United States Patent Application Publication US 2018/0305689 A1 - sequence listing, part 77

SEQ ID NO: 1104709 - RNA, 19 nt, Artificial Sequence
  Description of Artificial Sequence: Synthetic oligonucleotide
  Antisense strand to SEQ ID NO: 1104708
uuucuccaaccaguauacu

SEQ ID NO: 1104710 - RNA, 19 nt, Artificial Sequence
  Description of Artificial Sequence: Synthetic oligonucleotide
  Sense strand starting at position 2395 of SEQ ID NO: 915770
guauacugguuggagaaau

SEQ ID NO: 1104711 - RNA, 19 nt, Artificial Sequence
  Description of Artificial Sequence: Synthetic oligonucleotide
  Antisense strand to SEQ ID NO: 1104710
auuucuccaaccaguauac

SEQ ID NO: 1104712 - RNA, 19 nt, Artificial Sequence
  Description of Artificial Sequence: Synthetic oligonucleotide
  Sense strand starting at position 2403 of SEQ ID NO: 915770
guuggagaaauggguaaua

SEQ ID NO: 1104713 - RNA, 19 nt, Artificial Sequence
  Description of Artificial Sequence: Synthetic oligonucleotide
  Antisense strand to SEQ ID NO: 1104712
uauuacccauuucuccaac

SEQ ID NO: 1104714 - RNA, 19 nt, Artificial Sequence
  Description of Artificial Sequence: Synthetic oligonucleotide
  Sense strand starting at position 2414 of SEQ ID NO: 915770
ggguaauaguuacuuaucu

SEQ ID NO: 1104715 - RNA, 19 nt, Artificial Sequence
  Description of Artificial Sequence: Synthetic oligonucleotide
  Antisense strand to SEQ ID NO: 1104714
agauaaguaacuauuaccc

SEQ ID NO: 1104716 - RNA, 19 nt, Artificial Sequence
  Description of Artificial Sequence: Synthetic oligonucleotide
  Sense strand starting at position 2415 of SEQ ID NO: 915770
gguaauaguuacuuaucuu

SEQ ID NO: 1104717 - RNA, 19 nt, Artificial Sequence
  Description of Artificial Sequence: Synthetic oligonucleotide
  Antisense strand to SEQ ID NO: 1104716
aagauaaguaacuauuacc

SEQ ID NO: 1104718 - RNA, 19 nt, Artificial Sequence
  Description of Artificial Sequence: Synthetic oligonucleotide
  Sense strand starting at position 2483 of SEQ ID NO: 915770
cuugguauuguuuggguuu

SEQ ID NO: 1104719 - RNA, 19 nt, Artificial Sequence
  Description of Artificial Sequence: Synthetic oligonucleotide
  Antisense strand to SEQ ID NO: 1104718
aaacccaaacaauaccaag

SEQ ID NO: 1104720 - RNA, 19 nt, Artificial Sequence
  Description of Artificial Sequence: Synthetic oligonucleotide
  Sense strand starting at position 3059 of SEQ ID NO: 915770
aaaggcuggauucguguaa

SEQ ID NO: 1104721 - RNA, 19 nt, Artificial Sequence
  Description of Artificial Sequence: Synthetic oligonucleotide
  Antisense strand to SEQ ID NO: 1104720
uuacacgaauccagccuuu

SEQ ID NO: 1104722 - RNA, 19 nt, Artificial Sequence
  Description of Artificial Sequence: Synthetic oligonucleotide
  Sense strand starting at position 3063 of SEQ ID NO: 915770
gcuggauucguguaacaua

SEQ ID NO: 1104723 - RNA, 19 nt, Artificial Sequence
  Description of Artificial Sequence: Synthetic oligonucleotide
  Antisense strand to SEQ ID NO: 1104722
uauguuacacgaauccagc

SEQ ID NO: 1104724 - RNA, 19 nt, Artificial Sequence
  Description of Artificial Sequence: Synthetic oligonucleotide
  Sense strand starting at position 3071 of SEQ ID NO: 915770
cguguaacauacugaauuc

SEQ ID NO: 1104725 - RNA, 19 nt, Artificial Sequence
  Description of Artificial Sequence: Synthetic oligonucleotide
  Antisense strand to SEQ ID NO: 1104724
gaauucaguauguuacacg

SEQ ID NO: 1104726 - RNA, 19 nt, Artificial Sequence
  Description of Artificial Sequence: Synthetic oligonucleotide
  Sense strand starting at position 3081 of SEQ ID NO: 915770
acugaauucugcuuuacag

SEQ ID NO: 1104727 - RNA, 19 nt, Artificial Sequence
  Description of Artificial Sequence: Synthetic oligonucleotide
  Antisense strand to SEQ ID NO: 1104726
cuguaaagcagaauucagu

SEQ ID NO: 1104728 - RNA, 19 nt, Artificial Sequence
  Description of Artificial Sequence: Synthetic oligonucleotide
  Sense strand starting at position 3083 of SEQ ID NO: 915770
ugaauucugcuuuacagaa

SEQ ID NO: 1104729 - RNA, 19 nt, Artificial Sequence
  Description of Artificial Sequence: Synthetic oligonucleotide
  Antisense strand to SEQ ID NO: 1104728
uucuguaaagcagaauuca

SEQ ID NO: 1104730 - RNA, 19 nt, Artificial Sequence
  Description of Artificial Sequence: Synthetic oligonucleotide
  Sense strand starting at position 3110 of SEQ ID NO: 915770
cucuuagcugugugacuga

SEQ ID NO: 1104731 - RNA, 19 nt, Artificial Sequence
  Description of Artificial Sequence: Synthetic oligonucleotide
  Antisense strand to SEQ ID NO: 1104730
ucagucacacagcuaagag

SEQ ID NO: 1104732 - RNA, 19 nt, Artificial Sequence
  Description of Artificial Sequence: Synthetic oligonucleotide
  Sense strand starting at position 3113 of SEQ ID NO: 915770
uuagcugugugacugauua

SEQ ID NO: 1104733 - RNA, 19 nt, Artificial Sequence
  Description of Artificial Sequence: Synthetic oligonucleotide
  Antisense strand to SEQ ID NO: 1104732
uaaucagucacacagcuaa

SEQ ID NO: 1104734 - RNA, 19 nt, Artificial Sequence
  Description of Artificial Sequence: Synthetic oligonucleotide
  Sense strand starting at position 3115 of SEQ ID NO: 915770
agcugugugacugauuaua

SEQ ID NO: 1104735 - RNA, 19 nt, Artificial Sequence
  Description of Artificial Sequence: Synthetic oligonucleotide
  Antisense strand to SEQ ID NO: 1104734
uauaaucagucacacagcu

SEQ ID NO: 1104736 - RNA, 19 nt, Artificial Sequence
  Description of Artificial Sequence: Synthetic oligonucleotide
  Sense strand starting at position 3123 of SEQ ID NO: 915770
gacugauuauaggcaaguu

SEQ ID NO: 1104737 - RNA, 19 nt, Artificial Sequence
  Description of Artificial Sequence: Synthetic oligonucleotide
  Antisense strand to SEQ ID NO: 1104736
aacuugccuauaaucaguc

SEQ ID NO: 1104738 - RNA, 19 nt, Artificial Sequence
  Description of Artificial Sequence: Synthetic oligonucleotide
  Sense strand starting at position 3185 of SEQ ID NO: 915770
caguacuugucucacaguu

SEQ ID NO: 1104739 - RNA, 19 nt, Artificial Sequence
  Description of Artificial Sequence: Synthetic oligonucleotide
  Antisense strand to SEQ ID NO: 1104738
aacugugagacaaguacug

SEQ ID NO: 1104740 - RNA, 19 nt, Artificial Sequence
  Description of Artificial Sequence: Synthetic oligonucleotide
  Sense strand starting at position 3340 of SEQ ID NO: 915770
uuccaaguugguuaucaca

SEQ ID NO: 1104741 - RNA, 19 nt, Artificial Sequence
  Description of Artificial Sequence: Synthetic oligonucleotide
  Antisense strand to SEQ ID NO: 1104740
ugugauaaccaacuuggaa

SEQ ID NO: 1104742 - RNA, 19 nt, Artificial Sequence
  Description of Artificial Sequence: Synthetic oligonucleotide
  Sense strand starting at position 3342 of SEQ ID NO: 915770
ccaaguugguuaucacaac

SEQ ID NO: 1104743 - RNA, 19 nt, Artificial Sequence
  Description of Artificial Sequence: Synthetic oligonucleotide
  Antisense strand to SEQ ID NO: 1104742
guugugauaaccaacuugg

SEQ ID NO: 1104744 - RNA, 19 nt, Artificial Sequence
  Description of Artificial Sequence: Synthetic oligonucleotide
  Sense strand starting at position 3418 of SEQ ID NO: 915770
cagugucuccagggaguaa

SEQ ID NO: 1104745 - RNA, 19 nt, Artificial Sequence
  Description of Artificial Sequence: Synthetic oligonucleotide
  Antisense strand to SEQ ID NO: 1104744
uuacucccuggagacacug

SEQ ID NO: 1104746 - RNA, 19 nt, Artificial Sequence
  Description of Artificial Sequence: Synthetic oligonucleotide
  Sense strand starting at position 3485 of SEQ ID NO: 915770
gaaagcguauaaucgcuua

SEQ ID NO: 1104747 - RNA, 19 nt, Artificial Sequence
  Description of Artificial Sequence: Synthetic oligonucleotide
  Antisense strand to SEQ ID NO: 1104746
uaagcgauuauacgcuuuc

SEQ ID NO: 1104748 - RNA, 19 nt, Artificial Sequence
  Description of Artificial Sequence: Synthetic oligonucleotide
  Sense strand starting at position 3488 of SEQ ID NO: 915770
agcguauaaucgcuuagca

SEQ ID NO: 1104749 - RNA, 19 nt, Artificial Sequence
  Description of Artificial Sequence: Synthetic oligonucleotide
  Antisense strand to SEQ ID NO: 1104748
ugcuaagcgauuauacgcu

SEQ ID NO: 1104750 - RNA, 19 nt, Artificial Sequence
  Description of Artificial Sequence: Synthetic oligonucleotide
  Sense strand starting at position 3489 of SEQ ID NO: 915770
gcguauaaucgcuuagcac

SEQ ID NO: 1104751 - RNA, 19 nt, Artificial Sequence
  Description of Artificial Sequence: Synthetic oligonucleotide
  Antisense strand to SEQ ID NO: 1104750
gugcuaagcgauuauacgc

SEQ ID NO: 1104752 - RNA, 19 nt, Artificial Sequence
  Description of Artificial Sequence: Synthetic oligonucleotide
  Sense strand starting at position 3490 of SEQ ID NO: 915770
cguauaaucgcuuagcaca

SEQ ID NO: 1104753 - RNA, 19 nt, Artificial Sequence
  Description of Artificial Sequence: Synthetic oligonucleotide
  Antisense strand to SEQ ID NO: 1104752
ugugcuaagcgauuauacg

SEQ ID NO: 1104754 - RNA, 19 nt, Artificial Sequence
  Description of Artificial Sequence: Synthetic oligonucleotide
  Sense strand starting at position 3574 of SEQ ID NO: 915770
gcaguacucuccucugagu

SEQ ID NO: 1104755 - RNA, 19 nt, Artificial Sequence
  Description of Artificial Sequence: Synthetic oligonucleotide
  Antisense strand to SEQ ID NO: 1104754
acucagaggagaguacugc

SEQ ID NO: 1104756 - RNA, 19 nt, Artificial Sequence
  Description of Artificial Sequence: Synthetic oligonucleotide
  Sense strand starting at position 3627 of SEQ ID NO: 915770
gcccuugugccagggagaa

SEQ ID NO: 1104757 - RNA, 19 nt, Artificial Sequence
  Description of Artificial Sequence: Synthetic oligonucleotide
  Antisense strand to SEQ ID NO: 1104756
uucucccuggcacaagggc

SEQ ID NO: 1104758 - RNA, 19 nt, Artificial Sequence
  Description of Artificial Sequence: Synthetic oligonucleotide
  Sense strand starting at position 3651 of SEQ ID NO: 915770
gaggaugggcuuuggacua

SEQ ID NO: 1104759 - RNA, 19 nt, Artificial Sequence
  Description of Artificial Sequence: Synthetic oligonucleotide
  Antisense strand to SEQ ID NO: 1104758
uaguccaaagcccauccuc

SEQ ID NO: 1104760 - RNA, 19 nt, Artificial Sequence
  Description of Artificial Sequence: Synthetic oligonucleotide
  Sense strand starting at position 3774 of SEQ ID NO: 915770
guuaguacuuccucagccu

SEQ ID NO: 1104761 - RNA, 19 nt, Artificial Sequence
  Description of Artificial Sequence: Synthetic oligonucleotide
  Antisense strand to SEQ ID NO: 1104760
aggcugaggaaguacuaac

SEQ ID NO: 1104762 - RNA, 19 nt, Artificial Sequence
  Description of Artificial Sequence: Synthetic oligonucleotide
  Sense strand starting at position 3866 of SEQ ID NO: 915770
gucccaucugccgucuauu

SEQ ID NO: 1104763 - RNA, 19 nt, Artificial Sequence
  Description of Artificial Sequence: Synthetic oligonucleotide
  Antisense strand to SEQ ID NO: 1104762
aauagacggcagaugggac

SEQ ID NO: 1104764 - RNA, 19 nt, Artificial Sequence
  Description of Artificial Sequence: Synthetic oligonucleotide
  Sense strand starting at position 3875 of SEQ ID NO: 915770
gccgucuauugugguggaa

SEQ ID NO: 1104765 - RNA, 19 nt, Artificial Sequence
  Description of Artificial Sequence: Synthetic oligonucleotide
  Antisense strand to SEQ ID NO: 1104764
uuccaccacaauagacggc

SEQ ID NO: 1104766 - RNA, 19 nt, Artificial Sequence
  Description of Artificial Sequence: Synthetic oligonucleotide
  Sense strand starting at position 3877 of SEQ ID NO: 915770
cgucuauugugguggaauc

SEQ ID NO: 1104767 - RNA, 19 nt, Artificial Sequence
  Description of Artificial Sequence: Synthetic oligonucleotide
  Antisense strand to SEQ ID NO: 1104766
gauuccaccacaauagacg

SEQ ID NO: 1104768 - RNA, 19 nt, Artificial Sequence
  Description of Artificial Sequence: Synthetic oligonucleotide
  Sense strand starting at position 3888 of SEQ ID NO: 915770
guggaauccagugagguga

SEQ ID NO: 1104769 - RNA, 19 nt, Artificial Sequence
  Description of Artificial Sequence: Synthetic oligonucleotide
  Antisense strand to SEQ ID NO: 1104768
ucaccucacuggauuccac

SEQ ID NO: 1104770 - RNA, 19 nt, Artificial Sequence
  Description of Artificial Sequence: Synthetic oligonucleotide
  Sense strand starting at position 3890 of SEQ ID NO: 915770
ggaauccagugaggugaau

SEQ ID NO: 1104771 - RNA, 19 nt, Artificial Sequence
  Description of Artificial Sequence: Synthetic oligonucleotide
  Antisense strand to SEQ ID NO: 1104770
auucaccucacuggauucc

SEQ ID NO: 1104772 - RNA, 19 nt, Artificial Sequence
  Description of Artificial Sequence: Synthetic oligonucleotide
  Sense strand starting at position 3953 of SEQ ID NO: 915770
gcucacugauggugaggaa

SEQ ID NO: 1104773 - RNA, 19 nt, Artificial Sequence
  Description of Artificial Sequence: Synthetic oligonucleotide
  Antisense strand to SEQ ID NO: 1104772
uuccucaccaucagugagc

SEQ ID NO: 1104774 - RNA, 19 nt, Artificial Sequence
  Description of Artificial Sequence: Synthetic oligonucleotide
  Sense strand starting at position 79 of SEQ ID NO: 915771
gacuguugcgaugaggaag

SEQ ID NO: 1104775 - RNA, 19 nt, Artificial Sequence
  Description of Artificial Sequence: Synthetic oligonucleotide
  Antisense strand to SEQ ID NO: 1104774
cuuccucaucgcaacaguc

SEQ ID NO: 1104776 - RNA, 19 nt, Artificial Sequence
  Description of Artificial Sequence: Synthetic oligonucleotide
  Sense strand starting at position 342 of SEQ ID NO: 915771
caaacuggguugccugaaa

SEQ ID NO: 1104777 - RNA, 19 nt, Artificial Sequence
  Description of Artificial Sequence: Synthetic oligonucleotide
  Antisense strand to SEQ ID NO: 1104776
uuucaggcaacccaguuug

SEQ ID NO: 1104778 - RNA, 19 nt, Artificial Sequence
  Description of Artificial Sequence: Synthetic oligonucleotide
  Sense strand starting at position 376 of SEQ ID NO: 915771
uguccuuaguggcugaaau

SEQ ID NO: 1104779 - RNA, 19 nt, Artificial Sequence
  Description of Artificial Sequence: Synthetic oligonucleotide
  Antisense strand to SEQ ID NO: 1104778
auuucagccacuaaggaca

SEQ ID NO: 1104780 - RNA, 19 nt, Artificial Sequence
  Description of Artificial Sequence: Synthetic oligonucleotide
  Sense strand starting at position 421 of SEQ ID NO: 915771
ggauguaacagugaaugcu

SEQ ID NO: 1104781 - RNA, 19 nt, Artificial Sequence
  Description of Artificial Sequence: Synthetic oligonucleotide
  Antisense strand to SEQ ID NO: 1104780
agcauucacuguuacaucc

SEQ ID NO: 1104782 - RNA, 19 nt, Artificial Sequence
  Description of Artificial Sequence: Synthetic oligonucleotide
  Sense strand starting at position 560 of SEQ ID NO: 915771
guuugagcugucccuuugu

SEQ ID NO: 1104783 - RNA, 19 nt, Artificial Sequence
  Description of Artificial Sequence: Synthetic oligonucleotide
  Antisense strand to SEQ ID NO: 1104782
acaaagggacagcucaaac

SEQ ID NO: 1104784 - RNA, 19 nt, Artificial Sequence
  Description of Artificial Sequence: Synthetic oligonucleotide
  Sense strand starting at position 608 of SEQ ID NO: 915771
agcacucagacauggguaa

SEQ ID NO: 1104785 - RNA, 19 nt, Artificial Sequence
  Description of Artificial Sequence: Synthetic oligonucleotide
  Antisense strand to SEQ ID NO: 1104784
uuacccaugucugagugcu

SEQ ID NO: 1104786 - RNA, 19 nt, Artificial Sequence
  Description of Artificial Sequence: Synthetic oligonucleotide
  Sense strand starting at position 609 of SEQ ID NO: 915771
gcacucagacauggguaau

SEQ ID NO: 1104787 - RNA, 19 nt, Artificial Sequence
  Description of Artificial Sequence: Synthetic oligonucleotide
  Antisense strand to SEQ ID NO: 1104786
auuacccaugucugagugc

SEQ ID NO: 1104788 - RNA, 19 nt, Artificial Sequence
  Description of Artificial Sequence: Synthetic oligonucleotide
  Sense strand starting at position 793 of SEQ ID NO: 915771
ggccucuuuaugggaagga

SEQ ID NO: 1104789 - RNA, 19 nt, Artificial Sequence
  Description of Artificial Sequence: Synthetic oligonucleotide
  Antisense strand to SEQ ID NO: 1104788
uccuucccauaaagaggcc

SEQ ID NO: 1104790 - RNA, 19 nt, Artificial Sequence
  Description of Artificial Sequence: Synthetic oligonucleotide
  Sense strand starting at position 864 of SEQ ID NO: 915771
agagguuuggcuuggucua

SEQ ID NO: 1104791 - RNA, 19 nt, Artificial Sequence
  Description of Artificial Sequence: Synthetic oligonucleotide
  Antisense strand to SEQ ID NO: 1104790
uagaccaagccaaaccucu

SEQ ID NO: 1104792 - RNA, 19 nt, Artificial Sequence
  Description of Artificial Sequence: Synthetic oligonucleotide
  Sense strand starting at position 865 of SEQ ID NO: 915771
gagguuuggcuuggucuaa

SEQ ID NO: 1104793 - RNA, 19 nt, Artificial Sequence
  Description of Artificial Sequence: Synthetic oligonucleotide
  Antisense strand to SEQ ID NO: 1104792
uuagaccaagccaaaccuc

SEQ ID NO: 1104794 - RNA, 19 nt, Artificial Sequence
  Description of Artificial Sequence: Synthetic oligonucleotide
  Sense strand starting at position 866 of SEQ ID NO: 915771
agguuuggcuuggucuaaa

SEQ ID NO: 1104795 - RNA, 19 nt, Artificial Sequence
  Description of Artificial Sequence: Synthetic oligonucleotide
  Antisense strand to SEQ ID NO: 1104794
uuuagaccaagccaaaccu

SEQ ID NO: 1104796 - RNA, 19 nt, Artificial Sequence
  Description of Artificial Sequence: Synthetic oligonucleotide
  Sense strand starting at position 919 of SEQ ID NO: 915771
gucacacaguuaucaauag

SEQ ID NO: 1104797 - RNA, 19 nt, Artificial Sequence
  Description of Artificial Sequence: Synthetic oligonucleotide
  Antisense strand to SEQ ID NO: 1104796
cuauugauaacugugugac

SEQ ID NO: 1104798 - RNA, 19 nt, Artificial Sequence
  Description of Artificial Sequence: Synthetic oligonucleotide
  Sense strand starting at position 1059 of SEQ ID NO: 915771
uaggcuggaucucuuugau

SEQ ID NO: 1104799 - RNA, 19 nt, Artificial Sequence
  Description of Artificial Sequence: Synthetic oligonucleotide
  Antisense strand to SEQ ID NO: 1104798
aucaaagagauccagccua

SEQ ID NO: 1104800 - RNA, 19 nt, Artificial Sequence
  Description of Artificial Sequence: Synthetic oligonucleotide
  Sense strand starting at position 1103 of SEQ ID NO: 915771
gcagauucugcacagcuuu

SEQ ID NO: 1104801 - RNA, 19 nt, Artificial Sequence
  Description of Artificial Sequence: Synthetic oligonucleotide
  Antisense strand to SEQ ID NO: 1104800
aaagcugugcagaaucugc

SEQ ID NO: 1104802 - RNA, 19 nt, Artificial Sequence
  Description of Artificial Sequence: Synthetic oligonucleotide
  Sense strand starting at position 1118 of SEQ ID NO: 915771
cuuugugaaucauucucga

SEQ ID NO: 1104803 - RNA, 19 nt, Artificial Sequence
  Description of Artificial Sequence: Synthetic oligonucleotide
  Antisense strand to SEQ ID NO: 1104802
ucgagaaugauucacaaag

SEQ ID NO: 1104804 - RNA, 19 nt, Artificial Sequence
  Description of Artificial Sequence: Synthetic oligonucleotide
  Sense strand starting at position 1121 of SEQ ID NO: 915771
ugugaaucauucucgaaau

SEQ ID NO: 1104805 - RNA, 19 nt, Artificial Sequence
  Description of Artificial Sequence: Synthetic oligonucleotide
  Antisense strand to SEQ ID NO: 1104804
auuucgagaaugauucaca

SEQ ID NO: 1104806 - RNA, 19 nt, Artificial Sequence
  Description of Artificial Sequence: Synthetic oligonucleotide
  Sense strand starting at position 1231 of SEQ ID NO: 915771
ccggcucugccugaaggau

SEQ ID NO: 1104807 - RNA, 19 nt, Artificial Sequence
  Description of Artificial Sequence: Synthetic oligonucleotide
  Antisense strand to SEQ ID NO: 1104806
auccuucaggcagagccgg

SEQ ID NO: 1104808 - RNA, 19 nt, Artificial Sequence
  Description of Artificial Sequence: Synthetic oligonucleotide
  Sense strand starting at position 1629 of SEQ ID NO: 915771
agaagaucgacucguuuag

SEQ ID NO: 1104809 - RNA, 19 nt, Artificial Sequence
  Description of Artificial Sequence: Synthetic oligonucleotide
  Antisense strand to SEQ ID NO: 1104808
cuaaacgagucgaucuucu

SEQ ID NO: 1104810 - RNA, 19 nt, Artificial Sequence
  Description of Artificial Sequence: Synthetic oligonucleotide
  Sense strand starting at position 1853 of SEQ ID NO: 915771
gaccuuaugccggaauucu

SEQ ID NO: 1104811 - RNA, 19 nt, Artificial Sequence
  Description of Artificial Sequence: Synthetic oligonucleotide
  Antisense strand to SEQ ID NO: 1104810
agaauuccggcauaagguc

SEQ ID NO: 1104812 - RNA, 19 nt, Artificial Sequence
  Description of Artificial Sequence: Synthetic oligonucleotide
  Sense strand starting at position 2155 of SEQ ID NO: 915771
gggcuucaagcugguauuu

SEQ ID NO: 1104813 - RNA, 19 nt, Artificial Sequence
  Description of Artificial Sequence: Synthetic oligonucleotide
  Antisense strand to SEQ ID NO: 1104812
aaauaccagcuugaagccc

SEQ ID NO: 1104814 - RNA, 19 nt, Artificial Sequence
  Description of Artificial Sequence: Synthetic oligonucleotide
  Sense strand starting at position 2178 of SEQ ID NO: 915771
ggaagugguaccugaacac

SEQ ID NO: 1104815 - RNA, 19 nt, Artificial Sequence
  Description of Artificial Sequence: Synthetic oligonucleotide
  Antisense strand to SEQ ID NO: 1104814
guguucagguaccacuucc

SEQ ID NO: 1104816 - RNA, 19 nt, Artificial Sequence
  Description of Artificial Sequence: Synthetic oligonucleotide
  Sense strand starting at position 2192 of SEQ ID NO: 915771
aacacaugcguuugaggaa

SEQ ID NO: 1104817 - RNA, 19 nt, Artificial Sequence
  Description of Artificial Sequence: Synthetic oligonucleotide
  Antisense strand to SEQ ID NO: 1104816
uuccucaaacgcauguguu

SEQ ID NO: 1104818 - RNA, 19 nt, Artificial Sequence
  Description of Artificial Sequence: Synthetic oligonucleotide
  Sense strand starting at position 2755 of SEQ ID NO: 915771
aucaauccuuguucuguga

SEQ ID NO: 1104819 - RNA, 19 nt, Artificial Sequence
  Description of Artificial Sequence: Synthetic oligonucleotide
  Antisense strand to SEQ ID NO: 1104818
ucacagaacaaggauugau

SEQ ID NO: 1104820 - RNA, 19 nt, Artificial Sequence
  Description of Artificial Sequence: Synthetic oligonucleotide
  Sense strand starting at position 2759 of SEQ ID NO: 915771
auccuuguucugugaauuc

SEQ ID NO: 1104821 - RNA, 19 nt, Artificial Sequence
  Description of Artificial Sequence: Synthetic oligonucleotide
  Antisense strand to SEQ ID NO: 1104820
gaauucacagaacaaggau

SEQ ID NO: 1104822 - RNA, 19 nt, Artificial Sequence
  Description of Artificial Sequence: Synthetic oligonucleotide
  Sense strand starting at position 3065 of SEQ ID NO: 915771
gugcaaagacaaugaugaa

SEQ ID NO: 1104823 - RNA, 19 nt, Artificial Sequence
  Description of Artificial Sequence: Synthetic oligonucleotide
  Antisense strand to SEQ ID NO: 1104822
uucaucauugucuuugcac

SEQ ID NO: 1104824 - RNA, 19 nt, Artificial Sequence
  Description of Artificial Sequence: Synthetic oligonucleotide
  Sense strand starting at position 3189 of SEQ ID NO: 915771
guguaaaucagaggcuaag

SEQ ID NO: 1104825 - RNA, 19 nt, Artificial Sequence
  Description of Artificial Sequence: Synthetic oligonucleotide
  Antisense strand to SEQ ID NO: 1104824
cuuagccucugauuuacac

SEQ ID NO: 1104826 - RNA, 19 nt, Artificial Sequence
  Description of Artificial Sequence: Synthetic oligonucleotide
  Sense strand starting at position 3212 of SEQ ID NO: 915771
gggcuugugccugaacuua

SEQ ID NO: 1104827 - RNA, 19 nt, Artificial Sequence
  Description of Artificial Sequence: Synthetic oligonucleotide
  Antisense strand to SEQ ID NO: 1104826
uaaguucaggcacaagccc

SEQ ID NO: 1104828 - RNA, 19 nt, Artificial Sequence
  Description of Artificial Sequence: Synthetic oligonucleotide
  Sense strand starting at position 3249 of SEQ ID NO: 915771
gcccuuugugcccugucaa

SEQ ID NO: 1104829 - RNA, 19 nt, Artificial Sequence
  Description of Artificial Sequence: Synthetic oligonucleotide
  Antisense strand to SEQ ID NO: 1104828
uugacagggcacaaagggc

SEQ ID NO: 1104830 - RNA, 19 nt, Artificial Sequence
  Description of Artificial Sequence: Synthetic oligonucleotide
  Sense strand starting at position 3471 of SEQ ID NO: 915771
acuauuaagucagcgauaa

SEQ ID NO: 1104831 - RNA, 19 nt, Artificial Sequence
  Description of Artificial Sequence: Synthetic oligonucleotide
  Antisense strand to SEQ ID NO: 1104830
uuaucgcugacuuaauagu

SEQ ID NO: 1104832 - RNA, 19 nt, Artificial Sequence
  Description of Artificial Sequence: Synthetic oligonucleotide
  Sense strand starting at position 3472 of SEQ ID NO: 915771
cuauuaagucagcgauaaa

SEQ ID NO: 1104833 - RNA, 19 nt, Artificial Sequence
  Description of Artificial Sequence: Synthetic oligonucleotide
  Antisense strand to SEQ ID NO: 1104832
uuuaucgcugacuuaauag

SEQ ID NO: 1104834 - RNA, 19 nt, Artificial Sequence
  Description of Artificial Sequence: Synthetic oligonucleotide
  Sense strand starting at position 3587 of SEQ ID NO: 915771
aaugucauauggcuguuua

SEQ ID NO: 1104835 - RNA, 19 nt, Artificial Sequence
  Description of Artificial Sequence: Synthetic oligonucleotide
  Antisense strand to SEQ ID NO: 1104834
uaaacagccauaugacauu

SEQ ID NO: 1104836 - RNA, 19 nt, Artificial Sequence
  Description of Artificial Sequence: Synthetic oligonucleotide
  Sense strand starting at position 3624 of SEQ ID NO: 915771
ggcagaggugaaugaaugu

SEQ ID NO: 1104837 - RNA, 19 nt, Artificial Sequence
  Description of Artificial Sequence: Synthetic oligonucleotide
  Antisense strand to SEQ ID NO: 1104836
acauucauucaccucugcc

SEQ ID NO: 1104838 - RNA, 19 nt, Artificial Sequence
  Description of Artificial Sequence: Synthetic oligonucleotide
  Sense strand starting at position 3631 of SEQ ID NO: 915771
gugaaugaauguccuuauc

SEQ ID NO: 1104839 - RNA, 19 nt, Artificial Sequence
  Description of Artificial Sequence: Synthetic oligonucleotide
  Antisense strand to SEQ ID NO: 1104838
gauaaggacauucauucac

SEQ ID NO: 1104840 - RNA, 19 nt, Artificial Sequence
  Description of Artificial Sequence: Synthetic oligonucleotide
  Sense strand starting at position 3794 of SEQ ID NO: 915771
ucaagcuuccuuggagaca

SEQ ID NO: 1104841 - RNA, 19 nt, Artificial Sequence
  Description of Artificial Sequence: Synthetic oligonucleotide
  Antisense strand to SEQ ID NO: 1104840
ugucuccaaggaagcuuga

SEQ ID NO: 1104842 - RNA, 19 nt, Artificial Sequence
  Description of Artificial Sequence: Synthetic oligonucleotide
  Sense strand starting at position 3899 of SEQ ID NO: 915771
cuuccuccugugugaagau

SEQ ID NO: 1104843 - RNA, 19 nt, Artificial Sequence
  Description of Artificial Sequence: Synthetic oligonucleotide
  Antisense strand to SEQ ID NO: 1104842
aucuucacacaggaggaag

SEQ ID NO: 1104844 - RNA, 19 nt, Artificial Sequence
  Description of Artificial Sequence: Synthetic oligonucleotide
  Sense strand starting at position 3918 of SEQ ID NO: 915771
agcuguguuugcuuuauuu

SEQ ID NO: 1104845 - RNA, 19 nt, Artificial Sequence
  Description of Artificial Sequence: Synthetic oligonucleotide
  Antisense strand to SEQ ID NO: 1104844
aaauaaagcaaacacagcu

SEQ ID NO: 1104846 - RNA, 19 nt, Artificial Sequence
  Description of Artificial Sequence: Synthetic oligonucleotide
  Sense strand starting at position 3920 of SEQ ID NO: 915771
cuguguuugcuuuauuuac

SEQ ID NO: 1104847 - RNA, 19 nt, Artificial Sequence
  Description of Artificial Sequence: Synthetic oligonucleotide
  Antisense strand to SEQ ID NO: 1104846
guaaauaaagcaaacacag

SEQ ID NO: 1104848 - RNA, 19 nt, Artificial Sequence
  Description of Artificial Sequence: Synthetic oligonucleotide
  Sense strand starting at position 3922 of SEQ ID NO: 915771
guguuugcuuuauuuacca

SEQ ID NO: 1104849 - RNA, 19 nt, Artificial Sequence
  Description of Artificial Sequence: Synthetic oligonucleotide
  Antisense strand to SEQ ID NO: 1104848
ugguaaauaaagcaaacac

SEQ ID NO: 1104850 - RNA, 19 nt, Artificial Sequence
  Description of Artificial Sequence: Synthetic oligonucleotide
  Sense strand starting at position 3940 of SEQ ID NO: 915771
acuauaugccuagaacagu

SEQ ID NO: 1104851 - RNA, 19 nt, Artificial Sequence
  Description of Artificial Sequence: Synthetic oligonucleotide
  Antisense strand to SEQ ID NO: 1104850
acuguucuaggcauauagu

SEQ ID NO: 1104852 - RNA, 19 nt, Artificial Sequence
  Description of Artificial Sequence: Synthetic oligonucleotide
  Sense strand starting at position 3980 of SEQ ID NO: 915771
aaacaaauuuguugaguga

SEQ ID NO: 1104853 - RNA, 19 nt, Artificial Sequence
  Description of Artificial Sequence: Synthetic oligonucleotide
  Antisense strand to SEQ ID NO: 1104852
ucacucaacaaauuuguuu

SEQ ID NO: 1104854 - RNA, 19 nt, Artificial Sequence
  Description of Artificial Sequence: Synthetic oligonucleotide
  Sense strand starting at position 135 of SEQ ID NO: 915772
aggugaaccuuccuaggga

SEQ ID NO: 1104855 - RNA, 19 nt, Artificial Sequence
  Description of Artificial Sequence: Synthetic oligonucleotide
  Antisense strand to SEQ ID NO: 1104854
ucccuaggaagguucaccu

SEQ ID NO: 1104856 - RNA, 19 nt, Artificial Sequence
  Description of Artificial Sequence: Synthetic oligonucleotide
  Sense strand starting at position 139 of SEQ ID NO: 915772
gaaccuuccuagggagaaa

SEQ ID NO: 1104857 - RNA, 19 nt, Artificial Sequence
  Description of Artificial Sequence: Synthetic oligonucleotide
  Antisense strand to SEQ ID NO: 1104856
uuucucccuaggaagguuc

SEQ ID NO: 1104858 - RNA, 19 nt, Artificial Sequence
  Description of Artificial Sequence: Synthetic oligonucleotide
  Sense strand starting at position 489 of SEQ ID NO: 915772
ccggaagugugccuuucua

SEQ ID NO: 1104859 - RNA, 19 nt, Artificial Sequence
  Description of Artificial Sequence: Synthetic oligonucleotide
  Antisense strand to SEQ ID NO: 1104858
uagaaaggcacacuuccgg

SEQ ID NO: 1104860 - RNA, 19 nt, Artificial Sequence
  Description of Artificial Sequence: Synthetic oligonucleotide
  Sense strand starting at position 500 of SEQ ID NO: 915772
ccuuucuaaugccagagaa

SEQ ID NO: 1104861 - RNA, 19 nt, Artificial Sequence
  Description of Artificial Sequence: Synthetic oligonucleotide
  Antisense strand to SEQ ID NO: 1104860
uucucuggcauuagaaagg

SEQ ID NO: 1104862 - RNA, 19 nt, Artificial Sequence
  Description of Artificial Sequence: Synthetic oligonucleotide
  Sense strand starting at position 513 of SEQ ID NO: 915772
agagaacagucccuugguu

SEQ ID NO: 1104863 - RNA, 19 nt, Artificial Sequence
  Description of Artificial Sequence: Synthetic oligonucleotide
  Antisense strand to SEQ ID NO: 1104862
aaccaagggacuguucucu

SEQ ID NO: 1104864 - RNA, 19 nt, Artificial Sequence
  Description of Artificial Sequence: Synthetic oligonucleotide
  Sense strand starting at position 739 of SEQ ID NO: 915772
ucaggauuccagggccaca

SEQ ID NO: 1104865 - RNA, 19 nt, Artificial Sequence
  Description of Artificial Sequence: Synthetic oligonucleotide
  Antisense strand to SEQ ID NO: 1104864
uguggcccuggaauccuga

SEQ ID NO: 1104866 - RNA, 19 nt, Artificial Sequence
  Description of Artificial Sequence: Synthetic oligonucleotide
  Sense strand starting at position 919 of SEQ ID NO: 915772
cagcccagguccuaaugau

SEQ ID NO: 1104867 - RNA, 19 nt, Artificial Sequence
  Description of Artificial Sequence: Synthetic oligonucleotide
  Antisense strand to SEQ ID NO: 1104866
aucauuaggaccugggcug

SEQ ID NO: 1104868 - RNA, 19 nt, Artificial Sequence
  Description of Artificial Sequence: Synthetic oligonucleotide
  Sense strand starting at position 976 of SEQ ID NO: 915772
acuccagucugacaugcau

SEQ ID NO: 1104869 - RNA, 19 nt, Artificial Sequence
  Description of Artificial Sequence: Synthetic oligonucleotide
  Antisense strand to SEQ ID NO: 1104868
augcaugucagacuggagu

SEQ ID NO: 1104870 - RNA, 19 nt, Artificial Sequence
  Description of Artificial Sequence: Synthetic oligonucleotide
  Sense strand starting at position 1215 of SEQ ID NO: 915772
ucccuugacuguugagaag

SEQ ID NO: 1104871 - RNA, 19 nt, Artificial Sequence
  Description of Artificial Sequence: Synthetic oligonucleotide
  Antisense strand to SEQ ID NO: 1104870
cuucucaacagucaaggga

SEQ ID NO: 1104872 - RNA, 19 nt, Artificial Sequence
  Description of Artificial Sequence: Synthetic oligonucleotide
  Sense strand starting at position 1266 of SEQ ID NO: 915772
ugguuugggacuggugaga

SEQ ID NO: 1104873 - RNA, 19 nt, Artificial Sequence
  Description of Artificial Sequence: Synthetic oligonucleotide
  Antisense strand to SEQ ID NO: 1104872
ucucaccagucccaaacca

SEQ ID NO: 1104874 - RNA, 19 nt, Artificial Sequence
  Description of Artificial Sequence: Synthetic oligonucleotide
  Sense strand starting at position 1296 of SEQ ID NO: 915772
gccucuuucugguuuggga

SEQ ID NO: 1104875 - RNA, 19 nt, Artificial Sequence
  Description of Artificial Sequence: Synthetic oligonucleotide
  Antisense strand to SEQ ID NO: 1104874
ucccaaaccagaaagaggc

SEQ ID NO: 1104876 - RNA, 19 nt, Artificial Sequence
  Description of Artificial Sequence: Synthetic oligonucleotide
  Sense strand starting at position 1298 of SEQ ID NO: 915772
cucuuucugguuugggauu

SEQ ID NO: 1104877 - RNA, 19 nt, Artificial Sequence
  Description of Artificial Sequence: Synthetic oligonucleotide
  Antisense strand to SEQ ID NO: 1104876
aaucccaaaccagaaagag

SEQ ID NO: 1104878 - RNA, 19 nt, Artificial Sequence
  Description of Artificial Sequence: Synthetic oligonucleotide
  Sense strand starting at position 1305 of SEQ ID NO: 915772
ugguuugggauugguggaa

SEQ ID NO: 1104879 - RNA, 19 nt, Artificial Sequence
  Description of Artificial Sequence: Synthetic oligonucleotide
  Antisense strand to SEQ ID NO: 1104878
uuccaccaaucccaaacca

SEQ ID NO: 1104880 - RNA, 19 nt, Artificial Sequence
  Description of Artificial Sequence: Synthetic oligonucleotide
  Sense strand starting at position 1306 of SEQ ID NO: 915772
gguuugggauugguggaaa

SEQ ID NO: 1104881 - RNA, 19 nt, Artificial Sequence
  Description of Artificial Sequence: Synthetic oligonucleotide
  Antisense strand to SEQ ID NO: 1104880
uuuccaccaaucccaaacc

SEQ ID NO: 1104882 - RNA, 19 nt, Artificial Sequence
  Description of Artificial Sequence: Synthetic oligonucleotide
  Sense strand starting at position 1455 of SEQ ID NO: 915772
gccacauaccaccgauaua

SEQ ID NO: 1104883 - RNA, 19 nt, Artificial Sequence
  Description of Artificial Sequence: Synthetic oligonucleotide
  Antisense strand to SEQ ID NO: 1104882
uauaucggugguauguggc

SEQ ID NO: 1104884 - RNA, 19 nt, Artificial Sequence
  Description of Artificial Sequence: Synthetic oligonucleotide
  Sense strand starting at position 1620 of SEQ ID NO: 915772
ccggcucucucccuauauu

SEQ ID NO: 1104885 - RNA, 19 nt, Artificial Sequence
  Description of Artificial Sequence: Synthetic oligonucleotide
  Antisense strand to SEQ ID NO: 1104884
aauauagggagagagccgg

SEQ ID NO: 1104886 - RNA, 19 nt, Artificial Sequence
  Description of Artificial Sequence: Synthetic oligonucleotide
  Sense strand starting at position 1621 of SEQ ID NO: 915772
cggcucucucccuauauuu

SEQ ID NO: 1104887 - RNA, 19 nt, Artificial Sequence
  Description of Artificial Sequence: Synthetic oligonucleotide
  Antisense strand to SEQ ID NO: 1104886
aaauauagggagagagccg

SEQ ID NO: 1104888 - RNA, 19 nt, Artificial Sequence
  Description of Artificial Sequence: Synthetic oligonucleotide
  Sense strand starting at position 1644 of SEQ ID NO: 915772
uguccacucugcccagaau

SEQ ID NO: 1104889 - RNA, 19 nt, Artificial Sequence
  Description of Artificial Sequence: Synthetic oligonucleotide
  Antisense strand to SEQ ID NO: 1104888
auucugggcagaguggaca

SEQ ID NO: 1104890 - RNA, 19 nt, Artificial Sequence
  Description of Artificial Sequence: Synthetic oligonucleotide
  Sense strand starting at position 1747 of SEQ ID NO: 915772
cugccucuucuuggaguau

SEQ ID NO: 1104891 - RNA, 19 nt, Artificial Sequence
  Description of Artificial Sequence: Synthetic oligonucleotide
  Antisense strand to SEQ ID NO: 1104890
auacuccaagaagaggcag

SEQ ID NO: 1104892 - RNA, 19 nt, Artificial Sequence
  Description of Artificial Sequence: Synthetic oligonucleotide
  Sense strand starting at position 2175 of SEQ ID NO: 915772
gcuggaagguauugggaaa

SEQ ID NO: 1104893 - RNA, 19 nt, Artificial Sequence
  Description of Artificial Sequence: Synthetic oligonucleotide
  Antisense strand to SEQ ID NO: 1104892
uuucccaauaccuuccagc

SEQ ID NO: 1104894 - RNA, 19 nt, Artificial Sequence
  Description of Artificial Sequence: Synthetic oligonucleotide
  Sense strand starting at position 2207 of SEQ ID NO: 915772
gggagaaggcucggaacuu

SEQ ID NO: 1104895 - RNA, 19 nt, Artificial Sequence
  Description of Artificial Sequence: Synthetic oligonucleotide
  Antisense strand to SEQ ID NO: 1104894
aaguuccgagccuucuccc

SEQ ID NO: 1104896 - RNA, 19 nt, Artificial Sequence
  Description of Artificial Sequence: Synthetic oligonucleotide
  Sense strand starting at position 2376 of SEQ ID NO: 915772
accagugauuagugaugaa

SEQ ID NO: 1104897 - RNA, 19 nt, Artificial Sequence
  Description of Artificial Sequence: Synthetic oligonucleotide
  Antisense strand to SEQ ID NO: 1104896
uucaucacuaaucacuggu

SEQ ID NO: 1104898 - RNA, 19 nt, Artificial Sequence
  Description of Artificial Sequence: Synthetic oligonucleotide
  Sense strand starting at position 2432 of SEQ ID NO: 915772
agaauucucuuuggucuuu

SEQ ID NO: 1104899 - RNA, 19 nt, Artificial Sequence
  Description of Artificial Sequence: Synthetic oligonucleotide
  Antisense strand to SEQ ID NO: 1104898
aaagaccaaagagaauucu

SEQ ID NO: 1104900 - RNA, 19 nt, Artificial Sequence
  Description of Artificial Sequence: Synthetic oligonucleotide
  Sense strand starting at position 2763 of SEQ ID NO: 915772
cauucuuaucaggagcagu

SEQ ID NO: 1104901 - RNA, 19 nt, Artificial Sequence
  Description of Artificial Sequence: Synthetic oligonucleotide
  Antisense strand to SEQ ID NO: 1104900
acugcuccugauaagaaug

SEQ ID NO: 1104902 - RNA, 19 nt, Artificial Sequence
  Description of Artificial Sequence: Synthetic oligonucleotide
  Sense strand starting at position 2877 of SEQ ID NO: 915772
gagugucgucgcucuuguu

SEQ ID NO: 1104903 - RNA, 19 nt, Artificial Sequence
  Description of Artificial Sequence: Synthetic oligonucleotide
  Antisense strand to SEQ ID NO: 1104902
aacaagagcgacgacacuc

SEQ ID NO: 1104904 - RNA, 19 nt, Artificial Sequence
  Description of Artificial Sequence: Synthetic oligonucleotide
  Sense strand starting at position 3393 of SEQ ID NO: 915772
ggauauuggacaugccagu

SEQ ID NO: 1104905 - RNA, 19 nt, Artificial Sequence
  Description of Artificial Sequence: Synthetic oligonucleotide
  Antisense strand to SEQ ID NO: 1104904
acuggcauguccaauaucc

SEQ ID NO: 1104906 - RNA, 19 nt, Artificial Sequence
  Description of Artificial Sequence: Synthetic oligonucleotide
  Sense strand starting at position 3406 of SEQ ID NO: 915772
gccagucacucuucuagaa

SEQ ID NO: 1104907 - RNA, 19 nt, Artificial Sequence
  Description of Artificial Sequence: Synthetic oligonucleotide
  Antisense strand to SEQ ID NO: 1104906
uucuagaagagugacuggc

SEQ ID NO: 1104908 - RNA, 19 nt, Artificial Sequence
  Description of Artificial Sequence: Synthetic oligonucleotide
  Sense strand starting at position 3410 of SEQ ID NO: 915772
gucacucuucuagaaacug

SEQ ID NO: 1104909 - RNA, 19 nt, Artificial Sequence
  Description of Artificial Sequence: Synthetic oligonucleotide
  Antisense strand to SEQ ID NO: 1104908
caguuucuagaagagugac

SEQ ID NO: 1104910 - RNA, 19 nt, Artificial Sequence
  Description of Artificial Sequence: Synthetic oligonucleotide
  Sense strand starting at position 3515 of SEQ ID NO: 915772
uguaauauguuagaugaug

SEQ ID NO: 1104911 - RNA, 19 nt, Artificial Sequence
  Description of Artificial Sequence: Synthetic oligonucleotide
  Antisense strand to SEQ ID NO: 1104910
caucaucuaacauauuaca

SEQ ID NO: 1104912 - RNA, 19 nt, Artificial Sequence
  Description of Artificial Sequence: Synthetic oligonucleotide
  Sense strand starting at position 3526 of SEQ ID NO: 915772
agaugaugcuaagagcuau

SEQ ID NO: 1104913 - RNA, 19 nt, Artificial Sequence
  Description of Artificial Sequence: Synthetic oligonucleotide
  Antisense strand to SEQ ID NO: 1104912
auagcucuuagcaucaucu

SEQ ID NO: 1104914 - RNA, 19 nt, Artificial Sequence
  Description of Artificial Sequence: Synthetic oligonucleotide
  Sense strand starting at position 3563 of SEQ ID NO: 915772
aggaggugcguucggagaa

SEQ ID NO: 1104915 - RNA, 19 nt, Artificial Sequence
  Description of Artificial Sequence: Synthetic oligonucleotide
  Antisense strand to SEQ ID NO: 1104914
uucuccgaacgcaccuccu

SEQ ID NO: 1104916 - RNA, 19 nt, Artificial Sequence
  Description of Artificial Sequence: Synthetic oligonucleotide
  Sense strand starting at position 3567 of SEQ ID NO: 915772
ggugcguucggagaaggua

SEQ ID NO: 1104917 - RNA, 19 nt, Artificial Sequence
  Description of Artificial Sequence: Synthetic oligonucleotide
  Antisense strand to SEQ ID NO: 1104916
uaccuucuccgaacgcacc

SEQ ID NO: 1104918 - RNA, 19 nt, Artificial Sequence
  Description of Artificial Sequence: Synthetic oligonucleotide
  Sense strand starting at position 3604 of SEQ ID NO: 915772
ggaggcuaggcgugaacua

SEQ ID NO: 1104919 - RNA, 19 nt, Artificial Sequence
  Description of Artificial Sequence: Synthetic oligonucleotide
  Antisense strand to SEQ ID NO: 1104918
uaguucacgccuagccucc

SEQ ID NO: 1104920 - RNA, 19 nt, Artificial Sequence
  Description of Artificial Sequence: Synthetic oligonucleotide
  Sense strand starting at position 3611 of SEQ ID NO: 915772
aggcgugaacuacacauaa

SEQ ID NO: 1104921 - RNA, 19 nt, Artificial Sequence
  Description of Artificial Sequence: Synthetic oligonucleotide
  Antisense strand to SEQ ID NO: 1104920
uuauguguaguucacgccu

SEQ ID NO: 1104922 - RNA, 19 nt, Artificial Sequence
  Description of Artificial Sequence: Synthetic oligonucleotide
  Sense strand starting at position 3637 of SEQ ID NO: 915772
gaaagaauguucuaggcag

SEQ ID NO: 1104923 - RNA, 19 nt, Artificial Sequence
  Description of Artificial Sequence: Synthetic oligonucleotide
  Antisense strand to SEQ ID NO: 1104922
cugccuagaacauucuuuc

SEQ ID NO: 1104924 - RNA, 19 nt, Artificial Sequence
  Description of Artificial Sequence: Synthetic oligonucleotide
  Sense strand starting at position 3668 of SEQ ID NO: 915772
aaguaaagguccugaggug

SEQ ID NO: 1104925 - RNA, 19 nt, Artificial Sequence
  Description of Artificial Sequence: Synthetic oligonucleotide
  Antisense strand to SEQ ID NO: 1104924
caccucaggaccuuuacuu

SEQ ID NO: 1104926 - RNA, 19 nt, Artificial Sequence
  Description of Artificial Sequence: Synthetic oligonucleotide
  Sense strand starting at position 3696 of SEQ ID NO: 915772
ugccacuuucgaggaagaa

SEQ ID NO: 1104927 - RNA, 19 nt, Artificial Sequence
  Description of Artificial Sequence: Synthetic oligonucleotide
  Antisense strand to SEQ ID NO: 1104926
uucuuccucgaaaguggca

SEQ ID NO: 1104928 - RNA, 19 nt, Artificial Sequence
  Description of Artificial Sequence: Synthetic oligonucleotide
  Sense strand starting at position 3697 of SEQ ID NO: 915772
gccacuuucgaggaagaac

SEQ ID NO: 1104929 - RNA, 19 nt, Artificial Sequence
  Description of Artificial Sequence: Synthetic oligonucleotide
  Antisense strand to SEQ ID NO: 1104928
guucuuccucgaaaguggc

SEQ ID NO: 1104930 - RNA, 19 nt, Artificial Sequence
  Description of Artificial Sequence: Synthetic oligonucleotide
  Sense strand starting at position 3813 of SEQ ID NO: 915772
aggccauucugaggacuuu

SEQ ID NO: 1104931 - RNA, 19 nt, Artificial Sequence
  Description of Artificial Sequence: Synthetic oligonucleotide
  Antisense strand to SEQ ID NO: 1104930
aaaguccucagaauggccu

SEQ ID NO: 1104932 - RNA, 19 nt, Artificial Sequence
  Description of Artificial Sequence: Synthetic oligonucleotide
  Sense strand starting at position 3892 of SEQ ID NO: 915772
ggguuaugguagaagaaga

SEQ ID NO: 1104933 - RNA, 19 nt, Artificial Sequence
  Description of Artificial Sequence: Synthetic oligonucleotide
  Antisense strand to SEQ ID NO: 1104932
ucuucuucuaccauaaccc

SEQ ID NO: 1104934 - RNA, 19 nt, Artificial Sequence
  Description of Artificial Sequence: Synthetic oligonucleotide
  Sense strand starting at position 37 of SEQ ID NO: 915773
ggagucaucugucuacaga

SEQ ID NO: 1104935 - RNA, 19 nt, Artificial Sequence
  Description of Artificial Sequence: Synthetic oligonucleotide
  Antisense strand to SEQ ID NO: 1104934
ucuguagacagaugacucc

SEQ ID NO: 1104936 - RNA, 19 nt, Artificial Sequence
  Description of Artificial Sequence: Synthetic oligonucleotide
  Sense strand starting at position 38 of SEQ ID NO: 915773
gagucaucugucuacagaa

SEQ ID NO: 1104937 - RNA, 19 nt, Artificial Sequence
  Description of Artificial Sequence: Synthetic oligonucleotide
  Antisense strand to SEQ ID NO: 1104936
uucuguagacagaugacuc

SEQ ID NO: 1104938 - RNA, 19 nt, Artificial Sequence
  Description of Artificial Sequence: Synthetic oligonucleotide
  Sense strand starting at position 54 of SEQ ID NO: 915773
gaagcacuccugugguguu

SEQ ID NO: 1104939 - RNA, 19 nt, Artificial Sequence
  Description of Artificial Sequence: Synthetic oligonucleotide
  Antisense strand to SEQ ID NO: 1104938
aacaccacaggagugcuuc

SEQ ID NO: 1104940 - RNA, 19 nt, Artificial Sequence
  Description of Artificial Sequence: Synthetic oligonucleotide
  Sense strand starting at position 136 of SEQ ID NO: 915773
cgauuacuauucuugagga

SEQ ID NO: 1104941 - RNA, 19 nt, Artificial Sequence
  Description of Artificial Sequence: Synthetic oligonucleotide
  Antisense strand to SEQ ID NO: 1104940
uccucaagaauaguaaucg

SEQ ID NO: 1104942 - RNA, 19 nt, Artificial Sequence
  Description of Artificial Sequence: Synthetic oligonucleotide
  Sense strand starting at position 190 of SEQ ID NO: 915773
gggagaagcuccuuuaagg

SEQ ID NO: 1104943 - RNA, 19 nt, Artificial Sequence
  Description of Artificial Sequence: Synthetic oligonucleotide
  Antisense strand to SEQ ID NO: 1104942
ccuuaaaggagcuucuccc

SEQ ID NO: 1104944 - RNA, 19 nt, Artificial Sequence
  Description of Artificial Sequence: Synthetic oligonucleotide
  Sense strand starting at position 247 of SEQ ID NO: 915773
gguugaugccuuugucuaa

SEQ ID NO: 1104945 - RNA, 19 nt, Artificial Sequence
  Description of Artificial Sequence: Synthetic oligonucleotide
  Antisense strand to SEQ ID NO: 1104944
uuagacaaaggcaucaacc

SEQ ID NO: 1104946 - RNA, 19 nt, Artificial Sequence
  Description of Artificial Sequence: Synthetic oligonucleotide
  Sense strand starting at position 248 of SEQ ID NO: 915773
guugaugccuuugucuaaa

SEQ ID NO: 1104947 - RNA, 19 nt, Artificial Sequence
  Description of Artificial Sequence: Synthetic oligonucleotide
  Antisense strand to SEQ ID NO: 1104946
uuuagacaaaggcaucaac

SEQ ID NO: 1104948 - RNA, 19 nt, Artificial Sequence
  Description of Artificial Sequence: Synthetic oligonucleotide
  Sense strand starting at position 298 of SEQ ID NO: 915773
cuaggugcucuguguagaa

SEQ ID NO: 1104949 - RNA, 19 nt, Artificial Sequence
  Description of Artificial Sequence: Synthetic oligonucleotide
  Antisense strand to SEQ ID NO: 1104948
uucuacacagagcaccuag

SEQ ID NO: 1104950 - RNA, 19 nt, Artificial Sequence
  Description of Artificial Sequence: Synthetic oligonucleotide
  Sense strand starting at position 378 of SEQ ID NO: 915773
gccagauauucuucugcca

SEQ ID NO: 1104951 - RNA, 19 nt, Artificial Sequence
  Description of Artificial Sequence: Synthetic oligonucleotide
  Antisense strand to SEQ ID NO: 1104950
uggcagaagaauaucuggc

SEQ ID NO: 1104952 - RNA, 19 nt, Artificial Sequence
  Description of Artificial Sequence: Synthetic oligonucleotide
  Sense strand starting at position 381 of SEQ ID NO: 915773
agauauucuucugccaaga

SEQ ID NO: 1104953 - RNA, 19 nt, Artificial Sequence
  Description of Artificial Sequence: Synthetic oligonucleotide
  Antisense strand to SEQ ID NO: 1104952
ucuuggcagaagaauaucu

SEQ ID NO: 1104954 - RNA, 19 nt, Artificial Sequence
  Description of Artificial Sequence: Synthetic oligonucleotide
  Sense strand starting at position 418 of SEQ ID NO: 915773
cagggaaagucagcacuuu

SEQ ID NO: 1104955 - RNA, 19 nt, Artificial Sequence
  Description of Artificial Sequence: Synthetic oligonucleotide
  Antisense strand to SEQ ID NO: 1104954
aaagugcugacuuucccug

SEQ ID NO: 1104956 - RNA, 19 nt, Artificial Sequence
  Description of Artificial Sequence: Synthetic oligonucleotide
  Sense strand starting at position 558 of SEQ ID NO: 915773
caaccucuuucggugaaag

SEQ ID NO: 1104957 - RNA, 19 nt, Artificial Sequence
  Description of Artificial Sequence: Synthetic oligonucleotide
  Antisense strand to SEQ ID NO: 1104956
cuuucaccgaaagagguug

SEQ ID NO: 1104958 - RNA, 19 nt, Artificial Sequence
  Description of Artificial Sequence: Synthetic oligonucleotide
  Sense strand starting at position 597 of SEQ ID NO: 915773
aaguguuaugcugggacac

SEQ ID NO: 1104959 - RNA, 19 nt, Artificial Sequence
  Description of Artificial Sequence: Synthetic oligonucleotide
  Antisense strand to SEQ ID NO: 1104958
gugucccagcauaacacuu

SEQ ID NO: 1104960 - RNA, 19 nt, Artificial Sequence
  Description of Artificial Sequence: Synthetic oligonucleotide
  Sense strand starting at position 598 of SEQ ID NO: 915773
aguguuaugcugggacaca

SEQ ID NO: 1104961 - RNA, 19 nt, Artificial Sequence
  Description of Artificial Sequence: Synthetic oligonucleotide
  Antisense strand to SEQ ID NO: 1104960
ugugucccagcauaacacu

SEQ ID NO: 1104962 - RNA, 19 nt, Artificial Sequence
  Description of Artificial Sequence: Synthetic oligonucleotide
  Sense strand starting at position 617 of SEQ ID NO: 915773
ugugcaaagaguugagaaa

SEQ ID NO: 1104963 - RNA, 19 nt, Artificial Sequence
  Description of Artificial Sequence: Synthetic oligonucleotide
  Antisense strand to SEQ ID NO: 1104962
uuucucaacucuuugcaca

SEQ ID NO: 1104964 - RNA, 19 nt, Artificial Sequence
  Description of Artificial Sequence: Synthetic oligonucleotide
  Sense strand starting at position 783 of SEQ ID NO: 915773
gagcccugccuggguuaau

SEQ ID NO: 1104965 - RNA, 19 nt, Artificial Sequence
  Description of Artificial Sequence: Synthetic oligonucleotide
  Antisense strand to SEQ ID NO: 1104964
auuaacccaggcagggcuc

SEQ ID NO: 1104966 - RNA, 19 nt, Artificial Sequence
  Description of Artificial Sequence: Synthetic oligonucleotide
  Sense strand starting at position 795 of SEQ ID NO: 915773
gguuaaugcagagguagca

SEQ ID NO: 1104967 - RNA, 19 nt, Artificial Sequence
  Description of Artificial Sequence: Synthetic oligonucleotide
  Antisense strand to SEQ ID NO: 1104966
ugcuaccucugcauuaacc

SEQ ID NO: 1104968 - RNA, 19 nt, Artificial Sequence
  Description of Artificial Sequence: Synthetic oligonucleotide
  Sense strand starting at position 840 of SEQ ID NO: 915773
cgagguuugugucuucaca

SEQ ID NO: 1104969 - RNA, 19 nt, Artificial Sequence
  Description of Artificial Sequence: Synthetic oligonucleotide
  Antisense strand to SEQ ID NO: 1104968
ugugaagacacaaaccucg

SEQ ID NO: 1104970 - RNA, 19 nt, Artificial Sequence
  Description of Artificial Sequence: Synthetic oligonucleotide
  Sense strand starting at position 1205 of SEQ ID NO: 915773
gucaccaacccuugggaaa

SEQ ID NO: 1104971 - RNA, 19 nt, Artificial Sequence
  Description of Artificial Sequence: Synthetic oligonucleotide
  Antisense strand to SEQ ID NO: 1104970
uuucccaaggguuggugac

SEQ ID NO: 1104972 - RNA, 19 nt, Artificial Sequence
  Description of Artificial Sequence: Synthetic oligonucleotide
  Sense strand starting at position 1365 of SEQ ID NO: 915773
uccugcaccuguccugaua

SEQ ID NO: 1104973 - RNA, 19 nt, Artificial Sequence
  Description of Artificial Sequence: Synthetic oligonucleotide
  Antisense strand to SEQ ID NO: 1104972
uaucaggacaggugcagga

SEQ ID NO: 1104974 - RNA, 19 nt, Artificial Sequence
  Description of Artificial Sequence: Synthetic oligonucleotide
  Sense strand starting at position 1487 of SEQ ID NO: 915773
acgaguaagcgugcgauca

SEQ ID NO: 1104975 - RNA, 19 nt, Artificial Sequence
  Description of Artificial Sequence: Synthetic oligonucleotide
  Antisense strand to SEQ ID NO: 1104974
ugaucgcacgcuuacucgu

SEQ ID NO: 1104976 - RNA, 19 nt, Artificial Sequence
  Description of Artificial Sequence: Synthetic oligonucleotide
  Sense strand starting at position 1831 of SEQ ID NO: 915773
gggcuuuggcccucgcuua

SEQ ID NO: 1104977 - RNA, 19 nt, Artificial Sequence
  Description of Artificial Sequence: Synthetic oligonucleotide
  Antisense strand to SEQ ID NO: 1104976
uaagcgagggccaaagccc

SEQ ID NO: 1104978 - RNA, 19 nt, Artificial Sequence
  Description of Artificial Sequence: Synthetic oligonucleotide
  Sense strand starting at position 2278 of SEQ ID NO: 915773
gaggcucagcucgggauaa

SEQ ID NO: 1104979 - RNA, 19 nt, Artificial Sequence
  Description of Artificial Sequence: Synthetic oligonucleotide
  Antisense strand to SEQ ID NO: 1104978
uuaucccgagcugagccuc

SEQ ID NO: 1104980 - RNA, 19 nt, Artificial Sequence
  Description of Artificial Sequence: Synthetic oligonucleotide
  Sense strand starting at position 2280 of SEQ ID NO: 915773
ggcucagcucgggauaagu

SEQ ID NO: 1104981 - RNA, 19 nt, Artificial Sequence
  Description of Artificial Sequence: Synthetic oligonucleotide
  Antisense strand to SEQ ID NO: 1104980
acuuaucccgagcugagcc

SEQ ID NO: 1104982 - RNA, 19 nt, Artificial Sequence
  Description of Artificial Sequence: Synthetic oligonucleotide
  Sense strand starting at position 2282 of SEQ ID NO: 915773
cucagcucgggauaaguga

SEQ ID NO: 1104983 - RNA, 19 nt, Artificial Sequence
  Description of Artificial Sequence: Synthetic oligonucleotide
  Antisense strand to SEQ ID NO: 1104982
ucacuuaucccgagcugag

SEQ ID NO: 1104984 - RNA, 19 nt, Artificial Sequence
  Description of Artificial Sequence: Synthetic oligonucleotide
  Sense strand starting at position 2442 of SEQ ID NO: 915773
gcgaaauacguauaugcac

SEQ ID NO: 1104985 - RNA, 19 nt, Artificial Sequence
  Description of Artificial Sequence: Synthetic oligonucleotide
  Antisense strand to SEQ ID NO: 1104984
gugcauauacguauuucgc

SEQ ID NO: 1104986 - RNA, 19 nt, Artificial Sequence
  Description of Artificial Sequence: Synthetic oligonucleotide
  Sense strand starting at position 2517 of SEQ ID NO: 915773
gcagucuguggaggucaau

SEQ ID NO: 1104987 - RNA, 19 nt, Artificial Sequence
  Description of Artificial Sequence: Synthetic oligonucleotide
  Antisense strand to SEQ ID NO: 1104986
auugaccuccacagacugc

SEQ ID NO: 1104988 - RNA, 19 nt, Artificial Sequence
  Description of Artificial Sequence: Synthetic oligonucleotide
  Sense strand starting at position 2529 of SEQ ID NO: 915773
ggucaaugugcccagguua

SEQ ID NO: 1104989 - RNA, 19 nt, Artificial Sequence
  Description of Artificial Sequence: Synthetic oligonucleotide
  Antisense strand to SEQ ID NO: 1104988
uaaccugggcacauugacc

SEQ ID NO: 1104990 - RNA, 19 nt, Artificial Sequence
  Description of Artificial Sequence: Synthetic oligonucleotide
  Sense strand starting at position 2619 of SEQ ID NO: 915773
agaggcagugcucauguuu

SEQ ID NO: 1104991 - RNA, 19 nt, Artificial Sequence
  Description of Artificial Sequence: Synthetic oligonucleotide
  Antisense strand to SEQ ID NO: 1104990
aaacaugagcacugccucu

SEQ ID NO: 1104992 - RNA, 19 nt, Artificial Sequence
  Description of Artificial Sequence: Synthetic oligonucleotide
  Sense strand starting at position 2907 of SEQ ID NO: 915773
ucacgaaucugccuagaga

SEQ ID NO: 1104993 - RNA, 19 nt, Artificial Sequence
  Description of Artificial Sequence: Synthetic oligonucleotide
  Antisense strand to SEQ ID NO: 1104992
ucucuaggcagauucguga

SEQ ID NO: 1104994 - RNA, 19 nt, Artificial Sequence
  Description of Artificial Sequence: Synthetic oligonucleotide
  Sense strand starting at position 2908 of SEQ ID NO: 915773
cacgaaucugccuagagaa

SEQ ID NO: 1104995 - RNA, 19 nt, Artificial Sequence
  Description of Artificial Sequence: Synthetic oligonucleotide
  Antisense strand to SEQ ID NO: 1104994
uucucuaggcagauucgug

SEQ ID NO: 1104996 - RNA, 19 nt, Artificial Sequence
  Description of Artificial Sequence: Synthetic oligonucleotide
  Sense strand starting at position 2920 of SEQ ID NO: 915773
uagagaaaguaucuuguuu

SEQ ID NO: 1104997 - RNA, 19 nt, Artificial Sequence
  Description of Artificial Sequence: Synthetic oligonucleotide
  Antisense strand to SEQ ID NO: 1104996
aaacaagauacuuucucua

SEQ ID NO: 1104998 - RNA, 19 nt, Artificial Sequence
  Description of Artificial Sequence: Synthetic oligonucleotide
  Sense strand starting at position 2924 of SEQ ID NO: 915773
gaaaguaucuuguuuggag

SEQ ID NO: 1104999 - RNA, 19 nt, Artificial Sequence
  Description of Artificial Sequence: Synthetic oligonucleotide
  Antisense strand to SEQ ID NO: 1104998
cuccaaacaagauacuuuc

SEQ ID NO: 1105000 - RNA, 19 nt, Artificial Sequence
  Description of Artificial Sequence: Synthetic oligonucleotide
  Sense strand starting at position 3245 of SEQ ID NO: 915773
gucugcuugugaucaguga

SEQ ID NO: 1105001 - RNA, 19 nt, Artificial Sequence
  Description of Artificial Sequence: Synthetic oligonucleotide
  Antisense strand to SEQ ID NO: 1105000
ucacugaucacaagcagac

SEQ ID NO: 1105002 - RNA, 19 nt, Artificial Sequence
  Description of Artificial Sequence: Synthetic oligonucleotide
  Sense strand starting at position 3249 of SEQ ID NO: 915773
gcuugugaucagugagagu

SEQ ID NO: 1105003 - RNA, 19 nt, Artificial Sequence
  Description of Artificial Sequence: Synthetic oligonucleotide
  Antisense strand to SEQ ID NO: 1105002
acucucacugaucacaagc

SEQ ID NO: 1105004 - RNA, 19 nt, Artificial Sequence
  Description of Artificial Sequence: Synthetic oligonucleotide
  Sense strand starting at position 3270 of SEQ ID NO: 915773
gcaugugaggaguggugau

SEQ ID NO: 1105005 - RNA, 19 nt, Artificial Sequence
  Description of Artificial Sequence: Synthetic oligonucleotide
  Antisense strand to SEQ ID NO: 1105004
aucaccacuccucacaugc

SEQ ID NO: 1105006 - RNA, 19 nt, Artificial Sequence
  Description of Artificial Sequence: Synthetic oligonucleotide
  Sense strand starting at position 3280 of SEQ ID NO: 915773
aguggugaucucuacaguc

SEQ ID NO: 1105007 - RNA, 19 nt, Artificial Sequence
  Description of Artificial Sequence: Synthetic oligonucleotide
  Antisense strand to SEQ ID NO: 1105006
gacuguagagaucaccacu

SEQ ID NO: 1105008 - RNA, 19 nt, Artificial Sequence
  Description of Artificial Sequence: Synthetic oligonucleotide
  Sense strand starting at position 3282 of SEQ ID NO: 915773
uggugaucucuacagucac

SEQ ID NO: 1105009 - RNA, 19 nt, Artificial Sequence
  Description of Artificial Sequence: Synthetic oligonucleotide
  Antisense strand to SEQ ID NO: 1105008
gugacuguagagaucacca

SEQ ID NO: 1105010 - RNA, 19 nt, Artificial Sequence
  Description of Artificial Sequence: Synthetic oligonucleotide
  Sense strand starting at position 3309 of SEQ ID NO: 915773
cccagacucugacugaauc

SEQ ID NO: 1105011 - RNA, 19 nt, Artificial Sequence
  Description of Artificial Sequence: Synthetic oligonucleotide
  Antisense strand to SEQ ID NO: 1105010
gauucagucagagucuggg

SEQ ID NO: 1105012 - RNA, 19 nt, Artificial Sequence
  Description of Artificial Sequence: Synthetic oligonucleotide
  Sense strand starting at position 3568 of SEQ ID NO: 915773
ugcuuauccucugcugaaa

SEQ ID NO: 1105013 - RNA, 19 nt, Artificial Sequence
  Description of Artificial Sequence: Synthetic oligonucleotide
  Antisense strand to SEQ ID NO: 1105012
uuucagcagaggauaagca

SEQ ID NO: 1105014 - RNA, 19 nt, Artificial Sequence
  Description of Artificial Sequence: Synthetic oligonucleotide
  Sense strand starting at position 2 of SEQ ID NO: 915774
augacugagccacgacaaa

SEQ ID NO: 1105015 - RNA, 19 nt, Artificial Sequence
  Description of Artificial Sequence: Synthetic oligonucleotide
  Antisense strand to SEQ ID NO: 1105014
uuugucguggcucagucau

SEQ ID NO: 1105016 - RNA, 19 nt, Artificial Sequence
  Description of Artificial Sequence: Synthetic oligonucleotide
  Sense strand starting at position 176 of SEQ ID NO: 915774
ggcacuugugaacaucuaa

SEQ ID NO: 1105017 - RNA, 19 nt, Artificial Sequence
  Description of Artificial Sequence: Synthetic oligonucleotide
  Antisense strand to SEQ ID NO: 1105016
uuagauguucacaagugcc

SEQ ID NO: 1105018 - RNA, 19 nt, Artificial Sequence
  Description of Artificial Sequence: Synthetic oligonucleotide
  Sense strand starting at position 205 of SEQ ID NO: 915774
auuagaagucagugcauga

SEQ ID NO: 1105019 - RNA, 19 nt, Artificial Sequence
  Description of Artificial Sequence: Synthetic oligonucleotide
  Antisense strand to SEQ ID NO: 1105018
ucaugcacugacuucuaau

SEQ ID NO: 1105020 - RNA, 19 nt, Artificial Sequence
  Description of Artificial Sequence: Synthetic oligonucleotide
  Sense strand starting at position 209 of SEQ ID NO: 915774
gaagucagugcaugauacu

SEQ ID NO: 1105021 - RNA, 19 nt, Artificial Sequence
  Description of Artificial Sequence: Synthetic oligonucleotide
  Antisense strand to SEQ ID NO: 1105020
aguaucaugcacugacuuc

SEQ ID NO: 1105022 - RNA, 19 nt, Artificial Sequence
  Description of Artificial Sequence: Synthetic oligonucleotide
  Sense strand starting at position 210 of SEQ ID NO: 915774
aagucagugcaugauacuu

SEQ ID NO: 1105023 - RNA, 19 nt, Artificial Sequence
  Description of Artificial Sequence: Synthetic oligonucleotide
  Antisense strand to SEQ ID NO: 1105022
aaguaucaugcacugacuu

SEQ ID NO: 1105024 - RNA, 19 nt, Artificial Sequence
  Description of Artificial Sequence: Synthetic oligonucleotide
  Sense strand starting at position 936 of SEQ ID NO: 915774
aggauucucaccugagggu

SEQ ID NO: 1105025 - RNA, 19 nt, Artificial Sequence
  Description of Artificial Sequence: Synthetic oligonucleotide
  Antisense strand to SEQ ID NO: 1105024
acccucaggugagaauccu

SEQ ID NO: 1105026 - RNA, 19 nt, Artificial Sequence
  Description of Artificial Sequence: Synthetic oligonucleotide
  Sense strand starting at position 952 of SEQ ID NO: 915774
gguaucugucugccagcuu

SEQ ID NO: 1105027 - RNA, 19 nt, Artificial Sequence
  Description of Artificial Sequence: Synthetic oligonucleotide
  Antisense strand to SEQ ID NO: 1105026
aagcuggcagacagauacc

SEQ ID NO: 1105028 - RNA, 19 nt, Artificial Sequence
  Description of Artificial Sequence: Synthetic oligonucleotide
  Sense strand starting at position 966 of SEQ ID NO: 915774
agcuuuguacgacaaauau

SEQ ID NO: 1105029 - RNA, 19 nt, Artificial Sequence
  Description of Artificial Sequence: Synthetic oligonucleotide
  Antisense strand to SEQ ID NO: 1105028
auauuugucguacaaagcu

SEQ ID NO: 1105030 - RNA, 19 nt, Artificial Sequence
  Description of Artificial Sequence: Synthetic oligonucleotide
  Sense strand starting at position 975 of SEQ ID NO: 915774
cgacaaauauaguuucuca

SEQ ID NO: 1105031 - RNA, 19 nt, Artificial Sequence
  Description of Artificial Sequence: Synthetic oligonucleotide
  Antisense strand to SEQ ID NO: 1105030
ugagaaacuauauuugucg

SEQ ID NO: 1105032 - RNA, 19 nt, Artificial Sequence
  Description of Artificial Sequence: Synthetic oligonucleotide
  Sense strand starting at position 1231 of SEQ ID NO: 915774
cuucuuagacauugggaac

SEQ ID NO: 1105033 - RNA, 19 nt, Artificial Sequence
  Description of Artificial Sequence: Synthetic oligonucleotide
  Antisense strand to SEQ ID NO: 1105032
guucccaaugucuaagaag

SEQ ID NO: 1105034 - RNA, 19 nt, Artificial Sequence
  Description of Artificial Sequence: Synthetic oligonucleotide
  Sense strand starting at position 1253 of SEQ ID NO: 915774
agaucaucaucaguagacu

SEQ ID NO: 1105035 - RNA, 19 nt, Artificial Sequence
  Description of Artificial Sequence: Synthetic oligonucleotide
  Antisense strand to SEQ ID NO: 1105034
agucuacugaugaugaucu

SEQ ID NO: 1105036 - RNA, 19 nt, Artificial Sequence
  Description of Artificial Sequence: Synthetic oligonucleotide
  Sense strand starting at position 1313 of SEQ ID NO: 915774
gagcgaugaaggcaauaau

SEQ ID NO: 1105037 - RNA, 19 nt, Artificial Sequence
  Description of Artificial Sequence: Synthetic oligonucleotide
  Antisense strand to SEQ ID NO: 1105036
auuauugccuucaucgcuc

SEQ ID NO: 1105038 - RNA, 19 nt, Artificial Sequence
  Description of Artificial Sequence: Synthetic oligonucleotide
  Sense strand starting at position 1375 of SEQ ID NO: 915774
gagggaaguggugguaacu

SEQ ID NO: 1105039 - RNA, 19 nt, Artificial Sequence
  Description of Artificial Sequence: Synthetic oligonucleotide
  Antisense strand to SEQ ID NO: 1105038
aguuaccaccacuucccuc

SEQ ID NO: 1105040 - RNA, 19 nt, Artificial Sequence
  Description of Artificial Sequence: Synthetic oligonucleotide
  Sense strand starting at position 1408 of SEQ ID NO: 915774
uauagaagacggugauuaa

SEQ ID NO: 1105041 - RNA, 19 nt, Artificial Sequence
  Description of Artificial Sequence: Synthetic oligonucleotide
  Antisense strand to SEQ ID NO: 1105040
uuaaucaccgucuucuaua

SEQ ID NO: 1105042 - RNA, 19 nt, Artificial Sequence
  Description of Artificial Sequence: Synthetic oligonucleotide
  Sense strand starting at position 1411 of SEQ ID NO: 915774
agaagacggugauuaauuc

SEQ ID NO: 1105043 - RNA, 19 nt, Artificial Sequence
  Description of Artificial Sequence: Synthetic oligonucleotide
  Antisense strand to SEQ ID NO: 1105042
gaauuaaucaccgucuucu

SEQ ID NO: 1105044 - RNA, 19 nt, Artificial Sequence
  Description of Artificial Sequence: Synthetic oligonucleotide
  Sense strand starting at position 1415 of SEQ ID NO: 915774
gacggugauuaauuccgga

SEQ ID NO: 1105045 - RNA, 19 nt, Artificial Sequence
  Description of Artificial Sequence: Synthetic oligonucleotide
  Antisense strand to SEQ ID NO: 1105044
uccggaauuaaucaccguc

SEQ ID NO: 1105046 - RNA, 19 nt, Artificial Sequence
  Description of Artificial Sequence: Synthetic oligonucleotide
  Sense strand starting at position 1420 of SEQ ID NO: 915774
ugauuaauuccggacuuua

SEQ ID NO: 1105047 - RNA, 19 nt, Artificial Sequence
  Description of Artificial Sequence: Synthetic oligonucleotide
  Antisense strand to SEQ ID NO: 1105046
uaaaguccggaauuaauca

SEQ ID NO: 1105048 - RNA, 19 nt, Artificial Sequence
  Description of Artificial Sequence: Synthetic oligonucleotide
  Sense strand starting at position 1428 of SEQ ID NO: 915774
uccggacuuuaagugagau

SEQ ID NO: 1105049 - RNA, 19 nt, Artificial Sequence
  Description of Artificial Sequence: Synthetic oligonucleotide
  Antisense strand to SEQ ID NO: 1105048
aucucacuuaaaguccgga

SEQ ID NO: 1105050 - RNA, 19 nt, Artificial Sequence
  Description of Artificial Sequence: Synthetic oligonucleotide
  Sense strand starting at position 1429 of SEQ ID NO: 915774
ccggacuuuaagugagaua

SEQ ID NO: 1105051 - RNA, 19 nt, Artificial Sequence
  Description of Artificial Sequence: Synthetic oligonucleotide
  Antisense strand to SEQ ID NO: 1105050
uaucucacuuaaaguccgg

SEQ ID NO: 1105052 - RNA, 19 nt, Artificial Sequence
  Description of Artificial Sequence: Synthetic oligonucleotide
  Sense strand starting at position 1440 of SEQ ID NO: 915774
gugagauaacuucggucug

SEQ ID NO: 1105053 - RNA, 19 nt, Artificial Sequence
  Description of Artificial Sequence: Synthetic oligonucleotide
  Antisense strand to SEQ ID NO: 1105052
cagaccgaaguuaucucac

SEQ ID NO: 1105054 - RNA, 19 nt, Artificial Sequence
  Description of Artificial Sequence: Synthetic oligonucleotide
  Sense strand starting at position 1567 of SEQ ID NO: 915774
gagggcucaccuuacugau

SEQ ID NO: 1105055 - RNA, 19 nt, Artificial Sequence
  Description of Artificial Sequence: Synthetic oligonucleotide
  Antisense strand to SEQ ID NO: 1105054
aucaguaaggugagcccuc

SEQ ID NO: 1105056 - RNA, 19 nt, Artificial Sequence
  Description of Artificial Sequence: Synthetic oligonucleotide
  Sense strand starting at position 1606 of SEQ ID NO: 915774
cguccagcccuuuauauuu

SEQ ID NO: 1105057 - RNA, 19 nt, Artificial Sequence
  Description of Artificial Sequence: Synthetic oligonucleotide
  Antisense strand to SEQ ID NO: 1105056
aaauauaaagggcuggacg

SEQ ID NO: 1105058 - RNA, 19 nt, Artificial Sequence
  Description of Artificial Sequence: Synthetic oligonucleotide
  Sense strand starting at position 2249 of SEQ ID NO: 915774
gggaacuggguuugcgaau

SEQ ID NO: 1105059 - RNA, 19 nt, Artificial Sequence
  Description of Artificial Sequence: Synthetic oligonucleotide
  Antisense strand to SEQ ID NO: 1105058
auucgcaaacccaguuccc

SEQ ID NO: 1105060 - RNA, 19 nt, Artificial Sequence
  Description of Artificial Sequence: Synthetic oligonucleotide
  Sense strand starting at position 2391 of SEQ ID NO: 915774
ccgaaugaccguggaauaa

SEQ ID NO: 1105061 - RNA, 19 nt, Artificial Sequence
  Description of Artificial Sequence: Synthetic oligonucleotide
  Antisense strand to SEQ ID NO: 1105060
uuauuccacggucauucgg

SEQ ID NO: 1105062 - RNA, 19 nt, Artificial Sequence
  Description of Artificial Sequence: Synthetic oligonucleotide
  Sense strand starting at position 2494 of SEQ ID NO: 915774
gaaugcagucgcuugucua

SEQ ID NO: 1105063 - RNA, 19 nt, Artificial Sequence
  Description of Artificial Sequence: Synthetic oligonucleotide
  Antisense strand to SEQ ID NO: 1105062
uagacaagcgacugcauuc

SEQ ID NO: 1105064 - RNA, 19 nt, Artificial Sequence
  Description of Artificial Sequence: Synthetic oligonucleotide
  Sense strand starting at position 2578 of SEQ ID NO: 915774
cucuuaaccugggcaugau

SEQ ID NO: 1105065 - RNA, 19 nt, Artificial Sequence
  Description of Artificial Sequence: Synthetic oligonucleotide
  Antisense strand to SEQ ID NO: 1105064
aucaugcccagguuaagag

SEQ ID NO: 1105066 - RNA, 19 nt, Artificial Sequence
  Description of Artificial Sequence: Synthetic oligonucleotide
  Sense strand starting at position 2579 of SEQ ID NO: 915774
ucuuaaccugggcaugaua

SEQ ID NO: 1105067 - RNA, 19 nt, Artificial Sequence
  Description of Artificial Sequence: Synthetic oligonucleotide
  Antisense strand to SEQ ID NO: 1105066
uaucaugcccagguuaaga

SEQ ID NO: 1105068 - RNA, 19 nt, Artificial Sequence
  Description of Artificial Sequence: Synthetic oligonucleotide
  Sense strand starting at position 2663 of SEQ ID NO: 915774
uuacguuugagccagauau

SEQ ID NO: 1105069 - RNA, 19 nt, Artificial Sequence
  Description of Artificial Sequence: Synthetic oligonucleotide
  Antisense strand to SEQ ID NO: 1105068
auaucuggcucaaacguaa

SEQ ID NO: 1105070 - RNA, 19 nt, Artificial Sequence
  Description of Artificial Sequence: Synthetic oligonucleotide
  Sense strand starting at position 2673 of SEQ ID NO: 915774
gccagauauuuacgauuuc

SEQ ID NO: 1105071 - RNA, 19 nt, Artificial Sequence
  Description of Artificial Sequence: Synthetic oligonucleotide
  Antisense strand to SEQ ID NO: 1105070
gaaaucguaaauaucuggc

SEQ ID NO: 1105072 - RNA, 19 nt, Artificial Sequence
  Description of Artificial Sequence: Synthetic oligonucleotide
  Sense strand starting at position 3027 of SEQ ID NO: 915774
ucaacaacugugugggaau

SEQ ID NO: 1105073 - RNA, 19 nt, Artificial Sequence
  Description of Artificial Sequence: Synthetic oligonucleotide
  Antisense strand to SEQ ID NO: 1105072
auucccacacaguuguuga

SEQ ID NO: 1105074 - RNA, 19 nt, Artificial Sequence
  Description of Artificial Sequence: Synthetic oligonucleotide
  Sense strand starting at position 3039 of SEQ ID NO: 915774
ugggaauugugauuacuga

SEQ ID NO: 1105075 - RNA, 19 nt, Artificial Sequence
  Description of Artificial Sequence: Synthetic oligonucleotide
  Antisense strand to SEQ ID NO: 1105074
ucaguaaucacaauuccca

SEQ ID NO: 1105076 - RNA, 19 nt, Artificial Sequence
  Description of Artificial Sequence: Synthetic oligonucleotide
  Sense strand starting at position 3075 of SEQ ID NO: 915774
agauacaaauguguuauga

SEQ ID NO: 1105077 - RNA, 19 nt, Artificial Sequence
  Description of Artificial Sequence: Synthetic oligonucleotide
  Antisense strand to SEQ ID NO: 1105076
ucauaacacauuuguaucu

SEQ ID NO: 1105078 - RNA, 19 nt, Artificial Sequence
  Description of Artificial Sequence: Synthetic oligonucleotide
  Sense strand starting at position 3083 of SEQ ID NO: 915774
auguguuaugauggcaaac

SEQ ID NO: 1105079 - RNA, 19 nt, Artificial Sequence
  Description of Artificial Sequence: Synthetic oligonucleotide
  Antisense strand to SEQ ID NO: 1105078
guuugccaucauaacacau

SEQ ID NO: 1105080 - RNA, 19 nt, Artificial Sequence
  Description of Artificial Sequence: Synthetic oligonucleotide
  Sense strand starting at position 3224 of SEQ ID NO: 915774
gugugaauuuaacauggac

SEQ ID NO: 1105081 - RNA, 19 nt, Artificial Sequence
  Description of Artificial Sequence: Synthetic oligonucleotide
  Antisense strand to SEQ ID NO: 1105080
guccauguuaaauucacac

SEQ ID NO: 1105082 - RNA, 19 nt, Artificial Sequence
  Description of Artificial Sequence: Synthetic oligonucleotide
  Sense strand starting at position 3264 of SEQ ID NO: 915774
ggcauuguugucgcuggga

SEQ ID NO: 1105083 - RNA, 19 nt, Artificial Sequence
  Description of Artificial Sequence: Synthetic oligonucleotide
  Antisense strand to SEQ ID NO: 1105082
ucccagcgacaacaaugcc

SEQ ID NO: 1105084 - RNA, 19 nt, Artificial Sequence
  Description of Artificial Sequence: Synthetic oligonucleotide
  Sense strand starting at position 3377 of SEQ ID NO: 915774
aggccagauuacucucuga

SEQ ID NO: 1105085 - RNA, 19 nt, Artificial Sequence
  Description of Artificial Sequence: Synthetic oligonucleotide
  Antisense strand to SEQ ID NO: 1105084
ucagagaguaaucuggccu

SEQ ID NO: 1105086 - RNA, 19 nt, Artificial Sequence
  Description of Artificial Sequence: Synthetic oligonucleotide
  Sense strand starting at position 3388 of SEQ ID NO: 915774
cucucugaggccugaacua

SEQ ID NO: 1105087 - RNA, 19 nt, Artificial Sequence
  Description of Artificial Sequence: Synthetic oligonucleotide
  Antisense strand to SEQ ID NO: 1105086
uaguucaggccucagagag

SEQ ID NO: 1105088 - RNA, 19 nt, Artificial Sequence
  Description of Artificial Sequence: Synthetic oligonucleotide
  Sense strand starting at position 3456 of SEQ ID NO: 915774
ggcagauuaacuggcagau

SEQ ID NO: 1105089 - RNA, 19 nt, Artificial Sequence
  Description of Artificial Sequence: Synthetic oligonucleotide
  Antisense strand to SEQ ID NO: 1105088
aucugccaguuaaucugcc

SEQ ID NO: 1105090 - RNA, 19 nt, Artificial Sequence
  Description of Artificial Sequence: Synthetic oligonucleotide
  Sense strand starting at position 3533 of SEQ ID NO: 915774
uugugucugcgaguaguag

SEQ ID NO: 1105091 - RNA, 19 nt, Artificial Sequence
  Description of Artificial Sequence: Synthetic oligonucleotide
  Antisense strand to SEQ ID NO: 1105090
cuacuacucgcagacacaa

SEQ ID NO: 1105092 - RNA, 19 nt, Artificial Sequence
  Description of Artificial Sequence: Synthetic oligonucleotide
  Sense strand starting at position 3592 of SEQ ID NO: 915774
augagugacuguguuuaug

SEQ ID NO: 1105093 - RNA, 19 nt, Artificial Sequence
  Description of Artificial Sequence: Synthetic oligonucleotide
  Antisense strand to SEQ ID NO: 1105092
cauaaacacagucacucau

SEQ ID NO: 1105094 - RNA, 19 nt, Artificial Sequence
  Description of Artificial Sequence: Synthetic oligonucleotide
  Sense strand starting at position 265 of SEQ ID NO: 915775
ggacugagguguccgugaa

SEQ ID NO: 1105095 - RNA, 19 nt, Artificial Sequence
  Description of Artificial Sequence: Synthetic oligonucleotide
  Antisense strand to SEQ ID NO: 1105094
uucacggacaccucagucc

SEQ ID NO: 1105096 - RNA, 19 nt, Artificial Sequence
  Description of Artificial Sequence: Synthetic oligonucleotide
  Sense strand starting at position 266 of SEQ ID NO: 915775
gacugagguguccgugaag

SEQ ID NO: 1105097 - RNA, 19 nt, Artificial Sequence
  Description of Artificial Sequence: Synthetic oligonucleotide
  Antisense strand to SEQ ID NO: 1105096
cuucacggacaccucaguc

SEQ ID NO: 1105098 - RNA, 19 nt, Artificial Sequence
  Description of Artificial Sequence: Synthetic oligonucleotide
  Sense strand starting at position 288 of SEQ ID NO: 915775
cgucaagcaacucaugaga

SEQ ID NO: 1105099 - RNA, 19 nt, Artificial Sequence
  Description of Artificial Sequence: Synthetic oligonucleotide
  Antisense strand to SEQ ID NO: 1105098
ucucaugaguugcuugacg

SEQ ID NO: 1105100 - RNA, 19 nt, Artificial Sequence
  Description of Artificial Sequence: Synthetic oligonucleotide
  Sense strand starting at position 413 of SEQ ID NO: 915775
ccuggucuugcauaucaaa

SEQ ID NO: 1105101 - RNA, 19 nt, Artificial Sequence
  Description of Artificial Sequence: Synthetic oligonucleotide
  Antisense strand to SEQ ID NO: 1105100
uuugauaugcaagaccagg

SEQ ID NO: 1105102 - RNA, 19 nt, Artificial Sequence
  Description of Artificial Sequence: Synthetic oligonucleotide
  Sense strand starting at position 865 of SEQ ID NO: 915775
ggcagcaucucucuaggua

SEQ ID NO: 1105103 - RNA, 19 nt, Artificial Sequence
  Description of Artificial Sequence: Synthetic oligonucleotide
  Antisense strand to SEQ ID NO: 1105102
uaccuagagagaugcugcc

SEQ ID NO: 1105104 - RNA, 19 nt, Artificial Sequence
  Description of Artificial Sequence: Synthetic oligonucleotide
  Sense strand starting at position 866 of SEQ ID NO: 915775
gcagcaucucucuagguau

SEQ ID NO: 1105105 - RNA, 19 nt, Artificial Sequence
  Description of Artificial Sequence: Synthetic oligonucleotide
  Antisense strand to SEQ ID NO: 1105104
auaccuagagagaugcugc

SEQ ID NO: 1105106 - RNA, 19 nt, Artificial Sequence
  Description of Artificial Sequence: Synthetic oligonucleotide
  Sense strand starting at position 868 of SEQ ID NO: 915775
agcaucucucuagguauuu

SEQ ID NO: 1105107 - RNA, 19 nt, Artificial Sequence
  Description of Artificial Sequence: Synthetic oligonucleotide
  Antisense strand to SEQ ID NO: 1105106
aaauaccuagagagaugcu

SEQ ID NO: 1105108 - RNA, 19 nt, Artificial Sequence
  Description of Artificial Sequence: Synthetic oligonucleotide
  Sense strand starting at position 949 of SEQ ID NO: 915775
ccaugucugggccaccaaa

SEQ ID NO: 1105109 - RNA, 19 nt, Artificial Sequence
  Description of Artificial Sequence: Synthetic oligonucleotide
  Antisense strand to SEQ ID NO: 1105108
uuugguggcccagacaugg

SEQ ID NO: 1105110 - RNA, 19 nt, Artificial Sequence
  Description of Artificial Sequence: Synthetic oligonucleotide
  Sense strand starting at position 962 of SEQ ID NO: 915775
accaaacugucuccuggaa

SEQ ID NO: 1105111 - RNA, 19 nt, Artificial Sequence
  Description of Artificial Sequence: Synthetic oligonucleotide
  Antisense strand to SEQ ID NO: 1105110
uuccaggagacaguuuggu

SEQ ID NO: 1105112 - RNA, 19 nt, Artificial Sequence
  Description of Artificial Sequence: Synthetic oligonucleotide
  Sense strand starting at position 1068 of SEQ ID NO: 915775
agcuauuccuccucaggaa

SEQ ID NO: 1105113 - RNA, 19 nt, Artificial Sequence
  Description of Artificial Sequence: Synthetic oligonucleotide
  Antisense strand to SEQ ID NO: 1105112
uuccugaggaggaauagcu

SEQ ID NO: 1105114 - RNA, 19 nt, Artificial Sequence
  Description of Artificial Sequence: Synthetic oligonucleotide
  Sense strand starting at position 1248 of SEQ ID NO: 915775
ggcccagcacacugagaau

SEQ ID NO: 1105115 - RNA, 19 nt, Artificial Sequence
  Description of Artificial Sequence: Synthetic oligonucleotide
  Antisense strand to SEQ ID NO: 1105114
auucucagugugcugggcc

SEQ ID NO: 1105116 - RNA, 19 nt, Artificial Sequence
  Description of Artificial Sequence: Synthetic oligonucleotide
  Sense strand starting at position 1441 of SEQ ID NO: 915775
gcaggaucacuucgacaua

SEQ ID NO: 1105117 - RNA, 19 nt, Artificial Sequence
  Description of Artificial Sequence: Synthetic oligonucleotide
  Antisense strand to SEQ ID NO: 1105116
uaugucgaagugauccugc

SEQ ID NO: 1105118 - RNA, 19 nt, Artificial Sequence
  Description of Artificial Sequence: Synthetic oligonucleotide
  Sense strand starting at position 2310 of SEQ ID NO: 915775
ccugucuuaccaugagacu

SEQ ID NO: 1105119 - RNA, 19 nt, Artificial Sequence
  Description of Artificial Sequence: Synthetic oligonucleotide
  Antisense strand to SEQ ID NO: 1105118
agucucaugguaagacagg

SEQ ID NO: 1105120 - RNA, 19 nt, Artificial Sequence
  Description of Artificial Sequence: Synthetic oligonucleotide
  Sense strand starting at position 2311 of SEQ ID NO: 915775
cugucuuaccaugagacua

SEQ ID NO: 1105121 - RNA, 19 nt, Artificial Sequence
  Description of Artificial Sequence: Synthetic oligonucleotide
  Antisense strand to SEQ ID NO: 1105120
uagucucaugguaagacag

SEQ ID NO: 1105122 - RNA, 19 nt, Artificial Sequence
  Description of Artificial Sequence: Synthetic oligonucleotide
  Sense strand starting at position 2471 of SEQ ID NO: 915775
ggauggugauagucggaaa

SEQ ID NO: 1105123 - RNA, 19 nt, Artificial Sequence
  Description of Artificial Sequence: Synthetic oligonucleotide
  Antisense strand to SEQ ID NO: 1105122
uuuccgacuaucaccaucc

SEQ ID NO: 1105124 - RNA, 19 nt, Artificial Sequence
  Description of Artificial Sequence: Synthetic oligonucleotide
  Sense strand starting at position 2518 of SEQ ID NO: 915775
ggaggaguccuuggugggu

SEQ ID NO: 1105125 - RNA, 19 nt, Artificial Sequence
  Description of Artificial Sequence: Synthetic oligonucleotide
  Antisense strand to SEQ ID NO: 1105124
acccaccaaggacuccucc

SEQ ID NO: 1105126 - RNA, 19 nt, Artificial Sequence
  Description of Artificial Sequence: Synthetic oligonucleotide
  Sense strand starting at position 2745 of SEQ ID NO: 915775
gccugugaugcauagaaca

SEQ ID NO: 1105127 - RNA, 19 nt, Artificial Sequence
  Description of Artificial Sequence: Synthetic oligonucleotide
  Antisense strand to SEQ ID NO: 1105126
uguucuaugcaucacaggc

SEQ ID NO: 1105128 - RNA, 19 nt, Artificial Sequence
  Description of Artificial Sequence: Synthetic oligonucleotide
  Sense strand starting at position 2766 of SEQ ID NO: 915775
ucccuuuacugacuggaaa

SEQ ID NO: 1105129 - RNA, 19 nt, Artificial Sequence
  Description of Artificial Sequence: Synthetic oligonucleotide
  Antisense strand to SEQ ID NO: 1105128
uuuccagucaguaaaggga

SEQ ID NO: 1105130 - RNA, 19 nt, Artificial Sequence
  Description of Artificial Sequence: Synthetic oligonucleotide
  Sense strand starting at position 2767 of SEQ ID NO: 915775
cccuuuacugacuggaaau

SEQ ID NO: 1105131 - RNA, 19 nt, Artificial Sequence
  Description of Artificial Sequence: Synthetic oligonucleotide
  Antisense strand to SEQ ID NO: 1105130
auuuccagucaguaaaggg

SEQ ID NO: 1105132 - RNA, 19 nt, Artificial Sequence
  Description of Artificial Sequence: Synthetic oligonucleotide
  Sense strand starting at position 2813 of SEQ ID NO: 915775
gcacaccagugaucucauu

SEQ ID NO: 1105133 - RNA, 19 nt, Artificial Sequence
  Description of Artificial Sequence: Synthetic oligonucleotide
  Antisense strand to SEQ ID NO: 1105132
aaugagaucacuggugugc

SEQ ID NO: 1105134 - RNA, 19 nt, Artificial Sequence
  Description of Artificial Sequence: Synthetic oligonucleotide
  Sense strand starting at position 2869 of SEQ ID NO: 915775
gcgguugacaggugaggaa

SEQ ID NO: 1105135 - RNA, 19 nt, Artificial Sequence
  Description of Artificial Sequence: Synthetic oligonucleotide
  Antisense strand to SEQ ID NO: 1105134
uuccucaccugucaaccgc

SEQ ID NO: 1105136 - RNA, 19 nt, Artificial Sequence
  Description of Artificial Sequence: Synthetic oligonucleotide
  Sense strand starting at position 3099 of SEQ ID NO: 915775
ccuauaguacugugaggau

SEQ ID NO: 1105137 - RNA, 19 nt, Artificial Sequence
  Description of Artificial Sequence: Synthetic oligonucleotide
  Antisense strand to SEQ ID NO: 1105136
auccucacaguacuauagg

SEQ ID NO: 1105138 - RNA, 19 nt, Artificial Sequence
  Description of Artificial Sequence: Synthetic oligonucleotide
  Sense strand starting at position 3122 of SEQ ID NO: 915775
ugagauggauuugaaagca

SEQ ID NO: 1105139 - RNA, 19 nt, Artificial Sequence
  Description of Artificial Sequence: Synthetic oligonucleotide
  Antisense strand to SEQ ID NO: 1105138
ugcuuucaaauccaucuca

SEQ ID NO: 1105140 - RNA, 19 nt, Artificial Sequence
  Description of Artificial Sequence: Synthetic oligonucleotide
  Sense strand starting at position 3130 of SEQ ID NO: 915775
auuugaaagcacgguguuu

SEQ ID NO: 1105141 - RNA, 19 nt, Artificial Sequence
  Description of Artificial Sequence: Synthetic oligonucleotide
  Antisense strand to SEQ ID NO: 1105140
aaacaccgugcuuucaaau

SEQ ID NO: 1105142 - RNA, 19 nt, Artificial Sequence
  Description of Artificial Sequence: Synthetic oligonucleotide
  Sense strand starting at position 3135 of SEQ ID NO: 915775
aaagcacgguguuuauaaa

SEQ ID NO: 1105143 - RNA, 19 nt, Artificial Sequence
  Description of Artificial Sequence: Synthetic oligonucleotide
  Antisense strand to SEQ ID NO: 1105142
uuuauaaacaccgugcuuu

SEQ ID NO: 1105144 - RNA, 19 nt, Artificial Sequence
  Description of Artificial Sequence: Synthetic oligonucleotide
  Sense strand starting at position 3136 of SEQ ID NO: 915775
aagcacgguguuuauaaau

SEQ ID NO: 1105145 - RNA, 19 nt, Artificial Sequence
  Description of Artificial Sequence: Synthetic oligonucleotide
  Antisense strand to SEQ ID NO: 1105144
auuuauaaacaccgugcuu

SEQ ID NO: 1105146 - RNA, 19 nt, Artificial Sequence
  Description of Artificial Sequence: Synthetic oligonucleotide
  Sense strand starting at position 3150 of SEQ ID NO: 915775
uaaauuacuguuuggagga

SEQ ID NO: 1105147 - RNA, 19 nt, Artificial Sequence
  Description of Artificial Sequence: Synthetic oligonucleotide
  Antisense strand to SEQ ID NO: 1105146
uccuccaaacaguaauuua

SEQ ID NO: 1105148 - RNA, 19 nt, Artificial Sequence
  Description of Artificial Sequence: Synthetic oligonucleotide
  Sense strand starting at position 3177 of SEQ ID NO: 915775
aagagagcgguuugaaaug

SEQ ID NO: 1105149 - RNA, 19 nt, Artificial Sequence
  Description of Artificial Sequence: Synthetic oligonucleotide
  Antisense strand to SEQ ID NO: 1105148
cauuucaaaccgcucucuu

SEQ ID NO: 1105150 - RNA, 19 nt, Artificial Sequence
  Description of Artificial Sequence: Synthetic oligonucleotide
  Sense strand starting at position 3296 of SEQ ID NO: 915775
ggaggucuacgccagauga

SEQ ID NO: 1105151 - RNA, 19 nt, Artificial Sequence
  Description of Artificial Sequence: Synthetic oligonucleotide
  Antisense strand to SEQ ID NO: 1105150
ucaucuggcguagaccucc

SEQ ID NO: 1105152 - RNA, 19 nt, Artificial Sequence
  Description of Artificial Sequence: Synthetic oligonucleotide
  Sense strand starting at position 3298 of SEQ ID NO: 915775
aggucuacgccagaugaaa

SEQ ID NO: 1105153 - RNA, 19 nt, Artificial Sequence
  Description of Artificial Sequence: Synthetic oligonucleotide
  Antisense strand to SEQ ID NO: 1105152
uuucaucuggcguagaccu

SEQ ID NO: 1105154 - RNA, 19 nt, Artificial Sequence
  Description of Artificial Sequence: Synthetic oligonucleotide
  Sense strand starting at position 3300 of SEQ ID NO: 915775
gucuacgccagaugaaaga

SEQ ID NO: 1105155 - RNA, 19 nt, Artificial Sequence
  Description of Artificial Sequence: Synthetic oligonucleotide
  Antisense strand to SEQ ID NO: 1105154
ucuuucaucuggcguagac

SEQ ID NO: 1105156 - RNA, 19 nt, Artificial Sequence
  Description of Artificial Sequence: Synthetic oligonucleotide
  Sense strand starting at position 3439 of SEQ ID NO: 915775
auggguugugaugguaaua

SEQ ID NO: 1105157 - RNA, 19 nt, Artificial Sequence
  Description of Artificial Sequence: Synthetic oligonucleotide
  Antisense strand to SEQ ID NO: 1105156
uauuaccaucacaacccau

SEQ ID NO: 1105158 - RNA, 19 nt, Artificial Sequence
  Description of Artificial Sequence: Synthetic oligonucleotide
  Sense strand starting at position 3467 of SEQ ID NO: 915775
ucggauuucuuagagauau

SEQ ID NO: 1105159 - RNA, 19 nt, Artificial Sequence
  Description of Artificial Sequence: Synthetic oligonucleotide
  Antisense strand to SEQ ID NO: 1105158
auaucucuaagaaauccga

SEQ ID NO: 1105160 - RNA, 19 nt, Artificial Sequence
  Description of Artificial Sequence: Synthetic oligonucleotide
  Sense strand starting at position 3707 of SEQ ID NO: 915775
aguggaaacucuccuugca

SEQ ID NO: 1105161 - RNA, 19 nt, Artificial Sequence
  Description of Artificial Sequence: Synthetic oligonucleotide
  Antisense strand to SEQ ID NO: 1105160
ugcaaggagaguuuccacu

SEQ ID NO: 1105162 - RNA, 19 nt, Artificial Sequence
  Description of Artificial Sequence: Synthetic oligonucleotide
  Sense strand starting at position 3709 of SEQ ID NO: 915775
uggaaacucuccuugcauu

SEQ ID NO: 1105163 - RNA, 19 nt, Artificial Sequence
  Description of Artificial Sequence: Synthetic oligonucleotide
  Antisense strand to SEQ ID NO: 1105162
aaugcaaggagaguuucca

SEQ ID NO: 1105164 - RNA, 19 nt, Artificial Sequence
  Description of Artificial Sequence: Synthetic oligonucleotide
  Sense strand starting at position 3735 of SEQ ID NO: 915775
aaguaaucaccucggccuu

SEQ ID NO: 1105165 - RNA, 19 nt, Artificial Sequence
  Description of Artificial Sequence: Synthetic oligonucleotide
  Antisense strand to SEQ ID NO: 1105164
aaggccgaggugauuacuu

SEQ ID NO: 1105166 - RNA, 19 nt, Artificial Sequence
  Description of Artificial Sequence: Synthetic oligonucleotide
  Sense strand starting at position 3751 of SEQ ID NO: 915775
cuugucacaucccuuuaga

SEQ ID NO: 1105167 - RNA, 19 nt, Artificial Sequence
  Description of Artificial Sequence: Synthetic oligonucleotide
  Antisense strand to SEQ ID NO: 1105166
ucuaaagggaugugacaag

SEQ ID NO: 1105168 - RNA, 19 nt, Artificial Sequence
  Description of Artificial Sequence: Synthetic oligonucleotide
  Sense strand starting at position 3754 of SEQ ID NO: 915775
gucacaucccuuuagauuc

SEQ ID NO: 1105169 - RNA, 19 nt, Artificial Sequence
  Description of Artificial Sequence: Synthetic oligonucleotide
  Antisense strand to SEQ ID NO: 1105168
gaaucuaaagggaugugac

SEQ ID NO: 1105170 - RNA, 19 nt, Artificial Sequence
  Description of Artificial Sequence: Synthetic oligonucleotide
  Sense strand starting at position 3886 of SEQ ID NO: 915775
ugcuucuguggauauagaa

SEQ ID NO: 1105171 - RNA, 19 nt, Artificial Sequence
  Description of Artificial Sequence: Synthetic oligonucleotide
  Antisense strand to SEQ ID NO: 1105170
uucuauauccacagaagca

SEQ ID NO: 1105172 - RNA, 19 nt, Artificial Sequence
  Description of Artificial Sequence: Synthetic oligonucleotide
  Sense strand starting at position 3954 of SEQ ID NO: 915775
uaaaguuggcugugguaag

SEQ ID NO: 1105173 - RNA, 19 nt, Artificial Sequence
  Description of Artificial Sequence: Synthetic oligonucleotide
  Antisense strand to SEQ ID NO: 1105172
cuuaccacagccaacuuua

SEQ ID NO: 1105174 - RNA, 19 nt, Artificial Sequence
  Description of Artificial Sequence: Synthetic oligonucleotide
  Sense strand starting at position 372 of SEQ ID NO: 915776
uuugaauacgccgaagaua

SEQ ID NO: 1105175 - RNA, 19 nt, Artificial Sequence
  Description of Artificial Sequence: Synthetic oligonucleotide
  Antisense strand to SEQ ID NO: 1105174
uaucuucggcguauucaaa

SEQ ID NO: 1105176 - RNA, 19 nt, Artificial Sequence
  Description of Artificial Sequence: Synthetic oligonucleotide
  Sense strand starting at position 434 of SEQ ID NO: 915776
uggccagugcuggauucua

SEQ ID NO: 1105177 - RNA, 19 nt, Artificial Sequence
  Description of Artificial Sequence: Synthetic oligonucleotide
  Antisense strand to SEQ ID NO: 1105176
uagaauccagcacuggcca

SEQ ID NO: 1105178 - RNA, 19 nt, Artificial Sequence
  Description of Artificial Sequence: Synthetic oligonucleotide
  Sense strand starting at position 442 of SEQ ID NO: 915776
gcuggauucuacccuaaau

SEQ ID NO: 1105179 - RNA, 19 nt, Artificial Sequence
  Description of Artificial Sequence: Synthetic oligonucleotide
  Antisense strand to SEQ ID NO: 1105178
auuuaggguagaauccagc

SEQ ID NO: 1105180 - RNA, 19 nt, Artificial Sequence
  Description of Artificial Sequence: Synthetic oligonucleotide
  Sense strand starting at position 602 of SEQ ID NO: 915776
ugguaauguucuccuaucu

SEQ ID NO: 1105181 - RNA, 19 nt, Artificial Sequence
  Description of Artificial Sequence: Synthetic oligonucleotide
  Antisense strand to SEQ ID NO: 1105180
agauaggagaacauuacca

SEQ ID NO: 1105182 - RNA, 19 nt, Artificial Sequence
  Description of Artificial Sequence: Synthetic oligonucleotide
  Sense strand starting at position 632 of SEQ ID NO: 915776
auuaaugucccauguacua

SEQ ID NO: 1105183 - RNA, 19 nt, Artificial Sequence
  Description of Artificial Sequence: Synthetic oligonucleotide
  Antisense strand to SEQ ID NO: 1105182
uaguacaugggacauuaau

SEQ ID NO: 1105184 - RNA, 19 nt, Artificial Sequence
  Description of Artificial Sequence: Synthetic oligonucleotide
  Sense strand starting at position 722 of SEQ ID NO: 915776
agucguaacaguuaagucu

SEQ ID NO: 1105185 - RNA, 19 nt, Artificial Sequence
  Description of Artificial Sequence: Synthetic oligonucleotide
  Antisense strand to SEQ ID NO: 1105184
agacuuaacuguuacgacu

SEQ ID NO: 1105186 - RNA, 19 nt, Artificial Sequence
  Description of Artificial Sequence: Synthetic oligonucleotide
  Sense strand starting at position 842 of SEQ ID NO: 915776
auaggcaacuguuccagaa

SEQ ID NO: 1105187 - RNA, 19 nt, Artificial Sequence
  Description of Artificial Sequence: Synthetic oligonucleotide
  Antisense strand to SEQ ID NO: 1105186
uucuggaacaguugccuau

SEQ ID NO: 1105188 - RNA, 19 nt, Artificial Sequence
  Description of Artificial Sequence: Synthetic oligonucleotide
  Sense strand starting at position 846 of SEQ ID NO: 915776
gcaacuguuccagaauguu

SEQ ID NO: 1105189 - RNA, 19 nt, Artificial Sequence
  Description of Artificial Sequence: Synthetic oligonucleotide
  Antisense strand to SEQ ID NO: 1105188
aacauucuggaacaguugc

SEQ ID NO: 1105190 - RNA, 19 nt, Artificial Sequence
  Description of Artificial Sequence: Synthetic oligonucleotide
  Sense strand starting at position 886 of SEQ ID NO: 915776
ggcuccacacguuaaacaa

SEQ ID NO: 1105191 - RNA, 19 nt, Artificial Sequence
  Description of Artificial Sequence: Synthetic oligonucleotide
  Antisense strand to SEQ ID NO: 1105190
uuguuuaacguguggagcc

SEQ ID NO: 1105192 - RNA, 19 nt, Artificial Sequence
  Description of Artificial Sequence: Synthetic oligonucleotide
  Sense strand starting at position 2142 of SEQ ID NO: 915776
gcccucuuccagggaacuu

SEQ ID NO: 1105193 - RNA, 19 nt, Artificial Sequence
  Description of Artificial Sequence: Synthetic oligonucleotide
  Antisense strand to SEQ ID NO: 1105192
aaguucccuggaagagggc

SEQ ID NO: 1105194 - RNA, 19 nt, Artificial Sequence
  Description of Artificial Sequence: Synthetic oligonucleotide
  Sense strand starting at position 2177 of SEQ ID NO: 915776
caagucugagacugagcua

SEQ ID NO: 1105195 - RNA, 19 nt, Artificial Sequence
  Description of Artificial Sequence: Synthetic oligonucleotide
  Antisense strand to SEQ ID NO: 1105194
uagcucagucucagacuug

SEQ ID NO: 1105196 - RNA, 19 nt, Artificial Sequence
  Description of Artificial Sequence: Synthetic oligonucleotide
  Sense strand starting at position 2193 of SEQ ID NO: 915776
cuagccuuccaagaguaga

SEQ ID NO: 1105197 - RNA, 19 nt, Artificial Sequence
  Description of Artificial Sequence: Synthetic oligonucleotide
  Antisense strand to SEQ ID NO: 1105196
ucuacucuuggaaggcuag

SEQ ID NO: 1105198 - RNA, 19 nt, Artificial Sequence
  Description of Artificial Sequence: Synthetic oligonucleotide
  Sense strand starting at position 2231 of SEQ ID NO: 915776
ugugaucuccguuaacaag

SEQ ID NO: 1105199 - RNA, 19 nt, Artificial Sequence
  Description of Artificial Sequence: Synthetic oligonucleotide
  Antisense strand to SEQ ID NO: 1105198
cuuguuaacggagaucaca

SEQ ID NO: 1105200 - RNA, 19 nt, Artificial Sequence
  Description of Artificial Sequence: Synthetic oligonucleotide
  Sense strand starting at position 2263 of SEQ ID NO: 915776
uuuaaucuucucuaguagu

SEQ ID NO: 1105201 - RNA, 19 nt, Artificial Sequence
  Description of Artificial Sequence: Synthetic oligonucleotide
  Antisense strand to SEQ ID NO: 1105200
acuacuagagaagauuaaa

SEQ ID NO: 1105202 - RNA, 19 nt, Artificial Sequence
  Description of Artificial Sequence: Synthetic oligonucleotide
  Sense strand starting at position 2465 of SEQ ID NO: 915776
acuuguguucuccaaacuu

SEQ ID NO: 1105203 - RNA, 19 nt, Artificial Sequence
  Description of Artificial Sequence: Synthetic oligonucleotide
  Antisense strand to SEQ ID NO: 1105202
aaguuuggagaacacaagu

SEQ ID NO: 1105204 - RNA, 19 nt, Artificial Sequence
  Description of Artificial Sequence: Synthetic oligonucleotide
  Sense strand starting at position 2491 of SEQ ID NO: 915776
uuguaaucccguuaccaaa

SEQ ID NO: 1105205 - RNA, 19 nt, Artificial Sequence
  Description of Artificial Sequence: Synthetic oligonucleotide
  Antisense strand to SEQ ID NO: 1105204
uuugguaacgggauuacaa

SEQ ID NO: 1105206 - RNA, 19 nt, Artificial Sequence
  Description of Artificial Sequence: Synthetic oligonucleotide
  Sense strand starting at position 2691 of SEQ ID NO: 915776
caauaugauugacuagguu

SEQ ID NO: 1105207 - RNA, 19 nt, Artificial Sequence
  Description of Artificial Sequence: Synthetic oligonucleotide
  Antisense strand to SEQ ID NO: 1105206
aaccuagucaaucauauug

SEQ ID NO: 1105208 - RNA, 19 nt, Artificial Sequence
  Description of Artificial Sequence: Synthetic oligonucleotide
  Sense strand starting at position 2726 of SEQ ID NO: 915776
ucuuuaauacuucgugaaa

SEQ ID NO: 1105209 - RNA, 19 nt, Artificial Sequence
  Description of Artificial Sequence: Synthetic oligonucleotide
  Antisense strand to SEQ ID NO: 1105208
uuucacgaaguauuaaaga

SEQ ID NO: 1105210 - RNA, 19 nt, Artificial Sequence
  Description of Artificial Sequence: Synthetic oligonucleotide
  Sense strand starting at position 2727 of SEQ ID NO: 915776
cuuuaauacuucgugaaau

SEQ ID NO: 1105211 - RNA, 19 nt, Artificial Sequence
  Description of Artificial Sequence: Synthetic oligonucleotide
  Antisense strand to SEQ ID NO: 1105210
auuucacgaaguauuaaag

SEQ ID NO: 1105212 - RNA, 19 nt, Artificial Sequence
  Description of Artificial Sequence: Synthetic oligonucleotide
  Sense strand starting at position 2729 of SEQ ID NO: 915776
uuaauacuucgugaaauag

SEQ ID NO: 1105213 - RNA, 19 nt, Artificial Sequence
  Description of Artificial Sequence: Synthetic oligonucleotide
  Antisense strand to SEQ ID NO: 1105212
cuauuucacgaaguauuaa

SEQ ID NO: 1105214 - RNA, 19 nt, Artificial Sequence
  Description of Artificial Sequence: Synthetic oligonucleotide
  Sense strand starting at position 2760 of SEQ ID NO: 915776
cugauugaacgucagguua

SEQ ID NO: 1105215 - RNA, 19 nt, Artificial Sequence
  Description of Artificial Sequence: Synthetic oligonucleotide
  Antisense strand to SEQ ID NO: 1105214
uaaccugacguucaaucag

SEQ ID NO: 1105216 - RNA, 19 nt, Artificial Sequence
  Description of Artificial Sequence: Synthetic oligonucleotide
  Sense strand starting at position 2852 of SEQ ID NO: 915776
ggaaguacaucuuuggcca

SEQ ID NO: 1105217 - RNA, 19 nt, Artificial Sequence
  Description of Artificial Sequence: Synthetic oligonucleotide
  Antisense strand to SEQ ID NO: 1105216
uggccaaagauguacuucc

SEQ ID NO: 1105218 - RNA, 19 nt, Artificial Sequence
  Description of Artificial Sequence: Synthetic oligonucleotide
  Sense strand starting at position 2876 of SEQ ID NO: 915776
ccuaaugcauguuuagaac

SEQ ID NO: 1105219 - RNA, 19 nt, Artificial Sequence
  Description of Artificial Sequence: Synthetic oligonucleotide
  Antisense strand to SEQ ID NO: 1105218
guucuaaacaugcauuagg

SEQ ID NO: 1105220 - RNA, 19 nt, Artificial Sequence
  Description of Artificial Sequence: Synthetic oligonucleotide
  Sense strand starting at position 2992 of SEQ ID NO: 915776
uccaucuuuccugauguca

SEQ ID NO: 1105221 - RNA, 19 nt, Artificial Sequence
  Description of Artificial Sequence: Synthetic oligonucleotide
  Antisense strand to SEQ ID NO: 1105220
ugacaucaggaaagaugga

SEQ ID NO: 1105222 - RNA, 19 nt, Artificial Sequence
  Description of Artificial Sequence: Synthetic oligonucleotide
  Sense strand starting at position 3147 of SEQ ID NO: 915776
uagaucuugucuuuaaggu

SEQ ID NO: 1105223 - RNA, 19 nt, Artificial Sequence
  Description of Artificial Sequence: Synthetic oligonucleotide
  Antisense strand to SEQ ID NO: 1105222
accuuaaagacaagaucua

SEQ ID NO: 1105224 - RNA, 19 nt, Artificial Sequence
  Description of Artificial Sequence: Synthetic oligonucleotide
  Sense strand starting at position 3148 of SEQ ID NO: 915776
agaucuugucuuuaagguu

SEQ ID NO: 1105225 - RNA, 19 nt, Artificial Sequence
  Description of Artificial Sequence: Synthetic oligonucleotide
  Antisense strand to SEQ ID NO: 1105224
aaccuuaaagacaagaucu

SEQ ID NO: 1105226 - RNA, 19 nt, Artificial Sequence
  Description of Artificial Sequence: Synthetic oligonucleotide
  Sense strand starting at position 3174 of SEQ ID NO: 915776
uuugauuaucauggauuga

SEQ ID NO: 1105227 - RNA, 19 nt, Artificial Sequence
  Description of Artificial Sequence: Synthetic oligonucleotide
  Antisense strand to SEQ ID NO: 1105226
ucaauccaugauaaucaaa

SEQ ID NO: 1105228 - RNA, 19 nt, Artificial Sequence
  Description of Artificial Sequence: Synthetic oligonucleotide
  Sense strand starting at position 3223 of SEQ ID NO: 915776
guauuaagauuaguugucu

SEQ ID NO: 1105229 - RNA, 19 nt, Artificial Sequence
  Description of Artificial Sequence: Synthetic oligonucleotide
  Antisense strand to SEQ ID NO: 1105228
agacaacuaaucuuaauac

SEQ ID NO: 1105230 - RNA, 19 nt, Artificial Sequence
  Description of Artificial Sequence: Synthetic oligonucleotide
  Sense strand starting at position 3227 of SEQ ID NO: 915776
uaagauuaguugucuugau

SEQ ID NO: 1105231 - RNA, 19 nt, Artificial Sequence
  Description of Artificial Sequence: Synthetic oligonucleotide
  Antisense strand to SEQ ID NO: 1105230
aucaagacaacuaaucuua

SEQ ID NO: 1105232 - RNA, 19 nt, Artificial Sequence
  Description of Artificial Sequence: Synthetic oligonucleotide
  Sense strand starting at position 3228 of SEQ ID NO: 915776
aagauuaguugucuugauu

SEQ ID NO: 1105233 - RNA, 19 nt, Artificial Sequence
  Description of Artificial Sequence: Synthetic oligonucleotide
  Antisense strand to SEQ ID NO: 1105232
aaucaagacaacuaaucuu

SEQ ID NO: 1105234 - RNA, 19 nt, Artificial Sequence
  Description of Artificial Sequence: Synthetic oligonucleotide
  Sense strand starting at position 3234 of SEQ ID NO: 915776
aguugucuugauuauugaa

SEQ ID NO: 1105235 - RNA, 19 nt, Artificial Sequence
  Description of Artificial Sequence: Synthetic oligonucleotide
  Antisense strand to SEQ ID NO: 1105234
uucaauaaucaagacaacu

SEQ ID NO: 1105236 - RNA, 19 nt, Artificial Sequence
  Description of Artificial Sequence: Synthetic oligonucleotide
  Sense strand starting at position 3461 of SEQ ID NO: 915776
uagugcucacccuagaagu

SEQ ID NO: 1105237 - RNA, 19 nt, Artificial Sequence
  Description of Artificial Sequence: Synthetic oligonucleotide
  Antisense strand to SEQ ID NO: 1105236
acuucuagggugagcacua

SEQ ID NO: 1105238 - RNA, 19 nt, Artificial Sequence
  Description of Artificial Sequence: Synthetic oligonucleotide
  Sense strand starting at position 3463 of SEQ ID NO: 915776
gugcucacccuagaaguaa

SEQ ID NO: 1105239 - RNA, 19 nt, Artificial Sequence
  Description of Artificial Sequence: Synthetic oligonucleotide
  Antisense strand to SEQ ID NO: 1105238
uuacuucuagggugagcac

SEQ ID NO: 1105240 - RNA, 19 nt, Artificial Sequence
  Description of Artificial Sequence: Synthetic oligonucleotide
  Sense strand starting at position 3643 of SEQ ID NO: 915776
uggaauaagugacaacaua

SEQ ID NO: 1105241 - RNA, 19 nt, Artificial Sequence
  Description of Artificial Sequence: Synthetic oligonucleotide
  Antisense strand to SEQ ID NO: 1105240
uauguugucacuuauucca

SEQ ID NO: 1105242 - RNA, 19 nt, Artificial Sequence
  Description of Artificial Sequence: Synthetic oligonucleotide
  Sense strand starting at position 3732 of SEQ ID NO: 915776
agaugcugguguuuauaua

SEQ ID NO: 1105243 - RNA, 19 nt, Artificial Sequence
  Description of Artificial Sequence: Synthetic oligonucleotide
  Antisense strand to SEQ ID NO: 1105242
uauauaaacaccagcaucu

SEQ ID NO: 1105244 - RNA, 19 nt, Artificial Sequence
  Description of Artificial Sequence: Synthetic oligonucleotide
  Sense strand starting at position 3733 of SEQ ID NO: 915776
gaugcugguguuuauauau

SEQ ID NO: 1105245 - RNA, 19 nt, Artificial Sequence
  Description of Artificial Sequence: Synthetic oligonucleotide
  Antisense strand to SEQ ID NO: 1105244
auauauaaacaccagcauc

SEQ ID NO: 1105246 - RNA, 19 nt, Artificial Sequence
  Description of Artificial Sequence: Synthetic oligonucleotide
  Sense strand starting at position 3866 of SEQ ID NO: 915776
ggccacuggcuugacuauu

SEQ ID NO: 1105247 - RNA, 19 nt, Artificial Sequence
  Description of Artificial Sequence: Synthetic oligonucleotide
  Antisense strand to SEQ ID NO: 1105246
aauagucaagccaguggcc

SEQ ID NO: 1105248 - RNA, 19 nt, Artificial Sequence
  Description of Artificial Sequence: Synthetic oligonucleotide
  Sense strand starting at position 3893 of SEQ ID NO: 915776
gccugauaagaugguaagu

SEQ ID NO: 1105249 - RNA, 19 nt, Artificial Sequence
  Description of Artificial Sequence: Synthetic oligonucleotide
  Antisense strand to SEQ ID NO: 1105248
acuuaccaucuuaucaggc

SEQ ID NO: 1105250 - RNA, 19 nt, Artificial Sequence
  Description of Artificial Sequence: Synthetic oligonucleotide
  Sense strand starting at position 3928 of SEQ ID NO: 915776
uggaauaaguauguggauu

SEQ ID NO: 1105251 - RNA, 19 nt, Artificial Sequence
  Description of Artificial Sequence: Synthetic oligonucleotide
  Antisense strand to SEQ ID NO: 1105250
aauccacauacuuauucca

SEQ ID NO: 1105252 - RNA, 19 nt, Artificial Sequence
  Description of Artificial Sequence: Synthetic oligonucleotide
  Sense strand starting at position 3929 of SEQ ID NO: 915776
ggaauaaguauguggauuc

SEQ ID NO: 1105253 - RNA, 19 nt, Artificial Sequence
  Description of Artificial Sequence: Synthetic oligonucleotide
  Antisense strand to SEQ ID NO: 1105252
gaauccacauacuuauucc

SEQ ID NO: 1105254 - RNA, 19 nt, Artificial Sequence
  Description of Artificial Sequence: Synthetic oligonucleotide
  Sense strand starting at position 194 of SEQ ID NO: 915777
uucgguaguagucacacaa

SEQ ID NO: 1105255 - RNA, 19 nt, Artificial Sequence
  Description of Artificial Sequence: Synthetic oligonucleotide
  Antisense strand to SEQ ID NO: 1105254
uugugugacuacuaccgaa

SEQ ID NO: 1105256 - RNA, 19 nt, Artificial Sequence
  Description of Artificial Sequence: Synthetic oligonucleotide
  Sense strand starting at position 548 of SEQ ID NO: 915777
acuggaaggcucuggacaa

SEQ ID NO: 1105257 - RNA, 19 nt, Artificial Sequence
  Description of Artificial Sequence: Synthetic oligonucleotide
  Antisense strand to SEQ ID NO: 1105256
uuguccagagccuuccagu

SEQ ID NO: 1105258 - RNA, 19 nt, Artificial Sequence
  Description of Artificial Sequence: Synthetic oligonucleotide
  Sense strand starting at position 677 of SEQ ID NO: 915777
guaaguucucaguaaauga

SEQ ID NO: 1105259 - RNA, 19 nt, Artificial Sequence
  Description of Artificial Sequence: Synthetic oligonucleotide
  Antisense strand to SEQ ID NO: 1105258
ucauuuacugagaacuuac

SEQ ID NO: 1105260 - RNA, 19 nt, Artificial Sequence
  Description of Artificial Sequence: Synthetic oligonucleotide
  Sense strand starting at position 681 of SEQ ID NO: 915777
guucucaguaaaugacagu

SEQ ID NO: 1105261 - RNA, 19 nt, Artificial Sequence
  Description of Artificial Sequence: Synthetic oligonucleotide
  Antisense strand to SEQ ID NO: 1105260
acugucauuuacugagaac

SEQ ID NO: 1105262 - RNA, 19 nt, Artificial Sequence
  Description of Artificial Sequence: Synthetic oligonucleotide
  Sense strand starting at position 692 of SEQ ID NO: 915777
augacaguuucucuagauc

SEQ ID NO: 1105263 - RNA, 19 nt, Artificial Sequence
  Description of Artificial Sequence: Synthetic oligonucleotide
  Antisense strand to SEQ ID NO: 1105262
gaucuagagaaacugucau

SEQ ID NO: 1105264 - RNA, 19 nt, Artificial Sequence
  Description of Artificial Sequence: Synthetic oligonucleotide
  Sense strand starting at position 712 of SEQ ID NO: 915777
ucuucuuggcaggaggaau

SEQ ID NO: 1105265 - RNA, 19 nt, Artificial Sequence
  Description of Artificial Sequence: Synthetic oligonucleotide
  Antisense strand to SEQ ID NO: 1105264
auuccuccugccaagaaga

SEQ ID NO: 1105266 - RNA, 19 nt, Artificial Sequence
  Description of Artificial Sequence: Synthetic oligonucleotide
  Sense strand starting at position 741 of SEQ ID NO: 915777
ggugaaagguauucuuuag

SEQ ID NO: 1105267 - RNA, 19 nt, Artificial Sequence
  Description of Artificial Sequence: Synthetic oligonucleotide
  Antisense strand to SEQ ID NO: 1105266
cuaaagaauaccuuucacc

SEQ ID NO: 1105268 - RNA, 19 nt, Artificial Sequence
  Description of Artificial Sequence: Synthetic oligonucleotide
  Sense strand starting at position 745 of SEQ ID NO: 915777
aaagguauucuuuaggucu

SEQ ID NO: 1105269 - RNA, 19 nt, Artificial Sequence
  Description of Artificial Sequence: Synthetic oligonucleotide
  Antisense strand to SEQ ID NO: 1105268
agaccuaaagaauaccuuu

SEQ ID NO: 1105270 - RNA, 19 nt, Artificial Sequence
  Description of Artificial Sequence: Synthetic oligonucleotide
  Sense strand starting at position 769 of SEQ ID NO: 915777
augcuaagauuccugcaaa

SEQ ID NO: 1105271 - RNA, 19 nt, Artificial Sequence
  Description of Artificial Sequence: Synthetic oligonucleotide
  Antisense strand to SEQ ID NO: 1105270
uuugcaggaaucuuagcau

SEQ ID NO: 1105272 - RNA, 19 nt, Artificial Sequence
  Description of Artificial Sequence: Synthetic oligonucleotide
  Sense strand starting at position 839 of SEQ ID NO: 915777
ucuacagauaugugaguga

SEQ ID NO: 1105273 - RNA, 19 nt, Artificial Sequence
  Description of Artificial Sequence: Synthetic oligonucleotide
  Antisense strand to SEQ ID NO: 1105272
ucacucacauaucuguaga

SEQ ID NO: 1105274 - RNA, 19 nt, Artificial Sequence
  Description of Artificial Sequence: Synthetic oligonucleotide
  Sense strand starting at position 842 of SEQ ID NO: 915777
acagauaugugagugaaac

SEQ ID NO: 1105275 - RNA, 19 nt, Artificial Sequence
  Description of Artificial Sequence: Synthetic oligonucleotide
  Antisense strand to SEQ ID NO: 1105274
guuucacucacauaucugu

SEQ ID NO: 1105276 - RNA, 19 nt, Artificial Sequence
  Description of Artificial Sequence: Synthetic oligonucleotide
  Sense strand starting at position 843 of SEQ ID NO: 915777
cagauaugugagugaaaca

SEQ ID NO: 1105277 - RNA, 19 nt, Artificial Sequence
  Description of Artificial Sequence: Synthetic oligonucleotide
  Antisense strand to SEQ ID NO: 1105276
uguuucacucacauaucug

SEQ ID NO: 1105278 - RNA, 19 nt, Artificial Sequence
  Description of Artificial Sequence: Synthetic oligonucleotide
  Sense strand starting at position 868 of SEQ ID NO: 915777
uuugucacaucuccaaagu

SEQ ID NO: 1105279 - RNA, 19 nt, Artificial Sequence
  Description of Artificial Sequence: Synthetic oligonucleotide
  Antisense strand to SEQ ID NO: 1105278
acuuuggagaugugacaaa

SEQ ID NO: 1105280 - RNA, 19 nt, Artificial Sequence
  Description of Artificial Sequence: Synthetic oligonucleotide
  Sense strand starting at position 1052 of SEQ ID NO: 915777
uuccuugggacucggagaa

SEQ ID NO: 1105281 - RNA, 19 nt, Artificial Sequence
  Description of Artificial Sequence: Synthetic oligonucleotide
  Antisense strand to SEQ ID NO: 1105280
uucuccgagucccaaggaa

SEQ ID NO: 1105282 - RNA, 19 nt, Artificial Sequence
  Description of Artificial Sequence: Synthetic oligonucleotide
  Sense strand starting at position 1112 of SEQ ID NO: 915777
gaggccgaauacuuaauaa

SEQ ID NO: 1105283 - RNA, 19 nt, Artificial Sequence
  Description of Artificial Sequence: Synthetic oligonucleotide
  Antisense strand to SEQ ID NO: 1105282
uuauuaaguauucggccuc

SEQ ID NO: 1105284 - RNA, 19 nt, Artificial Sequence
  Description of Artificial Sequence: Synthetic oligonucleotide
  Sense strand starting at position 1177 of SEQ ID NO: 915777
gggcucuugcacgaagagu

SEQ ID NO: 1105285 - RNA, 19 nt, Artificial Sequence
  Description of Artificial Sequence: Synthetic oligonucleotide
  Antisense strand to SEQ ID NO: 1105284
acucuucgugcaagagccc

SEQ ID NO: 1105286 - RNA, 19 nt, Artificial Sequence
  Description of Artificial Sequence: Synthetic oligonucleotide
  Sense strand starting at position 1399 of SEQ ID NO: 915777
cugcuugucccuuaacaag

SEQ ID NO: 1105287 - RNA, 19 nt, Artificial Sequence
  Description of Artificial Sequence: Synthetic oligonucleotide
  Antisense strand to SEQ ID NO: 1105286
cuuguuaagggacaagcag

SEQ ID NO: 1105288 - RNA, 19 nt, Artificial Sequence
  Description of Artificial Sequence: Synthetic oligonucleotide
  Sense strand starting at position 2055 of SEQ ID NO: 915777
gguagaaggucuguccauc

SEQ ID NO: 1105289 - RNA, 19 nt, Artificial Sequence
  Description of Artificial Sequence: Synthetic oligonucleotide
  Antisense strand to SEQ ID NO: 1105288
gauggacagaccuucuacc

SEQ ID NO: 1105290 - RNA, 19 nt, Artificial Sequence
  Description of Artificial Sequence: Synthetic oligonucleotide
  Sense strand starting at position 2115 of SEQ ID NO: 915777
gccucaauugcgucuguca

SEQ ID NO: 1105291 - RNA, 19 nt, Artificial Sequence
  Description of Artificial Sequence: Synthetic oligonucleotide
  Antisense strand to SEQ ID NO: 1105290
ugacagacgcaauugaggc

SEQ ID NO: 1105292 - RNA, 19 nt, Artificial Sequence
  Description of Artificial Sequence: Synthetic oligonucleotide
  Sense strand starting at position 2247 of SEQ ID NO: 915777
ugucaauugucaguaaagg

SEQ ID NO: 1105293 - RNA, 19 nt, Artificial Sequence
  Description of Artificial Sequence: Synthetic oligonucleotide
  Antisense strand to SEQ ID NO: 1105292
ccuuuacugacaauugaca

SEQ ID NO: 1105294 - RNA, 19 nt, Artificial Sequence
  Description of Artificial Sequence: Synthetic oligonucleotide
  Sense strand starting at position 2330 of SEQ ID NO: 915777
gcgggagagucaccugauu

SEQ ID NO: 1105295 - RNA, 19 nt, Artificial Sequence
  Description of Artificial Sequence: Synthetic oligonucleotide
  Antisense strand to SEQ ID NO: 1105294
aaucaggugacucucccgc

SEQ ID NO: 1105296 - RNA, 19 nt, Artificial Sequence
  Description of Artificial Sequence: Synthetic oligonucleotide
  Sense strand starting at position 2332 of SEQ ID NO: 915777
gggagagucaccugauuag

SEQ ID NO: 1105297 - RNA, 19 nt, Artificial Sequence
  Description of Artificial Sequence: Synthetic oligonucleotide
  Antisense strand to SEQ ID NO: 1105296
cuaaucaggugacucuccc

SEQ ID NO: 1105298 - RNA, 19 nt, Artificial Sequence
  Description of Artificial Sequence: Synthetic oligonucleotide
  Sense strand starting at position 2514 of SEQ ID NO: 915777
aaaggaaugcuuuaugguu

SEQ ID NO: 1105299 - RNA, 19 nt, Artificial Sequence
  Description of Artificial Sequence: Synthetic oligonucleotide
  Antisense strand to SEQ ID NO: 1105298
aaccauaaagcauuccuuu

SEQ ID NO: 1105300 - RNA, 19 nt, Artificial Sequence
  Description of Artificial Sequence: Synthetic oligonucleotide
  Sense strand starting at position 2648 of SEQ ID NO: 915777
cuaguaagcugagcuacaa

SEQ ID NO: 1105301 - RNA, 19 nt, Artificial Sequence
  Description of Artificial Sequence: Synthetic oligonucleotide
  Antisense strand to SEQ ID NO: 1105300
uuguagcucagcuuacuag

SEQ ID NO: 1105302 - RNA, 19 nt, Artificial Sequence
  Description of Artificial Sequence: Synthetic oligonucleotide
  Sense strand starting at position 2770 of SEQ ID NO: 915777
aggagucccuucuuccaaa

SEQ ID NO: 1105303 - RNA, 19 nt, Artificial Sequence
  Description of Artificial Sequence: Synthetic oligonucleotide
  Antisense strand to SEQ ID NO: 1105302
uuuggaagaagggacuccu

SEQ ID NO: 1105304 - RNA, 19 nt, Artificial Sequence
  Description of Artificial Sequence: Synthetic oligonucleotide
  Sense strand starting at position 2840 of SEQ ID NO: 915777
gugggucuggauuauucua

SEQ ID NO: 1105305 - RNA, 19 nt, Artificial Sequence
  Description of Artificial Sequence: Synthetic oligonucleotide
  Antisense strand to SEQ ID NO: 1105304
uagaauaauccagacccac

SEQ ID NO: 1105306 - RNA, 19 nt, Artificial Sequence
  Description of Artificial Sequence: Synthetic oligonucleotide
  Sense strand starting at position 2842 of SEQ ID NO: 915777
gggucuggauuauucuauu

SEQ ID NO: 1105307 - RNA, 19 nt, Artificial Sequence
  Description of Artificial Sequence: Synthetic oligonucleotide
  Antisense strand to SEQ ID NO: 1105306
aauagaauaauccagaccc

SEQ ID NO: 1105308 - RNA, 19 nt, Artificial Sequence
  Description of Artificial Sequence: Synthetic oligonucleotide
  Sense strand starting at position 3228 of SEQ ID NO: 915777
aaaggacuuugucugauuc

SEQ ID NO: 1105309 - RNA, 19 nt, Artificial Sequence
  Description of Artificial Sequence: Synthetic oligonucleotide
  Antisense strand to SEQ ID NO: 1105308
gaaucagacaaaguccuuu

SEQ ID NO: 1105310 - RNA, 19 nt, Artificial Sequence
  Description of Artificial Sequence: Synthetic oligonucleotide
  Sense strand starting at position 3338 of SEQ ID NO: 915777
ugaagacuuccgugaucca

SEQ ID NO: 1105311 - RNA, 19 nt, Artificial Sequence
  Description of Artificial Sequence: Synthetic oligonucleotide
  Antisense strand to SEQ ID NO: 1105310
uggaucacggaagucuuca

SEQ ID NO: 1105312 - RNA, 19 nt, Artificial Sequence
  Description of Artificial Sequence: Synthetic oligonucleotide
  Sense strand starting at position 3339 of SEQ ID NO: 915777
gaagacuuccgugauccac

SEQ ID NO: 1105313 - RNA, 19 nt, Artificial Sequence
  Description of Artificial Sequence: Synthetic oligonucleotide
  Antisense strand to SEQ ID NO: 1105312
guggaucacggaagucuuc

SEQ ID NO: 1105314 - RNA, 19 nt, Artificial Sequence
  Description of Artificial Sequence: Synthetic oligonucleotide
  Sense strand starting at position 3341 of SEQ ID NO: 915777
agacuuccgugauccacaa

SEQ ID NO: 1105315 - RNA, 19 nt, Artificial Sequence
  Description of Artificial Sequence: Synthetic oligonucleotide
  Antisense strand to SEQ ID NO: 1105314
uuguggaucacggaagucu

SEQ ID NO: 1105316 - RNA, 19 nt, Artificial Sequence
  Description of Artificial Sequence: Synthetic oligonucleotide
  Sense strand starting at position 3345 of SEQ ID NO: 915777
uuccgugauccacaaugau

SEQ ID NO: 1105317 - RNA, 19 nt, Artificial Sequence
  Description of Artificial Sequence: Synthetic oligonucleotide
  Antisense strand to SEQ ID NO: 1105316
aucauuguggaucacggaa

SEQ ID NO: 1105318 - RNA, 19 nt, Artificial Sequence
  Description of Artificial Sequence: Synthetic oligonucleotide
  Sense strand starting at position 3359 of SEQ ID NO: 915777
augauagcaucuccagcaa

SEQ ID NO: 1105319 - RNA, 19 nt, Artificial Sequence
  Description of Artificial Sequence: Synthetic oligonucleotide
  Antisense strand to SEQ ID NO: 1105318
uugcuggagaugcuaucau

SEQ ID NO: 1105320 - RNA, 19 nt, Artificial Sequence
  Description of Artificial Sequence: Synthetic oligonucleotide
  Sense strand starting at position 3387 of SEQ ID NO: 915777
uaaugaauagcaugaguca

SEQ ID NO: 1105321 - RNA, 19 nt, Artificial Sequence
  Description of Artificial Sequence: Synthetic oligonucleotide
  Antisense strand to SEQ ID NO: 1105320
ugacucaugcuauucauua

SEQ ID NO: 1105322 - RNA, 19 nt, Artificial Sequence
  Description of Artificial Sequence: Synthetic oligonucleotide
  Sense strand starting at position 3398 of SEQ ID NO: 915777
augagucauucugcaggau

SEQ ID NO: 1105323 - RNA, 19 nt, Artificial Sequence
  Description of Artificial Sequence: Synthetic oligonucleotide
  Antisense strand to SEQ ID NO: 1105322
auccugcagaaugacucau

SEQ ID NO: 1105324 - RNA, 19 nt, Artificial Sequence
  Description of Artificial Sequence: Synthetic oligonucleotide
  Sense strand starting at position 3399 of SEQ ID NO: 915777
ugagucauucugcaggaug

SEQ ID NO: 1105325 - RNA, 19 nt, Artificial Sequence
  Description of Artificial Sequence: Synthetic oligonucleotide
  Antisense strand to SEQ ID NO: 1105324
cauccugcagaaugacuca

SEQ ID NO: 1105326 - RNA, 19 nt, Artificial Sequence
  Description of Artificial Sequence: Synthetic oligonucleotide
  Sense strand starting at position 3474 of SEQ ID NO: 915777
gcagaaagaacauaguguu

SEQ ID NO: 1105327 - RNA, 19 nt, Artificial Sequence
  Description of Artificial Sequence: Synthetic oligonucleotide
  Antisense strand to SEQ ID NO: 1105326
aacacuauguucuuucugc

SEQ ID NO: 1105328 - RNA, 19 nt, Artificial Sequence
  Description of Artificial Sequence: Synthetic oligonucleotide
  Sense strand starting at position 3597 of SEQ ID NO: 915777
uaguaauaggauugcugua

SEQ ID NO: 1105329 - RNA, 19 nt, Artificial Sequence
  Description of Artificial Sequence: Synthetic oligonucleotide
  Antisense strand to SEQ ID NO: 1105328
uacagcaauccuauuacua

SEQ ID NO: 1105330 - RNA, 19 nt, Artificial Sequence
  Description of Artificial Sequence: Synthetic oligonucleotide
  Sense strand starting at position 3609 of SEQ ID NO: 915777
ugcuguagggauuaaagua

SEQ ID NO: 1105331 - RNA, 19 nt, Artificial Sequence
  Description of Artificial Sequence: Synthetic oligonucleotide
  Antisense strand to SEQ ID NO: 1105330
uacuuuaaucccuacagca

SEQ ID NO: 1105332 - RNA, 19 nt, Artificial Sequence
  Description of Artificial Sequence: Synthetic oligonucleotide
  Sense strand starting at position 3859 of SEQ ID NO: 915777
aaaggagucgcuugaucag

SEQ ID NO: 1105333 - RNA, 19 nt, Artificial Sequence
  Description of Artificial Sequence: Synthetic oligonucleotide
  Antisense strand to SEQ ID NO: 1105332
cugaucaagcgacuccuuu

SEQ ID NO: 1105334 - RNA, 19 nt, Artificial Sequence
  Description of Artificial Sequence: Synthetic oligonucleotide
  Sense strand starting at position 155 of SEQ ID NO: 915778
ugguucuacucuuaggaac

SEQ ID NO: 1105335 - RNA, 19 nt, Artificial Sequence
  Description of Artificial Sequence: Synthetic oligonucleotide
  Antisense strand to SEQ ID NO: 1105334
guuccuaagaguagaacca

SEQ ID NO: 1105336 - RNA, 19 nt, Artificial Sequence
  Description of Artificial Sequence: Synthetic oligonucleotide
  Sense strand starting at position 327 of SEQ ID NO: 915778
aggaucugugcucaggaga

SEQ ID NO: 1105337 - RNA, 19 nt, Artificial Sequence
  Description of Artificial Sequence: Synthetic oligonucleotide
  Antisense strand to SEQ ID NO: 1105336
ucuccugagcacagauccu

SEQ ID NO: 1105338 - RNA, 19 nt, Artificial Sequence
  Description of Artificial Sequence: Synthetic oligonucleotide
  Sense strand starting at position 912 of SEQ ID NO: 915778
ccuguuuauccagauccca

SEQ ID NO: 1105339 - RNA, 19 nt, Artificial Sequence
  Description of Artificial Sequence: Synthetic oligonucleotide
  Antisense strand to SEQ ID NO: 1105338
ugggaucuggauaaacagg

SEQ ID NO: 1105340 - RNA, 19 nt, Artificial Sequence
  Description of Artificial Sequence: Synthetic oligonucleotide
  Sense strand starting at position 1195 of SEQ ID NO: 915778
gggcuuugcccuugcauca

SEQ ID NO: 1105341 - RNA, 19 nt, Artificial Sequence
  Description of Artificial Sequence: Synthetic oligonucleotide
  Antisense strand to SEQ ID NO: 1105340
ugaugcaagggcaaagccc

SEQ ID NO: 1105342 - RNA, 19 nt, Artificial Sequence
  Description of Artificial Sequence: Synthetic oligonucleotide
  Sense strand starting at position 1232 of SEQ ID NO: 915778
cugacaucuuuccagauug

SEQ ID NO: 1105343 - RNA, 19 nt, Artificial Sequence
  Description of Artificial Sequence: Synthetic oligonucleotide
  Antisense strand to SEQ ID NO: 1105342
caaucuggaaagaugucag

SEQ ID NO: 1105344 - RNA, 19 nt, Artificial Sequence
  Description of Artificial Sequence: Synthetic oligonucleotide
  Sense strand starting at position 1242 of SEQ ID NO: 915778
uccagauugcucuguuccu

SEQ ID NO: 1105345 - RNA, 19 nt, Artificial Sequence
  Description of Artificial Sequence: Synthetic oligonucleotide
  Antisense strand to SEQ ID NO: 1105344
aggaacagagcaaucugga

SEQ ID NO: 1105346 - RNA, 19 nt, Artificial Sequence
  Description of Artificial Sequence: Synthetic oligonucleotide
  Sense strand starting at position 2294 of SEQ ID NO: 915778
ggacacgagcucugcgaau

SEQ ID NO: 1105347 - RNA, 19 nt, Artificial Sequence
  Description of Artificial Sequence: Synthetic oligonucleotide
  Antisense strand to SEQ ID NO: 1105346
auucgcagagcucgugucc

SEQ ID NO: 1105348 - RNA, 19 nt, Artificial Sequence
  Description of Artificial Sequence: Synthetic oligonucleotide
  Sense strand starting at position 2296 of SEQ ID NO: 915778
acacgagcucugcgaauca

SEQ ID NO: 1105349 - RNA, 19 nt, Artificial Sequence
  Description of Artificial Sequence: Synthetic oligonucleotide
  Antisense strand to SEQ ID NO: 1105348
ugauucgcagagcucgugu

SEQ ID NO: 1105350 - RNA, 19 nt, Artificial Sequence
  Description of Artificial Sequence: Synthetic oligonucleotide
  Sense strand starting at position 2691 of SEQ ID NO: 915778
ccugcaaugggucacaauu

SEQ ID NO: 1105351 - RNA, 19 nt, Artificial Sequence
  Description of Artificial Sequence: Synthetic oligonucleotide
  Antisense strand to SEQ ID NO: 1105350
aauugugacccauugcagg

SEQ ID NO: 1105352 - RNA, 19 nt, Artificial Sequence
  Description of Artificial Sequence: Synthetic oligonucleotide
  Sense strand starting at position 2693 of SEQ ID NO: 915778
ugcaaugggucacaauuaa

SEQ ID NO: 1105353 - RNA, 19 nt, Artificial Sequence
  Description of Artificial Sequence: Synthetic oligonucleotide
  Antisense strand to SEQ ID NO: 1105352
uuaauugugacccauugca

SEQ ID NO: 1105354 - RNA, 19 nt, Artificial Sequence
  Description of Artificial Sequence: Synthetic oligonucleotide
  Sense strand starting at position 2813 of SEQ ID NO: 915778
gucuaacccuuccugugau

SEQ ID NO: 1105355 - RNA, 19 nt, Artificial Sequence
  Description of Artificial Sequence: Synthetic oligonucleotide
  Antisense strand to SEQ ID NO: 1105354
aucacaggaaggguuagac

SEQ ID NO: 1105356 - RNA, 19 nt, Artificial Sequence
  Description of Artificial Sequence: Synthetic oligonucleotide
  Sense strand starting at position 2857 of SEQ ID NO: 915778
uggcuugucuaggguccaa

SEQ ID NO: 1105357 - RNA, 19 nt, Artificial Sequence
  Description of Artificial Sequence: Synthetic oligonucleotide
  Antisense strand to SEQ ID NO: 1105356
uuggacccuagacaagcca

SEQ ID NO: 1105358 - RNA, 19 nt, Artificial Sequence
  Description of Artificial Sequence: Synthetic oligonucleotide
  Sense strand starting at position 2892 of SEQ ID NO: 915778
uggucacuuugagguguga

SEQ ID NO: 1105359 - RNA, 19 nt, Artificial Sequence
  Description of Artificial Sequence: Synthetic oligonucleotide
  Antisense strand to SEQ ID NO: 1105358
ucacaccucaaagugacca

SEQ ID NO: 1105360 - RNA, 19 nt, Artificial Sequence
  Description of Artificial Sequence: Synthetic oligonucleotide
  Sense strand starting at position 2894 of SEQ ID NO: 915778
gucacuuugaggugugaca

SEQ ID NO: 1105361 - RNA, 19 nt, Artificial Sequence
  Description of Artificial Sequence: Synthetic oligonucleotide
  Antisense strand to SEQ ID NO: 1105360
ugucacaccucaaagugac

SEQ ID NO: 1105362 - RNA, 19 nt, Artificial Sequence
  Description of Artificial Sequence: Synthetic oligonucleotide
  Sense strand starting at position 2929 of SEQ ID NO: 915778
gggugcuccucccagaaga

SEQ ID NO: 1105363 - RNA, 19 nt, Artificial Sequence
  Description of Artificial Sequence: Synthetic oligonucleotide
  Antisense strand to SEQ ID NO: 1105362
ucuucugggaggagcaccc

SEQ ID NO: 1105364 - RNA, 19 nt, Artificial Sequence
  Description of Artificial Sequence: Synthetic oligonucleotide
  Sense strand starting at position 3003 of SEQ ID NO: 915778
ggcacuggccuuuagguau

SEQ ID NO: 1105365 - RNA, 19 nt, Artificial Sequence
  Description of Artificial Sequence: Synthetic oligonucleotide
  Antisense strand to SEQ ID NO: 1105364
auaccuaaaggccagugcc

SEQ ID NO: 1105366 - RNA, 19 nt, Artificial Sequence
  Description of Artificial Sequence: Synthetic oligonucleotide
  Sense strand starting at position 3010 of SEQ ID NO: 915778
gccuuuagguaucugcuau

SEQ ID NO: 1105367 - RNA, 19 nt, Artificial Sequence
  Description of Artificial Sequence: Synthetic oligonucleotide
  Antisense strand to SEQ ID NO: 1105366
auagcagauaccuaaaggc

SEQ ID NO: 1105368 - RNA, 19 nt, Artificial Sequence
  Description of Artificial Sequence: Synthetic oligonucleotide
  Sense strand starting at position 3014 of SEQ ID NO: 915778
uuagguaucugcuauagaa

SEQ ID NO: 1105369 - RNA, 19 nt, Artificial Sequence
  Description of Artificial Sequence: Synthetic oligonucleotide
  Antisense strand to SEQ ID NO: 1105368
uucuauagcagauaccuaa

SEQ ID NO: 1105370 - RNA, 19 nt, Artificial Sequence
  Description of Artificial Sequence: Synthetic oligonucleotide
  Sense strand starting at position 3400 of SEQ ID NO: 915778
ggagaugccuacugccaaa

SEQ ID NO: 1105371 - RNA, 19 nt, Artificial Sequence
  Description of Artificial Sequence: Synthetic oligonucleotide
  Antisense strand to SEQ ID NO: 1105370
uuuggcaguaggcaucucc

SEQ ID NO: 1105372 - RNA, 19 nt, Artificial Sequence
  Description of Artificial Sequence: Synthetic oligonucleotide
  Sense strand starting at position 3439 of SEQ ID NO: 915778
ugcugcuugugcuugauuu

SEQ ID NO: 1105373 - RNA, 19 nt, Artificial Sequence
  Description of Artificial Sequence: Synthetic oligonucleotide
  Antisense strand to SEQ ID NO: 1105372
aaaucaagcacaagcagca

SEQ ID NO: 1105374 - RNA, 19 nt, Artificial Sequence
  Description of Artificial Sequence: Synthetic oligonucleotide
  Sense strand starting at position 3489 of SEQ ID NO: 915778
augaaagauuuacauucga

SEQ ID NO: 1105375 - RNA, 19 nt, Artificial Sequence
  Description of Artificial Sequence: Synthetic oligonucleotide
  Antisense strand to SEQ ID NO: 1105374
ucgaauguaaaucuuucau

SEQ ID NO: 1105376 - RNA, 19 nt, Artificial Sequence
  Description of Artificial Sequence: Synthetic oligonucleotide
  Sense strand starting at position 3530 of SEQ ID NO: 915778
aacguuagcucuuggugca

SEQ ID NO: 1105377 - RNA, 19 nt, Artificial Sequence
  Description of Artificial Sequence: Synthetic oligonucleotide
  Antisense strand to SEQ ID NO: 1105376
ugcaccaagagcuaacguu

SEQ ID NO: 1105378 - RNA, 19 nt, Artificial Sequence
  Description of Artificial Sequence: Synthetic oligonucleotide
  Sense strand starting at position 3545 of SEQ ID NO: 915778
ugcagcgcugccuuuaaua

SEQ ID NO: 1105379 - RNA, 19 nt, Artificial Sequence
  Description of Artificial Sequence: Synthetic oligonucleotide
  Antisense strand to SEQ ID NO: 1105378
uauuaaaggcagcgcugca

SEQ ID NO: 1105380 - RNA, 19 nt, Artificial Sequence
  Description of Artificial Sequence: Synthetic oligonucleotide
  Sense strand starting at position 3550 of SEQ ID NO: 915778
cgcugccuuuaauaaguaa

SEQ ID NO: 1105381 - RNA, 19 nt, Artificial Sequence
  Description of Artificial Sequence: Synthetic oligonucleotide
  Antisense strand to SEQ ID NO: 1105380
uuacuuauuaaaggcagcg

SEQ ID NO: 1105382 - RNA, 19 nt, Artificial Sequence
  Description of Artificial Sequence: Synthetic oligonucleotide
  Sense strand starting at position 3553 of SEQ ID NO: 915778
ugccuuuaauaaguaagga

SEQ ID NO: 1105383 - RNA, 19 nt, Artificial Sequence
  Description of Artificial Sequence: Synthetic oligonucleotide
  Antisense strand to SEQ ID NO: 1105382
uccuuacuuauuaaaggca

SEQ ID NO: 1105384 - RNA, 19 nt, Artificial Sequence
  Description of Artificial Sequence: Synthetic oligonucleotide
  Sense strand starting at position 3594 of SEQ ID NO: 915778
agcagcucuuagcuugaga

SEQ ID NO: 1105385 - RNA, 19 nt, Artificial Sequence
  Description of Artificial Sequence: Synthetic oligonucleotide
  Antisense strand to SEQ ID NO: 1105384
ucucaagcuaagagcugcu

SEQ ID NO: 1105386 - RNA, 19 nt, Artificial Sequence
  Description of Artificial Sequence: Synthetic oligonucleotide
  Sense strand starting at position 3596 of SEQ ID NO: 915778
cagcucuuagcuugagaga

SEQ ID NO: 1105387 - RNA, 19 nt, Artificial Sequence
  Description of Artificial Sequence: Synthetic oligonucleotide
  Antisense strand to SEQ ID NO: 1105386
ucucucaagcuaagagcug

SEQ ID NO: 1105388 - RNA, 19 nt, Artificial Sequence
  Description of Artificial Sequence: Synthetic oligonucleotide
  Sense strand starting at position 3956 of SEQ ID NO: 915778
gcaggauuacuguaccugu

SEQ ID NO: 1105389 - RNA, 19 nt, Artificial Sequence
  Description of Artificial Sequence: Synthetic oligonucleotide
  Antisense strand to SEQ ID NO: 1105388
acagguacaguaauccugc

SEQ ID NO: 1105390 - RNA, 19 nt, Artificial Sequence
  Description of Artificial Sequence: Synthetic oligonucleotide
  Sense strand starting at position 114 of SEQ ID NO: 915779
agaagcaacucugaagaaa

SEQ ID NO: 1105391 - RNA, 19 nt, Artificial Sequence
  Description of Artificial Sequence: Synthetic oligonucleotide
  Antisense strand to SEQ ID NO: 1105390
uuucuucagaguugcuucu

SEQ ID NO: 1105392 - RNA, 19 nt, Artificial Sequence
  Description of Artificial Sequence: Synthetic oligonucleotide
  Sense strand starting at position 138 of SEQ ID NO: 915779
uaacaaaucuaggaggguu

SEQ ID NO: 1105393 - RNA, 19 nt, Artificial Sequence
  Description of Artificial Sequence: Synthetic oligonucleotide
  Antisense strand to SEQ ID NO: 1105392
aacccuccuagauuuguua

SEQ ID NO: 1105394 - RNA, 19 nt, Artificial Sequence
  Description of Artificial Sequence: Synthetic oligonucleotide
  Sense strand starting at position 303 of SEQ ID NO: 915779
gaucuuaaccuguggacag

SEQ ID NO: 1105395 - RNA, 19 nt, Artificial Sequence
  Description of Artificial Sequence: Synthetic oligonucleotide
  Antisense strand to SEQ ID NO: 1105394
cuguccacagguuaagauc

SEQ ID NO: 1105396 - RNA, 19 nt, Artificial Sequence
  Description of Artificial Sequence: Synthetic oligonucleotide
  Sense strand starting at position 332 of SEQ ID NO: 915779
uguaaaugcuagucauccu

SEQ ID NO: 1105397 - RNA, 19 nt, Artificial Sequence
  Description of Artificial Sequence: Synthetic oligonucleotide
  Antisense strand to SEQ ID NO: 1105396
aggaugacuagcauuuaca

SEQ ID NO: 1105398 - RNA, 19 nt, Artificial Sequence
  Description of Artificial Sequence: Synthetic oligonucleotide
  Sense strand starting at position 577 of SEQ ID NO: 915779
ccuccuuuccaaggagaga

SEQ ID NO: 1105399 - RNA, 19 nt, Artificial Sequence
  Description of Artificial Sequence: Synthetic oligonucleotide
  Antisense strand to SEQ ID NO: 1105398
ucucuccuuggaaaggagg

SEQ ID NO: 1105400 - RNA, 19 nt, Artificial Sequence
  Description of Artificial Sequence: Synthetic oligonucleotide
  Sense strand starting at position 1379 of SEQ ID NO: 915779
ccucgccaacgauaauauu

SEQ ID NO: 1105401 - RNA, 19 nt, Artificial Sequence
  Description of Artificial Sequence: Synthetic oligonucleotide
  Antisense strand to SEQ ID NO: 1105400
aauauuaucguuggcgagg

SEQ ID NO: 1105402 - RNA, 19 nt, Artificial Sequence
  Description of Artificial Sequence: Synthetic oligonucleotide
  Sense strand starting at position 2123 of SEQ ID NO: 915779
cuguaacuucgcuagcuaa

SEQ ID NO: 1105403 - RNA, 19 nt, Artificial Sequence
  Description of Artificial Sequence: Synthetic oligonucleotide
  Antisense strand to SEQ ID NO: 1105402
uuagcuagcgaaguuacag

SEQ ID NO: 1105404 - RNA, 19 nt, Artificial Sequence
  Description of Artificial Sequence: Synthetic oligonucleotide
  Sense strand starting at position 2170 of SEQ ID NO: 915779
uugagcauguuucuuccua

SEQ ID NO: 1105405 - RNA, 19 nt, Artificial Sequence
  Description of Artificial Sequence: Synthetic oligonucleotide
  Antisense strand to SEQ ID NO: 1105404
uaggaagaaacaugcucaa

SEQ ID NO: 1105406 - RNA, 19 nt, Artificial Sequence
  Description of Artificial Sequence: Synthetic oligonucleotide
  Sense strand starting at position 2171 of SEQ ID NO: 915779
ugagcauguuucuuccuaa

SEQ ID NO: 1105407 - RNA, 19 nt, Artificial Sequence
  Description of Artificial Sequence: Synthetic oligonucleotide
  Antisense strand to SEQ ID NO: 1105406
uuaggaagaaacaugcuca

SEQ ID NO: 1105408 - RNA, 19 nt, Artificial Sequence
  Description of Artificial Sequence: Synthetic oligonucleotide
  Sense strand starting at position 2302 of SEQ ID NO: 915779
aaugaaacaguguauguua

SEQ ID NO: 1105409 - RNA, 19 nt, Artificial Sequence
  Description of Artificial Sequence: Synthetic oligonucleotide
  Antisense strand to SEQ ID NO: 1105408
uaacauacacuguuucauu

SEQ ID NO: 1105410 - RNA, 19 nt, Artificial Sequence
  Description of Artificial Sequence: Synthetic oligonucleotide
  Sense strand starting at position 2304 of SEQ ID NO: 915779
ugaaacaguguauguuaaa

SEQ ID NO: 1105411 - RNA, 19 nt, Artificial Sequence
  Description of Artificial Sequence: Synthetic oligonucleotide
  Antisense strand to SEQ ID NO: 1105410
uuuaacauacacuguuuca

SEQ ID NO: 1105412 - RNA, 19 nt, Artificial Sequence
  Description of Artificial Sequence: Synthetic oligonucleotide
  Sense strand starting at position 2305 of SEQ ID NO: 915779
gaaacaguguauguuaaac

SEQ ID NO: 1105413 - RNA, 19 nt, Artificial Sequence
  Description of Artificial Sequence: Synthetic oligonucleotide
  Antisense strand to SEQ ID NO: 1105412
guuuaacauacacuguuuc

SEQ ID NO: 1105414 - RNA, 19 nt, Artificial Sequence
  Description of Artificial Sequence: Synthetic oligonucleotide
  Sense strand starting at position 2333 of SEQ ID NO: 915779
ggcuguaugagaggagaaa

SEQ ID NO: 1105415 - RNA, 19 nt, Artificial Sequence
  Description of Artificial Sequence: Synthetic oligonucleotide
  Antisense strand to SEQ ID NO: 1105414
uuucuccucucauacagcc

SEQ ID NO: 1105416 - RNA, 19 nt, Artificial Sequence
  Description of Artificial Sequence: Synthetic oligonucleotide
  Sense strand starting at position 2354 of SEQ ID NO: 915779
aaauuagaaguuugugucu

SEQ ID NO: 1105417 - RNA, 19 nt, Artificial Sequence
  Description of Artificial Sequence: Synthetic oligonucleotide
  Antisense strand to SEQ ID NO: 1105416
agacacaaacuucuaauuu

SEQ ID NO: 1105418 - RNA, 19 nt, Artificial Sequence
  Description of Artificial Sequence: Synthetic oligonucleotide
  Sense strand starting at position 2387 of SEQ ID NO: 915779
ugugaaccauagucaaugu

SEQ ID NO: 1105419 - RNA, 19 nt, Artificial Sequence
  Description of Artificial Sequence: Synthetic oligonucleotide
  Antisense strand to SEQ ID NO: 1105418
acauugacuaugguucaca

SEQ ID NO: 1105420 - RNA, 19 nt, Artificial Sequence
  Description of Artificial Sequence: Synthetic oligonucleotide
  Sense strand starting at position 2436 of SEQ ID NO: 915779
gcguaugacaccuaacaga

SEQ ID NO: 1105421 - RNA, 19 nt, Artificial Sequence
  Description of Artificial Sequence: Synthetic oligonucleotide
  Antisense strand to SEQ ID NO: 1105420
ucuguuaggugucauacgc

SEQ ID NO: 1105422 - RNA, 19 nt, Artificial Sequence
  Description of Artificial Sequence: Synthetic oligonucleotide
  Sense strand starting at position 2920 of SEQ ID NO: 915779
guggcagguguccaagaua

SEQ ID NO: 1105423 - RNA, 19 nt, Artificial Sequence
  Description of Artificial Sequence: Synthetic oligonucleotide
  Antisense strand to SEQ ID NO: 1105422
uaucuuggacaccugccac

SEQ ID NO: 1105424 - RNA, 19 nt, Artificial Sequence
  Description of Artificial Sequence: Synthetic oligonucleotide
  Sense strand starting at position 2923 of SEQ ID NO: 915779
gcagguguccaagauauua

SEQ ID NO: 1105425 - RNA, 19 nt, Artificial Sequence
  Description of Artificial Sequence: Synthetic oligonucleotide
  Antisense strand to SEQ ID NO: 1105424
uaauaucuuggacaccugc

SEQ ID NO: 1105426 - RNA, 19 nt, Artificial Sequence
  Description of Artificial Sequence: Synthetic oligonucleotide
  Sense strand starting at position 3019 of SEQ ID NO: 915779
gcagguuuacuguuugugu

SEQ ID NO: 1105427 - RNA, 19 nt, Artificial Sequence
  Description of Artificial Sequence: Synthetic oligonucleotide
  Antisense strand to SEQ ID NO: 1105426
acacaaacaguaaaccugc

SEQ ID NO: 1105428 - RNA, 19 nt, Artificial Sequence
  Description of Artificial Sequence: Synthetic oligonucleotide
  Sense strand starting at position 3107 of SEQ ID NO: 915779
cccugugguauuugugaag

SEQ ID NO: 1105429 - RNA, 19 nt, Artificial Sequence
  Description of Artificial Sequence: Synthetic oligonucleotide
  Antisense strand to SEQ ID NO: 1105428
cuucacaaauaccacaggg

SEQ ID NO: 1105430 - RNA, 19 nt, Artificial Sequence
  Description of Artificial Sequence: Synthetic oligonucleotide
  Sense strand starting at position 3122 of SEQ ID NO: 915779
gaaguuuauuguuugcacu

SEQ ID NO: 1105431 - RNA, 19 nt, Artificial Sequence
  Description of Artificial Sequence: Synthetic oligonucleotide
  Antisense strand to SEQ ID NO: 1105430
agugcaaacaauaaacuuc

SEQ ID NO: 1105432 - RNA, 19 nt, Artificial Sequence
  Description of Artificial Sequence: Synthetic oligonucleotide
  Sense strand starting at position 3512 of SEQ ID NO: 915779
cagccagaguucccugaga

SEQ ID NO: 1105433 - RNA, 19 nt, Artificial Sequence
  Description of Artificial Sequence: Synthetic oligonucleotide
  Antisense strand to SEQ ID NO: 1105432
ucucagggaacucuggcug

SEQ ID NO: 1105434 - RNA, 19 nt, Artificial Sequence
  Description of Artificial Sequence: Synthetic oligonucleotide
  Sense strand starting at position 3514 of SEQ ID NO: 915779
gccagaguucccugagagc

SEQ ID NO: 1105435 - RNA, 19 nt, Artificial Sequence
  Description of Artificial Sequence: Synthetic oligonucleotide
  Antisense strand to SEQ ID NO: 1105434
gcucucagggaacucuggc

SEQ ID NO: 1105436 - RNA, 19 nt, Artificial Sequence
  Description of Artificial Sequence: Synthetic oligonucleotide
  Sense strand starting at position 3582 of SEQ ID NO: 915779
guagaaguuccauguuugg

SEQ ID NO: 1105437 - RNA, 19 nt, Artificial Sequence
  Description of Artificial Sequence: Synthetic oligonucleotide
  Antisense strand to SEQ ID NO: 1105436
ccaaacauggaacuucuac

SEQ ID NO: 1105438 - RNA, 19 nt, Artificial Sequence
  Description of Artificial Sequence: Synthetic oligonucleotide
  Sense strand starting at position 3588 of SEQ ID NO: 915779
guuccauguuugguugaag

SEQ ID NO: 1105439 - RNA, 19 nt, Artificial Sequence
  Description of Artificial Sequence: Synthetic oligonucleotide
  Antisense strand to SEQ ID NO: 1105438
cuucaaccaaacauggaac

SEQ ID NO: 1105440 - RNA, 19 nt, Artificial Sequence
  Description of Artificial Sequence: Synthetic oligonucleotide
  Sense strand starting at position 3591 of SEQ ID NO: 915779
ccauguuugguugaaggaa

SEQ ID NO: 1105441 - RNA, 19 nt, Artificial Sequence
  Description of Artificial Sequence: Synthetic oligonucleotide
  Antisense strand to SEQ ID NO: 1105440
uuccuucaaccaaacaugg

SEQ ID NO: 1105442 - RNA, 19 nt, Artificial Sequence
  Description of Artificial Sequence: Synthetic oligonucleotide
  Sense strand starting at position 3675 of SEQ ID NO: 915779
gcguccauuugucugaaga

SEQ ID NO: 1105443 - RNA, 19 nt, Artificial Sequence
  Description of Artificial Sequence: Synthetic oligonucleotide
  Antisense strand to SEQ ID NO: 1105442
ucuucagacaaauggacgc

SEQ ID NO: 1105444 - RNA, 19 nt, Artificial Sequence
  Description of Artificial Sequence: Synthetic oligonucleotide
  Sense strand starting at position 3676 of SEQ ID NO: 915779
cguccauuugucugaagag

SEQ ID NO: 1105445 - RNA, 19 nt, Artificial Sequence
  Description of Artificial Sequence: Synthetic oligonucleotide
  Antisense strand to SEQ ID NO: 1105444
cucuucagacaaauggacg

SEQ ID NO: 1105446 - RNA, 19 nt, Artificial Sequence
  Description of Artificial Sequence: Synthetic oligonucleotide
  Sense strand starting at position 3677 of SEQ ID NO: 915779
guccauuugucugaagagg

SEQ ID NO: 1105447 - RNA, 19 nt, Artificial Sequence
  Description of Artificial Sequence: Synthetic oligonucleotide
  Antisense strand to SEQ ID NO: 1105446
ccucuucagacaaauggac

SEQ ID NO: 1105448 - RNA, 19 nt, Artificial Sequence
  Description of Artificial Sequence: Synthetic oligonucleotide
  Sense strand starting at position 3682 of SEQ ID NO: 915779
uuugucugaagagguaaau

SEQ ID NO: 1105449 - RNA, 19 nt, Artificial Sequence
  Description of Artificial Sequence: Synthetic oligonucleotide
  Antisense strand to SEQ ID NO: 1105448
auuuaccucuucagacaaa

SEQ ID NO: 1105450 - RNA, 19 nt, Artificial Sequence
  Description of Artificial Sequence: Synthetic oligonucleotide
  Sense strand starting at position 3694 of SEQ ID NO: 915779
gguaaaugauaggaagaaa

SEQ ID NO: 1105451 - RNA, 19 nt, Artificial Sequence
  Description of Artificial Sequence: Synthetic oligonucleotide
  Antisense strand to SEQ ID NO: 1105450
uuucuuccuaucauuuacc

SEQ ID NO: 1105452 - RNA, 19 nt, Artificial Sequence
  Description of Artificial Sequence: Synthetic oligonucleotide
  Sense strand starting at position 3871 of SEQ ID NO: 915779
gagcauauuccauacuggu

SEQ ID NO: 1105453 - RNA, 19 nt, Artificial Sequence
  Description of Artificial Sequence: Synthetic oligonucleotide
  Antisense strand to SEQ ID NO: 1105452
accaguauggaauaugcuc

SEQ ID NO: 1105454 - RNA, 19 nt, Artificial Sequence
  Description of Artificial Sequence: Synthetic oligonucleotide
  Sense strand starting at position 3878 of SEQ ID NO: 915779
uuccauacuggucaucaga

SEQ ID NO: 1105455 - RNA, 19 nt, Artificial Sequence
  Description of Artificial Sequence: Synthetic oligonucleotide
  Antisense strand to SEQ ID NO: 1105454
ucugaugaccaguauggaa

SEQ ID NO: 1105456 - RNA, 19 nt, Artificial Sequence
  Description of Artificial Sequence: Synthetic oligonucleotide
  Sense strand starting at position 3880 of SEQ ID NO: 915779
ccauacuggucaucagaau

SEQ ID NO: 1105457 - RNA, 19 nt, Artificial Sequence
  Description of Artificial Sequence: Synthetic oligonucleotide
  Antisense strand to SEQ ID NO: 1105456
auucugaugaccaguaugg

SEQ ID NO: 1105458 - RNA, 19 nt, Artificial Sequence
  Description of Artificial Sequence: Synthetic oligonucleotide
  Sense strand starting at position 3889 of SEQ ID NO: 915779
ucaucagaauguuuagaua

SEQ ID NO: 1105459 - RNA, 19 nt, Artificial Sequence
  Description of Artificial Sequence: Synthetic oligonucleotide
  Antisense strand to SEQ ID NO: 1105458
uaucuaaacauucugauga

SEQ ID NO: 1105460 - RNA, 19 nt, Artificial Sequence
  Description of Artificial Sequence: Synthetic oligonucleotide
  Sense strand starting at position 3908 of SEQ ID NO: 915779
guauguuaauaugucaguu

SEQ ID NO: 1105461 - RNA, 19 nt, Artificial Sequence
  Description of Artificial Sequence: Synthetic oligonucleotide
  Antisense strand to SEQ ID NO: 1105460
aacugacauauuaacauac

SEQ ID NO: 1105462 - RNA, 19 nt, Artificial Sequence
  Description of Artificial Sequence: Synthetic oligonucleotide
  Sense strand starting at position 3912 of SEQ ID NO: 915779
guuaauaugucaguuguua

SEQ ID NO: 1105463 - RNA, 19 nt, Artificial Sequence
  Description of Artificial Sequence: Synthetic oligonucleotide
  Antisense strand to SEQ ID NO: 1105462
uaacaacugacauauuaac

SEQ ID NO: 1105464 - RNA, 19 nt, Artificial Sequence
  Description of Artificial Sequence: Synthetic oligonucleotide
  Sense strand starting at position 3923 of SEQ ID NO: 915779
aguuguuaagccuaugaag

SEQ ID NO: 1105465 - RNA, 19 nt, Artificial Sequence
  Description of Artificial Sequence: Synthetic oligonucleotide
  Antisense strand to SEQ ID NO: 1105464
cuucauaggcuuaacaacu

SEQ ID NO: 1105466 - RNA, 19 nt, Artificial Sequence
  Description of Artificial Sequence: Synthetic oligonucleotide
  Sense strand starting at position 3925 of SEQ ID NO: 915779
uuguuaagccuaugaagaa

SEQ ID NO: 1105467 - RNA, 19 nt, Artificial Sequence
  Description of Artificial Sequence: Synthetic oligonucleotide
  Antisense strand to SEQ ID NO: 1105466
uucuucauaggcuuaacaa

SEQ ID NO: 1105468 - RNA, 19 nt, Artificial Sequence
  Description of Artificial Sequence: Synthetic oligonucleotide
  Sense strand starting at position 3932 of SEQ ID NO: 915779
gccuaugaagaauauaugu

SEQ ID NO: 1105469 - RNA, 19 nt, Artificial Sequence
  Description of Artificial Sequence: Synthetic oligonucleotide
  Antisense strand to SEQ ID NO: 1105468
acauauauucuucauaggc

SEQ ID NO: 1105470 - RNA, 19 nt, Artificial Sequence
  Description of Artificial Sequence: Synthetic oligonucleotide
  Sense strand starting at position 10 of SEQ ID NO: 915780
cagugugugguaucgguau

SEQ ID NO: 1105471 - RNA, 19 nt, Artificial Sequence
  Description of Artificial Sequence: Synthetic oligonucleotide
  Antisense strand to SEQ ID NO: 1105470
auaccgauaccacacacug

SEQ ID NO: 1105472 - RNA, 19 nt, Artificial Sequence
  Description of Artificial Sequence: Synthetic oligonucleotide
  Sense strand starting at position 14 of SEQ ID NO: 915780
gugugguaucgguauggau

SEQ ID NO: 1105473 - RNA, 19 nt, Artificial Sequence
  Description of Artificial Sequence: Synthetic oligonucleotide
  Antisense strand to SEQ ID NO: 1105472
auccauaccgauaccacac

SEQ ID NO: 1105474 - RNA, 19 nt, Artificial Sequence
  Description of Artificial Sequence: Synthetic oligonucleotide
  Sense strand starting at position 577 of SEQ ID NO: 915780
uguuuaaagcauugagaaa

SEQ ID NO: 1105475 - RNA, 19 nt, Artificial Sequence
  Description of Artificial Sequence: Synthetic oligonucleotide
  Antisense strand to SEQ ID NO: 1105474
uuucucaaugcuuuaaaca

SEQ ID NO: 1105476 - RNA, 19 nt, Artificial Sequence
  Description of Artificial Sequence: Synthetic oligonucleotide
  Sense strand starting at position 700 of SEQ ID NO: 915780
cagccuagguagucagauu

SEQ ID NO: 1105477 - RNA, 19 nt, Artificial Sequence
  Description of Artificial Sequence: Synthetic oligonucleotide
  Antisense strand to SEQ ID NO: 1105476
aaucugacuaccuaggcug

SEQ ID NO: 1105478 - RNA, 19 nt, Artificial Sequence
  Description of Artificial Sequence: Synthetic oligonucleotide
  Sense strand starting at position 709 of SEQ ID NO: 915780
uagucagauuuagacugaa

SEQ ID NO: 1105479 - RNA, 19 nt, Artificial Sequence
  Description of Artificial Sequence: Synthetic oligonucleotide
  Antisense strand to SEQ ID NO: 1105478
uucagucuaaaucugacua

SEQ ID NO: 1105480 - RNA, 19 nt, Artificial Sequence
  Description of Artificial Sequence: Synthetic oligonucleotide
  Sense strand starting at position 724 of SEQ ID NO: 915780
ugaagauuaugggucuucu

SEQ ID NO: 1105481 - RNA, 19 nt, Artificial Sequence
  Description of Artificial Sequence: Synthetic oligonucleotide
  Antisense strand to SEQ ID NO: 1105480
agaagacccauaaucuuca

SEQ ID NO: 1105482 - RNA, 19 nt, Artificial Sequence
  Description of Artificial Sequence: Synthetic oligonucleotide
  Sense strand starting at position 733 of SEQ ID NO: 915780
ugggucuucuuucuggaaa

SEQ ID NO: 1105483 - RNA, 19 nt, Artificial Sequence
  Description of Artificial Sequence: Synthetic oligonucleotide
  Antisense strand to SEQ ID NO: 1105482
uuuccagaaagaagaccca

SEQ ID NO: 1105484 - RNA, 19 nt, Artificial Sequence
  Description of Artificial Sequence: Synthetic oligonucleotide
  Sense strand starting at position 736 of SEQ ID NO: 915780
gucuucuuucuggaaacau

SEQ ID NO: 1105485 - RNA, 19 nt, Artificial Sequence
  Description of Artificial Sequence: Synthetic oligonucleotide
  Antisense strand to SEQ ID NO: 1105484
auguuuccagaaagaagac

SEQ ID NO: 1105486 - RNA, 19 nt, Artificial Sequence
  Description of Artificial Sequence: Synthetic oligonucleotide
  Sense strand starting at position 792 of SEQ ID NO: 915780
gagagaacugguuagcucu

SEQ ID NO: 1105487 - RNA, 19 nt, Artificial Sequence
  Description of Artificial Sequence: Synthetic oligonucleotide
  Antisense strand to SEQ ID NO: 1105486
agagcuaaccaguucucuc

SEQ ID NO: 1105488 - RNA, 19 nt, Artificial Sequence
  Description of Artificial Sequence: Synthetic oligonucleotide
  Sense strand starting at position 1320 of SEQ ID NO: 915780
caccgaucugcccgaugaa

SEQ ID NO: 1105489 - RNA, 19 nt, Artificial Sequence
  Description of Artificial Sequence: Synthetic oligonucleotide
  Antisense strand to SEQ ID NO: 1105488
uucaucgggcagaucggug

SEQ ID NO: 1105490 - RNA, 19 nt, Artificial Sequence
  Description of Artificial Sequence: Synthetic oligonucleotide
  Sense strand starting at position 2227 of SEQ ID NO: 915780
ugucuucucggagugcuuu

SEQ ID NO: 1105491 - RNA, 19 nt, Artificial Sequence
  Description of Artificial Sequence: Synthetic oligonucleotide
  Antisense strand to SEQ ID NO: 1105490
aaagcacuccgagaagaca

SEQ ID NO: 1105492 - RNA, 19 nt, Artificial Sequence
  Description of Artificial Sequence: Synthetic oligonucleotide
  Sense strand starting at position 2233 of SEQ ID NO: 915780
cucggagugcuuucggcua

SEQ ID NO: 1105493 - RNA, 19 nt, Artificial Sequence
  Description of Artificial Sequence: Synthetic oligonucleotide
  Antisense strand to SEQ ID NO: 1105492
uagccgaaagcacuccgag

SEQ ID NO: 1105494 - RNA, 19 nt, Artificial Sequence
  Description of Artificial Sequence: Synthetic oligonucleotide
  Sense strand starting at position 2237 of SEQ ID NO: 915780
gagugcuuucggcuacuuu

SEQ ID NO: 1105495 - RNA, 19 nt, Artificial Sequence
  Description of Artificial Sequence: Synthetic oligonucleotide
  Antisense strand to SEQ ID NO: 1105494
aaaguagccgaaagcacuc

SEQ ID NO: 1105496 - RNA, 19 nt, Artificial Sequence
  Description of Artificial Sequence: Synthetic oligonucleotide
  Sense strand starting at position 2259 of SEQ ID NO: 915780
cuuauuacuuuagcucgau

SEQ ID NO: 1105497 - RNA, 19 nt, Artificial Sequence
  Description of Artificial Sequence: Synthetic oligonucleotide
  Antisense strand to SEQ ID NO: 1105496
aucgagcuaaaguaauaag

SEQ ID NO: 1105498 - RNA, 19 nt, Artificial Sequence
  Description of Artificial Sequence: Synthetic oligonucleotide
  Sense strand starting at position 2260 of SEQ ID NO: 915780
uuauuacuuuagcucgaua

SEQ ID NO: 1105499 - RNA, 19 nt, Artificial Sequence
  Description of Artificial Sequence: Synthetic oligonucleotide
  Antisense strand to SEQ ID NO: 1105498
uaucgagcuaaaguaauaa

SEQ ID NO: 1105500 - RNA, 19 nt, Artificial Sequence
  Description of Artificial Sequence: Synthetic oligonucleotide
  Sense strand starting at position 2262 of SEQ ID NO: 915780
auuacuuuagcucgauaca

SEQ ID NO: 1105501 - RNA, 19 nt, Artificial Sequence
  Description of Artificial Sequence: Synthetic oligonucleotide
  Antisense strand to SEQ ID NO: 1105500
uguaucgagcuaaaguaau

SEQ ID NO: 1105502 - RNA, 19 nt, Artificial Sequence
  Description of Artificial Sequence: Synthetic oligonucleotide
  Sense strand starting at position 2263 of SEQ ID NO: 915780
uuacuuuagcucgauacac

SEQ ID NO: 1105503 - RNA, 19 nt, Artificial Sequence
  Description of Artificial Sequence: Synthetic oligonucleotide
  Antisense strand to SEQ ID NO: 1105502
guguaucgagcuaaaguaa

SEQ ID NO: 1105504 - RNA, 19 nt, Artificial Sequence
  Description of Artificial Sequence: Synthetic oligonucleotide
  Sense strand starting at position 2355 of SEQ ID NO: 915780
gcgaaaugucgccugacga

SEQ ID NO: 1105505 - RNA, 19 nt, Artificial Sequence
  Description of Artificial Sequence: Synthetic oligonucleotide
  Antisense strand to SEQ ID NO: 1105504
ucgucaggcgacauuucgc

SEQ ID NO: 1105506 - RNA, 19 nt, Artificial Sequence
  Description of Artificial Sequence: Synthetic oligonucleotide
  Sense strand starting at position 2385 of SEQ ID NO: 915780
acaguuacuaccggaagua

SEQ ID NO: 1105507 - RNA, 19 nt, Artificial Sequence
  Description of Artificial Sequence: Synthetic oligonucleotide
  Antisense strand to SEQ ID NO: 1105506
uacuuccgguaguaacugu

SEQ ID NO: 1105508 - RNA, 19 nt, Artificial Sequence
  Description of Artificial Sequence: Synthetic oligonucleotide
  Sense strand starting at position 2463 of SEQ ID NO: 915780
gcuguuaggguuuaacuca

SEQ ID NO: 1105509 - RNA, 19 nt, Artificial Sequence
  Description of Artificial Sequence: Synthetic oligonucleotide
  Antisense strand to SEQ ID NO: 1105508
ugaguuaaacccuaacagc

SEQ ID NO: 1105510 - RNA, 19 nt, Artificial Sequence
  Description of Artificial Sequence: Synthetic oligonucleotide
  Sense strand starting at position 2490 of SEQ ID NO: 915780
cuccuucucgaacgaauua

SEQ ID NO: 1105511 - RNA, 19 nt, Artificial Sequence
  Description of Artificial Sequence: Synthetic oligonucleotide
  Antisense strand to SEQ ID NO: 1105510
uaauucguucgagaaggag

SEQ ID NO: 1105512 - RNA, 19 nt, Artificial Sequence
  Description of Artificial Sequence: Synthetic oligonucleotide
  Sense strand starting at position 2586 of SEQ ID NO: 915780
cggugauugguugagcgaa

SEQ ID NO: 1105513 - RNA, 19 nt, Artificial Sequence
  Description of Artificial Sequence: Synthetic oligonucleotide
  Antisense strand to SEQ ID NO: 1105512
uucgcucaaccaaucaccg

SEQ ID NO: 1105514 - RNA, 19 nt, Artificial Sequence
  Description of Artificial Sequence: Synthetic oligonucleotide
  Sense strand starting at position 2588 of SEQ ID NO: 915780
gugauugguugagcgaaug

SEQ ID NO: 1105515 - RNA, 19 nt, Artificial Sequence
  Description of Artificial Sequence: Synthetic oligonucleotide
  Antisense strand to SEQ ID NO: 1105514
cauucgcucaaccaaucac

SEQ ID NO: 1105516 - RNA, 19 nt, Artificial Sequence
  Description of Artificial Sequence: Synthetic oligonucleotide
  Sense strand starting at position 2623 of SEQ ID NO: 915780
gugguuggccagugggaaa

SEQ ID NO: 1105517 - RNA, 19 nt, Artificial Sequence
  Description of Artificial Sequence: Synthetic oligonucleotide
  Antisense strand to SEQ ID NO: 1105516
uuucccacuggccaaccac

SEQ ID NO: 1105518 - RNA, 19 nt, Artificial Sequence
  Description of Artificial Sequence: Synthetic oligonucleotide
  Sense strand starting at position 2638 of SEQ ID NO: 915780
gaaauucuguacguuguga

SEQ ID NO: 1105519 - RNA, 19 nt, Artificial Sequence
  Description of Artificial Sequence: Synthetic oligonucleotide
  Antisense strand to SEQ ID NO: 1105518
ucacaacguacagaauuuc

SEQ ID NO: 1105520 - RNA, 19 nt, Artificial Sequence
  Description of Artificial Sequence: Synthetic oligonucleotide
  Sense strand starting at position 2651 of SEQ ID NO: 915780
uugugauugguccacagga

SEQ ID NO: 1105521 - RNA, 19 nt, Artificial Sequence
  Description of Artificial Sequence: Synthetic oligonucleotide
  Antisense strand to SEQ ID NO: 1105520
uccuguggaccaaucacaa

SEQ ID NO: 1105522 - RNA, 19 nt, Artificial Sequence
  Description of Artificial Sequence: Synthetic oligonucleotide
  Sense strand starting at position 2653 of SEQ ID NO: 915780
gugauugguccacaggaac

SEQ ID NO: 1105523 - RNA, 19 nt, Artificial Sequence
  Description of Artificial Sequence: Synthetic oligonucleotide
  Antisense strand to SEQ ID NO: 1105522
guuccuguggaccaaucac

SEQ ID NO: 1105524 - RNA, 19 nt, Artificial Sequence
  Description of Artificial Sequence: Synthetic oligonucleotide
  Sense strand starting at position 2688 of SEQ ID NO: 915780
gggagcgagcuuugaaagu

SEQ ID NO: 1105525 - RNA, 19 nt, Artificial Sequence
  Description of Artificial Sequence: Synthetic oligonucleotide
  Antisense strand to SEQ ID NO: 1105524
acuuucaaagcucgcuccc

SEQ ID NO: 1105526 - RNA, 19 nt, Artificial Sequence
  Description of Artificial Sequence: Synthetic oligonucleotide
  Sense strand starting at position 2999 of SEQ ID NO: 915780
ccaggccacccuuagaaua

SEQ ID NO: 1105527 - RNA, 19 nt, Artificial Sequence
  Description of Artificial Sequence: Synthetic oligonucleotide
  Antisense strand to SEQ ID NO: 1105526
uauucuaaggguggccugg

SEQ ID NO: 1105528 - RNA, 19 nt, Artificial Sequence
  Description of Artificial Sequence: Synthetic oligonucleotide
  Sense strand starting at position 3009 of SEQ ID NO: 915780
cuuagaauaagcgaauguu

SEQ ID NO: 1105529 - RNA, 19 nt, Artificial Sequence
  Description of Artificial Sequence: Synthetic oligonucleotide
  Antisense strand to SEQ ID NO: 1105528
aacauucgcuuauucuaag

SEQ ID NO: 1105530 - RNA, 19 nt, Artificial Sequence
  Description of Artificial Sequence: Synthetic oligonucleotide
  Sense strand starting at position 3085 of SEQ ID NO: 915780
gcgugucuucgugcaccua

SEQ ID NO: 1105531 - RNA, 19 nt, Artificial Sequence
  Description of Artificial Sequence: Synthetic oligonucleotide
  Antisense strand to SEQ ID NO: 1105530
uaggugcacgaagacacgc

SEQ ID NO: 1105532 - RNA, 19 nt, Artificial Sequence
  Description of Artificial Sequence: Synthetic oligonucleotide
  Sense strand starting at position 3143 of SEQ ID NO: 915780
ucuuucuuccgccagacuu

SEQ ID NO: 1105533 - RNA, 19 nt, Artificial Sequence
  Description of Artificial Sequence: Synthetic oligonucleotide
  Antisense strand to SEQ ID NO: 1105532
aagucuggcggaagaaaga

SEQ ID NO: 1105534 - RNA, 19 nt, Artificial Sequence
  Description of Artificial Sequence: Synthetic oligonucleotide
  Sense strand starting at position 3145 of SEQ ID NO: 915780
uuucuuccgccagacuuau

SEQ ID NO: 1105535 - RNA, 19 nt, Artificial Sequence
  Description of Artificial Sequence: Synthetic oligonucleotide
  Antisense strand to SEQ ID NO: 1105534
auaagucuggcggaagaaa

SEQ ID NO: 1105536 - RNA, 19 nt, Artificial Sequence
  Description of Artificial Sequence: Synthetic oligonucleotide
  Sense strand starting at position 3194 of SEQ ID NO: 915780
ggaugucucacaugcagac

SEQ ID NO: 1105537 - RNA, 19 nt, Artificial Sequence
  Description of Artificial Sequence: Synthetic oligonucleotide
  Antisense strand to SEQ ID NO: 1105536
gucugcaugugagacaucc

SEQ ID NO: 1105538 - RNA, 19 nt, Artificial Sequence
  Description of Artificial Sequence: Synthetic oligonucleotide
  Sense strand starting at position 3206 of SEQ ID NO: 915780
ugcagacaucaucaaacgu

SEQ ID NO: 1105539 - RNA, 19 nt, Artificial Sequence
  Description of Artificial Sequence: Synthetic oligonucleotide
  Antisense strand to SEQ ID NO: 1105538
acguuugaugaugucugca

SEQ ID NO: 1105540 - RNA, 19 nt, Artificial Sequence
  Description of Artificial Sequence: Synthetic oligonucleotide
  Sense strand starting at position 3217 of SEQ ID NO: 915780
ucaaacgucacaugaguga

SEQ ID NO: 1105541 - RNA, 19 nt, Artificial Sequence
  Description of Artificial Sequence: Synthetic oligonucleotide
  Antisense strand to SEQ ID NO: 1105540
ucacucaugugacguuuga

SEQ ID NO: 1105542 - RNA, 19 nt, Artificial Sequence
  Description of Artificial Sequence: Synthetic oligonucleotide
  Sense strand starting at position 3399 of SEQ ID NO: 915780
gagcaauugcaggaguauu

SEQ ID NO: 1105543 - RNA, 19 nt, Artificial Sequence
  Description of Artificial Sequence: Synthetic oligonucleotide
  Antisense strand to SEQ ID NO: 1105542
aauacuccugcaauugcuc

SEQ ID NO: 1105544 - RNA, 19 nt, Artificial Sequence
  Description of Artificial Sequence: Synthetic oligonucleotide
  Sense strand starting at position 3506 of SEQ ID NO: 915780
ccuguacaccuuuaauguu

SEQ ID NO: 1105545 - RNA, 19 nt, Artificial Sequence
  Description of Artificial Sequence: Synthetic oligonucleotide
  Antisense strand to SEQ ID NO: 1105544
aacauuaaagguguacagg

SEQ ID NO: 1105546 - RNA, 19 nt, Artificial Sequence
  Description of Artificial Sequence: Synthetic oligonucleotide
  Sense strand starting at position 3557 of SEQ ID NO: 915780
cuuggcaugcuuuauaaga

SEQ ID NO: 1105547 - RNA, 19 nt, Artificial Sequence
  Description of Artificial Sequence: Synthetic oligonucleotide
  Antisense strand to SEQ ID NO: 1105546
ucuuauaaagcaugccaag

SEQ ID NO: 1105548 - RNA, 19 nt, Artificial Sequence
  Description of Artificial Sequence: Synthetic oligonucleotide
  Sense strand starting at position 3606 of SEQ ID NO: 915780
gagcauaaccuuuggaguc

SEQ ID NO: 1105549 - RNA, 19 nt, Artificial Sequence
  Description of Artificial Sequence: Synthetic oligonucleotide
  Antisense strand to SEQ ID NO: 1105548
gacuccaaagguuaugcuc

SEQ ID NO: 1105550 - RNA, 19 nt, Artificial Sequence
  Description of Artificial Sequence: Synthetic oligonucleotide
  Sense strand starting at position 1 of SEQ ID NO: 915781
ggcaguaucacagaguuaa

SEQ ID NO: 1105551 - RNA, 19 nt, Artificial Sequence
  Description of Artificial Sequence: Synthetic oligonucleotide
  Antisense strand to SEQ ID NO: 1105550
uuaacucugugauacugcc

SEQ ID NO: 1105552 - RNA, 19 nt, Artificial Sequence
  Description of Artificial Sequence: Synthetic oligonucleotide
  Sense strand starting at position 22 of SEQ ID NO: 915781
gcacauuaacuucgaaaua

SEQ ID NO: 1105553 - RNA, 19 nt, Artificial Sequence
  Description of Artificial Sequence: Synthetic oligonucleotide
  Antisense strand to SEQ ID NO: 1105552
uauuucgaaguuaaugugc

SEQ ID NO: 1105554 - RNA, 19 nt, Artificial Sequence
  Description of Artificial Sequence: Synthetic oligonucleotide
  Sense strand starting at position 517 of SEQ ID NO: 915781
cuagccagguuaucuaaca

SEQ ID NO: 1105555 - RNA, 19 nt, Artificial Sequence
  Description of Artificial Sequence: Synthetic oligonucleotide
  Antisense strand to SEQ ID NO: 1105554
uguuagauaaccuggcuag

SEQ ID NO: 1105556 - RNA, 19 nt, Artificial Sequence
  Description of Artificial Sequence: Synthetic oligonucleotide
  Sense strand starting at position 683 of SEQ ID NO: 915781
gccagaaacugcucagaaa

SEQ ID NO: 1105557 - RNA, 19 nt, Artificial Sequence
  Description of Artificial Sequence: Synthetic oligonucleotide
  Antisense strand to SEQ ID NO: 1105556
uuucugagcaguuucuggc

SEQ ID NO: 1105558 - RNA, 19 nt, Artificial Sequence
  Description of Artificial Sequence: Synthetic oligonucleotide
  Sense strand starting at position 789 of SEQ ID NO: 915781
gcacuaugaccgcaaagaa

SEQ ID NO: 1105559 - RNA, 19 nt, Artificial Sequence
  Description of Artificial Sequence: Synthetic oligonucleotide
  Antisense strand to SEQ ID NO: 1105558
uucuuugcggucauagugc

SEQ ID NO: 1105560 - RNA, 19 nt, Artificial Sequence
  Description of Artificial Sequence: Synthetic oligonucleotide
  Sense strand starting at position 814 of SEQ ID NO: 915781
cucaguuuagcguccagua

SEQ ID NO: 1105561 - RNA, 19 nt, Artificial Sequence
  Description of Artificial Sequence: Synthetic oligonucleotide
  Antisense strand to SEQ ID NO: 1105560
uacuggacgcuaaacugag

SEQ ID NO: 1105562 - RNA, 19 nt, Artificial Sequence
  Description of Artificial Sequence: Synthetic oligonucleotide
  Sense strand starting at position 815 of SEQ ID NO: 915781
ucaguuuagcguccaguau

SEQ ID NO: 1105563 - RNA, 19 nt, Artificial Sequence
  Description of Artificial Sequence: Synthetic oligonucleotide
  Antisense strand to SEQ ID NO: 1105562
auacuggacgcuaaacuga

SEQ ID NO: 1105564 - RNA, 19 nt, Artificial Sequence
  Description of Artificial Sequence: Synthetic oligonucleotide
  Sense strand starting at position 893 of SEQ ID NO: 915781
ugcagcuuuggacaacaaa

SEQ ID NO: 1105565 - RNA, 19 nt, Artificial Sequence
  Description of Artificial Sequence: Synthetic oligonucleotide
  Antisense strand to SEQ ID NO: 1105564
uuuguuguccaaagcugca

SEQ ID NO: 1105566 - RNA, 19 nt, Artificial Sequence
  Description of Artificial Sequence: Synthetic oligonucleotide
  Sense strand starting at position 1005 of SEQ ID NO: 915781
ggugcauuaguaggaaaug

SEQ ID NO: 1105567 - RNA, 19 nt, Artificial Sequence
  Description of Artificial Sequence: Synthetic oligonucleotide
  Antisense strand to SEQ ID NO: 1105566
cauuuccuacuaaugcacc

SEQ ID NO: 1105568 - RNA, 19 nt, Artificial Sequence
  Description of Artificial Sequence: Synthetic oligonucleotide
  Sense strand starting at position 1119 of SEQ ID NO: 915781
ggagcugaagacugacauu

SEQ ID NO: 1105569 - RNA, 19 nt, Artificial Sequence
  Description of Artificial Sequence: Synthetic oligonucleotide
  Antisense strand to SEQ ID NO: 1105568
aaugucagucuucagcucc

SEQ ID NO: 1105570 - RNA, 19 nt, Artificial Sequence
  Description of Artificial Sequence: Synthetic oligonucleotide
  Sense strand starting at position 1131 of SEQ ID NO: 915781
ugacauucccaggguaagu

SEQ ID NO: 1105571 - RNA, 19 nt, Artificial Sequence
  Description of Artificial Sequence: Synthetic oligonucleotide
  Antisense strand to SEQ ID NO: 1105570
acuuacccugggaauguca

SEQ ID NO: 1105572 - RNA, 19 nt, Artificial Sequence
  Description of Artificial Sequence: Synthetic oligonucleotide
  Sense strand starting at position 1321 of SEQ ID NO: 915781
ggcauauaauggguaugua

SEQ ID NO: 1105573 - RNA, 19 nt, Artificial Sequence
  Description of Artificial Sequence: Synthetic oligonucleotide
  Antisense strand to SEQ ID NO: 1105572
uacauacccauuauaugcc

SEQ ID NO: 1105574 - RNA, 19 nt, Artificial Sequence
  Description of Artificial Sequence: Synthetic oligonucleotide
  Sense strand starting at position 1322 of SEQ ID NO: 915781
gcauauaauggguauguau

SEQ ID NO: 1105575 - RNA, 19 nt, Artificial Sequence
  Description of Artificial Sequence: Synthetic oligonucleotide
  Antisense strand to SEQ ID NO: 1105574
auacauacccauuauaugc

SEQ ID NO: 1105576 - RNA, 19 nt, Artificial Sequence
  Description of Artificial Sequence: Synthetic oligonucleotide
  Sense strand starting at position 1324 of SEQ ID NO: 915781
auauaauggguauguauac

SEQ ID NO: 1105577 - RNA, 19 nt, Artificial Sequence
  Description of Artificial Sequence: Synthetic oligonucleotide
  Antisense strand to SEQ ID NO: 1105576
guauacauacccauuauau

SEQ ID NO: 1105578 - RNA, 19 nt, Artificial Sequence
  Description of Artificial Sequence: Synthetic oligonucleotide
  Sense strand starting at position 1598 of SEQ ID NO: 915781
gcucuaaugucaucagaau

SEQ ID NO: 1105579 - RNA, 19 nt, Artificial Sequence
  Description of Artificial Sequence: Synthetic oligonucleotide
  Antisense strand to SEQ ID NO: 1105578
auucugaugacauuagagc

SEQ ID NO: 1105580 - RNA, 19 nt, Artificial Sequence
  Description of Artificial Sequence: Synthetic oligonucleotide
  Sense strand starting at position 1611 of SEQ ID NO: 915781
cagaauugugaccgcaaga

SEQ ID NO: 1105581 - RNA, 19 nt, Artificial Sequence
  Description of Artificial Sequence: Synthetic oligonucleotide
  Antisense strand to SEQ ID NO: 1105580
ucuugcggucacaauucug

SEQ ID NO: 1105582 - RNA, 19 nt, Artificial Sequence
  Description of Artificial Sequence: Synthetic oligonucleotide
  Sense strand starting at position 1622 of SEQ ID NO: 915781
ccgcaagaugcucacauau

SEQ ID NO: 1105583 - RNA, 19 nt, Artificial Sequence
  Description of Artificial Sequence: Synthetic oligonucleotide
  Antisense strand to SEQ ID NO: 1105582
auaugugagcaucuugcgg

SEQ ID NO: 1105584 - RNA, 19 nt, Artificial Sequence
  Description of Artificial Sequence: Synthetic oligonucleotide
  Sense strand starting at position 2614 of SEQ ID NO: 915781
ucugaagugaccugauguu

SEQ ID NO: 1105585 - RNA, 19 nt, Artificial Sequence
  Description of Artificial Sequence: Synthetic oligonucleotide
  Antisense strand to SEQ ID NO: 1105584
aacaucaggucacuucaga

SEQ ID NO: 1105586 - RNA, 19 nt, Artificial Sequence
  Description of Artificial Sequence: Synthetic oligonucleotide
  Sense strand starting at position 2752 of SEQ ID NO: 915781
ugaugucaaugucuaaagu

SEQ ID NO: 1105587 - RNA, 19 nt, Artificial Sequence
  Description of Artificial Sequence: Synthetic oligonucleotide
  Antisense strand to SEQ ID NO: 1105586
acuuuagacauugacauca

SEQ ID NO: 1105588 - RNA, 19 nt, Artificial Sequence
  Description of Artificial Sequence: Synthetic oligonucleotide
  Sense strand starting at position 2753 of SEQ ID NO: 915781
gaugucaaugucuaaaguu

SEQ ID NO: 1105589 - RNA, 19 nt, Artificial Sequence
  Description of Artificial Sequence: Synthetic oligonucleotide
  Antisense strand to SEQ ID NO: 1105588
aacuuuagacauugacauc

SEQ ID NO: 1105590 - RNA, 19 nt, Artificial Sequence
  Description of Artificial Sequence: Synthetic oligonucleotide
  Sense strand starting at position 2806 of SEQ ID NO: 915781
gggagaaguguccaguuua

SEQ ID NO: 1105591 - RNA, 19 nt, Artificial Sequence
  Description of Artificial Sequence: Synthetic oligonucleotide
  Antisense strand to SEQ ID NO: 1105590
uaaacuggacacuucuccc

SEQ ID NO: 1105592 - RNA, 19 nt, Artificial Sequence
  Description of Artificial Sequence: Synthetic oligonucleotide
  Sense strand starting at position 2847 of SEQ ID NO: 915781
aucuuaaguuuguccuaaa

SEQ ID NO: 1105593 - RNA, 19 nt, Artificial Sequence
  Description of Artificial Sequence: Synthetic oligonucleotide
  Antisense strand to SEQ ID NO: 1105592
uuuaggacaaacuuaagau

SEQ ID NO: 1105594 - RNA, 19 nt, Artificial Sequence
  Description of Artificial Sequence: Synthetic oligonucleotide
  Sense strand starting at position 2848 of SEQ ID NO: 915781
ucuuaaguuuguccuaaag

SEQ ID NO: 1105595 - RNA, 19 nt, Artificial Sequence
  Description of Artificial Sequence: Synthetic oligonucleotide
  Antisense strand to SEQ ID NO: 1105594
cuuuaggacaaacuuaaga

SEQ ID NO: 1105596 - RNA, 19 nt, Artificial Sequence
  Description of Artificial Sequence: Synthetic oligonucleotide
  Sense strand starting at position 3126 of SEQ ID NO: 915781
guguuauaggcagagggua

SEQ ID NO: 1105597 - RNA, 19 nt, Artificial Sequence
  Description of Artificial Sequence: Synthetic oligonucleotide
  Antisense strand to SEQ ID NO: 1105596
uacccucugccuauaacac

SEQ ID NO: 1105598 - RNA, 19 nt, Artificial Sequence
  Description of Artificial Sequence: Synthetic oligonucleotide
  Sense strand starting at position 3128 of SEQ ID NO: 915781
guuauaggcagaggguaau

SEQ ID NO: 1105599 - RNA, 19 nt, Artificial Sequence
  Description of Artificial Sequence: Synthetic oligonucleotide
  Antisense strand to SEQ ID NO: 1105598
auuacccucugccuauaac

SEQ ID NO: 1105600 - RNA, 19 nt, Artificial Sequence
  Description of Artificial Sequence: Synthetic oligonucleotide
  Sense strand starting at position 3138 of SEQ ID NO: 915781
gaggguaaugagcagugau

SEQ ID NO: 1105601 - RNA, 19 nt, Artificial Sequence
  Description of Artificial Sequence: Synthetic oligonucleotide
  Antisense strand to SEQ ID NO: 1105600
aucacugcucauuacccuc

SEQ ID NO: 1105602 - RNA, 19 nt, Artificial Sequence
  Description of Artificial Sequence: Synthetic oligonucleotide
  Sense strand starting at position 3146 of SEQ ID NO: 915781
ugagcagugaucugauuga

SEQ ID NO: 1105603 - RNA, 19 nt, Artificial Sequence
  Description of Artificial Sequence: Synthetic oligonucleotide
  Antisense strand to SEQ ID NO: 1105602
ucaaucagaucacugcuca

SEQ ID NO: 1105604 - RNA, 19 nt, Artificial Sequence
  Description of Artificial Sequence: Synthetic oligonucleotide
  Sense strand starting at position 3150 of SEQ ID NO: 915781
cagugaucugauugaaucu

SEQ ID NO: 1105605 - RNA, 19 nt, Artificial Sequence
  Description of Artificial Sequence: Synthetic oligonucleotide
  Antisense strand to SEQ ID NO: 1105604
agauucaaucagaucacug

SEQ ID NO: 1105606 - RNA, 19 nt, Artificial Sequence
  Description of Artificial Sequence: Synthetic oligonucleotide
  Sense strand starting at position 3162 of SEQ ID NO: 915781
ugaaucuugcaauaagcaa

SEQ ID NO: 1105607 - RNA, 19 nt, Artificial Sequence
  Description of Artificial Sequence: Synthetic oligonucleotide
  Antisense strand to SEQ ID NO: 1105606
uugcuuauugcaagauuca

SEQ ID NO: 1105608 - RNA, 19 nt, Artificial Sequence
  Description of Artificial Sequence: Synthetic oligonucleotide
  Sense strand starting at position 3191 of SEQ ID NO: 915781
ggaucuugccaugggauga

SEQ ID NO: 1105609 - RNA, 19 nt, Artificial Sequence
  Description of Artificial Sequence: Synthetic oligonucleotide
  Antisense strand to SEQ ID NO: 1105608
ucaucccauggcaagaucc

SEQ ID NO: 1105610 - RNA, 19 nt, Artificial Sequence
  Description of Artificial Sequence: Synthetic oligonucleotide
  Sense strand starting at position 3204 of SEQ ID NO: 915781
ggaugaugccauggcucaa

SEQ ID NO: 1105611 - RNA, 19 nt, Artificial Sequence
  Description of Artificial Sequence: Synthetic oligonucleotide
  Antisense strand to SEQ ID NO: 1105610
uugagccauggcaucaucc

SEQ ID NO: 1105612 - RNA, 19 nt, Artificial Sequence
  Description of Artificial Sequence: Synthetic oligonucleotide
  Sense strand starting at position 3217 of SEQ ID NO: 915781
gcucaaucugauuagauca

SEQ ID NO: 1105613 - RNA, 19 nt, Artificial Sequence
  Description of Artificial Sequence: Synthetic oligonucleotide
  Antisense strand to SEQ ID NO: 1105612
ugaucuaaucagauugagc

SEQ ID NO: 1105614 - RNA, 19 nt, Artificial Sequence
  Description of Artificial Sequence: Synthetic oligonucleotide
  Sense strand starting at position 3225 of SEQ ID NO: 915781
ugauuagaucauggcuuau

SEQ ID NO: 1105615 - RNA, 19 nt, Artificial Sequence
  Description of Artificial Sequence: Synthetic oligonucleotide
  Antisense strand to SEQ ID NO: 1105614
auaagccaugaucuaauca

SEQ ID NO: 1105616 - RNA, 19 nt, Artificial Sequence
  Description of Artificial Sequence: Synthetic oligonucleotide
  Sense strand starting at position 3227 of SEQ ID NO: 915781
auuagaucauggcuuauac

SEQ ID NO: 1105617 - RNA, 19 nt, Artificial Sequence
  Description of Artificial Sequence: Synthetic oligonucleotide
  Antisense strand to SEQ ID NO: 1105616
guauaagccaugaucuaau

SEQ ID NO: 1105618 - RNA, 19 nt, Artificial Sequence
  Description of Artificial Sequence: Synthetic oligonucleotide
  Sense strand starting at position 3420 of SEQ ID NO: 915781
gcugguucugcgcuuacau

SEQ ID NO: 1105619 - RNA, 19 nt, Artificial Sequence
  Description of Artificial Sequence: Synthetic oligonucleotide
  Antisense strand to SEQ ID NO: 1105618
auguaagcgcagaaccagc

SEQ ID NO: 1105620 - RNA, 19 nt, Artificial Sequence
  Description of Artificial Sequence: Synthetic oligonucleotide
  Sense strand starting at position 3421 of SEQ ID NO: 915781
cugguucugcgcuuacaua

SEQ ID NO: 1105621 - RNA, 19 nt, Artificial Sequence
  Description of Artificial Sequence: Synthetic oligonucleotide
  Antisense strand to SEQ ID NO: 1105620
uauguaagcgcagaaccag

SEQ ID NO: 1105622 - RNA, 19 nt, Artificial Sequence
  Description of Artificial Sequence: Synthetic oligonucleotide
  Sense strand starting at position 3696 of SEQ ID NO: 915781
gccucagagucacucugaa

SEQ ID NO: 1105623 - RNA, 19 nt, Artificial Sequence
  Description of Artificial Sequence: Synthetic oligonucleotide
  Antisense strand to SEQ ID NO: 1105622
uucagagugacucugaggc

SEQ ID NO: 1105624 - RNA, 19 nt, Artificial Sequence
  Description of Artificial Sequence: Synthetic oligonucleotide
  Sense strand starting at position 3942 of SEQ ID NO: 915781
guuugaaagcuagguugaa

SEQ ID NO: 1105625 - RNA, 19 nt, Artificial Sequence
  Description of Artificial Sequence: Synthetic oligonucleotide
  Antisense strand to SEQ ID NO: 1105624
uucaaccuagcuuucaaac

SEQ ID NO: 1105626 - RNA, 19 nt, Artificial Sequence
  Description of Artificial Sequence: Synthetic oligonucleotide
  Sense strand starting at position 3943 of SEQ ID NO: 915781
uuugaaagcuagguugaaa

SEQ ID NO: 1105627 - RNA, 19 nt, Artificial Sequence
  Description of Artificial Sequence: Synthetic oligonucleotide
  Antisense strand to SEQ ID NO: 1105626
uuucaaccuagcuuucaaa

SEQ ID NO: 1105628 - RNA, 19 nt, Artificial Sequence
  Description of Artificial Sequence: Synthetic oligonucleotide
  Sense strand starting at position 3954 of SEQ ID NO: 915781
gguugaaauuguuucugag

SEQ ID NO: 1105629 - RNA, 19 nt, Artificial Sequence
  Description of Artificial Sequence: Synthetic oligonucleotide
  Antisense strand to SEQ ID NO: 1105628
cucagaaacaauuucaacc

SEQ ID NO: 1105630 - RNA, 19 nt, Artificial Sequence
  Description of Artificial Sequence: Synthetic oligonucleotide
  Sense strand starting at position 287 of SEQ ID NO: 915782
guugaagugaagugguaca

SEQ ID NO: 1105631 - RNA, 19 nt, Artificial Sequence
  Description of Artificial Sequence: Synthetic oligonucleotide
  Antisense strand to SEQ ID NO: 1105630
uguaccacuucacuucaac

SEQ ID NO: 1105632 - RNA, 19 nt, Artificial Sequence
  Description of Artificial Sequence: Synthetic oligonucleotide
  Sense strand starting at position 623 of SEQ ID NO: 915782
cccagugcuuugguaggau

SEQ ID NO: 1105633 - RNA, 19 nt, Artificial Sequence
  Description of Artificial Sequence: Synthetic oligonucleotide
  Antisense strand to SEQ ID NO: 1105632
auccuaccaaagcacuggg

SEQ ID NO: 1105634 - RNA, 19 nt, Artificial Sequence
  Description of Artificial Sequence: Synthetic oligonucleotide
  Sense strand starting at position 788 of SEQ ID NO: 915782
aagacaacccucugagagu

SEQ ID NO: 1105635 - RNA, 19 nt, Artificial Sequence
  Description of Artificial Sequence: Synthetic oligonucleotide
  Antisense strand to SEQ ID NO: 1105634
acucucagaggguugucuu

SEQ ID NO: 1105636 - RNA, 19 nt, Artificial Sequence
  Description of Artificial Sequence: Synthetic oligonucleotide
  Sense strand starting at position 797 of SEQ ID NO: 915782
cucugagaguagcuauuau

SEQ ID NO: 1105637 - RNA, 19 nt, Artificial Sequence
  Description of Artificial Sequence: Synthetic oligonucleotide
  Antisense strand to SEQ ID NO: 1105636
auaauagcuacucucagag

SEQ ID NO: 1105638 - RNA, 19 nt, Artificial Sequence
  Description of Artificial Sequence: Synthetic oligonucleotide
  Sense strand starting at position 804 of SEQ ID NO: 915782
aguagcuauuaucucuaua

SEQ ID NO: 1105639 - RNA, 19 nt, Artificial Sequence
  Description of Artificial Sequence: Synthetic oligonucleotide
  Antisense strand to SEQ ID NO: 1105638
uauagagauaauagcuacu

SEQ ID NO: 1105640 - RNA, 19 nt, Artificial Sequence
  Description of Artificial Sequence: Synthetic oligonucleotide
  Sense strand starting at position 807 of SEQ ID NO: 915782
agcuauuaucucuauagua

SEQ ID NO: 1105641 - RNA, 19 nt, Artificial Sequence
  Description of Artificial Sequence: Synthetic oligonucleotide
  Antisense strand to SEQ ID NO: 1105640
uacuauagagauaauagcu

SEQ ID NO: 1105642 - RNA, 19 nt, Artificial Sequence
  Description of Artificial Sequence: Synthetic oligonucleotide
  Sense strand starting at position 809 of SEQ ID NO: 915782
cuauuaucucuauaguagu

SEQ ID NO: 1105643 - RNA, 19 nt, Artificial Sequence
  Description of Artificial Sequence: Synthetic oligonucleotide
  Antisense strand to SEQ ID NO: 1105642
acuacuauagagauaauag

SEQ ID NO: 1105644 - RNA, 19 nt, Artificial Sequence
  Description of Artificial Sequence: Synthetic oligonucleotide
  Sense strand starting at position 815 of SEQ ID NO: 915782
ucucuauaguagucugaca

SEQ ID NO: 1105645 - RNA, 19 nt, Artificial Sequence
  Description of Artificial Sequence: Synthetic oligonucleotide
  Antisense strand to SEQ ID NO: 1105644
ugucagacuacuauagaga

SEQ ID NO: 1105646 - RNA, 19 nt, Artificial Sequence
  Description of Artificial Sequence: Synthetic oligonucleotide
  Sense strand starting at position 817 of SEQ ID NO: 915782
ucuauaguagucugacaac

SEQ ID NO: 1105647 - RNA, 19 nt, Artificial Sequence
  Description of Artificial Sequence: Synthetic oligonucleotide
  Antisense strand to SEQ ID NO: 1105646
guugucagacuacuauaga

SEQ ID NO: 1105648 - RNA, 19 nt, Artificial Sequence
  Description of Artificial Sequence: Synthetic oligonucleotide
  Sense strand starting at position 862 of SEQ ID NO: 915782
auggaauaaugucaggaca

SEQ ID NO: 1105649 - RNA, 19 nt, Artificial Sequence
  Description of Artificial Sequence: Synthetic oligonucleotide
  Antisense strand to SEQ ID NO: 1105648
uguccugacauuauuccau

SEQ ID NO: 1105650 - RNA, 19 nt, Artificial Sequence
  Description of Artificial Sequence: Synthetic oligonucleotide
  Sense strand starting at position 1120 of SEQ ID NO: 915782
ugaagaaguugggugguua

SEQ ID NO: 1105651 - RNA, 19 nt, Artificial Sequence
  Description of Artificial Sequence: Synthetic oligonucleotide
  Antisense strand to SEQ ID NO: 1105650
uaaccacccaacuucuuca

SEQ ID NO: 1105652 - RNA, 19 nt, Artificial Sequence
  Description of Artificial Sequence: Synthetic oligonucleotide
  Sense strand starting at position 1121 of SEQ ID NO: 915782
gaagaaguugggugguuag

SEQ ID NO: 1105653 - RNA, 19 nt, Artificial Sequence
  Description of Artificial Sequence: Synthetic oligonucleotide
  Antisense strand to SEQ ID NO: 1105652
cuaaccacccaacuucuuc

SEQ ID NO: 1105654 - RNA, 19 nt, Artificial Sequence
  Description of Artificial Sequence: Synthetic oligonucleotide
  Sense strand starting at position 1200 of SEQ ID NO: 915782
gcaagaaaucucugauccc

SEQ ID NO: 1105655 - RNA, 19 nt, Artificial Sequence
  Description of Artificial Sequence: Synthetic oligonucleotide
  Antisense strand to SEQ ID NO: 1105654
gggaucagagauuucuugc

SEQ ID NO: 1105656 - RNA, 19 nt, Artificial Sequence
  Description of Artificial Sequence: Synthetic oligonucleotide
  Sense strand starting at position 1304 of SEQ ID NO: 915782
ccguguuugguguuuguca

SEQ ID NO: 1105657 - RNA, 19 nt, Artificial Sequence
  Description of Artificial Sequence: Synthetic oligonucleotide
  Antisense strand to SEQ ID NO: 1105656
ugacaaacaccaaacacgg

SEQ ID NO: 1105658 - RNA, 19 nt, Artificial Sequence
  Description of Artificial Sequence: Synthetic oligonucleotide
  Sense strand starting at position 1311 of SEQ ID NO: 915782
ugguguuugucagcauuug

SEQ ID NO: 1105659 - RNA, 19 nt, Artificial Sequence
  Description of Artificial Sequence: Synthetic oligonucleotide
  Antisense strand to SEQ ID NO: 1105658
caaaugcugacaaacacca

SEQ ID NO: 1105660 - RNA, 19 nt, Artificial Sequence
  Description of Artificial Sequence: Synthetic oligonucleotide
  Sense strand starting at position 1312 of SEQ ID NO: 915782
gguguuugucagcauuuga

SEQ ID NO: 1105661 - RNA, 19 nt, Artificial Sequence
  Description of Artificial Sequence: Synthetic oligonucleotide
  Antisense strand to SEQ ID NO: 1105660
ucaaaugcugacaaacacc

SEQ ID NO: 1105662 - RNA, 19 nt, Artificial Sequence
  Description of Artificial Sequence: Synthetic oligonucleotide
  Sense strand starting at position 1634 of SEQ ID NO: 915782
acaccuugucuagguaaac

SEQ ID NO: 1105663 - RNA, 19 nt, Artificial Sequence
  Description of Artificial Sequence: Synthetic oligonucleotide
  Antisense strand to SEQ ID NO: 1105662
guuuaccuagacaaggugu

SEQ ID NO: 1105664 - RNA, 19 nt, Artificial Sequence
  Description of Artificial Sequence: Synthetic oligonucleotide
  Sense strand starting at position 1987 of SEQ ID NO: 915782
agcccuagguccuucgaga

SEQ ID NO: 1105665 - RNA, 19 nt, Artificial Sequence
  Description of Artificial Sequence: Synthetic oligonucleotide
  Antisense strand to SEQ ID NO: 1105664
ucucgaaggaccuagggcu

SEQ ID NO: 1105666 - RNA, 19 nt, Artificial Sequence
  Description of Artificial Sequence: Synthetic oligonucleotide
  Sense strand starting at position 1995 of SEQ ID NO: 915782
guccuucgagacuagaguu

SEQ ID NO: 1105667 - RNA, 19 nt, Artificial Sequence
  Description of Artificial Sequence: Synthetic oligonucleotide
  Antisense strand to SEQ ID NO: 1105666
aacucuagucucgaaggac

SEQ ID NO: 1105668 - RNA, 19 nt, Artificial Sequence
  Description of Artificial Sequence: Synthetic oligonucleotide
  Sense strand starting at position 2047 of SEQ ID NO: 915782
ccgggagagcccugaauuc

SEQ ID NO: 1105669 - RNA, 19 nt, Artificial Sequence
  Description of Artificial Sequence: Synthetic oligonucleotide
  Antisense strand to SEQ ID NO: 1105668
gaauucagggcucucccgg

SEQ ID NO: 1105670 - RNA, 19 nt, Artificial Sequence
  Description of Artificial Sequence: Synthetic oligonucleotide
  Sense strand starting at position 2067 of SEQ ID NO: 915782
cccaguuuccuggguggaa

SEQ ID NO: 1105671 - RNA, 19 nt, Artificial Sequence
  Description of Artificial Sequence: Synthetic oligonucleotide
  Antisense strand to SEQ ID NO: 1105670
uuccacccaggaaacuggg

SEQ ID NO: 1105672 - RNA, 19 nt, Artificial Sequence
  Description of Artificial Sequence: Synthetic oligonucleotide
  Sense strand starting at position 2177 of SEQ ID NO: 915782
cggaauaugugcccagaug

SEQ ID NO: 1105673 - RNA, 19 nt, Artificial Sequence
  Description of Artificial Sequence: Synthetic oligonucleotide
  Antisense strand to SEQ ID NO: 1105672
caucugggcacauauuccg

SEQ ID NO: 1105674 - RNA, 19 nt, Artificial Sequence
  Description of Artificial Sequence: Synthetic oligonucleotide
  Sense strand starting at position 2225 of SEQ ID NO: 915782
aguagaguguuccugggau

SEQ ID NO: 1105675 - RNA, 19 nt, Artificial Sequence
  Description of Artificial Sequence: Synthetic oligonucleotide
  Antisense strand to SEQ ID NO: 1105674
aucccaggaacacucuacu

SEQ ID NO: 1105676 - RNA, 19 nt, Artificial Sequence
  Description of Artificial Sequence: Synthetic oligonucleotide
  Sense strand starting at position 2315 of SEQ ID NO: 915782
ggauuaaaugcauguacac

SEQ ID NO: 1105677 - RNA, 19 nt, Artificial Sequence
  Description of Artificial Sequence: Synthetic oligonucleotide
  Antisense strand to SEQ ID NO: 1105676
guguacaugcauuuaaucc

SEQ ID NO: 1105678 - RNA, 19 nt, Artificial Sequence
  Description of Artificial Sequence: Synthetic oligonucleotide
  Sense strand starting at position 2380 of SEQ ID NO: 915782
ucugacgugcaucagaauu

SEQ ID NO: 1105679 - RNA, 19 nt, Artificial Sequence
  Description of Artificial Sequence: Synthetic oligonucleotide
  Antisense strand to SEQ ID NO: 1105678
aauucugaugcacgucaga

SEQ ID NO: 1105680 - RNA, 19 nt, Artificial Sequence
  Description of Artificial Sequence: Synthetic oligonucleotide
  Sense strand starting at position 3031 of SEQ ID NO: 915782
uuuagaaaguucccaagua

SEQ ID NO: 1105681 - RNA, 19 nt, Artificial Sequence
  Description of Artificial Sequence: Synthetic oligonucleotide
  Antisense strand to SEQ ID NO: 1105680
uacuugggaacuuucuaaa

SEQ ID NO: 1105682 - RNA, 19 nt, Artificial Sequence
  Description of Artificial Sequence: Synthetic oligonucleotide
  Sense strand starting at position 3162 of SEQ ID NO: 915782
ucaauacuggccuggacaa

SEQ ID NO: 1105683 - RNA, 19 nt, Artificial Sequence
  Description of Artificial Sequence: Synthetic oligonucleotide
  Antisense strand to SEQ ID NO: 1105682
uuguccaggccaguauuga

SEQ ID NO: 1105684 - RNA, 19 nt, Artificial Sequence
  Description of Artificial Sequence: Synthetic oligonucleotide
  Sense strand starting at position 3232 of SEQ ID NO: 915782
agcuuaagugacugaugga

SEQ ID NO: 1105685 - RNA, 19 nt, Artificial Sequence
  Description of Artificial Sequence: Synthetic oligonucleotide
  Antisense strand to SEQ ID NO: 1105684
uccaucagucacuuaagcu

SEQ ID NO: 1105686 - RNA, 19 nt, Artificial Sequence
  Description of Artificial Sequence: Synthetic oligonucleotide
  Sense strand starting at position 3246 of SEQ ID NO: 915782
auggaaugugcugagugaa

SEQ ID NO: 1105687 - RNA, 19 nt, Artificial Sequence
  Description of Artificial Sequence: Synthetic oligonucleotide
  Antisense strand to SEQ ID NO: 1105686
uucacucagcacauuccau

SEQ ID NO: 1105688 - RNA, 19 nt, Artificial Sequence
  Description of Artificial Sequence: Synthetic oligonucleotide
  Sense strand starting at position 3272 of SEQ ID NO: 915782
guggaaauguggaggauaa

SEQ ID NO: 1105689 - RNA, 19 nt, Artificial Sequence
  Description of Artificial Sequence: Synthetic oligonucleotide
  Antisense strand to SEQ ID NO: 1105688
uuauccuccacauuuccac

SEQ ID NO: 1105690 - RNA, 19 nt, Artificial Sequence
  Description of Artificial Sequence: Synthetic oligonucleotide
  Sense strand starting at position 3426 of SEQ ID NO: 915782
aggguucugacuuggacaa

SEQ ID NO: 1105691 - RNA, 19 nt, Artificial Sequence
  Description of Artificial Sequence: Synthetic oligonucleotide
  Antisense strand to SEQ ID NO: 1105690
uuguccaagucagaacccu

SEQ ID NO: 1105692 - RNA, 19 nt, Artificial Sequence
  Description of Artificial Sequence: Synthetic oligonucleotide
  Sense strand starting at position 3483 of SEQ ID NO: 915782
cagggaacgaucuggaguu

SEQ ID NO: 1105693 - RNA, 19 nt, Artificial Sequence
  Description of Artificial Sequence: Synthetic oligonucleotide
  Antisense strand to SEQ ID NO: 1105692
aacuccagaucguucccug

SEQ ID NO: 1105694 - RNA, 19 nt, Artificial Sequence
  Description of Artificial Sequence: Synthetic oligonucleotide
  Sense strand starting at position 3490 of SEQ ID NO: 915782
cgaucuggaguucagauua

SEQ ID NO: 1105695 - RNA, 19 nt, Artificial Sequence
  Description of Artificial Sequence: Synthetic oligonucleotide
  Antisense strand to SEQ ID NO: 1105694
uaaucugaacuccagaucg

SEQ ID NO: 1105696 - RNA, 19 nt, Artificial Sequence
  Description of Artificial Sequence: Synthetic oligonucleotide
  Sense strand starting at position 3556 of SEQ ID NO: 915782
caaaguggcccuugaaaca

SEQ ID NO: 1105697 - RNA, 19 nt, Artificial Sequence
  Description of Artificial Sequence: Synthetic oligonucleotide
  Antisense strand to SEQ ID NO: 1105696
uguuucaagggccacuuug

SEQ ID NO: 1105698 - RNA, 19 nt, Artificial Sequence
  Description of Artificial Sequence: Synthetic oligonucleotide
  Sense strand starting at position 3628 of SEQ ID NO: 915782
acuuguucuuugccaggga

SEQ ID NO: 1105699 - RNA, 19 nt, Artificial Sequence
  Description of Artificial Sequence: Synthetic oligonucleotide
  Antisense strand to SEQ ID NO: 1105698
ucccuggcaaagaacaagu

SEQ ID NO: 1105700 - RNA, 19 nt, Artificial Sequence
  Description of Artificial Sequence: Synthetic oligonucleotide
  Sense strand starting at position 3683 of SEQ ID NO: 915782
uauggucugugagcuagaa

SEQ ID NO: 1105701 - RNA, 19 nt, Artificial Sequence
  Description of Artificial Sequence: Synthetic oligonucleotide
  Antisense strand to SEQ ID NO: 1105700
uucuagcucacagaccaua

SEQ ID NO: 1105702 - RNA, 19 nt, Artificial Sequence
  Description of Artificial Sequence: Synthetic oligonucleotide
  Sense strand starting at position 3685 of SEQ ID NO: 915782
uggucugugagcuagaaug

SEQ ID NO: 1105703 - RNA, 19 nt, Artificial Sequence
  Description of Artificial Sequence: Synthetic oligonucleotide
  Antisense strand to SEQ ID NO: 1105702
cauucuagcucacagacca

SEQ ID NO: 1105704 - RNA, 19 nt, Artificial Sequence
  Description of Artificial Sequence: Synthetic oligonucleotide
  Sense strand starting at position 3687 of SEQ ID NO: 915782
gucugugagcuagaauggu

SEQ ID NO: 1105705 - RNA, 19 nt, Artificial Sequence
  Description of Artificial Sequence: Synthetic oligonucleotide
  Antisense strand to SEQ ID NO: 1105704
accauucuagcucacagac

SEQ ID NO: 1105706 - RNA, 19 nt, Artificial Sequence
  Description of Artificial Sequence: Synthetic oligonucleotide
  Sense strand starting at position 3784 of SEQ ID NO: 915782
ccguaacucuuauuggaac

SEQ ID NO: 1105707 - RNA, 19 nt, Artificial Sequence
  Description of Artificial Sequence: Synthetic oligonucleotide
  Antisense strand to SEQ ID NO: 1105706
guuccaauaagaguuacgg

SEQ ID NO: 1105708 - RNA, 19 nt, Artificial Sequence
  Description of Artificial Sequence: Synthetic oligonucleotide
  Sense strand starting at position 3826 of SEQ ID NO: 915782
uaugaucuauggcugcuua

SEQ ID NO: 1105709 - RNA, 19 nt, Artificial Sequence
  Description of Artificial Sequence: Synthetic oligonucleotide
  Antisense strand to SEQ ID NO: 1105708
uaagcagccauagaucaua

SEQ ID NO: 1105710 - RNA, 19 nt, Artificial Sequence
  Description of Artificial Sequence: Synthetic oligonucleotide
  Sense strand starting at position 25 of SEQ ID NO: 915783
acugccagucucugugaua

SEQ ID NO: 1105711 - RNA, 19 nt, Artificial Sequence
  Description of Artificial Sequence: Synthetic oligonucleotide
  Antisense strand to SEQ ID NO: 1105710
uaucacagagacuggcagu

SEQ ID NO: 1105712 - RNA, 19 nt, Artificial Sequence
  Description of Artificial Sequence: Synthetic oligonucleotide
  Sense strand starting at position 26 of SEQ ID NO: 915783
cugccagucucugugauag

SEQ ID NO: 1105713 - RNA, 19 nt, Artificial Sequence
  Description of Artificial Sequence: Synthetic oligonucleotide
  Antisense strand to SEQ ID NO: 1105712
cuaucacagagacuggcag

SEQ ID NO: 1105714 - RNA, 19 nt, Artificial Sequence
  Description of Artificial Sequence: Synthetic oligonucleotide
  Sense strand starting at position 49 of SEQ ID NO: 915783
ucugguugcucaucucuga

SEQ ID NO: 1105715 - RNA, 19 nt, Artificial Sequence
  Description of Artificial Sequence: Synthetic oligonucleotide
  Antisense strand to SEQ ID NO: 1105714
ucagagaugagcaaccaga

SEQ ID NO: 1105716 - RNA, 19 nt, Artificial Sequence
  Description of Artificial Sequence: Synthetic oligonucleotide
  Sense strand starting at position 107 of SEQ ID NO: 915783
gaaguuggugcucaguaau

SEQ ID NO: 1105717 - RNA, 19 nt, Artificial Sequence
  Description of Artificial Sequence: Synthetic oligonucleotide
  Antisense strand to SEQ ID NO: 1105716
auuacugagcaccaacuuc

SEQ ID NO: 1105718 - RNA, 19 nt, Artificial Sequence
  Description of Artificial Sequence: Synthetic oligonucleotide
  Sense strand starting at position 277 of SEQ ID NO: 915783
cucuguuauuaggcucuga

SEQ ID NO: 1105719 - RNA, 19 nt, Artificial Sequence
  Description of Artificial Sequence: Synthetic oligonucleotide
  Antisense strand to SEQ ID NO: 1105718
ucagagccuaauaacagag

SEQ ID NO: 1105720 - RNA, 19 nt, Artificial Sequence
  Description of Artificial Sequence: Synthetic oligonucleotide
  Sense strand starting at position 281 of SEQ ID NO: 915783
guuauuaggcucugaugga

SEQ ID NO: 1105721 - RNA, 19 nt, Artificial Sequence
  Description of Artificial Sequence: Synthetic oligonucleotide
  Antisense strand to SEQ ID NO: 1105720
uccaucagagccuaauaac

SEQ ID NO: 1105722 - RNA, 19 nt, Artificial Sequence
  Description of Artificial Sequence: Synthetic oligonucleotide
  Sense strand starting at position 322 of SEQ ID NO: 915783
ggaguuggaguaugaccau

SEQ ID NO: 1105723 - RNA, 19 nt, Artificial Sequence
  Description of Artificial Sequence: Synthetic oligonucleotide
  Antisense strand to SEQ ID NO: 1105722
auggucauacuccaacucc

SEQ ID NO: 1105724 - RNA, 19 nt, Artificial Sequence
  Description of Artificial Sequence: Synthetic oligonucleotide
  Sense strand starting at position 337 of SEQ ID NO: 915783
ccaucugaauuagaagacu

SEQ ID NO: 1105725 - RNA, 19 nt, Artificial Sequence
  Description of Artificial Sequence: Synthetic oligonucleotide
  Antisense strand to SEQ ID NO: 1105724
agucuucuaauucagaugg

SEQ ID NO: 1105726 - RNA, 19 nt, Artificial Sequence
  Description of Artificial Sequence: Synthetic oligonucleotide
  Sense strand starting at position 529 of SEQ ID NO: 915783
cccauugguguagaaaucu

SEQ ID NO: 1105727 - RNA, 19 nt, Artificial Sequence
  Description of Artificial Sequence: Synthetic oligonucleotide
  Antisense strand to SEQ ID NO: 1105726
agauuucuacaccaauggg

SEQ ID NO: 1105728 - RNA, 19 nt, Artificial Sequence
  Description of Artificial Sequence: Synthetic oligonucleotide
  Sense strand starting at position 539 of SEQ ID NO: 915783
uagaaaucugguggguugu

SEQ ID NO: 1105729 - RNA, 19 nt, Artificial Sequence
  Description of Artificial Sequence: Synthetic oligonucleotide
  Antisense strand to SEQ ID NO: 1105728
acaacccaccagauuucua

SEQ ID NO: 1105730 - RNA, 19 nt, Artificial Sequence
  Description of Artificial Sequence: Synthetic oligonucleotide
  Sense strand starting at position 540 of SEQ ID NO: 915783
agaaaucugguggguuguu

SEQ ID NO: 1105731 - RNA, 19 nt, Artificial Sequence
  Description of Artificial Sequence: Synthetic oligonucleotide
  Antisense strand to SEQ ID NO: 1105730
aacaacccaccagauuucu

SEQ ID NO: 1105732 - RNA, 19 nt, Artificial Sequence
  Description of Artificial Sequence: Synthetic oligonucleotide
  Sense strand starting at position 681 of SEQ ID NO: 915783
acagauggccauuggugaa

SEQ ID NO: 1105733 - RNA, 19 nt, Artificial Sequence
  Description of Artificial Sequence: Synthetic oligonucleotide
  Antisense strand to SEQ ID NO: 1105732
uucaccaauggccaucugu

SEQ ID NO: 1105734 - RNA, 19 nt, Artificial Sequence
  Description of Artificial Sequence: Synthetic oligonucleotide
  Sense strand starting at position 789 of SEQ ID NO: 915783
auaagaggccucugacuua

SEQ ID NO: 1105735 - RNA, 19 nt, Artificial Sequence
  Description of Artificial Sequence: Synthetic oligonucleotide
  Antisense strand to SEQ ID NO: 1105734
uaagucagaggccucuuau

SEQ ID NO: 1105736 - RNA, 19 nt, Artificial Sequence
  Description of Artificial Sequence: Synthetic oligonucleotide
  Sense strand starting at position 792 of SEQ ID NO: 915783
agaggccucugacuuacau

SEQ ID NO: 1105737 - RNA, 19 nt, Artificial Sequence
  Description of Artificial Sequence: Synthetic oligonucleotide
  Antisense strand to SEQ ID NO: 1105736
auguaagucagaggccucu

SEQ ID NO: 1105738 - RNA, 19 nt, Artificial Sequence
  Description of Artificial Sequence: Synthetic oligonucleotide
  Sense strand starting at position 821 of SEQ ID NO: 915783
ggcugauacccuuaagcug

SEQ ID NO: 1105739 - RNA, 19 nt, Artificial Sequence
  Description of Artificial Sequence: Synthetic oligonucleotide
  Antisense strand to SEQ ID NO: 1105738
cagcuuaaggguaucagcc

SEQ ID NO: 1105740 - RNA, 19 nt, Artificial Sequence
  Description of Artificial Sequence: Synthetic oligonucleotide
  Sense strand starting at position 946 of SEQ ID NO: 915783
gcagcauauuaucuuggua

SEQ ID NO: 1105741 - RNA, 19 nt, Artificial Sequence
  Description of Artificial Sequence: Synthetic oligonucleotide
  Antisense strand to SEQ ID NO: 1105740
uaccaagauaauaugcugc

SEQ ID NO: 1105742 - RNA, 19 nt, Artificial Sequence
  Description of Artificial Sequence: Synthetic oligonucleotide
  Sense strand starting at position 949 of SEQ ID NO: 915783
gcauauuaucuugguauca

SEQ ID NO: 1105743 - RNA, 19 nt, Artificial Sequence
  Description of Artificial Sequence: Synthetic oligonucleotide
  Antisense strand to SEQ ID NO: 1105742
ugauaccaagauaauaugc

SEQ ID NO: 1105744 - RNA, 19 nt, Artificial Sequence
  Description of Artificial Sequence: Synthetic oligonucleotide
  Sense strand starting at position 1215 of SEQ ID NO: 915783
gggacucagagauggguuu

SEQ ID NO: 1105745 - RNA, 19 nt, Artificial Sequence
  Description of Artificial Sequence: Synthetic oligonucleotide
  Antisense strand to SEQ ID NO: 1105744
aaacccaucucugaguccc

SEQ ID NO: 1105746 - RNA, 19 nt, Artificial Sequence
  Description of Artificial Sequence: Synthetic oligonucleotide
  Sense strand starting at position 1398 of SEQ ID NO: 915783
cccaaauuccagugaucug

SEQ ID NO: 1105747 - RNA, 19 nt, Artificial Sequence
  Description of Artificial Sequence: Synthetic oligonucleotide
  Antisense strand to SEQ ID NO: 1105746
cagaucacuggaauuuggg

SEQ ID NO: 1105748 - RNA, 19 nt, Artificial Sequence
  Description of Artificial Sequence: Synthetic oligonucleotide
  Sense strand starting at position 1586 of SEQ ID NO: 915783
guguguuuagcagagaaag

SEQ ID NO: 1105749 - RNA, 19 nt, Artificial Sequence
  Description of Artificial Sequence: Synthetic oligonucleotide
  Antisense strand to SEQ ID NO: 1105748
cuuucucugcuaaacacac

SEQ ID NO: 1105750 - RNA, 19 nt, Artificial Sequence
  Description of Artificial Sequence: Synthetic oligonucleotide
  Sense strand starting at position 1588 of SEQ ID NO: 915783
guguuuagcagagaaagga

SEQ ID NO: 1105751 - RNA, 19 nt, Artificial Sequence
  Description of Artificial Sequence: Synthetic oligonucleotide
  Antisense strand to SEQ ID NO: 1105750
uccuuucucugcuaaacac

SEQ ID NO: 1105752 - RNA, 19 nt, Artificial Sequence
  Description of Artificial Sequence: Synthetic oligonucleotide
  Sense strand starting at position 2383 of SEQ ID NO: 915783
guaggagucucuguagaaa

SEQ ID NO: 1105753 - RNA, 19 nt, Artificial Sequence
  Description of Artificial Sequence: Synthetic oligonucleotide
  Antisense strand to SEQ ID NO: 1105752
uuucuacagagacuccuac

SEQ ID NO: 1105754 - RNA, 19 nt, Artificial Sequence
  Description of Artificial Sequence: Synthetic oligonucleotide
  Sense strand starting at position 3033 of SEQ ID NO: 915783
gccagccugacagguuaua

SEQ ID NO: 1105755 - RNA, 19 nt, Artificial Sequence
  Description of Artificial Sequence: Synthetic oligonucleotide
  Antisense strand to SEQ ID NO: 1105754
uauaaccugucaggcuggc

SEQ ID NO: 1105756 - RNA, 19 nt, Artificial Sequence
  Description of Artificial Sequence: Synthetic oligonucleotide
  Sense strand starting at position 3151 of SEQ ID NO: 915783
cccucacucuuggugagua

SEQ ID NO: 1105757 - RNA, 19 nt, Artificial Sequence
  Description of Artificial Sequence: Synthetic oligonucleotide
  Antisense strand to SEQ ID NO: 1105756
uacucaccaagagugaggg

SEQ ID NO: 1105758 - RNA, 19 nt, Artificial Sequence
  Description of Artificial Sequence: Synthetic oligonucleotide
  Sense strand starting at position 3155 of SEQ ID NO: 915783
cacucuuggugaguagcua

SEQ ID NO: 1105759 - RNA, 19 nt, Artificial Sequence
  Description of Artificial Sequence: Synthetic oligonucleotide
  Antisense strand to SEQ ID NO: 1105758
uagcuacucaccaagagug

SEQ ID NO: 1105760 - RNA, 19 nt, Artificial Sequence
  Description of Artificial Sequence: Synthetic oligonucleotide
  Sense strand starting at position 3156 of SEQ ID NO: 915783
acucuuggugaguagcuaa

SEQ ID NO: 1105761 - RNA, 19 nt, Artificial Sequence
  Description of Artificial Sequence: Synthetic oligonucleotide
  Antisense strand to SEQ ID NO: 1105760
uuagcuacucaccaagagu

SEQ ID NO: 1105762 - RNA, 19 nt, Artificial Sequence
  Description of Artificial Sequence: Synthetic oligonucleotide
  Sense strand starting at position 3159 of SEQ ID NO: 915783
cuuggugaguagcuaauuu

SEQ ID NO: 1105763 - RNA, 19 nt, Artificial Sequence
  Description of Artificial Sequence: Synthetic oligonucleotide
  Antisense strand to SEQ ID NO: 1105762
aaauuagcuacucaccaag

SEQ ID NO: 1105764 - RNA, 19 nt, Artificial Sequence
  Description of Artificial Sequence: Synthetic oligonucleotide
  Sense strand starting at position 3187 of SEQ ID NO: 915783
gcuucauaaggaggaguca

SEQ ID NO: 1105765 - RNA, 19 nt, Artificial Sequence
  Description of Artificial Sequence: Synthetic oligonucleotide
  Antisense strand to SEQ ID NO: 1105764
ugacuccuccuuaugaagc

SEQ ID NO: 1105766 - RNA, 19 nt, Artificial Sequence
  Description of Artificial Sequence: Synthetic oligonucleotide
  Sense strand starting at position 3212 of SEQ ID NO: 915783
gguggaggcuccucccaau

SEQ ID NO: 1105767 - RNA, 19 nt, Artificial Sequence
  Description of Artificial Sequence: Synthetic oligonucleotide
  Antisense strand to SEQ ID NO: 1105766
auugggaggagccuccacc

SEQ ID NO: 1105768 - RNA, 19 nt, Artificial Sequence
  Description of Artificial Sequence: Synthetic oligonucleotide
  Sense strand starting at position 3335 of SEQ ID NO: 915783
gagugugacucuuucccau

SEQ ID NO: 1105769 - RNA, 19 nt, Artificial Sequence
  Description of Artificial Sequence: Synthetic oligonucleotide
  Antisense strand to SEQ ID NO: 1105768
augggaaagagucacacuc

SEQ ID NO: 1105770 - RNA, 19 nt, Artificial Sequence
  Description of Artificial Sequence: Synthetic oligonucleotide
  Sense strand starting at position 3337 of SEQ ID NO: 915783
gugugacucuuucccauga

SEQ ID NO: 1105771 - RNA, 19 nt, Artificial Sequence
  Description of Artificial Sequence: Synthetic oligonucleotide
  Antisense strand to SEQ ID NO: 1105770
ucaugggaaagagucacac

SEQ ID NO: 1105772 - RNA, 19 nt, Artificial Sequence
  Description of Artificial Sequence: Synthetic oligonucleotide
  Sense strand starting at position 3361 of SEQ ID NO: 915783
gccucugugcuagagguga

SEQ ID NO: 1105773 - RNA, 19 nt, Artificial Sequence
  Description of Artificial Sequence: Synthetic oligonucleotide
  Antisense strand to SEQ ID NO: 1105772
ucaccucuagcacagaggc

SEQ ID NO: 1105774 - RNA, 19 nt, Artificial Sequence
  Description of Artificial Sequence: Synthetic oligonucleotide
  Sense strand starting at position 3679 of SEQ ID NO: 915783
ggucccauucuuggagauu

SEQ ID NO: 1105775 - RNA, 19 nt, Artificial Sequence
  Description of Artificial Sequence: Synthetic oligonucleotide
  Antisense strand to SEQ ID NO: 1105774
aaucuccaagaaugggacc

SEQ ID NO: 1105776 - RNA, 19 nt, Artificial Sequence
  Description of Artificial Sequence: Synthetic oligonucleotide
  Sense strand starting at position 3690 of SEQ ID NO: 915783
uggagauugugucugagcu

SEQ ID NO: 1105777 - RNA, 19 nt, Artificial Sequence
  Description of Artificial Sequence: Synthetic oligonucleotide
  Antisense strand to SEQ ID NO: 1105776
agcucagacacaaucucca

SEQ ID NO: 1105778 - RNA, 19 nt, Artificial Sequence
  Description of Artificial Sequence: Synthetic oligonucleotide
  Sense strand starting at position 3691 of SEQ ID NO: 915783
ggagauugugucugagcuc

SEQ ID NO: 1105779 - RNA, 19 nt, Artificial Sequence
  Description of Artificial Sequence: Synthetic oligonucleotide
  Antisense strand to SEQ ID NO: 1105778
gagcucagacacaaucucc

SEQ ID NO: 1105780 - RNA, 19 nt, Artificial Sequence
  Description of Artificial Sequence: Synthetic oligonucleotide
  Sense strand starting at position 3738 of SEQ ID NO: 915783
uggcauccucccuagucau

SEQ ID NO: 1105781 - RNA, 19 nt, Artificial Sequence
  Description of Artificial Sequence: Synthetic oligonucleotide
  Antisense strand to SEQ ID NO: 1105780
augacuagggaggaugcca

SEQ ID NO: 1105782 - RNA, 19 nt, Artificial Sequence
  Description of Artificial Sequence: Synthetic oligonucleotide
  Sense strand starting at position 3808 of SEQ ID NO: 915783
cuaccugcuuggucuuaua

SEQ ID NO: 1105783 - RNA, 19 nt, Artificial Sequence
  Description of Artificial Sequence: Synthetic oligonucleotide
  Antisense strand to SEQ ID NO: 1105782
uauaagaccaagcagguag

SEQ ID NO: 1105784 - RNA, 19 nt, Artificial Sequence
  Description of Artificial Sequence: Synthetic oligonucleotide
  Sense strand starting at position 3878 of SEQ ID NO: 915783
ugcccauaggaaugauguu

SEQ ID NO: 1105785 - RNA, 19 nt, Artificial Sequence
  Description of Artificial Sequence: Synthetic oligonucleotide
  Antisense strand to SEQ ID NO: 1105784
aacaucauuccuaugggca

SEQ ID NO: 1105786 - RNA, 19 nt, Artificial Sequence
  Description of Artificial Sequence: Synthetic oligonucleotide
  Sense strand starting at position 3879 of SEQ ID NO: 915783
gcccauaggaaugauguuu

SEQ ID NO: 1105787 - RNA, 19 nt, Artificial Sequence
  Description of Artificial Sequence: Synthetic oligonucleotide
  Antisense strand to SEQ ID NO: 1105786
aaacaucauuccuaugggc

SEQ ID NO: 1105788 - RNA, 19 nt, Artificial Sequence
  Description of Artificial Sequence: Synthetic oligonucleotide
  Sense strand starting at position 3922 of SEQ ID NO: 915783
augagagcugccugaauuc

SEQ ID NO: 1105789 - RNA, 19 nt, Artificial Sequence
  Description of Artificial Sequence: Synthetic oligonucleotide
  Antisense strand to SEQ ID NO: 1105788
gaauucaggcagcucucau

SEQ ID NO: 1105790 - RNA, 19 nt, Artificial Sequence
  Description of Artificial Sequence: Synthetic oligonucleotide
  Sense strand starting at position 183 of SEQ ID NO: 915784
gucugucuucuccaugaca

SEQ ID NO: 1105791 - RNA, 19 nt, Artificial Sequence
  Description of Artificial Sequence: Synthetic oligonucleotide
  Antisense strand to SEQ ID NO: 1105790
ugucauggagaagacagac

SEQ ID NO: 1105792 - RNA, 19 nt, Artificial Sequence
  Description of Artificial Sequence: Synthetic oligonucleotide
  Sense strand starting at position 207 of SEQ ID NO: 915784
gcuuccugagaacgaaaca

SEQ ID NO: 1105793 - RNA, 19 nt, Artificial Sequence
  Description of Artificial Sequence: Synthetic oligonucleotide
  Antisense strand to SEQ ID NO: 1105792
uguuucguucucaggaagc

SEQ ID NO: 1105794 - RNA, 19 nt, Artificial Sequence
  Description of Artificial Sequence: Synthetic oligonucleotide
  Sense strand starting at position 271 of SEQ ID NO: 915784
gggagaggguacagucaau

SEQ ID NO: 1105795 - RNA, 19 nt, Artificial Sequence
  Description of Artificial Sequence: Synthetic oligonucleotide
  Antisense strand to SEQ ID NO: 1105794
auugacuguacccucuccc

SEQ ID NO: 1105796 - RNA, 19 nt, Artificial Sequence
  Description of Artificial Sequence: Synthetic oligonucleotide
  Sense strand starting at position 277 of SEQ ID NO: 915784
ggguacagucaaugaguga

SEQ ID NO: 1105797 - RNA, 19 nt, Artificial Sequence
  Description of Artificial Sequence: Synthetic oligonucleotide
  Antisense strand to SEQ ID NO: 1105796
ucacucauugacuguaccc

SEQ ID NO: 1105798 - RNA, 19 nt, Artificial Sequence
  Description of Artificial Sequence: Synthetic oligonucleotide
  Sense strand starting at position 282 of SEQ ID NO: 915784
cagucaaugagugagugaa

SEQ ID NO: 1105799 - RNA, 19 nt, Artificial Sequence
  Description of Artificial Sequence: Synthetic oligonucleotide
  Antisense strand to SEQ ID NO: 1105798
uucacucacucauugacug

SEQ ID NO: 1105800 - RNA, 19 nt, Artificial Sequence
  Description of Artificial Sequence: Synthetic oligonucleotide
  Sense strand starting at position 305 of SEQ ID NO: 915784
ugaauuauacgcuauugca

SEQ ID NO: 1105801 - RNA, 19 nt, Artificial Sequence
  Description of Artificial Sequence: Synthetic oligonucleotide
  Antisense strand to SEQ ID NO: 1105800
ugcaauagcguauaauuca

SEQ ID NO: 1105802 - RNA, 19 nt, Artificial Sequence
  Description of Artificial Sequence: Synthetic oligonucleotide
  Sense strand starting at position 352 of SEQ ID NO: 915784
ucugaacagauguguaagu

SEQ ID NO: 1105803 - RNA, 19 nt, Artificial Sequence
  Description of Artificial Sequence: Synthetic oligonucleotide
  Antisense strand to SEQ ID NO: 1105802
acuuacacaucuguucaga

SEQ ID NO: 1105804 - RNA, 19 nt, Artificial Sequence
  Description of Artificial Sequence: Synthetic oligonucleotide
  Sense strand starting at position 353 of SEQ ID NO: 915784
cugaacagauguguaagua

SEQ ID NO: 1105805 - RNA, 19 nt, Artificial Sequence
  Description of Artificial Sequence: Synthetic oligonucleotide
  Antisense strand to SEQ ID NO: 1105804
uacuuacacaucuguucag

SEQ ID NO: 1105806 - RNA, 19 nt, Artificial Sequence
  Description of Artificial Sequence: Synthetic oligonucleotide
  Sense strand starting at position 354 of SEQ ID NO: 915784
ugaacagauguguaaguau

SEQ ID NO: 1105807 - RNA, 19 nt, Artificial Sequence
  Description of Artificial Sequence: Synthetic oligonucleotide
  Antisense strand to SEQ ID NO: 1105806
auacuuacacaucuguuca

SEQ ID NO: 1105808 - RNA, 19 nt, Artificial Sequence
  Description of Artificial Sequence: Synthetic oligonucleotide
  Sense strand starting at position 366 of SEQ ID NO: 915784
uaaguauggugauuagaaa

SEQ ID NO: 1105809 - RNA, 19 nt, Artificial Sequence
  Description of Artificial Sequence: Synthetic oligonucleotide
  Antisense strand to SEQ ID NO: 1105808
uuucuaaucaccauacuua

SEQ ID NO: 1105810 - RNA, 19 nt, Artificial Sequence
  Description of Artificial Sequence: Synthetic oligonucleotide
  Sense strand starting at position 384 of SEQ ID NO: 915784
acaagugauaaagguuuga

SEQ ID NO: 1105811 - RNA, 19 nt, Artificial Sequence
  Description of Artificial Sequence: Synthetic oligonucleotide
  Antisense strand to SEQ ID NO: 1105810
ucaaaccuuuaucacuugu

SEQ ID NO: 1105812 - RNA, 19 nt, Artificial Sequence
  Description of Artificial Sequence: Synthetic oligonucleotide
  Sense strand starting at position 511 of SEQ ID NO: 915784
cuuacuggguuucugagau

SEQ ID NO: 1105813 - RNA, 19 nt, Artificial Sequence
  Description of Artificial Sequence: Synthetic oligonucleotide
  Antisense strand to SEQ ID NO: 1105812
aucucagaaacccaguaag

SEQ ID NO: 1105814 - RNA, 19 nt, Artificial Sequence
  Description of Artificial Sequence: Synthetic oligonucleotide
  Sense strand starting at position 547 of SEQ ID NO: 915784
ggguucuagccagagaggu

SEQ ID NO: 1105815 - RNA, 19 nt, Artificial Sequence
  Description of Artificial Sequence: Synthetic oligonucleotide
  Antisense strand to SEQ ID NO: 1105814
accucucuggcuagaaccc

SEQ ID NO: 1105816 - RNA, 19 nt, Artificial Sequence
  Description of Artificial Sequence: Synthetic oligonucleotide
  Sense strand starting at position 555 of SEQ ID NO: 915784
gccagagagguguaaaggu

SEQ ID NO: 1105817 - RNA, 19 nt, Artificial Sequence
  Description of Artificial Sequence: Synthetic oligonucleotide
  Antisense strand to SEQ ID NO: 1105816
accuuuacaccucucuggc

SEQ ID NO: 1105818 - RNA, 19 nt, Artificial Sequence
  Description of Artificial Sequence: Synthetic oligonucleotide
  Sense strand starting at position 593 of SEQ ID NO: 915784
agucaccuuguauaaguua

SEQ ID NO: 1105819 - RNA, 19 nt, Artificial Sequence
  Description of Artificial Sequence: Synthetic oligonucleotide
  Antisense strand to SEQ ID NO: 1105818
uaacuuauacaaggugacu

SEQ ID NO: 1105820 - RNA, 19 nt, Artificial Sequence
  Description of Artificial Sequence: Synthetic oligonucleotide
  Sense strand starting at position 1000 of SEQ ID NO: 915784
aagaguaguuuauuagggu

SEQ ID NO: 1105821 - RNA, 19 nt, Artificial Sequence
  Description of Artificial Sequence: Synthetic oligonucleotide
  Antisense strand to SEQ ID NO: 1105820
acccuaauaaacuacucuu

SEQ ID NO: 1105822 - RNA, 19 nt, Artificial Sequence
  Description of Artificial Sequence: Synthetic oligonucleotide
  Sense strand starting at position 1044 of SEQ ID NO: 915784
ucuuguaaagucugaggga

SEQ ID NO: 1105823 - RNA, 19 nt, Artificial Sequence
  Description of Artificial Sequence: Synthetic oligonucleotide
  Antisense strand to SEQ ID NO: 1105822
ucccucagacuuuacaaga

SEQ ID NO: 1105824 - RNA, 19 nt, Artificial Sequence
  Description of Artificial Sequence: Synthetic oligonucleotide
  Sense strand starting at position 1051 of SEQ ID NO: 915784
aagucugagggauggugaa

SEQ ID NO: 1105825 - RNA, 19 nt, Artificial Sequence
  Description of Artificial Sequence: Synthetic oligonucleotide
  Antisense strand to SEQ ID NO: 1105824
uucaccaucccucagacuu

SEQ ID NO: 1105826 - RNA, 19 nt, Artificial Sequence
  Description of Artificial Sequence: Synthetic oligonucleotide
  Sense strand starting at position 1058 of SEQ ID NO: 915784
agggauggugaaugcauaa

SEQ ID NO: 1105827 - RNA, 19 nt, Artificial Sequence
  Description of Artificial Sequence: Synthetic oligonucleotide
  Antisense strand to SEQ ID NO: 1105826
uuaugcauucaccaucccu

SEQ ID NO: 1105828 - RNA, 19 nt, Artificial Sequence
  Description of Artificial Sequence: Synthetic oligonucleotide
  Sense strand starting at position 1070 of SEQ ID NO: 915784
ugcauaaaugcuuaauaag

SEQ ID NO: 1105829 - RNA, 19 nt, Artificial Sequence
  Description of Artificial Sequence: Synthetic oligonucleotide
  Antisense strand to SEQ ID NO: 1105828
cuuauuaagcauuuaugca

SEQ ID NO: 1105830 - RNA, 19 nt, Artificial Sequence
  Description of Artificial Sequence: Synthetic oligonucleotide
  Sense strand starting at position 1159 of SEQ ID NO: 915784
ccauguguaagaugggagu

SEQ ID NO: 1105831 - RNA, 19 nt, Artificial Sequence
  Description of Artificial Sequence: Synthetic oligonucleotide
  Antisense strand to SEQ ID NO: 1105830
acucccaucuuacacaugg

SEQ ID NO: 1105832 - RNA, 19 nt, Artificial Sequence
  Description of Artificial Sequence: Synthetic oligonucleotide
  Sense strand starting at position 1178 of SEQ ID NO: 915784
gcgaaugguaaugauuaaa

SEQ ID NO: 1105833 - RNA, 19 nt, Artificial Sequence
  Description of Artificial Sequence: Synthetic oligonucleotide
  Antisense strand to SEQ ID NO: 1105832
uuuaaucauuaccauucgc

SEQ ID NO: 1105834 - RNA, 19 nt, Artificial Sequence
  Description of Artificial Sequence: Synthetic oligonucleotide
  Sense strand starting at position 1224 of SEQ ID NO: 915784
guuguuuguguccaagaga

SEQ ID NO: 1105835 - RNA, 19 nt, Artificial Sequence
  Description of Artificial Sequence: Synthetic oligonucleotide
  Antisense strand to SEQ ID NO: 1105834
ucucuuggacacaaacaac

SEQ ID NO: 1105836 - RNA, 19 nt, Artificial Sequence
  Description of Artificial Sequence: Synthetic oligonucleotide
  Sense strand starting at position 1444 of SEQ ID NO: 915784
ccugauuauucuccuggga

SEQ ID NO: 1105837 - RNA, 19 nt, Artificial Sequence
  Description of Artificial Sequence: Synthetic oligonucleotide
  Antisense strand to SEQ ID NO: 1105836
ucccaggagaauaaucagg

SEQ ID NO: 1105838 - RNA, 19 nt, Artificial Sequence
  Description of Artificial Sequence: Synthetic oligonucleotide
  Sense strand starting at position 1447 of SEQ ID NO: 915784
gauuauucuccugggagau

SEQ ID NO: 1105839 - RNA, 19 nt, Artificial Sequence
  Description of Artificial Sequence: Synthetic oligonucleotide
  Antisense strand to SEQ ID NO: 1105838
aucucccaggagaauaauc

SEQ ID NO: 1105840 - RNA, 19 nt, Artificial Sequence
  Description of Artificial Sequence: Synthetic oligonucleotide
  Sense strand starting at position 1448 of SEQ ID NO: 915784
auuauucuccugggagaug

SEQ ID NO: 1105841 - RNA, 19 nt, Artificial Sequence
  Description of Artificial Sequence: Synthetic oligonucleotide
  Antisense strand to SEQ ID NO: 1105840
caucucccaggagaauaau

SEQ ID NO: 1105842 - RNA, 19 nt, Artificial Sequence
  Description of Artificial Sequence: Synthetic oligonucleotide
  Sense strand starting at position 1515 of SEQ ID NO: 915784
cugcaaucugguuauucca

SEQ ID NO: 1105843 - RNA, 19 nt, Artificial Sequence
  Description of Artificial Sequence: Synthetic oligonucleotide
  Antisense strand to SEQ ID NO: 1105842
uggaauaaccagauugcag

SEQ ID NO: 1105844 - RNA, 19 nt, Artificial Sequence
  Description of Artificial Sequence: Synthetic oligonucleotide
  Sense strand starting at position 1901 of SEQ ID NO: 915784
ggagcuuacucugcagaca

SEQ ID NO: 1105845 - RNA, 19 nt, Artificial Sequence
  Description of Artificial Sequence: Synthetic oligonucleotide
  Antisense strand to SEQ ID NO: 1105844
ugucugcagaguaagcucc

SEQ ID NO: 1105846 - RNA, 19 nt, Artificial Sequence
  Description of Artificial Sequence: Synthetic oligonucleotide
  Sense strand starting at position 2565 of SEQ ID NO: 915784
ccugcuuuauuugcacaga

SEQ ID NO: 1105847 - RNA, 19 nt, Artificial Sequence
  Description of Artificial Sequence: Synthetic oligonucleotide
  Antisense strand to SEQ ID NO: 1105846
ucugugcaaauaaagcagg

SEQ ID NO: 1105848 - RNA, 19 nt, Artificial Sequence
  Description of Artificial Sequence: Synthetic oligonucleotide
  Sense strand starting at position 2605 of SEQ ID NO: 915784
caaauaaaccgguggaaug

SEQ ID NO: 1105849 - RNA, 19 nt, Artificial Sequence
  Description of Artificial Sequence: Synthetic oligonucleotide
  Antisense strand to SEQ ID NO: 1105848
cauuccaccgguuuauuug

SEQ ID NO: 1105850 - RNA, 19 nt, Artificial Sequence
  Description of Artificial Sequence: Synthetic oligonucleotide
  Sense strand starting at position 2663 of SEQ ID NO: 915784
ugggcaccuguuuagaaau

SEQ ID NO: 1105851 - RNA, 19 nt, Artificial Sequence
  Description of Artificial Sequence: Synthetic oligonucleotide
  Antisense strand to SEQ ID NO: 1105850
auuucuaaacaggugccca

SEQ ID NO: 1105852 - RNA, 19 nt, Artificial Sequence
  Description of Artificial Sequence: Synthetic oligonucleotide
  Sense strand starting at position 3057 of SEQ ID NO: 915784
uguaauuagucuccaggag

SEQ ID NO: 1105853 - RNA, 19 nt, Artificial Sequence
  Description of Artificial Sequence: Synthetic oligonucleotide
  Antisense strand to SEQ ID NO: 1105852
cuccuggagacuaauuaca

SEQ ID NO: 1105854 - RNA, 19 nt, Artificial Sequence
  Description of Artificial Sequence: Synthetic oligonucleotide
  Sense strand starting at position 3061 of SEQ ID NO: 915784
auuagucuccaggagaggu

SEQ ID NO: 1105855 - RNA, 19 nt, Artificial Sequence
  Description of Artificial Sequence: Synthetic oligonucleotide
  Antisense strand to SEQ ID NO: 1105854
accucuccuggagacuaau

SEQ ID NO: 1105856 - RNA, 19 nt, Artificial Sequence
  Description of Artificial Sequence: Synthetic oligonucleotide
  Sense strand starting at position 3107 of SEQ ID NO: 915784
gguccaaacuagucaugaa

SEQ ID NO: 1105857 - RNA, 19 nt, Artificial Sequence
  Description of Artificial Sequence: Synthetic oligonucleotide
  Antisense strand to SEQ ID NO: 1105856
uucaugacuaguuuggacc

SEQ ID NO: 1105858 - RNA, 19 nt, Artificial Sequence
  Description of Artificial Sequence: Synthetic oligonucleotide
  Sense strand starting at position 3339 of SEQ ID NO: 915784
guggcaugugucuugcauc

SEQ ID NO: 1105859 - RNA, 19 nt, Artificial Sequence
  Description of Artificial Sequence: Synthetic oligonucleotide
  Antisense strand to SEQ ID NO: 1105858
gaugcaagacacaugccac

SEQ ID NO: 1105860 - RNA, 19 nt, Artificial Sequence
  Description of Artificial Sequence: Synthetic oligonucleotide
  Sense strand starting at position 3386 of SEQ ID NO: 915784
ccaucaugcuaaguaagga

SEQ ID NO: 1105861 - RNA, 19 nt, Artificial Sequence
  Description of Artificial Sequence: Synthetic oligonucleotide
  Antisense strand to SEQ ID NO: 1105860
uccuuacuuagcaugaugg

SEQ ID NO: 1105862 - RNA, 19 nt, Artificial Sequence
  Description of Artificial Sequence: Synthetic oligonucleotide
  Sense strand starting at position 3658 of SEQ ID NO: 915784
guuguaguaagccaugaau

SEQ ID NO: 1105863 - RNA, 19 nt, Artificial Sequence
  Description of Artificial Sequence: Synthetic oligonucleotide
  Antisense strand to SEQ ID NO: 1105862
auucauggcuuacuacaac

SEQ ID NO: 1105864 - RNA, 19 nt, Artificial Sequence
  Description of Artificial Sequence: Synthetic oligonucleotide
  Sense strand starting at position 3661 of SEQ ID NO: 915784
guaguaagccaugaaugua

SEQ ID NO: 1105865 - RNA, 19 nt, Artificial Sequence
  Description of Artificial Sequence: Synthetic oligonucleotide
  Antisense strand to SEQ ID NO: 1105864
uacauucauggcuuacuac

SEQ ID NO: 1105866 - RNA, 19 nt, Artificial Sequence
  Description of Artificial Sequence: Synthetic oligonucleotide
  Sense strand starting at position 3744 of SEQ ID NO: 915784
cauagaagacaucguaauc

SEQ ID NO: 1105867 - RNA, 19 nt, Artificial Sequence
  Description of Artificial Sequence: Synthetic oligonucleotide
  Antisense strand to SEQ ID NO: 1105866
gauuacgaugucuucuaug

SEQ ID NO: 1105868 - RNA, 19 nt, Artificial Sequence
  Description of Artificial Sequence: Synthetic oligonucleotide
  Sense strand starting at position 3785 of SEQ ID NO: 915784
cugguuucuaaaggagauu

SEQ ID NO: 1105869 - RNA, 19 nt, Artificial Sequence
  Description of Artificial Sequence: Synthetic oligonucleotide
  Antisense strand to SEQ ID NO: 1105868
aaucuccuuuagaaaccag

SEQ ID NO: 1105870 - RNA, 19 nt, Artificial Sequence
  Description of Artificial Sequence: Synthetic oligonucleotide
  Sense strand starting at position 8 of SEQ ID NO: 915785
aggguuaauguuggaguua

SEQ ID NO: 1105871 - RNA, 19 nt, Artificial Sequence
  Description of Artificial Sequence: Synthetic oligonucleotide
  Antisense strand to SEQ ID NO: 1105870
uaacuccaacauuaacccu

SEQ ID NO: 1105872 - RNA, 19 nt, Artificial Sequence
  Description of Artificial Sequence: Synthetic oligonucleotide
  Sense strand starting at position 276 of SEQ ID NO: 915785
guaguauaauauccacaca

SEQ ID NO: 1105873 - RNA, 19 nt, Artificial Sequence
  Description of Artificial Sequence: Synthetic oligonucleotide
  Antisense strand to SEQ ID NO: 1105872
uguguggauauuauacuac

SEQ ID NO: 1105874 - RNA, 19 nt, Artificial Sequence
  Description of Artificial Sequence: Synthetic oligonucleotide
  Sense strand starting at position 313 of SEQ ID NO: 915785
augugaagucccuacaaua

SEQ ID NO: 1105875 - RNA, 19 nt, Artificial Sequence
  Description of Artificial Sequence: Synthetic oligonucleotide
  Antisense strand to SEQ ID NO: 1105874
uauuguagggacuucacau

SEQ ID NO: 1105876 - RNA, 19 nt, Artificial Sequence
  Description of Artificial Sequence: Synthetic oligonucleotide
  Sense strand starting at position 550 of SEQ ID NO: 915785
acgaguauauuuguuugua

SEQ ID NO: 1105877 - RNA, 19 nt, Artificial Sequence
  Description of Artificial Sequence: Synthetic oligonucleotide
  Antisense strand to SEQ ID NO: 1105876
uacaaacaaauauacucgu

SEQ ID NO: 1105878 - RNA, 19 nt, Artificial Sequence
  Description of Artificial Sequence: Synthetic oligonucleotide
  Sense strand starting at position 551 of SEQ ID NO: 915785
cgaguauauuuguuuguau

SEQ ID NO: 1105879 - RNA, 19 nt, Artificial Sequence
  Description of Artificial Sequence: Synthetic oligonucleotide
  Antisense strand to SEQ ID NO: 1105878
auacaaacaaauauacucg

SEQ ID NO: 1105880 - RNA, 19 nt, Artificial Sequence
  Description of Artificial Sequence: Synthetic oligonucleotide
  Sense strand starting at position 552 of SEQ ID NO: 915785
gaguauauuuguuuguauc

SEQ ID NO: 1105881 - RNA, 19 nt, Artificial Sequence
  Description of Artificial Sequence: Synthetic oligonucleotide
  Antisense strand to SEQ ID NO: 1105880
gauacaaacaaauauacuc

SEQ ID NO: 1105882 - RNA, 19 nt, Artificial Sequence
  Description of Artificial Sequence: Synthetic oligonucleotide
  Sense strand starting at position 554 of SEQ ID NO: 915785
guauauuuguuuguaucca

SEQ ID NO: 1105883 - RNA, 19 nt, Artificial Sequence
  Description of Artificial Sequence: Synthetic oligonucleotide
  Antisense strand to SEQ ID NO: 1105882
uggauacaaacaaauauac

SEQ ID NO: 1105884 - RNA, 19 nt, Artificial Sequence
  Description of Artificial Sequence: Synthetic oligonucleotide
  Sense strand starting at position 938 of SEQ ID NO: 915785
gggcaauacucaccaaggu

SEQ ID NO: 1105885 - RNA, 19 nt, Artificial Sequence
  Description of Artificial Sequence: Synthetic oligonucleotide
  Antisense strand to SEQ ID NO: 1105884
accuuggugaguauugccc

SEQ ID NO: 1105886 - RNA, 19 nt, Artificial Sequence
  Description of Artificial Sequence: Synthetic oligonucleotide
  Sense strand starting at position 1016 of SEQ ID NO: 915785
uccugauucuaagcucaga

SEQ ID NO: 1105887 - RNA, 19 nt, Artificial Sequence
  Description of Artificial Sequence: Synthetic oligonucleotide
  Antisense strand to SEQ ID NO: 1105886
ucugagcuuagaaucagga

SEQ ID NO: 1105888 - RNA, 19 nt, Artificial Sequence
  Description of Artificial Sequence: Synthetic oligonucleotide
  Sense strand starting at position 1033 of SEQ ID NO: 915785
gaacaaauccuccguugag

SEQ ID NO: 1105889 - RNA, 19 nt, Artificial Sequence
  Description of Artificial Sequence: Synthetic oligonucleotide
  Antisense strand to SEQ ID NO: 1105888
cucaacggaggauuuguuc

SEQ ID NO: 1105890 - RNA, 19 nt, Artificial Sequence
  Description of Artificial Sequence: Synthetic oligonucleotide
  Sense strand starting at position 1036 of SEQ ID NO: 915785
caaauccuccguugaggaa

SEQ ID NO: 1105891 - RNA, 19 nt, Artificial Sequence
  Description of Artificial Sequence: Synthetic oligonucleotide
  Antisense strand to SEQ ID NO: 1105890
uuccucaacggaggauuug

SEQ ID NO: 1105892 - RNA, 19 nt, Artificial Sequence
  Description of Artificial Sequence: Synthetic oligonucleotide
  Sense strand starting at position 1101 of SEQ ID NO: 915785
aaauuaguuugggucagaa

SEQ ID NO: 1105893 - RNA, 19 nt, Artificial Sequence
  Description of Artificial Sequence: Synthetic oligonucleotide
  Antisense strand to SEQ ID NO: 1105892
uucugacccaaacuaauuu

SEQ ID NO: 1105894 - RNA, 19 nt, Artificial Sequence
  Description of Artificial Sequence: Synthetic oligonucleotide
  Sense strand starting at position 1103 of SEQ ID NO: 915785
auuaguuugggucagaauu

SEQ ID NO: 1105895 - RNA, 19 nt, Artificial Sequence
  Description of Artificial Sequence: Synthetic oligonucleotide
  Antisense strand to SEQ ID NO: 1105894
aauucugacccaaacuaau

SEQ ID NO: 1105896 - RNA, 19 nt, Artificial Sequence
  Description of Artificial Sequence: Synthetic oligonucleotide
  Sense strand starting at position 1189 of SEQ ID NO: 915785
agcugaaagccaugaaucu

SEQ ID NO: 1105897 - RNA, 19 nt, Artificial Sequence
  Description of Artificial Sequence: Synthetic oligonucleotide
  Antisense strand to SEQ ID NO: 1105896
agauucauggcuuucagcu

SEQ ID NO: 1105898 - RNA, 19 nt, Artificial Sequence
  Description of Artificial Sequence: Synthetic oligonucleotide
  Sense strand starting at position 1463 of SEQ ID NO: 915785
uuccaauguccacguauuu

SEQ ID NO: 1105899 - RNA, 19 nt, Artificial Sequence
  Description of Artificial Sequence: Synthetic oligonucleotide
  Antisense strand to SEQ ID NO: 1105898
aaauacguggacauuggaa

SEQ ID NO: 1105900 - RNA, 19 nt, Artificial Sequence
  Description of Artificial Sequence: Synthetic oligonucleotide
  Sense strand starting at position 1493 of SEQ ID NO: 915785
ugcgucggucucuuacauu

SEQ ID NO: 1105901 - RNA, 19 nt, Artificial Sequence
  Description of Artificial Sequence: Synthetic oligonucleotide
  Antisense strand to SEQ ID NO: 1105900
aauguaagagaccgacgca

SEQ ID NO: 1105902 - RNA, 19 nt, Artificial Sequence
  Description of Artificial Sequence: Synthetic oligonucleotide
  Sense strand starting at position 1671 of SEQ ID NO: 915785
gaagaagggccuugagauu

SEQ ID NO: 1105903 - RNA, 19 nt, Artificial Sequence
  Description of Artificial Sequence: Synthetic oligonucleotide
  Antisense strand to SEQ ID NO: 1105902
aaucucaaggcccuucuuc

SEQ ID NO: 1105904 - RNA, 19 nt, Artificial Sequence
  Description of Artificial Sequence: Synthetic oligonucleotide
  Sense strand starting at position 2023 of SEQ ID NO: 915785
uaaaguagcgacuacaaga

SEQ ID NO: 1105905 - RNA, 19 nt, Artificial Sequence
  Description of Artificial Sequence: Synthetic oligonucleotide
  Antisense strand to SEQ ID NO: 1105904
ucuuguagucgcuacuuua

SEQ ID NO: 1105906 - RNA, 19 nt, Artificial Sequence
  Description of Artificial Sequence: Synthetic oligonucleotide
  Sense strand starting at position 2477 of SEQ ID NO: 915785
aaaccaaauguuuggguua

SEQ ID NO: 1105907 - RNA, 19 nt, Artificial Sequence
  Description of Artificial Sequence: Synthetic oligonucleotide
  Antisense strand to SEQ ID NO: 1105906
uaacccaaacauuugguuu

SEQ ID NO: 1105908 - RNA, 19 nt, Artificial Sequence
  Description of Artificial Sequence: Synthetic oligonucleotide
  Sense strand starting at position 2482 of SEQ ID NO: 915785
aaauguuuggguuaacgau

SEQ ID NO: 1105909 - RNA, 19 nt, Artificial Sequence
  Description of Artificial Sequence: Synthetic oligonucleotide
  Antisense strand to SEQ ID NO: 1105908
aucguuaacccaaacauuu

SEQ ID NO: 1105910 - RNA, 19 nt, Artificial Sequence
  Description of Artificial Sequence: Synthetic oligonucleotide
  Sense strand starting at position 2490 of SEQ ID NO: 915785
ggguuaacgauguaaguaa

SEQ ID NO: 1105911 - RNA, 19 nt, Artificial Sequence
  Description of Artificial Sequence: Synthetic oligonucleotide
  Antisense strand to SEQ ID NO: 1105910
uuacuuacaucguuaaccc

SEQ ID NO: 1105912 - RNA, 19 nt, Artificial Sequence
  Description of Artificial Sequence: Synthetic oligonucleotide
  Sense strand starting at position 2497 of SEQ ID NO: 915785
cgauguaaguaacugagaa

SEQ ID NO: 1105913 - RNA, 19 nt, Artificial Sequence
  Description of Artificial Sequence: Synthetic oligonucleotide
  Antisense strand to SEQ ID NO: 1105912
uucucaguuacuuacaucg

SEQ ID NO: 1105914 - RNA, 19 nt, Artificial Sequence
  Description of Artificial Sequence: Synthetic oligonucleotide
  Sense strand starting at position 2504 of SEQ ID NO: 915785
aguaacugagaaugucuau

SEQ ID NO: 1105915 - RNA, 19 nt, Artificial Sequence
  Description of Artificial Sequence: Synthetic oligonucleotide
  Antisense strand to SEQ ID NO: 1105914
auagacauucucaguuacu

SEQ ID NO: 1105916 - RNA, 19 nt, Artificial Sequence
  Description of Artificial Sequence: Synthetic oligonucleotide
  Sense strand starting at position 2516 of SEQ ID NO: 915785
ugucuaugcucauuuaccu

SEQ ID NO: 1105917 - RNA, 19 nt, Artificial Sequence
  Description of Artificial Sequence: Synthetic oligonucleotide
  Antisense strand to SEQ ID NO: 1105916
agguaaaugagcauagaca

SEQ ID NO: 1105918 - RNA, 19 nt, Artificial Sequence
  Description of Artificial Sequence: Synthetic oligonucleotide
  Sense strand starting at position 2523 of SEQ ID NO: 915785
gcucauuuaccuggcuaaa

SEQ ID NO: 1105919 - RNA, 19 nt, Artificial Sequence
  Description of Artificial Sequence: Synthetic oligonucleotide
  Antisense strand to SEQ ID NO: 1105918
uuuagccagguaaaugagc

SEQ ID NO: 1105920 - RNA, 19 nt, Artificial Sequence
  Description of Artificial Sequence: Synthetic oligonucleotide
  Sense strand starting at position 2542 of SEQ ID NO: 915785
ggacauuagaagcgaucaa

SEQ ID NO: 1105921 - RNA, 19 nt, Artificial Sequence
  Description of Artificial Sequence: Synthetic oligonucleotide
  Antisense strand to SEQ ID NO: 1105920
uugaucgcuucuaaugucc

SEQ ID NO: 1105922 - RNA, 19 nt, Artificial Sequence
  Description of Artificial Sequence: Synthetic oligonucleotide
  Sense strand starting at position 2617 of SEQ ID NO: 915785
cauauugcugucgagaauc

SEQ ID NO: 1105923 - RNA, 19 nt, Artificial Sequence
  Description of Artificial Sequence: Synthetic oligonucleotide
  Antisense strand to SEQ ID NO: 1105922
gauucucgacagcaauaug

SEQ ID NO: 1105924 - RNA, 19 nt, Artificial Sequence
  Description of Artificial Sequence: Synthetic oligonucleotide
  Sense strand starting at position 2780 of SEQ ID NO: 915785
aguuauuuguucucucauc

SEQ ID NO: 1105925 - RNA, 19 nt, Artificial Sequence
  Description of Artificial Sequence: Synthetic oligonucleotide
  Antisense strand to SEQ ID NO: 1105924
gaugagagaacaaauaacu

SEQ ID NO: 1105926 - RNA, 19 nt, Artificial Sequence
  Description of Artificial Sequence: Synthetic oligonucleotide
  Sense strand starting at position 2781 of SEQ ID NO: 915785
guuauuuguucucucaucu

SEQ ID NO: 1105927 - RNA, 19 nt, Artificial Sequence
  Description of Artificial Sequence: Synthetic oligonucleotide
  Antisense strand to SEQ ID NO: 1105926
agaugagagaacaaauaac

SEQ ID NO: 1105928 - RNA, 19 nt, Artificial Sequence
  Description of Artificial Sequence: Synthetic oligonucleotide
  Sense strand starting at position 2846 of SEQ ID NO: 915785
uaaugaaucuuaguggcua

SEQ ID NO: 1105929 - RNA, 19 nt, Artificial Sequence
  Description of Artificial Sequence: Synthetic oligonucleotide
  Antisense strand to SEQ ID NO: 1105928
uagccacuaagauucauua

SEQ ID NO: 1105930 - RNA, 19 nt, Artificial Sequence
  Description of Artificial Sequence: Synthetic oligonucleotide
  Sense strand starting at position 2850 of SEQ ID NO: 915785
gaaucuuaguggcuauaaa

SEQ ID NO: 1105931 - RNA, 19 nt, Artificial Sequence
  Description of Artificial Sequence: Synthetic oligonucleotide
  Antisense strand to SEQ ID NO: 1105930
uuuauagccacuaagauuc

SEQ ID NO: 1105932 - RNA, 19 nt, Artificial Sequence
  Description of Artificial Sequence: Synthetic oligonucleotide
  Sense strand starting at position 3171 of SEQ ID NO: 915785
gagaaaucaugucugguau

SEQ ID NO: 1105933 - RNA, 19 nt, Artificial Sequence
  Description of Artificial Sequence: Synthetic oligonucleotide
  Antisense strand to SEQ ID NO: 1105932
auaccagacaugauuucuc

SEQ ID NO: 1105934 - RNA, 19 nt, Artificial Sequence
  Description of Artificial Sequence: Synthetic oligonucleotide
  Sense strand starting at position 3172 of SEQ ID NO: 915785
agaaaucaugucugguauu

SEQ ID NO: 1105935 - RNA, 19 nt, Artificial Sequence
  Description of Artificial Sequence: Synthetic oligonucleotide
  Antisense strand to SEQ ID NO: 1105934
aauaccagacaugauuucu

SEQ ID NO: 1105936 - RNA, 19 nt, Artificial Sequence
  Description of Artificial Sequence: Synthetic oligonucleotide
  Sense strand starting at position 3212 of SEQ ID NO: 915785
uuuccauuggccgaaacau

SEQ ID NO: 1105937 - RNA, 19 nt, Artificial Sequence
  Description of Artificial Sequence: Synthetic oligonucleotide
  Antisense strand to SEQ ID NO: 1105936
auguuucggccaauggaaa

SEQ ID NO: 1105938 - RNA, 19 nt, Artificial Sequence
  Description of Artificial Sequence: Synthetic oligonucleotide
  Sense strand starting at position 3223 of SEQ ID NO: 915785
cgaaacaucugagcaacaa

SEQ ID NO: 1105939 - RNA, 19 nt, Artificial Sequence
  Description of Artificial Sequence: Synthetic oligonucleotide
  Antisense strand to SEQ ID NO: 1105938
uuguugcucagauguuucg

SEQ ID NO: 1105940 - RNA, 19 nt, Artificial Sequence
  Description of Artificial Sequence: Synthetic oligonucleotide
  Sense strand starting at position 3470 of SEQ ID NO: 915785
gucugucuuaguguugcca

SEQ ID NO: 1105941 - RNA, 19 nt, Artificial Sequence
  Description of Artificial Sequence: Synthetic oligonucleotide
  Antisense strand to SEQ ID NO: 1105940
uggcaacacuaagacagac

SEQ ID NO: 1105942 - RNA, 19 nt, Artificial Sequence
  Description of Artificial Sequence: Synthetic oligonucleotide
  Sense strand starting at position 3486 of SEQ ID NO: 915785
ccaggcauuccucaagguu

SEQ ID NO: 1105943 - RNA, 19 nt, Artificial Sequence
  Description of Artificial Sequence: Synthetic oligonucleotide
  Antisense strand to SEQ ID NO: 1105942
aaccuugaggaaugccugg

SEQ ID NO: 1105944 - RNA, 19 nt, Artificial Sequence
  Description of Artificial Sequence: Synthetic oligonucleotide
  Sense strand starting at position 3598 of SEQ ID NO: 915785
gcugguguggccuuguaac

SEQ ID NO: 1105945 - RNA, 19 nt, Artificial Sequence
  Description of Artificial Sequence: Synthetic oligonucleotide
  Antisense strand to SEQ ID NO: 1105944
guuacaaggccacaccagc

SEQ ID NO: 1105946 - RNA, 19 nt, Artificial Sequence
  Description of Artificial Sequence: Synthetic oligonucleotide
  Sense strand starting at position 3767 of SEQ ID NO: 915785
aucauaaagccuggagcau

SEQ ID NO: 1105947 - RNA, 19 nt, Artificial Sequence
  Description of Artificial Sequence: Synthetic oligonucleotide
  Antisense strand to SEQ ID NO: 1105946
augcuccaggcuuuaugau

SEQ ID NO: 1105948 - RNA, 19 nt, Artificial Sequence
  Description of Artificial Sequence: Synthetic oligonucleotide
  Sense strand starting at position 3768 of SEQ ID NO: 915785
ucauaaagccuggagcauu

SEQ ID NO: 1105949 - RNA, 19 nt, Artificial Sequence
  Description of Artificial Sequence: Synthetic oligonucleotide
  Antisense strand to SEQ ID NO: 1105948
aaugcuccaggcuuuauga

SEQ ID NO: 1105950 - RNA, 19 nt, Artificial Sequence
  Description of Artificial Sequence: Synthetic oligonucleotide
  Sense strand starting at position 238 of SEQ ID NO: 915786
gacagagggugaugaaauc

SEQ ID NO: 1105951 - RNA, 19 nt, Artificial Sequence
  Description of Artificial Sequence: Synthetic oligonucleotide
  Antisense strand to SEQ ID NO: 1105950
gauuucaucacccucuguc

SEQ ID NO: 1105952 - RNA, 19 nt, Artificial Sequence
  Description of Artificial Sequence: Synthetic oligonucleotide
  Sense strand starting at position 349 of SEQ ID NO: 915786
agaugauucugcgaggcag

SEQ ID NO: 1105953 - RNA, 19 nt, Artificial Sequence
  Description of Artificial Sequence: Synthetic oligonucleotide
  Antisense strand to SEQ ID NO: 1105952
cugccucgcagaaucaucu

SEQ ID NO: 1105954 - RNA, 19 nt, Artificial Sequence
  Description of Artificial Sequence: Synthetic oligonucleotide
  Sense strand starting at position 419 of SEQ ID NO: 915786
gcaaacuuagcguguucuu

SEQ ID NO: 1105955 - RNA, 19 nt, Artificial Sequence
  Description of Artificial Sequence: Synthetic oligonucleotide
  Antisense strand to SEQ ID NO: 1105954
aagaacacgcuaaguuugc

SEQ ID NO: 1105956 - RNA, 19 nt, Artificial Sequence
  Description of Artificial Sequence: Synthetic oligonucleotide
  Sense strand starting at position 461 of SEQ ID NO: 915786
ugugacaaguauuccggaa

SEQ ID NO: 1105957 - RNA, 19 nt, Artificial Sequence
  Description of Artificial Sequence: Synthetic oligonucleotide
  Antisense strand to SEQ ID NO: 1105956
uuccggaauacuugucaca

SEQ ID NO: 1105958 - RNA, 19 nt, Artificial Sequence
  Description of Artificial Sequence: Synthetic oligonucleotide
  Sense strand starting at position 463 of SEQ ID NO: 915786
ugacaaguauuccggaaag

SEQ ID NO: 1105959 - RNA, 19 nt, Artificial Sequence
  Description of Artificial Sequence: Synthetic oligonucleotide
  Antisense strand to SEQ ID NO: 1105958
cuuuccggaauacuuguca

SEQ ID NO: 1105960 - RNA, 19 nt, Artificial Sequence
  Description of Artificial Sequence: Synthetic oligonucleotide
  Sense strand starting at position 903 of SEQ ID NO: 915786
ggaacacacgugugagcua

SEQ ID NO: 1105961 - RNA, 19 nt, Artificial Sequence
  Description of Artificial Sequence: Synthetic oligonucleotide
  Antisense strand to SEQ ID NO: 1105960
uagcucacacguguguucc

SEQ ID NO: 1105962 - RNA, 19 nt, Artificial Sequence
  Description of Artificial Sequence: Synthetic oligonucleotide
  Sense strand starting at position 1070 of SEQ ID NO: 915786
ggcggcauccaucgcgaaa

SEQ ID NO: 1105963 - RNA, 19 nt, Artificial Sequence
  Description of Artificial Sequence: Synthetic oligonucleotide
  Antisense strand to SEQ ID NO: 1105962
uuucgcgauggaugccgcc

SEQ ID NO: 1105964 - RNA, 19 nt, Artificial Sequence
  Description of Artificial Sequence: Synthetic oligonucleotide
  Sense strand starting at position 1072 of SEQ ID NO: 915786
cggcauccaucgcgaaaga

SEQ ID NO: 1105965 - RNA, 19 nt, Artificial Sequence
  Description of Artificial Sequence: Synthetic oligonucleotide
  Antisense strand to SEQ ID NO: 1105964
ucuuucgcgauggaugccg

SEQ ID NO: 1105966 - RNA, 19 nt, Artificial Sequence
  Description of Artificial Sequence: Synthetic oligonucleotide
  Sense strand starting at position 1171 of SEQ ID NO: 915786
uuccaagguccaugaaguu

SEQ ID NO: 1105967 - RNA, 19 nt, Artificial Sequence
  Description of Artificial Sequence: Synthetic oligonucleotide
  Antisense strand to SEQ ID NO: 1105966
aacuucauggaccuuggaa

SEQ ID NO: 1105968 - RNA, 19 nt, Artificial Sequence
  Description of Artificial Sequence: Synthetic oligonucleotide
  Sense strand starting at position 2136 of SEQ ID NO: 915786
gaaacagacuucgggaaca

SEQ ID NO: 1105969 - RNA, 19 nt, Artificial Sequence
  Description of Artificial Sequence: Synthetic oligonucleotide
  Antisense strand to SEQ ID NO: 1105968
uguucccgaagucuguuuc

SEQ ID NO: 1105970 - RNA, 19 nt, Artificial Sequence
  Description of Artificial Sequence: Synthetic oligonucleotide
  Sense strand starting at position 2336 of SEQ ID NO: 915786
cguugaucuguggguccaa

SEQ ID NO: 1105971 - RNA, 19 nt, Artificial Sequence
  Description of Artificial Sequence: Synthetic oligonucleotide
  Antisense strand to SEQ ID NO: 1105970
uuggacccacagaucaacg

SEQ ID NO: 1105972 - RNA, 19 nt, Artificial Sequence
  Description of Artificial Sequence: Synthetic oligonucleotide
  Sense strand starting at position 2599 of SEQ ID NO: 915786
aaaucaucccgcugggaga

SEQ ID NO: 1105973 - RNA, 19 nt, Artificial Sequence
  Description of Artificial Sequence: Synthetic oligonucleotide
  Antisense strand to SEQ ID NO: 1105972
ucucccagcgggaugauuu

SEQ ID NO: 1105974 - RNA, 19 nt, Artificial Sequence
  Description of Artificial Sequence: Synthetic oligonucleotide
  Sense strand starting at position 2600 of SEQ ID NO: 915786
aaucaucccgcugggagaa

SEQ ID NO: 1105975 - RNA, 19 nt, Artificial Sequence
  Description of Artificial Sequence: Synthetic oligonucleotide
  Antisense strand to SEQ ID NO: 1105974
uucucccagcgggaugauu

SEQ ID NO: 1105976 - RNA, 19 nt, Artificial Sequence
  Description of Artificial Sequence: Synthetic oligonucleotide
  Sense strand starting at position 2642 of SEQ ID NO: 915786
ccuucugcuccaugcagua

SEQ ID NO: 1105977 - RNA, 19 nt, Artificial Sequence
  Description of Artificial Sequence: Synthetic oligonucleotide
  Antisense strand to SEQ ID NO: 1105976
uacugcauggagcagaagg

SEQ ID NO: 1105978 - RNA, 19 nt, Artificial Sequence
  Description of Artificial Sequence: Synthetic oligonucleotide
  Sense strand starting at position 2647 of SEQ ID NO: 915786
ugcuccaugcaguaaucuu

SEQ ID NO: 1105979 - RNA, 19 nt, Artificial Sequence
  Description of Artificial Sequence: Synthetic oligonucleotide
  Antisense strand to SEQ ID NO: 1105978
aagauuacugcauggagca

SEQ ID NO: 1105980 - RNA, 19 nt, Artificial Sequence
  Description of Artificial Sequence: Synthetic oligonucleotide
  Sense strand starting at position 2655 of SEQ ID NO: 915786
gcaguaaucuuucccuuag

SEQ ID NO: 1105981 - RNA, 19 nt, Artificial Sequence
  Description of Artificial Sequence: Synthetic oligonucleotide
  Antisense strand to SEQ ID NO: 1105980
cuaagggaaagauuacugc

SEQ ID NO: 1105982 - RNA, 19 nt, Artificial Sequence
  Description of Artificial Sequence: Synthetic oligonucleotide
  Sense strand starting at position 2716 of SEQ ID NO: 915786
guaagaaacucacuaucug

SEQ ID NO: 1105983 - RNA, 19 nt, Artificial Sequence
  Description of Artificial Sequence: Synthetic oligonucleotide
  Antisense strand to SEQ ID NO: 1105982
cagauagugaguuucuuac

SEQ ID NO: 1105984 - RNA, 19 nt, Artificial Sequence
  Description of Artificial Sequence: Synthetic oligonucleotide
  Sense strand starting at position 2724 of SEQ ID NO: 915786
cucacuaucuguuaagaag

SEQ ID NO: 1105985 - RNA, 19 nt, Artificial Sequence
  Description of Artificial Sequence: Synthetic oligonucleotide
  Antisense strand to SEQ ID NO: 1105984
cuucuuaacagauagugag

SEQ ID NO: 1105986 - RNA, 19 nt, Artificial Sequence
  Description of Artificial Sequence: Synthetic oligonucleotide
  Sense strand starting at position 2840 of SEQ ID NO: 915786
uacugaggugcuuaacauu

SEQ ID NO: 1105987 - RNA, 19 nt, Artificial Sequence
  Description of Artificial Sequence: Synthetic oligonucleotide
  Antisense strand to SEQ ID NO: 1105986
aauguuaagcaccucagua

SEQ ID NO: 1105988 - RNA, 19 nt, Artificial Sequence
  Description of Artificial Sequence: Synthetic oligonucleotide
  Sense strand starting at position 2852 of SEQ ID NO: 915786
uaacauugguggccacaaa

SEQ ID NO: 1105989 - RNA, 19 nt, Artificial Sequence
  Description of Artificial Sequence: Synthetic oligonucleotide
  Antisense strand to SEQ ID NO: 1105988
uuuguggccaccaauguua

SEQ ID NO: 1105990 - RNA, 19 nt, Artificial Sequence
  Description of Artificial Sequence: Synthetic oligonucleotide
  Sense strand starting at position 2853 of SEQ ID NO: 915786
aacauugguggccacaaau

SEQ ID NO: 1105991 - RNA, 19 nt, Artificial Sequence
  Description of Artificial Sequence: Synthetic oligonucleotide
  Antisense strand to SEQ ID NO: 1105990
auuuguggccaccaauguu

SEQ ID NO: 1105992 - RNA, 19 nt, Artificial Sequence
  Description of Artificial Sequence: Synthetic oligonucleotide
  Sense strand starting at position 2967 of SEQ ID NO: 915786
ccaugauguuaauuaugac

SEQ ID NO: 1105993 - RNA, 19 nt, Artificial Sequence
  Description of Artificial Sequence: Synthetic oligonucleotide
  Antisense strand to SEQ ID NO: 1105992
gucauaauuaacaucaugg

SEQ ID NO: 1105994 - RNA, 19 nt, Artificial Sequence
  Description of Artificial Sequence: Synthetic oligonucleotide
  Sense strand starting at position 2984 of SEQ ID NO: 915786
acacauugaguuugcagua

SEQ ID NO: 1105995 - RNA, 19 nt, Artificial Sequence
  Description of Artificial Sequence: Synthetic oligonucleotide
  Antisense strand to SEQ ID NO: 1105994
uacugcaaacucaaugugu

SEQ ID NO: 1105996 - RNA, 19 nt, Artificial Sequence
  Description of Artificial Sequence: Synthetic oligonucleotide
  Sense strand starting at position 2985 of SEQ ID NO: 915786
cacauugaguuugcaguaa

SEQ ID NO: 1105997 - RNA, 19 nt, Artificial Sequence
  Description of Artificial Sequence: Synthetic oligonucleotide
  Antisense strand to SEQ ID NO: 1105996
uuacugcaaacucaaugug

SEQ ID NO: 1105998 - RNA, 19 nt, Artificial Sequence
  Description of Artificial Sequence: Synthetic oligonucleotide
  Sense strand starting at position 2989 of SEQ ID NO: 915786
uugaguuugcaguaaagaa

SEQ ID NO: 1105999 - RNA, 19 nt, Artificial Sequence
  Description of Artificial Sequence: Synthetic oligonucleotide
  Antisense strand to SEQ ID NO: 1105998
uucuuuacugcaaacucaa

SEQ ID NO: 1106000 - RNA, 19 nt, Artificial Sequence
  Description of Artificial Sequence: Synthetic oligonucleotide
  Sense strand starting at position 3736 of SEQ ID NO: 915786
ggccguaucucaccuuguu

SEQ ID NO: 1106001 - RNA, 19 nt, Artificial Sequence
  Description of Artificial Sequence: Synthetic oligonucleotide
  Antisense strand to SEQ ID NO: 1106000
aacaaggugagauacggcc

SEQ ID NO: 1106002 - RNA, 19 nt, Artificial Sequence
  Description of Artificial Sequence: Synthetic oligonucleotide
  Sense strand starting at position 3737 of SEQ ID NO: 915786
gccguaucucaccuuguuu

SEQ ID NO: 1106003 - RNA, 19 nt, Artificial Sequence
  Description of Artificial Sequence: Synthetic oligonucleotide
  Antisense strand to SEQ ID NO: 1106002
aaacaaggugagauacggc

SEQ ID NO: 1106004 - RNA, 19 nt, Artificial Sequence
  Description of Artificial Sequence: Synthetic oligonucleotide
  Sense strand starting at position 3809 of SEQ ID NO: 915786
ucuguaacauaagaugaau

SEQ ID NO: 1106005 - RNA, 19 nt, Artificial Sequence
  Description of Artificial Sequence: Synthetic oligonucleotide
  Antisense strand to SEQ ID NO: 1106004
auucaucuuauguuacaga

SEQ ID NO: 1106006 - RNA, 19 nt, Artificial Sequence
  Description of Artificial Sequence: Synthetic oligonucleotide
  Sense strand starting at position 3824 of SEQ ID NO: 915786
gaaugcaauuuccgucaua

SEQ ID NO: 1106007 - RNA, 19 nt, Artificial Sequence
  Description of Artificial Sequence: Synthetic oligonucleotide
  Antisense strand to SEQ ID NO: 1106006
uaugacggaaauugcauuc

SEQ ID NO: 1106008 - RNA, 19 nt, Artificial Sequence
  Description of Artificial Sequence: Synthetic oligonucleotide
  Sense strand starting at position 666 of SEQ ID NO: 915787
ugguuacuuagaggauuau

SEQ ID NO: 1106009 - RNA, 19 nt, Artificial Sequence
  Description of Artificial Sequence: Synthetic oligonucleotide
  Antisense strand to SEQ ID NO: 1106008
auaauccucuaaguaacca

SEQ ID NO: 1106010 - RNA, 19 nt, Artificial Sequence
  Description of Artificial Sequence: Synthetic oligonucleotide
  Sense strand starting at position 672 of SEQ ID NO: 915787
cuuagaggauuauaaugga

SEQ ID NO: 1106011 - RNA, 19 nt, Artificial Sequence
  Description of Artificial Sequence: Synthetic oligonucleotide
  Antisense strand to SEQ ID NO: 1106010
uccauuauaauccucuaag

SEQ ID NO: 1106012 - RNA, 19 nt, Artificial Sequence
  Description of Artificial Sequence: Synthetic oligonucleotide
  Sense strand starting at position 769 of SEQ ID NO: 915787
ccuggaauucaguaggugu

SEQ ID NO: 1106013 - RNA, 19 nt, Artificial Sequence
  Description of Artificial Sequence: Synthetic oligonucleotide
  Antisense strand to SEQ ID NO: 1106012
acaccuacugaauuccagg

SEQ ID NO: 1106014 - RNA, 19 nt, Artificial Sequence
  Description of Artificial Sequence: Synthetic oligonucleotide
  Sense strand starting at position 788 of SEQ ID NO: 915787
ucaauaaauguguguuaca

SEQ ID NO: 1106015 - RNA, 19 nt, Artificial Sequence
  Description of Artificial Sequence: Synthetic oligonucleotide
  Antisense strand to SEQ ID NO: 1106014
uguaacacacauuuauuga

SEQ ID NO: 1106016 - RNA, 19 nt, Artificial Sequence
  Description of Artificial Sequence: Synthetic oligonucleotide
  Sense strand starting at position 789 of SEQ ID NO: 915787
caauaaauguguguuacag

SEQ ID NO: 1106017 - RNA, 19 nt, Artificial Sequence
  Description of Artificial Sequence: Synthetic oligonucleotide
  Antisense strand to SEQ ID NO: 1106016
cuguaacacacauuuauug

SEQ ID NO: 1106018 - RNA, 19 nt, Artificial Sequence
  Description of Artificial Sequence: Synthetic oligonucleotide
  Sense strand starting at position 797 of SEQ ID NO: 915787
guguguuacagguaugaac

SEQ ID NO: 1106019 - RNA, 19 nt, Artificial Sequence
  Description of Artificial Sequence: Synthetic oligonucleotide
  Antisense strand to SEQ ID NO: 1106018
guucauaccuguaacacac

SEQ ID NO: 1106020 - RNA, 19 nt, Artificial Sequence
  Description of Artificial Sequence: Synthetic oligonucleotide
  Sense strand starting at position 799 of SEQ ID NO: 915787
guguuacagguaugaacua

SEQ ID NO: 1106021 - RNA, 19 nt, Artificial Sequence
  Description of Artificial Sequence: Synthetic oligonucleotide
  Antisense strand to SEQ ID NO: 1106020
uaguucauaccuguaacac

SEQ ID NO: 1106022 - RNA, 19 nt, Artificial Sequence
  Description of Artificial Sequence: Synthetic oligonucleotide
  Sense strand starting at position 862 of SEQ ID NO: 915787
ucacuaagaguuugccugu

SEQ ID NO: 1106023 - RNA, 19 nt, Artificial Sequence
  Description of Artificial Sequence: Synthetic oligonucleotide
  Antisense strand to SEQ ID NO: 1106022
acaggcaaacucuuaguga

SEQ ID NO: 1106024 - RNA, 19 nt, Artificial Sequence
  Description of Artificial Sequence: Synthetic oligonucleotide
  Sense strand starting at position 867 of SEQ ID NO: 915787
aagaguuugccugucgcca

SEQ ID NO: 1106025 - RNA, 19 nt, Artificial Sequence
  Description of Artificial Sequence: Synthetic oligonucleotide
  Antisense strand to SEQ ID NO: 1106024
uggcgacaggcaaacucuu

SEQ ID NO: 1106026 - RNA, 19 nt, Artificial Sequence
  Description of Artificial Sequence: Synthetic oligonucleotide
  Sense strand starting at position 868 of SEQ ID NO: 915787
agaguuugccugucgccau

SEQ ID NO: 1106027 - RNA, 19 nt, Artificial Sequence
  Description of Artificial Sequence: Synthetic oligonucleotide
  Antisense strand to SEQ ID NO: 1106026
auggcgacaggcaaacucu

SEQ ID NO: 1106028 - RNA, 19 nt, Artificial Sequence
  Description of Artificial Sequence: Synthetic oligonucleotide
  Sense strand starting at position 1006 of SEQ ID NO: 915787
ugucucugacccuggaaua

SEQ ID NO: 1106029 - RNA, 19 nt, Artificial Sequence
  Description of Artificial Sequence: Synthetic oligonucleotide
  Antisense strand to SEQ ID NO: 1106028
uauuccagggucagagaca

SEQ ID NO: 1106030 - RNA, 19 nt, Artificial Sequence
  Description of Artificial Sequence: Synthetic oligonucleotide
  Sense strand starting at position 1007 of SEQ ID NO: 915787
gucucugacccuggaauau

SEQ ID NO: 1106031 - RNA, 19 nt, Artificial Sequence
  Description of Artificial Sequence: Synthetic oligonucleotide
  Antisense strand to SEQ ID NO: 1106030
auauuccagggucagagac

SEQ ID NO: 1106032 - RNA, 19 nt, Artificial Sequence
  Description of Artificial Sequence: Synthetic oligonucleotide
  Sense strand starting at position 1074 of SEQ ID NO: 915787
cagcaucugcggcaaagaa

SEQ ID NO: 1106033 - RNA, 19 nt, Artificial Sequence
  Description of Artificial Sequence: Synthetic oligonucleotide
  Antisense strand to SEQ ID NO: 1106032
uucuuugccgcagaugcug

SEQ ID NO: 1106034 - RNA, 19 nt, Artificial Sequence
  Description of Artificial Sequence: Synthetic oligonucleotide
  Sense strand starting at position 1567 of SEQ ID NO: 915787
ccaggaggugcuuguuuau

SEQ ID NO: 1106035 - RNA, 19 nt, Artificial Sequence
  Description of Artificial Sequence: Synthetic oligonucleotide
  Antisense strand to SEQ ID NO: 1106034
auaaacaagcaccuccugg

SEQ ID NO: 1106036 - RNA, 19 nt, Artificial Sequence
  Description of Artificial Sequence: Synthetic oligonucleotide
  Sense strand starting at position 1580 of SEQ ID NO: 915787
guuuauguagaucggaaga

SEQ ID NO: 1106037 - RNA, 19 nt, Artificial Sequence
  Description of Artificial Sequence: Synthetic oligonucleotide
  Antisense strand to SEQ ID NO: 1106036
ucuuccgaucuacauaaac

SEQ ID NO: 1106038 - RNA, 19 nt, Artificial Sequence
  Description of Artificial Sequence: Synthetic oligonucleotide
  Sense strand starting at position 1683 of SEQ ID NO: 915787
cggcuccauuauguaauau

SEQ ID NO: 1106039 - RNA, 19 nt, Artificial Sequence
  Description of Artificial Sequence: Synthetic oligonucleotide
  Antisense strand to SEQ ID NO: 1106038
auauuacauaauggagccg

SEQ ID NO: 1106040 - RNA, 19 nt, Artificial Sequence
  Description of Artificial Sequence: Synthetic oligonucleotide
  Sense strand starting at position 1694 of SEQ ID NO: 915787
uguaauauguguucuggac

SEQ ID NO: 1106041 - RNA, 19 nt, Artificial Sequence
  Description of Artificial Sequence: Synthetic oligonucleotide
  Antisense strand to SEQ ID NO: 1106040
guccagaacacauauuaca

SEQ ID NO: 1106042 - RNA, 19 nt, Artificial Sequence
  Description of Artificial Sequence: Synthetic oligonucleotide
  Sense strand starting at position 1698 of SEQ ID NO: 915787
auauguguucuggacuguu

SEQ ID NO: 1106043 - RNA, 19 nt, Artificial Sequence
  Description of Artificial Sequence: Synthetic oligonucleotide
  Antisense strand to SEQ ID NO: 1106042
aacaguccagaacacauau

SEQ ID NO: 1106044 - RNA, 19 nt, Artificial Sequence
  Description of Artificial Sequence: Synthetic oligonucleotide
  Sense strand starting at position 1701 of SEQ ID NO: 915787
uguguucuggacuguuaga

SEQ ID NO: 1106045 - RNA, 19 nt, Artificial Sequence
  Description of Artificial Sequence: Synthetic oligonucleotide
  Antisense strand to SEQ ID NO: 1106044
ucuaacaguccagaacaca

SEQ ID NO: 1106046 - RNA, 19 nt, Artificial Sequence
  Description of Artificial Sequence: Synthetic oligonucleotide
  Sense strand starting at position 1795 of SEQ ID NO: 915787
ggcuucguucuggaauaua

SEQ ID NO: 1106047 - RNA, 19 nt, Artificial Sequence
  Description of Artificial Sequence: Synthetic oligonucleotide
  Antisense strand to SEQ ID NO: 1106046
uauauuccagaacgaagcc

SEQ ID NO: 1106048 - RNA, 19 nt, Artificial Sequence
  Description of Artificial Sequence: Synthetic oligonucleotide
  Sense strand starting at position 1798 of SEQ ID NO: 915787
uucguucuggaauauaagu

SEQ ID NO: 1106049 - RNA, 19 nt, Artificial Sequence
  Description of Artificial Sequence: Synthetic oligonucleotide
  Antisense strand to SEQ ID NO: 1106048
acuuauauuccagaacgaa

SEQ ID NO: 1106050 - RNA, 19 nt, Artificial Sequence
  Description of Artificial Sequence: Synthetic oligonucleotide
  Sense strand starting at position 1865 of SEQ ID NO: 915787
gagagaacuucgcccuugu

SEQ ID NO: 1106051 - RNA, 19 nt, Artificial Sequence
  Description of Artificial Sequence: Synthetic oligonucleotide
  Antisense strand to SEQ ID NO: 1106050
acaagggcgaaguucucuc

SEQ ID NO: 1106052 - RNA, 19 nt, Artificial Sequence
  Description of Artificial Sequence: Synthetic oligonucleotide
  Sense strand starting at position 2356 of SEQ ID NO: 915787
ugugcuaugcuacaugaga

SEQ ID NO: 1106053 - RNA, 19 nt, Artificial Sequence
  Description of Artificial Sequence: Synthetic oligonucleotide
  Antisense strand to SEQ ID NO: 1106052
ucucauguagcauagcaca

SEQ ID NO: 1106054 - RNA, 19 nt, Artificial Sequence
  Description of Artificial Sequence: Synthetic oligonucleotide
  Sense strand starting at position 2379 of SEQ ID NO: 915787
cagagaaagucaucgcuca

SEQ ID NO: 1106055 - RNA, 19 nt, Artificial Sequence
  Description of Artificial Sequence: Synthetic oligonucleotide
  Antisense strand to SEQ ID NO: 1106054
ugagcgaugacuuucucug

SEQ ID NO: 1106056 - RNA, 19 nt, Artificial Sequence
  Description of Artificial Sequence: Synthetic oligonucleotide
  Sense strand starting at position 2384 of SEQ ID NO: 915787
aaagucaucgcucaguaga

SEQ ID NO: 1106057 - RNA, 19 nt, Artificial Sequence
  Description of Artificial Sequence: Synthetic oligonucleotide
  Antisense strand to SEQ ID NO: 1106056
ucuacugagcgaugacuuu

SEQ ID NO: 1106058 - RNA, 19 nt, Artificial Sequence
  Description of Artificial Sequence: Synthetic oligonucleotide
  Sense strand starting at position 2386 of SEQ ID NO: 915787
agucaucgcucaguagaaa

SEQ ID NO: 1106059 - RNA, 19 nt, Artificial Sequence
  Description of Artificial Sequence: Synthetic oligonucleotide
  Antisense strand to SEQ ID NO: 1106058
uuucuacugagcgaugacu

SEQ ID NO: 1106060 - RNA, 19 nt, Artificial Sequence
  Description of Artificial Sequence: Synthetic oligonucleotide
  Sense strand starting at position 2387 of SEQ ID NO: 915787
gucaucgcucaguagaaau

SEQ ID NO: 1106061 - RNA, 19 nt, Artificial Sequence
  Description of Artificial Sequence: Synthetic oligonucleotide
  Antisense strand to SEQ ID NO: 1106060
auuucuacugagcgaugac

SEQ ID NO: 1106062 - RNA, 19 nt, Artificial Sequence
  Description of Artificial Sequence: Synthetic oligonucleotide
  Sense strand starting at position 2409 of SEQ ID NO: 915787
guaauagcgcaugcguaaa

SEQ ID NO: 1106063 - RNA, 19 nt, Artificial Sequence
  Description of Artificial Sequence: Synthetic oligonucleotide
  Antisense strand to SEQ ID NO: 1106062
uuuacgcaugcgcuauuac

SEQ ID NO: 1106064 - RNA, 19 nt, Artificial Sequence
  Description of Artificial Sequence: Synthetic oligonucleotide
  Sense strand starting at position 2433 of SEQ ID NO: 915787
gagggaagucgcuacuuua

SEQ ID NO: 1106065 - RNA, 19 nt, Artificial Sequence
  Description of Artificial Sequence: Synthetic oligonucleotide
  Antisense strand to SEQ ID NO: 1106064
uaaaguagcgacuucccuc

SEQ ID NO: 1106066 - RNA, 19 nt, Artificial Sequence
  Description of Artificial Sequence: Synthetic oligonucleotide
  Sense strand starting at position 2441 of SEQ ID NO: 915787
ucgcuacuuuaccuagaga

SEQ ID NO: 1106067 - RNA, 19 nt, Artificial Sequence
  Description of Artificial Sequence: Synthetic oligonucleotide
  Antisense strand to SEQ ID NO: 1106066
ucucuagguaaaguagcga

SEQ ID NO: 1106068 - RNA, 19 nt, Artificial Sequence
  Description of Artificial Sequence: Synthetic oligonucleotide
  Sense strand starting at position 2452 of SEQ ID NO: 915787
ccuagagauuaacacagaa

SEQ ID NO: 1106069 - RNA, 19 nt, Artificial Sequence
  Description of Artificial Sequence: Synthetic oligonucleotide
  Antisense strand to SEQ ID NO: 1106068
uucuguguuaaucucuagg

SEQ ID NO: 1106070 - RNA, 19 nt, Artificial Sequence
  Description of Artificial Sequence: Synthetic oligonucleotide
  Sense strand starting at position 2503 of SEQ ID NO: 915787
uuuaucuaacgcgaagauu

SEQ ID NO: 1106071 - RNA, 19 nt, Artificial Sequence
  Description of Artificial Sequence: Synthetic oligonucleotide
  Antisense strand to SEQ ID NO: 1106070
aaucuucgcguuagauaaa

SEQ ID NO: 1106072 - RNA, 19 nt, Artificial Sequence
  Description of Artificial Sequence: Synthetic oligonucleotide
  Sense strand starting at position 2635 of SEQ ID NO: 915787
guuagucaggcuggaauua

SEQ ID NO: 1106073 - RNA, 19 nt, Artificial Sequence
  Description of Artificial Sequence: Synthetic oligonucleotide
  Antisense strand to SEQ ID NO: 1106072
uaauuccagccugacuaac

SEQ ID NO: 1106074 - RNA, 19 nt, Artificial Sequence
  Description of Artificial Sequence: Synthetic oligonucleotide
  Sense strand starting at position 2713 of SEQ ID NO: 915787
gcgaccuagguuuaacaca

SEQ ID NO: 1106075 - RNA, 19 nt, Artificial Sequence
  Description of Artificial Sequence: Synthetic oligonucleotide
  Antisense strand to SEQ ID NO: 1106074
uguguuaaaccuaggucgc

SEQ ID NO: 1106076 - RNA, 19 nt, Artificial Sequence
  Description of Artificial Sequence: Synthetic oligonucleotide
  Sense strand starting at position 2835 of SEQ ID NO: 915787
ugguuaacacguugugaaa

SEQ ID NO: 1106077 - RNA, 19 nt, Artificial Sequence
  Description of Artificial Sequence: Synthetic oligonucleotide
  Antisense strand to SEQ ID NO: 1106076
uuucacaacguguuaacca

SEQ ID NO: 1106078 - RNA, 19 nt, Artificial Sequence
  Description of Artificial Sequence: Synthetic oligonucleotide
  Sense strand starting at position 3240 of SEQ ID NO: 915787
gaggcugaaguaugaagau

SEQ ID NO: 1106079 - RNA, 19 nt, Artificial Sequence
  Description of Artificial Sequence: Synthetic oligonucleotide
  Antisense strand to SEQ ID NO: 1106078
aucuucauacuucagccuc

SEQ ID NO: 1106080 - RNA, 19 nt, Artificial Sequence
  Description of Artificial Sequence: Synthetic oligonucleotide
  Sense strand starting at position 3247 of SEQ ID NO: 915787
aaguaugaagauugcugaa

SEQ ID NO: 1106081 - RNA, 19 nt, Artificial Sequence
  Description of Artificial Sequence: Synthetic oligonucleotide
  Antisense strand to SEQ ID NO: 1106080
uucagcaaucuucauacuu

SEQ ID NO: 1106082 - RNA, 19 nt, Artificial Sequence
  Description of Artificial Sequence: Synthetic oligonucleotide
  Sense strand starting at position 3249 of SEQ ID NO: 915787
guaugaagauugcugaaga

SEQ ID NO: 1106083 - RNA, 19 nt, Artificial Sequence
  Description of Artificial Sequence: Synthetic oligonucleotide
  Antisense strand to SEQ ID NO: 1106082
ucuucagcaaucuucauac

SEQ ID NO: 1106084 - RNA, 19 nt, Artificial Sequence
  Description of Artificial Sequence: Synthetic oligonucleotide
  Sense strand starting at position 3411 of SEQ ID NO: 915787
acccuaacugaucgaaauc

SEQ ID NO: 1106085 - RNA, 19 nt, Artificial Sequence
  Description of Artificial Sequence: Synthetic oligonucleotide
  Antisense strand to SEQ ID NO: 1106084
gauuucgaucaguuagggu

SEQ ID NO: 1106086 - RNA, 19 nt, Artificial Sequence
  Description of Artificial Sequence: Synthetic oligonucleotide
  Sense strand starting at position 3709 of SEQ ID NO: 915787
gguaacuauccaggcacua

SEQ ID NO: 1106087 - RNA, 19 nt, Artificial Sequence
  Description of Artificial Sequence: Synthetic oligonucleotide
  Antisense strand to SEQ ID NO: 1106086
uagugccuggauaguuacc

SEQ ID NO: 1106088 - RNA, 19 nt, Artificial Sequence
  Description of Artificial Sequence: Synthetic oligonucleotide
  Sense strand starting at position 247 of SEQ ID NO: 915788
acaguuauuucuugcuaug

SEQ ID NO: 1106089 - RNA, 19 nt, Artificial Sequence
  Description of Artificial Sequence: Synthetic oligonucleotide
  Antisense strand to SEQ ID NO: 1106088
cauagcaagaaauaacugu

SEQ ID NO: 1106090 - RNA, 19 nt, Artificial Sequence
  Description of Artificial Sequence: Synthetic oligonucleotide
  Sense strand starting at position 252 of SEQ ID NO: 915788
uauuucuugcuauggugau

SEQ ID NO: 1106091 - RNA, 19 nt, Artificial Sequence
  Description of Artificial Sequence: Synthetic oligonucleotide
  Antisense strand to SEQ ID NO: 1106090
aucaccauagcaagaaaua

SEQ ID NO: 1106092 - RNA, 19 nt, Artificial Sequence
  Description of Artificial Sequence: Synthetic oligonucleotide
  Sense strand starting at position 253 of SEQ ID NO: 915788
auuucuugcuauggugaua

SEQ ID NO: 1106093 - RNA, 19 nt, Artificial Sequence
  Description of Artificial Sequence: Synthetic oligonucleotide
  Antisense strand to SEQ ID NO: 1106092
uaucaccauagcaagaaau

SEQ ID NO: 1106094 - RNA, 19 nt, Artificial Sequence
  Description of Artificial Sequence: Synthetic oligonucleotide
  Sense strand starting at position 264 of SEQ ID NO: 915788
uggugauagggcuaugugu

SEQ ID NO: 1106095 - RNA, 19 nt, Artificial Sequence
  Description of Artificial Sequence: Synthetic oligonucleotide
  Antisense strand to SEQ ID NO: 1106094
acacauagcccuaucacca

SEQ ID NO: 1106096 - RNA, 19 nt, Artificial Sequence
  Description of Artificial Sequence: Synthetic oligonucleotide
  Sense strand starting at position 266 of SEQ ID NO: 915788
gugauagggcuauguguga

SEQ ID NO: 1106097 - RNA, 19 nt, Artificial Sequence
  Description of Artificial Sequence: Synthetic oligonucleotide
  Antisense strand to SEQ ID NO: 1106096
ucacacauagcccuaucac

SEQ ID NO: 1106098 - RNA, 19 nt, Artificial Sequence
  Description of Artificial Sequence: Synthetic oligonucleotide
  Sense strand starting at position 270 of SEQ ID NO: 915788
uagggcuaugugugaaauu

SEQ ID NO: 1106099 - RNA, 19 nt, Artificial Sequence
  Description of Artificial Sequence: Synthetic oligonucleotide
  Antisense strand to SEQ ID NO: 1106098
aauuucacacauagcccua

SEQ ID NO: 1106100 - RNA, 19 nt, Artificial Sequence
  Description of Artificial Sequence: Synthetic oligonucleotide
  Sense strand starting at position 271 of SEQ ID NO: 915788
agggcuaugugugaaauuu

SEQ ID NO: 1106101 - RNA, 19 nt, Artificial Sequence
  Description of Artificial Sequence: Synthetic oligonucleotide
  Antisense strand to SEQ ID NO: 1106100
aaauuucacacauagcccu

SEQ ID NO: 1106102 - RNA, 19 nt, Artificial Sequence
  Description of Artificial Sequence: Synthetic oligonucleotide
  Sense strand starting at position 297 of SEQ ID NO: 915788
auucuaccuuauguguuaa

SEQ ID NO: 1106103 - RNA, 19 nt, Artificial Sequence
  Description of Artificial Sequence: Synthetic oligonucleotide
  Antisense strand to SEQ ID NO: 1106102
uuaacacauaagguagaau

SEQ ID NO: 1106104 - RNA, 19 nt, Artificial Sequence
  Description of Artificial Sequence: Synthetic oligonucleotide
  Sense strand starting at position 308 of SEQ ID NO: 915788
uguguuaaugcuuauuaac

SEQ ID NO: 1106105 - RNA, 19 nt, Artificial Sequence
  Description of Artificial Sequence: Synthetic oligonucleotide
  Antisense strand to SEQ ID NO: 1106104
guuaauaagcauuaacaca

SEQ ID NO: 1106106 - RNA, 19 nt, Artificial Sequence
  Description of Artificial Sequence: Synthetic oligonucleotide
  Sense strand starting at position 336 of SEQ ID NO: 915788
gcaugcuuuaaguggcaga

SEQ ID NO: 1106107 - RNA, 19 nt, Artificial Sequence
  Description of Artificial Sequence: Synthetic oligonucleotide
  Antisense strand to SEQ ID NO: 1106106
ucugccacuuaaagcaugc

SEQ ID NO: 1106108 - RNA, 19 nt, Artificial Sequence
  Description of Artificial Sequence: Synthetic oligonucleotide
  Sense strand starting at position 508 of SEQ ID NO: 915788
gccauuaaauaggaacuaa

SEQ ID NO: 1106109 - RNA, 19 nt, Artificial Sequence
  Description of Artificial Sequence: Synthetic oligonucleotide
  Antisense strand to SEQ ID NO: 1106108
uuaguuccuauuuaauggc

SEQ ID NO: 1106110 - RNA, 19 nt, Artificial Sequence
  Description of Artificial Sequence: Synthetic oligonucleotide
  Sense strand starting at position 793 of SEQ ID NO: 915788
agcaaacucuagggaaaga

SEQ ID NO: 1106111 - RNA, 19 nt, Artificial Sequence
  Description of Artificial Sequence: Synthetic oligonucleotide
  Antisense strand to SEQ ID NO: 1106110
ucuuucccuagaguuugcu

SEQ ID NO: 1106112 - RNA, 19 nt, Artificial Sequence
  Description of Artificial Sequence: Synthetic oligonucleotide
  Sense strand starting at position 889 of SEQ ID NO: 915788
ggcugaaugcguaggugaa

SEQ ID NO: 1106113 - RNA, 19 nt, Artificial Sequence
  Description of Artificial Sequence: Synthetic oligonucleotide
  Antisense strand to SEQ ID NO: 1106112
uucaccuacgcauucagcc

SEQ ID NO: 1106114 - RNA, 19 nt, Artificial Sequence
  Description of Artificial Sequence: Synthetic oligonucleotide
  Sense strand starting at position 890 of SEQ ID NO: 915788
gcugaaugcguaggugaaa

SEQ ID NO: 1106115 - RNA, 19 nt, Artificial Sequence
  Description of Artificial Sequence: Synthetic oligonucleotide
  Antisense strand to SEQ ID NO: 1106114
uuucaccuacgcauucagc

SEQ ID NO: 1106116 - RNA, 19 nt, Artificial Sequence
  Description of Artificial Sequence: Synthetic oligonucleotide
  Sense strand starting at position 916 of SEQ ID NO: 915788
acaagccuuuguuagaguu

SEQ ID NO: 1106117 - RNA, 19 nt, Artificial Sequence
  Description of Artificial Sequence: Synthetic oligonucleotide
  Antisense strand to SEQ ID NO: 1106116
aacucuaacaaaggcuugu

SEQ ID NO: 1106118 - RNA, 19 nt, Artificial Sequence
  Description of Artificial Sequence: Synthetic oligonucleotide
  Sense strand starting at position 951 of SEQ ID NO: 915788
uggcuaauuuaggaagacu

SEQ ID NO: 1106119 - RNA, 19 nt, Artificial Sequence
  Description of Artificial Sequence: Synthetic oligonucleotide
  Antisense strand to SEQ ID NO: 1106118
agucuuccuaaauuagcca

SEQ ID NO: 1106120 - RNA, 19 nt, Artificial Sequence
  Description of Artificial Sequence: Synthetic oligonucleotide
  Sense strand starting at position 964 of SEQ ID NO: 915788
aagacugaagcuggauauu

SEQ ID NO: 1106121 - RNA, 19 nt, Artificial Sequence
  Description of Artificial Sequence: Synthetic oligonucleotide
  Antisense strand to SEQ ID NO: 1106120
aauauccagcuucagucuu

SEQ ID NO: 1106122 - RNA, 19 nt, Artificial Sequence
  Description of Artificial Sequence: Synthetic oligonucleotide
  Sense strand starting at position 973 of SEQ ID NO: 915788
gcuggauauuaacuaucuu

SEQ ID NO: 1106123 - RNA, 19 nt, Artificial Sequence
  Description of Artificial Sequence: Synthetic oligonucleotide
  Antisense strand to SEQ ID NO: 1106122
aagauaguuaauauccagc

SEQ ID NO: 1106124 - RNA, 19 nt, Artificial Sequence
  Description of Artificial Sequence: Synthetic oligonucleotide
  Sense strand starting at position 1222 of SEQ ID NO: 915788
gagcaagucggccaauaaa

SEQ ID NO: 1106125 - RNA, 19 nt, Artificial Sequence
  Description of Artificial Sequence: Synthetic oligonucleotide
  Antisense strand to SEQ ID NO: 1106124
uuuauuggccgacuugcuc

SEQ ID NO: 1106126 - RNA, 19 nt, Artificial Sequence
  Description of Artificial Sequence: Synthetic oligonucleotide
  Sense strand starting at position 1260 of SEQ ID NO: 915788
acagauugccuaggcugau

SEQ ID NO: 1106127 - RNA, 19 nt, Artificial Sequence
  Description of Artificial Sequence: Synthetic oligonucleotide
  Antisense strand to SEQ ID NO: 1106126
aucagccuaggcaaucugu

SEQ ID NO: 1106128 - RNA, 19 nt, Artificial Sequence
  Description of Artificial Sequence: Synthetic oligonucleotide
  Sense strand starting at position 1266 of SEQ ID NO: 915788
ugccuaggcugaugacaaa

SEQ ID NO: 1106129 - RNA, 19 nt, Artificial Sequence
  Description of Artificial Sequence: Synthetic oligonucleotide
  Antisense strand to SEQ ID NO: 1106128
uuugucaucagccuaggca

SEQ ID NO: 1106130 - RNA, 19 nt, Artificial Sequence
  Description of Artificial Sequence: Synthetic oligonucleotide
  Sense strand starting at position 1995 of SEQ ID NO: 915788
guuacauaaucucaacgga

SEQ ID NO: 1106131 - RNA, 19 nt, Artificial Sequence
  Description of Artificial Sequence: Synthetic oligonucleotide
  Antisense strand to SEQ ID NO: 1106130
uccguugagauuauguaac

SEQ ID NO: 1106132 - RNA, 19 nt, Artificial Sequence
  Description of Artificial Sequence: Synthetic oligonucleotide
  Sense strand starting at position 3031 of SEQ ID NO: 915788
gaccguuaaccacgugagu

SEQ ID NO: 1106133 - RNA, 19 nt, Artificial Sequence
  Description of Artificial Sequence: Synthetic oligonucleotide
  Antisense strand to SEQ ID NO: 1106132
acucacgugguuaacgguc

SEQ ID NO: 1106134 - RNA, 19 nt, Artificial Sequence
  Description of Artificial Sequence: Synthetic oligonucleotide
  Sense strand starting at position 3197 of SEQ ID NO: 915788
ugugguguuccgggccuau

SEQ ID NO: 1106135 - RNA, 19 nt, Artificial Sequence
  Description of Artificial Sequence: Synthetic oligonucleotide
  Antisense strand to SEQ ID NO: 1106134
auaggcccggaacaccaca

SEQ ID NO: 1106136 - RNA, 19 nt, Artificial Sequence
  Description of Artificial Sequence: Synthetic oligonucleotide
  Sense strand starting at position 3301 of SEQ ID NO: 915788
gagagcuggauucgccuaa

SEQ ID NO: 1106137 - RNA, 19 nt, Artificial Sequence
  Description of Artificial Sequence: Synthetic oligonucleotide
  Antisense strand to SEQ ID NO: 1106136
uuaggcgaauccagcucuc

SEQ ID NO: 1106138 - RNA, 19 nt, Artificial Sequence
  Description of Artificial Sequence: Synthetic oligonucleotide
  Sense strand starting at position 3550 of SEQ ID NO: 915788
cgaggucugagccggaaau

SEQ ID NO: 1106139 - RNA, 19 nt, Artificial Sequence
  Description of Artificial Sequence: Synthetic oligonucleotide
  Antisense strand to SEQ ID NO: 1106138
auuuccggcucagaccucg

SEQ ID NO: 1106140 - RNA, 19 nt, Artificial Sequence
  Description of Artificial Sequence: Synthetic oligonucleotide
  Sense strand starting at position 3739 of SEQ ID NO: 915788
gaccuuguccgcggccaaa

SEQ ID NO: 1106141 - RNA, 19 nt, Artificial Sequence
  Description of Artificial Sequence: Synthetic oligonucleotide
  Antisense strand to SEQ ID NO: 1106140
uuuggccgcggacaagguc

SEQ ID NO: 1106142 - RNA, 19 nt, Artificial Sequence
  Description of Artificial Sequence: Synthetic oligonucleotide
  Sense strand starting at position 3802 of SEQ ID NO: 915788
acacgaucuccguguuuac

SEQ ID NO: 1106143 - RNA, 19 nt, Artificial Sequence
  Description of Artificial Sequence: Synthetic oligonucleotide
  Antisense strand to SEQ ID NO: 1106142
guaaacacggagaucgugu

SEQ ID NO: 1106144 - RNA, 19 nt, Artificial Sequence
  Description of Artificial Sequence: Synthetic oligonucleotide
  Sense strand starting at position 3805 of SEQ ID NO: 915788
cgaucuccguguuuacauu

SEQ ID NO: 1106145 - RNA, 19 nt, Artificial Sequence
  Description of Artificial Sequence: Synthetic oligonucleotide
  Antisense strand to SEQ ID NO: 1106144
aauguaaacacggagaucg

SEQ ID NO: 1106146 - RNA, 19 nt, Artificial Sequence
  Description of Artificial Sequence: Synthetic oligonucleotide
  Sense strand starting at position 3817 of SEQ ID NO: 915788
uuacauuuguucgccagca

SEQ ID NO: 1106147 - RNA, 19 nt, Artificial Sequence
  Description of Artificial Sequence: Synthetic oligonucleotide
  Antisense strand to SEQ ID NO: 1106146
ugcuggcgaacaaauguaa

SEQ ID NO: 1106148 - RNA, 19 nt, Artificial Sequence
  Description of Artificial Sequence: Synthetic oligonucleotide
  Sense strand starting at position 3837 of SEQ ID NO: 915788
gugggcaugcguuggcaaa

SEQ ID NO: 1106149 - RNA, 19 nt, Artificial Sequence
  Description of Artificial Sequence: Synthetic oligonucleotide
  Antisense strand to SEQ ID NO: 1106148
uuugccaacgcaugcccac

SEQ ID NO: 1106150 - RNA, 19 nt, Artificial Sequence
  Description of Artificial Sequence: Synthetic oligonucleotide
  Sense strand starting at position 3904 of SEQ ID NO: 915788
ucccuagugcuucguuaaa

SEQ ID NO: 1106151 - RNA, 19 nt, Artificial Sequence
  Description of Artificial Sequence: Synthetic oligonucleotide
  Antisense strand to SEQ ID NO: 1106150
uuuaacgaagcacuaggga

SEQ ID NO: 1106152 - RNA, 19 nt, Artificial Sequence
  Description of Artificial Sequence: Synthetic oligonucleotide
  Sense strand starting at position 3906 of SEQ ID NO: 915788
ccuagugcuucguuaaacu

SEQ ID NO: 1106153 - RNA, 19 nt, Artificial Sequence
  Description of Artificial Sequence: Synthetic oligonucleotide
  Antisense strand to SEQ ID NO: 1106152
aguuuaacgaagcacuagg

SEQ ID NO: 1106154 - RNA, 19 nt, Artificial Sequence
  Description of Artificial Sequence: Synthetic oligonucleotide
  Sense strand starting at position 216 of SEQ ID NO: 915789
gagcaagucggccaauaaa

SEQ ID NO: 1106155 - RNA, 19 nt, Artificial Sequence
  Description of Artificial Sequence: Synthetic oligonucleotide
  Antisense strand to SEQ ID NO: 1106154
uuuauuggccgacuugcuc

SEQ ID NO: 1106156 - RNA, 19 nt, Artificial Sequence
  Description of Artificial Sequence: Synthetic oligonucleotide
  Sense strand starting at position 254 of SEQ ID NO: 915789
acagauugccuaggcugau

SEQ ID NO: 1106157 - RNA, 19 nt, Artificial Sequence
  Description of Artificial Sequence: Synthetic oligonucleotide
  Antisense strand to SEQ ID NO: 1106156
aucagccuaggcaaucugu

SEQ ID NO: 1106158 - RNA, 19 nt, Artificial Sequence
  Description of Artificial Sequence: Synthetic oligonucleotide
  Sense strand starting at position 260 of SEQ ID NO: 915789
ugccuaggcugaugacaaa

SEQ ID NO: 1106159 - RNA, 19 nt, Artificial Sequence
  Description of Artificial Sequence: Synthetic oligonucleotide
  Antisense strand to SEQ ID NO: 1106158
uuugucaucagccuaggca

SEQ ID NO: 1106160 - RNA, 19 nt, Artificial Sequence
  Description of Artificial Sequence: Synthetic oligonucleotide
  Sense strand starting at position 989 of SEQ ID NO: 915789
guuacauaaucucaacgga

SEQ ID NO: 1106161 - RNA, 19 nt, Artificial Sequence
  Description of Artificial Sequence: Synthetic oligonucleotide
  Antisense strand to SEQ ID NO: 1106160
uccguugagauuauguaac

SEQ ID NO: 1106162 - RNA, 19 nt, Artificial Sequence
  Description of Artificial Sequence: Synthetic oligonucleotide
  Sense strand starting at position 2025 of SEQ ID NO: 915789
gaccguuaaccacgugagu

SEQ ID NO: 1106163 - RNA, 19 nt, Artificial Sequence
  Description of Artificial Sequence: Synthetic oligonucleotide
  Antisense strand to SEQ ID NO: 1106162
acucacgugguuaacgguc

SEQ ID NO: 1106164 - RNA, 19 nt, Artificial Sequence
  Description of Artificial Sequence: Synthetic oligonucleotide
  Sense strand starting at position 2191 of SEQ ID NO: 915789
ugugguguuccgggccuau

SEQ ID NO: 1106165 - RNA, 19 nt, Artificial Sequence
  Description of Artificial Sequence: Synthetic oligonucleotide
  Antisense strand to SEQ ID NO: 1106164
auaggcccggaacaccaca

SEQ ID NO: 1106166 - RNA, 19 nt, Artificial Sequence
  Description of Artificial Sequence: Synthetic oligonucleotide
  Sense strand starting at position 2295 of SEQ ID NO: 915789
gagagcuggauucgccuaa

SEQ ID NO: 1106167 - RNA, 19 nt, Artificial Sequence
  Description of Artificial Sequence: Synthetic oligonucleotide
  Antisense strand to SEQ ID NO: 1106166
uuaggcgaauccagcucuc

SEQ ID NO: 1106168 - RNA, 19 nt, Artificial Sequence
  Description of Artificial Sequence: Synthetic oligonucleotide
  Sense strand starting at position 2544 of SEQ ID NO: 915789
cgaggucugagccggaaau

SEQ ID NO: 1106169 - RNA, 19 nt, Artificial Sequence
  Description of Artificial Sequence: Synthetic oligonucleotide
  Antisense strand to SEQ ID NO: 1106168
auuuccggcucagaccucg

SEQ ID NO: 1106170 - RNA, 19 nt, Artificial Sequence
  Description of Artificial Sequence: Synthetic oligonucleotide
  Sense strand starting at position 2733 of SEQ ID NO: 915789
gaccuuguccgcggccaaa

SEQ ID NO: 1106171 - RNA, 19 nt, Artificial Sequence
  Description of Artificial Sequence: Synthetic oligonucleotide
  Antisense strand to SEQ ID NO: 1106170
uuuggccgcggacaagguc

SEQ ID NO: 1106172 - RNA, 19 nt, Artificial Sequence
  Description of Artificial Sequence: Synthetic oligonucleotide
  Sense strand starting at position 2796 of SEQ ID NO: 915789
acacgaucuccguguuuac

SEQ ID NO: 1106173 - RNA, 19 nt, Artificial Sequence
  Description of Artificial Sequence: Synthetic oligonucleotide
  Antisense strand to SEQ ID NO: 1106172
guaaacacggagaucgugu

SEQ ID NO: 1106174 - RNA, 19 nt, Artificial Sequence
  Description of Artificial Sequence: Synthetic oligonucleotide
  Sense strand starting at position 2799 of SEQ ID NO: 915789
cgaucuccguguuuacauu

SEQ ID NO: 1106175 - RNA, 19 nt, Artificial Sequence
  Description of Artificial Sequence: Synthetic oligonucleotide
  Antisense strand to SEQ ID NO: 1106174
aauguaaacacggagaucg

SEQ ID NO: 1106176 - RNA, 19 nt, Artificial Sequence
  Description of Artificial Sequence: Synthetic oligonucleotide
  Sense strand starting at position 2811 of SEQ ID NO: 915789
uuacauuuguucgccagca

SEQ ID NO: 1106177 - RNA, 19 nt, Artificial Sequence
  Description of Artificial Sequence: Synthetic oligonucleotide
  Antisense strand to SEQ ID NO: 1106176
ugcuggcgaacaaauguaa

SEQ ID NO: 1106178 - RNA, 19 nt, Artificial Sequence
  Description of Artificial Sequence: Synthetic oligonucleotide
  Sense strand starting at position 2831 of SEQ ID NO: 915789
gugggcaugcguuggcaaa

SEQ ID NO: 1106179 - RNA, 19 nt, Artificial Sequence
  Description of Artificial Sequence: Synthetic oligonucleotide
  Antisense strand to SEQ ID NO: 1106178
uuugccaacgcaugcccac

SEQ ID NO: 1106180 - RNA, 19 nt, Artificial Sequence
  Description of Artificial Sequence: Synthetic oligonucleotide
  Sense strand starting at position 2898 of SEQ ID NO: 915789
ucccuagugcuucguuaaa

SEQ ID NO: 1106181 - RNA, 19 nt, Artificial Sequence
  Description of Artificial Sequence: Synthetic oligonucleotide
  Antisense strand to SEQ ID NO: 1106180
uuuaacgaagcacuaggga

SEQ ID NO: 1106182 - RNA, 19 nt, Artificial Sequence
  Description of Artificial Sequence: Synthetic oligonucleotide
  Sense strand starting at position 2900 of SEQ ID NO: 915789
ccuagugcuucguuaaacu

SEQ ID NO: 1106183 - RNA, 19 nt, Artificial Sequence
  Description of Artificial Sequence: Synthetic oligonucleotide
  Antisense strand to SEQ ID NO: 1106182
aguuuaacgaagcacuagg

SEQ ID NO: 1106184 - RNA, 19 nt, Artificial Sequence
  Description of Artificial Sequence: Synthetic oligonucleotide
  Sense strand starting at position 3080 of SEQ ID NO: 915789
gccuuuagaguucaagcga

SEQ ID NO: 1106185 - RNA, 19 nt, Artificial Sequence
  Description of Artificial Sequence: Synthetic oligonucleotide
  Antisense strand to SEQ ID NO: 1106184
ucgcuugaacucuaaaggc

SEQ ID NO: 1106186 - RNA, 19 nt, Artificial Sequence
  Description of Artificial Sequence: Synthetic oligonucleotide
  Sense strand starting at position 3179 of SEQ ID NO: 915789
agacgaacuucccaauguu

SEQ ID NO: 1106187 - RNA, 19 nt, Artificial Sequence
  Description of Artificial Sequence: Synthetic oligonucleotide
  Antisense strand to SEQ ID NO: 1106186
aacauugggaaguucgucu

SEQ ID NO: 1106188 - RNA, 19 nt, Artificial Sequence
  Description of Artificial Sequence: Synthetic oligonucleotide
  Sense strand starting at position 3327 of SEQ ID NO: 915789
guauaugcuuccuucucca

SEQ ID NO: 1106189 - RNA, 19 nt, Artificial Sequence
  Description of Artificial Sequence: Synthetic oligonucleotide
  Antisense strand to SEQ ID NO: 1106188
uggagaaggaagcauauac

SEQ ID NO: 1106190 - RNA, 19 nt, Artificial Sequence
  Description of Artificial Sequence: Synthetic oligonucleotide
  Sense strand starting at position 3678 of SEQ ID NO: 915789
uggauaccucccuggaguu

SEQ ID NO: 1106191 - RNA, 19 nt, Artificial Sequence
  Description of Artificial Sequence: Synthetic oligonucleotide
  Antisense strand to SEQ ID NO: 1106190
aacuccagggagguaucca

SEQ ID NO: 1106192 - RNA, 19 nt, Artificial Sequence
  Description of Artificial Sequence: Synthetic oligonucleotide
  Sense strand starting at position 3679 of SEQ ID NO: 915789
ggauaccucccuggaguua

SEQ ID NO: 1106193 - RNA, 19 nt, Artificial Sequence
  Description of Artificial Sequence: Synthetic oligonucleotide
  Antisense strand to SEQ ID NO: 1106192
uaacuccagggagguaucc

SEQ ID NO: 1106194 - RNA, 19 nt, Artificial Sequence
  Description of Artificial Sequence: Synthetic oligonucleotide
  Sense strand starting at position 3692 of SEQ ID NO: 915789
gaguuagaauuccucaguc

SEQ ID NO: 1106195 - RNA, 19 nt, Artificial Sequence
  Description of Artificial Sequence: Synthetic oligonucleotide
  Antisense strand to SEQ ID NO: 1106194
gacugaggaauucuaacuc

SEQ ID NO: 1106196 - RNA, 19 nt, Artificial Sequence
  Description of Artificial Sequence: Synthetic oligonucleotide
  Sense strand starting at position 3694 of SEQ ID NO: 915789
guuagaauuccucagucaa

SEQ ID NO: 1106197 - RNA, 19 nt, Artificial Sequence
  Description of Artificial Sequence: Synthetic oligonucleotide
  Antisense strand to SEQ ID NO: 1106196
uugacugaggaauucuaac

SEQ ID NO: 1106198 - RNA, 19 nt, Artificial Sequence
  Description of Artificial Sequence: Synthetic oligonucleotide
  Sense strand starting at position 3750 of SEQ ID NO: 915789
auacauucucacuagcagu

SEQ ID NO: 1106199 - RNA, 19 nt, Artificial Sequence
  Description of Artificial Sequence: Synthetic oligonucleotide
  Antisense strand to SEQ ID NO: 1106198
acugcuagugagaauguau

SEQ ID NO: 1106200 - RNA, 19 nt, Artificial Sequence
  Description of Artificial Sequence: Synthetic oligonucleotide
  Sense strand starting at position 3756 of SEQ ID NO: 915789
ucucacuagcaguggauua

SEQ ID NO: 1106201 - RNA, 19 nt, Artificial Sequence
  Description of Artificial Sequence: Synthetic oligonucleotide
  Antisense strand to SEQ ID NO: 1106200
uaauccacugcuagugaga

SEQ ID NO: 1106202 - RNA, 19 nt, Artificial Sequence
  Description of Artificial Sequence: Synthetic oligonucleotide
  Sense strand starting at position 3773 of SEQ ID NO: 915789
uagagcacacucugugaau

SEQ ID NO: 1106203 - RNA, 19 nt, Artificial Sequence
  Description of Artificial Sequence: Synthetic oligonucleotide
  Antisense strand to SEQ ID NO: 1106202
auucacagagugugcucua

SEQ ID NO: 1106204 - RNA, 19 nt, Artificial Sequence
  Description of Artificial Sequence: Synthetic oligonucleotide
  Sense strand starting at position 3774 of SEQ ID NO: 915789
agagcacacucugugaauu

SEQ ID NO: 1106205 - RNA, 19 nt, Artificial Sequence
  Description of Artificial Sequence: Synthetic oligonucleotide
  Antisense strand to SEQ ID NO: 1106204
aauucacagagugugcucu

SEQ ID NO: 1106206 - RNA, 19 nt, Artificial Sequence
  Description of Artificial Sequence: Synthetic oligonucleotide
  Sense strand starting at position 3775 of SEQ ID NO: 915789
gagcacacucugugaauuc

SEQ ID NO: 1106207 - RNA, 19 nt, Artificial Sequence
  Description of Artificial Sequence: Synthetic oligonucleotide
  Antisense strand to SEQ ID NO: 1106206
gaauucacagagugugcuc

SEQ ID NO: 1106208 - RNA, 19 nt, Artificial Sequence
  Description of Artificial Sequence: Synthetic oligonucleotide
  Sense strand starting at position 3802 of SEQ ID NO: 915789
aguggauguucguugaugu

SEQ ID NO: 1106209 - RNA, 19 nt, Artificial Sequence
  Description of Artificial Sequence: Synthetic oligonucleotide
  Antisense strand to SEQ ID NO: 1106208
acaucaacgaacauccacu

SEQ ID NO: 1106210 - RNA, 19 nt, Artificial Sequence
  Description of Artificial Sequence: Synthetic oligonucleotide
  Sense strand starting at position 3803 of SEQ ID NO: 915789
guggauguucguugaugug

SEQ ID NO: 1106211 - RNA, 19 nt, Artificial Sequence
  Description of Artificial Sequence: Synthetic oligonucleotide
  Antisense strand to SEQ ID NO: 1106210
cacaucaacgaacauccac

SEQ ID NO: 1106212 - RNA, 19 nt, Artificial Sequence
  Description of Artificial Sequence: Synthetic oligonucleotide
  Sense strand starting at position 3805 of SEQ ID NO: 915789
ggauguucguugauguggu

SEQ ID NO: 1106213 - RNA, 19 nt, Artificial Sequence
  Description of Artificial Sequence: Synthetic oligonucleotide
  Antisense strand to SEQ ID NO: 1106212
accacaucaacgaacaucc

SEQ ID NO: 1106214 - RNA, 19 nt, Artificial Sequence
  Description of Artificial Sequence: Synthetic oligonucleotide
  Sense strand starting at position 3849 of SEQ ID NO: 915789
aacaguugucauggguuua

SEQ ID NO: 1106215 - RNA, 19 nt, Artificial Sequence
  Description of Artificial Sequence: Synthetic oligonucleotide
  Antisense strand to SEQ ID NO: 1106214
uaaacccaugacaacuguu

SEQ ID NO: 1106216 - RNA, 19 nt, Artificial Sequence
  Description of Artificial Sequence: Synthetic oligonucleotide
  Sense strand starting at position 3850 of SEQ ID NO: 915789
acaguugucauggguuuaa

SEQ ID NO: 1106217 - RNA, 19 nt, Artificial Sequence
  Description of Artificial Sequence: Synthetic oligonucleotide
  Antisense strand to SEQ ID NO: 1106216
uuaaacccaugacaacugu

SEQ ID NO: 1106218 - RNA, 19 nt, Artificial Sequence
  Description of Artificial Sequence: Synthetic oligonucleotide
  Sense strand starting at position 3854 of SEQ ID NO: 915789
uugucauggguuuaaugau

SEQ ID NO: 1106219 - RNA, 19 nt, Artificial Sequence
  Description of Artificial Sequence: Synthetic oligonucleotide
  Antisense strand to SEQ ID NO: 1106218
aucauuaaacccaugacaa

SEQ ID NO: 1106220 - RNA, 19 nt, Artificial Sequence
  Description of Artificial Sequence: Synthetic oligonucleotide
  Sense strand starting at position 3907 of SEQ ID NO: 915789
uuguuagcacuuuaugcau

SEQ ID NO: 1106221 - RNA, 19 nt, Artificial Sequence
  Description of Artificial Sequence: Synthetic oligonucleotide
  Antisense strand to SEQ ID NO: 1106220
augcauaaagugcuaacaa

SEQ ID NO: 1106222 - RNA, 19 nt, Artificial Sequence
  Description of Artificial Sequence: Synthetic oligonucleotide
  Sense strand starting at position 3909 of SEQ ID NO: 915789
guuagcacuuuaugcauau

SEQ ID NO: 1106223 - RNA, 19 nt, Artificial Sequence
  Description of Artificial Sequence: Synthetic oligonucleotide
  Antisense strand to SEQ ID NO: 1106222
auaugcauaaagugcuaac

SEQ ID NO: 1106224 - RNA, 19 nt, Artificial Sequence
  Description of Artificial Sequence: Synthetic oligonucleotide
  Sense strand starting at position 3936 of SEQ ID NO: 915789
ugucauauauguuguucua

SEQ ID NO: 1106225 - RNA, 19 nt, Artificial Sequence
  Description of Artificial Sequence: Synthetic oligonucleotide
  Antisense strand to SEQ ID NO: 1106224
uagaacaacauauaugaca

SEQ ID NO: 1106226 - RNA, 19 nt, Artificial Sequence
  Description of Artificial Sequence: Synthetic oligonucleotide
  Sense strand starting at position 310 of SEQ ID NO: 915790
gacucuuaugggcggcaaa

SEQ ID NO: 1106227 - RNA, 19 nt, Artificial Sequence
  Description of Artificial Sequence: Synthetic oligonucleotide
  Antisense strand to SEQ ID NO: 1106226
uuugccgcccauaagaguc

SEQ ID NO: 1106228 - RNA, 19 nt, Artificial Sequence
  Description of Artificial Sequence: Synthetic oligonucleotide
  Sense strand starting at position 311 of SEQ ID NO: 915790
acucuuaugggcggcaaau

SEQ ID NO: 1106229 - RNA, 19 nt, Artificial Sequence
  Description of Artificial Sequence: Synthetic oligonucleotide
  Antisense strand to SEQ ID NO: 1106228
auuugccgcccauaagagu

SEQ ID NO: 1106230 - RNA, 19 nt, Artificial Sequence
  Description of Artificial Sequence: Synthetic oligonucleotide
  Sense strand starting at position 502 of SEQ ID NO: 915790
guggcugguuucucacaga

SEQ ID NO: 1106231 - RNA, 19 nt, Artificial Sequence
  Description of Artificial Sequence: Synthetic oligonucleotide
  Antisense strand to SEQ ID NO: 1106230
ucugugagaaaccagccac

SEQ ID NO: 1106232 - RNA, 19 nt, Artificial Sequence
  Description of Artificial Sequence: Synthetic oligonucleotide
  Sense strand starting at position 505 of SEQ ID NO: 915790
gcugguuucucacagaacu

SEQ ID NO: 1106233 - RNA, 19 nt, Artificial Sequence
  Description of Artificial Sequence: Synthetic oligonucleotide
  Antisense strand to SEQ ID NO: 1106232
aguucugugagaaaccagc

SEQ ID NO: 1106234 - RNA, 19 nt, Artificial Sequence
  Description of Artificial Sequence: Synthetic oligonucleotide
  Sense strand starting at position 573 of SEQ ID NO: 915790
agaccaggcuucuuguaaa

SEQ ID NO: 1106235 - RNA, 19 nt, Artificial Sequence
  Description of Artificial Sequence: Synthetic oligonucleotide
  Antisense strand to SEQ ID NO: 1106234
uuuacaagaagccuggucu

SEQ ID NO: 1106236 - RNA, 19 nt, Artificial Sequence
  Description of Artificial Sequence: Synthetic oligonucleotide
  Sense strand starting at position 576 of SEQ ID NO: 915790
ccaggcuucuuguaaacaa

SEQ ID NO: 1106237 - RNA, 19 nt, Artificial Sequence
  Description of Artificial Sequence: Synthetic oligonucleotide
  Antisense strand to SEQ ID NO: 1106236
uuguuuacaagaagccugg

SEQ ID NO: 1106238 - RNA, 19 nt, Artificial Sequence
  Description of Artificial Sequence: Synthetic oligonucleotide
  Sense strand starting at position 618 of SEQ ID NO: 915790
cuccucgaaucgucaauua

SEQ ID NO: 1106239 - RNA, 19 nt, Artificial Sequence
  Description of Artificial Sequence: Synthetic oligonucleotide
  Antisense strand to SEQ ID NO: 1106238
uaauugacgauucgaggag

SEQ ID NO: 1106240 - RNA, 19 nt, Artificial Sequence
  Description of Artificial Sequence: Synthetic oligonucleotide
  Sense strand starting at position 638 of SEQ ID NO: 915790
ucaauaacuuggccugaga

SEQ ID NO: 1106241 - RNA, 19 nt, Artificial Sequence
  Description of Artificial Sequence: Synthetic oligonucleotide
  Antisense strand to SEQ ID NO: 1106240
ucucaggccaaguuauuga

SEQ ID NO: 1106242 - RNA, 19 nt, Artificial Sequence
  Description of Artificial Sequence: Synthetic oligonucleotide
  Sense strand starting at position 640 of SEQ ID NO: 915790
aauaacuuggccugagaag

SEQ ID NO: 1106243 - RNA, 19 nt, Artificial Sequence
  Description of Artificial Sequence: Synthetic oligonucleotide
  Antisense strand to SEQ ID NO: 1106242
cuucucaggccaaguuauu

SEQ ID NO: 1106244 - RNA, 19 nt, Artificial Sequence
  Description of Artificial Sequence: Synthetic oligonucleotide
  Sense strand starting at position 668 of SEQ ID NO: 915790
cagugaccuccagacuguu

SEQ ID NO: 1106245 - RNA, 19 nt, Artificial Sequence
  Description of Artificial Sequence: Synthetic oligonucleotide
  Antisense strand to SEQ ID NO: 1106244
aacagucuggaggucacug

SEQ ID NO: 1106246 - RNA, 19 nt, Artificial Sequence
  Description of Artificial Sequence: Synthetic oligonucleotide
  Sense strand starting at position 1029 of SEQ ID NO: 915790
cuuggacacuuguggaguu

SEQ ID NO: 1106247 - RNA, 19 nt, Artificial Sequence
  Description of Artificial Sequence: Synthetic oligonucleotide
  Antisense strand to SEQ ID NO: 1106246
aacuccacaaguguccaag

SEQ ID NO: 1106248 - RNA, 19 nt, Artificial Sequence
  Description of Artificial Sequence: Synthetic oligonucleotide
  Sense strand starting at position 1030 of SEQ ID NO: 915790
uuggacacuuguggaguua

SEQ ID NO: 1106249 - RNA, 19 nt, Artificial Sequence
  Description of Artificial Sequence: Synthetic oligonucleotide
  Antisense strand to SEQ ID NO: 1106248
uaacuccacaaguguccaa

SEQ ID NO: 1106250 - RNA, 19 nt, Artificial Sequence
  Description of Artificial Sequence: Synthetic oligonucleotide
  Sense strand starting at position 1031 of SEQ ID NO: 915790
uggacacuuguggaguuau

SEQ ID NO: 1106251 - RNA, 19 nt, Artificial Sequence
  Description of Artificial Sequence: Synthetic oligonucleotide
  Antisense strand to SEQ ID NO: 1106250
auaacuccacaagugucca

SEQ ID NO: 1106252 - RNA, 19 nt, Artificial Sequence
  Description of Artificial Sequence: Synthetic oligonucleotide
  Sense strand starting at position 1193 of SEQ ID NO: 915790
cugcgugaauaauuucuau

SEQ ID NO: 1106253 - RNA, 19 nt, Artificial Sequence
  Description of Artificial Sequence: Synthetic oligonucleotide
  Antisense strand to SEQ ID NO: 1106252
auagaaauuauucacgcag

SEQ ID NO: 1106254 - RNA, 19 nt, Artificial Sequence
  Description of Artificial Sequence: Synthetic oligonucleotide
  Sense strand starting at position 1477 of SEQ ID NO: 915790
cccugaacagaaugucuuu

SEQ ID NO: 1106255 - RNA, 19 nt, Artificial Sequence
  Description of Artificial Sequence: Synthetic oligonucleotide
  Antisense strand to SEQ ID NO: 1106254
aaagacauucuguucaggg

SEQ ID NO: 1106256 - RNA, 19 nt, Artificial Sequence
  Description of Artificial Sequence: Synthetic oligonucleotide
  Sense strand starting at position 2417 of SEQ ID NO: 915790
ggcuuaucccugcaauauu

SEQ ID NO: 1106257 - RNA, 19 nt, Artificial Sequence
  Description of Artificial Sequence: Synthetic oligonucleotide
  Antisense strand to SEQ ID NO: 1106256
aauauugcagggauaagcc

SEQ ID NO: 1106258 - RNA, 19 nt, Artificial Sequence
  Description of Artificial Sequence: Synthetic oligonucleotide
  Sense strand starting at position 2427 of SEQ ID NO: 915790
ugcaauauugagcauuagu

SEQ ID NO: 1106259 - RNA, 19 nt, Artificial Sequence
  Description of Artificial Sequence: Synthetic oligonucleotide
  Antisense strand to SEQ ID NO: 1106258
acuaaugcucaauauugca

SEQ ID NO: 1106260 - RNA, 19 nt, Artificial Sequence
  Description of Artificial Sequence: Synthetic oligonucleotide
  Sense strand starting at position 2445 of SEQ ID NO: 915790
uuaauagggccucggcaau

SEQ ID NO: 1106261 - RNA, 19 nt, Artificial Sequence
  Description of Artificial Sequence: Synthetic oligonucleotide
  Antisense strand to SEQ ID NO: 1106260
auugccgaggcccuauuaa

SEQ ID NO: 1106262 - RNA, 19 nt, Artificial Sequence
  Description of Artificial Sequence: Synthetic oligonucleotide
  Sense strand starting at position 2457 of SEQ ID NO: 915790
cggcaauucuccuucccaa

SEQ ID NO: 1106263 - RNA, 19 nt, Artificial Sequence
  Description of Artificial Sequence: Synthetic oligonucleotide
  Antisense strand to SEQ ID NO: 1106262
uugggaaggagaauugccg

SEQ ID NO: 1106264 - RNA, 19 nt, Artificial Sequence
  Description of Artificial Sequence: Synthetic oligonucleotide
  Sense strand starting at position 2507 of SEQ ID NO: 915790
gggcaauucgggcacaauu

SEQ ID NO: 1106265 - RNA, 19 nt, Artificial Sequence
  Description of Artificial Sequence: Synthetic oligonucleotide
  Antisense strand to SEQ ID NO: 1106264
aauugugcccgaauugccc

SEQ ID NO: 1106266 - RNA, 19 nt, Artificial Sequence
  Description of Artificial Sequence: Synthetic oligonucleotide
  Sense strand starting at position 2913 of SEQ ID NO: 915790
gcugccucaucucacagau

SEQ ID NO: 1106267 - RNA, 19 nt, Artificial Sequence
  Description of Artificial Sequence: Synthetic oligonucleotide
  Antisense strand to SEQ ID NO: 1106266
aucugugagaugaggcagc

SEQ ID NO: 1106268 - RNA, 19 nt, Artificial Sequence
  Description of Artificial Sequence: Synthetic oligonucleotide
  Sense strand starting at position 2977 of SEQ ID NO: 915790
gccggguguccggcgaaau

SEQ ID NO: 1106269 - RNA, 19 nt, Artificial Sequence
  Description of Artificial Sequence: Synthetic oligonucleotide
  Antisense strand to SEQ ID NO: 1106268
auuucgccggacacccggc

SEQ ID NO: 1106270 - RNA, 19 nt, Artificial Sequence
  Description of Artificial Sequence: Synthetic oligonucleotide
  Sense strand starting at position 2978 of SEQ ID NO: 915790
ccggguguccggcgaaauc

SEQ ID NO: 1106271 - RNA, 19 nt, Artificial Sequence
  Description of Artificial Sequence: Synthetic oligonucleotide
  Antisense strand to SEQ ID NO: 1106270
gauuucgccggacacccgg

SEQ ID NO: 1106272 - RNA, 19 nt, Artificial Sequence
  Description of Artificial Sequence: Synthetic oligonucleotide
  Sense strand starting at position 2979 of SEQ ID NO: 915790
cggguguccggcgaaauca

SEQ ID NO: 1106273 - RNA, 19 nt, Artificial Sequence
  Description of Artificial Sequence: Synthetic oligonucleotide
  Antisense strand to SEQ ID NO: 1106272
ugauuucgccggacacccg

SEQ ID NO: 1106274 - RNA, 19 nt, Artificial Sequence
  Description of Artificial Sequence: Synthetic oligonucleotide
  Sense strand starting at position 3021 of SEQ ID NO: 915790
cugcuuucucgguguggga

SEQ ID NO: 1106275 - RNA, 19 nt, Artificial Sequence
  Description of Artificial Sequence: Synthetic oligonucleotide
  Antisense strand to SEQ ID NO: 1106274
ucccacaccgagaaagcag

SEQ ID NO: 1106276 - RNA, 19 nt, Artificial Sequence
  Description of Artificial Sequence: Synthetic oligonucleotide
  Sense strand starting at position 3069 of SEQ ID NO: 915790
cucuuuguacagugaggau

SEQ ID NO: 1106277 - RNA, 19 nt, Artificial Sequence
  Description of Artificial Sequence: Synthetic oligonucleotide
  Antisense strand to SEQ ID NO: 1106276
auccucacuguacaaagag

SEQ ID NO: 1106278 - RNA, 19 nt, Artificial Sequence
  Description of Artificial Sequence: Synthetic oligonucleotide
  Sense strand starting at position 3367 of SEQ ID NO: 915790
gcguucgcccggagucaga

SEQ ID NO: 1106279 - RNA, 19 nt, Artificial Sequence
  Description of Artificial Sequence: Synthetic oligonucleotide
  Antisense strand to SEQ ID NO: 1106278
ucugacuccgggcgaacgc

SEQ ID NO: 1106280 - RNA, 19 nt, Artificial Sequence
  Description of Artificial Sequence: Synthetic oligonucleotide
  Sense strand starting at position 3428 of SEQ ID NO: 915790
gggauuccuuucuaagggu

SEQ ID NO: 1106281 - RNA, 19 nt, Artificial Sequence
  Description of Artificial Sequence: Synthetic oligonucleotide
  Antisense strand to SEQ ID NO: 1106280
acccuuagaaaggaauccc

SEQ ID NO: 1106282 - RNA, 19 nt, Artificial Sequence
  Description of Artificial Sequence: Synthetic oligonucleotide
  Sense strand starting at position 3698 of SEQ ID NO: 915790
guagucagcacgcagagau

SEQ ID NO: 1106283 - RNA, 19 nt, Artificial Sequence
  Description of Artificial Sequence: Synthetic oligonucleotide
  Antisense strand to SEQ ID NO: 1106282
aucucugcgugcugacuac

SEQ ID NO: 1106284 - RNA, 19 nt, Artificial Sequence
  Description of Artificial Sequence: Synthetic oligonucleotide
  Sense strand starting at position 3768 of SEQ ID NO: 915790
aggagaagccuggaucgua

SEQ ID NO: 1106285 - RNA, 19 nt, Artificial Sequence
  Description of Artificial Sequence: Synthetic oligonucleotide
  Antisense strand to SEQ ID NO: 1106284
uacgauccaggcuucuccu

SEQ ID NO: 1106286 - RNA, 19 nt, Artificial Sequence
  Description of Artificial Sequence: Synthetic oligonucleotide
  Sense strand starting at position 3944 of SEQ ID NO: 915790
cugcaaguuucuugcacuu

SEQ ID NO: 1106287 - RNA, 19 nt, Artificial Sequence
  Description of Artificial Sequence: Synthetic oligonucleotide
  Antisense strand to SEQ ID NO: 1106286
aagugcaagaaacuugcag

SEQ ID NO: 1106288 - RNA, 19 nt, Artificial Sequence
  Description of Artificial Sequence: Synthetic oligonucleotide
  Sense strand starting at position 3946 of SEQ ID NO: 915790
gcaaguuucuugcacuucu

SEQ ID NO: 1106289 - RNA, 19 nt, Artificial Sequence
  Description of Artificial Sequence: Synthetic oligonucleotide
  Antisense strand to SEQ ID NO: 1106288
agaagugcaagaaacuugc

SEQ ID NO: 1106290 - RNA, 19 nt, Artificial Sequence
  Description of Artificial Sequence: Synthetic oligonucleotide
  Sense strand starting at position 3 of SEQ ID NO: 915791
ucccuaggcccucgaguaa

SEQ ID NO: 1106291 - RNA, 19 nt, Artificial Sequence
  Description of Artificial Sequence: Synthetic oligonucleotide
  Antisense strand to SEQ ID NO: 1106290
uuacucgagggccuaggga

SEQ ID NO: 1106292 - RNA, 19 nt, Artificial Sequence
  Description of Artificial Sequence: Synthetic oligonucleotide
  Sense strand starting at position 37 of SEQ ID NO: 915791
agcauccgccauuguauua

SEQ ID NO: 1106293 - RNA, 19 nt, Artificial Sequence
  Description of Artificial Sequence: Synthetic oligonucleotide
  Antisense strand to SEQ ID NO: 1106292
uaauacaauggcggaugcu

SEQ ID NO: 1106294 - RNA, 19 nt, Artificial Sequence
  Description of Artificial Sequence: Synthetic oligonucleotide
  Sense strand starting at position 42 of SEQ ID NO: 915791
ccgccauuguauuaguaaa

SEQ ID NO: 1106295 - RNA, 19 nt, Artificial Sequence
  Description of Artificial Sequence: Synthetic oligonucleotide
  Antisense strand to SEQ ID NO: 1106294
uuuacuaauacaauggcgg

SEQ ID NO: 1106296 - RNA, 19 nt, Artificial Sequence
  Description of Artificial Sequence: Synthetic oligonucleotide
  Sense strand starting at position 50 of SEQ ID NO: 915791
guauuaguaaagcguuuac

SEQ ID NO: 1106297 - RNA, 19 nt, Artificial Sequence
  Description of Artificial Sequence: Synthetic oligonucleotide
  Antisense strand to SEQ ID NO: 1106296
guaaacgcuuuacuaauac

SEQ ID NO: 1106298 - RNA, 19 nt, Artificial Sequence
  Description of Artificial Sequence: Synthetic oligonucleotide
  Sense strand starting at position 54 of SEQ ID NO: 915791
uaguaaagcguuuacuaaa

SEQ ID NO: 1106299 - RNA, 19 nt, Artificial Sequence
  Description of Artificial Sequence: Synthetic oligonucleotide
  Antisense strand to SEQ ID NO: 1106298
uuuaguaaacgcuuuacua

SEQ ID NO: 1106300 - RNA, 19 nt, Artificial Sequence
  Description of Artificial Sequence: Synthetic oligonucleotide
  Sense strand starting at position 92 of SEQ ID NO: 915791
uggcuuagguucucaauag

SEQ ID NO: 1106301 - RNA, 19 nt, Artificial Sequence
  Description of Artificial Sequence: Synthetic oligonucleotide
  Antisense strand to SEQ ID NO: 1106300
cuauugagaaccuaagcca

SEQ ID NO: 1106302 - RNA, 19 nt, Artificial Sequence
  Description of Artificial Sequence: Synthetic oligonucleotide
  Sense strand starting at position 101 of SEQ ID NO: 915791
uucucaauagcguggaaau

SEQ ID NO: 1106303 - RNA, 19 nt, Artificial Sequence
  Description of Artificial Sequence: Synthetic oligonucleotide
  Antisense strand to SEQ ID NO: 1106302
auuuccacgcuauugagaa

SEQ ID NO: 1106304 - RNA, 19 nt, Artificial Sequence
  Description of Artificial Sequence: Synthetic oligonucleotide
  Sense strand starting at position 102 of SEQ ID NO: 915791
ucucaauagcguggaaauc

SEQ ID NO: 1106305 - RNA, 19 nt, Artificial Sequence
  Description of Artificial Sequence: Synthetic oligonucleotide
  Antisense strand to SEQ ID NO: 1106304
gauuuccacgcuauugaga

SEQ ID NO: 1106306 - RNA, 19 nt, Artificial Sequence
  Description of Artificial Sequence: Synthetic oligonucleotide
  Sense strand starting at position 234 of SEQ ID NO: 915791
uacuuaucgugugccgagu

SEQ ID NO: 1106307 - RNA, 19 nt, Artificial Sequence
  Description of Artificial Sequence: Synthetic oligonucleotide
  Antisense strand to SEQ ID NO: 1106306
acucggcacacgauaagua

SEQ ID NO: 1106308 - RNA, 19 nt, Artificial Sequence
  Description of Artificial Sequence: Synthetic oligonucleotide
  Sense strand starting at position 248 of SEQ ID NO: 915791
cgaguucccuccuuguauc

SEQ ID NO: 1106309 - RNA, 19 nt, Artificial Sequence
  Description of Artificial Sequence: Synthetic oligonucleotide
  Antisense strand to SEQ ID NO: 1106308
gauacaaggagggaacucg

SEQ ID NO: 1106310 - RNA, 19 nt, Artificial Sequence
  Description of Artificial Sequence: Synthetic oligonucleotide
  Sense strand starting at position 259 of SEQ ID NO: 915791
cuuguauccugacuaagca

SEQ ID NO: 1106311 - RNA, 19 nt, Artificial Sequence
  Description of Artificial Sequence: Synthetic oligonucleotide
  Antisense strand to SEQ ID NO: 1106310
ugcuuagucaggauacaag

SEQ ID NO: 1106312 - RNA, 19 nt, Artificial Sequence
  Description of Artificial Sequence: Synthetic oligonucleotide
  Sense strand starting at position 279 of SEQ ID NO: 915791
agcgaauaacccuguccuu

SEQ ID NO: 1106313 - RNA, 19 nt, Artificial Sequence
  Description of Artificial Sequence: Synthetic oligonucleotide
  Antisense strand to SEQ ID NO: 1106312
aaggacaggguuauucgcu

SEQ ID NO: 1106314 - RNA, 19 nt, Artificial Sequence
  Description of Artificial Sequence: Synthetic oligonucleotide
  Sense strand starting at position 341 of SEQ ID NO: 915791
ccgcguuuacaagaugaag

SEQ ID NO: 1106315 - RNA, 19 nt, Artificial Sequence
  Description of Artificial Sequence: Synthetic oligonucleotide
  Antisense strand to SEQ ID NO: 1106314
cuucaucuuguaaacgcgg

SEQ ID NO: 1106316 - RNA, 19 nt, Artificial Sequence
  Description of Artificial Sequence: Synthetic oligonucleotide
  Sense strand starting at position 343 of SEQ ID NO: 915791
gcguuuacaagaugaagag

SEQ ID NO: 1106317 - RNA, 19 nt, Artificial Sequence
  Description of Artificial Sequence: Synthetic oligonucleotide
  Antisense strand to SEQ ID NO: 1106316
cucuucaucuuguaaacgc

SEQ ID NO: 1106318 - RNA, 19 nt, Artificial Sequence
  Description of Artificial Sequence: Synthetic oligonucleotide
  Sense strand starting at position 366 of SEQ ID NO: 915791
cccagaugcgcugaaagaa

SEQ ID NO: 1106319 - RNA, 19 nt, Artificial Sequence
  Description of Artificial Sequence: Synthetic oligonucleotide
  Antisense strand to SEQ ID NO: 1106318
uucuuucagcgcaucuggg

SEQ ID NO: 1106320 - RNA, 19 nt, Artificial Sequence
  Description of Artificial Sequence: Synthetic oligonucleotide
  Sense strand starting at position 436 of SEQ ID NO: 915791
auagcuuggacucggauaa

SEQ ID NO: 1106321 - RNA, 19 nt, Artificial Sequence
  Description of Artificial Sequence: Synthetic oligonucleotide
  Antisense strand to SEQ ID NO: 1106320
uuauccgaguccaagcuau

SEQ ID NO: 1106322 - RNA, 19 nt, Artificial Sequence
  Description of Artificial Sequence: Synthetic oligonucleotide
  Sense strand starting at position 440 of SEQ ID NO: 915791
cuuggacucggauaaguca

SEQ ID NO: 1106323 - RNA, 19 nt, Artificial Sequence
  Description of Artificial Sequence: Synthetic oligonucleotide
  Antisense strand to SEQ ID NO: 1106322
ugacuuauccgaguccaag

SEQ ID NO: 1106324 - RNA, 19 nt, Artificial Sequence
  Description of Artificial Sequence: Synthetic oligonucleotide
  Sense strand starting at position 499 of SEQ ID NO: 915791
agcgaagcccagugaagau

SEQ ID NO: 1106325 - RNA, 19 nt, Artificial Sequence
  Description of Artificial Sequence: Synthetic oligonucleotide
  Antisense strand to SEQ ID NO: 1106324
aucuucacugggcuucgcu

SEQ ID NO: 1106326 - RNA, 19 nt, Artificial Sequence
  Description of Artificial Sequence: Synthetic oligonucleotide
  Sense strand starting at position 542 of SEQ ID NO: 915791
gagcuauccacggacacga

SEQ ID NO: 1106327 - RNA, 19 nt, Artificial Sequence
  Description of Artificial Sequence: Synthetic oligonucleotide
  Antisense strand to SEQ ID NO: 1106326
ucguguccguggauagcuc

SEQ ID NO: 1106328 - RNA, 19 nt, Artificial Sequence
  Description of Artificial Sequence: Synthetic oligonucleotide
  Sense strand starting at position 592 of SEQ ID NO: 915791
ggugcaugugcucauucua

SEQ ID NO: 1106329 - RNA, 19 nt, Artificial Sequence
  Description of Artificial Sequence: Synthetic oligonucleotide
  Antisense strand to SEQ ID NO: 1106328
uagaaugagcacaugcacc

SEQ ID NO: 1106330 - RNA, 19 nt, Artificial Sequence
  Description of Artificial Sequence: Synthetic oligonucleotide
  Sense strand starting at position 595 of SEQ ID NO: 915791
gcaugugcucauucuaguu

SEQ ID NO: 1106331 - RNA, 19 nt, Artificial Sequence
  Description of Artificial Sequence: Synthetic oligonucleotide
  Antisense strand to SEQ ID NO: 1106330
aacuagaaugagcacaugc

SEQ ID NO: 1106332 - RNA, 19 nt, Artificial Sequence
  Description of Artificial Sequence: Synthetic oligonucleotide
  Sense strand starting at position 600 of SEQ ID NO: 915791
ugcucauucuaguucucua

SEQ ID NO: 1106333 - RNA, 19 nt, Artificial Sequence
  Description of Artificial Sequence: Synthetic oligonucleotide
  Antisense strand to SEQ ID NO: 1106332
uagagaacuagaaugagca

SEQ ID NO: 1106334 - RNA, 19 nt, Artificial Sequence
  Description of Artificial Sequence: Synthetic oligonucleotide
  Sense strand starting at position 603 of SEQ ID NO: 915791
ucauucuaguucucuacga

SEQ ID NO: 1106335 - RNA, 19 nt, Artificial Sequence
  Description of Artificial Sequence: Synthetic oligonucleotide
  Antisense strand to SEQ ID NO: 1106334
ucguagagaacuagaauga

SEQ ID NO: 1106336 - RNA, 19 nt, Artificial Sequence
  Description of Artificial Sequence: Synthetic oligonucleotide
  Sense strand starting at position 605 of SEQ ID NO: 915791
auucuaguucucuacgaua

SEQ ID NO: 1106337 - RNA, 19 nt, Artificial Sequence
  Description of Artificial Sequence: Synthetic oligonucleotide
  Antisense strand to SEQ ID NO: 1106336
uaucguagagaacuagaau

SEQ ID NO: 1106338 - RNA, 19 nt, Artificial Sequence
  Description of Artificial Sequence: Synthetic oligonucleotide
  Sense strand starting at position 607 of SEQ ID NO: 915791
ucuaguucucuacgauacu

SEQ ID NO: 1106339 - RNA, 19 nt, Artificial Sequence
  Description of Artificial Sequence: Synthetic oligonucleotide
  Antisense strand to SEQ ID NO: 1106338
aguaucguagagaacuaga

SEQ ID NO: 1106340 - RNA, 19 nt, Artificial Sequence
  Description of Artificial Sequence: Synthetic oligonucleotide
  Sense strand starting at position 608 of SEQ ID NO: 915791
cuaguucucuacgauacuu

SEQ ID NO: 1106341 - RNA, 19 nt, Artificial Sequence
  Description of Artificial Sequence: Synthetic oligonucleotide
  Antisense strand to SEQ ID NO: 1106340
aaguaucguagagaacuag

SEQ ID NO: 1106342 - RNA, 19 nt, Artificial Sequence
  Description of Artificial Sequence: Synthetic oligonucleotide
  Sense strand starting at position 610 of SEQ ID NO: 915791
aguucucuacgauacuuaa

SEQ ID NO: 1106343 - RNA, 19 nt, Artificial Sequence
  Description of Artificial Sequence: Synthetic oligonucleotide
  Antisense strand to SEQ ID NO: 1106342
uuaaguaucguagagaacu

SEQ ID NO: 1106344 - RNA, 19 nt, Artificial Sequence
  Description of Artificial Sequence: Synthetic oligonucleotide
  Sense strand starting at position 644 of SEQ ID NO: 915791
gugccaacaccguauuaua

SEQ ID NO: 1106345 - RNA, 19 nt, Artificial Sequence
  Description of Artificial Sequence: Synthetic oligonucleotide
  Antisense strand to SEQ ID NO: 1106344
uauaauacgguguuggcac

SEQ ID NO: 1106346 - RNA, 19 nt, Artificial Sequence
  Description of Artificial Sequence: Synthetic oligonucleotide
  Sense strand starting at position 669 of SEQ ID NO: 915791
ggaggugcuccuggacauu

SEQ ID NO: 1106347 - RNA, 19 nt, Artificial Sequence
  Description of Artificial Sequence: Synthetic oligonucleotide
  Antisense strand to SEQ ID NO: 1106346
aauguccaggagcaccucc

SEQ ID NO: 1106348 - RNA, 19 nt, Artificial Sequence
  Description of Artificial Sequence: Synthetic oligonucleotide
  Sense strand starting at position 770 of SEQ ID NO: 915791
gcgcuacgcuuggugacaa

SEQ ID NO: 1106349 - RNA, 19 nt, Artificial Sequence
  Description of Artificial Sequence: Synthetic oligonucleotide
  Antisense strand to SEQ ID NO: 1106348
uugucaccaagcguagcgc

SEQ ID NO: 1106350 - RNA, 19 nt, Artificial Sequence
  Description of Artificial Sequence: Synthetic oligonucleotide
  Sense strand starting at position 771 of SEQ ID NO: 915791
cgcuacgcuuggugacaau

SEQ ID NO: 1106351 - RNA, 19 nt, Artificial Sequence
  Description of Artificial Sequence: Synthetic oligonucleotide
  Antisense strand to SEQ ID NO: 1106350
auugucaccaagcguagcg

SEQ ID NO: 1106352 - RNA, 19 nt, Artificial Sequence
  Description of Artificial Sequence: Synthetic oligonucleotide
  Sense strand starting at position 789 of SEQ ID NO: 915791
uuuggcguuuccuuaauua

SEQ ID NO: 1106353 - RNA, 19 nt, Artificial Sequence
  Description of Artificial Sequence: Synthetic oligonucleotide
  Antisense strand to SEQ ID NO: 1106352
uaauuaaggaaacgccaaa

SEQ ID NO: 1106354 - RNA, 19 nt, Artificial Sequence
  Description of Artificial Sequence: Synthetic oligonucleotide
  Sense strand starting at position 793 of SEQ ID NO: 915791
gcguuuccuuaauuaacaa

SEQ ID NO: 1106355 - RNA, 19 nt, Artificial Sequence
  Description of Artificial Sequence: Synthetic oligonucleotide
  Antisense strand to SEQ ID NO: 1106354
uuguuaauuaaggaaacgc

SEQ ID NO: 1106356 - RNA, 19 nt, Artificial Sequence
  Description of Artificial Sequence: Synthetic oligonucleotide
  Sense strand starting at position 882 of SEQ ID NO: 915791
cggaaucucucggacucua

SEQ ID NO: 1106357 - RNA, 19 nt, Artificial Sequence
  Description of Artificial Sequence: Synthetic oligonucleotide
  Antisense strand to SEQ ID NO: 1106356
uagaguccgagagauuccg

SEQ ID NO: 1106358 - RNA, 19 nt, Artificial Sequence
  Description of Artificial Sequence: Synthetic oligonucleotide
  Sense strand starting at position 1378 of SEQ ID NO: 915791
ucggcuccuguuugaugaa

SEQ ID NO: 1106359 - RNA, 19 nt, Artificial Sequence
  Description of Artificial Sequence: Synthetic oligonucleotide
  Antisense strand to SEQ ID NO: 1106358
uucaucaaacaggagccga

SEQ ID NO: 1106360 - RNA, 19 nt, Artificial Sequence
  Description of Artificial Sequence: Synthetic oligonucleotide
  Sense strand starting at position 1381 of SEQ ID NO: 915791
gcuccuguuugaugaagga

SEQ ID NO: 1106361 - RNA, 19 nt, Artificial Sequence
  Description of Artificial Sequence: Synthetic oligonucleotide
  Antisense strand to SEQ ID NO: 1106360
uccuucaucaaacaggagc

SEQ ID NO: 1106362 - RNA, 19 nt, Artificial Sequence
  Description of Artificial Sequence: Synthetic oligonucleotide
  Sense strand starting at position 1385 of SEQ ID NO: 915791
cuguuugaugaaggaguga

SEQ ID NO: 1106363 - RNA, 19 nt, Artificial Sequence
  Description of Artificial Sequence: Synthetic oligonucleotide
  Antisense strand to SEQ ID NO: 1106362
ucacuccuucaucaaacag

SEQ ID NO: 1106364 - RNA, 19 nt, Artificial Sequence
  Description of Artificial Sequence: Synthetic oligonucleotide
  Sense strand starting at position 2494 of SEQ ID NO: 915791
ggcucuugcuucuagaacu

SEQ ID NO: 1106365 - RNA, 19 nt, Artificial Sequence
  Description of Artificial Sequence: Synthetic oligonucleotide
  Antisense strand to SEQ ID NO: 1106364
aguucuagaagcaagagcc

SEQ ID NO: 1106366 - RNA, 19 nt, Artificial Sequence
  Description of Artificial Sequence: Synthetic oligonucleotide
  Sense strand starting at position 51 of SEQ ID NO: 915792
uuauuuaugccgcagucuu

SEQ ID NO: 1106367 - RNA, 19 nt, Artificial Sequence
  Description of Artificial Sequence: Synthetic oligonucleotide
  Antisense strand to SEQ ID NO: 1106366
aagacugcggcauaaauaa

SEQ ID NO: 1106368 - RNA, 19 nt, Artificial Sequence
  Description of Artificial Sequence: Synthetic oligonucleotide
  Sense strand starting at position 101 of SEQ ID NO: 915792
cuggcaaauuaaguauaaa

SEQ ID NO: 1106369 - RNA, 19 nt, Artificial Sequence
  Description of Artificial Sequence: Synthetic oligonucleotide
  Antisense strand to SEQ ID NO: 1106368
uuuauacuuaauuugccag

SEQ ID NO: 1106370 - RNA, 19 nt, Artificial Sequence
  Description of Artificial Sequence: Synthetic oligonucleotide
  Sense strand starting at position 125 of SEQ ID NO: 915792
uugccugaucgacagagaa

SEQ ID NO: 1106371 - RNA, 19 nt, Artificial Sequence
  Description of Artificial Sequence: Synthetic oligonucleotide
  Antisense strand to SEQ ID NO: 1106370
uucucugucgaucaggcaa

SEQ ID NO: 1106372 - RNA, 19 nt, Artificial Sequence
  Description of Artificial Sequence: Synthetic oligonucleotide
  Sense strand starting at position 204 of SEQ ID NO: 915792
aaugaaucugcugggcuaa

SEQ ID NO: 1106373 - RNA, 19 nt, Artificial Sequence
  Description of Artificial Sequence: Synthetic oligonucleotide
  Antisense strand to SEQ ID NO: 1106372
uuagcccagcagauucauu

SEQ ID NO: 1106374 - RNA, 19 nt, Artificial Sequence
  Description of Artificial Sequence: Synthetic oligonucleotide
  Sense strand starting at position 230 of SEQ ID NO: 915792
uugacuccgagcuguaaau

SEQ ID NO: 1106375 - RNA, 19 nt, Artificial Sequence
  Description of Artificial Sequence: Synthetic oligonucleotide
  Antisense strand to SEQ ID NO: 1106374
auuuacagcucggagucaa

SEQ ID NO: 1106376 - RNA, 19 nt, Artificial Sequence
  Description of Artificial Sequence: Synthetic oligonucleotide
  Sense strand starting at position 232 of SEQ ID NO: 915792
gacuccgagcuguaaauca

SEQ ID NO: 1106377 - RNA, 19 nt, Artificial Sequence
  Description of Artificial Sequence: Synthetic oligonucleotide
  Antisense strand to SEQ ID NO: 1106376
ugauuuacagcucggaguc

SEQ ID NO: 1106378 - RNA, 19 nt, Artificial Sequence
  Description of Artificial Sequence: Synthetic oligonucleotide
  Sense strand starting at position 290 of SEQ ID NO: 915792
guuaaauggccuggucuua

SEQ ID NO: 1106379 - RNA, 19 nt, Artificial Sequence
  Description of Artificial Sequence: Synthetic oligonucleotide
  Antisense strand to SEQ ID NO: 1106378
uaagaccaggccauuuaac

SEQ ID NO: 1106380 - RNA, 19 nt, Artificial Sequence
  Description of Artificial Sequence: Synthetic oligonucleotide
  Sense strand starting at position 318 of SEQ ID NO: 915792
agaguaauuaccgaguaau

SEQ ID NO: 1106381 - RNA, 19 nt, Artificial Sequence
  Description of Artificial Sequence: Synthetic oligonucleotide
  Antisense strand to SEQ ID NO: 1106380
auuacucgguaauuacucu

SEQ ID NO: 1106382 - RNA, 19 nt, Artificial Sequence
  Description of Artificial Sequence: Synthetic oligonucleotide
  Sense strand starting at position 321 of SEQ ID NO: 915792
guaauuaccgaguaauguu

SEQ ID NO: 1106383 - RNA, 19 nt, Artificial Sequence
  Description of Artificial Sequence: Synthetic oligonucleotide
  Antisense strand to SEQ ID NO: 1106382
aacauuacucgguaauuac

SEQ ID NO: 1106384 - RNA, 19 nt, Artificial Sequence
  Description of Artificial Sequence: Synthetic oligonucleotide
  Sense strand starting at position 330 of SEQ ID NO: 915792
gaguaauguuaucugucug

SEQ ID NO: 1106385 - RNA, 19 nt, Artificial Sequence
  Description of Artificial Sequence: Synthetic oligonucleotide
  Antisense strand to SEQ ID NO: 1106384
cagacagauaacauuacuc

SEQ ID NO: 1106386 - RNA, 19 nt, Artificial Sequence
  Description of Artificial Sequence: Synthetic oligonucleotide
  Sense strand starting at position 783 of SEQ ID NO: 915792
ggauccuucggcuaaagau

SEQ ID NO: 1106387 - RNA, 19 nt, Artificial Sequence
  Description of Artificial Sequence: Synthetic oligonucleotide
  Antisense strand to SEQ ID NO: 1106386
aucuuuagccgaaggaucc

SEQ ID NO: 1106388 - RNA, 19 nt, Artificial Sequence
  Description of Artificial Sequence: Synthetic oligonucleotide
  Sense strand starting at position 830 of SEQ ID NO: 915792
gggucucauuccucuacaa

SEQ ID NO: 1106389 - RNA, 19 nt, Artificial Sequence
  Description of Artificial Sequence: Synthetic oligonucleotide
  Antisense strand to SEQ ID NO: 1106388
uuguagaggaaugagaccc

SEQ ID NO: 1106390 - RNA, 19 nt, Artificial Sequence
  Description of Artificial Sequence: Synthetic oligonucleotide
  Sense strand starting at position 832 of SEQ ID NO: 915792
gucucauuccucuacaagu

SEQ ID NO: 1106391 - RNA, 19 nt, Artificial Sequence
  Description of Artificial Sequence: Synthetic oligonucleotide
  Antisense strand to SEQ ID NO: 1106390
acuuguagaggaaugagac

SEQ ID NO: 1106392 - RNA, 19 nt, Artificial Sequence
  Description of Artificial Sequence: Synthetic oligonucleotide
  Sense strand starting at position 864 of SEQ ID NO: 915792
gccugaaguccagacacaa

SEQ ID NO: 1106393 - RNA, 19 nt, Artificial Sequence
  Description of Artificial Sequence: Synthetic oligonucleotide
  Antisense strand to SEQ ID NO: 1106392
uugugucuggacuucaggc

SEQ ID NO: 1106394 - RNA, 19 nt, Artificial Sequence
  Description of Artificial Sequence: Synthetic oligonucleotide
  Sense strand starting at position 990 of SEQ ID NO: 915792
ggaguaaauugggucaaac

SEQ ID NO: 1106395 - RNA, 19 nt, Artificial Sequence
  Description of Artificial Sequence: Synthetic oligonucleotide
  Antisense strand to SEQ ID NO: 1106394
guuugacccaauuuacucc

SEQ ID NO: 1106396 - RNA, 19 nt, Artificial Sequence
  Description of Artificial Sequence: Synthetic oligonucleotide
  Sense strand starting at position 1267 of SEQ ID NO: 915792
auccuaacucccggauagu

SEQ ID NO: 1106397 - RNA, 19 nt, Artificial Sequence
  Description of Artificial Sequence: Synthetic oligonucleotide
  Antisense strand to SEQ ID NO: 1106396
acuauccgggaguuaggau

SEQ ID NO: 1106398 - RNA, 19 nt, Artificial Sequence
  Description of Artificial Sequence: Synthetic oligonucleotide
  Sense strand starting at position 1268 of SEQ ID NO: 915792
uccuaacucccggauagua

SEQ ID NO: 1106399 - RNA, 19 nt, Artificial Sequence
  Description of Artificial Sequence: Synthetic oligonucleotide
  Antisense strand to SEQ ID NO: 1106398
uacuauccgggaguuagga

SEQ ID NO: 1106400 - RNA, 19 nt, Artificial Sequence
  Description of Artificial Sequence: Synthetic oligonucleotide
  Sense strand starting at position 1389 of SEQ ID NO: 915792
cugcuaagugggcaaagau

SEQ ID NO: 1106401 - RNA, 19 nt, Artificial Sequence
  Description of Artificial Sequence: Synthetic oligonucleotide
  Antisense strand to SEQ ID NO: 1106400
aucuuugcccacuuagcag

SEQ ID NO: 1106402 - RNA, 19 nt, Artificial Sequence
  Description of Artificial Sequence: Synthetic oligonucleotide
  Sense strand starting at position 1491 of SEQ ID NO: 915792
uucuuugaggccuauagau

SEQ ID NO: 1106403 - RNA, 19 nt, Artificial Sequence
  Description of Artificial Sequence: Synthetic oligonucleotide
  Antisense strand to SEQ ID NO: 1106402
aucuauaggccucaaagaa

SEQ ID NO: 1106404 - RNA, 19 nt, Artificial Sequence
  Description of Artificial Sequence: Synthetic oligonucleotide
  Sense strand starting at position 1498 of SEQ ID NO: 915792
aggccuauagaugagcuua

SEQ ID NO: 1106405 - RNA, 19 nt, Artificial Sequence
  Description of Artificial Sequence: Synthetic oligonucleotide
  Antisense strand to SEQ ID NO: 1106404
uaagcucaucuauaggccu

SEQ ID NO: 1106406 - RNA, 19 nt, Artificial Sequence
  Description of Artificial Sequence: Synthetic oligonucleotide
  Sense strand starting at position 1500 of SEQ ID NO: 915792
gccuauagaugagcuuaca

SEQ ID NO: 1106407 - RNA, 19 nt, Artificial Sequence
  Description of Artificial Sequence: Synthetic oligonucleotide
  Antisense strand to SEQ ID NO: 1106406
uguaagcucaucuauaggc

SEQ ID NO: 1106408 - RNA, 19 nt, Artificial Sequence
  Description of Artificial Sequence: Synthetic oligonucleotide
  Sense strand starting at position 1541 of SEQ ID NO: 915792
ccacuauugcccggaguga

SEQ ID NO: 1106409 - RNA, 19 nt, Artificial Sequence
  Description of Artificial Sequence: Synthetic oligonucleotide
  Antisense strand to SEQ ID NO: 1106408
ucacuccgggcaauagugg

SEQ ID NO: 1106410 - RNA, 19 nt, Artificial Sequence
  Description of Artificial Sequence: Synthetic oligonucleotide
  Sense strand starting at position 1542 of SEQ ID NO: 915792
cacuauugcccggagugaa

SEQ ID NO: 1106411 - RNA, 19 nt, Artificial Sequence
  Description of Artificial Sequence: Synthetic oligonucleotide
  Antisense strand to SEQ ID NO: 1106410
uucacuccgggcaauagug

SEQ ID NO: 1106412 - RNA, 19 nt, Artificial Sequence
  Description of Artificial Sequence: Synthetic oligonucleotide
  Sense strand starting at position 1552 of SEQ ID NO: 915792
cggagugaaggccgaauuu

SEQ ID NO: 1106413 - RNA, 19 nt, Artificial Sequence
  Description of Artificial Sequence: Synthetic oligonucleotide
  Antisense strand to SEQ ID NO: 1106412
aaauucggccuucacuccg

SEQ ID NO: 1106414 - RNA, 19 nt, Artificial Sequence
  Description of Artificial Sequence: Synthetic oligonucleotide
  Sense strand starting at position 1561 of SEQ ID NO: 915792
ggccgaauuucugaaagga

SEQ ID NO: 1106415 - RNA, 19 nt, Artificial Sequence
  Description of Artificial Sequence: Synthetic oligonucleotide
  Antisense strand to SEQ ID NO: 1106414
uccuuucagaaauucggcc

SEQ ID NO: 1106416 - RNA, 19 nt, Artificial Sequence
  Description of Artificial Sequence: Synthetic oligonucleotide
  Sense strand starting at position 2024 of SEQ ID NO: 915792
uaauuagaagcuuaucgga

SEQ ID NO: 1106417 - RNA, 19 nt, Artificial Sequence
  Description of Artificial Sequence: Synthetic oligonucleotide
  Antisense strand to SEQ ID NO: 1106416
uccgauaagcuucuaauua

SEQ ID NO: 1106418 - RNA, 19 nt, Artificial Sequence
  Description of Artificial Sequence: Synthetic oligonucleotide
  Sense strand starting at position 2026 of SEQ ID NO: 915792
auuagaagcuuaucggaca

SEQ ID NO: 1106419 - RNA, 19 nt, Artificial Sequence
  Description of Artificial Sequence: Synthetic oligonucleotide
  Antisense strand to SEQ ID NO: 1106418
uguccgauaagcuucuaau

SEQ ID NO: 1106420 - RNA, 19 nt, Artificial Sequence
  Description of Artificial Sequence: Synthetic oligonucleotide
  Sense strand starting at position 2552 of SEQ ID NO: 915792
cuaaucaugccuuaggguu

SEQ ID NO: 1106421 - RNA, 19 nt, Artificial Sequence
  Description of Artificial Sequence: Synthetic oligonucleotide
  Antisense strand to SEQ ID NO: 1106420
aacccuaaggcaugauuag

SEQ ID NO: 1106422 - RNA, 19 nt, Artificial Sequence
  Description of Artificial Sequence: Synthetic oligonucleotide
  Sense strand starting at position 3055 of SEQ ID NO: 915792
gggccaagaucccuggaaa

SEQ ID NO: 1106423 - RNA, 19 nt, Artificial Sequence
  Description of Artificial Sequence: Synthetic oligonucleotide
  Antisense strand to SEQ ID NO: 1106422
uuuccagggaucuuggccc

SEQ ID NO: 1106424 - RNA, 19 nt, Artificial Sequence
  Description of Artificial Sequence: Synthetic oligonucleotide
  Sense strand starting at position 3198 of SEQ ID NO: 915792
aaagguucucgaggccauu

SEQ ID NO: 1106425 - RNA, 19 nt, Artificial Sequence
  Description of Artificial Sequence: Synthetic oligonucleotide
  Antisense strand to SEQ ID NO: 1106424
aauggccucgagaaccuuu

SEQ ID NO: 1106426 - RNA, 19 nt, Artificial Sequence
  Description of Artificial Sequence: Synthetic oligonucleotide
  Sense strand starting at position 3247 of SEQ ID NO: 915792
gaccaaguaggcgauugau

SEQ ID NO: 1106427 - RNA, 19 nt, Artificial Sequence
  Description of Artificial Sequence: Synthetic oligonucleotide
  Antisense strand to SEQ ID NO: 1106426
aucaaucgccuacuugguc

SEQ ID NO: 1106428 - RNA, 19 nt, Artificial Sequence
  Description of Artificial Sequence: Synthetic oligonucleotide
  Sense strand starting at position 3259 of SEQ ID NO: 915792
gauugauguuugcuaaauu

SEQ ID NO: 1106429 - RNA, 19 nt, Artificial Sequence
  Description of Artificial Sequence: Synthetic oligonucleotide
  Antisense strand to SEQ ID NO: 1106428
aauuuagcaaacaucaauc

SEQ ID NO: 1106430 - RNA, 19 nt, Artificial Sequence
  Description of Artificial Sequence: Synthetic oligonucleotide
  Sense strand starting at position 3325 of SEQ ID NO: 915792
auaugaacaugcuugugaa

SEQ ID NO: 1106431 - RNA, 19 nt, Artificial Sequence
  Description of Artificial Sequence: Synthetic oligonucleotide
  Antisense strand to SEQ ID NO: 1106430
uucacaagcauguucauau

SEQ ID NO: 1106432 - RNA, 19 nt, Artificial Sequence
  Description of Artificial Sequence: Synthetic oligonucleotide
  Sense strand starting at position 3326 of SEQ ID NO: 915792
uaugaacaugcuugugaag

SEQ ID NO: 1106433 - RNA, 19 nt, Artificial Sequence
  Description of Artificial Sequence: Synthetic oligonucleotide
  Antisense strand to SEQ ID NO: 1106432
cuucacaagcauguucaua

SEQ ID NO: 1106434 - RNA, 19 nt, Artificial Sequence
  Description of Artificial Sequence: Synthetic oligonucleotide
  Sense strand starting at position 3397 of SEQ ID NO: 915792
gcuagacugcccuagggau

SEQ ID NO: 1106435 - RNA, 19 nt, Artificial Sequence
  Description of Artificial Sequence: Synthetic oligonucleotide
  Antisense strand to SEQ ID NO: 1106434
aucccuagggcagucuagc

SEQ ID NO: 1106436 - RNA, 19 nt, Artificial Sequence
  Description of Artificial Sequence: Synthetic oligonucleotide
  Sense strand starting at position 3623 of SEQ ID NO: 915792
gccggagcgcuucucacau

SEQ ID NO: 1106437 - RNA, 19 nt, Artificial Sequence
  Description of Artificial Sequence: Synthetic oligonucleotide
  Antisense strand to SEQ ID NO: 1106436
augugagaagcgcuccggc

SEQ ID NO: 1106438 - RNA, 19 nt, Artificial Sequence
  Description of Artificial Sequence: Synthetic oligonucleotide
  Sense strand starting at position 3672 of SEQ ID NO: 915792
guaagauggacccaucugu

SEQ ID NO: 1106439 - RNA, 19 nt, Artificial Sequence
  Description of Artificial Sequence: Synthetic oligonucleotide
  Antisense strand to SEQ ID NO: 1106438
acagauggguccaucuuac

SEQ ID NO: 1106440 - RNA, 19 nt, Artificial Sequence
  Description of Artificial Sequence: Synthetic oligonucleotide
  Sense strand starting at position 3725 of SEQ ID NO: 915792
gugcuuccaggcuauauga

SEQ ID NO: 1106441 - RNA, 19 nt, Artificial Sequence
  Description of Artificial Sequence: Synthetic oligonucleotide
  Antisense strand to SEQ ID NO: 1106440
ucauauagccuggaagcac

SEQ ID NO: 1106442 - RNA, 19 nt, Artificial Sequence
  Description of Artificial Sequence: Synthetic oligonucleotide
  Sense strand starting at position 3735 of SEQ ID NO: 915792
gcuauaugacuugaaucua

SEQ ID NO: 1106443 - RNA, 19 nt, Artificial Sequence
  Description of Artificial Sequence: Synthetic oligonucleotide
  Antisense strand to SEQ ID NO: 1106442
uagauucaagucauauagc

SEQ ID NO: 1106444 - RNA, 19 nt, Artificial Sequence
  Description of Artificial Sequence: Synthetic oligonucleotide
  Sense strand starting at position 3846 of SEQ ID NO: 915792
gcagccacgccuguauauu

SEQ ID NO: 1106445 - RNA, 19 nt, Artificial Sequence
  Description of Artificial Sequence: Synthetic oligonucleotide
  Antisense strand to SEQ ID NO: 1106444
aauauacaggcguggcugc

SEQ ID NO: 1106446 - RNA, 19 nt, Artificial Sequence
  Description of Artificial Sequence: Synthetic oligonucleotide
  Sense strand starting at position 381 of SEQ ID NO: 915793
agggcaaugcuguaucauc

SEQ ID NO: 1106447 - RNA, 19 nt, Artificial Sequence
  Description of Artificial Sequence: Synthetic oligonucleotide
  Antisense strand to SEQ ID NO: 1106446
gaugauacagcauugcccu

SEQ ID NO: 1106448 - RNA, 19 nt, Artificial Sequence
  Description of Artificial Sequence: Synthetic oligonucleotide
  Sense strand starting at position 471 of SEQ ID NO: 915793
cugacuaguguccacggau

SEQ ID NO: 1106449 - RNA, 19 nt, Artificial Sequence
  Description of Artificial Sequence: Synthetic oligonucleotide
  Antisense strand to SEQ ID NO: 1106448
auccguggacacuagucag

SEQ ID NO: 1106450 - RNA, 19 nt, Artificial Sequence
  Description of Artificial Sequence: Synthetic oligonucleotide
  Sense strand starting at position 521 of SEQ ID NO: 915793
uguuauugcuauuuaguga

SEQ ID NO: 1106451 - RNA, 19 nt, Artificial Sequence
  Description of Artificial Sequence: Synthetic oligonucleotide
  Antisense strand to SEQ ID NO: 1106450
ucacuaaauagcaauaaca

SEQ ID NO: 1106452 - RNA, 19 nt, Artificial Sequence
  Description of Artificial Sequence: Synthetic oligonucleotide
  Sense strand starting at position 887 of SEQ ID NO: 915793
agggauauaucccugguga

SEQ ID NO: 1106453 - RNA, 19 nt, Artificial Sequence
  Description of Artificial Sequence: Synthetic oligonucleotide
  Antisense strand to SEQ ID NO: 1106452
ucaccagggauauaucccu

SEQ ID NO: 1106454 - RNA, 19 nt, Artificial Sequence
  Description of Artificial Sequence: Synthetic oligonucleotide
  Sense strand starting at position 888 of SEQ ID NO: 915793
gggauauaucccuggugac

SEQ ID NO: 1106455 - RNA, 19 nt, Artificial Sequence
  Description of Artificial Sequence: Synthetic oligonucleotide
  Antisense strand to SEQ ID NO: 1106454
gucaccagggauauauccc

SEQ ID NO: 1106456 - RNA, 19 nt, Artificial Sequence
  Description of Artificial Sequence: Synthetic oligonucleotide
  Sense strand starting at position 889 of SEQ ID NO: 915793
ggauauaucccuggugacu

SEQ ID NO: 1106457 - RNA, 19 nt, Artificial Sequence
  Description of Artificial Sequence: Synthetic oligonucleotide
  Antisense strand to SEQ ID NO: 1106456
agucaccagggauauaucc

SEQ ID NO: 1106458 - RNA, 19 nt, Artificial Sequence
  Description of Artificial Sequence: Synthetic oligonucleotide
  Sense strand starting at position 894 of SEQ ID NO: 915793
uaucccuggugacuagaau

SEQ ID NO: 1106459 - RNA, 19 nt, Artificial Sequence
  Description of Artificial Sequence: Synthetic oligonucleotide
  Antisense strand to SEQ ID NO: 1106458
auucuagucaccagggaua

SEQ ID NO: 1106460 - RNA, 19 nt, Artificial Sequence
  Description of Artificial Sequence: Synthetic oligonucleotide
  Sense strand starting at position 1162 of SEQ ID NO: 915793
aacguaauagagcauggua

SEQ ID NO: 1106461 - RNA, 19 nt, Artificial Sequence
  Description of Artificial Sequence: Synthetic oligonucleotide
  Antisense strand to SEQ ID NO: 1106460
uaccaugcucuauuacguu

SEQ ID NO: 1106462 - RNA, 19 nt, Artificial Sequence
  Description of Artificial Sequence: Synthetic oligonucleotide
  Sense strand starting at position 1165 of SEQ ID NO: 915793
guaauagagcaugguauaa

SEQ ID NO: 1106463 - RNA, 19 nt, Artificial Sequence
  Description of Artificial Sequence: Synthetic oligonucleotide
  Antisense strand to SEQ ID NO: 1106462
uuauaccaugcucuauuac

SEQ ID NO: 1106464 - RNA, 19 nt, Artificial Sequence
  Description of Artificial Sequence: Synthetic oligonucleotide
  Sense strand starting at position 1214 of SEQ ID NO: 915793
ggaguaguaguccaccaga

SEQ ID NO: 1106465 - RNA, 19 nt, Artificial Sequence
  Description of Artificial Sequence: Synthetic oligonucleotide
  Antisense strand to SEQ ID NO: 1106464
ucugguggacuacuacucc

SEQ ID NO: 1106466 - RNA, 19 nt, Artificial Sequence
  Description of Artificial Sequence: Synthetic oligonucleotide
  Sense strand starting at position 1217 of SEQ ID NO: 915793
guaguaguccaccagagua

SEQ ID NO: 1106467 - RNA, 19 nt, Artificial Sequence
  Description of Artificial Sequence: Synthetic oligonucleotide
  Antisense strand to SEQ ID NO: 1106466
uacucugguggacuacuac

SEQ ID NO: 1106468 - RNA, 19 nt, Artificial Sequence
  Description of Artificial Sequence: Synthetic oligonucleotide
  Sense strand starting at position 1278 of SEQ ID NO: 915793
auuggugcucaauauacau

SEQ ID NO: 1106469 - RNA, 19 nt, Artificial Sequence
  Description of Artificial Sequence: Synthetic oligonucleotide
  Antisense strand to SEQ ID NO: 1106468
auguauauugagcaccaau

SEQ ID NO: 1106470 - RNA, 19 nt, Artificial Sequence
  Description of Artificial Sequence: Synthetic oligonucleotide
  Sense strand starting at position 1354 of SEQ ID NO: 915793
gagugucagaagggauaua

SEQ ID NO: 1106471 - RNA, 19 nt, Artificial Sequence
  Description of Artificial Sequence: Synthetic oligonucleotide
  Antisense strand to SEQ ID NO: 1106470
uauaucccuucugacacuc

SEQ ID NO: 1106472 - RNA, 19 nt, Artificial Sequence
  Description of Artificial Sequence: Synthetic oligonucleotide
  Sense strand starting at position 1519 of SEQ ID NO: 915793
uaggauacugccuggcaga

SEQ ID NO: 1106473 - RNA, 19 nt, Artificial Sequence
  Description of Artificial Sequence: Synthetic oligonucleotide
  Antisense strand to SEQ ID NO: 1106472
ucugccaggcaguauccua

SEQ ID NO: 1106474 - RNA, 19 nt, Artificial Sequence
  Description of Artificial Sequence: Synthetic oligonucleotide
  Sense strand starting at position 1557 of SEQ ID NO: 915793
gcgaguucuccguuaacac

SEQ ID NO: 1106475 - RNA, 19 nt, Artificial Sequence
  Description of Artificial Sequence: Synthetic oligonucleotide
  Antisense strand to SEQ ID NO: 1106474
guguuaacggagaacucgc

SEQ ID NO: 1106476 - RNA, 19 nt, Artificial Sequence
  Description of Artificial Sequence: Synthetic oligonucleotide
  Sense strand starting at position 1598 of SEQ ID NO: 915793
augacagcugcuugagaga

SEQ ID NO: 1106477 - RNA, 19 nt, Artificial Sequence
  Description of Artificial Sequence: Synthetic oligonucleotide
  Antisense strand to SEQ ID NO: 1106476
ucucucaagcagcugucau

SEQ ID NO: 1106478 - RNA, 19 nt, Artificial Sequence
  Description of Artificial Sequence: Synthetic oligonucleotide
  Sense strand starting at position 1609 of SEQ ID NO: 915793
uugagagaauaaucgguaa

SEQ ID NO: 1106479 - RNA, 19 nt, Artificial Sequence
  Description of Artificial Sequence: Synthetic oligonucleotide
  Antisense strand to SEQ ID NO: 1106478
uuaccgauuauucucucaa

SEQ ID NO: 1106480 - RNA, 19 nt, Artificial Sequence
  Description of Artificial Sequence: Synthetic oligonucleotide
  Sense strand starting at position 1611 of SEQ ID NO: 915793
gagagaauaaucgguaagu

SEQ ID NO: 1106481 - RNA, 19 nt, Artificial Sequence
  Description of Artificial Sequence: Synthetic oligonucleotide
  Antisense strand to SEQ ID NO: 1106480
acuuaccgauuauucucuc

SEQ ID NO: 1106482 - RNA, 19 nt, Artificial Sequence
  Description of Artificial Sequence: Synthetic oligonucleotide
  Sense strand starting at position 1612 of SEQ ID NO: 915793
agagaauaaucgguaagug

SEQ ID NO: 1106483 - RNA, 19 nt, Artificial Sequence
  Description of Artificial Sequence: Synthetic oligonucleotide
  Antisense strand to SEQ ID NO: 1106482
cacuuaccgauuauucucu

SEQ ID NO: 1106484 - RNA, 19 nt, Artificial Sequence
  Description of Artificial Sequence: Synthetic oligonucleotide
  Sense strand starting at position 1613 of SEQ ID NO: 915793
gagaauaaucgguaagugc

SEQ ID NO: 1106485 - RNA, 19 nt, Artificial Sequence
  Description of Artificial Sequence: Synthetic oligonucleotide
  Antisense strand to SEQ ID NO: 1106484
gcacuuaccgauuauucuc

SEQ ID NO: 1106486 - RNA, 19 nt, Artificial Sequence
  Description of Artificial Sequence: Synthetic oligonucleotide
  Sense strand starting at position 1668 of SEQ ID NO: 915793
ugcccacuccuuuggaaac

SEQ ID NO: 1106487 - RNA, 19 nt, Artificial Sequence
  Description of Artificial Sequence: Synthetic oligonucleotide
  Antisense strand to SEQ ID NO: 1106486
guuuccaaaggagugggca

SEQ ID NO: 1106488 - RNA, 19 nt, Artificial Sequence
  Description of Artificial Sequence: Synthetic oligonucleotide
  Sense strand starting at position 2196 of SEQ ID NO: 915793
gcggcuuguuggauaaggu

SEQ ID NO: 1106489 - RNA, 19 nt, Artificial Sequence
  Description of Artificial Sequence: Synthetic oligonucleotide
  Antisense strand to SEQ ID NO: 1106488
accuuauccaacaagccgc

SEQ ID NO: 1106490 - RNA, 19 nt, Artificial Sequence
  Description of Artificial Sequence: Synthetic oligonucleotide
  Sense strand starting at position 2324 of SEQ ID NO: 915793
uugugugaccacuaucaca

SEQ ID NO: 1106491 - RNA, 19 nt, Artificial Sequence
  Description of Artificial Sequence: Synthetic oligonucleotide
  Antisense strand to SEQ ID NO: 1106490
ugugauaguggucacacaa

SEQ ID NO: 1106492 - RNA, 19 nt, Artificial Sequence
  Description of Artificial Sequence: Synthetic oligonucleotide
  Sense strand starting at position 2396 of SEQ ID NO: 915793
cccgguccucuuuagaacu

SEQ ID NO: 1106493 - RNA, 19 nt, Artificial Sequence
  Description of Artificial Sequence: Synthetic oligonucleotide
  Antisense strand to SEQ ID NO: 1106492
aguucuaaagaggaccggg

SEQ ID NO: 1106494 - RNA, 19 nt, Artificial Sequence
  Description of Artificial Sequence: Synthetic oligonucleotide
  Sense strand starting at position 2678 of SEQ ID NO: 915793
uuuaucaugauaggcgaau

SEQ ID NO: 1106495 - RNA, 19 nt, Artificial Sequence
  Description of Artificial Sequence: Synthetic oligonucleotide
  Antisense strand to SEQ ID NO: 1106494
auucgccuaucaugauaaa

SEQ ID NO: 1106496 - RNA, 19 nt, Artificial Sequence
  Description of Artificial Sequence: Synthetic oligonucleotide
  Sense strand starting at position 2679 of SEQ ID NO: 915793
uuaucaugauaggcgaaua

SEQ ID NO: 1106497 - RNA, 19 nt, Artificial Sequence
  Description of Artificial Sequence: Synthetic oligonucleotide
  Antisense strand to SEQ ID NO: 1106496
uauucgccuaucaugauaa

SEQ ID NO: 1106498 - RNA, 19 nt, Artificial Sequence
  Description of Artificial Sequence: Synthetic oligonucleotide
  Sense strand starting at position 2981 of SEQ ID NO: 915793
gaaacaguugcacggagaa

SEQ ID NO: 1106499 - RNA, 19 nt, Artificial Sequence
  Description of Artificial Sequence: Synthetic oligonucleotide
  Antisense strand to SEQ ID NO: 1106498
uucuccgugcaacuguuuc

SEQ ID NO: 1106500 - RNA, 19 nt, Artificial Sequence
  Description of Artificial Sequence: Synthetic oligonucleotide
  Sense strand starting at position 3033 of SEQ ID NO: 915793
cuuugugaccuugaaauau

SEQ ID NO: 1106501 - RNA, 19 nt, Artificial Sequence
  Description of Artificial Sequence: Synthetic oligonucleotide
  Antisense strand to SEQ ID NO: 1106500
auauuucaaggucacaaag

SEQ ID NO: 1106502 - RNA, 19 nt, Artificial Sequence
  Description of Artificial Sequence: Synthetic oligonucleotide
  Sense strand starting at position 3166 of SEQ ID NO: 915793
uuugaugagaauuguuaag

SEQ ID NO: 1106503 - RNA, 19 nt, Artificial Sequence
  Description of Artificial Sequence: Synthetic oligonucleotide
  Antisense strand to SEQ ID NO: 1106502
cuuaacaauucucaucaaa

SEQ ID NO: 1106504 - RNA, 19 nt, Artificial Sequence
  Description of Artificial Sequence: Synthetic oligonucleotide
  Sense strand starting at position 3168 of SEQ ID NO: 915793
ugaugagaauuguuaagca

SEQ ID NO: 1106505 - RNA, 19 nt, Artificial Sequence
  Description of Artificial Sequence: Synthetic oligonucleotide
  Antisense strand to SEQ ID NO: 1106504
ugcuuaacaauucucauca

SEQ ID NO: 1106506 - RNA, 19 nt, Artificial Sequence
  Description of Artificial Sequence: Synthetic oligonucleotide
  Sense strand starting at position 3172 of SEQ ID NO: 915793
gagaauuguuaagcauggu

SEQ ID NO: 1106507 - RNA, 19 nt, Artificial Sequence
  Description of Artificial Sequence: Synthetic oligonucleotide
  Antisense strand to SEQ ID NO: 1106506
accaugcuuaacaauucuc

SEQ ID NO: 1106508 - RNA, 19 nt, Artificial Sequence
  Description of Artificial Sequence: Synthetic oligonucleotide
  Sense strand starting at position 3262 of SEQ ID NO: 915793
augguaggugcuuaagaaa

SEQ ID NO: 1106509 - RNA, 19 nt, Artificial Sequence
  Description of Artificial Sequence: Synthetic oligonucleotide
  Antisense strand to SEQ ID NO: 1106508
uuucuuaagcaccuaccau

SEQ ID NO: 1106510 - RNA, 19 nt, Artificial Sequence
  Description of Artificial Sequence: Synthetic oligonucleotide
  Sense strand starting at position 3303 of SEQ ID NO: 915793
gguuaagauccaggucuuu

SEQ ID NO: 1106511 - RNA, 19 nt, Artificial Sequence
  Description of Artificial Sequence: Synthetic oligonucleotide
  Antisense strand to SEQ ID NO: 1106510
aaagaccuggaucuuaacc

SEQ ID NO: 1106512 - RNA, 19 nt, Artificial Sequence
  Description of Artificial Sequence: Synthetic oligonucleotide
  Sense strand starting at position 3695 of SEQ ID NO: 915793
uggagguugggaugguaaa

SEQ ID NO: 1106513 - RNA, 19 nt, Artificial Sequence
  Description of Artificial Sequence: Synthetic oligonucleotide
  Antisense strand to SEQ ID NO: 1106512
uuuaccaucccaaccucca

SEQ ID NO: 1106514 - RNA, 19 nt, Artificial Sequence
  Description of Artificial Sequence: Synthetic oligonucleotide
  Sense strand starting at position 3844 of SEQ ID NO: 915793
cuuggaucaucaucagcaa

SEQ ID NO: 1106515 - RNA, 19 nt, Artificial Sequence
  Description of Artificial Sequence: Synthetic oligonucleotide
  Antisense strand to SEQ ID NO: 1106514
uugcugaugaugauccaag

SEQ ID NO: 1106516 - RNA, 19 nt, Artificial Sequence
  Description of Artificial Sequence: Synthetic oligonucleotide
  Sense strand starting at position 3847 of SEQ ID NO: 915793
ggaucaucaucagcaaaca

SEQ ID NO: 1106517 - RNA, 19 nt, Artificial Sequence
  Description of Artificial Sequence: Synthetic oligonucleotide
  Antisense strand to SEQ ID NO: 1106516
uguuugcugaugaugaucc

SEQ ID NO: 1106518 - RNA, 19 nt, Artificial Sequence
  Description of Artificial Sequence: Synthetic oligonucleotide
  Sense strand starting at position 3881 of SEQ ID NO: 915793
cugcuaaggcaguauagaa

SEQ ID NO: 1106519 - RNA, 19 nt, Artificial Sequence
  Description of Artificial Sequence: Synthetic oligonucleotide
  Antisense strand to SEQ ID NO: 1106518
uucuauacugccuuagcag

SEQ ID NO: 1106520 - RNA, 19 nt, Artificial Sequence
  Description of Artificial Sequence: Synthetic oligonucleotide
  Sense strand starting at position 3888 of SEQ ID NO: 915793
ggcaguauagaauacuauu

SEQ ID NO: 1106521 - RNA, 19 nt, Artificial Sequence
  Description of Artificial Sequence: Synthetic oligonucleotide
  Antisense strand to SEQ ID NO: 1106520
aauaguauucuauacugcc

SEQ ID NO: 1106522 - RNA, 19 nt, Artificial Sequence
  Description of Artificial Sequence: Synthetic oligonucleotide
  Sense strand starting at position 3929 of SEQ ID NO: 915793
accauuguguuauugaaag

SEQ ID NO: 1106523 - RNA, 19 nt, Artificial Sequence
  Description of Artificial Sequence: Synthetic oligonucleotide
  Antisense strand to SEQ ID NO: 1106522
cuuucaauaacacaauggu

SEQ ID NO: 1106524 - RNA, 19 nt, Artificial Sequence
  Description of Artificial Sequence: Synthetic oligonucleotide
  Sense strand starting at position 3981 of SEQ ID NO: 915793
ugaaguauuucugcuacuu

SEQ ID NO: 1106525 - RNA, 19 nt, Artificial Sequence
  Description of Artificial Sequence: Synthetic oligonucleotide
  Antisense strand to SEQ ID NO: 1106524
aaguagcagaaauacuuca

SEQ ID NO: 1106526 - RNA, 19 nt, Artificial Sequence
  Description of Artificial Sequence: Synthetic oligonucleotide
  Sense strand starting at position 95 of SEQ ID NO: 915794
gaccuauuggaauguuaac

SEQ ID NO: 1106527 - RNA, 19 nt, Artificial Sequence
  Description of Artificial Sequence: Synthetic oligonucleotide
  Antisense strand to SEQ ID NO: 1106526
guuaacauuccaauagguc

SEQ ID NO: 1106528 - RNA, 19 nt, Artificial Sequence
  Description of Artificial Sequence: Synthetic oligonucleotide
  Sense strand starting at position 141 of SEQ ID NO: 915794
gcugaaucaaguuggcaca

SEQ ID NO: 1106529 - RNA, 19 nt, Artificial Sequence
  Description of Artificial Sequence: Synthetic oligonucleotide
  Antisense strand to SEQ ID NO: 1106528
ugugccaacuugauucagc

SEQ ID NO: 1106530 - RNA, 19 nt, Artificial Sequence
  Description of Artificial Sequence: Synthetic oligonucleotide
  Sense strand starting at position 160 of SEQ ID NO: 915794
auaaucgaacauuguguau

SEQ ID NO: 1106531 - RNA, 19 nt, Artificial Sequence
  Description of Artificial Sequence: Synthetic oligonucleotide
  Antisense strand to SEQ ID NO: 1106530
auacacaauguucgauuau

SEQ ID NO: 1106532 - RNA, 19 nt, Artificial Sequence
  Description of Artificial Sequence: Synthetic oligonucleotide
  Sense strand starting at position 166 of SEQ ID NO: 915794
gaacauuguguauguggaa

SEQ ID NO: 1106533 - RNA, 19 nt, Artificial Sequence
  Description of Artificial Sequence: Synthetic oligonucleotide
  Antisense strand to SEQ ID NO: 1106532
uuccacauacacaauguuc

SEQ ID NO: 1106534 - RNA, 19 nt, Artificial Sequence
  Description of Artificial Sequence: Synthetic oligonucleotide
  Sense strand starting at position 167 of SEQ ID NO: 915794
aacauuguguauguggaau

SEQ ID NO: 1106535 - RNA, 19 nt, Artificial Sequence
  Description of Artificial Sequence: Synthetic oligonucleotide
  Antisense strand to SEQ ID NO: 1106534
auuccacauacacaauguu

SEQ ID NO: 1106536 - RNA, 19 nt, Artificial Sequence
  Description of Artificial Sequence: Synthetic oligonucleotide
  Sense strand starting at position 197 of SEQ ID NO: 915794
ucauauccgcaauaagaau

SEQ ID NO: 1106537 - RNA, 19 nt, Artificial Sequence
  Description of Artificial Sequence: Synthetic oligonucleotide
  Antisense strand to SEQ ID NO: 1106536
auucuuauugcggauauga

SEQ ID NO: 1106538 - RNA, 19 nt, Artificial Sequence
  Description of Artificial Sequence: Synthetic oligonucleotide
  Sense strand starting at position 235 of SEQ ID NO: 915794
uagaauuagucaucgcuuc

SEQ ID NO: 1106539 - RNA, 19 nt, Artificial Sequence
  Description of Artificial Sequence: Synthetic oligonucleotide
  Antisense strand to SEQ ID NO: 1106538
gaagcgaugacuaauucua

SEQ ID NO: 1106540 - RNA, 19 nt, Artificial Sequence
  Description of Artificial Sequence: Synthetic oligonucleotide
  Sense strand starting at position 242 of SEQ ID NO: 915794
agucaucgcuucccaaaca

SEQ ID NO: 1106541 - RNA, 19 nt, Artificial Sequence
  Description of Artificial Sequence: Synthetic oligonucleotide
  Antisense strand to SEQ ID NO: 1106540
uguuugggaagcgaugacu

SEQ ID NO: 1106542 - RNA, 19 nt, Artificial Sequence
  Description of Artificial Sequence: Synthetic oligonucleotide
  Sense strand starting at position 288 of SEQ ID NO: 915794
caggacuuggccuaugagu

SEQ ID NO: 1106543 - RNA, 19 nt, Artificial Sequence
  Description of Artificial Sequence: Synthetic oligonucleotide
  Antisense strand to SEQ ID NO: 1106542
acucauaggccaaguccug

SEQ ID NO: 1106544 - RNA, 19 nt, Artificial Sequence
  Description of Artificial Sequence: Synthetic oligonucleotide
  Sense strand starting at position 290 of SEQ ID NO: 915794
ggacuuggccuaugaguca

SEQ ID NO: 1106545 - RNA, 19 nt, Artificial Sequence
  Description of Artificial Sequence: Synthetic oligonucleotide
  Antisense strand to SEQ ID NO: 1106544
ugacucauaggccaagucc

SEQ ID NO: 1106546 - RNA, 19 nt, Artificial Sequence
  Description of Artificial Sequence: Synthetic oligonucleotide
  Sense strand starting at position 302 of SEQ ID NO: 915794
ugagucaaccugcagugua

SEQ ID NO: 1106547 - RNA, 19 nt, Artificial Sequence
  Description of Artificial Sequence: Synthetic oligonucleotide
  Antisense strand to SEQ ID NO: 1106546
uacacugcagguugacuca

SEQ ID NO: 1106548 - RNA, 19 nt, Artificial Sequence
  Description of Artificial Sequence: Synthetic oligonucleotide
  Sense strand starting at position 321 of SEQ ID NO: 915794
uuaucaaaggcuuguguua

SEQ ID NO: 1106549 - RNA, 19 nt, Artificial Sequence
  Description of Artificial Sequence: Synthetic oligonucleotide
  Antisense strand to SEQ ID NO: 1106548
uaacacaagccuuugauaa

SEQ ID NO: 1106550 - RNA, 19 nt, Artificial Sequence
  Description of Artificial Sequence: Synthetic oligonucleotide
  Sense strand starting at position 412 of SEQ ID NO: 915794
gccgacuguaaauaauagu

SEQ ID NO: 1106551 - RNA, 19 nt, Artificial Sequence
  Description of Artificial Sequence: Synthetic oligonucleotide
  Antisense strand to SEQ ID NO: 1106550
acuauuauuuacagucggc

SEQ ID NO: 1106552 - RNA, 19 nt, Artificial Sequence
  Description of Artificial Sequence: Synthetic oligonucleotide
  Sense strand starting at position 452 of SEQ ID NO: 915794
gcgaccuacuaaguuugau

SEQ ID NO: 1106553 - RNA, 19 nt, Artificial Sequence
  Description of Artificial Sequence: Synthetic oligonucleotide
  Antisense strand to SEQ ID NO: 1106552
aucaaacuuaguaggucgc

SEQ ID NO: 1106554 - RNA, 19 nt, Artificial Sequence
  Description of Artificial Sequence: Synthetic oligonucleotide
  Sense strand starting at position 566 of SEQ ID NO: 915794
cgaaaccuguauuccgaaa

SEQ ID NO: 1106555 - RNA, 19 nt, Artificial Sequence
  Description of Artificial Sequence: Synthetic oligonucleotide
  Antisense strand to SEQ ID NO: 1106554
uuucggaauacagguuucg

SEQ ID NO: 1106556 - RNA, 19 nt, Artificial Sequence
  Description of Artificial Sequence: Synthetic oligonucleotide
  Sense strand starting at position 665 of SEQ ID NO: 915794
acuaaauggaccgguucua

SEQ ID NO: 1106557 - RNA, 19 nt, Artificial Sequence
  Description of Artificial Sequence: Synthetic oligonucleotide
  Antisense strand to SEQ ID NO: 1106556
uagaaccgguccauuuagu

SEQ ID NO: 1106558 - RNA, 19 nt, Artificial Sequence
  Description of Artificial Sequence: Synthetic oligonucleotide
  Sense strand starting at position 2536 of SEQ ID NO: 915794
gcgccugugcgagcuuaaa

SEQ ID NO: 1106559 - RNA, 19 nt, Artificial Sequence
  Description of Artificial Sequence: Synthetic oligonucleotide
  Antisense strand to SEQ ID NO: 1106558
uuuaagcucgcacaggcgc

SEQ ID NO: 1106560 - RNA, 19 nt, Artificial Sequence
  Description of Artificial Sequence: Synthetic oligonucleotide
  Sense strand starting at position 2548 of SEQ ID NO: 915794
gcuuaaagccgcgaggaua

SEQ ID NO: 1106561 - RNA, 19 nt, Artificial Sequence
  Description of Artificial Sequence: Synthetic oligonucleotide
  Antisense strand to SEQ ID NO: 1106560
uauccucgcggcuuuaagc

SEQ ID NO: 1106562 - RNA, 19 nt, Artificial Sequence
  Description of Artificial Sequence: Synthetic oligonucleotide
  Sense strand starting at position 2559 of SEQ ID NO: 915794
cgaggauagauuggaguua

SEQ ID NO: 1106563 - RNA, 19 nt, Artificial Sequence
  Description of Artificial Sequence: Synthetic oligonucleotide
  Antisense strand to SEQ ID NO: 1106562
uaacuccaaucuauccucg

SEQ ID NO: 1106564 - RNA, 19 nt, Artificial Sequence
  Description of Artificial Sequence: Synthetic oligonucleotide
  Sense strand starting at position 2692 of SEQ ID NO: 915794
gguaaacgguuacuguaau

SEQ ID NO: 1106565 - RNA, 19 nt, Artificial Sequence
  Description of Artificial Sequence: Synthetic oligonucleotide
  Antisense strand to SEQ ID NO: 1106564
auuacaguaaccguuuacc

SEQ ID NO: 1106566 - RNA, 19 nt, Artificial Sequence
  Description of Artificial Sequence: Synthetic oligonucleotide
  Sense strand starting at position 2726 of SEQ ID NO: 915794
aggucuguaacucagugua

SEQ ID NO: 1106567 - RNA, 19 nt, Artificial Sequence
  Description of Artificial Sequence: Synthetic oligonucleotide
  Antisense strand to SEQ ID NO: 1106566
uacacugaguuacagaccu

SEQ ID NO: 1106568 - RNA, 19 nt, Artificial Sequence
  Description of Artificial Sequence: Synthetic oligonucleotide
  Sense strand starting at position 2729 of SEQ ID NO: 915794
ucuguaacucaguguaacu

SEQ ID NO: 1106569 - RNA, 19 nt, Artificial Sequence
  Description of Artificial Sequence: Synthetic oligonucleotide
  Antisense strand to SEQ ID NO: 1106568
aguuacacugaguuacaga

SEQ ID NO: 1106570 - RNA, 19 nt, Artificial Sequence
  Description of Artificial Sequence: Synthetic oligonucleotide
  Sense strand starting at position 2731 of SEQ ID NO: 915794
uguaacucaguguaacuua

SEQ ID NO: 1106571 - RNA, 19 nt, Artificial Sequence
  Description of Artificial Sequence: Synthetic oligonucleotide
  Antisense strand to SEQ ID NO: 1106570
uaaguuacacugaguuaca

SEQ ID NO: 1106572 - RNA, 19 nt, Artificial Sequence
  Description of Artificial Sequence: Synthetic oligonucleotide
  Sense strand starting at position 2817 of SEQ ID NO: 915794
uugcaauagucacuggaag

SEQ ID NO: 1106573 - RNA, 19 nt, Artificial Sequence
  Description of Artificial Sequence: Synthetic oligonucleotide
  Antisense strand to SEQ ID NO: 1106572
cuuccagugacuauugcaa

SEQ ID NO: 1106574 - RNA, 19 nt, Artificial Sequence
  Description of Artificial Sequence: Synthetic oligonucleotide
  Sense strand starting at position 2950 of SEQ ID NO: 915794
gguggacuccguuaaugug

SEQ ID NO: 1106575 - RNA, 19 nt, Artificial Sequence
  Description of Artificial Sequence: Synthetic oligonucleotide
  Antisense strand to SEQ ID NO: 1106574
cacauuaacggaguccacc

SEQ ID NO: 1106576 - RNA, 19 nt, Artificial Sequence
  Description of Artificial Sequence: Synthetic oligonucleotide
  Sense strand starting at position 2957 of SEQ ID NO: 915794
uccguuaauguggacugaa

SEQ ID NO: 1106577 - RNA, 19 nt, Artificial Sequence
  Description of Artificial Sequence: Synthetic oligonucleotide
  Antisense strand to SEQ ID NO: 1106576
uucaguccacauuaacgga

SEQ ID NO: 1106578 - RNA, 19 nt, Artificial Sequence
  Description of Artificial Sequence: Synthetic oligonucleotide
  Sense strand starting at position 2960 of SEQ ID NO: 915794
guuaauguggacugaauaa

SEQ ID NO: 1106579 - RNA, 19 nt, Artificial Sequence
  Description of Artificial Sequence: Synthetic oligonucleotide
  Antisense strand to SEQ ID NO: 1106578
uuauucaguccacauuaac

SEQ ID NO: 1106580 - RNA, 19 nt, Artificial Sequence
  Description of Artificial Sequence: Synthetic oligonucleotide
  Sense strand starting at position 2967 of SEQ ID NO: 915794
uggacugaauaagaaauga

SEQ ID NO: 1106581 - RNA, 19 nt, Artificial Sequence
  Description of Artificial Sequence: Synthetic oligonucleotide
  Antisense strand to SEQ ID NO: 1106580
ucauuucuuauucagucca

SEQ ID NO: 1106582 - RNA, 19 nt, Artificial Sequence
  Description of Artificial Sequence: Synthetic oligonucleotide
  Sense strand starting at position 3093 of SEQ ID NO: 915794
uuuaaagcauccuuguuga

SEQ ID NO: 1106583 - RNA, 19 nt, Artificial Sequence
  Description of Artificial Sequence: Synthetic oligonucleotide
  Antisense strand to SEQ ID NO: 1106582
ucaacaaggaugcuuuaaa

SEQ ID NO: 1106584 - RNA, 19 nt, Artificial Sequence
  Description of Artificial Sequence: Synthetic oligonucleotide
  Sense strand starting at position 3096 of SEQ ID NO: 915794
aaagcauccuuguugagau

SEQ ID NO: 1106585 - RNA, 19 nt, Artificial Sequence
  Description of Artificial Sequence: Synthetic oligonucleotide
  Antisense strand to SEQ ID NO: 1106584
aucucaacaaggaugcuuu

SEQ ID NO: 1106586 - RNA, 19 nt, Artificial Sequence
  Description of Artificial Sequence: Synthetic oligonucleotide
  Sense strand starting at position 3098 of SEQ ID NO: 915794
agcauccuuguugagauau

SEQ ID NO: 1106587 - RNA, 19 nt, Artificial Sequence
  Description of Artificial Sequence: Synthetic oligonucleotide
  Antisense strand to SEQ ID NO: 1106586
auaucucaacaaggaugcu

SEQ ID NO: 1106588 - RNA, 19 nt, Artificial Sequence
  Description of Artificial Sequence: Synthetic oligonucleotide
  Sense strand starting at position 3140 of SEQ ID NO: 915794
gcaauaguuguacauauua

SEQ ID NO: 1106589 - RNA, 19 nt, Artificial Sequence
  Description of Artificial Sequence: Synthetic oligonucleotide
  Antisense strand to SEQ ID NO: 1106588
uaauauguacaacuauugc

SEQ ID NO: 1106590 - RNA, 19 nt, Artificial Sequence
  Description of Artificial Sequence: Synthetic oligonucleotide
  Sense strand starting at position 3199 of SEQ ID NO: 915794
aggauugugcaacaucagu

SEQ ID NO: 1106591 - RNA, 19 nt, Artificial Sequence
  Description of Artificial Sequence: Synthetic oligonucleotide
  Antisense strand to SEQ ID NO: 1106590
acugauguugcacaauccu

SEQ ID NO: 1106592 - RNA, 19 nt, Artificial Sequence
  Description of Artificial Sequence: Synthetic oligonucleotide
  Sense strand starting at position 3204 of SEQ ID NO: 915794
ugugcaacaucagucuaau

SEQ ID NO: 1106593 - RNA, 19 nt, Artificial Sequence
  Description of Artificial Sequence: Synthetic oligonucleotide
  Antisense strand to SEQ ID NO: 1106592
auuagacugauguugcaca

SEQ ID NO: 1106594 - RNA, 19 nt, Artificial Sequence
  Description of Artificial Sequence: Synthetic oligonucleotide
  Sense strand starting at position 3528 of SEQ ID NO: 915794
caugacuaguucuuggauu

SEQ ID NO: 1106595 - RNA, 19 nt, Artificial Sequence
  Description of Artificial Sequence: Synthetic oligonucleotide
  Antisense strand to SEQ ID NO: 1106594
aauccaagaacuagucaug

SEQ ID NO: 1106596 - RNA, 19 nt, Artificial Sequence
  Description of Artificial Sequence: Synthetic oligonucleotide
  Sense strand starting at position 3636 of SEQ ID NO: 915794
auuuacuagcugugagguu

SEQ ID NO: 1106597 - RNA, 19 nt, Artificial Sequence
  Description of Artificial Sequence: Synthetic oligonucleotide
  Antisense strand to SEQ ID NO: 1106596
aaccucacagcuaguaaau

SEQ ID NO: 1106598 - RNA, 19 nt, Artificial Sequence
  Description of Artificial Sequence: Synthetic oligonucleotide
  Sense strand starting at position 3728 of SEQ ID NO: 915794
ggcauuaaaugagucaaug

SEQ ID NO: 1106599 - RNA, 19 nt, Artificial Sequence
  Description of Artificial Sequence: Synthetic oligonucleotide
  Antisense strand to SEQ ID NO: 1106598
cauugacucauuuaaugcc

SEQ ID NO: 1106600 - RNA, 19 nt, Artificial Sequence
  Description of Artificial Sequence: Synthetic oligonucleotide
  Sense strand starting at position 3785 of SEQ ID NO: 915794
guuccacaucaaugucagu

SEQ ID NO: 1106601 - RNA, 19 nt, Artificial Sequence
  Description of Artificial Sequence: Synthetic oligonucleotide
  Antisense strand to SEQ ID NO: 1106600
acugacauugauguggaac

SEQ ID NO: 1106602 - RNA, 19 nt, Artificial Sequence
  Description of Artificial Sequence: Synthetic oligonucleotide
  Sense strand starting at position 3790 of SEQ ID NO: 915794
acaucaaugucaguuguca

SEQ ID NO: 1106603 - RNA, 19 nt, Artificial Sequence
  Description of Artificial Sequence: Synthetic oligonucleotide
  Antisense strand to SEQ ID NO: 1106602
ugacaacugacauugaugu

SEQ ID NO: 1106604 - RNA, 19 nt, Artificial Sequence
  Description of Artificial Sequence: Synthetic oligonucleotide
  Sense strand starting at position 3958 of SEQ ID NO: 915794
ggcagaaacuaugcauuaa

SEQ ID NO: 1106605 - RNA, 19 nt, Artificial Sequence
  Description of Artificial Sequence: Synthetic oligonucleotide
  Antisense strand to SEQ ID NO: 1106604
uuaaugcauaguuucugcc

SEQ ID NO: 1106606 - RNA, 19 nt, Artificial Sequence
  Description of Artificial Sequence: Synthetic oligonucleotide
  Sense strand starting at position 303 of SEQ ID NO: 915795
agggaauauuaagaugaaa

SEQ ID NO: 1106607 - RNA, 19 nt, Artificial Sequence
  Description of Artificial Sequence: Synthetic oligonucleotide
  Antisense strand to SEQ ID NO: 1106606
uuucaucuuaauauucccu

SEQ ID NO: 1106608 - RNA, 19 nt, Artificial Sequence
  Description of Artificial Sequence: Synthetic oligonucleotide
  Sense strand starting at position 371 of SEQ ID NO: 915795
cgcuuaauugcagccgaau

SEQ ID NO: 1106609 - RNA, 19 nt, Artificial Sequence
  Description of Artificial Sequence: Synthetic oligonucleotide
  Antisense strand to SEQ ID NO: 1106608
auucggcugcaauuaagcg

SEQ ID NO: 1106610 - RNA, 19 nt, Artificial Sequence
  Description of Artificial Sequence: Synthetic oligonucleotide
  Sense strand starting at position 384 of SEQ ID NO: 915795
ccgaauaucuaaguaccaa

SEQ ID NO: 1106611 - RNA, 19 nt, Artificial Sequence
  Description of Artificial Sequence: Synthetic oligonucleotide
  Antisense strand to SEQ ID NO: 1106610
uugguacuuagauauucgg

SEQ ID NO: 1106612 - RNA, 19 nt, Artificial Sequence
  Description of Artificial Sequence: Synthetic oligonucleotide
  Sense strand starting at position 505 of SEQ ID NO: 915795
aauuguauugaugagcagu

SEQ ID NO: 1106613 - RNA, 19 nt, Artificial Sequence
  Description of Artificial Sequence: Synthetic oligonucleotide
  Antisense strand to SEQ ID NO: 1106612
acugcucaucaauacaauu

SEQ ID NO: 1106614 - RNA, 19 nt, Artificial Sequence
  Description of Artificial Sequence: Synthetic oligonucleotide
  Sense strand starting at position 513 of SEQ ID NO: 915795
ugaugagcaguccaucuaa

SEQ ID NO: 1106615 - RNA, 19 nt, Artificial Sequence
  Description of Artificial Sequence: Synthetic oligonucleotide
  Antisense strand to SEQ ID NO: 1106614
uuagauggacugcucauca

SEQ ID NO: 1106616 - RNA, 19 nt, Artificial Sequence
  Description of Artificial Sequence: Synthetic oligonucleotide
  Sense strand starting at position 627 of SEQ ID NO: 915795
uuaagaggucagugcaguu

SEQ ID NO: 1106617 - RNA, 19 nt, Artificial Sequence
  Description of Artificial Sequence: Synthetic oligonucleotide
  Antisense strand to SEQ ID NO: 1106616
aacugcacugaccucuuaa

SEQ ID NO: 1106618 - RNA, 19 nt, Artificial Sequence
  Description of Artificial Sequence: Synthetic oligonucleotide
  Sense strand starting at position 761 of SEQ ID NO: 915795
ucaagcccucgucauuuau

SEQ ID NO: 1106619 - RNA, 19 nt, Artificial Sequence
  Description of Artificial Sequence: Synthetic oligonucleotide
  Antisense strand to SEQ ID NO: 1106618
auaaaugacgagggcuuga

SEQ ID NO: 1106620 - RNA, 19 nt, Artificial Sequence
  Description of Artificial Sequence: Synthetic oligonucleotide
  Sense strand starting at position 913 of SEQ ID NO: 915795
auaucuuuguauguagaag

SEQ ID NO: 1106621 - RNA, 19 nt, Artificial Sequence
  Description of Artificial Sequence: Synthetic oligonucleotide
  Antisense strand to SEQ ID NO: 1106620
cuucuacauacaaagauau

SEQ ID NO: 1106622 - RNA, 19 nt, Artificial Sequence
  Description of Artificial Sequence: Synthetic oligonucleotide
  Sense strand starting at position 1126 of SEQ ID NO: 915795
auggauguauaugaaagaa

SEQ ID NO: 1106623 - RNA, 19 nt, Artificial Sequence
  Description of Artificial Sequence: Synthetic oligonucleotide
  Antisense strand to SEQ ID NO: 1106622
uucuuucauauacauccau

SEQ ID NO: 1106624 - RNA, 19 nt, Artificial Sequence
  Description of Artificial Sequence: Synthetic oligonucleotide
  Sense strand starting at position 1152 of SEQ ID NO: 915795
ucaccaguuuguguuguga

SEQ ID NO: 1106625 - RNA, 19 nt, Artificial Sequence
  Description of Artificial Sequence: Synthetic oligonucleotide
  Antisense strand to SEQ ID NO: 1106624
ucacaacacaaacugguga

SEQ ID NO: 1106626 - RNA, 19 nt, Artificial Sequence
  Description of Artificial Sequence: Synthetic oligonucleotide
  Sense strand starting at position 1160 of SEQ ID NO: 915795
uuguguugugaacaauagu

SEQ ID NO: 1106627 - RNA, 19 nt, Artificial Sequence
  Description of Artificial Sequence: Synthetic oligonucleotide
  Antisense strand to SEQ ID NO: 1106626
acuauuguucacaacacaa

SEQ ID NO: 1106628 - RNA, 19 nt, Artificial Sequence
  Description of Artificial Sequence: Synthetic oligonucleotide
  Sense strand starting at position 1163 of SEQ ID NO: 915795
uguugugaacaauaguauu

SEQ ID NO: 1106629 - RNA, 19 nt, Artificial Sequence
  Description of Artificial Sequence: Synthetic oligonucleotide
  Antisense strand to SEQ ID NO: 1106628
aauacuauuguucacaaca

SEQ ID NO: 1106630 - RNA, 19 nt, Artificial Sequence
  Description of Artificial Sequence: Synthetic oligonucleotide
  Sense strand starting at position 1239 of SEQ ID NO: 915795
agcauuagaguuugauuau

SEQ ID NO: 1106631 - RNA, 19 nt, Artificial Sequence
  Description of Artificial Sequence: Synthetic oligonucleotide
  Antisense strand to SEQ ID NO: 1106630
auaaucaaacucuaaugcu

SEQ ID NO: 1106632 - RNA, 19 nt, Artificial Sequence
  Description of Artificial Sequence: Synthetic oligonucleotide
  Sense strand starting at position 1264 of SEQ ID NO: 915795
guuagaauuuccuagauuc

SEQ ID NO: 1106633 - RNA, 19 nt, Artificial Sequence
  Description of Artificial Sequence: Synthetic oligonucleotide
  Antisense strand to SEQ ID NO: 1106632
gaaucuaggaaauucuaac

SEQ ID NO: 1106634 - RNA, 19 nt, Artificial Sequence
  Description of Artificial Sequence: Synthetic oligonucleotide
  Sense strand starting at position 1308 of SEQ ID NO: 915795
ucaguagagucauuaaugc

SEQ ID NO: 1106635 - RNA, 19 nt, Artificial Sequence
  Description of Artificial Sequence: Synthetic oligonucleotide
  Antisense strand to SEQ ID NO: 1106634
gcauuaaugacucuacuga

SEQ ID NO: 1106636 - RNA, 19 nt, Artificial Sequence
  Description of Artificial Sequence: Synthetic oligonucleotide
  Sense strand starting at position 1315 of SEQ ID NO: 915795
agucauuaaugccuuaaag

SEQ ID NO: 1106637 - RNA, 19 nt, Artificial Sequence
  Description of Artificial Sequence: Synthetic oligonucleotide
  Antisense strand to SEQ ID NO: 1106636
cuuuaaggcauuaaugacu

SEQ ID NO: 1106638 - RNA, 19 nt, Artificial Sequence
  Description of Artificial Sequence: Synthetic oligonucleotide
  Sense strand starting at position 1317 of SEQ ID NO: 915795
ucauuaaugccuuaaagug

SEQ ID NO: 1106639 - RNA, 19 nt, Artificial Sequence
  Description of Artificial Sequence: Synthetic oligonucleotide
  Antisense strand to SEQ ID NO: 1106638
cacuuuaaggcauuaauga

SEQ ID NO: 1106640 - RNA, 19 nt, Artificial Sequence
  Description of Artificial Sequence: Synthetic oligonucleotide
  Sense strand starting at position 1365 of SEQ ID NO: 915795
aaguaugauuuaggaaauc

SEQ ID NO: 1106641 - RNA, 19 nt, Artificial Sequence
  Description of Artificial Sequence: Synthetic oligonucleotide
  Antisense strand to SEQ ID NO: 1106640
gauuuccuaaaucauacuu

SEQ ID NO: 1106642 - RNA, 19 nt, Artificial Sequence
  Description of Artificial Sequence: Synthetic oligonucleotide
  Sense strand starting at position 1376 of SEQ ID NO: 915795
aggaaaucauuaggagaaa

SEQ ID NO: 1106643 - RNA, 19 nt, Artificial Sequence
  Description of Artificial Sequence: Synthetic oligonucleotide
  Antisense strand to SEQ ID NO: 1106642
uuucuccuaaugauuuccu

SEQ ID NO: 1106644 - RNA, 19 nt, Artificial Sequence
  Description of Artificial Sequence: Synthetic oligonucleotide
  Sense strand starting at position 1377 of SEQ ID NO: 915795
ggaaaucauuaggagaaau

SEQ ID NO: 1106645 - RNA, 19 nt, Artificial Sequence
  Description of Artificial Sequence: Synthetic oligonucleotide
  Antisense strand to SEQ ID NO: 1106644
auuucuccuaaugauuucc

SEQ ID NO: 1106646 - RNA, 19 nt, Artificial Sequence
  Description of Artificial Sequence: Synthetic oligonucleotide
  Sense strand starting at position 1473 of SEQ ID NO: 915795
uuuagaacugcuggauaua

SEQ ID NO: 1106647 - RNA, 19 nt, Artificial Sequence
  Description of Artificial Sequence: Synthetic oligonucleotide
  Antisense strand to SEQ ID NO: 1106646
uauauccagcaguucuaaa

SEQ ID NO: 1106648 - RNA, 19 nt, Artificial Sequence
  Description of Artificial Sequence: Synthetic oligonucleotide
  Sense strand starting at position 1572 of SEQ ID NO: 915795
ggauccaaucuauguguau

SEQ ID NO: 1106649 - RNA, 19 nt, Artificial Sequence
  Description of Artificial Sequence: Synthetic oligonucleotide
  Antisense strand to SEQ ID NO: 1106648
auacacauagauuggaucc

SEQ ID NO: 1106650 - RNA, 19 nt, Artificial Sequence
  Description of Artificial Sequence: Synthetic oligonucleotide
  Sense strand starting at position 1623 of SEQ ID NO: 915795
ggugcaugccaacauacau

SEQ ID NO: 1106651 - RNA, 19 nt, Artificial Sequence
  Description of Artificial Sequence: Synthetic oligonucleotide
  Antisense strand to SEQ ID NO: 1106650
auguauguuggcaugcacc

SEQ ID NO: 1106652 - RNA, 19 nt, Artificial Sequence
  Description of Artificial Sequence: Synthetic oligonucleotide
  Sense strand starting at position 2074 of SEQ ID NO: 915795
gaccuauuggaauguuaac

SEQ ID NO: 1106653 - RNA, 19 nt, Artificial Sequence
  Description of Artificial Sequence: Synthetic oligonucleotide
  Antisense strand to SEQ ID NO: 1106652
guuaacauuccaauagguc

SEQ ID NO: 1106654 - RNA, 19 nt, Artificial Sequence
  Description of Artificial Sequence: Synthetic oligonucleotide
  Sense strand starting at position 2120 of SEQ ID NO: 915795
gcugaaucaaguuggcaca

SEQ ID NO: 1106655 - RNA, 19 nt, Artificial Sequence
  Description of Artificial Sequence: Synthetic oligonucleotide
  Antisense strand to SEQ ID NO: 1106654
ugugccaacuugauucagc

SEQ ID NO: 1106656 - RNA, 19 nt, Artificial Sequence
  Description of Artificial Sequence: Synthetic oligonucleotide
  Sense strand starting at position 2139 of SEQ ID NO: 915795
auaaucgaacauuguguau

SEQ ID NO: 1106657 - RNA, 19 nt, Artificial Sequence
  Description of Artificial Sequence: Synthetic oligonucleotide
  Antisense strand to SEQ ID NO: 1106656
auacacaauguucgauuau

SEQ ID NO: 1106658 - RNA, 19 nt, Artificial Sequence
  Description of Artificial Sequence: Synthetic oligonucleotide
  Sense strand starting at position 2145 of SEQ ID NO: 915795
gaacauuguguauguggaa

SEQ ID NO: 1106659 - RNA, 19 nt, Artificial Sequence
  Description of Artificial Sequence: Synthetic oligonucleotide
  Antisense strand to SEQ ID NO: 1106658
uuccacauacacaauguuc

SEQ ID NO: 1106660 - RNA, 19 nt, Artificial Sequence
  Description of Artificial Sequence: Synthetic oligonucleotide
  Sense strand starting at position 2146 of SEQ ID NO: 915795
aacauuguguauguggaau

SEQ ID NO: 1106661 - RNA, 19 nt, Artificial Sequence
  Description of Artificial Sequence: Synthetic oligonucleotide
  Antisense strand to SEQ ID NO: 1106660
auuccacauacacaauguu

SEQ ID NO: 1106662 - RNA, 19 nt, Artificial Sequence
  Description of Artificial Sequence: Synthetic oligonucleotide
  Sense strand starting at position 2176 of SEQ ID NO: 915795
ucauauccgcaauaagaau

SEQ ID NO: 1106663 - RNA, 19 nt, Artificial Sequence
  Description of Artificial Sequence: Synthetic oligonucleotide
  Antisense strand to SEQ ID NO: 1106662
auucuuauugcggauauga

SEQ ID NO: 1106664 - RNA, 19 nt, Artificial Sequence
  Description of Artificial Sequence: Synthetic oligonucleotide
  Sense strand starting at position 2214 of SEQ ID NO: 915795
uagaauuagucaucgcuuc

SEQ ID NO: 1106665 - RNA, 19 nt, Artificial Sequence
  Description of Artificial Sequence: Synthetic oligonucleotide
  Antisense strand to SEQ ID NO: 1106664
gaagcgaugacuaauucua

SEQ ID NO: 1106666 - RNA, 19 nt, Artificial Sequence
  Description of Artificial Sequence: Synthetic oligonucleotide
  Sense strand starting at position 2221 of SEQ ID NO: 915795
agucaucgcuucccaaaca

SEQ ID NO: 1106667 - RNA, 19 nt, Artificial Sequence
  Description of Artificial Sequence: Synthetic oligonucleotide
  Antisense strand to SEQ ID NO: 1106666
uguuugggaagcgaugacu

SEQ ID NO: 1106668 - RNA, 19 nt, Artificial Sequence
  Description of Artificial Sequence: Synthetic oligonucleotide
  Sense strand starting at position 2267 of SEQ ID NO: 915795
caggacuuggccuaugagu

SEQ ID NO: 1106669 - RNA, 19 nt, Artificial Sequence
  Description of Artificial Sequence: Synthetic oligonucleotide
  Antisense strand to SEQ ID NO: 1106668
acucauaggccaaguccug

SEQ ID NO: 1106670 - RNA, 19 nt, Artificial Sequence
  Description of Artificial Sequence: Synthetic oligonucleotide
  Sense strand starting at position 2269 of SEQ ID NO: 915795
ggacuuggccuaugaguca

SEQ ID NO: 1106671 - RNA, 19 nt, Artificial Sequence
  Description of Artificial Sequence: Synthetic oligonucleotide
  Antisense strand to SEQ ID NO: 1106670
ugacucauaggccaagucc

SEQ ID NO: 1106672 - RNA, 19 nt, Artificial Sequence
  Description of Artificial Sequence: Synthetic oligonucleotide
  Sense strand starting at position 2281 of SEQ ID NO: 915795
ugagucaaccugcagugua

SEQ ID NO: 1106673 - RNA, 19 nt, Artificial Sequence
  Description of Artificial Sequence: Synthetic oligonucleotide
  Antisense strand to SEQ ID NO: 1106672
uacacugcagguugacuca

SEQ ID NO: 1106674 - RNA, 19 nt, Artificial Sequence
  Description of Artificial Sequence: Synthetic oligonucleotide
  Sense strand starting at position 2284 of SEQ ID NO: 915795
gucaaccugcaguguauua

SEQ ID NO: 1106675 - RNA, 19 nt, Artificial Sequence
  Description of Artificial Sequence: Synthetic oligonucleotide
  Antisense strand to SEQ ID NO: 1106674
uaauacacugcagguugac

SEQ ID NO: 1106676 - RNA, 19 nt, Artificial Sequence
  Description of Artificial Sequence: Synthetic oligonucleotide
  Sense strand starting at position 2300 of SEQ ID NO: 915795
uuaucaaaggcuuguguua

SEQ ID NO: 1106677 - RNA, 19 nt, Artificial Sequence
  Description of Artificial Sequence: Synthetic oligonucleotide
  Antisense strand to SEQ ID NO: 1106676
uaacacaagccuuugauaa

SEQ ID NO: 1106678 - RNA, 19 nt, Artificial Sequence
  Description of Artificial Sequence: Synthetic oligonucleotide
  Sense strand starting at position 2391 of SEQ ID NO: 915795
gccgacuguaaauaauagu

SEQ ID NO: 1106679 - RNA, 19 nt, Artificial Sequence
  Description of Artificial Sequence: Synthetic oligonucleotide
  Antisense strand to SEQ ID NO: 1106678
acuauuauuuacagucggc

SEQ ID NO: 1106680 - RNA, 19 nt, Artificial Sequence
  Description of Artificial Sequence: Synthetic oligonucleotide
  Sense strand starting at position 2431 of SEQ ID NO: 915795
gcgaccuacuaaguuugau

SEQ ID NO: 1106681 - RNA, 19 nt, Artificial Sequence
  Description of Artificial Sequence: Synthetic oligonucleotide
  Antisense strand to SEQ ID NO: 1106680
aucaaacuuaguaggucgc

SEQ ID NO: 1106682 - RNA, 19 nt, Artificial Sequence
  Description of Artificial Sequence: Synthetic oligonucleotide
  Sense strand starting at position 2545 of SEQ ID NO: 915795
cgaaaccuguauuccgaaa

SEQ ID NO: 1106683 - RNA, 19 nt, Artificial Sequence
  Description of Artificial Sequence: Synthetic oligonucleotide
  Antisense strand to SEQ ID NO: 1106682
uuucggaauacagguuucg

SEQ ID NO: 1106684 - RNA, 19 nt, Artificial Sequence
  Description of Artificial Sequence: Synthetic oligonucleotide
  Sense strand starting at position 2644 of SEQ ID NO: 915795
acuaaauggaccgguucua

SEQ ID NO: 1106685 - RNA, 19 nt, Artificial Sequence
  Description of Artificial Sequence: Synthetic oligonucleotide
  Antisense strand to SEQ ID NO: 1106684
uagaaccgguccauuuagu

SEQ ID NO: 1106686 - RNA, 19 nt, Artificial Sequence
  Description of Artificial Sequence: Synthetic oligonucleotide
  Sense strand starting at position 18 of SEQ ID NO: 915796
ugaggugcugagcaaacau

SEQ ID NO: 1106687 - RNA, 19 nt, Artificial Sequence
  Description of Artificial Sequence: Synthetic oligonucleotide
  Antisense strand to SEQ ID NO: 1106686
auguuugcucagcaccuca

SEQ ID NO: 1106688 - RNA, 19 nt, Artificial Sequence
  Description of Artificial Sequence: Synthetic oligonucleotide
  Sense strand starting at position 42 of SEQ ID NO: 915796
ugcugaaucucuccaacag

SEQ ID NO: 1106689 - RNA, 19 nt, Artificial Sequence
  Description of Artificial Sequence: Synthetic oligonucleotide
  Antisense strand to SEQ ID NO: 1106688
cuguuggagagauucagca

SEQ ID NO: 1106690 - RNA, 19 nt, Artificial Sequence
  Description of Artificial Sequence: Synthetic oligonucleotide
  Sense strand starting at position 43 of SEQ ID NO: 915796
gcugaaucucuccaacagu

SEQ ID NO: 1106691 - RNA, 19 nt, Artificial Sequence
  Description of Artificial Sequence: Synthetic oligonucleotide
  Antisense strand to SEQ ID NO: 1106690
acuguuggagagauucagc

SEQ ID NO: 1106692 - RNA, 19 nt, Artificial Sequence
  Description of Artificial Sequence: Synthetic oligonucleotide
  Sense strand starting at position 74 of SEQ ID NO: 915796
ggacuacauuaguccuguu

SEQ ID NO: 1106693 - RNA, 19 nt, Artificial Sequence
  Description of Artificial Sequence: Synthetic oligonucleotide
  Antisense strand to SEQ ID NO: 1106692
aacaggacuaauguagucc

SEQ ID NO: 1106694 - RNA, 19 nt, Artificial Sequence
  Description of Artificial Sequence: Synthetic oligonucleotide
  Sense strand starting at position 323 of SEQ ID NO: 915796
aacagaugcugacucagua

SEQ ID NO: 1106695 - RNA, 19 nt, Artificial Sequence
  Description of Artificial Sequence: Synthetic oligonucleotide
  Antisense strand to SEQ ID NO: 1106694
uacugagucagcaucuguu

SEQ ID NO: 1106696 - RNA, 19 nt, Artificial Sequence
  Description of Artificial Sequence: Synthetic oligonucleotide
  Sense strand starting at position 714 of SEQ ID NO: 915796
auacuugaguuugcucaca

SEQ ID NO: 1106697 - RNA, 19 nt, Artificial Sequence
  Description of Artificial Sequence: Synthetic oligonucleotide
  Antisense strand to SEQ ID NO: 1106696
ugugagcaaacucaaguau

SEQ ID NO: 1106698 - RNA, 19 nt, Artificial Sequence
  Description of Artificial Sequence: Synthetic oligonucleotide
  Sense strand starting at position 835 of SEQ ID NO: 915796
ugaggaaucggguggaauc

SEQ ID NO: 1106699 - RNA, 19 nt, Artificial Sequence
  Description of Artificial Sequence: Synthetic oligonucleotide
  Antisense strand to SEQ ID NO: 1106698
gauuccacccgauuccuca

SEQ ID NO: 1106700 - RNA, 19 nt, Artificial Sequence
  Description of Artificial Sequence: Synthetic oligonucleotide
  Sense strand starting at position 1067 of SEQ ID NO: 915796
gcuugugucaucgaagagg

SEQ ID NO: 1106701 - RNA, 19 nt, Artificial Sequence
  Description of Artificial Sequence: Synthetic oligonucleotide
  Antisense strand to SEQ ID NO: 1106700
ccucuucgaugacacaagc

SEQ ID NO: 1106702 - RNA, 19 nt, Artificial Sequence
  Description of Artificial Sequence: Synthetic oligonucleotide
  Sense strand starting at position 1289 of SEQ ID NO: 915796
gagggauccuuugcgagaa

SEQ ID NO: 1106703 - RNA, 19 nt, Artificial Sequence
  Description of Artificial Sequence: Synthetic oligonucleotide
  Antisense strand to SEQ ID NO: 1106702
uucucgcaaaggaucccuc

SEQ ID NO: 1106704 - RNA, 19 nt, Artificial Sequence
  Description of Artificial Sequence: Synthetic oligonucleotide
  Sense strand starting at position 1293 of SEQ ID NO: 915796
gauccuuugcgagaaaucc

SEQ ID NO: 1106705 - RNA, 19 nt, Artificial Sequence
  Description of Artificial Sequence: Synthetic oligonucleotide
  Antisense strand to SEQ ID NO: 1106704
ggauuucucgcaaaggauc

SEQ ID NO: 1106706 - RNA, 19 nt, Artificial Sequence
  Description of Artificial Sequence: Synthetic oligonucleotide
  Sense strand starting at position 1304 of SEQ ID NO: 915796
agaaauccguugcuaaaug

SEQ ID NO: 1106707 - RNA, 19 nt, Artificial Sequence
  Description of Artificial Sequence: Synthetic oligonucleotide
  Antisense strand to SEQ ID NO: 1106706
cauuuagcaacggauuucu

SEQ ID NO: 1106708 - RNA, 19 nt, Artificial Sequence
  Description of Artificial Sequence: Synthetic oligonucleotide
  Sense strand starting at position 1314 of SEQ ID NO: 915796
ugcuaaauguaggcaaaga

SEQ ID NO: 1106709 - RNA, 19 nt, Artificial Sequence
  Description of Artificial Sequence: Synthetic oligonucleotide
  Antisense strand to SEQ ID NO: 1106708
ucuuugccuacauuuagca

SEQ ID NO: 1106710 - RNA, 19 nt, Artificial Sequence
  Description of Artificial Sequence: Synthetic oligonucleotide
  Sense strand starting at position 1315 of SEQ ID NO: 915796
gcuaaauguaggcaaagaa

SEQ ID NO: 1106711 - RNA, 19 nt, Artificial Sequence
  Description of Artificial Sequence: Synthetic oligonucleotide
  Antisense strand to SEQ ID NO: 1106710
uucuuugccuacauuuagc

SEQ ID NO: 1106712 - RNA, 19 nt, Artificial Sequence
  Description of Artificial Sequence: Synthetic oligonucleotide
  Sense strand starting at position 1425 of SEQ ID NO: 915796
agaagugugcuaggugaaa

SEQ ID NO: 1106713 - RNA, 19 nt, Artificial Sequence
  Description of Artificial Sequence: Synthetic oligonucleotide
  Antisense strand to SEQ ID NO: 1106712
uuucaccuagcacacuucu

SEQ ID NO: 1106714 - RNA, 19 nt, Artificial Sequence
  Description of Artificial Sequence: Synthetic oligonucleotide
  Sense strand starting at position 1456 of SEQ ID NO: 915796
gcauccuuccgugaacaaa

SEQ ID NO: 1106715 - RNA, 19 nt, Artificial Sequence
  Description of Artificial Sequence: Synthetic oligonucleotide
  Antisense strand to SEQ ID NO: 1106714
uuuguucacggaaggaugc

SEQ ID NO: 1106716 - RNA, 19 nt, Artificial Sequence
  Description of Artificial Sequence: Synthetic oligonucleotide
  Sense strand starting at position 1551 of SEQ ID NO: 915796
aggaguuucuggaggagga

SEQ ID NO: 1106717 - RNA, 19 nt, Artificial Sequence
  Description of Artificial Sequence: Synthetic oligonucleotide
  Antisense strand to SEQ ID NO: 1106716
uccuccuccagaaacuccu

SEQ ID NO: 1106718 - RNA, 19 nt, Artificial Sequence
  Description of Artificial Sequence: Synthetic oligonucleotide
  Sense strand starting at position 2181 of SEQ ID NO: 915796
gaaggugggcgagaauuau

SEQ ID NO: 1106719 - RNA, 19 nt, Artificial Sequence
  Description of Artificial Sequence: Synthetic oligonucleotide
  Antisense strand to SEQ ID NO: 1106718
auaauucucgcccaccuuc

SEQ ID NO: 1106720 - RNA, 19 nt, Artificial Sequence
  Description of Artificial Sequence: Synthetic oligonucleotide
  Sense strand starting at position 2465 of SEQ ID NO: 915796
cggaccuaucagugacaga

SEQ ID NO: 1106721 - RNA, 19 nt, Artificial Sequence
  Description of Artificial Sequence: Synthetic oligonucleotide
  Antisense strand to SEQ ID NO: 1106720
ucugucacugauagguccg

SEQ ID NO: 1106722 - RNA, 19 nt, Artificial Sequence
  Description of Artificial Sequence: Synthetic oligonucleotide
  Sense strand starting at position 2552 of SEQ ID NO: 915796
ccgucguccggugcugaaa

SEQ ID NO: 1106723 - RNA, 19 nt, Artificial Sequence
  Description of Artificial Sequence: Synthetic oligonucleotide
  Antisense strand to SEQ ID NO: 1106722
uuucagcaccggacgacgg

SEQ ID NO: 1106724 - RNA, 19 nt, Artificial Sequence
  Description of Artificial Sequence: Synthetic oligonucleotide
  Sense strand starting at position 2711 of SEQ ID NO: 915796
ggauccgaagucugagaga

SEQ ID NO: 1106725 - RNA, 19 nt, Artificial Sequence
  Description of Artificial Sequence: Synthetic oligonucleotide
  Antisense strand to SEQ ID NO: 1106724
ucucucagacuucggaucc

SEQ ID NO: 1106726 - RNA, 19 nt, Artificial Sequence
  Description of Artificial Sequence: Synthetic oligonucleotide
  Sense strand starting at position 2722 of SEQ ID NO: 915796
cugagagauugggugguau

SEQ ID NO: 1106727 - RNA, 19 nt, Artificial Sequence
  Description of Artificial Sequence: Synthetic oligonucleotide
  Antisense strand to SEQ ID NO: 1106726
auaccacccaaucucucag

SEQ ID NO: 1106728 - RNA, 19 nt, Artificial Sequence
  Description of Artificial Sequence: Synthetic oligonucleotide
  Sense strand starting at position 2724 of SEQ ID NO: 915796
gagagauugggugguauag

SEQ ID NO: 1106729 - RNA, 19 nt, Artificial Sequence
  Description of Artificial Sequence: Synthetic oligonucleotide
  Antisense strand to SEQ ID NO: 1106728
cuauaccacccaaucucuc

SEQ ID NO: 1106730 - RNA, 19 nt, Artificial Sequence
  Description of Artificial Sequence: Synthetic oligonucleotide
  Sense strand starting at position 2783 of SEQ ID NO: 915796
cccguaguccagcagauuu

SEQ ID NO: 1106731 - RNA, 19 nt, Artificial Sequence
  Description of Artificial Sequence: Synthetic oligonucleotide
  Antisense strand to SEQ ID NO: 1106730
aaaucugcuggacuacggg

SEQ ID NO: 1106732 - RNA, 19 nt, Artificial Sequence
  Description of Artificial Sequence: Synthetic oligonucleotide
  Sense strand starting at position 2840 of SEQ ID NO: 915796
gccuaaacuccugagucau

SEQ ID NO: 1106733 - RNA, 19 nt, Artificial Sequence
  Description of Artificial Sequence: Synthetic oligonucleotide
  Antisense strand to SEQ ID NO: 1106732
augacucaggaguuuaggc

SEQ ID NO: 1106734 - RNA, 19 nt, Artificial Sequence
  Description of Artificial Sequence: Synthetic oligonucleotide
  Sense strand starting at position 2868 of SEQ ID NO: 915796
uguggucuucuugaaguga

SEQ ID NO: 1106735 - RNA, 19 nt, Artificial Sequence
  Description of Artificial Sequence: Synthetic oligonucleotide
  Antisense strand to SEQ ID NO: 1106734
ucacuucaagaagaccaca

SEQ ID NO: 1106736 - RNA, 19 nt, Artificial Sequence
  Description of Artificial Sequence: Synthetic oligonucleotide
  Sense strand starting at position 3032 of SEQ ID NO: 915796
cugcgaccucucuaauuag

SEQ ID NO: 1106737 - RNA, 19 nt, Artificial Sequence
  Description of Artificial Sequence: Synthetic oligonucleotide
  Antisense strand to SEQ ID NO: 1106736
cuaauuagagaggucgcag

SEQ ID NO: 1106738 - RNA, 19 nt, Artificial Sequence
  Description of Artificial Sequence: Synthetic oligonucleotide
  Sense strand starting at position 3176 of SEQ ID NO: 915796
uguccauaagccuaguuau

SEQ ID NO: 1106739 - RNA, 19 nt, Artificial Sequence
  Description of Artificial Sequence: Synthetic oligonucleotide
  Antisense strand to SEQ ID NO: 1106738
auaacuaggcuuauggaca

SEQ ID NO: 1106740 - RNA, 19 nt, Artificial Sequence
  Description of Artificial Sequence: Synthetic oligonucleotide
  Sense strand starting at position 3186 of SEQ ID NO: 915796
ccuaguuaucuuuaagagu

SEQ ID NO: 1106741 - RNA, 19 nt, Artificial Sequence
  Description of Artificial Sequence: Synthetic oligonucleotide
  Antisense strand to SEQ ID NO: 1106740
acucuuaaagauaacuagg

SEQ ID NO: 1106742 - RNA, 19 nt, Artificial Sequence
  Description of Artificial Sequence: Synthetic oligonucleotide
  Sense strand starting at position 3421 of SEQ ID NO: 915796
aucuguguccaagaaauuc

SEQ ID NO: 1106743 - RNA, 19 nt, Artificial Sequence
  Description of Artificial Sequence: Synthetic oligonucleotide
  Antisense strand to SEQ ID NO: 1106742
gaauuucuuggacacagau

SEQ ID NO: 1106744 - RNA, 19 nt, Artificial Sequence
  Description of Artificial Sequence: Synthetic oligonucleotide
  Sense strand starting at position 3495 of SEQ ID NO: 915796
ccuaaucuuuaagugggua

SEQ ID NO: 1106745 - RNA, 19 nt, Artificial Sequence
  Description of Artificial Sequence: Synthetic oligonucleotide
  Antisense strand to SEQ ID NO: 1106744
uacccacuuaaagauuagg

SEQ ID NO: 1106746 - RNA, 19 nt, Artificial Sequence
  Description of Artificial Sequence: Synthetic oligonucleotide
  Sense strand starting at position 3499 of SEQ ID NO: 915796
aucuuuaaguggguaagga

SEQ ID NO: 1106747 - RNA, 19 nt, Artificial Sequence
  Description of Artificial Sequence: Synthetic oligonucleotide
  Antisense strand to SEQ ID NO: 1106746
uccuuacccacuuaaagau

SEQ ID NO: 1106748 - RNA, 19 nt, Artificial Sequence
  Description of Artificial Sequence: Synthetic oligonucleotide
  Sense strand starting at position 3500 of SEQ ID NO: 915796
ucuuuaaguggguaaggau

SEQ ID NO: 1106749 - RNA, 19 nt, Artificial Sequence
  Description of Artificial Sequence: Synthetic oligonucleotide
  Antisense strand to SEQ ID NO: 1106748
auccuuacccacuuaaaga

SEQ ID NO: 1106750 - RNA, 19 nt, Artificial Sequence
  Description of Artificial Sequence: Synthetic oligonucleotide
  Sense strand starting at position 3509 of SEQ ID NO: 915796
ggguaaggauguuuaauug

SEQ ID NO: 1106751 - RNA, 19 nt, Artificial Sequence
  Description of Artificial Sequence: Synthetic oligonucleotide
  Antisense strand to SEQ ID NO: 1106750
caauuaaacauccuuaccc

SEQ ID NO: 1106752 - RNA, 19 nt, Artificial Sequence
  Description of Artificial Sequence: Synthetic oligonucleotide
  Sense strand starting at position 3515 of SEQ ID NO: 915796
ggauguuuaauugaauggu

SEQ ID NO: 1106753 - RNA, 19 nt, Artificial Sequence
  Description of Artificial Sequence: Synthetic oligonucleotide
  Antisense strand to SEQ ID NO: 1106752
accauucaauuaaacaucc

SEQ ID NO: 1106754 - RNA, 19 nt, Artificial Sequence
  Description of Artificial Sequence: Synthetic oligonucleotide
  Sense strand starting at position 3518 of SEQ ID NO: 915796
uguuuaauugaauggucuu

SEQ ID NO: 1106755 - RNA, 19 nt, Artificial Sequence
  Description of Artificial Sequence: Synthetic oligonucleotide
  Antisense strand to SEQ ID NO: 1106754
aagaccauucaauuaaaca

SEQ ID NO: 1106756 - RNA, 19 nt, Artificial Sequence
  Description of Artificial Sequence: Synthetic oligonucleotide
  Sense strand starting at position 3521 of SEQ ID NO: 915796
uuaauugaauggucuuuga

SEQ ID NO: 1106757 - RNA, 19 nt, Artificial Sequence
  Description of Artificial Sequence: Synthetic oligonucleotide
  Antisense strand to SEQ ID NO: 1106756
ucaaagaccauucaauuaa

SEQ ID NO: 1106758 - RNA, 19 nt, Artificial Sequence
  Description of Artificial Sequence: Synthetic oligonucleotide
  Sense strand starting at position 3524 of SEQ ID NO: 915796
auugaauggucuuugaguu

SEQ ID NO: 1106759 - RNA, 19 nt, Artificial Sequence
  Description of Artificial Sequence: Synthetic oligonucleotide
  Antisense strand to SEQ ID NO: 1106758
aacucaaagaccauucaau

SEQ ID NO: 1106760 - RNA, 19 nt, Artificial Sequence
  Description of Artificial Sequence: Synthetic oligonucleotide
  Sense strand starting at position 3525 of SEQ ID NO: 915796
uugaauggucuuugaguug

SEQ ID NO: 1106761 - RNA, 19 nt, Artificial Sequence
  Description of Artificial Sequence: Synthetic oligonucleotide
  Antisense strand to SEQ ID NO: 1106760
caacucaaagaccauucaa

SEQ ID NO: 1106762 - RNA, 19 nt, Artificial Sequence
  Description of Artificial Sequence: Synthetic oligonucleotide
  Sense strand starting at position 3542 of SEQ ID NO: 915796
ugcucuuugccugaacaca

SEQ ID NO: 1106763 - RNA, 19 nt, Artificial Sequence
  Description of Artificial Sequence: Synthetic oligonucleotide
  Antisense strand to SEQ ID NO: 1106762
uguguucaggcaaagagca

SEQ ID NO: 1106764 - RNA, 19 nt, Artificial Sequence
  Description of Artificial Sequence: Synthetic oligonucleotide
  Sense strand starting at position 3612 of SEQ ID NO: 915796
cauauugucuaguuuggga

SEQ ID NO: 1106765 - RNA, 19 nt, Artificial Sequence
  Description of Artificial Sequence: Synthetic oligonucleotide
  Antisense strand to SEQ ID NO: 1106764
ucccaaacuagacaauaug

SEQ ID NO: 1106766 - RNA, 19 nt, Artificial Sequence
  Description of Artificial Sequence: Synthetic oligonucleotide
  Sense strand starting at position 8 of SEQ ID NO: 915797
cucauucuggcccagaaua

SEQ ID NO: 1106767 - RNA, 19 nt, Artificial Sequence
  Description of Artificial Sequence: Synthetic oligonucleotide
  Antisense strand to SEQ ID NO: 1106766
uauucugggccagaaugag

SEQ ID NO: 1106768 - RNA, 19 nt, Artificial Sequence
  Description of Artificial Sequence: Synthetic oligonucleotide
  Sense strand starting at position 356 of SEQ ID NO: 915797
gugggugacugaagaugaa

SEQ ID NO: 1106769 - RNA, 19 nt, Artificial Sequence
  Description of Artificial Sequence: Synthetic oligonucleotide
  Antisense strand to SEQ ID NO: 1106768
uucaucuucagucacccac

SEQ ID NO: 1106770 - RNA, 19 nt, Artificial Sequence
  Description of Artificial Sequence: Synthetic oligonucleotide
  Sense strand starting at position 812 of SEQ ID NO: 915797
cugaguucagggugacauu

SEQ ID NO: 1106771 - RNA, 19 nt, Artificial Sequence
  Description of Artificial Sequence: Synthetic oligonucleotide
  Antisense strand to SEQ ID NO: 1106770
aaugucacccugaacucag

SEQ ID NO: 1106772 - RNA, 19 nt, Artificial Sequence
  Description of Artificial Sequence: Synthetic oligonucleotide
  Sense strand starting at position 1318 of SEQ ID NO: 915797
gcgaaucucgugcuucuca

SEQ ID NO: 1106773 - RNA, 19 nt, Artificial Sequence
  Description of Artificial Sequence: Synthetic oligonucleotide
  Antisense strand to SEQ ID NO: 1106772
ugagaagcacgagauucgc

SEQ ID NO: 1106774 - RNA, 19 nt, Artificial Sequence
  Description of Artificial Sequence: Synthetic oligonucleotide
  Sense strand starting at position 1416 of SEQ ID NO: 915797
ugguauucucaguauggua

SEQ ID NO: 1106775 - RNA, 19 nt, Artificial Sequence
  Description of Artificial Sequence: Synthetic oligonucleotide
  Antisense strand to SEQ ID NO: 1106774
uaccauacugagaauacca

SEQ ID NO: 1106776 - RNA, 19 nt, Artificial Sequence
  Description of Artificial Sequence: Synthetic oligonucleotide
  Sense strand starting at position 1532 of SEQ ID NO: 915797
caaaguugccgggaaauaa

SEQ ID NO: 1106777 - RNA, 19 nt, Artificial Sequence
  Description of Artificial Sequence: Synthetic oligonucleotide
  Antisense strand to SEQ ID NO: 1106776
uuauuucccggcaacuuug

SEQ ID NO: 1106778 - RNA, 19 nt, Artificial Sequence
  Description of Artificial Sequence: Synthetic oligonucleotide
  Sense strand starting at position 1542 of SEQ ID NO: 915797
gggaaauaagugcgggaau

SEQ ID NO: 1106779 - RNA, 19 nt, Artificial Sequence
  Description of Artificial Sequence: Synthetic oligonucleotide
  Antisense strand to SEQ ID NO: 1106778
auucccgcacuuauuuccc

SEQ ID NO: 1106780 - RNA, 19 nt, Artificial Sequence
  Description of Artificial Sequence: Synthetic oligonucleotide
  Sense strand starting at position 1553 of SEQ ID NO: 915797
gcgggaaucgucagagcuu

SEQ ID NO: 1106781 - RNA, 19 nt, Artificial Sequence
  Description of Artificial Sequence: Synthetic oligonucleotide
  Antisense strand to SEQ ID NO: 1106780
aagcucugacgauucccgc

SEQ ID NO: 1106782 - RNA, 19 nt, Artificial Sequence
  Description of Artificial Sequence: Synthetic oligonucleotide
  Sense strand starting at position 1687 of SEQ ID NO: 915797
ggaggaaauuugcaaagag

SEQ ID NO: 1106783 - RNA, 19 nt, Artificial Sequence
  Description of Artificial Sequence: Synthetic oligonucleotide
  Antisense strand to SEQ ID NO: 1106782
cucuuugcaaauuuccucc

SEQ ID NO: 1106784 - RNA, 19 nt, Artificial Sequence
  Description of Artificial Sequence: Synthetic oligonucleotide
  Sense strand starting at position 1743 of SEQ ID NO: 915797
ugaggucugcuccagagau

SEQ ID NO: 1106785 - RNA, 19 nt, Artificial Sequence
  Description of Artificial Sequence: Synthetic oligonucleotide
  Antisense strand to SEQ ID NO: 1106784
aucucuggagcagaccuca

SEQ ID NO: 1106786 - RNA, 19 nt, Artificial Sequence
  Description of Artificial Sequence: Synthetic oligonucleotide
  Sense strand starting at position 1745 of SEQ ID NO: 915797
aggucugcuccagagaucu

SEQ ID NO: 1106787 - RNA, 19 nt, Artificial Sequence
  Description of Artificial Sequence: Synthetic oligonucleotide
  Antisense strand to SEQ ID NO: 1106786
agaucucuggagcagaccu

SEQ ID NO: 1106788 - RNA, 19 nt, Artificial Sequence
  Description of Artificial Sequence: Synthetic oligonucleotide
  Sense strand starting at position 1757 of SEQ ID NO: 915797
gagaucuccgucuaucucu

SEQ ID NO: 1106789 - RNA, 19 nt, Artificial Sequence
  Description of Artificial Sequence: Synthetic oligonucleotide
  Antisense strand to SEQ ID NO: 1106788
agagauagacggagaucuc

SEQ ID NO: 1106790 - RNA, 19 nt, Artificial Sequence
  Description of Artificial Sequence: Synthetic oligonucleotide
  Sense strand starting at position 1961 of SEQ ID NO: 915797
gugaauguggcuguguguu

SEQ ID NO: 1106791 - RNA, 19 nt, Artificial Sequence
  Description of Artificial Sequence: Synthetic oligonucleotide
  Antisense strand to SEQ ID NO: 1106790
aacacacagccacauucac

SEQ ID NO: 1106792 - RNA, 19 nt, Artificial Sequence
  Description of Artificial Sequence: Synthetic oligonucleotide
  Sense strand starting at position 1980 of SEQ ID NO: 915797
guggaacugcaucauaaca

SEQ ID NO: 1106793 - RNA, 19 nt, Artificial Sequence
  Description of Artificial Sequence: Synthetic oligonucleotide
  Antisense strand to SEQ ID NO: 1106792
uguuaugaugcaguuccac

SEQ ID NO: 1106794 - RNA, 19 nt, Artificial Sequence
  Description of Artificial Sequence: Synthetic oligonucleotide
  Sense strand starting at position 1990 of SEQ ID NO: 915797
aucauaacacugugaguca

SEQ ID NO: 1106795 - RNA, 19 nt, Artificial Sequence
  Description of Artificial Sequence: Synthetic oligonucleotide
  Antisense strand to SEQ ID NO: 1106794
ugacucacaguguuaugau

SEQ ID NO: 1106796 - RNA, 19 nt, Artificial Sequence
  Description of Artificial Sequence: Synthetic oligonucleotide
  Sense strand starting at position 2388 of SEQ ID NO: 915797
auguacuaauugucaugga

SEQ ID NO: 1106797 - RNA, 19 nt, Artificial Sequence
  Description of Artificial Sequence: Synthetic oligonucleotide
  Antisense strand to SEQ ID NO: 1106796
uccaugacaauuaguacau

SEQ ID NO: 1106798 - RNA, 19 nt, Artificial Sequence
  Description of Artificial Sequence: Synthetic oligonucleotide
  Sense strand starting at position 2393 of SEQ ID NO: 915797
cuaauugucauggauggca

SEQ ID NO: 1106799 - RNA, 19 nt, Artificial Sequence
  Description of Artificial Sequence: Synthetic oligonucleotide
  Antisense strand to SEQ ID NO: 1106798
ugccauccaugacaauuag

SEQ ID NO: 1106800 - RNA, 19 nt, Artificial Sequence
  Description of Artificial Sequence: Synthetic oligonucleotide
  Sense strand starting at position 2395 of SEQ ID NO: 915797
aauugucauggauggcaaa

SEQ ID NO: 1106801 - RNA, 19 nt, Artificial Sequence
  Description of Artificial Sequence: Synthetic oligonucleotide
  Antisense strand to SEQ ID NO: 1106800
uuugccauccaugacaauu

SEQ ID NO: 1106802 - RNA, 19 nt, Artificial Sequence
  Description of Artificial Sequence: Synthetic oligonucleotide
  Sense strand starting at position 2448 of SEQ ID NO: 915797
uugguuuaauacuccugaa

SEQ ID NO: 1106803 - RNA, 19 nt, Artificial Sequence
  Description of Artificial Sequence: Synthetic oligonucleotide
  Antisense strand to SEQ ID NO: 1106802
uucaggaguauuaaaccaa

SEQ ID NO: 1106804 - RNA, 19 nt, Artificial Sequence
  Description of Artificial Sequence: Synthetic oligonucleotide
  Sense strand starting at position 2545 of SEQ ID NO: 915797
uggagacaccuacguuaua

SEQ ID NO: 1106805 - RNA, 19 nt, Artificial Sequence
  Description of Artificial Sequence: Synthetic oligonucleotide
  Antisense strand to SEQ ID NO: 1106804
uauaacguaggugucucca

SEQ ID NO: 1106806 - RNA, 19 nt, Artificial Sequence
  Description of Artificial Sequence: Synthetic oligonucleotide
  Sense strand starting at position 2546 of SEQ ID NO: 915797
ggagacaccuacguuauau

SEQ ID NO: 1106807 - RNA, 19 nt, Artificial Sequence
  Description of Artificial Sequence: Synthetic oligonucleotide
  Antisense strand to SEQ ID NO: 1106806
auauaacguaggugucucc

SEQ ID NO: 1106808 - RNA, 19 nt, Artificial Sequence
  Description of Artificial Sequence: Synthetic oligonucleotide
  Sense strand starting at position 2548 of SEQ ID NO: 915797
agacaccuacguuauauga

SEQ ID NO: 1106809 - RNA, 19 nt, Artificial Sequence
  Description of Artificial Sequence: Synthetic oligonucleotide
  Antisense strand to SEQ ID NO: 1106808
ucauauaacguaggugucu

SEQ ID NO: 1106810 - RNA, 19 nt, Artificial Sequence
  Description of Artificial Sequence: Synthetic oligonucleotide
  Sense strand starting at position 2572 of SEQ ID NO: 915797
ucuauugggcuguaaacuu

SEQ ID NO: 1106811 - RNA, 19 nt, Artificial Sequence
  Description of Artificial Sequence: Synthetic oligonucleotide
  Antisense strand to SEQ ID NO: 1106810
aaguuuacagcccaauaga

SEQ ID NO: 1106812 - RNA, 19 nt, Artificial Sequence
  Description of Artificial Sequence: Synthetic oligonucleotide
  Sense strand starting at position 2580 of SEQ ID NO: 915797
gcuguaaacuuccugagac

SEQ ID NO: 1106813 - RNA, 19 nt, Artificial Sequence
  Description of Artificial Sequence: Synthetic oligonucleotide
  Antisense strand to SEQ ID NO: 1106812
gucucaggaaguuuacagc

SEQ ID NO: 1106814 - RNA, 19 nt, Artificial Sequence
  Description of Artificial Sequence: Synthetic oligonucleotide
  Sense strand starting at position 2597 of SEQ ID NO: 915797
acaggccuucugggaaauu

SEQ ID NO: 1106815 - RNA, 19 nt, Artificial Sequence
  Description of Artificial Sequence: Synthetic oligonucleotide
  Antisense strand to SEQ ID NO: 1106814
aauuucccagaaggccugu

SEQ ID NO: 1106816 - RNA, 19 nt, Artificial Sequence
  Description of Artificial Sequence: Synthetic oligonucleotide
  Sense strand starting at position 2683 of SEQ ID NO: 915797
guuguuuccgcggcauuau

SEQ ID NO: 1106817 - RNA, 19 nt, Artificial Sequence
  Description of Artificial Sequence: Synthetic oligonucleotide
  Antisense strand to SEQ ID NO: 1106816
auaaugccgcggaaacaac

SEQ ID NO: 1106818 - RNA, 19 nt, Artificial Sequence
  Description of Artificial Sequence: Synthetic oligonucleotide
  Sense strand starting at position 2854 of SEQ ID NO: 915797
guguuugacccagacuauc

SEQ ID NO: 1106819 - RNA, 19 nt, Artificial Sequence
  Description of Artificial Sequence: Synthetic oligonucleotide
  Antisense strand to SEQ ID NO: 1106818
gauagucugggucaaacac

SEQ ID NO: 1106820 - RNA, 19 nt, Artificial Sequence
  Description of Artificial Sequence: Synthetic oligonucleotide
  Sense strand starting at position 2908 of SEQ ID NO: 915797
aaggaaguaugcguggaau

SEQ ID NO: 1106821 - RNA, 19 nt, Artificial Sequence
  Description of Artificial Sequence: Synthetic oligonucleotide
  Antisense strand to SEQ ID NO: 1106820
auuccacgcauacuuccuu

SEQ ID NO: 1106822 - RNA, 19 nt, Artificial Sequence
  Description of Artificial Sequence: Synthetic oligonucleotide
  Sense strand starting at position 2911 of SEQ ID NO: 915797
gaaguaugcguggaauaca

SEQ ID NO: 1106823 - RNA, 19 nt, Artificial Sequence
  Description of Artificial Sequence: Synthetic oligonucleotide
  Antisense strand to SEQ ID NO: 1106822
uguauuccacgcauacuuc

SEQ ID NO: 1106824 - RNA, 19 nt, Artificial Sequence
  Description of Artificial Sequence: Synthetic oligonucleotide
  Sense strand starting at position 2935 of SEQ ID NO: 915797
ucacguagggcgucucuua

SEQ ID NO: 1106825 - RNA, 19 nt, Artificial Sequence
  Description of Artificial Sequence: Synthetic oligonucleotide
  Antisense strand to SEQ ID NO: 1106824
uaagagacgcccuacguga

SEQ ID NO: 1106826 - RNA, 19 nt, Artificial Sequence
  Description of Artificial Sequence: Synthetic oligonucleotide
  Sense strand starting at position 3135 of SEQ ID NO: 915797
gguagucaucaauacgaac

SEQ ID NO: 1106827 - RNA, 19 nt, Artificial Sequence
  Description of Artificial Sequence: Synthetic oligonucleotide
  Antisense strand to SEQ ID NO: 1106826
guucguauugaugacuacc

SEQ ID NO: 1106828 - RNA, 19 nt, Artificial Sequence
  Description of Artificial Sequence: Synthetic oligonucleotide
  Sense strand starting at position 3338 of SEQ ID NO: 915797
uguuguuaacucuauguaa

SEQ ID NO: 1106829 - RNA, 19 nt, Artificial Sequence
  Description of Artificial Sequence: Synthetic oligonucleotide
  Antisense strand to SEQ ID NO: 1106828
uuacauagaguuaacaaca

SEQ ID NO: 1106830 - RNA, 19 nt, Artificial Sequence
  Description of Artificial Sequence: Synthetic oligonucleotide
  Sense strand starting at position 3506 of SEQ ID NO: 915797
acuggugaugguuaauauu

SEQ ID NO: 1106831 - RNA, 19 nt, Artificial Sequence
  Description of Artificial Sequence: Synthetic oligonucleotide
  Antisense strand to SEQ ID NO: 1106830
aauauuaaccaucaccagu

SEQ ID NO: 1106832 - RNA, 19 nt, Artificial Sequence
  Description of Artificial Sequence: Synthetic oligonucleotide
  Sense strand starting at position 3668 of SEQ ID NO: 915797
ucagcuaggccagaauaaa

SEQ ID NO: 1106833 - RNA, 19 nt, Artificial Sequence
  Description of Artificial Sequence: Synthetic oligonucleotide
  Antisense strand to SEQ ID NO: 1106832
uuuauucuggccuagcuga

SEQ ID NO: 1106834 - RNA, 19 nt, Artificial Sequence
  Description of Artificial Sequence: Synthetic oligonucleotide
  Sense strand starting at position 3762 of SEQ ID NO: 915797
ccugcccucgaauauugaa

SEQ ID NO: 1106835 - RNA, 19 nt, Artificial Sequence
  Description of Artificial Sequence: Synthetic oligonucleotide
  Antisense strand to SEQ ID NO: 1106834
uucaauauucgagggcagg

SEQ ID NO: 1106836 - RNA, 19 nt, Artificial Sequence
  Description of Artificial Sequence: Synthetic oligonucleotide
  Sense strand starting at position 3862 of SEQ ID NO: 915797
gugaucaucugagucaaua

SEQ ID NO: 1106837 - RNA, 19 nt, Artificial Sequence
  Description of Artificial Sequence: Synthetic oligonucleotide
  Antisense strand to SEQ ID NO: 1106836
uauugacucagaugaucac

SEQ ID NO: 1106838 - RNA, 19 nt, Artificial Sequence
  Description of Artificial Sequence: Synthetic oligonucleotide
  Sense strand starting at position 3873 of SEQ ID NO: 915797
agucaauauuccguaauaa

SEQ ID NO: 1106839 - RNA, 19 nt, Artificial Sequence
  Description of Artificial Sequence: Synthetic oligonucleotide
  Antisense strand to SEQ ID NO: 1106838
uuauuacggaauauugacu

SEQ ID NO: 1106840 - RNA, 19 nt, Artificial Sequence
  Description of Artificial Sequence: Synthetic oligonucleotide
  Sense strand starting at position 3874 of SEQ ID NO: 915797
gucaauauuccguaauaac

SEQ ID NO: 1106841 - RNA, 19 nt, Artificial Sequence
  Description of Artificial Sequence: Synthetic oligonucleotide
  Antisense strand to SEQ ID NO: 1106840
guuauuacggaauauugac

SEQ ID NO: 1106842 - RNA, 19 nt, Artificial Sequence
  Description of Artificial Sequence: Synthetic oligonucleotide
  Sense strand starting at position 3922 of SEQ ID NO: 915797
guucuaucccgcuagagaa

SEQ ID NO: 1106843 - RNA, 19 nt, Artificial Sequence
  Description of Artificial Sequence: Synthetic oligonucleotide
  Antisense strand to SEQ ID NO: 1106842
uucucuagcgggauagaac

SEQ ID NO: 1106844 - RNA, 19 nt, Artificial Sequence
  Description of Artificial Sequence: Synthetic oligonucleotide
  Sense strand starting at position 3932 of SEQ ID NO: 915797
gcuagagaacucugauuaa

SEQ ID NO: 1106845 - RNA, 19 nt, Artificial Sequence
  Description of Artificial Sequence: Synthetic oligonucleotide
  Antisense strand to SEQ ID NO: 1106844
uuaaucagaguucucuagc

SEQ ID NO: 1106846 - RNA, 19 nt, Artificial Sequence
  Description of Artificial Sequence: Synthetic oligonucleotide
  Sense strand starting at position 16 of SEQ ID NO: 915798
auguuagaucuugagucaa

SEQ ID NO: 1106847 - RNA, 19 nt, Artificial Sequence
  Description of Artificial Sequence: Synthetic oligonucleotide
  Antisense strand to SEQ ID NO: 1106846
uugacucaagaucuaacau

SEQ ID NO: 1106848 - RNA, 19 nt, Artificial Sequence
  Description of Artificial Sequence: Synthetic oligonucleotide
  Sense strand starting at position 73 of SEQ ID NO: 915798
gaaauaagguguucuccuu

SEQ ID NO: 1106849 - RNA, 19 nt, Artificial Sequence
  Description of Artificial Sequence: Synthetic oligonucleotide
  Antisense strand to SEQ ID NO: 1106848
aaggagaacaccuuauuuc

SEQ ID NO: 1106850 - RNA, 19 nt, Artificial Sequence
  Description of Artificial Sequence: Synthetic oligonucleotide
  Sense strand starting at position 242 of SEQ ID NO: 915798
guaagauggguuuauucuu

SEQ ID NO: 1106851 - RNA, 19 nt, Artificial Sequence
  Description of Artificial Sequence: Synthetic oligonucleotide
  Antisense strand to SEQ ID NO: 1106850
aagaauaaacccaucuuac

SEQ ID NO: 1106852 - RNA, 19 nt, Artificial Sequence
  Description of Artificial Sequence: Synthetic oligonucleotide
  Sense strand starting at position 248 of SEQ ID NO: 915798
uggguuuauucuuucugga

SEQ ID NO: 1106853 - RNA, 19 nt, Artificial Sequence
  Description of Artificial Sequence: Synthetic oligonucleotide
  Antisense strand to SEQ ID NO: 1106852
uccagaaagaauaaaccca

SEQ ID NO: 1106854 - RNA, 19 nt, Artificial Sequence
  Description of Artificial Sequence: Synthetic oligonucleotide
  Sense strand starting at position 250 of SEQ ID NO: 915798
gguuuauucuuucuggauc

SEQ ID NO: 1106855 - RNA, 19 nt, Artificial Sequence
  Description of Artificial Sequence: Synthetic oligonucleotide
  Antisense strand to SEQ ID NO: 1106854
gauccagaaagaauaaacc

SEQ ID NO: 1106856 - RNA, 19 nt, Artificial Sequence
  Description of Artificial Sequence: Synthetic oligonucleotide
  Sense strand starting at position 261 of SEQ ID NO: 915798
ucuggaucuaagcagugaa

SEQ ID NO: 1106857 - RNA, 19 nt, Artificial Sequence
  Description of Artificial Sequence: Synthetic oligonucleotide
  Antisense strand to SEQ ID NO: 1106856
uucacugcuuagauccaga

SEQ ID NO: 1106858 - RNA, 19 nt, Artificial Sequence
  Description of Artificial Sequence: Synthetic oligonucleotide
  Sense strand starting at position 316 of SEQ ID NO: 915798
agagaagacgccuagcaua

SEQ ID NO: 1106859 - RNA, 19 nt, Artificial Sequence
  Description of Artificial Sequence: Synthetic oligonucleotide
  Antisense strand to SEQ ID NO: 1106858
uaugcuaggcgucuucucu

SEQ ID NO: 1106860 - RNA, 19 nt, Artificial Sequence
  Description of Artificial Sequence: Synthetic oligonucleotide
  Sense strand starting at position 483 of SEQ ID NO: 915798
aguacaaccucaucaaugu

SEQ ID NO: 1106861 - RNA, 19 nt, Artificial Sequence
  Description of Artificial Sequence: Synthetic oligonucleotide
  Antisense strand to SEQ ID NO: 1106860
acauugaugagguuguacu

SEQ ID NO: 1106862 - RNA, 19 nt, Artificial Sequence
  Description of Artificial Sequence: Synthetic oligonucleotide
  Sense strand starting at position 594 of SEQ ID NO: 915798
ugaccaaucuccucaggua

SEQ ID NO: 1106863 - RNA, 19 nt, Artificial Sequence
  Description of Artificial Sequence: Synthetic oligonucleotide
  Antisense strand to SEQ ID NO: 1106862
uaccugaggagauugguca

SEQ ID NO: 1106864 - RNA, 19 nt, Artificial Sequence
  Description of Artificial Sequence: Synthetic oligonucleotide
  Sense strand starting at position 606 of SEQ ID NO: 915798
ucagguaaacaaugucuaa

SEQ ID NO: 1106865 - RNA, 19 nt, Artificial Sequence
  Description of Artificial Sequence: Synthetic oligonucleotide
  Antisense strand to SEQ ID NO: 1106864
uuagacauuguuuaccuga

SEQ ID NO: 1106866 - RNA, 19 nt, Artificial Sequence
  Description of Artificial Sequence: Synthetic oligonucleotide
  Sense strand starting at position 609 of SEQ ID NO: 915798
gguaaacaaugucuaauga

SEQ ID NO: 1106867 - RNA, 19 nt, Artificial Sequence
  Description of Artificial Sequence: Synthetic oligonucleotide
  Antisense strand to SEQ ID NO: 1106866
ucauuagacauuguuuacc

SEQ ID NO: 1106868 - RNA, 19 nt, Artificial Sequence
  Description of Artificial Sequence: Synthetic oligonucleotide
  Sense strand starting at position 617 of SEQ ID NO: 915798
augucuaaugacugaugau

SEQ ID NO: 1106869 - RNA, 19 nt, Artificial Sequence
  Description of Artificial Sequence: Synthetic oligonucleotide
  Antisense strand to SEQ ID NO: 1106868
aucaucagucauuagacau

SEQ ID NO: 1106870 - RNA, 19 nt, Artificial Sequence
  Description of Artificial Sequence: Synthetic oligonucleotide
  Sense strand starting at position 623 of SEQ ID NO: 915798
aaugacugaugauuguuua

SEQ ID NO: 1106871 - RNA, 19 nt, Artificial Sequence
  Description of Artificial Sequence: Synthetic oligonucleotide
  Antisense strand to SEQ ID NO: 1106870
uaaacaaucaucagucauu

SEQ ID NO: 1106872 - RNA, 19 nt, Artificial Sequence
  Description of Artificial Sequence: Synthetic oligonucleotide
  Sense strand starting at position 633 of SEQ ID NO: 915798
gauuguuuacuguaugcca

SEQ ID NO: 1106873 - RNA, 19 nt, Artificial Sequence
  Description of Artificial Sequence: Synthetic oligonucleotide
  Antisense strand to SEQ ID NO: 1106872
uggcauacaguaaacaauc

SEQ ID NO: 1106874 - RNA, 19 nt, Artificial Sequence
  Description of Artificial Sequence: Synthetic oligonucleotide
  Sense strand starting at position 828 of SEQ ID NO: 915798
uuacuuggguguuccugaa

SEQ ID NO: 1106875 - RNA, 19 nt, Artificial Sequence
  Description of Artificial Sequence: Synthetic oligonucleotide
  Antisense strand to SEQ ID NO: 1106874
uucaggaacacccaaguaa

SEQ ID NO: 1106876 - RNA, 19 nt, Artificial Sequence
  Description of Artificial Sequence: Synthetic oligonucleotide
  Sense strand starting at position 832 of SEQ ID NO: 915798
uuggguguuccugaauacu

SEQ ID NO: 1106877 - RNA, 19 nt, Artificial Sequence
  Description of Artificial Sequence: Synthetic oligonucleotide
  Antisense strand to SEQ ID NO: 1106876
aguauucaggaacacccaa

SEQ ID NO: 1106878 - RNA, 19 nt, Artificial Sequence
  Description of Artificial Sequence: Synthetic oligonucleotide
  Sense strand starting at position 879 of SEQ ID NO: 915798
guuacuaggaguuggguua

SEQ ID NO: 1106879 - RNA, 19 nt, Artificial Sequence
  Description of Artificial Sequence: Synthetic oligonucleotide
  Antisense strand to SEQ ID NO: 1106878
uaacccaacuccuaguaac

SEQ ID NO: 1106880 - RNA, 19 nt, Artificial Sequence
  Description of Artificial Sequence: Synthetic oligonucleotide
  Sense strand starting at position 880 of SEQ ID NO: 915798
uuacuaggaguuggguuau

SEQ ID NO: 1106881 - RNA, 19 nt, Artificial Sequence
  Description of Artificial Sequence: Synthetic oligonucleotide
  Antisense strand to SEQ ID NO: 1106880
auaacccaacuccuaguaa

SEQ ID NO: 1106882 - RNA, 19 nt, Artificial Sequence
  Description of Artificial Sequence: Synthetic oligonucleotide
  Sense strand starting at position 923 of SEQ ID NO: 915798
uuauaacugccagaaaguc

SEQ ID NO: 1106883 - RNA, 19 nt, Artificial Sequence
  Description of Artificial Sequence: Synthetic oligonucleotide
  Antisense strand to SEQ ID NO: 1106882
gacuuucuggcaguuauaa

SEQ ID NO: 1106884 - RNA, 19 nt, Artificial Sequence
  Description of Artificial Sequence: Synthetic oligonucleotide
  Sense strand starting at position 1191 of SEQ ID NO: 915798
ucuggacuccuuugagagu

SEQ ID NO: 1106885 - RNA, 19 nt, Artificial Sequence
  Description of Artificial Sequence: Synthetic oligonucleotide
  Antisense strand to SEQ ID NO: 1106884
acucucaaaggaguccaga

SEQ ID NO: 1106886 - RNA, 19 nt, Artificial Sequence
  Description of Artificial Sequence: Synthetic oligonucleotide
  Sense strand starting at position 1197 of SEQ ID NO: 915798
cuccuuugagaguaaaguu

SEQ ID NO: 1106887 - RNA, 19 nt, Artificial Sequence
  Description of Artificial Sequence: Synthetic oligonucleotide
  Antisense strand to SEQ ID NO: 1106886
aacuuuacucucaaaggag

SEQ ID NO: 1106888 - RNA, 19 nt, Artificial Sequence
  Description of Artificial Sequence: Synthetic oligonucleotide
  Sense strand starting at position 1207 of SEQ ID NO: 915798
aguaaaguuuccuuuccac

SEQ ID NO: 1106889 - RNA, 19 nt, Artificial Sequence
  Description of Artificial Sequence: Synthetic oligonucleotide
  Antisense strand to SEQ ID NO: 1106888
guggaaaggaaacuuuacu

SEQ ID NO: 1106890 - RNA, 19 nt, Artificial Sequence
  Description of Artificial Sequence: Synthetic oligonucleotide
  Sense strand starting at position 1265 of SEQ ID NO: 915798
uccgguuaaacugacaagu

SEQ ID NO: 1106891 - RNA, 19 nt, Artificial Sequence
  Description of Artificial Sequence: Synthetic oligonucleotide
  Antisense strand to SEQ ID NO: 1106890
acuugucaguuuaaccgga

SEQ ID NO: 1106892 - RNA, 19 nt, Artificial Sequence
  Description of Artificial Sequence: Synthetic oligonucleotide
  Sense strand starting at position 1909 of SEQ ID NO: 915798
cucucagcucagggauauc

SEQ ID NO: 1106893 - RNA, 19 nt, Artificial Sequence
  Description of Artificial Sequence: Synthetic oligonucleotide
  Antisense strand to SEQ ID NO: 1106892
gauaucccugagcugagag

SEQ ID NO: 1106894 - RNA, 19 nt, Artificial Sequence
  Description of Artificial Sequence: Synthetic oligonucleotide
  Sense strand starting at position 1919 of SEQ ID NO: 915798
agggauaucgccuaggcca

SEQ ID NO: 1106895 - RNA, 19 nt, Artificial Sequence
  Description of Artificial Sequence: Synthetic oligonucleotide
  Antisense strand to SEQ ID NO: 1106894
uggccuaggcgauaucccu

SEQ ID NO: 1106896 - RNA, 19 nt, Artificial Sequence
  Description of Artificial Sequence: Synthetic oligonucleotide
  Sense strand starting at position 2426 of SEQ ID NO: 915798
gugcauuuaucaccucuuu

SEQ ID NO: 1106897 - RNA, 19 nt, Artificial Sequence
  Description of Artificial Sequence: Synthetic oligonucleotide
  Antisense strand to SEQ ID NO: 1106896
aaagaggugauaaaugcac

SEQ ID NO: 1106898 - RNA, 19 nt, Artificial Sequence
  Description of Artificial Sequence: Synthetic oligonucleotide
  Sense strand starting at position 2508 of SEQ ID NO: 915798
acuggaaucuaggaagaaa

SEQ ID NO: 1106899 - RNA, 19 nt, Artificial Sequence
  Description of Artificial Sequence: Synthetic oligonucleotide
  Antisense strand to SEQ ID NO: 1106898
uuucuuccuagauuccagu

SEQ ID NO: 1106900 - RNA, 19 nt, Artificial Sequence
  Description of Artificial Sequence: Synthetic oligonucleotide
  Sense strand starting at position 2741 of SEQ ID NO: 915798
ccgcuugaugucuuugcau

SEQ ID NO: 1106901 - RNA, 19 nt, Artificial Sequence
  Description of Artificial Sequence: Synthetic oligonucleotide
  Antisense strand to SEQ ID NO: 1106900
augcaaagacaucaagcgg

SEQ ID NO: 1106902 - RNA, 19 nt, Artificial Sequence
  Description of Artificial Sequence: Synthetic oligonucleotide
  Sense strand starting at position 2930 of SEQ ID NO: 915798
gcggguugugugcuuucau

SEQ ID NO: 1106903 - RNA, 19 nt, Artificial Sequence
  Description of Artificial Sequence: Synthetic oligonucleotide
  Antisense strand to SEQ ID NO: 1106902
augaaagcacacaacccgc

SEQ ID NO: 1106904 - RNA, 19 nt, Artificial Sequence
  Description of Artificial Sequence: Synthetic oligonucleotide
  Sense strand starting at position 3044 of SEQ ID NO: 915798
guccuauuauuugcaaugu

SEQ ID NO: 1106905 - RNA, 19 nt, Artificial Sequence
  Description of Artificial Sequence: Synthetic oligonucleotide
  Antisense strand to SEQ ID NO: 1106904
acauugcaaauaauaggac

SEQ ID NO: 1106906 - RNA, 19 nt, Artificial Sequence
  Description of Artificial Sequence: Synthetic oligonucleotide
  Sense strand starting at position 3070 of SEQ ID NO: 915798
uuuccagacuccguacaaa

SEQ ID NO: 1106907 - RNA, 19 nt, Artificial Sequence
  Description of Artificial Sequence: Synthetic oligonucleotide
  Antisense strand to SEQ ID NO: 1106906
uuuguacggagucuggaaa

SEQ ID NO: 1106908 - RNA, 19 nt, Artificial Sequence
  Description of Artificial Sequence: Synthetic oligonucleotide
  Sense strand starting at position 3073 of SEQ ID NO: 915798
ccagacuccguacaaauga

SEQ ID NO: 1106909 - RNA, 19 nt, Artificial Sequence
  Description of Artificial Sequence: Synthetic oligonucleotide
  Antisense strand to SEQ ID NO: 1106908
ucauuuguacggagucugg

SEQ ID NO: 1106910 - RNA, 19 nt, Artificial Sequence
  Description of Artificial Sequence: Synthetic oligonucleotide
  Sense strand starting at position 3325 of SEQ ID NO: 915798
auaguaagcuguccauaua

SEQ ID NO: 1106911 - RNA, 19 nt, Artificial Sequence
  Description of Artificial Sequence: Synthetic oligonucleotide
  Antisense strand to SEQ ID NO: 1106910
uauauggacagcuuacuau

SEQ ID NO: 1106912 - RNA, 19 nt, Artificial Sequence
  Description of Artificial Sequence: Synthetic oligonucleotide
  Sense strand starting at position 3328 of SEQ ID NO: 915798
guaagcuguccauauauuc

SEQ ID NO: 1106913 - RNA, 19 nt, Artificial Sequence
  Description of Artificial Sequence: Synthetic oligonucleotide
  Antisense strand to SEQ ID NO: 1106912
gaauauauggacagcuuac

SEQ ID NO: 1106914 - RNA, 19 nt, Artificial Sequence
  Description of Artificial Sequence: Synthetic oligonucleotide
  Sense strand starting at position 3429 of SEQ ID NO: 915798
ggguacagucgcgcuugaa

SEQ ID NO: 1106915 - RNA, 19 nt, Artificial Sequence
  Description of Artificial Sequence: Synthetic oligonucleotide
  Antisense strand to SEQ ID NO: 1106914
uucaagcgcgacuguaccc

SEQ ID NO: 1106916 - RNA, 19 nt, Artificial Sequence
  Description of Artificial Sequence: Synthetic oligonucleotide
  Sense strand starting at position 3430 of SEQ ID NO: 915798
gguacagucgcgcuugaag

SEQ ID NO: 1106917 - RNA, 19 nt, Artificial Sequence
  Description of Artificial Sequence: Synthetic oligonucleotide
  Antisense strand to SEQ ID NO: 1106916
cuucaagcgcgacuguacc

SEQ ID NO: 1106918 - RNA, 19 nt, Artificial Sequence
  Description of Artificial Sequence: Synthetic oligonucleotide
  Sense strand starting at position 3599 of SEQ ID NO: 915798
uaaguucuagggugcacaa

SEQ ID NO: 1106919 - RNA, 19 nt, Artificial Sequence
  Description of Artificial Sequence: Synthetic oligonucleotide
  Antisense strand to SEQ ID NO: 1106918
uugugcacccuagaacuua

SEQ ID NO: 1106920 - RNA, 19 nt, Artificial Sequence
  Description of Artificial Sequence: Synthetic oligonucleotide
  Sense strand starting at position 3905 of SEQ ID NO: 915798
uuaaacuguuaggcagaau

SEQ ID NO: 1106921 - RNA, 19 nt, Artificial Sequence
  Description of Artificial Sequence: Synthetic oligonucleotide
  Antisense strand to SEQ ID NO: 1106920
auucugccuaacaguuuaa

SEQ ID NO: 1106922 - RNA, 19 nt, Artificial Sequence
  Description of Artificial Sequence: Synthetic oligonucleotide
  Sense strand starting at position 3908 of SEQ ID NO: 915798
aacuguuaggcagaauagu

SEQ ID NO: 1106923 - RNA, 19 nt, Artificial Sequence
  Description of Artificial Sequence: Synthetic oligonucleotide
  Antisense strand to SEQ ID NO: 1106922
acuauucugccuaacaguu

SEQ ID NO: 1106924 - RNA, 19 nt, Artificial Sequence
  Description of Artificial Sequence: Synthetic oligonucleotide
  Sense strand starting at position 3917 of SEQ ID NO: 915798
gcagaauaguguuuaaaua

SEQ ID NO: 1106925 - RNA, 19 nt, Artificial Sequence
  Description of Artificial Sequence: Synthetic oligonucleotide
  Antisense strand to SEQ ID NO: 1106924
uauuuaaacacuauucugc

SEQ ID NO: 1106926 - RNA, 19 nt, Artificial Sequence
  Description of Artificial Sequence: Synthetic oligonucleotide
  Sense strand starting at position 82 of SEQ ID NO: 915799
gccucaaaguuauuguaug

SEQ ID NO: 1106927 - RNA, 19 nt, Artificial Sequence
  Description of Artificial Sequence: Synthetic oligonucleotide
  Antisense strand to SEQ ID NO: 1106926
cauacaauaacuuugaggc

SEQ ID NO: 1106928 - RNA, 19 nt, Artificial Sequence
  Description of Artificial Sequence: Synthetic oligonucleotide
  Sense strand starting at position 83 of SEQ ID NO: 915799
ccucaaaguuauuguaugu

SEQ ID NO: 1106929 - RNA, 19 nt, Artificial Sequence
  Description of Artificial Sequence: Synthetic oligonucleotide
  Antisense strand to SEQ ID NO: 1106928
acauacaauaacuuugagg

SEQ ID NO: 1106930 - RNA, 19 nt, Artificial Sequence
  Description of Artificial Sequence: Synthetic oligonucleotide
  Sense strand starting at position 110 of SEQ ID NO: 915799
aaaucugaacuguguguau

SEQ ID NO: 1106931 - RNA, 19 nt, Artificial Sequence
  Description of Artificial Sequence: Synthetic oligonucleotide
  Antisense strand to SEQ ID NO: 1106930
auacacacaguucagauuu

SEQ ID NO: 1106932 - RNA, 19 nt, Artificial Sequence
  Description of Artificial Sequence: Synthetic oligonucleotide
  Sense strand starting at position 112 of SEQ ID NO: 915799
aucugaacuguguguaugu

SEQ ID NO: 1106933 - RNA, 19 nt, Artificial Sequence
  Description of Artificial Sequence: Synthetic oligonucleotide
  Antisense strand to SEQ ID NO: 1106932
acauacacacaguucagau

SEQ ID NO: 1106934 - RNA, 19 nt, Artificial Sequence
  Description of Artificial Sequence: Synthetic oligonucleotide
  Sense strand starting at position 113 of SEQ ID NO: 915799
ucugaacuguguguaugua

SEQ ID NO: 1106935 - RNA, 19 nt, Artificial Sequence
  Description of Artificial Sequence: Synthetic oligonucleotide
  Antisense strand to SEQ ID NO: 1106934
uacauacacacaguucaga

SEQ ID NO: 1106936 - RNA, 19 nt, Artificial Sequence
  Description of Artificial Sequence: Synthetic oligonucleotide
  Sense strand starting at position 554 of SEQ ID NO: 915799
cgaagaaggaugggucauu

SEQ ID NO: 1106937 - RNA, 19 nt, Artificial Sequence
  Description of Artificial Sequence: Synthetic oligonucleotide
  Antisense strand to SEQ ID NO: 1106936
aaugacccauccuucuucg

SEQ ID NO: 1106938 - RNA, 19 nt, Artificial Sequence
  Description of Artificial Sequence: Synthetic oligonucleotide
  Sense strand starting at position 559 of SEQ ID NO: 915799
aaggaugggucauuaaggu

SEQ ID NO: 1106939 - RNA, 19 nt, Artificial Sequence
  Description of Artificial Sequence: Synthetic oligonucleotide
  Antisense strand to SEQ ID NO: 1106938
accuuaaugacccauccuu

SEQ ID NO: 1106940 - RNA, 19 nt, Artificial Sequence
  Description of Artificial Sequence: Synthetic oligonucleotide
  Sense strand starting at position 568 of SEQ ID NO: 915799
ucauuaagguauggagaga

SEQ ID NO: 1106941 - RNA, 19 nt, Artificial Sequence
  Description of Artificial Sequence: Synthetic oligonucleotide
  Antisense strand to SEQ ID NO: 1106940
ucucuccauaccuuaauga

SEQ ID NO: 1106942 - RNA, 19 nt, Artificial Sequence
  Description of Artificial Sequence: Synthetic oligonucleotide
  Sense strand starting at position 641 of SEQ ID NO: 915799
gugugaacuccacgugugu

SEQ ID NO: 1106943 - RNA, 19 nt, Artificial Sequence
  Description of Artificial Sequence: Synthetic oligonucleotide
  Antisense strand to SEQ ID NO: 1106942
acacacguggaguucacac

SEQ ID NO: 1106944 - RNA, 19 nt, Artificial Sequence
  Description of Artificial Sequence: Synthetic oligonucleotide
  Sense strand starting at position 728 of SEQ ID NO: 915799
aggcgcuggaagugauauu

SEQ ID NO: 1106945 - RNA, 19 nt, Artificial Sequence
  Description of Artificial Sequence: Synthetic oligonucleotide
  Antisense strand to SEQ ID NO: 1106944
aauaucacuuccagcgccu

SEQ ID NO: 1106946 - RNA, 19 nt, Artificial Sequence
  Description of Artificial Sequence: Synthetic oligonucleotide
  Sense strand starting at position 735 of SEQ ID NO: 915799
ggaagugauauuggcacca

SEQ ID NO: 1106947 - RNA, 19 nt, Artificial Sequence
  Description of Artificial Sequence: Synthetic oligonucleotide
  Antisense strand to SEQ ID NO: 1106946
uggugccaauaucacuucc

SEQ ID NO: 1106948 - RNA, 19 nt, Artificial Sequence
  Description of Artificial Sequence: Synthetic oligonucleotide
  Sense strand starting at position 754 of SEQ ID NO: 915799
gcaccuguggugugaguua

SEQ ID NO: 1106949 - RNA, 19 nt, Artificial Sequence
  Description of Artificial Sequence: Synthetic oligonucleotide
  Antisense strand to SEQ ID NO: 1106948
uaacucacaccacaggugc

SEQ ID NO: 1106950 - RNA, 19 nt, Artificial Sequence
  Description of Artificial Sequence: Synthetic oligonucleotide
  Sense strand starting at position 820 of SEQ ID NO: 915799
agagccuguucgggaucaa

SEQ ID NO: 1106951 - RNA, 19 nt, Artificial Sequence
  Description of Artificial Sequence: Synthetic oligonucleotide
  Antisense strand to SEQ ID NO: 1106950
uugaucccgaacaggcucu

SEQ ID NO: 1106952 - RNA, 19 nt, Artificial Sequence
  Description of Artificial Sequence: Synthetic oligonucleotide
  Sense strand starting at position 821 of SEQ ID NO: 915799
gagccuguucgggaucaau

SEQ ID NO: 1106953 - RNA, 19 nt, Artificial Sequence
  Description of Artificial Sequence: Synthetic oligonucleotide
  Antisense strand to SEQ ID NO: 1106952
auugaucccgaacaggcuc

SEQ ID NO: 1106954 - RNA, 19 nt, Artificial Sequence
  Description of Artificial Sequence: Synthetic oligonucleotide
  Sense strand starting at position 824 of SEQ ID NO: 915799
ccuguucgggaucaauaag

SEQ ID NO: 1106955 - RNA, 19 nt, Artificial Sequence
  Description of Artificial Sequence: Synthetic oligonucleotide
  Antisense strand to SEQ ID NO: 1106954
cuuauugaucccgaacagg

SEQ ID NO: 1106956 - RNA, 19 nt, Artificial Sequence
  Description of Artificial Sequence: Synthetic oligonucleotide
  Sense strand starting at position 865 of SEQ ID NO: 915799
cgcuuacaggaguguuaga

SEQ ID NO: 1106957 - RNA, 19 nt, Artificial Sequence
  Description of Artificial Sequence: Synthetic oligonucleotide
  Antisense strand to SEQ ID NO: 1106956
ucuaacacuccuguaagcg

SEQ ID NO: 1106958 - RNA, 19 nt, Artificial Sequence
  Description of Artificial Sequence: Synthetic oligonucleotide
  Sense strand starting at position 919 of SEQ ID NO: 915799
ucuuacagcgaccaauauu

SEQ ID NO: 1106959 - RNA, 19 nt, Artificial Sequence
  Description of Artificial Sequence: Synthetic oligonucleotide
  Antisense strand to SEQ ID NO: 1106958
aauauuggucgcuguaaga

SEQ ID NO: 1106960 - RNA, 19 nt, Artificial Sequence
  Description of Artificial Sequence: Synthetic oligonucleotide
  Sense strand starting at position 927 of SEQ ID NO: 915799
cgaccaauauugcagugaa

SEQ ID NO: 1106961 - RNA, 19 nt, Artificial Sequence
  Description of Artificial Sequence: Synthetic oligonucleotide
  Antisense strand to SEQ ID NO: 1106960
uucacugcaauauuggucg

SEQ ID NO: 1106962 - RNA, 19 nt, Artificial Sequence
  Description of Artificial Sequence: Synthetic oligonucleotide
  Sense strand starting at position 1162 of SEQ ID NO: 915799
gcgugcuuucccgcagaca

SEQ ID NO: 1106963 - RNA, 19 nt, Artificial Sequence
  Description of Artificial Sequence: Synthetic oligonucleotide
  Antisense strand to SEQ ID NO: 1106962
ugucugcgggaaagcacgc

SEQ ID NO: 1106964 - RNA, 19 nt, Artificial Sequence
  Description of Artificial Sequence: Synthetic oligonucleotide
  Sense strand starting at position 1163 of SEQ ID NO: 915799
cgugcuuucccgcagacau

SEQ ID NO: 1106965 - RNA, 19 nt, Artificial Sequence
  Description of Artificial Sequence: Synthetic oligonucleotide
  Antisense strand to SEQ ID NO: 1106964
augucugcgggaaagcacg

SEQ ID NO: 1106966 - RNA, 19 nt, Artificial Sequence
  Description of Artificial Sequence: Synthetic oligonucleotide
  Sense strand starting at position 1488 of SEQ ID NO: 915799
gagcuagacuccugaaaga

SEQ ID NO: 1106967 - RNA, 19 nt, Artificial Sequence
  Description of Artificial Sequence: Synthetic oligonucleotide
  Antisense strand to SEQ ID NO: 1106966
ucuuucaggagucuagcuc

SEQ ID NO: 1106968 - RNA, 19 nt, Artificial Sequence
  Description of Artificial Sequence: Synthetic oligonucleotide
  Sense strand starting at position 1645 of SEQ ID NO: 915799
cagcgaguugugggaggaa

SEQ ID NO: 1106969 - RNA, 19 nt, Artificial Sequence
  Description of Artificial Sequence: Synthetic oligonucleotide
  Antisense strand to SEQ ID NO: 1106968
uuccucccacaacucgcug

SEQ ID NO: 1106970 - RNA, 19 nt, Artificial Sequence
  Description of Artificial Sequence: Synthetic oligonucleotide
  Sense strand starting at position 1646 of SEQ ID NO: 915799
agcgaguugugggaggaaa

SEQ ID NO: 1106971 - RNA, 19 nt, Artificial Sequence
  Description of Artificial Sequence: Synthetic oligonucleotide
  Antisense strand to SEQ ID NO: 1106970
uuuccucccacaacucgcu

SEQ ID NO: 1106972 - RNA, 19 nt, Artificial Sequence
  Description of Artificial Sequence: Synthetic oligonucleotide
  Sense strand starting at position 2206 of SEQ ID NO: 915799
gucagcuccuccgauucua

SEQ ID NO: 1106973 - RNA, 19 nt, Artificial Sequence
  Description of Artificial Sequence: Synthetic oligonucleotide
  Antisense strand to SEQ ID NO: 1106972
uagaaucggaggagcugac

SEQ ID NO: 1106974 - RNA, 19 nt, Artificial Sequence
  Description of Artificial Sequence: Synthetic oligonucleotide
  Sense strand starting at position 3403 of SEQ ID NO: 915799
gugcgugucaucucgccuu

SEQ ID NO: 1106975 - RNA, 19 nt, Artificial Sequence
  Description of Artificial Sequence: Synthetic oligonucleotide
  Antisense strand to SEQ ID NO: 1106974
aaggcgagaugacacgcac

SEQ ID NO: 1106976 - RNA, 19 nt, Artificial Sequence
  Description of Artificial Sequence: Synthetic oligonucleotide
  Sense strand starting at position 3405 of SEQ ID NO: 915799
gcgugucaucucgccuuua

SEQ ID NO: 1106977 - RNA, 19 nt, Artificial Sequence
  Description of Artificial Sequence: Synthetic oligonucleotide
  Antisense strand to SEQ ID NO: 1106976
uaaaggcgagaugacacgc

SEQ ID NO: 1106978 - RNA, 19 nt, Artificial Sequence
  Description of Artificial Sequence: Synthetic oligonucleotide
  Sense strand starting at position 3406 of SEQ ID NO: 915799
cgugucaucucgccuuuaa

SEQ ID NO: 1106979 - RNA, 19 nt, Artificial Sequence
  Description of Artificial Sequence: Synthetic oligonucleotide
  Antisense strand to SEQ ID NO: 1106978
uuaaaggcgagaugacacg

SEQ ID NO: 1106980 - RNA, 19 nt, Artificial Sequence
  Description of Artificial Sequence: Synthetic oligonucleotide
  Sense strand starting at position 3476 of SEQ ID NO: 915799
gccgcuuuccuagcccaaa

SEQ ID NO: 1106981 - RNA, 19 nt, Artificial Sequence
  Description of Artificial Sequence: Synthetic oligonucleotide
  Antisense strand to SEQ ID NO: 1106980
uuugggcuaggaaagcggc

SEQ ID NO: 1106982 - RNA, 19 nt, Artificial Sequence
  Description of Artificial Sequence: Synthetic oligonucleotide
  Sense strand starting at position 3552 of SEQ ID NO: 915799
caauaagucucccgaggca

SEQ ID NO: 1106983 - RNA, 19 nt, Artificial Sequence
  Description of Artificial Sequence: Synthetic oligonucleotide
  Antisense strand to SEQ ID NO: 1106982
ugccucgggagacuuauug

SEQ ID NO: 1106984 - RNA, 19 nt, Artificial Sequence
  Description of Artificial Sequence: Synthetic oligonucleotide
  Sense strand starting at position 3614 of SEQ ID NO: 915799
ggaucuauugucgaagcga

SEQ ID NO: 1106985 - RNA, 19 nt, Artificial Sequence
  Description of Artificial Sequence: Synthetic oligonucleotide
  Antisense strand to SEQ ID NO: 1106984
ucgcuucgacaauagaucc

SEQ ID NO: 1106986 - RNA, 19 nt, Artificial Sequence
  Description of Artificial Sequence: Synthetic oligonucleotide
  Sense strand starting at position 3670 of SEQ ID NO: 915799
aggucgaguccugggagaa

SEQ ID NO: 1106987 - RNA, 19 nt, Artificial Sequence
  Description of Artificial Sequence: Synthetic oligonucleotide
  Antisense strand to SEQ ID NO: 1106986
uucucccaggacucgaccu

SEQ ID NO: 1106988 - RNA, 19 nt, Artificial Sequence
  Description of Artificial Sequence: Synthetic oligonucleotide
  Sense strand starting at position 3671 of SEQ ID NO: 915799
ggucgaguccugggagaaa

SEQ ID NO: 1106989 - RNA, 19 nt, Artificial Sequence
  Description of Artificial Sequence: Synthetic oligonucleotide
  Antisense strand to SEQ ID NO: 1106988
uuucucccaggacucgacc

SEQ ID NO: 1106990 - RNA, 19 nt, Artificial Sequence
  Description of Artificial Sequence: Synthetic oligonucleotide
  Sense strand starting at position 3674 of SEQ ID NO: 915799
cgaguccugggagaaacuu

SEQ ID NO: 1106991 - RNA, 19 nt, Artificial Sequence
  Description of Artificial Sequence: Synthetic oligonucleotide
  Antisense strand to SEQ ID NO: 1106990
aaguuucucccaggacucg

SEQ ID NO: 1106992 - RNA, 19 nt, Artificial Sequence
  Description of Artificial Sequence: Synthetic oligonucleotide
  Sense strand starting at position 3752 of SEQ ID NO: 915799
cccagcaaucuggguggaa

SEQ ID NO: 1106993 - RNA, 19 nt, Artificial Sequence
  Description of Artificial Sequence: Synthetic oligonucleotide
  Antisense strand to SEQ ID NO: 1106992
uuccacccagauugcuggg

SEQ ID NO: 1106994 - RNA, 19 nt, Artificial Sequence
  Description of Artificial Sequence: Synthetic oligonucleotide
  Sense strand starting at position 3753 of SEQ ID NO: 915799
ccagcaaucuggguggaaa

SEQ ID NO: 1106995 - RNA, 19 nt, Artificial Sequence
  Description of Artificial Sequence: Synthetic oligonucleotide
  Antisense strand to SEQ ID NO: 1106994
uuuccacccagauugcugg

SEQ ID NO: 1106996 - RNA, 19 nt, Artificial Sequence
  Description of Artificial Sequence: Synthetic oligonucleotide
  Sense strand starting at position 3754 of SEQ ID NO: 915799
cagcaaucuggguggaaac

SEQ ID NO: 1106997 - RNA, 19 nt, Artificial Sequence
  Description of Artificial Sequence: Synthetic oligonucleotide
  Antisense strand to SEQ ID NO: 1106996
guuuccacccagauugcug

SEQ ID NO: 1106998 - RNA, 19 nt, Artificial Sequence
  Description of Artificial Sequence: Synthetic oligonucleotide
  Sense strand starting at position 3766 of SEQ ID NO: 915799
uggaaacaguucccgagaa

SEQ ID NO: 1106999 - RNA, 19 nt, Artificial Sequence
  Description of Artificial Sequence: Synthetic oligonucleotide
  Antisense strand to SEQ ID NO: 1106998
uucucgggaacuguuucca

SEQ ID NO: 1107000 - RNA, 19 nt, Artificial Sequence
  Description of Artificial Sequence: Synthetic oligonucleotide
  Sense strand starting at position 3910 of SEQ ID NO: 915799
auguacucuuccucugacu

SEQ ID NO: 1107001 - RNA, 19 nt, Artificial Sequence
  Description of Artificial Sequence: Synthetic oligonucleotide
  Antisense strand to SEQ ID NO: 1107000
agucagaggaagaguacau

SEQ ID NO: 1107002 - RNA, 19 nt, Artificial Sequence
  Description of Artificial Sequence: Synthetic oligonucleotide
  Sense strand starting at position 8 of SEQ ID NO: 915800
cgcuuacaggaguguuaga

SEQ ID NO: 1107003 - RNA, 19 nt, Artificial Sequence
  Description of Artificial Sequence: Synthetic oligonucleotide
  Antisense strand to SEQ ID NO: 1107002
ucuaacacuccuguaagcg

SEQ ID NO: 1107004 - RNA, 19 nt, Artificial Sequence
  Description of Artificial Sequence: Synthetic oligonucleotide
  Sense strand starting at position 62 of SEQ ID NO: 915800
ucuuacagcgaccaauauu

SEQ ID NO: 1107005 - RNA, 19 nt, Artificial Sequence
  Description of Artificial Sequence: Synthetic oligonucleotide
  Antisense strand to SEQ ID NO: 1107004
aauauuggucgcuguaaga

SEQ ID NO: 1107006 - RNA, 19 nt, Artificial Sequence
  Description of Artificial Sequence: Synthetic oligonucleotide
  Sense strand starting at position 70 of SEQ ID NO: 915800
cgaccaauauugcagugaa

SEQ ID NO: 1107007 - RNA, 19 nt, Artificial Sequence
  Description of Artificial Sequence: Synthetic oligonucleotide
  Antisense strand to SEQ ID NO: 1107006
uucacugcaauauuggucg

SEQ ID NO: 1107008 - RNA, 19 nt, Artificial Sequence
  Description of Artificial Sequence: Synthetic oligonucleotide
  Sense strand starting at position 305 of SEQ ID NO: 915800
gcgugcuuucccgcagaca

SEQ ID NO: 1107009 - RNA, 19 nt, Artificial Sequence
  Description of Artificial Sequence: Synthetic oligonucleotide
  Antisense strand to SEQ ID NO: 1107008
ugucugcgggaaagcacgc

SEQ ID NO: 1107010 - RNA, 19 nt, Artificial Sequence
  Description of Artificial Sequence: Synthetic oligonucleotide
  Sense strand starting at position 306 of SEQ ID NO: 915800
cgugcuuucccgcagacau

SEQ ID NO: 1107011 - RNA, 19 nt, Artificial Sequence
  Description of Artificial Sequence: Synthetic oligonucleotide
  Antisense strand to SEQ ID NO: 1107010
augucugcgggaaagcacg

SEQ ID NO: 1107012 - RNA, 19 nt, Artificial Sequence
  Description of Artificial Sequence: Synthetic oligonucleotide
  Sense strand starting at position 631 of SEQ ID NO: 915800
gagcuagacuccugaaaga

SEQ ID NO: 1107013 - RNA, 19 nt, Artificial Sequence
  Description of Artificial Sequence: Synthetic oligonucleotide
  Antisense strand to SEQ ID NO: 1107012
ucuuucaggagucuagcuc

SEQ ID NO: 1107014 - RNA, 19 nt, Artificial Sequence
  Description of Artificial Sequence: Synthetic oligonucleotide
  Sense strand starting at position 788 of SEQ ID NO: 915800
cagcgaguugugggaggaa

SEQ ID NO: 1107015 - RNA, 19 nt, Artificial Sequence
  Description of Artificial Sequence: Synthetic oligonucleotide
  Antisense strand to SEQ ID NO: 1107014
uuccucccacaacucgcug

SEQ ID NO: 1107016 - RNA, 19 nt, Artificial Sequence
  Description of Artificial Sequence: Synthetic oligonucleotide
  Sense strand starting at position 789 of SEQ ID NO: 915800
agcgaguugugggaggaaa

SEQ ID NO: 1107017 - RNA, 19 nt, Artificial Sequence
  Description of Artificial Sequence: Synthetic oligonucleotide
  Antisense strand to SEQ ID NO: 1107016
uuuccucccacaacucgcu

SEQ ID NO: 1107018 - RNA, 19 nt, Artificial Sequence
  Description of Artificial Sequence: Synthetic oligonucleotide
  Sense strand starting at position 2546 of SEQ ID NO: 915800
gugcgugucaucucgccuu

SEQ ID NO: 1107019 - RNA, 19 nt, Artificial Sequence
  Description of Artificial Sequence: Synthetic oligonucleotide
  Antisense strand to SEQ ID NO: 1107018
aaggcgagaugacacgcac

SEQ ID NO: 1107020 - RNA, 19 nt, Artificial Sequence
  Description of Artificial Sequence: Synthetic oligonucleotide
  Sense strand starting at position 2548 of SEQ ID NO: 915800
gcgugucaucucgccuuua

SEQ ID NO: 1107021 - RNA, 19 nt, Artificial Sequence
  Description of Artificial Sequence: Synthetic oligonucleotide
  Antisense strand to SEQ ID NO: 1107020
uaaaggcgagaugacacgc

SEQ ID NO: 1107022 - RNA, 19 nt, Artificial Sequence
  Description of Artificial Sequence: Synthetic oligonucleotide
  Sense strand starting at position 2549 of SEQ ID NO: 915800
cgugucaucucgccuuuaa

SEQ ID NO: 1107023 - RNA, 19 nt, Artificial Sequence
  Description of Artificial Sequence: Synthetic oligonucleotide
  Antisense strand to SEQ ID NO: 1107022
uuaaaggcgagaugacacg

SEQ ID NO: 1107024 - RNA, 19 nt, Artificial Sequence
  Description of Artificial Sequence: Synthetic oligonucleotide
  Sense strand starting at position 2619 of SEQ ID NO: 915800
gccgcuuuccuagcccaaa

SEQ ID NO: 1107025 - RNA, 19 nt, Artificial Sequence
  Description of Artificial Sequence: Synthetic oligonucleotide
  Antisense strand to SEQ ID NO: 1107024
uuugggcuaggaaagcggc

SEQ ID NO: 1107026 - RNA, 19 nt, Artificial Sequence
  Description of Artificial Sequence: Synthetic oligonucleotide
  Sense strand starting at position 2695 of SEQ ID NO: 915800
caauaagucucccgaggca

SEQ ID NO: 1107027 - RNA, 19 nt, Artificial Sequence
  Description of Artificial Sequence: Synthetic oligonucleotide
  Antisense strand to SEQ ID NO: 1107026
ugccucgggagacuuauug

SEQ ID NO: 1107028 - RNA, 19 nt, Artificial Sequence
  Description of Artificial Sequence: Synthetic oligonucleotide
  Sense strand starting at position 2757 of SEQ ID NO: 915800
ggaucuauugucgaagcga

SEQ ID NO: 1107029 - RNA, 19 nt, Artificial Sequence
  Description of Artificial Sequence: Synthetic oligonucleotide
  Antisense strand to SEQ ID NO: 1107028
ucgcuucgacaauagaucc

SEQ ID NO: 1107030 - RNA, 19 nt, Artificial Sequence
  Description of Artificial Sequence: Synthetic oligonucleotide
  Sense strand starting at position 2813 of SEQ ID NO: 915800
aggucgaguccugggagaa

SEQ ID NO: 1107031 - RNA, 19 nt, Artificial Sequence
  Description of Artificial Sequence: Synthetic oligonucleotide
  Antisense strand to SEQ ID NO: 1107030
uucucccaggacucgaccu

SEQ ID NO: 1107032 - RNA, 19 nt, Artificial Sequence
  Description of Artificial Sequence: Synthetic oligonucleotide
  Sense strand starting at position 2814 of SEQ ID NO: 915800
ggucgaguccugggagaaa

SEQ ID NO: 1107033 - RNA, 19 nt, Artificial Sequence
  Description of Artificial Sequence: Synthetic oligonucleotide
  Antisense strand to SEQ ID NO: 1107032
uuucucccaggacucgacc

SEQ ID NO: 1107034 - RNA, 19 nt, Artificial Sequence
  Description of Artificial Sequence: Synthetic oligonucleotide
  Sense strand starting at position 2817 of SEQ ID NO: 915800
cgaguccugggagaaacuu

SEQ ID NO: 1107035 - RNA, 19 nt, Artificial Sequence
  Description of Artificial Sequence: Synthetic oligonucleotide
  Antisense strand to SEQ ID NO: 1107034
aaguuucucccaggacucg

SEQ ID NO: 1107036 - RNA, 19 nt, Artificial Sequence
  Description of Artificial Sequence: Synthetic oligonucleotide
  Sense strand starting at position 2895 of SEQ ID NO: 915800
cccagcaaucuggguggaa

SEQ ID NO: 1107037 - RNA, 19 nt, Artificial Sequence
  Description of Artificial Sequence: Synthetic oligonucleotide
  Antisense strand to SEQ ID NO: 1107036
uuccacccagauugcuggg

SEQ ID NO: 1107038 - RNA, 19 nt, Artificial Sequence
  Description of Artificial Sequence: Synthetic oligonucleotide
  Sense strand starting at position 2896 of SEQ ID NO: 915800
ccagcaaucuggguggaaa

SEQ ID NO: 1107039 - RNA, 19 nt, Artificial Sequence
  Description of Artificial Sequence: Synthetic oligonucleotide
  Antisense strand to SEQ ID NO: 1107038
uuuccacccagauugcugg

SEQ ID NO: 1107040 - RNA, 19 nt, Artificial Sequence
  Description of Artificial Sequence: Synthetic oligonucleotide
  Sense strand starting at position 2897 of SEQ ID NO: 915800
cagcaaucuggguggaaac

SEQ ID NO: 1107041 - RNA, 19 nt, Artificial Sequence
  Description of Artificial Sequence: Synthetic oligonucleotide
  Antisense strand to SEQ ID NO: 1107040
guuuccacccagauugcug

SEQ ID NO: 1107042 - RNA, 19 nt, Artificial Sequence
  Description of Artificial Sequence: Synthetic oligonucleotide
  Sense strand starting at position 2909 of SEQ ID NO: 915800
uggaaacaguucccgagaa

SEQ ID NO: 1107043 - RNA, 19 nt, Artificial Sequence
  Description of Artificial Sequence: Synthetic oligonucleotide
  Antisense strand to SEQ ID NO: 1107042
uucucgggaacuguuucca

SEQ ID NO: 1107044 - RNA, 19 nt, Artificial Sequence
  Description of Artificial Sequence: Synthetic oligonucleotide
  Sense strand starting at position 3053 of SEQ ID NO: 915800
auguacucuuccucugacu

SEQ ID NO: 1107045 - RNA, 19 nt, Artificial Sequence
  Description of Artificial Sequence: Synthetic oligonucleotide
  Antisense strand to SEQ ID NO: 1107044
agucagaggaagaguacau

SEQ ID NO: 1107046 - RNA, 19 nt, Artificial Sequence
  Description of Artificial Sequence: Synthetic oligonucleotide
  Sense strand starting at position 3294 of SEQ ID NO: 915800
cugcauguucuguccguga

SEQ ID NO: 1107047 - RNA, 19 nt, Artificial Sequence
  Description of Artificial Sequence: Synthetic oligonucleotide
  Antisense strand to SEQ ID NO: 1107046
ucacggacagaacaugcag

SEQ ID NO: 1107048 - RNA, 19 nt, Artificial Sequence
  Description of Artificial Sequence: Synthetic oligonucleotide
  Sense strand starting at position 3296 of SEQ ID NO: 915800
gcauguucuguccgugacu

SEQ ID NO: 1107049 - RNA, 19 nt, Artificial Sequence
  Description of Artificial Sequence: Synthetic oligonucleotide
  Antisense strand to SEQ ID NO: 1107048
agucacggacagaacaugc

SEQ ID NO: 1107050 - RNA, 19 nt, Artificial Sequence
  Description of Artificial Sequence: Synthetic oligonucleotide
  Sense strand starting at position 3398 of SEQ ID NO: 915800
ccaugaacuguagggucau

SEQ ID NO: 1107051 - RNA, 19 nt, Artificial Sequence
  Description of Artificial Sequence: Synthetic oligonucleotide
  Antisense strand to SEQ ID NO: 1107050
augacccuacaguucaugg

SEQ ID NO: 1107052 - RNA, 19 nt, Artificial Sequence
  Description of Artificial Sequence: Synthetic oligonucleotide
  Sense strand starting at position 3414 of SEQ ID NO: 915800
cauggaagguggcagaaau

SEQ ID NO: 1107053 - RNA, 19 nt, Artificial Sequence
  Description of Artificial Sequence: Synthetic oligonucleotide
  Antisense strand to SEQ ID NO: 1107052
auuucugccaccuuccaug

SEQ ID NO: 1107054 - RNA, 19 nt, Artificial Sequence
  Description of Artificial Sequence: Synthetic oligonucleotide
  Sense strand starting at position 3422 of SEQ ID NO: 915800
guggcagaaaucuguaucu

SEQ ID NO: 1107055 - RNA, 19 nt, Artificial Sequence
  Description of Artificial Sequence: Synthetic oligonucleotide
  Antisense strand to SEQ ID NO: 1107054
agauacagauuucugccac

SEQ ID NO: 1107056 - RNA, 19 nt, Artificial Sequence
  Description of Artificial Sequence: Synthetic oligonucleotide
  Sense strand starting at position 3424 of SEQ ID NO: 915800
ggcagaaaucuguaucugu

SEQ ID NO: 1107057 - RNA, 19 nt, Artificial Sequence
  Description of Artificial Sequence: Synthetic oligonucleotide
  Antisense strand to SEQ ID NO: 1107056
acagauacagauuucugcc

SEQ ID NO: 1107058 - RNA, 19 nt, Artificial Sequence
  Description of Artificial Sequence: Synthetic oligonucleotide
  Sense strand starting at position 3431 of SEQ ID NO: 915800
aucuguaucuguucgcuga

SEQ ID NO: 1107059 - RNA, 19 nt, Artificial Sequence
  Description of Artificial Sequence: Synthetic oligonucleotide
  Antisense strand to SEQ ID NO: 1107058
ucagcgaacagauacagau

SEQ ID NO: 1107060 - RNA, 19 nt, Artificial Sequence
  Description of Artificial Sequence: Synthetic oligonucleotide
  Sense strand starting at position 3432 of SEQ ID NO: 915800
ucuguaucuguucgcugaa

SEQ ID NO: 1107061 - RNA, 19 nt, Artificial Sequence
  Description of Artificial Sequence: Synthetic oligonucleotide
  Antisense strand to SEQ ID NO: 1107060
uucagcgaacagauacaga

SEQ ID NO: 1107062 - RNA, 19 nt, Artificial Sequence
  Description of Artificial Sequence: Synthetic oligonucleotide
  Sense strand starting at position 3456 of SEQ ID NO: 915800
ggcgguagaguuuacacau

SEQ ID NO: 1107063 - RNA, 19 nt, Artificial Sequence
  Description of Artificial Sequence: Synthetic oligonucleotide
  Antisense strand to SEQ ID NO: 1107062
auguguaaacucuaccgcc

SEQ ID NO: 1107064 - RNA, 19 nt, Artificial Sequence
  Description of Artificial Sequence: Synthetic oligonucleotide
  Sense strand starting at position 3463 of SEQ ID NO: 915800
gaguuuacacaucggaacu

SEQ ID NO: 1107065 - RNA, 19 nt, Artificial Sequence
  Description of Artificial Sequence: Synthetic oligonucleotide
  Antisense strand to SEQ ID NO: 1107064
aguuccgauguguaaacuc

SEQ ID NO: 1107066 - RNA, 19 nt, Artificial Sequence
  Description of Artificial Sequence: Synthetic oligonucleotide
  Sense strand starting at position 3644 of SEQ ID NO: 915800
ucugauagcacgggauaca

SEQ ID NO: 1107067 - RNA, 19 nt, Artificial Sequence
  Description of Artificial Sequence: Synthetic oligonucleotide
  Antisense strand to SEQ ID NO: 1107066
uguaucccgugcuaucaga

SEQ ID NO: 1107068 - RNA, 19 nt, Artificial Sequence
  Description of Artificial Sequence: Synthetic oligonucleotide
  Sense strand starting at position 3771 of SEQ ID NO: 915800
gucuauacacccuguuaga

SEQ ID NO: 1107069 - RNA, 19 nt, Artificial Sequence
  Description of Artificial Sequence: Synthetic oligonucleotide
  Antisense strand to SEQ ID NO: 1107068
ucuaacaggguguauagac

SEQ ID NO: 1107070 - RNA, 19 nt, Artificial Sequence
  Description of Artificial Sequence: Synthetic oligonucleotide
  Sense strand starting at position 3802 of SEQ ID NO: 915800
aaagaaaguuaggaaagaa

SEQ ID NO: 1107071 - RNA, 19 nt, Artificial Sequence
  Description of Artificial Sequence: Synthetic oligonucleotide
  Antisense strand to SEQ ID NO: 1107070
uucuuuccuaacuuucuuu

SEQ ID NO: 1107072 - RNA, 19 nt, Artificial Sequence
  Description of Artificial Sequence: Synthetic oligonucleotide
  Sense strand starting at position 3837 of SEQ ID NO: 915800
gcaagaguggagggaugua

SEQ ID NO: 1107073 - RNA, 19 nt, Artificial Sequence
  Description of Artificial Sequence: Synthetic oligonucleotide
  Antisense strand to SEQ ID NO: 1107072
uacaucccuccacucuugc

SEQ ID NO: 1107074 - RNA, 19 nt, Artificial Sequence
  Description of Artificial Sequence: Synthetic oligonucleotide
  Sense strand starting at position 3919 of SEQ ID NO: 915800
uguugagcuucugccuaga

SEQ ID NO: 1107075 - RNA, 19 nt, Artificial Sequence
  Description of Artificial Sequence: Synthetic oligonucleotide
  Antisense strand to SEQ ID NO: 1107074
ucuaggcagaagcucaaca

SEQ ID NO: 1107076 - RNA, 19 nt, Artificial Sequence
  Description of Artificial Sequence: Synthetic oligonucleotide
  Sense strand starting at position 3921 of SEQ ID NO: 915800
uugagcuucugccuagaua

SEQ ID NO: 1107077 - RNA, 19 nt, Artificial Sequence
  Description of Artificial Sequence: Synthetic oligonucleotide
  Antisense strand to SEQ ID NO: 1107076
uaucuaggcagaagcucaa

SEQ ID NO: 1107078 - RNA, 19 nt, Artificial Sequence
  Description of Artificial Sequence: Synthetic oligonucleotide
  Sense strand starting at position 3922 of SEQ ID NO: 915800
ugagcuucugccuagauag

SEQ ID NO: 1107079 - RNA, 19 nt, Artificial Sequence
  Description of Artificial Sequence: Synthetic oligonucleotide
  Antisense strand to SEQ ID NO: 1107078
cuaucuaggcagaagcuca

SEQ ID NO: 1107080 - RNA, 19 nt, Artificial Sequence
  Description of Artificial Sequence: Synthetic oligonucleotide
  Sense strand starting at position 3933 of SEQ ID NO: 915800
cuagauagugccugcugga

SEQ ID NO: 1107081 - RNA, 19 nt, Artificial Sequence
  Description of Artificial Sequence: Synthetic oligonucleotide
  Antisense strand to SEQ ID NO: 1107080
uccagcaggcacuaucuag

SEQ ID NO: 1107082 - RNA, 19 nt, Artificial Sequence
  Description of Artificial Sequence: Synthetic oligonucleotide
  Sense strand starting at position 58 of SEQ ID NO: 915801
cauugugagccuugcggau

SEQ ID NO: 1107083 - RNA, 19 nt, Artificial Sequence
  Description of Artificial Sequence: Synthetic oligonucleotide
  Antisense strand to SEQ ID NO: 1107082
auccgcaaggcucacaaug

SEQ ID NO: 1107084 - RNA, 19 nt, Artificial Sequence
  Description of Artificial Sequence: Synthetic oligonucleotide
  Sense strand starting at position 173 of SEQ ID NO: 915801
uguguaagagcaugagaag

SEQ ID NO: 1107085 - RNA, 19 nt, Artificial Sequence
  Description of Artificial Sequence: Synthetic oligonucleotide
  Antisense strand to SEQ ID NO: 1107084
cuucucaugcucuuacaca

SEQ ID NO: 1107086 - RNA, 19 nt, Artificial Sequence
  Description of Artificial Sequence: Synthetic oligonucleotide
  Sense strand starting at position 213 of SEQ ID NO: 915801
gugggaacauccucaguaa

SEQ ID NO: 1107087 - RNA, 19 nt, Artificial Sequence
  Description of Artificial Sequence: Synthetic oligonucleotide
  Antisense strand to SEQ ID NO: 1107086
uuacugaggauguucccac

SEQ ID NO: 1107088 - RNA, 19 nt, Artificial Sequence
  Description of Artificial Sequence: Synthetic oligonucleotide
  Sense strand starting at position 252 of SEQ ID NO: 915801
gcugcuucguacucagaag

SEQ ID NO: 1107089 - RNA, 19 nt, Artificial Sequence
  Description of Artificial Sequence: Synthetic oligonucleotide
  Antisense strand to SEQ ID NO: 1107088
cuucugaguacgaagcagc

SEQ ID NO: 1107090 - RNA, 19 nt, Artificial Sequence
  Description of Artificial Sequence: Synthetic oligonucleotide
  Sense strand starting at position 253 of SEQ ID NO: 915801
cugcuucguacucagaaga

SEQ ID NO: 1107091 - RNA, 19 nt, Artificial Sequence
  Description of Artificial Sequence: Synthetic oligonucleotide
  Antisense strand to SEQ ID NO: 1107090
ucuucugaguacgaagcag

SEQ ID NO: 1107092 - RNA, 19 nt, Artificial Sequence
  Description of Artificial Sequence: Synthetic oligonucleotide
  Sense strand starting at position 318 of SEQ ID NO: 915801
gucaccaguccucgaugau

SEQ ID NO: 1107093 - RNA, 19 nt, Artificial Sequence
  Description of Artificial Sequence: Synthetic oligonucleotide
  Antisense strand to SEQ ID NO: 1107092
aucaucgaggacuggugac

SEQ ID NO: 1107094 - RNA, 19 nt, Artificial Sequence
  Description of Artificial Sequence: Synthetic oligonucleotide
  Sense strand starting at position 319 of SEQ ID NO: 915801
ucaccaguccucgaugaua

SEQ ID NO: 1107095 - RNA, 19 nt, Artificial Sequence
  Description of Artificial Sequence: Synthetic oligonucleotide
  Antisense strand to SEQ ID NO: 1107094
uaucaucgaggacugguga

SEQ ID NO: 1107096 - RNA, 19 nt, Artificial Sequence
  Description of Artificial Sequence: Synthetic oligonucleotide
  Sense strand starting at position 321 of SEQ ID NO: 915801
accaguccucgaugauacu

SEQ ID NO: 1107097 - RNA, 19 nt, Artificial Sequence
  Description of Artificial Sequence: Synthetic oligonucleotide
  Antisense strand to SEQ ID NO: 1107096
aguaucaucgaggacuggu

SEQ ID NO: 1107098 - RNA, 19 nt, Artificial Sequence
  Description of Artificial Sequence: Synthetic oligonucleotide
  Sense strand starting at position 488 of SEQ ID NO: 915801
ugggaaagcucucucagga

SEQ ID NO: 1107099 - RNA, 19 nt, Artificial Sequence
  Description of Artificial Sequence: Synthetic oligonucleotide
  Antisense strand to SEQ ID NO: 1107098
uccugagagagcuuuccca

SEQ ID NO: 1107100 - RNA, 19 nt, Artificial Sequence
  Description of Artificial Sequence: Synthetic oligonucleotide
  Sense strand starting at position 776 of SEQ ID NO: 915801
agagaaguaguuuguagga

SEQ ID NO: 1107101 - RNA, 19 nt, Artificial Sequence
  Description of Artificial Sequence: Synthetic oligonucleotide
  Antisense strand to SEQ ID NO: 1107100
uccuacaaacuacuucucu

SEQ ID NO: 1107102 - RNA, 19 nt, Artificial Sequence
  Description of Artificial Sequence: Synthetic oligonucleotide
  Sense strand starting at position 785 of SEQ ID NO: 915801
guuuguaggaauggucuca

SEQ ID NO: 1107103 - RNA, 19 nt, Artificial Sequence
  Description of Artificial Sequence: Synthetic oligonucleotide
  Antisense strand to SEQ ID NO: 1107102
ugagaccauuccuacaaac

SEQ ID NO: 1107104 - RNA, 19 nt, Artificial Sequence
  Description of Artificial Sequence: Synthetic oligonucleotide
  Sense strand starting at position 790 of SEQ ID NO: 915801
uaggaauggucucagugga

SEQ ID NO: 1107105 - RNA, 19 nt, Artificial Sequence
  Description of Artificial Sequence: Synthetic oligonucleotide
  Antisense strand to SEQ ID NO: 1107104
uccacugagaccauuccua

SEQ ID NO: 1107106 - RNA, 19 nt, Artificial Sequence
  Description of Artificial Sequence: Synthetic oligonucleotide
  Sense strand starting at position 794 of SEQ ID NO: 915801
aauggucucaguggagcua

SEQ ID NO: 1107107 - RNA, 19 nt, Artificial Sequence
  Description of Artificial Sequence: Synthetic oligonucleotide
  Antisense strand to SEQ ID NO: 1107106
uagcuccacugagaccauu

SEQ ID NO: 1107108 - RNA, 19 nt, Artificial Sequence
  Description of Artificial Sequence: Synthetic oligonucleotide
  Sense strand starting at position 858 of SEQ ID NO: 915801
cgcagauguggugcgucaa

SEQ ID NO: 1107109 - RNA, 19 nt, Artificial Sequence
  Description of Artificial Sequence: Synthetic oligonucleotide
  Antisense strand to SEQ ID NO: 1107108
uugacgcaccacaucugcg

SEQ ID NO: 1107110 - RNA, 19 nt, Artificial Sequence
  Description of Artificial Sequence: Synthetic oligonucleotide
  Sense strand starting at position 990 of SEQ ID NO: 915801
ccugaugucucagcagaug

SEQ ID NO: 1107111 - RNA, 19 nt, Artificial Sequence
  Description of Artificial Sequence: Synthetic oligonucleotide
  Antisense strand to SEQ ID NO: 1107110
caucugcugagacaucagg

SEQ ID NO: 1107112 - RNA, 19 nt, Artificial Sequence
  Description of Artificial Sequence: Synthetic oligonucleotide
  Sense strand starting at position 1138 of SEQ ID NO: 915801
acaccuugacgaugucauu

SEQ ID NO: 1107113 - RNA, 19 nt, Artificial Sequence
  Description of Artificial Sequence: Synthetic oligonucleotide
  Antisense strand to SEQ ID NO: 1107112
aaugacaucgucaaggugu

SEQ ID NO: 1107114 - RNA, 19 nt, Artificial Sequence
  Description of Artificial Sequence: Synthetic oligonucleotide
  Sense strand starting at position 1459 of SEQ ID NO: 915801
gacuguguucugggaacuc

SEQ ID NO: 1107115 - RNA, 19 nt, Artificial Sequence
  Description of Artificial Sequence: Synthetic oligonucleotide
  Antisense strand to SEQ ID NO: 1107114
gaguucccagaacacaguc

SEQ ID NO: 1107116 - RNA, 19 nt, Artificial Sequence
  Description of Artificial Sequence: Synthetic oligonucleotide
  Sense strand starting at position 1520 of SEQ ID NO: 915801
accaguggcucccugagaa

SEQ ID NO: 1107117 - RNA, 19 nt, Artificial Sequence
  Description of Artificial Sequence: Synthetic oligonucleotide
  Antisense strand to SEQ ID NO: 1107116
uucucagggagccacuggu

SEQ ID NO: 1107118 - RNA, 19 nt, Artificial Sequence
  Description of Artificial Sequence: Synthetic oligonucleotide
  Sense strand starting at position 1542 of SEQ ID NO: 915801
agggcagugaguuaagaca

SEQ ID NO: 1107119 - RNA, 19 nt, Artificial Sequence
  Description of Artificial Sequence: Synthetic oligonucleotide
  Antisense strand to SEQ ID NO: 1107118
ugucuuaacucacugcccu

SEQ ID NO: 1107120 - RNA, 19 nt, Artificial Sequence
  Description of Artificial Sequence: Synthetic oligonucleotide
  Sense strand starting at position 1799 of SEQ ID NO: 915801
ccacgaaguagagaucuuu

SEQ ID NO: 1107121 - RNA, 19 nt, Artificial Sequence
  Description of Artificial Sequence: Synthetic oligonucleotide
  Antisense strand to SEQ ID NO: 1107120
aaagaucucuacuucgugg

SEQ ID NO: 1107122 - RNA, 19 nt, Artificial Sequence
  Description of Artificial Sequence: Synthetic oligonucleotide
  Sense strand starting at position 1860 of SEQ ID NO: 915801
ucgagaacucccuaagcau

SEQ ID NO: 1107123 - RNA, 19 nt, Artificial Sequence
  Description of Artificial Sequence: Synthetic oligonucleotide
  Antisense strand to SEQ ID NO: 1107122
augcuuagggaguucucga

SEQ ID NO: 1107124 - RNA, 19 nt, Artificial Sequence
  Description of Artificial Sequence: Synthetic oligonucleotide
  Sense strand starting at position 1927 of SEQ ID NO: 915801
ggagaaagcugauaccuca

SEQ ID NO: 1107125 - RNA, 19 nt, Artificial Sequence
  Description of Artificial Sequence: Synthetic oligonucleotide
  Antisense strand to SEQ ID NO: 1107124
ugagguaucagcuuucucc

SEQ ID NO: 1107126 - RNA, 19 nt, Artificial Sequence
  Description of Artificial Sequence: Synthetic oligonucleotide
  Sense strand starting at position 1997 of SEQ ID NO: 915801
cuuuaauuggcuuaagauu

SEQ ID NO: 1107127 - RNA, 19 nt, Artificial Sequence
  Description of Artificial Sequence: Synthetic oligonucleotide
  Antisense strand to SEQ ID NO: 1107126
aaucuuaagccaauuaaag

SEQ ID NO: 1107128 - RNA, 19 nt, Artificial Sequence
  Description of Artificial Sequence: Synthetic oligonucleotide
  Sense strand starting at position 2064 of SEQ ID NO: 915801
cuaacugccgucuacaauu

SEQ ID NO: 1107129 - RNA, 19 nt, Artificial Sequence
  Description of Artificial Sequence: Synthetic oligonucleotide
  Antisense strand to SEQ ID NO: 1107128
aauuguagacggcaguuag

SEQ ID NO: 1107130 - RNA, 19 nt, Artificial Sequence
  Description of Artificial Sequence: Synthetic oligonucleotide
  Sense strand starting at position 2191 of SEQ ID NO: 915801
ggcugagcuucuccuucua

SEQ ID NO: 1107131 - RNA, 19 nt, Artificial Sequence
  Description of Artificial Sequence: Synthetic oligonucleotide
  Antisense strand to SEQ ID NO: 1107130
uagaaggagaagcucagcc

SEQ ID NO: 1107132 - RNA, 19 nt, Artificial Sequence
  Description of Artificial Sequence: Synthetic oligonucleotide
  Sense strand starting at position 3183 of SEQ ID NO: 915801
aauuuacagugagaggaua

SEQ ID NO: 1107133 - RNA, 19 nt, Artificial Sequence
  Description of Artificial Sequence: Synthetic oligonucleotide
  Antisense strand to SEQ ID NO: 1107132
uauccucucacuguaaauu

SEQ ID NO: 1107134 - RNA, 19 nt, Artificial Sequence
  Description of Artificial Sequence: Synthetic oligonucleotide
  Sense strand starting at position 3196 of SEQ ID NO: 915801
aggauagaguguucuuugu

SEQ ID NO: 1107135 - RNA, 19 nt, Artificial Sequence
  Description of Artificial Sequence: Synthetic oligonucleotide
  Antisense strand to SEQ ID NO: 1107134
acaaagaacacucuauccu

SEQ ID NO: 1107136 - RNA, 19 nt, Artificial Sequence
  Description of Artificial Sequence: Synthetic oligonucleotide
  Sense strand starting at position 3198 of SEQ ID NO: 915801
gauagaguguucuuuguuu

SEQ ID NO: 1107137 - RNA, 19 nt, Artificial Sequence
  Description of Artificial Sequence: Synthetic oligonucleotide
  Antisense strand to SEQ ID NO: 1107136
aaacaaagaacacucuauc

SEQ ID NO: 1107138 - RNA, 19 nt, Artificial Sequence
  Description of Artificial Sequence: Synthetic oligonucleotide
  Sense strand starting at position 3202 of SEQ ID NO: 915801
gaguguucuuuguuuccag

SEQ ID NO: 1107139 - RNA, 19 nt, Artificial Sequence
  Description of Artificial Sequence: Synthetic oligonucleotide
  Antisense strand to SEQ ID NO: 1107138
cuggaaacaaagaacacuc

SEQ ID NO: 1107140 - RNA, 19 nt, Artificial Sequence
  Description of Artificial Sequence: Synthetic oligonucleotide
  Sense strand starting at position 3203 of SEQ ID NO: 915801
aguguucuuuguuuccaga

SEQ ID NO: 1107141 - RNA, 19 nt, Artificial Sequence
  Description of Artificial Sequence: Synthetic oligonucleotide
  Antisense strand to SEQ ID NO: 1107140
ucuggaaacaaagaacacu

SEQ ID NO: 1107142 - RNA, 19 nt, Artificial Sequence
  Description of Artificial Sequence: Synthetic oligonucleotide
  Sense strand starting at position 3308 of SEQ ID NO: 915801
gugucuacugaagaaaucu

SEQ ID NO: 1107143 - RNA, 19 nt, Artificial Sequence
  Description of Artificial Sequence: Synthetic oligonucleotide
  Antisense strand to SEQ ID NO: 1107142
agauuucuucaguagacac

SEQ ID NO: 1107144 - RNA, 19 nt, Artificial Sequence
  Description of Artificial Sequence: Synthetic oligonucleotide
  Sense strand starting at position 3317 of SEQ ID NO: 915801
gaagaaaucuuugagaguc

SEQ ID NO: 1107145 - RNA, 19 nt, Artificial Sequence
  Description of Artificial Sequence: Synthetic oligonucleotide
  Antisense strand to SEQ ID NO: 1107144
gacucucaaagauuucuuc

SEQ ID NO: 1107146 - RNA, 19 nt, Artificial Sequence
  Description of Artificial Sequence: Synthetic oligonucleotide
  Sense strand starting at position 3325 of SEQ ID NO: 915801
cuuugagagucucuacaca

SEQ ID NO: 1107147 - RNA, 19 nt, Artificial Sequence
  Description of Artificial Sequence: Synthetic oligonucleotide
  Antisense strand to SEQ ID NO: 1107146
uguguagagacucucaaag

SEQ ID NO: 1107148 - RNA, 19 nt, Artificial Sequence
  Description of Artificial Sequence: Synthetic oligonucleotide
  Sense strand starting at position 3361 of SEQ ID NO: 915801
uaaguugggagucacugau

SEQ ID NO: 1107149 - RNA, 19 nt, Artificial Sequence
  Description of Artificial Sequence: Synthetic oligonucleotide
  Antisense strand to SEQ ID NO: 1107148
aucagugacucccaacuua

SEQ ID NO: 1107150 - RNA, 19 nt, Artificial Sequence
  Description of Artificial Sequence: Synthetic oligonucleotide
  Sense strand starting at position 3389 of SEQ ID NO: 915801
gucugacccagguaguguu

SEQ ID NO: 1107151 - RNA, 19 nt, Artificial Sequence
  Description of Artificial Sequence: Synthetic oligonucleotide
  Antisense strand to SEQ ID NO: 1107150
aacacuaccugggucagac

SEQ ID NO: 1107152 - RNA, 19 nt, Artificial Sequence
  Description of Artificial Sequence: Synthetic oligonucleotide
  Sense strand starting at position 3402 of SEQ ID NO: 915801
aguguuacuagaggaguaa

SEQ ID NO: 1107153 - RNA, 19 nt, Artificial Sequence
  Description of Artificial Sequence: Synthetic oligonucleotide
  Antisense strand to SEQ ID NO: 1107152
uuacuccucuaguaacacu

SEQ ID NO: 1107154 - RNA, 19 nt, Artificial Sequence
  Description of Artificial Sequence: Synthetic oligonucleotide
  Sense strand starting at position 3403 of SEQ ID NO: 915801
guguuacuagaggaguaaa

SEQ ID NO: 1107155 - RNA, 19 nt, Artificial Sequence
  Description of Artificial Sequence: Synthetic oligonucleotide
  Antisense strand to SEQ ID NO: 1107154
uuuacuccucuaguaacac

SEQ ID NO: 1107156 - RNA, 19 nt, Artificial Sequence
  Description of Artificial Sequence: Synthetic oligonucleotide
  Sense strand starting at position 3415 of SEQ ID NO: 915801
gaguaaacucggugcccua

SEQ ID NO: 1107157 - RNA, 19 nt, Artificial Sequence
  Description of Artificial Sequence: Synthetic oligonucleotide
  Antisense strand to SEQ ID NO: 1107156
uagggcaccgaguuuacuc

SEQ ID NO: 1107158 - RNA, 19 nt, Artificial Sequence
  Description of Artificial Sequence: Synthetic oligonucleotide
  Sense strand starting at position 3556 of SEQ ID NO: 915801
ucaggauauguuggccuua

SEQ ID NO: 1107159 - RNA, 19 nt, Artificial Sequence
  Description of Artificial Sequence: Synthetic oligonucleotide
  Antisense strand to SEQ ID NO: 1107158
uaaggccaacauauccuga

SEQ ID NO: 1107160 - RNA, 19 nt, Artificial Sequence
  Description of Artificial Sequence: Synthetic oligonucleotide
  Sense strand starting at position 3567 of SEQ ID NO: 915801
uggccuuagcuugagauca

SEQ ID NO: 1107161 - RNA, 19 nt, Artificial Sequence
  Description of Artificial Sequence: Synthetic oligonucleotide
  Antisense strand to SEQ ID NO: 1107160
ugaucucaagcuaaggcca

SEQ ID NO: 1107162 - RNA, 19 nt, Artificial Sequence
  Description of Artificial Sequence: Synthetic oligonucleotide
  Sense strand starting at position 9 of SEQ ID NO: 915802
gcaaucaaugcaugaaucu

SEQ ID NO: 1107163 - RNA, 19 nt, Artificial Sequence
  Description of Artificial Sequence: Synthetic oligonucleotide
  Antisense strand to SEQ ID NO: 1107162
agauucaugcauugauugc

SEQ ID NO: 1107164 - RNA, 19 nt, Artificial Sequence
  Description of Artificial Sequence: Synthetic oligonucleotide
  Sense strand starting at position 68 of SEQ ID NO: 915802
uggaacaacugaggaauuu

SEQ ID NO: 1107165 - RNA, 19 nt, Artificial Sequence
  Description of Artificial Sequence: Synthetic oligonucleotide
  Antisense strand to SEQ ID NO: 1107164
aaauuccucaguuguucca

SEQ ID NO: 1107166 - RNA, 19 nt, Artificial Sequence
  Description of Artificial Sequence: Synthetic oligonucleotide
  Sense strand starting at position 87 of SEQ ID NO: 915802
ugaagauggaguuguuaau

SEQ ID NO: 1107167 - RNA, 19 nt, Artificial Sequence
  Description of Artificial Sequence: Synthetic oligonucleotide
  Antisense strand to SEQ ID NO: 1107166
auuaacaacuccaucuuca

SEQ ID NO: 1107168 - RNA, 19 nt, Artificial Sequence
  Description of Artificial Sequence: Synthetic oligonucleotide
  Sense strand starting at position 138 of SEQ ID NO: 915802
guaggagaaugucccuauu

SEQ ID NO: 1107169 - RNA, 19 nt, Artificial Sequence
  Description of Artificial Sequence: Synthetic oligonucleotide
  Antisense strand to SEQ ID NO: 1107168
aauagggacauucuccuac

SEQ ID NO: 1107170 - RNA, 19 nt, Artificial Sequence
  Description of Artificial Sequence: Synthetic oligonucleotide
  Sense strand starting at position 171 of SEQ ID NO: 915802
gccgaaauauuugaggauu

SEQ ID NO: 1107171 - RNA, 19 nt, Artificial Sequence
  Description of Artificial Sequence: Synthetic oligonucleotide
  Antisense strand to SEQ ID NO: 1107170
aauccucaaauauuucggc

SEQ ID NO: 1107172 - RNA, 19 nt, Artificial Sequence
  Description of Artificial Sequence: Synthetic oligonucleotide
  Sense strand starting at position 173 of SEQ ID NO: 915802
cgaaauauuugaggauuac

SEQ ID NO: 1107173 - RNA, 19 nt, Artificial Sequence
  Description of Artificial Sequence: Synthetic oligonucleotide
  Antisense strand to SEQ ID NO: 1107172
guaauccucaaauauuucg

SEQ ID NO: 1107174 - RNA, 19 nt, Artificial Sequence
  Description of Artificial Sequence: Synthetic oligonucleotide
  Sense strand starting at position 191 of SEQ ID NO: 915802
caguguuugcagcuuacuu

SEQ ID NO: 1107175 - RNA, 19 nt, Artificial Sequence
  Description of Artificial Sequence: Synthetic oligonucleotide
  Antisense strand to SEQ ID NO: 1107174
aaguaagcugcaaacacug

SEQ ID NO: 1107176 - RNA, 19 nt, Artificial Sequence
  Description of Artificial Sequence: Synthetic oligonucleotide
  Sense strand starting at position 264 of SEQ ID NO: 915802
aaucacugaguugguuauu

SEQ ID NO: 1107177 - RNA, 19 nt, Artificial Sequence
  Description of Artificial Sequence: Synthetic oligonucleotide
  Antisense strand to SEQ ID NO: 1107176
aauaaccaacucagugauu

SEQ ID NO: 1107178 - RNA, 19 nt, Artificial Sequence
  Description of Artificial Sequence: Synthetic oligonucleotide
  Sense strand starting at position 394 of SEQ ID NO: 915802
ucuauugagaaguacggua

SEQ ID NO: 1107179 - RNA, 19 nt, Artificial Sequence
  Description of Artificial Sequence: Synthetic oligonucleotide
  Antisense strand to SEQ ID NO: 1107178
uaccguacuucucaauaga

SEQ ID NO: 1107180 - RNA, 19 nt, Artificial Sequence
  Description of Artificial Sequence: Synthetic oligonucleotide
  Sense strand starting at position 401 of SEQ ID NO: 915802
agaaguacgguagaaagua

SEQ ID NO: 1107181 - RNA, 19 nt, Artificial Sequence
  Description of Artificial Sequence: Synthetic oligonucleotide
  Antisense strand to SEQ ID NO: 1107180
uacuuucuaccguacuucu

SEQ ID NO: 1107182 - RNA, 19 nt, Artificial Sequence
  Description of Artificial Sequence: Synthetic oligonucleotide
  Sense strand starting at position 410 of SEQ ID NO: 915802
guagaaaguacacgaaagu

SEQ ID NO: 1107183 - RNA, 19 nt, Artificial Sequence
  Description of Artificial Sequence: Synthetic oligonucleotide
  Antisense strand to SEQ ID NO: 1107182
acuuucguguacuuucuac

SEQ ID NO: 1107184 - RNA, 19 nt, Artificial Sequence
  Description of Artificial Sequence: Synthetic oligonucleotide
  Sense strand starting at position 440 of SEQ ID NO: 915802
ggaauuauauuuggguuga

SEQ ID NO: 1107185 - RNA, 19 nt, Artificial Sequence
  Description of Artificial Sequence: Synthetic oligonucleotide
  Antisense strand to SEQ ID NO: 1107184
ucaacccaaauauaauucc

SEQ ID NO: 1107186 - RNA, 19 nt, Artificial Sequence
  Description of Artificial Sequence: Synthetic oligonucleotide
  Sense strand starting at position 441 of SEQ ID NO: 915802
gaauuauauuuggguugaa

SEQ ID NO: 1107187 - RNA, 19 nt, Artificial Sequence
  Description of Artificial Sequence: Synthetic oligonucleotide
  Antisense strand to SEQ ID NO: 1107186
uucaacccaaauauaauuc

SEQ ID NO: 1107188 - RNA, 19 nt, Artificial Sequence
  Description of Artificial Sequence: Synthetic oligonucleotide
  Sense strand starting at position 493 of SEQ ID NO: 915802
gcaaguuguaauucuucgu

SEQ ID NO: 1107189 - RNA, 19 nt, Artificial Sequence
  Description of Artificial Sequence: Synthetic oligonucleotide
  Antisense strand to SEQ ID NO: 1107188
acgaagaauuacaacuugc

SEQ ID NO: 1107190 - RNA, 19 nt, Artificial Sequence
  Description of Artificial Sequence: Synthetic oligonucleotide
  Sense strand starting at position 550 of SEQ ID NO: 915802
auaucugcaucauuagguu

SEQ ID NO: 1107191 - RNA, 19 nt, Artificial Sequence
  Description of Artificial Sequence: Synthetic oligonucleotide
  Antisense strand to SEQ ID NO: 1107190
aaccuaaugaugcagauau

SEQ ID NO: 1107192 - RNA, 19 nt, Artificial Sequence
  Description of Artificial Sequence: Synthetic oligonucleotide
  Sense strand starting at position 559 of SEQ ID NO: 915802
ucauuagguuguucugaga

SEQ ID NO: 1107193 - RNA, 19 nt, Artificial Sequence
  Description of Artificial Sequence: Synthetic oligonucleotide
  Antisense strand to SEQ ID NO: 1107192
ucucagaacaaccuaauga

SEQ ID NO: 1107194 - RNA, 19 nt, Artificial Sequence
  Description of Artificial Sequence: Synthetic oligonucleotide
  Sense strand starting at position 946 of SEQ ID NO: 915802
gagauuaucuacuuacacg

SEQ ID NO: 1107195 - RNA, 19 nt, Artificial Sequence
  Description of Artificial Sequence: Synthetic oligonucleotide
  Antisense strand to SEQ ID NO: 1107194
cguguaaguagauaaucuc

SEQ ID NO: 1107196 - RNA, 19 nt, Artificial Sequence
  Description of Artificial Sequence: Synthetic oligonucleotide
  Sense strand starting at position 1036 of SEQ ID NO: 915802
auuguaaauucugcuugga

SEQ ID NO: 1107197 - RNA, 19 nt, Artificial Sequence
  Description of Artificial Sequence: Synthetic oligonucleotide
  Antisense strand to SEQ ID NO: 1107196
uccaagcagaauuuacaau

SEQ ID NO: 1107198 - RNA, 19 nt, Artificial Sequence
  Description of Artificial Sequence: Synthetic oligonucleotide
  Sense strand starting at position 1038 of SEQ ID NO: 915802
uguaaauucugcuuggauu

SEQ ID NO: 1107199 - RNA, 19 nt, Artificial Sequence
  Description of Artificial Sequence: Synthetic oligonucleotide
  Antisense strand to SEQ ID NO: 1107198
aauccaagcagaauuuaca

SEQ ID NO: 1107200 - RNA, 19 nt, Artificial Sequence
  Description of Artificial Sequence: Synthetic oligonucleotide
  Sense strand starting at position 1039 of SEQ ID NO: 915802
guaaauucugcuuggauuc

SEQ ID NO: 1107201 - RNA, 19 nt, Artificial Sequence
  Description of Artificial Sequence: Synthetic oligonucleotide
  Antisense strand to SEQ ID NO: 1107200
gaauccaagcagaauuuac

SEQ ID NO: 1107202 - RNA, 19 nt, Artificial Sequence
  Description of Artificial Sequence: Synthetic oligonucleotide
  Sense strand starting at position 1107 of SEQ ID NO: 915802
gucauuucucgagguaacc

SEQ ID NO: 1107203 - RNA, 19 nt, Artificial Sequence
  Description of Artificial Sequence: Synthetic oligonucleotide
  Antisense strand to SEQ ID NO: 1107202
gguuaccucgagaaaugac

SEQ ID NO: 1107204 - RNA, 19 nt, Artificial Sequence
  Description of Artificial Sequence: Synthetic oligonucleotide
  Sense strand starting at position 1131 of SEQ ID NO: 915802
uucugauuaggccagcaau

SEQ ID NO: 1107205 - RNA, 19 nt, Artificial Sequence
  Description of Artificial Sequence: Synthetic oligonucleotide
  Antisense strand to SEQ ID NO: 1107204
auugcuggccuaaucagaa

SEQ ID NO: 1107206 - RNA, 19 nt, Artificial Sequence
  Description of Artificial Sequence: Synthetic oligonucleotide
  Sense strand starting at position 1134 of SEQ ID NO: 915802
ugauuaggccagcaauaaa

SEQ ID NO: 1107207 - RNA, 19 nt, Artificial Sequence
  Description of Artificial Sequence: Synthetic oligonucleotide
  Antisense strand to SEQ ID NO: 1107206
uuuauugcuggccuaauca

SEQ ID NO: 1107208 - RNA, 19 nt, Artificial Sequence
  Description of Artificial Sequence: Synthetic oligonucleotide
  Sense strand starting at position 1154 of SEQ ID NO: 915802
cgacuagaugcagagugau

SEQ ID NO: 1107209 - RNA, 19 nt, Artificial Sequence
  Description of Artificial Sequence: Synthetic oligonucleotide
  Antisense strand to SEQ ID NO: 1107208
aucacucugcaucuagucg

SEQ ID NO: 1107210 - RNA, 19 nt, Artificial Sequence
  Description of Artificial Sequence: Synthetic oligonucleotide
  Sense strand starting at position 2394 of SEQ ID NO: 915802
cagaaaggccgugagucuu

SEQ ID NO: 1107211 - RNA, 19 nt, Artificial Sequence
  Description of Artificial Sequence: Synthetic oligonucleotide
  Antisense strand to SEQ ID NO: 1107210
aagacucacggccuuucug

SEQ ID NO: 1107212 - RNA, 19 nt, Artificial Sequence
  Description of Artificial Sequence: Synthetic oligonucleotide
  Sense strand starting at position 2536 of SEQ ID NO: 915802
agcauuucuccgcaggagu

SEQ ID NO: 1107213 - RNA, 19 nt, Artificial Sequence
  Description of Artificial Sequence: Synthetic oligonucleotide
  Antisense strand to SEQ ID NO: 1107212
acuccugcggagaaaugcu

SEQ ID NO: 1107214 - RNA, 19 nt, Artificial Sequence
  Description of Artificial Sequence: Synthetic oligonucleotide
  Sense strand starting at position 2538 of SEQ ID NO: 915802
cauuucuccgcaggaguca

SEQ ID NO: 1107215 - RNA, 19 nt, Artificial Sequence
  Description of Artificial Sequence: Synthetic oligonucleotide
  Antisense strand to SEQ ID NO: 1107214
ugacuccugcggagaaaug

SEQ ID NO: 1107216 - RNA, 19 nt, Artificial Sequence
  Description of Artificial Sequence: Synthetic oligonucleotide
  Sense strand starting at position 2662 of SEQ ID NO: 915802
gagggagguuaguugguaa

SEQ ID NO: 1107217 - RNA, 19 nt, Artificial Sequence
  Description of Artificial Sequence: Synthetic oligonucleotide
  Antisense strand to SEQ ID NO: 1107216
uuaccaacuaaccucccuc

SEQ ID NO: 1107218 - RNA, 19 nt, Artificial Sequence
  Description of Artificial Sequence: Synthetic oligonucleotide
  Sense strand starting at position 2970 of SEQ ID NO: 915802
aaccgugaaucugucauuu

SEQ ID NO: 1107219 - RNA, 19 nt, Artificial Sequence
  Description of Artificial Sequence: Synthetic oligonucleotide
  Antisense strand to SEQ ID NO: 1107218
aaaugacagauucacgguu

SEQ ID NO: 1107220 - RNA, 19 nt, Artificial Sequence
  Description of Artificial Sequence: Synthetic oligonucleotide
  Sense strand starting at position 3297 of SEQ ID NO: 915802
ccgaaagacuucuuuccag

SEQ ID NO: 1107221 - RNA, 19 nt, Artificial Sequence
  Description of Artificial Sequence: Synthetic oligonucleotide
  Antisense strand to SEQ ID NO: 1107220
cuggaaagaagucuuucgg

SEQ ID NO: 1107222 - RNA, 19 nt, Artificial Sequence
  Description of Artificial Sequence: Synthetic oligonucleotide
  Sense strand starting at position 3303 of SEQ ID NO: 915802
gacuucuuuccagaggguu

SEQ ID NO: 1107223 - RNA, 19 nt, Artificial Sequence
  Description of Artificial Sequence: Synthetic oligonucleotide
  Antisense strand to SEQ ID NO: 1107222
aacccucuggaaagaaguc

SEQ ID NO: 1107224 - RNA, 19 nt, Artificial Sequence
  Description of Artificial Sequence: Synthetic oligonucleotide
  Sense strand starting at position 3443 of SEQ ID NO: 915802
cuugcaaucuucuuuagga

SEQ ID NO: 1107225 - RNA, 19 nt, Artificial Sequence
  Description of Artificial Sequence: Synthetic oligonucleotide
  Antisense strand to SEQ ID NO: 1107224
uccuaaagaagauugcaag

SEQ ID NO: 1107226 - RNA, 19 nt, Artificial Sequence
  Description of Artificial Sequence: Synthetic oligonucleotide
  Sense strand starting at position 3444 of SEQ ID NO: 915802
uugcaaucuucuuuaggaa

SEQ ID NO: 1107227 - RNA, 19 nt, Artificial Sequence
  Description of Artificial Sequence: Synthetic oligonucleotide
  Antisense strand to SEQ ID NO: 1107226
uuccuaaagaagauugcaa

SEQ ID NO: 1107228 - RNA, 19 nt, Artificial Sequence
  Description of Artificial Sequence: Synthetic oligonucleotide
  Sense strand starting at position 3445 of SEQ ID NO: 915802
ugcaaucuucuuuaggaau

SEQ ID NO: 1107229 - RNA, 19 nt, Artificial Sequence
  Description of Artificial Sequence: Synthetic oligonucleotide
  Antisense strand to SEQ ID NO: 1107228
auuccuaaagaagauugca

SEQ ID NO: 1107230 - RNA, 19 nt, Artificial Sequence
  Description of Artificial Sequence: Synthetic oligonucleotide
  Sense strand starting at position 3536 of SEQ ID NO: 915802
uuaucuaauccuuacggca

SEQ ID NO: 1107231 - RNA, 19 nt, Artificial Sequence
  Description of Artificial Sequence: Synthetic oligonucleotide
  Antisense strand to SEQ ID NO: 1107230
ugccguaaggauuagauaa

SEQ ID NO: 1107232 - RNA, 19 nt, Artificial Sequence
  Description of Artificial Sequence: Synthetic oligonucleotide
  Sense strand starting at position 3776 of SEQ ID NO: 915802
uggugaggaaugugugaga

SEQ ID NO: 1107233 - RNA, 19 nt, Artificial Sequence
  Description of Artificial Sequence: Synthetic oligonucleotide
  Antisense strand to SEQ ID NO: 1107232
ucucacacauuccucacca

SEQ ID NO: 1107234 - RNA, 19 nt, Artificial Sequence
  Description of Artificial Sequence: Synthetic oligonucleotide
  Sense strand starting at position 3777 of SEQ ID NO: 915802
ggugaggaaugugugagaa

SEQ ID NO: 1107235 - RNA, 19 nt, Artificial Sequence
  Description of Artificial Sequence: Synthetic oligonucleotide
  Antisense strand to SEQ ID NO: 1107234
uucucacacauuccucacc

SEQ ID NO: 1107236 - RNA, 19 nt, Artificial Sequence
  Description of Artificial Sequence: Synthetic oligonucleotide
  Sense strand starting at position 3793 of SEQ ID NO: 915802
gaauguauguaggugguaa

SEQ ID NO: 1107237 - RNA, 19 nt, Artificial Sequence
  Description of Artificial Sequence: Synthetic oligonucleotide
  Antisense strand to SEQ ID NO: 1107236
uuaccaccuacauacauuc

SEQ ID NO: 1107238 - RNA, 19 nt, Artificial Sequence
  Description of Artificial Sequence: Synthetic oligonucleotide
  Sense strand starting at position 3794 of SEQ ID NO: 915802
aauguauguaggugguaag

SEQ ID NO: 1107239 - RNA, 19 nt, Artificial Sequence
  Description of Artificial Sequence: Synthetic oligonucleotide
  Antisense strand to SEQ ID NO: 1107238
cuuaccaccuacauacauu

SEQ ID NO: 1107240 - RNA, 19 nt, Artificial Sequence
  Description of Artificial Sequence: Synthetic oligonucleotide
  Sense strand starting at position 3870 of SEQ ID NO: 915802
gugccuuuaacaggauagu

SEQ ID NO: 1107241 - RNA, 19 nt, Artificial Sequence
  Description of Artificial Sequence: Synthetic oligonucleotide
  Antisense strand to SEQ ID NO: 1107240
acuauccuguuaaaggcac

SEQ ID NO: 1107242 - RNA, 19 nt, Artificial Sequence
  Description of Artificial Sequence: Synthetic oligonucleotide
  Sense strand starting at position 31 of SEQ ID NO: 915803
uguggucugcuagaaugaa

SEQ ID NO: 1107243 - RNA, 19 nt, Artificial Sequence
  Description of Artificial Sequence: Synthetic oligonucleotide
  Antisense strand to SEQ ID NO: 1107242
uucauucuagcagaccaca

SEQ ID NO: 1107244 - RNA, 19 nt, Artificial Sequence
  Description of Artificial Sequence: Synthetic oligonucleotide
  Sense strand starting at position 46 of SEQ ID NO: 915803
ugaagaccuaguuguagaa

SEQ ID NO: 1107245 - RNA, 19 nt, Artificial Sequence
  Description of Artificial Sequence: Synthetic oligonucleotide
  Antisense strand to SEQ ID NO: 1107244
uucuacaacuaggucuuca

SEQ ID NO: 1107246 - RNA, 19 nt, Artificial Sequence
  Description of Artificial Sequence: Synthetic oligonucleotide
  Sense strand starting at position 53 of SEQ ID NO: 915803
cuaguuguagaaugagaaa

SEQ ID NO: 1107247 - RNA, 19 nt, Artificial Sequence
  Description of Artificial Sequence: Synthetic oligonucleotide
  Antisense strand to SEQ ID NO: 1107246
uuucucauucuacaacuag

SEQ ID NO: 1107248 - RNA, 19 nt, Artificial Sequence
  Description of Artificial Sequence: Synthetic oligonucleotide
  Sense strand starting at position 393 of SEQ ID NO: 915803
gguuauaauguuuaaguac

SEQ ID NO: 1107249 - RNA, 19 nt, Artificial Sequence
  Description of Artificial Sequence: Synthetic oligonucleotide
  Antisense strand to SEQ ID NO: 1107248
guacuuaaacauuauaacc

SEQ ID NO: 1107250 - RNA, 19 nt, Artificial Sequence
  Description of Artificial Sequence: Synthetic oligonucleotide
  Sense strand starting at position 445 of SEQ ID NO: 915803
uguaacuuacuuugaaagu

SEQ ID NO: 1107251 - RNA, 19 nt, Artificial Sequence
  Description of Artificial Sequence: Synthetic oligonucleotide
  Antisense strand to SEQ ID NO: 1107250
acuuucaaaguaaguuaca

SEQ ID NO: 1107252 - RNA, 19 nt, Artificial Sequence
  Description of Artificial Sequence: Synthetic oligonucleotide
  Sense strand starting at position 499 of SEQ ID NO: 915803
uuugaacuauggguacaua

SEQ ID NO: 1107253 - RNA, 19 nt, Artificial Sequence
  Description of Artificial Sequence: Synthetic oligonucleotide
  Antisense strand to SEQ ID NO: 1107252
uauguacccauaguucaaa

SEQ ID NO: 1107254 - RNA, 19 nt, Artificial Sequence
  Description of Artificial Sequence: Synthetic oligonucleotide
  Sense strand starting at position 554 of SEQ ID NO: 915803
uagacagauuuagguaacu

SEQ ID NO: 1107255 - RNA, 19 nt, Artificial Sequence
  Description of Artificial Sequence: Synthetic oligonucleotide
  Antisense strand to SEQ ID NO: 1107254
aguuaccuaaaucugucua

SEQ ID NO: 1107256 - RNA, 19 nt, Artificial Sequence
  Description of Artificial Sequence: Synthetic oligonucleotide
  Sense strand starting at position 572 of SEQ ID NO: 915803
uggaaauaagcaugccaaa

SEQ ID NO: 1107257 - RNA, 19 nt, Artificial Sequence
  Description of Artificial Sequence: Synthetic oligonucleotide
  Antisense strand to SEQ ID NO: 1107256
uuuggcaugcuuauuucca

SEQ ID NO: 1107258 - RNA, 19 nt, Artificial Sequence
  Description of Artificial Sequence: Synthetic oligonucleotide
  Sense strand starting at position 582 of SEQ ID NO: 915803
caugccaaauuguugaaga

SEQ ID NO: 1107259 - RNA, 19 nt, Artificial Sequence
  Description of Artificial Sequence: Synthetic oligonucleotide
  Antisense strand to SEQ ID NO: 1107258
ucuucaacaauuuggcaug

SEQ ID NO: 1107260 - RNA, 19 nt, Artificial Sequence
  Description of Artificial Sequence: Synthetic oligonucleotide
  Sense strand starting at position 645 of SEQ ID NO: 915803
ggcuuaucacacuaagauu

SEQ ID NO: 1107261 - RNA, 19 nt, Artificial Sequence
  Description of Artificial Sequence: Synthetic oligonucleotide
  Antisense strand to SEQ ID NO: 1107260
aaucuuagugugauaagcc

SEQ ID NO: 1107262 - RNA, 19 nt, Artificial Sequence
  Description of Artificial Sequence: Synthetic oligonucleotide
  Sense strand starting at position 667 of SEQ ID NO: 915803
uuuaccaauguuugaugaa

SEQ ID NO: 1107263 - RNA, 19 nt, Artificial Sequence
  Description of Artificial Sequence: Synthetic oligonucleotide
  Antisense strand to SEQ ID NO: 1107262
uucaucaaacauugguaaa

SEQ ID NO: 1107264 - RNA, 19 nt, Artificial Sequence
  Description of Artificial Sequence: Synthetic oligonucleotide
  Sense strand starting at position 676 of SEQ ID NO: 915803
guuugaugaagcuaucaug

SEQ ID NO: 1107265 - RNA, 19 nt, Artificial Sequence
  Description of Artificial Sequence: Synthetic oligonucleotide
  Antisense strand to SEQ ID NO: 1107264
caugauagcuucaucaaac

SEQ ID NO: 1107266 - RNA, 19 nt, Artificial Sequence
  Description of Artificial Sequence: Synthetic oligonucleotide
  Sense strand starting at position 686 of SEQ ID NO: 915803
gcuaucauguagucaaaca

SEQ ID NO: 1107267 - RNA, 19 nt, Artificial Sequence
  Description of Artificial Sequence: Synthetic oligonucleotide
  Antisense strand to SEQ ID NO: 1107266
uguuugacuacaugauagc

SEQ ID NO: 1107268 - RNA, 19 nt, Artificial Sequence
  Description of Artificial Sequence: Synthetic oligonucleotide
  Sense strand starting at position 744 of SEQ ID NO: 915803
uuguacaugugauuaaaug

SEQ ID NO: 1107269 - RNA, 19 nt, Artificial Sequence
  Description of Artificial Sequence: Synthetic oligonucleotide
  Antisense strand to SEQ ID NO: 1107268
cauuuaaucacauguacaa

SEQ ID NO: 1107270 - RNA, 19 nt, Artificial Sequence
  Description of Artificial Sequence: Synthetic oligonucleotide
  Sense strand starting at position 831 of SEQ ID NO: 915803
gacuucuugugguucuuga

SEQ ID NO: 1107271 - RNA, 19 nt, Artificial Sequence
  Description of Artificial Sequence: Synthetic oligonucleotide
  Antisense strand to SEQ ID NO: 1107270
ucaagaaccacaagaaguc

SEQ ID NO: 1107272 - RNA, 19 nt, Artificial Sequence
  Description of Artificial Sequence: Synthetic oligonucleotide
  Sense strand starting at position 1041 of SEQ ID NO: 915803
gccugaugggccugggaua

SEQ ID NO: 1107273 - RNA, 19 nt, Artificial Sequence
  Description of Artificial Sequence: Synthetic oligonucleotide
  Antisense strand to SEQ ID NO: 1107272
uaucccaggcccaucaggc

SEQ ID NO: 1107274 - RNA, 19 nt, Artificial Sequence
  Description of Artificial Sequence: Synthetic oligonucleotide
  Sense strand starting at position 1095 of SEQ ID NO: 915803
uuccuaaaucuggauucgu

SEQ ID NO: 1107275 - RNA, 19 nt, Artificial Sequence
  Description of Artificial Sequence: Synthetic oligonucleotide
  Antisense strand to SEQ ID NO: 1107274
acgaauccagauuuaggaa

SEQ ID NO: 1107276 - RNA, 19 nt, Artificial Sequence
  Description of Artificial Sequence: Synthetic oligonucleotide
  Sense strand starting at position 1194 of SEQ ID NO: 915803
guaaucaguacuuggaugu

SEQ ID NO: 1107277 - RNA, 19 nt, Artificial Sequence
  Description of Artificial Sequence: Synthetic oligonucleotide
  Antisense strand to SEQ ID NO: 1107276
acauccaaguacugauuac

SEQ ID NO: 1107278 - RNA, 19 nt, Artificial Sequence
  Description of Artificial Sequence: Synthetic oligonucleotide
  Sense strand starting at position 1195 of SEQ ID NO: 915803
uaaucaguacuuggauguu

SEQ ID NO: 1107279 - RNA, 19 nt, Artificial Sequence
  Description of Artificial Sequence: Synthetic oligonucleotide
  Antisense strand to SEQ ID NO: 1107278
aacauccaaguacugauua

SEQ ID NO: 1107280 - RNA, 19 nt, Artificial Sequence
  Description of Artificial Sequence: Synthetic oligonucleotide
  Sense strand starting at position 1251 of SEQ ID NO: 915803
ggaagaaaugcgggauuca

SEQ ID NO: 1107281 - RNA, 19 nt, Artificial Sequence
  Description of Artificial Sequence: Synthetic oligonucleotide
  Antisense strand to SEQ ID NO: 1107280
ugaaucccgcauuucuucc

SEQ ID NO: 1107282 - RNA, 19 nt, Artificial Sequence
  Description of Artificial Sequence: Synthetic oligonucleotide
  Sense strand starting at position 1485 of SEQ ID NO: 915803
ccgagaugccaagagaugu

SEQ ID NO: 1107283 - RNA, 19 nt, Artificial Sequence
  Description of Artificial Sequence: Synthetic oligonucleotide
  Antisense strand to SEQ ID NO: 1107282
acaucucuuggcaucucgg

SEQ ID NO: 1107284 - RNA, 19 nt, Artificial Sequence
  Description of Artificial Sequence: Synthetic oligonucleotide
  Sense strand starting at position 2869 of SEQ ID NO: 915803
guaguuguuuacuuaucaa

SEQ ID NO: 1107285 - RNA, 19 nt, Artificial Sequence
  Description of Artificial Sequence: Synthetic oligonucleotide
  Antisense strand to SEQ ID NO: 1107284
uugauaaguaaacaacuac

SEQ ID NO: 1107286 - RNA, 19 nt, Artificial Sequence
  Description of Artificial Sequence: Synthetic oligonucleotide
  Sense strand starting at position 2882 of SEQ ID NO: 915803
uaucaauauuccgugauga

SEQ ID NO: 1107287 - RNA, 19 nt, Artificial Sequence
  Description of Artificial Sequence: Synthetic oligonucleotide
  Antisense strand to SEQ ID NO: 1107286
ucaucacggaauauugaua

SEQ ID NO: 1107288 - RNA, 19 nt, Artificial Sequence
  Description of Artificial Sequence: Synthetic oligonucleotide
  Sense strand starting at position 2883 of SEQ ID NO: 915803
aucaauauuccgugaugag

SEQ ID NO: 1107289 - RNA, 19 nt, Artificial Sequence
  Description of Artificial Sequence: Synthetic oligonucleotide
  Antisense strand to SEQ ID NO: 1107288
cucaucacggaauauugau

SEQ ID NO: 1107290 - RNA, 19 nt, Artificial Sequence
  Description of Artificial Sequence: Synthetic oligonucleotide
  Sense strand starting at position 2884 of SEQ ID NO: 915803
ucaauauuccgugaugagg

SEQ ID NO: 1107291 - RNA, 19 nt, Artificial Sequence
  Description of Artificial Sequence: Synthetic oligonucleotide
  Antisense strand to SEQ ID NO: 1107290
ccucaucacggaauauuga

SEQ ID NO: 1107292 - RNA, 19 nt, Artificial Sequence
  Description of Artificial Sequence: Synthetic oligonucleotide
  Sense strand starting at position 2993 of SEQ ID NO: 915803
caaggaaauuggcuuugau

SEQ ID NO: 1107293 - RNA, 19 nt, Artificial Sequence
  Description of Artificial Sequence: Synthetic oligonucleotide
  Antisense strand to SEQ ID NO: 1107292
aucaaagccaauuuccuug

SEQ ID NO: 1107294 - RNA, 19 nt, Artificial Sequence
  Description of Artificial Sequence: Synthetic oligonucleotide
  Sense strand starting at position 2996 of SEQ ID NO: 915803
ggaaauuggcuuugaugga

SEQ ID NO: 1107295 - RNA, 19 nt, Artificial Sequence
  Description of Artificial Sequence: Synthetic oligonucleotide
  Antisense strand to SEQ ID NO: 1107294
uccaucaaagccaauuucc

SEQ ID NO: 1107296 - RNA, 19 nt, Artificial Sequence
  Description of Artificial Sequence: Synthetic oligonucleotide
  Sense strand starting at position 3012 of SEQ ID NO: 915803
ggaaauggcaaucguguca

SEQ ID NO: 1107297 - RNA, 19 nt, Artificial Sequence
  Description of Artificial Sequence: Synthetic oligonucleotide
  Antisense strand to SEQ ID NO: 1107296
ugacacgauugccauuucc

SEQ ID NO: 1107298 - RNA, 19 nt, Artificial Sequence
  Description of Artificial Sequence: Synthetic oligonucleotide
  Sense strand starting at position 3262 of SEQ ID NO: 915803
ggaugagucugcuucugga

SEQ ID NO: 1107299 - RNA, 19 nt, Artificial Sequence
  Description of Artificial Sequence: Synthetic oligonucleotide
  Antisense strand to SEQ ID NO: 1107298
uccagaagcagacucaucc

SEQ ID NO: 1107300 - RNA, 19 nt, Artificial Sequence
  Description of Artificial Sequence: Synthetic oligonucleotide
  Sense strand starting at position 3375 of SEQ ID NO: 915803
ccaugugagcuggguauua

SEQ ID NO: 1107301 - RNA, 19 nt, Artificial Sequence
  Description of Artificial Sequence: Synthetic oligonucleotide
  Antisense strand to SEQ ID NO: 1107300
uaauacccagcucacaugg

SEQ ID NO: 1107302 - RNA, 19 nt, Artificial Sequence
  Description of Artificial Sequence: Synthetic oligonucleotide
  Sense strand starting at position 3377 of SEQ ID NO: 915803
augugagcuggguauuaga

SEQ ID NO: 1107303 - RNA, 19 nt, Artificial Sequence
  Description of Artificial Sequence: Synthetic oligonucleotide
  Antisense strand to SEQ ID NO: 1107302
ucuaauacccagcucacau

SEQ ID NO: 1107304 - RNA, 19 nt, Artificial Sequence
  Description of Artificial Sequence: Synthetic oligonucleotide
  Sense strand starting at position 3447 of SEQ ID NO: 915803
acagcuugaaugugaggua

SEQ ID NO: 1107305 - RNA, 19 nt, Artificial Sequence
  Description of Artificial Sequence: Synthetic oligonucleotide
  Antisense strand to SEQ ID NO: 1107304
uaccucacauucaagcugu

SEQ ID NO: 1107306 - RNA, 19 nt, Artificial Sequence
  Description of Artificial Sequence: Synthetic oligonucleotide
  Sense strand starting at position 3591 of SEQ ID NO: 915803
gguuuaagccuggaucugu

SEQ ID NO: 1107307 - RNA, 19 nt, Artificial Sequence
  Description of Artificial Sequence: Synthetic oligonucleotide
  Antisense strand to SEQ ID NO: 1107306
acagauccaggcuuaaacc

SEQ ID NO: 1107308 - RNA, 19 nt, Artificial Sequence
  Description of Artificial Sequence: Synthetic oligonucleotide
  Sense strand starting at position 3596 of SEQ ID NO: 915803
aagccuggaucuguugaau

SEQ ID NO: 1107309 - RNA, 19 nt, Artificial Sequence
  Description of Artificial Sequence: Synthetic oligonucleotide
  Antisense strand to SEQ ID NO: 1107308
auucaacagauccaggcuu

SEQ ID NO: 1107310 - RNA, 19 nt, Artificial Sequence
  Description of Artificial Sequence: Synthetic oligonucleotide
  Sense strand starting at position 3707 of SEQ ID NO: 915803
gccuuuauggcucaguuga

SEQ ID NO: 1107311 - RNA, 19 nt, Artificial Sequence
  Description of Artificial Sequence: Synthetic oligonucleotide
  Antisense strand to SEQ ID NO: 1107310
ucaacugagccauaaaggc

SEQ ID NO: 1107312 - RNA, 19 nt, Artificial Sequence
  Description of Artificial Sequence: Synthetic oligonucleotide
  Sense strand starting at position 3765 of SEQ ID NO: 915803
gcucuuuagcuguugaugu

SEQ ID NO: 1107313 - RNA, 19 nt, Artificial Sequence
  Description of Artificial Sequence: Synthetic oligonucleotide
  Antisense strand to SEQ ID NO: 1107312
acaucaacagcuaaagagc

SEQ ID NO: 1107314 - RNA, 19 nt, Artificial Sequence
  Description of Artificial Sequence: Synthetic oligonucleotide
  Sense strand starting at position 3830 of SEQ ID NO: 915803
ccugacucugccugugaga

SEQ ID NO: 1107315 - RNA, 19 nt, Artificial Sequence
  Description of Artificial Sequence: Synthetic oligonucleotide
  Antisense strand to SEQ ID NO: 1107314
ucucacaggcagagucagg

SEQ ID NO: 1107316 - RNA, 19 nt, Artificial Sequence
  Description of Artificial Sequence: Synthetic oligonucleotide
  Sense strand starting at position 3832 of SEQ ID NO: 915803
ugacucugccugugagaug

SEQ ID NO: 1107317 - RNA, 19 nt, Artificial Sequence
  Description of Artificial Sequence: Synthetic oligonucleotide
  Antisense strand to SEQ ID NO: 1107316
caucucacaggcagaguca

SEQ ID NO: 1107318 - RNA, 19 nt, Artificial Sequence
  Description of Artificial Sequence: Synthetic oligonucleotide
  Sense strand starting at position 3848 of SEQ ID NO: 915803
augaaaggagagugucuua

SEQ ID NO: 1107319 - RNA, 19 nt, Artificial Sequence
  Description of Artificial Sequence: Synthetic oligonucleotide
  Antisense strand to SEQ ID NO: 1107318
uaagacacucuccuuucau

SEQ ID NO: 1107320 - RNA, 19 nt, Artificial Sequence
  Description of Artificial Sequence: Synthetic oligonucleotide
  Sense strand starting at position 3895 of SEQ ID NO: 915803
agucaugaagccgauuaaa

SEQ ID NO: 1107321 - RNA, 19 nt, Artificial Sequence
  Description of Artificial Sequence: Synthetic oligonucleotide
  Antisense strand to SEQ ID NO: 1107320
uuuaaucggcuucaugacu

SEQ ID NO: 1107322 - RNA, 19 nt, Artificial Sequence
  Description of Artificial Sequence: Synthetic oligonucleotide
  Sense strand starting at position 126 of SEQ ID NO: 915804
caaugagagcaguaauguu

SEQ ID NO: 1107323 - RNA, 19 nt, Artificial Sequence
  Description of Artificial Sequence: Synthetic oligonucleotide
  Antisense strand to SEQ ID NO: 1107322
aacauuacugcucucauug

SEQ ID NO: 1107324 - RNA, 19 nt, Artificial Sequence
  Description of Artificial Sequence: Synthetic oligonucleotide
  Sense strand starting at position 226 of SEQ ID NO: 915804
gacugaagucuuggcucua

SEQ ID NO: 1107325 - RNA, 19 nt, Artificial Sequence
  Description of Artificial Sequence: Synthetic oligonucleotide
  Antisense strand to SEQ ID NO: 1107324
uagagccaagacuucaguc

SEQ ID NO: 1107326 - RNA, 19 nt, Artificial Sequence
  Description of Artificial Sequence: Synthetic oligonucleotide
  Sense strand starting at position 383 of SEQ ID NO: 915804
acugcaaagcaguauauau

SEQ ID NO: 1107327 - RNA, 19 nt, Artificial Sequence
  Description of Artificial Sequence: Synthetic oligonucleotide
  Antisense strand to SEQ ID NO: 1107326
auauauacugcuuugcagu

SEQ ID NO: 1107328 - RNA, 19 nt, Artificial Sequence
  Description of Artificial Sequence: Synthetic oligonucleotide
  Sense strand starting at position 583 of SEQ ID NO: 915804
ugaagccuucuguaaauga

SEQ ID NO: 1107329 - RNA, 19 nt, Artificial Sequence
  Description of Artificial Sequence: Synthetic oligonucleotide
  Antisense strand to SEQ ID NO: 1107328
ucauuuacagaaggcuuca

SEQ ID NO: 1107330 - RNA, 19 nt, Artificial Sequence
  Description of Artificial Sequence: Synthetic oligonucleotide
  Sense strand starting at position 601 of SEQ ID NO: 915804
aguggcaguaauuaagaca

SEQ ID NO: 1107331 - RNA, 19 nt, Artificial Sequence
  Description of Artificial Sequence: Synthetic oligonucleotide
  Antisense strand to SEQ ID NO: 1107330
ugucuuaauuacugccacu

SEQ ID NO: 1107332 - RNA, 19 nt, Artificial Sequence
  Description of Artificial Sequence: Synthetic oligonucleotide
  Sense strand starting at position 644 of SEQ ID NO: 915804
cuuugagccucucugagaa

SEQ ID NO: 1107333 - RNA, 19 nt, Artificial Sequence
  Description of Artificial Sequence: Synthetic oligonucleotide
  Antisense strand to SEQ ID NO: 1107332
uucucagagaggcucaaag

SEQ ID NO: 1107334 - RNA, 19 nt, Artificial Sequence
  Description of Artificial Sequence: Synthetic oligonucleotide
  Sense strand starting at position 711 of SEQ ID NO: 915804
aauccagucugccugagaa

SEQ ID NO: 1107335 - RNA, 19 nt, Artificial Sequence
  Description of Artificial Sequence: Synthetic oligonucleotide
  Antisense strand to SEQ ID NO: 1107334
uucucaggcagacuggauu

SEQ ID NO: 1107336 - RNA, 19 nt, Artificial Sequence
  Description of Artificial Sequence: Synthetic oligonucleotide
  Sense strand starting at position 713 of SEQ ID NO: 915804
uccagucugccugagaacu

SEQ ID NO: 1107337 - RNA, 19 nt, Artificial Sequence
  Description of Artificial Sequence: Synthetic oligonucleotide
  Antisense strand to SEQ ID NO: 1107336
aguucucaggcagacugga

SEQ ID NO: 1107338 - RNA, 19 nt, Artificial Sequence
  Description of Artificial Sequence: Synthetic oligonucleotide
  Sense strand starting at position 817 of SEQ ID NO: 915804
caagaucgugcugaaagaa

SEQ ID NO: 1107339 - RNA, 19 nt, Artificial Sequence
  Description of Artificial Sequence: Synthetic oligonucleotide
  Antisense strand to SEQ ID NO: 1107338
uucuuucagcacgaucuug

SEQ ID NO: 1107340 - RNA, 19 nt, Artificial Sequence
  Description of Artificial Sequence: Synthetic oligonucleotide
  Sense strand starting at position 943 of SEQ ID NO: 915804
ugaagacagcuuuaguguu

SEQ ID NO: 1107341 - RNA, 19 nt, Artificial Sequence
  Description of Artificial Sequence: Synthetic oligonucleotide
  Antisense strand to SEQ ID NO: 1107340
aacacuaaagcugucuuca

SEQ ID NO: 1107342 - RNA, 19 nt, Artificial Sequence
  Description of Artificial Sequence: Synthetic oligonucleotide
  Sense strand starting at position 947 of SEQ ID NO: 915804
gacagcuuuaguguucguu

SEQ ID NO: 1107343 - RNA, 19 nt, Artificial Sequence
  Description of Artificial Sequence: Synthetic oligonucleotide
  Antisense strand to SEQ ID NO: 1107342
aacgaacacuaaagcuguc

SEQ ID NO: 1107344 - RNA, 19 nt, Artificial Sequence
  Description of Artificial Sequence: Synthetic oligonucleotide
  Sense strand starting at position 953 of SEQ ID NO: 915804
uuuaguguucguucucauc

SEQ ID NO: 1107345 - RNA, 19 nt, Artificial Sequence
  Description of Artificial Sequence: Synthetic oligonucleotide
  Antisense strand to SEQ ID NO: 1107344
gaugagaacgaacacuaaa

SEQ ID NO: 1107346 - RNA, 19 nt, Artificial Sequence
  Description of Artificial Sequence: Synthetic oligonucleotide
  Sense strand starting at position 1036 of SEQ ID NO: 915804
gcaucugacauggguuaug

SEQ ID NO: 1107347 - RNA, 19 nt, Artificial Sequence
  Description of Artificial Sequence: Synthetic oligonucleotide
  Antisense strand to SEQ ID NO: 1107346
cauaacccaugucagaugc

SEQ ID NO: 1107348 - RNA, 19 nt, Artificial Sequence
  Description of Artificial Sequence: Synthetic oligonucleotide
  Sense strand starting at position 1067 of SEQ ID NO: 915804
cuggcugaaccuggaaauu

SEQ ID NO: 1107349 - RNA, 19 nt, Artificial Sequence
  Description of Artificial Sequence: Synthetic oligonucleotide
  Antisense strand to SEQ ID NO: 1107348
aauuuccagguucagccag

SEQ ID NO: 1107350 - RNA, 19 nt, Artificial Sequence
  Description of Artificial Sequence: Synthetic oligonucleotide
  Sense strand starting at position 1109 of SEQ ID NO: 915804
agugaacgucuacaauaua

SEQ ID NO: 1107351 - RNA, 19 nt, Artificial Sequence
  Description of Artificial Sequence: Synthetic oligonucleotide
  Antisense strand to SEQ ID NO: 1107350
uauauuguagacguucacu

SEQ ID NO: 1107352 - RNA, 19 nt, Artificial Sequence
  Description of Artificial Sequence: Synthetic oligonucleotide
  Sense strand starting at position 1120 of SEQ ID NO: 915804
acaauauacuagucaguac

SEQ ID NO: 1107353 - RNA, 19 nt, Artificial Sequence
  Description of Artificial Sequence: Synthetic oligonucleotide
  Antisense strand to SEQ ID NO: 1107352
guacugacuaguauauugu

SEQ ID NO: 1107354 - RNA, 19 nt, Artificial Sequence
  Description of Artificial Sequence: Synthetic oligonucleotide
  Sense strand starting at position 1269 of SEQ ID NO: 915804
acaccuccuccacggaaua

SEQ ID NO: 1107355 - RNA, 19 nt, Artificial Sequence
  Description of Artificial Sequence: Synthetic oligonucleotide
  Antisense strand to SEQ ID NO: 1107354
uauuccguggaggaggugu

SEQ ID NO: 1107356 - RNA, 19 nt, Artificial Sequence
  Description of Artificial Sequence: Synthetic oligonucleotide
  Sense strand starting at position 1280 of SEQ ID NO: 915804
acggaauauuguccuuuga

SEQ ID NO: 1107357 - RNA, 19 nt, Artificial Sequence
  Description of Artificial Sequence: Synthetic oligonucleotide
  Antisense strand to SEQ ID NO: 1107356
ucaaaggacaauauuccgu

SEQ ID NO: 1107358 - RNA, 19 nt, Artificial Sequence
  Description of Artificial Sequence: Synthetic oligonucleotide
  Sense strand starting at position 1282 of SEQ ID NO: 915804
ggaauauuguccuuugaga

SEQ ID NO: 1107359 - RNA, 19 nt, Artificial Sequence
  Description of Artificial Sequence: Synthetic oligonucleotide
  Antisense strand to SEQ ID NO: 1107358
ucucaaaggacaauauucc

SEQ ID NO: 1107360 - RNA, 19 nt, Artificial Sequence
  Description of Artificial Sequence: Synthetic oligonucleotide
  Sense strand starting at position 1293 of SEQ ID NO: 915804
cuuugagauucugcagauc

SEQ ID NO: 1107361 - RNA, 19 nt, Artificial Sequence
  Description of Artificial Sequence: Synthetic oligonucleotide
  Antisense strand to SEQ ID NO: 1107360
gaucugcagaaucucaaag

SEQ ID NO: 1107362 - RNA, 19 nt, Artificial Sequence
  Description of Artificial Sequence: Synthetic oligonucleotide
  Sense strand starting at position 1688 of SEQ ID NO: 915804
agucgccucagagacaauu

SEQ ID NO: 1107363 - RNA, 19 nt, Artificial Sequence
  Description of Artificial Sequence: Synthetic oligonucleotide
  Antisense strand to SEQ ID NO: 1107362
aauugucucugaggcgacu

SEQ ID NO: 1107364 - RNA, 19 nt, Artificial Sequence
  Description of Artificial Sequence: Synthetic oligonucleotide
  Sense strand starting at position 2242 of SEQ ID NO: 915804
ucaggaucagacuguuauu

SEQ ID NO: 1107365 - RNA, 19 nt, Artificial Sequence
  Description of Artificial Sequence: Synthetic oligonucleotide
  Antisense strand to SEQ ID NO: 1107364
aauaacagucugauccuga

SEQ ID NO: 1107366 - RNA, 19 nt, Artificial Sequence
  Description of Artificial Sequence: Synthetic oligonucleotide
  Sense strand starting at position 2292 of SEQ ID NO: 915804
ucuggacuuggcuacuuaa

SEQ ID NO: 1107367 - RNA, 19 nt, Artificial Sequence
  Description of Artificial Sequence: Synthetic oligonucleotide
  Antisense strand to SEQ ID NO: 1107366
uuaaguagccaaguccaga

SEQ ID NO: 1107368 - RNA, 19 nt, Artificial Sequence
  Description of Artificial Sequence: Synthetic oligonucleotide
  Sense strand starting at position 2302 of SEQ ID NO: 915804
gcuacuuaauugcuaaaug

SEQ ID NO: 1107369 - RNA, 19 nt, Artificial Sequence
  Description of Artificial Sequence: Synthetic oligonucleotide
  Antisense strand to SEQ ID NO: 1107368
cauuuagcaauuaaguagc

SEQ ID NO: 1107370 - RNA, 19 nt, Artificial Sequence
  Description of Artificial Sequence: Synthetic oligonucleotide
  Sense strand starting at position 2313 of SEQ ID NO: 915804
gcuaaaugaccuugugaaa

SEQ ID NO: 1107371 - RNA, 19 nt, Artificial Sequence
  Description of Artificial Sequence: Synthetic oligonucleotide
  Antisense strand to SEQ ID NO: 1107370
uuucacaaggucauuuagc

SEQ ID NO: 1107372 - RNA, 19 nt, Artificial Sequence
  Description of Artificial Sequence: Synthetic oligonucleotide
  Sense strand starting at position 2499 of SEQ ID NO: 915804
acuccauuugcgugaucuu

SEQ ID NO: 1107373 - RNA, 19 nt, Artificial Sequence
  Description of Artificial Sequence: Synthetic oligonucleotide
  Antisense strand to SEQ ID NO: 1107372
aagaucacgcaaauggagu

SEQ ID NO: 1107374 - RNA, 19 nt, Artificial Sequence
  Description of Artificial Sequence: Synthetic oligonucleotide
  Sense strand starting at position 2540 of SEQ ID NO: 915804
gagguucuguuuccucaaa

SEQ ID NO: 1107375 - RNA, 19 nt, Artificial Sequence
  Description of Artificial Sequence: Synthetic oligonucleotide
  Antisense strand to SEQ ID NO: 1107374
uuugaggaaacagaaccuc

SEQ ID NO: 1107376 - RNA, 19 nt, Artificial Sequence
  Description of Artificial Sequence: Synthetic oligonucleotide
  Sense strand starting at position 2697 of SEQ ID NO: 915804
cuugaaggucuaugaagca

SEQ ID NO: 1107377 - RNA, 19 nt, Artificial Sequence
  Description of Artificial Sequence: Synthetic oligonucleotide
  Antisense strand to SEQ ID NO: 1107376
ugcuucauagaccuucaag

SEQ ID NO: 1107378 - RNA, 19 nt, Artificial Sequence
  Description of Artificial Sequence: Synthetic oligonucleotide
  Sense strand starting at position 2816 of SEQ ID NO: 915804
uuaacacaguucuuuguaa

SEQ ID NO: 1107379 - RNA, 19 nt, Artificial Sequence
  Description of Artificial Sequence: Synthetic oligonucleotide
  Antisense strand to SEQ ID NO: 1107378
uuacaaagaacuguguuaa

SEQ ID NO: 1107380 - RNA, 19 nt, Artificial Sequence
  Description of Artificial Sequence: Synthetic oligonucleotide
  Sense strand starting at position 2829 of SEQ ID NO: 915804
uuguaaugguuccuuagau

SEQ ID NO: 1107381 - RNA, 19 nt, Artificial Sequence
  Description of Artificial Sequence: Synthetic oligonucleotide
  Antisense strand to SEQ ID NO: 1107380
aucuaaggaaccauuacaa

SEQ ID NO: 1107382 - RNA, 19 nt, Artificial Sequence
  Description of Artificial Sequence: Synthetic oligonucleotide
  Sense strand starting at position 2830 of SEQ ID NO: 915804
uguaaugguuccuuagaug

SEQ ID NO: 1107383 - RNA, 19 nt, Artificial Sequence
  Description of Artificial Sequence: Synthetic oligonucleotide
  Antisense strand to SEQ ID NO: 1107382
caucuaaggaaccauuaca

SEQ ID NO: 1107384 - RNA, 19 nt, Artificial Sequence
  Description of Artificial Sequence: Synthetic oligonucleotide
  Sense strand starting at position 2848 of SEQ ID NO: 915804
gugucuguugccaagugga

SEQ ID NO: 1107385 - RNA, 19 nt, Artificial Sequence
  Description of Artificial Sequence: Synthetic oligonucleotide
  Antisense strand to SEQ ID NO: 1107384
uccacuuggcaacagacac

SEQ ID NO: 1107386 - RNA, 19 nt, Artificial Sequence
  Description of Artificial Sequence: Synthetic oligonucleotide
  Sense strand starting at position 3093 of SEQ ID NO: 915804
gcccaaacccuuugaggau

SEQ ID NO: 1107387 - RNA, 19 nt, Artificial Sequence
  Description of Artificial Sequence: Synthetic oligonucleotide
  Antisense strand to SEQ ID NO: 1107386
auccucaaaggguuugggc

SEQ ID NO: 1107388 - RNA, 19 nt, Artificial Sequence
  Description of Artificial Sequence: Synthetic oligonucleotide
  Sense strand starting at position 3134 of SEQ ID NO: 915804
cugaacucccagugucuaa

SEQ ID NO: 1107389 - RNA, 19 nt, Artificial Sequence
  Description of Artificial Sequence: Synthetic oligonucleotide
  Antisense strand to SEQ ID NO: 1107388
uuagacacugggaguucag

SEQ ID NO: 1107390 - RNA, 19 nt, Artificial Sequence
  Description of Artificial Sequence: Synthetic oligonucleotide
  Sense strand starting at position 3319 of SEQ ID NO: 915804
ugaggcauugggugaggau

SEQ ID NO: 1107391 - RNA, 19 nt, Artificial Sequence
  Description of Artificial Sequence: Synthetic oligonucleotide
  Antisense strand to SEQ ID NO: 1107390
auccucacccaaugccuca

SEQ ID NO: 1107392 - RNA, 19 nt, Artificial Sequence
  Description of Artificial Sequence: Synthetic oligonucleotide
  Sense strand starting at position 3764 of SEQ ID NO: 915804
augucucauccacgagaug

SEQ ID NO: 1107393 - RNA, 19 nt, Artificial Sequence
  Description of Artificial Sequence: Synthetic oligonucleotide
  Antisense strand to SEQ ID NO: 1107392
caucucguggaugagacau

SEQ ID NO: 1107394 - RNA, 19 nt, Artificial Sequence
  Description of Artificial Sequence: Synthetic oligonucleotide
  Sense strand starting at position 3773 of SEQ ID NO: 915804
ccacgagaugggugguauu

SEQ ID NO: 1107395 - RNA, 19 nt, Artificial Sequence
  Description of Artificial Sequence: Synthetic oligonucleotide
  Antisense strand to SEQ ID NO: 1107394
aauaccacccaucucgugg

SEQ ID NO: 1107396 - RNA, 19 nt, Artificial Sequence
  Description of Artificial Sequence: Synthetic oligonucleotide
  Sense strand starting at position 3843 of SEQ ID NO: 915804
ccaagucacucagcaagua

SEQ ID NO: 1107397 - RNA, 19 nt, Artificial Sequence
  Description of Artificial Sequence: Synthetic oligonucleotide
  Antisense strand to SEQ ID NO: 1107396
uacuugcugagugacuugg

SEQ ID NO: 1107398 - RNA, 19 nt, Artificial Sequence
  Description of Artificial Sequence: Synthetic oligonucleotide
  Sense strand starting at position 3859 of SEQ ID NO: 915804
guaaguaguaaagagagua

SEQ ID NO: 1107399 - RNA, 19 nt, Artificial Sequence
  Description of Artificial Sequence: Synthetic oligonucleotide
  Antisense strand to SEQ ID NO: 1107398
uacucucuuuacuacuuac

SEQ ID NO: 1107400 - RNA, 19 nt, Artificial Sequence
  Description of Artificial Sequence: Synthetic oligonucleotide
  Sense strand starting at position 3940 of SEQ ID NO: 915804
aagucugauuuagaagaug

SEQ ID NO: 1107401 - RNA, 19 nt, Artificial Sequence
  Description of Artificial Sequence: Synthetic oligonucleotide
  Antisense strand to SEQ ID NO: 1107400
caucuucuaaaucagacuu

SEQ ID NO: 1107402 - RNA, 19 nt, Artificial Sequence
  Description of Artificial Sequence: Synthetic oligonucleotide
  Sense strand starting at position 81 of SEQ ID NO: 915805
cuaggaacucucuggauua

SEQ ID NO: 1107403 - RNA, 19 nt, Artificial Sequence
  Description of Artificial Sequence: Synthetic oligonucleotide
  Antisense strand to SEQ ID NO: 1107402
uaauccagagaguuccuag

SEQ ID NO: 1107404 - RNA, 19 nt, Artificial Sequence
  Description of Artificial Sequence: Synthetic oligonucleotide
  Sense strand starting at position 197 of SEQ ID NO: 915805
uccugugguucuccaauuu

SEQ ID NO: 1107405 - RNA, 19 nt, Artificial Sequence
  Description of Artificial Sequence: Synthetic oligonucleotide
  Antisense strand to SEQ ID NO: 1107404
aaauuggagaaccacagga

SEQ ID NO: 1107406 - RNA, 19 nt, Artificial Sequence
  Description of Artificial Sequence: Synthetic oligonucleotide
  Sense strand starting at position 254 of SEQ ID NO: 915805
auccuucuaucugugacau

SEQ ID NO: 1107407 - RNA, 19 nt, Artificial Sequence
  Description of Artificial Sequence: Synthetic oligonucleotide
  Antisense strand to SEQ ID NO: 1107406
augucacagauagaaggau

SEQ ID NO: 1107408 - RNA, 19 nt, Artificial Sequence
  Description of Artificial Sequence: Synthetic oligonucleotide
  Sense strand starting at position 255 of SEQ ID NO: 915805
uccuucuaucugugacauc

SEQ ID NO: 1107409 - RNA, 19 nt, Artificial Sequence
  Description of Artificial Sequence: Synthetic oligonucleotide
  Antisense strand to SEQ ID NO: 1107408
gaugucacagauagaagga

SEQ ID NO: 1107410 - RNA, 19 nt, Artificial Sequence
  Description of Artificial Sequence: Synthetic oligonucleotide
  Sense strand starting at position 313 of SEQ ID NO: 915805
cuugcuguucugggaacau

SEQ ID NO: 1107411 - RNA, 19 nt, Artificial Sequence
  Description of Artificial Sequence: Synthetic oligonucleotide
  Antisense strand to SEQ ID NO: 1107410
auguucccagaacagcaag

SEQ ID NO: 1107412 - RNA, 19 nt, Artificial Sequence
  Description of Artificial Sequence: Synthetic oligonucleotide
  Sense strand starting at position 653 of SEQ ID NO: 915805
gagccuguaccugguguaa

SEQ ID NO: 1107413 - RNA, 19 nt, Artificial Sequence
  Description of Artificial Sequence: Synthetic oligonucleotide
  Antisense strand to SEQ ID NO: 1107412
uuacaccagguacaggcuc

SEQ ID NO: 1107414 - RNA, 19 nt, Artificial Sequence
  Description of Artificial Sequence: Synthetic oligonucleotide
  Sense strand starting at position 699 of SEQ ID NO: 915805
auuccaguuguauauacuu

SEQ ID NO: 1107415 - RNA, 19 nt, Artificial Sequence
  Description of Artificial Sequence: Synthetic oligonucleotide
  Antisense strand to SEQ ID NO: 1107414
aaguauauacaacuggaau

SEQ ID NO: 1107416 - RNA, 19 nt, Artificial Sequence
  Description of Artificial Sequence: Synthetic oligonucleotide
  Sense strand starting at position 719 of SEQ ID NO: 915805
ugggauaccaagugauguu

SEQ ID NO: 1107417 - RNA, 19 nt, Artificial Sequence
  Description of Artificial Sequence: Synthetic oligonucleotide
  Antisense strand to SEQ ID NO: 1107416
aacaucacuugguauccca

SEQ ID NO: 1107418 - RNA, 19 nt, Artificial Sequence
  Description of Artificial Sequence: Synthetic oligonucleotide
  Sense strand starting at position 745 of SEQ ID NO: 915805
aucaguacagcuuggaaua

SEQ ID NO: 1107419 - RNA, 19 nt, Artificial Sequence
  Description of Artificial Sequence: Synthetic oligonucleotide
  Antisense strand to SEQ ID NO: 1107418
uauuccaagcuguacugau

SEQ ID NO: 1107420 - RNA, 19 nt, Artificial Sequence
  Description of Artificial Sequence: Synthetic oligonucleotide
  Sense strand starting at position 746 of SEQ ID NO: 915805
ucaguacagcuuggaauaa

SEQ ID NO: 1107421 - RNA, 19 nt, Artificial Sequence
  Description of Artificial Sequence: Synthetic oligonucleotide
  Antisense strand to SEQ ID NO: 1107420
uuauuccaagcuguacuga

SEQ ID NO: 1107422 - RNA, 19 nt, Artificial Sequence
  Description of Artificial Sequence: Synthetic oligonucleotide
  Sense strand starting at position 747 of SEQ ID NO: 915805
caguacagcuuggaauaaa

SEQ ID NO: 1107423 - RNA, 19 nt, Artificial Sequence
  Description of Artificial Sequence: Synthetic oligonucleotide
  Antisense strand to SEQ ID NO: 1107422
uuuauuccaagcuguacug

SEQ ID NO: 1107424 - RNA, 19 nt, Artificial Sequence
  Description of Artificial Sequence: Synthetic oligonucleotide
  Sense strand starting at position 769 of SEQ ID NO: 915805
agcuaauuaggauagccau

SEQ ID NO: 1107425 - RNA, 19 nt, Artificial Sequence
  Description of Artificial Sequence: Synthetic oligonucleotide
  Antisense strand to SEQ ID NO: 1107424
auggcuauccuaauuagcu

SEQ ID NO: 1107426 - RNA, 19 nt, Artificial Sequence
  Description of Artificial Sequence: Synthetic oligonucleotide
  Sense strand starting at position 813 of SEQ ID NO: 915805
augagaauuuaccaccugu

SEQ ID NO: 1107427 - RNA, 19 nt, Artificial Sequence
  Description of Artificial Sequence: Synthetic oligonucleotide
  Antisense strand to SEQ ID NO: 1107426
acaggugguaaauucucau

SEQ ID NO: 1107428 - RNA, 19 nt, Artificial Sequence
  Description of Artificial Sequence: Synthetic oligonucleotide
  Sense strand starting at position 1057 of SEQ ID NO: 915805
guaaacuucugaccuuaag

SEQ ID NO: 1107429 - RNA, 19 nt, Artificial Sequence
  Description of Artificial Sequence: Synthetic oligonucleotide
  Antisense strand to SEQ ID NO: 1107428
cuuaaggucagaaguuuac

SEQ ID NO: 1107430 - RNA, 19 nt, Artificial Sequence
  Description of Artificial Sequence: Synthetic oligonucleotide
  Sense strand starting at position 1233 of SEQ ID NO: 915805
ugcuuauuauuccucuagu

SEQ ID NO: 1107431 - RNA, 19 nt, Artificial Sequence
  Description of Artificial Sequence: Synthetic oligonucleotide
  Antisense strand to SEQ ID NO: 1107430
acuagaggaauaauaagca

SEQ ID NO: 1107432 - RNA, 19 nt, Artificial Sequence
  Description of Artificial Sequence: Synthetic oligonucleotide
  Sense strand starting at position 1234 of SEQ ID NO: 915805
gcuuauuauuccucuaguu

SEQ ID NO: 1107433 - RNA, 19 nt, Artificial Sequence
  Description of Artificial Sequence: Synthetic oligonucleotide
  Antisense strand to SEQ ID NO: 1107432
aacuagaggaauaauaagc

SEQ ID NO: 1107434 - RNA, 19 nt, Artificial Sequence
  Description of Artificial Sequence: Synthetic oligonucleotide
  Sense strand starting at position 1277 of SEQ ID NO: 915805
aggaauuuguucuauugua

SEQ ID NO: 1107435 - RNA, 19 nt, Artificial Sequence
  Description of Artificial Sequence: Synthetic oligonucleotide
  Antisense strand to SEQ ID NO: 1107434
uacaauagaacaaauuccu

SEQ ID NO: 1107436 - RNA, 19 nt, Artificial Sequence
  Description of Artificial Sequence: Synthetic oligonucleotide
  Sense strand starting at position 1295 of SEQ ID NO: 915805
acccuucgucccuguaaca

SEQ ID NO: 1107437 - RNA, 19 nt, Artificial Sequence
  Description of Artificial Sequence: Synthetic oligonucleotide
  Antisense strand to SEQ ID NO: 1107436
uguuacagggacgaagggu

SEQ ID NO: 1107438 - RNA, 19 nt, Artificial Sequence
  Description of Artificial Sequence: Synthetic oligonucleotide
  Sense strand starting at position 1328 of SEQ ID NO: 915805
guaggcucccaauaaguau

SEQ ID NO: 1107439 - RNA, 19 nt, Artificial Sequence
  Description of Artificial Sequence: Synthetic oligonucleotide
  Antisense strand to SEQ ID NO: 1107438
auacuuauugggagccuac

SEQ ID NO: 1107440 - RNA, 19 nt, Artificial Sequence
  Description of Artificial Sequence: Synthetic oligonucleotide
  Sense strand starting at position 1336 of SEQ ID NO: 915805
ccaauaaguauuugcgagu

SEQ ID NO: 1107441 - RNA, 19 nt, Artificial Sequence
  Description of Artificial Sequence: Synthetic oligonucleotide
  Antisense strand to SEQ ID NO: 1107440
acucgcaaauacuuauugg

SEQ ID NO: 1107442 - RNA, 19 nt, Artificial Sequence
  Description of Artificial Sequence: Synthetic oligonucleotide
  Sense strand starting at position 1337 of SEQ ID NO: 915805
caauaaguauuugcgagua

SEQ ID NO: 1107443 - RNA, 19 nt, Artificial Sequence
  Description of Artificial Sequence: Synthetic oligonucleotide
  Antisense strand to SEQ ID NO: 1107442
uacucgcaaauacuuauug

SEQ ID NO: 1107444 - RNA, 19 nt, Artificial Sequence
  Description of Artificial Sequence: Synthetic oligonucleotide
  Sense strand starting at position 1339 of SEQ ID NO: 915805
auaaguauuugcgaguaaa

SEQ ID NO: 1107445 - RNA, 19 nt, Artificial Sequence
  Description of Artificial Sequence: Synthetic oligonucleotide
  Antisense strand to SEQ ID NO: 1107444
uuuacucgcaaauacuuau

SEQ ID NO: 1107446 - RNA, 19 nt, Artificial Sequence
  Description of Artificial Sequence: Synthetic oligonucleotide
  Sense strand starting at position 1405 of SEQ ID NO: 915805
gucugauucuaacaaccug

SEQ ID NO: 1107447 - RNA, 19 nt, Artificial Sequence
  Description of Artificial Sequence: Synthetic oligonucleotide
  Antisense strand to SEQ ID NO: 1107446
cagguuguuagaaucagac

SEQ ID NO: 1107448 - RNA, 19 nt, Artificial Sequence
  Description of Artificial Sequence: Synthetic oligonucleotide
  Sense strand starting at position 1958 of SEQ ID NO: 915805
aguugaucuggccaacgga

SEQ ID NO: 1107449 - RNA, 19 nt, Artificial Sequence
  Description of Artificial Sequence: Synthetic oligonucleotide
  Antisense strand to SEQ ID NO: 1107448
uccguuggccagaucaacu

SEQ ID NO: 1107450 - RNA, 19 nt, Artificial Sequence
  Description of Artificial Sequence: Synthetic oligonucleotide
  Sense strand starting at position 2633 of SEQ ID NO: 915805
ccauauuuagugcgaauuc

SEQ ID NO: 1107451 - RNA, 19 nt, Artificial Sequence
  Description of Artificial Sequence: Synthetic oligonucleotide
  Antisense strand to SEQ ID NO: 1107450
gaauucgcacuaaauaugg

SEQ ID NO: 1107452 - RNA, 19 nt, Artificial Sequence
  Description of Artificial Sequence: Synthetic oligonucleotide
  Sense strand starting at position 2883 of SEQ ID NO: 915805
aagugagugcucgcccauu

SEQ ID NO: 1107453 - RNA, 19 nt, Artificial Sequence
  Description of Artificial Sequence: Synthetic oligonucleotide
  Antisense strand to SEQ ID NO: 1107452
aaugggcgagcacucacuu

SEQ ID NO: 1107454 - RNA, 19 nt, Artificial Sequence
  Description of Artificial Sequence: Synthetic oligonucleotide
  Sense strand starting at position 2894 of SEQ ID NO: 915805
cgcccauuuccugacagca

SEQ ID NO: 1107455 - RNA, 19 nt, Artificial Sequence
  Description of Artificial Sequence: Synthetic oligonucleotide
  Antisense strand to SEQ ID NO: 1107454
ugcugucaggaaaugggcg

SEQ ID NO: 1107456 - RNA, 19 nt, Artificial Sequence
  Description of Artificial Sequence: Synthetic oligonucleotide
  Sense strand starting at position 2967 of SEQ ID NO: 915805
ggcagagcuugucuuuaac

SEQ ID NO: 1107457 - RNA, 19 nt, Artificial Sequence
  Description of Artificial Sequence: Synthetic oligonucleotide
  Antisense strand to SEQ ID NO: 1107456
guuaaagacaagcucugcc

SEQ ID NO: 1107458 - RNA, 19 nt, Artificial Sequence
  Description of Artificial Sequence: Synthetic oligonucleotide
  Sense strand starting at position 2970 of SEQ ID NO: 915805
agagcuugucuuuaaccua

SEQ ID NO: 1107459 - RNA, 19 nt, Artificial Sequence
  Description of Artificial Sequence: Synthetic oligonucleotide
  Antisense strand to SEQ ID NO: 1107458
uagguuaaagacaagcucu

SEQ ID NO: 1107460 - RNA, 19 nt, Artificial Sequence
  Description of Artificial Sequence: Synthetic oligonucleotide
  Sense strand starting at position 2977 of SEQ ID NO: 915805
gucuuuaaccuagagugcu

SEQ ID NO: 1107461 - RNA, 19 nt, Artificial Sequence
  Description of Artificial Sequence: Synthetic oligonucleotide
  Antisense strand to SEQ ID NO: 1107460
agcacucuagguuaaagac

SEQ ID NO: 1107462 - RNA, 19 nt, Artificial Sequence
  Description of Artificial Sequence: Synthetic oligonucleotide
  Sense strand starting at position 3209 of SEQ ID NO: 915805
agaagaaucuucuucuagu

SEQ ID NO: 1107463 - RNA, 19 nt, Artificial Sequence
  Description of Artificial Sequence: Synthetic oligonucleotide
  Antisense strand to SEQ ID NO: 1107462
acuagaagaagauucuucu

SEQ ID NO: 1107464 - RNA, 19 nt, Artificial Sequence
  Description of Artificial Sequence: Synthetic oligonucleotide
  Sense strand starting at position 3298 of SEQ ID NO: 915805
ugagaaggguccucucaga

SEQ ID NO: 1107465 - RNA, 19 nt, Artificial Sequence
  Description of Artificial Sequence: Synthetic oligonucleotide
  Antisense strand to SEQ ID NO: 1107464
ucugagaggacccuucuca

SEQ ID NO: 1107466 - RNA, 19 nt, Artificial Sequence
  Description of Artificial Sequence: Synthetic oligonucleotide
  Sense strand starting at position 3354 of SEQ ID NO: 915805
cgcuguaucucauuuaaca

SEQ ID NO: 1107467 - RNA, 19 nt, Artificial Sequence
  Description of Artificial Sequence: Synthetic oligonucleotide
  Antisense strand to SEQ ID NO: 1107466
uguuaaaugagauacagcg

SEQ ID NO: 1107468 - RNA, 19 nt, Artificial Sequence
  Description of Artificial Sequence: Synthetic oligonucleotide
  Sense strand starting at position 3416 of SEQ ID NO: 915805
aucacagacugucagacau

SEQ ID NO: 1107469 - RNA, 19 nt, Artificial Sequence
  Description of Artificial Sequence: Synthetic oligonucleotide
  Antisense strand to SEQ ID NO: 1107468
augucugacagucugugau

SEQ ID NO: 1107470 - RNA, 19 nt, Artificial Sequence
  Description of Artificial Sequence: Synthetic oligonucleotide
  Sense strand starting at position 3508 of SEQ ID NO: 915805
ggcccugagucugcugaaa

SEQ ID NO: 1107471 - RNA, 19 nt, Artificial Sequence
  Description of Artificial Sequence: Synthetic oligonucleotide
  Antisense strand to SEQ ID NO: 1107470
uuucagcagacucagggcc

SEQ ID NO: 1107472 - RNA, 19 nt, Artificial Sequence
  Description of Artificial Sequence: Synthetic oligonucleotide
  Sense strand starting at position 3781 of SEQ ID NO: 915805
ggagaauacuuuggagagu

SEQ ID NO: 1107473 - RNA, 19 nt, Artificial Sequence
  Description of Artificial Sequence: Synthetic oligonucleotide
  Antisense strand to SEQ ID NO: 1107472
acucuccaaaguauucucc

SEQ ID NO: 1107474 - RNA, 19 nt, Artificial Sequence
  Description of Artificial Sequence: Synthetic oligonucleotide
  Sense strand starting at position 3856 of SEQ ID NO: 915805
gugccaacacuguaugacu

SEQ ID NO: 1107475 - RNA, 19 nt, Artificial Sequence
  Description of Artificial Sequence: Synthetic oligonucleotide
  Antisense strand to SEQ ID NO: 1107474
agucauacaguguuggcac

SEQ ID NO: 1107476 - RNA, 19 nt, Artificial Sequence
  Description of Artificial Sequence: Synthetic oligonucleotide
  Sense strand starting at position 3940 of SEQ ID NO: 915805
gaaucagaguacuucugcu

SEQ ID NO: 1107477 - RNA, 19 nt, Artificial Sequence
  Description of Artificial Sequence: Synthetic oligonucleotide
  Antisense strand to SEQ ID NO: 1107476
agcagaaguacucugauuc

SEQ ID NO: 1107478 - RNA, 19 nt, Artificial Sequence
  Description of Artificial Sequence: Synthetic oligonucleotide
  Sense strand starting at position 3948 of SEQ ID NO: 915805
guacuucugcuggguuaga

SEQ ID NO: 1107479 - RNA, 19 nt, Artificial Sequence
  Description of Artificial Sequence: Synthetic oligonucleotide
  Antisense strand to SEQ ID NO: 1107478
ucuaacccagcagaaguac

SEQ ID NO: 1107480 - RNA, 19 nt, Artificial Sequence
  Description of Artificial Sequence: Synthetic oligonucleotide
  Sense strand starting at position 3949 of SEQ ID NO: 915805
uacuucugcuggguuagau

SEQ ID NO: 1107481 - RNA, 19 nt, Artificial Sequence
  Description of Artificial Sequence: Synthetic oligonucleotide
  Antisense strand to SEQ ID NO: 1107480
aucuaacccagcagaagua

SEQ ID NO: 1107482 - RNA, 19 nt, Artificial Sequence
  Description of Artificial Sequence: Synthetic oligonucleotide
  Sense strand starting at position 136 of SEQ ID NO: 915806
gaaugugcugcagauacua

SEQ ID NO: 1107483 - RNA, 19 nt, Artificial Sequence
  Description of Artificial Sequence: Synthetic oligonucleotide
  Antisense strand to SEQ ID NO: 1107482
uaguaucugcagcacauuc

SEQ ID NO: 1107484 - RNA, 19 nt, Artificial Sequence
  Description of Artificial Sequence: Synthetic oligonucleotide
  Sense strand starting at position 169 of SEQ ID NO: 915806
gggugaguaugguucauca

SEQ ID NO: 1107485 - RNA, 19 nt, Artificial Sequence
  Description of Artificial Sequence: Synthetic oligonucleotide
  Antisense strand to SEQ ID NO: 1107484
ugaugaaccauacucaccc

SEQ ID NO: 1107486 - RNA, 19 nt, Artificial Sequence
  Description of Artificial Sequence: Synthetic oligonucleotide
  Sense strand starting at position 171 of SEQ ID NO: 915806
gugaguaugguucaucaga

SEQ ID NO: 1107487 - RNA, 19 nt, Artificial Sequence
  Description of Artificial Sequence: Synthetic oligonucleotide
  Antisense strand to SEQ ID NO: 1107486
ucugaugaaccauacucac

SEQ ID NO: 1107488 - RNA, 19 nt, Artificial Sequence
  Description of Artificial Sequence: Synthetic oligonucleotide
  Sense strand starting at position 545 of SEQ ID NO: 915806
aguaauauguaugccauau

SEQ ID NO: 1107489 - RNA, 19 nt, Artificial Sequence
  Description of Artificial Sequence: Synthetic oligonucleotide
  Antisense strand to SEQ ID NO: 1107488
auauggcauacauauuacu

SEQ ID NO: 1107490 - RNA, 19 nt, Artificial Sequence
  Description of Artificial Sequence: Synthetic oligonucleotide
  Sense strand starting at position 549 of SEQ ID NO: 915806
auauguaugccauauugag

SEQ ID NO: 1107491 - RNA, 19 nt, Artificial Sequence
  Description of Artificial Sequence: Synthetic oligonucleotide
  Antisense strand to SEQ ID NO: 1107490
cucaauauggcauacauau

SEQ ID NO: 1107492 - RNA, 19 nt, Artificial Sequence
  Description of Artificial Sequence: Synthetic oligonucleotide
  Sense strand starting at position 618 of SEQ ID NO: 915806
caggauaugugguuugaag

SEQ ID NO: 1107493 - RNA, 19 nt, Artificial Sequence
  Description of Artificial Sequence: Synthetic oligonucleotide
  Antisense strand to SEQ ID NO: 1107492
cuucaaaccacauauccug

SEQ ID NO: 1107494 - RNA, 19 nt, Artificial Sequence
  Description of Artificial Sequence: Synthetic oligonucleotide
  Sense strand starting at position 629 of SEQ ID NO: 915806
guuugaaggcuuuaauaag

SEQ ID NO: 1107495 - RNA, 19 nt, Artificial Sequence
  Description of Artificial Sequence: Synthetic oligonucleotide
  Antisense strand to SEQ ID NO: 1107494
cuuauuaaagccuucaaac

SEQ ID NO: 1107496 - RNA, 19 nt, Artificial Sequence
  Description of Artificial Sequence: Synthetic oligonucleotide
  Sense strand starting at position 663 of SEQ ID NO: 915806
uuccuuaaauagguggaua

SEQ ID NO: 1107497 - RNA, 19 nt, Artificial Sequence
  Description of Artificial Sequence: Synthetic oligonucleotide
  Antisense strand to SEQ ID NO: 1107496
uauccaccuauuuaaggaa

SEQ ID NO: 1107498 - RNA, 19 nt, Artificial Sequence
  Description of Artificial Sequence: Synthetic oligonucleotide
  Sense strand starting at position 717 of SEQ ID NO: 915806
ugaaauaagcgguguaaca

SEQ ID NO: 1107499 - RNA, 19 nt, Artificial Sequence
  Description of Artificial Sequence: Synthetic oligonucleotide
  Antisense strand to SEQ ID NO: 1107498
uguuacaccgcuuauuuca

SEQ ID NO: 1107500 - RNA, 19 nt, Artificial Sequence
  Description of Artificial Sequence: Synthetic oligonucleotide
  Sense strand starting at position 719 of SEQ ID NO: 915806
aaauaagcgguguaacagu

SEQ ID NO: 1107501 - RNA, 19 nt, Artificial Sequence
  Description of Artificial Sequence: Synthetic oligonucleotide
  Antisense strand to SEQ ID NO: 1107500
acuguuacaccgcuuauuu

SEQ ID NO: 1107502 - RNA, 19 nt, Artificial Sequence
  Description of Artificial Sequence: Synthetic oligonucleotide
  Sense strand starting at position 792 of SEQ ID NO: 915806
ugucaagguaugggagaaa

SEQ ID NO: 1107503 - RNA, 19 nt, Artificial Sequence
  Description of Artificial Sequence: Synthetic oligonucleotide
  Antisense strand to SEQ ID NO: 1107502
uuucucccauaccuugaca

SEQ ID NO: 1107504 - RNA, 19 nt, Artificial Sequence
  Description of Artificial Sequence: Synthetic oligonucleotide
  Sense strand starting at position 817 of SEQ ID NO: 915806
agaaguuuaaugugggugu

SEQ ID NO: 1107505 - RNA, 19 nt, Artificial Sequence
  Description of Artificial Sequence: Synthetic oligonucleotide
  Antisense strand to SEQ ID NO: 1107504
acacccacauuaaacuucu

SEQ ID NO: 1107506 - RNA, 19 nt, Artificial Sequence
  Description of Artificial Sequence: Synthetic oligonucleotide
  Sense strand starting at position 830 of SEQ ID NO: 915806
ggguguuaucauuauauac

SEQ ID NO: 1107507 - RNA, 19 nt, Artificial Sequence
  Description of Artificial Sequence: Synthetic oligonucleotide
  Antisense strand to SEQ ID NO: 1107506
guauauaaugauaacaccc

SEQ ID NO: 1107508 - RNA, 19 nt, Artificial Sequence
  Description of Artificial Sequence: Synthetic oligonucleotide
  Sense strand starting at position 838 of SEQ ID NO: 915806
ucauuauauaccgagguag

SEQ ID NO: 1107509 - RNA, 19 nt, Artificial Sequence
  Description of Artificial Sequence: Synthetic oligonucleotide
  Antisense strand to SEQ ID NO: 1107508
cuaccucgguauauaauga

SEQ ID NO: 1107510 - RNA, 19 nt, Artificial Sequence
  Description of Artificial Sequence: Synthetic oligonucleotide
  Sense strand starting at position 840 of SEQ ID NO: 915806
auuauauaccgagguagca

SEQ ID NO: 1107511 - RNA, 19 nt, Artificial Sequence
  Description of Artificial Sequence: Synthetic oligonucleotide
  Antisense strand to SEQ ID NO: 1107510
ugcuaccucgguauauaau

SEQ ID NO: 1107512 - RNA, 19 nt, Artificial Sequence
  Description of Artificial Sequence: Synthetic oligonucleotide
  Sense strand starting at position 890 of SEQ ID NO: 915806
aaguuuauacaauggguga

SEQ ID NO: 1107513 - RNA, 19 nt, Artificial Sequence
  Description of Artificial Sequence: Synthetic oligonucleotide
  Antisense strand to SEQ ID NO: 1107512
ucacccauuguauaaacuu

SEQ ID NO: 1107514 - RNA, 19 nt, Artificial Sequence
  Description of Artificial Sequence: Synthetic oligonucleotide
  Sense strand starting at position 891 of SEQ ID NO: 915806
aguuuauacaaugggugau

SEQ ID NO: 1107515 - RNA, 19 nt, Artificial Sequence
  Description of Artificial Sequence: Synthetic oligonucleotide
  Antisense strand to SEQ ID NO: 1107514
aucacccauuguauaaacu

SEQ ID NO: 1107516 - RNA, 19 nt, Artificial Sequence
  Description of Artificial Sequence: Synthetic oligonucleotide
  Sense strand starting at position 892 of SEQ ID NO: 915806
guuuauacaaugggugaua

SEQ ID NO: 1107517 - RNA, 19 nt, Artificial Sequence
  Description of Artificial Sequence: Synthetic oligonucleotide
  Antisense strand to SEQ ID NO: 1107516
uaucacccauuguauaaac

SEQ ID NO: 1107518 - RNA, 19 nt, Artificial Sequence
  Description of Artificial Sequence: Synthetic oligonucleotide
  Sense strand starting at position 894 of SEQ ID NO: 915806
uuauacaaugggugauaau

SEQ ID NO: 1107519 - RNA, 19 nt, Artificial Sequence
  Description of Artificial Sequence: Synthetic oligonucleotide
  Antisense strand to SEQ ID NO: 1107518
auuaucacccauuguauaa

SEQ ID NO: 1107520 - RNA, 19 nt, Artificial Sequence
  Description of Artificial Sequence: Synthetic oligonucleotide
  Sense strand starting at position 903 of SEQ ID NO: 915806
gggugauaaugagcauucu

SEQ ID NO: 1107521 - RNA, 19 nt, Artificial Sequence
  Description of Artificial Sequence: Synthetic oligonucleotide
  Antisense strand to SEQ ID NO: 1107520
agaaugcucauuaucaccc

SEQ ID NO: 1107522 - RNA, 19 nt, Artificial Sequence
  Description of Artificial Sequence: Synthetic oligonucleotide
  Sense strand starting at position 979 of SEQ ID NO: 915806
uagaucaacuuggucaaga

SEQ ID NO: 1107523 - RNA, 19 nt, Artificial Sequence
  Description of Artificial Sequence: Synthetic oligonucleotide
  Antisense strand to SEQ ID NO: 1107522
ucuugaccaaguugaucua

SEQ ID NO: 1107524 - RNA, 19 nt, Artificial Sequence
  Description of Artificial Sequence: Synthetic oligonucleotide
  Sense strand starting at position 980 of SEQ ID NO: 915806
agaucaacuuggucaagau

SEQ ID NO: 1107525 - RNA, 19 nt, Artificial Sequence
  Description of Artificial Sequence: Synthetic oligonucleotide
  Antisense strand to SEQ ID NO: 1107524
aucuugaccaaguugaucu

SEQ ID NO: 1107526 - RNA, 19 nt, Artificial Sequence
  Description of Artificial Sequence: Synthetic oligonucleotide
  Sense strand starting at position 1050 of SEQ ID NO: 915806
acguauaugugauccuaca

SEQ ID NO: 1107527 - RNA, 19 nt, Artificial Sequence
  Description of Artificial Sequence: Synthetic oligonucleotide
  Antisense strand to SEQ ID NO: 1107526
uguaggaucacauauacgu

SEQ ID NO: 1107528 - RNA, 19 nt, Artificial Sequence
  Description of Artificial Sequence: Synthetic oligonucleotide
  Sense strand starting at position 1306 of SEQ ID NO: 915806
aaauaaguaucagcagagu

SEQ ID NO: 1107529 - RNA, 19 nt, Artificial Sequence
  Description of Artificial Sequence: Synthetic oligonucleotide
  Antisense strand to SEQ ID NO: 1107528
acucugcugauacuuauuu

SEQ ID NO: 1107530 - RNA, 19 nt, Artificial Sequence
  Description of Artificial Sequence: Synthetic oligonucleotide
  Sense strand starting at position 1634 of SEQ ID NO: 915806
acucgucguccguuuccaa

SEQ ID NO: 1107531 - RNA, 19 nt, Artificial Sequence
  Description of Artificial Sequence: Synthetic oligonucleotide
  Antisense strand to SEQ ID NO: 1107530
uuggaaacggacgacgagu

SEQ ID NO: 1107532 - RNA, 19 nt, Artificial Sequence
  Description of Artificial Sequence: Synthetic oligonucleotide
  Sense strand starting at position 2283 of SEQ ID NO: 915806
agacaaggauuggccuaau

SEQ ID NO: 1107533 - RNA, 19 nt, Artificial Sequence
  Description of Artificial Sequence: Synthetic oligonucleotide
  Antisense strand to SEQ ID NO: 1107532
auuaggccaauccuugucu

SEQ ID NO: 1107534 - RNA, 19 nt, Artificial Sequence
  Description of Artificial Sequence: Synthetic oligonucleotide
  Sense strand starting at position 2286 of SEQ ID NO: 915806
caaggauuggccuaaugca

SEQ ID NO: 1107535 - RNA, 19 nt, Artificial Sequence
  Description of Artificial Sequence: Synthetic oligonucleotide
  Antisense strand to SEQ ID NO: 1107534
ugcauuaggccaauccuug

SEQ ID NO: 1107536 - RNA, 19 nt, Artificial Sequence
  Description of Artificial Sequence: Synthetic oligonucleotide
  Sense strand starting at position 2348 of SEQ ID NO: 915806
uccugcguccuguuguauu

SEQ ID NO: 1107537 - RNA, 19 nt, Artificial Sequence
  Description of Artificial Sequence: Synthetic oligonucleotide
  Antisense strand to SEQ ID NO: 1107536
aauacaacaggacgcagga

SEQ ID NO: 1107538 - RNA, 19 nt, Artificial Sequence
  Description of Artificial Sequence: Synthetic oligonucleotide
  Sense strand starting at position 2737 of SEQ ID NO: 915806
cugugucucccacaugaag

SEQ ID NO: 1107539 - RNA, 19 nt, Artificial Sequence
  Description of Artificial Sequence: Synthetic oligonucleotide
  Antisense strand to SEQ ID NO: 1107538
cuucaugugggagacacag

SEQ ID NO: 1107540 - RNA, 19 nt, Artificial Sequence
  Description of Artificial Sequence: Synthetic oligonucleotide
  Sense strand starting at position 3067 of SEQ ID NO: 915806
gagcuaacucugcauaggu

SEQ ID NO: 1107541 - RNA, 19 nt, Artificial Sequence
  Description of Artificial Sequence: Synthetic oligonucleotide
  Antisense strand to SEQ ID NO: 1107540
accuaugcagaguuagcuc

SEQ ID NO: 1107542 - RNA, 19 nt, Artificial Sequence
  Description of Artificial Sequence: Synthetic oligonucleotide
  Sense strand starting at position 3069 of SEQ ID NO: 915806
gcuaacucugcauagguca

SEQ ID NO: 1107543 - RNA, 19 nt, Artificial Sequence
  Description of Artificial Sequence: Synthetic oligonucleotide
  Antisense strand to SEQ ID NO: 1107542
ugaccuaugcagaguuagc

SEQ ID NO: 1107544 - RNA, 19 nt, Artificial Sequence
  Description of Artificial Sequence: Synthetic oligonucleotide
  Sense strand starting at position 3103 of SEQ ID NO: 915806
cccugauuagcccaagaca

SEQ ID NO: 1107545 - RNA, 19 nt, Artificial Sequence
  Description of Artificial Sequence: Synthetic oligonucleotide
  Antisense strand to SEQ ID NO: 1107544
ugucuugggcuaaucaggg

SEQ ID NO: 1107546 - RNA, 19 nt, Artificial Sequence
  Description of Artificial Sequence: Synthetic oligonucleotide
  Sense strand starting at position 3123 of SEQ ID NO: 915806
cugugaacccaauagcaau

SEQ ID NO: 1107547 - RNA, 19 nt, Artificial Sequence
  Description of Artificial Sequence: Synthetic oligonucleotide
  Antisense strand to SEQ ID NO: 1107546
auugcuauuggguucacag

SEQ ID NO: 1107548 - RNA, 19 nt, Artificial Sequence
  Description of Artificial Sequence: Synthetic oligonucleotide
  Sense strand starting at position 3324 of SEQ ID NO: 915806
ugguucugacacuagcauu

SEQ ID NO: 1107549 - RNA, 19 nt, Artificial Sequence
  Description of Artificial Sequence: Synthetic oligonucleotide
  Antisense strand to SEQ ID NO: 1107548
aaugcuagugucagaacca

SEQ ID NO: 1107550 - RNA, 19 nt, Artificial Sequence
  Description of Artificial Sequence: Synthetic oligonucleotide
  Sense strand starting at position 3337 of SEQ ID NO: 915806
agcauuaggcaguaaggua

SEQ ID NO: 1107551 - RNA, 19 nt, Artificial Sequence
  Description of Artificial Sequence: Synthetic oligonucleotide
  Antisense strand to SEQ ID NO: 1107550
uaccuuacugccuaaugcu

SEQ ID NO: 1107552 - RNA, 19 nt, Artificial Sequence
  Description of Artificial Sequence: Synthetic oligonucleotide
  Sense strand starting at position 3384 of SEQ ID NO: 915806
ucuaguuccuucucugaca

SEQ ID NO: 1107553 - RNA, 19 nt, Artificial Sequence
  Description of Artificial Sequence: Synthetic oligonucleotide
  Antisense strand to SEQ ID NO: 1107552
ugucagagaaggaacuaga

SEQ ID NO: 1107554 - RNA, 19 nt, Artificial Sequence
  Description of Artificial Sequence: Synthetic oligonucleotide
  Sense strand starting at position 3385 of SEQ ID NO: 915806
cuaguuccuucucugacau

SEQ ID NO: 1107555 - RNA, 19 nt, Artificial Sequence
  Description of Artificial Sequence: Synthetic oligonucleotide
  Antisense strand to SEQ ID NO: 1107554
augucagagaaggaacuag

SEQ ID NO: 1107556 - RNA, 19 nt, Artificial Sequence
  Description of Artificial Sequence: Synthetic oligonucleotide
  Sense strand starting at position 3441 of SEQ ID NO: 915806
gcgucaauccagcauuuau

SEQ ID NO: 1107557 - RNA, 19 nt, Artificial Sequence
  Description of Artificial Sequence: Synthetic oligonucleotide
  Antisense strand to SEQ ID NO: 1107556
auaaaugcuggauugacgc

SEQ ID NO: 1107558 - RNA, 19 nt, Artificial Sequence
  Description of Artificial Sequence: Synthetic oligonucleotide
  Sense strand starting at position 3468 of SEQ ID NO: 915806
acuugagaguucuuuauaa

SEQ ID NO: 1107559 - RNA, 19 nt, Artificial Sequence
  Description of Artificial Sequence: Synthetic oligonucleotide
  Antisense strand to SEQ ID NO: 1107558
uuauaaagaacucucaagu

SEQ ID NO: 1107560 - RNA, 19 nt, Artificial Sequence
  Description of Artificial Sequence: Synthetic oligonucleotide
  Sense strand starting at position 3470 of SEQ ID NO: 915806
uugagaguucuuuauaacg

SEQ ID NO: 1107561 - RNA, 19 nt, Artificial Sequence
  Description of Artificial Sequence: Synthetic oligonucleotide
  Antisense strand to SEQ ID NO: 1107560
cguuauaaagaacucucaa

SEQ ID NO: 1107562 - RNA, 19 nt, Artificial Sequence
  Description of Artificial Sequence: Synthetic oligonucleotide
  Sense strand starting at position 50 of SEQ ID NO: 915807
acucacguugcagagauua

SEQ ID NO: 1107563 - RNA, 19 nt, Artificial Sequence
  Description of Artificial Sequence: Synthetic oligonucleotide
  Antisense strand to SEQ ID NO: 1107562
uaaucucugcaacgugagu

SEQ ID NO: 1107564 - RNA, 19 nt, Artificial Sequence
  Description of Artificial Sequence: Synthetic oligonucleotide
  Sense strand starting at position 52 of SEQ ID NO: 915807
ucacguugcagagauuauc

SEQ ID NO: 1107565 - RNA, 19 nt, Artificial Sequence
  Description of Artificial Sequence: Synthetic oligonucleotide
  Antisense strand to SEQ ID NO: 1107564
gauaaucucugcaacguga

SEQ ID NO: 1107566 - RNA, 19 nt, Artificial Sequence
  Description of Artificial Sequence: Synthetic oligonucleotide
  Sense strand starting at position 58 of SEQ ID NO: 915807
ugcagagauuauccucuau

SEQ ID NO: 1107567 - RNA, 19 nt, Artificial Sequence
  Description of Artificial Sequence: Synthetic oligonucleotide
  Antisense strand to SEQ ID NO: 1107566
auagaggauaaucucugca

SEQ ID NO: 1107568 - RNA, 19 nt, Artificial Sequence
  Description of Artificial Sequence: Synthetic oligonucleotide
  Sense strand starting at position 249 of SEQ ID NO: 915807
cugaaucuguaaguacaga

SEQ ID NO: 1107569 - RNA, 19 nt, Artificial Sequence
  Description of Artificial Sequence: Synthetic oligonucleotide
  Antisense strand to SEQ ID NO: 1107568
ucuguacuuacagauucag

SEQ ID NO: 1107570 - RNA, 19 nt, Artificial Sequence
  Description of Artificial Sequence: Synthetic oligonucleotide
  Sense strand starting at position 316 of SEQ ID NO: 915807
auguuaacuuagcugacau

SEQ ID NO: 1107571 - RNA, 19 nt, Artificial Sequence
  Description of Artificial Sequence: Synthetic oligonucleotide
  Antisense strand to SEQ ID NO: 1107570
augucagcuaaguuaacau

SEQ ID NO: 1107572 - RNA, 19 nt, Artificial Sequence
  Description of Artificial Sequence: Synthetic oligonucleotide
  Sense strand starting at position 480 of SEQ ID NO: 915807
uuaggucugguguaaguca

SEQ ID NO: 1107573 - RNA, 19 nt, Artificial Sequence
  Description of Artificial Sequence: Synthetic oligonucleotide
  Antisense strand to SEQ ID NO: 1107572
ugacuuacaccagaccuaa

SEQ ID NO: 1107574 - RNA, 19 nt, Artificial Sequence
  Description of Artificial Sequence: Synthetic oligonucleotide
  Sense strand starting at position 628 of SEQ ID NO: 915807
ugaauugaauagucaaugu

SEQ ID NO: 1107575 - RNA, 19 nt, Artificial Sequence
  Description of Artificial Sequence: Synthetic oligonucleotide
  Antisense strand to SEQ ID NO: 1107574
acauugacuauucaauuca

SEQ ID NO: 1107576 - RNA, 19 nt, Artificial Sequence
  Description of Artificial Sequence: Synthetic oligonucleotide
  Sense strand starting at position 632 of SEQ ID NO: 915807
uugaauagucaaugugauu

SEQ ID NO: 1107577 - RNA, 19 nt, Artificial Sequence
  Description of Artificial Sequence: Synthetic oligonucleotide
  Antisense strand to SEQ ID NO: 1107576
aaucacauugacuauucaa

SEQ ID NO: 1107578 - RNA, 19 nt, Artificial Sequence
  Description of Artificial Sequence: Synthetic oligonucleotide
  Sense strand starting at position 753 of SEQ ID NO: 915807
cucuauuacgucuagguaa

SEQ ID NO: 1107579 - RNA, 19 nt, Artificial Sequence
  Description of Artificial Sequence: Synthetic oligonucleotide
  Antisense strand to SEQ ID NO: 1107578
uuaccuagacguaauagag

SEQ ID NO: 1107580 - RNA, 19 nt, Artificial Sequence
  Description of Artificial Sequence: Synthetic oligonucleotide
  Sense strand starting at position 755 of SEQ ID NO: 915807
cuauuacgucuagguaaua

SEQ ID NO: 1107581 - RNA, 19 nt, Artificial Sequence
  Description of Artificial Sequence: Synthetic oligonucleotide
  Antisense strand to SEQ ID NO: 1107580
uauuaccuagacguaauag

SEQ ID NO: 1107582 - RNA, 19 nt, Artificial Sequence
  Description of Artificial Sequence: Synthetic oligonucleotide
  Sense strand starting at position 756 of SEQ ID NO: 915807
uauuacgucuagguaauaa

SEQ ID NO: 1107583 - RNA, 19 nt, Artificial Sequence
  Description of Artificial Sequence: Synthetic oligonucleotide
  Antisense strand to SEQ ID NO: 1107582
uuauuaccuagacguaaua

SEQ ID NO: 1107584 - RNA, 19 nt, Artificial Sequence
  Description of Artificial Sequence: Synthetic oligonucleotide
  Sense strand starting at position 806 of SEQ ID NO: 915807
ggaugaaguuccuacauuu

SEQ ID NO: 1107585 - RNA, 19 nt, Artificial Sequence
  Description of Artificial Sequence: Synthetic oligonucleotide
  Antisense strand to SEQ ID NO: 1107584
aaauguaggaacuucaucc

SEQ ID NO: 1107586 - RNA, 19 nt, Artificial Sequence
  Description of Artificial Sequence: Synthetic oligonucleotide
  Sense strand starting at position 1119 of SEQ ID NO: 915807
gggcaugugauguaauacu

SEQ ID NO: 1107587 - RNA, 19 nt, Artificial Sequence
  Description of Artificial Sequence: Synthetic oligonucleotide
  Antisense strand to SEQ ID NO: 1107586
aguauuacaucacaugccc

SEQ ID NO: 1107588 - RNA, 19 nt, Artificial Sequence
  Description of Artificial Sequence: Synthetic oligonucleotide
  Sense strand starting at position 1399 of SEQ ID NO: 915807
caggaugucacguggagua

SEQ ID NO: 1107589 - RNA, 19 nt, Artificial Sequence
  Description of Artificial Sequence: Synthetic oligonucleotide
  Antisense strand to SEQ ID NO: 1107588
uacuccacgugacauccug

SEQ ID NO: 1107590 - RNA, 19 nt, Artificial Sequence
  Description of Artificial Sequence: Synthetic oligonucleotide
  Sense strand starting at position 2230 of SEQ ID NO: 915807
cggcugugucucgcgacaa

SEQ ID NO: 1107591 - RNA, 19 nt, Artificial Sequence
  Description of Artificial Sequence: Synthetic oligonucleotide
  Antisense strand to SEQ ID NO: 1107590
uugucgcgagacacagccg

SEQ ID NO: 1107592 - RNA, 19 nt, Artificial Sequence
  Description of Artificial Sequence: Synthetic oligonucleotide
  Sense strand starting at position 2566 of SEQ ID NO: 915807
ucgcuucuccuuuaagaaa

SEQ ID NO: 1107593 - RNA, 19 nt, Artificial Sequence
  Description of Artificial Sequence: Synthetic oligonucleotide
  Antisense strand to SEQ ID NO: 1107592
uuucuuaaaggagaagcga

SEQ ID NO: 1107594 - RNA, 19 nt, Artificial Sequence
  Description of Artificial Sequence: Synthetic oligonucleotide
  Sense strand starting at position 2726 of SEQ ID NO: 915807
ucuuauuucgccuaggcuu

SEQ ID NO: 1107595 - RNA, 19 nt, Artificial Sequence
  Description of Artificial Sequence: Synthetic oligonucleotide
  Antisense strand to SEQ ID NO: 1107594
aagccuaggcgaaauaaga

SEQ ID NO: 1107596 - RNA, 19 nt, Artificial Sequence
  Description of Artificial Sequence: Synthetic oligonucleotide
  Sense strand starting at position 2733 of SEQ ID NO: 915807
ucgccuaggcuuuaggaaa

SEQ ID NO: 1107597 - RNA, 19 nt, Artificial Sequence
  Description of Artificial Sequence: Synthetic oligonucleotide
  Antisense strand to SEQ ID NO: 1107596
uuuccuaaagccuaggcga

SEQ ID NO: 1107598 - RNA, 19 nt, Artificial Sequence
  Description of Artificial Sequence: Synthetic oligonucleotide
  Sense strand starting at position 2786 of SEQ ID NO: 915807
ggagguucuaacugaguca

SEQ ID NO: 1107599 - RNA, 19 nt, Artificial Sequence
  Description of Artificial Sequence: Synthetic oligonucleotide
  Antisense strand to SEQ ID NO: 1107598
ugacucaguuagaaccucc

SEQ ID NO: 1107600 - RNA, 19 nt, Artificial Sequence
  Description of Artificial Sequence: Synthetic oligonucleotide
  Sense strand starting at position 2789 of SEQ ID NO: 915807
gguucuaacugagucacga

SEQ ID NO: 1107601 - RNA, 19 nt, Artificial Sequence
  Description of Artificial Sequence: Synthetic oligonucleotide
  Antisense strand to SEQ ID NO: 1107600
ucgugacucaguuagaacc

SEQ ID NO: 1107602 - RNA, 19 nt, Artificial Sequence
  Description of Artificial Sequence: Synthetic oligonucleotide
  Sense strand starting at position 2808 of SEQ ID NO: 915807
cgggaaagguaguuuacuu

SEQ ID NO: 1107603 - RNA, 19 nt, Artificial Sequence
  Description of Artificial Sequence: Synthetic oligonucleotide
  Antisense strand to SEQ ID NO: 1107602
aaguaaacuaccuuucccg

SEQ ID NO: 1107604 - RNA, 19 nt, Artificial Sequence
  Description of Artificial Sequence: Synthetic oligonucleotide
  Sense strand starting at position 3067 of SEQ ID NO: 915807
ucaugucuacauuauugau

SEQ ID NO: 1107605 - RNA, 19 nt, Artificial Sequence
  Description of Artificial Sequence: Synthetic oligonucleotide
  Antisense strand to SEQ ID NO: 1107604
aucaauaauguagacauga

SEQ ID NO: 1107606 - RNA, 19 nt, Artificial Sequence
  Description of Artificial Sequence: Synthetic oligonucleotide
  Sense strand starting at position 3101 of SEQ ID NO: 915807
gugagucacucaccuguga

SEQ ID NO: 1107607 - RNA, 19 nt, Artificial Sequence
  Description of Artificial Sequence: Synthetic oligonucleotide
  Antisense strand to SEQ ID NO: 1107606
ucacaggugagugacucac

SEQ ID NO: 1107608 - RNA, 19 nt, Artificial Sequence
  Description of Artificial Sequence: Synthetic oligonucleotide
  Sense strand starting at position 3123 of SEQ ID NO: 915807
ccuagaggucagcgacuaa

SEQ ID NO: 1107609 - RNA, 19 nt, Artificial Sequence
  Description of Artificial Sequence: Synthetic oligonucleotide
  Antisense strand to SEQ ID NO: 1107608
uuagucgcugaccucuagg

SEQ ID NO: 1107610 - RNA, 19 nt, Artificial Sequence
  Description of Artificial Sequence: Synthetic oligonucleotide
  Sense strand starting at position 3127 of SEQ ID NO: 915807
gaggucagcgacuaaaucu

SEQ ID NO: 1107611 - RNA, 19 nt, Artificial Sequence
  Description of Artificial Sequence: Synthetic oligonucleotide
  Antisense strand to SEQ ID NO: 1107610
agauuuagucgcugaccuc

SEQ ID NO: 1107612 - RNA, 19 nt, Artificial Sequence
  Description of Artificial Sequence: Synthetic oligonucleotide
  Sense strand starting at position 3136 of SEQ ID NO: 915807
gacuaaaucugguuccaug

SEQ ID NO: 1107613 - RNA, 19 nt, Artificial Sequence
  Description of Artificial Sequence: Synthetic oligonucleotide
  Antisense strand to SEQ ID NO: 1107612
cauggaaccagauuuaguc

SEQ ID NO: 1107614 - RNA, 19 nt, Artificial Sequence
  Description of Artificial Sequence: Synthetic oligonucleotide
  Sense strand starting at position 3192 of SEQ ID NO: 915807
cuacucaguuggcucuuaa

SEQ ID NO: 1107615 - RNA, 19 nt, Artificial Sequence
  Description of Artificial Sequence: Synthetic oligonucleotide
  Antisense strand to SEQ ID NO: 1107614
uuaagagccaacugaguag

SEQ ID NO: 1107616 - RNA, 19 nt, Artificial Sequence
  Description of Artificial Sequence: Synthetic oligonucleotide
  Sense strand starting at position 3199 of SEQ ID NO: 915807
guuggcucuuaaucaaauc

SEQ ID NO: 1107617 - RNA, 19 nt, Artificial Sequence
  Description of Artificial Sequence: Synthetic oligonucleotide
  Antisense strand to SEQ ID NO: 1107616
gauuugauuaagagccaac

SEQ ID NO: 1107618 - RNA, 19 nt, Artificial Sequence
  Description of Artificial Sequence: Synthetic oligonucleotide
  Sense strand starting at position 3328 of SEQ ID NO: 915807
gguugugagcgugacauga

SEQ ID NO: 1107619 - RNA, 19 nt, Artificial Sequence
  Description of Artificial Sequence: Synthetic oligonucleotide
  Antisense strand to SEQ ID NO: 1107618
ucaugucacgcucacaacc

SEQ ID NO: 1107620 - RNA, 19 nt, Artificial Sequence
  Description of Artificial Sequence: Synthetic oligonucleotide
  Sense strand starting at position 3403 of SEQ ID NO: 915807
ucugcuucugcgguuuaua

SEQ ID NO: 1107621 - RNA, 19 nt, Artificial Sequence
  Description of Artificial Sequence: Synthetic oligonucleotide
  Antisense strand to SEQ ID NO: 1107620
uauaaaccgcagaagcaga

SEQ ID NO: 1107622 - RNA, 19 nt, Artificial Sequence
  Description of Artificial Sequence: Synthetic oligonucleotide
  Sense strand starting at position 3405 of SEQ ID NO: 915807
ugcuucugcgguuuauaca

SEQ ID NO: 1107623 - RNA, 19 nt, Artificial Sequence
  Description of Artificial Sequence: Synthetic oligonucleotide
  Antisense strand to SEQ ID NO: 1107622
uguauaaaccgcagaagca

SEQ ID NO: 1107624 - RNA, 19 nt, Artificial Sequence
  Description of Artificial Sequence: Synthetic oligonucleotide
  Sense strand starting at position 3497 of SEQ ID NO: 915807
gggaauuuccguugcaguu

SEQ ID NO: 1107625 - RNA, 19 nt, Artificial Sequence
  Description of Artificial Sequence: Synthetic oligonucleotide
  Antisense strand to SEQ ID NO: 1107624
aacugcaacggaaauuccc

SEQ ID NO: 1107626 - RNA, 19 nt, Artificial Sequence
  Description of Artificial Sequence: Synthetic oligonucleotide
  Sense strand starting at position 3693 of SEQ ID NO: 915807
aguuaaacuguagacaagu

SEQ ID NO: 1107627 - RNA, 19 nt, Artificial Sequence
  Description of Artificial Sequence: Synthetic oligonucleotide
  Antisense strand to SEQ ID NO: 1107626
acuugucuacaguuuaacu

SEQ ID NO: 1107628 - RNA, 19 nt, Artificial Sequence
  Description of Artificial Sequence: Synthetic oligonucleotide
  Sense strand starting at position 3732 of SEQ ID NO: 915807
ccaguacuuugacucagau

SEQ ID NO: 1107629 - RNA, 19 nt, Artificial Sequence
  Description of Artificial Sequence: Synthetic oligonucleotide
  Antisense strand to SEQ ID NO: 1107628
aucugagucaaaguacugg

SEQ ID NO: 1107630 - RNA, 19 nt, Artificial Sequence
  Description of Artificial Sequence: Synthetic oligonucleotide
  Sense strand starting at position 3830 of SEQ ID NO: 915807
guaauaaucgauuggcaua

SEQ ID NO: 1107631 - RNA, 19 nt, Artificial Sequence
  Description of Artificial Sequence: Synthetic oligonucleotide
  Antisense strand to SEQ ID NO: 1107630
uaugccaaucgauuauuac

SEQ ID NO: 1107632 - RNA, 19 nt, Artificial Sequence
  Description of Artificial Sequence: Synthetic oligonucleotide
  Sense strand starting at position 3867 of SEQ ID NO: 915807
uaagauugaguuuguagug

SEQ ID NO: 1107633 - RNA, 19 nt, Artificial Sequence
  Description of Artificial Sequence: Synthetic oligonucleotide
  Antisense strand to SEQ ID NO: 1107632
cacuacaaacucaaucuua

SEQ ID NO: 1107634 - RNA, 19 nt, Artificial Sequence
  Description of Artificial Sequence: Synthetic oligonucleotide
  Sense strand starting at position 3868 of SEQ ID NO: 915807
aagauugaguuuguaguga

SEQ ID NO: 1107635 - RNA, 19 nt, Artificial Sequence
  Description of Artificial Sequence: Synthetic oligonucleotide
  Antisense strand to SEQ ID NO: 1107634
ucacuacaaacucaaucuu

SEQ ID NO: 1107636 - RNA, 19 nt, Artificial Sequence
  Description of Artificial Sequence: Synthetic oligonucleotide
  Sense strand starting at position 3873 of SEQ ID NO: 915807
ugaguuuguagugagcaga

SEQ ID NO: 1107637 - RNA, 19 nt, Artificial Sequence
  Description of Artificial Sequence: Synthetic oligonucleotide
  Antisense strand to SEQ ID NO: 1107636
ucugcucacuacaaacuca

SEQ ID NO: 1107638 - RNA, 19 nt, Artificial Sequence
  Description of Artificial Sequence: Synthetic oligonucleotide
  Sense strand starting at position 3876 of SEQ ID NO: 915807
guuuguagugagcagacuu

SEQ ID NO: 1107639 - RNA, 19 nt, Artificial Sequence
  Description of Artificial Sequence: Synthetic oligonucleotide
  Antisense strand to SEQ ID NO: 1107638
aagucugcucacuacaaac

SEQ ID NO: 1107640 - RNA, 19 nt, Artificial Sequence
  Description of Artificial Sequence: Synthetic oligonucleotide
  Sense strand starting at position 3916 of SEQ ID NO: 915807
uccaauggaugcucaaagu

SEQ ID NO: 1107641 - RNA, 19 nt, Artificial Sequence
  Description of Artificial Sequence: Synthetic oligonucleotide
  Antisense strand to SEQ ID NO: 1107640
acuuugagcauccauugga

SEQ ID NO: 1107642 - RNA, 19 nt, Artificial Sequence
  Description of Artificial Sequence: Synthetic oligonucleotide
  Sense strand starting at position 21 of SEQ ID NO: 915808
ggguaaguuuggguaggaa

SEQ ID NO: 1107643 - RNA, 19 nt, Artificial Sequence
  Description of Artificial Sequence: Synthetic oligonucleotide
  Antisense strand to SEQ ID NO: 1107642
uuccuacccaaacuuaccc

SEQ ID NO: 1107644 - RNA, 19 nt, Artificial Sequence
  Description of Artificial Sequence: Synthetic oligonucleotide
  Sense strand starting at position 24 of SEQ ID NO: 915808
uaaguuuggguaggaagaa

SEQ ID NO: 1107645 - RNA, 19 nt, Artificial Sequence
  Description of Artificial Sequence: Synthetic oligonucleotide
  Antisense strand to SEQ ID NO: 1107644
uucuuccuacccaaacuua

SEQ ID NO: 1107646 - RNA, 19 nt, Artificial Sequence
  Description of Artificial Sequence: Synthetic oligonucleotide
  Sense strand starting at position 107 of SEQ ID NO: 915808
ugggcuaauggcuaauaau

SEQ ID NO: 1107647 - RNA, 19 nt, Artificial Sequence
  Description of Artificial Sequence: Synthetic oligonucleotide
  Antisense strand to SEQ ID NO: 1107646
auuauuagccauuagccca

SEQ ID NO: 1107648 - RNA, 19 nt, Artificial Sequence
  Description of Artificial Sequence: Synthetic oligonucleotide
  Sense strand starting at position 197 of SEQ ID NO: 915808
auguacauguccuuauaag

SEQ ID NO: 1107649 - RNA, 19 nt, Artificial Sequence
  Description of Artificial Sequence: Synthetic oligonucleotide
  Antisense strand to SEQ ID NO: 1107648
cuuauaaggacauguacau

SEQ ID NO: 1107650 - RNA, 19 nt, Artificial Sequence
  Description of Artificial Sequence: Synthetic oligonucleotide
  Sense strand starting at position 232 of SEQ ID NO: 915808
aguggcauucccuauaucu

SEQ ID NO: 1107651 - RNA, 19 nt, Artificial Sequence
  Description of Artificial Sequence: Synthetic oligonucleotide
  Antisense strand to SEQ ID NO: 1107650
agauauagggaaugccacu

SEQ ID NO: 1107652 - RNA, 19 nt, Artificial Sequence
  Description of Artificial Sequence: Synthetic oligonucleotide
  Sense strand starting at position 635 of SEQ ID NO: 915808
cuuggaaucagugguggau

SEQ ID NO: 1107653 - RNA, 19 nt, Artificial Sequence
  Description of Artificial Sequence: Synthetic oligonucleotide
  Antisense strand to SEQ ID NO: 1107652
auccaccacugauuccaag

SEQ ID NO: 1107654 - RNA, 19 nt, Artificial Sequence
  Description of Artificial Sequence: Synthetic oligonucleotide
  Sense strand starting at position 735 of SEQ ID NO: 915808
cgcugaaaccuccagauug

SEQ ID NO: 1107655 - RNA, 19 nt, Artificial Sequence
  Description of Artificial Sequence: Synthetic oligonucleotide
  Antisense strand to SEQ ID NO: 1107654
caaucuggagguuucagcg

SEQ ID NO: 1107656 - RNA, 19 nt, Artificial Sequence
  Description of Artificial Sequence: Synthetic oligonucleotide
  Sense strand starting at position 746 of SEQ ID NO: 915808
ccagauuggcagggcuuaa

SEQ ID NO: 1107657 - RNA, 19 nt, Artificial Sequence
  Description of Artificial Sequence: Synthetic oligonucleotide
  Antisense strand to SEQ ID NO: 1107656
uuaagcccugccaaucugg

SEQ ID NO: 1107658 - RNA, 19 nt, Artificial Sequence
  Description of Artificial Sequence: Synthetic oligonucleotide
  Sense strand starting at position 827 of SEQ ID NO: 915808
agaauaacuugccugaacu

SEQ ID NO: 1107659 - RNA, 19 nt, Artificial Sequence
  Description of Artificial Sequence: Synthetic oligonucleotide
  Antisense strand to SEQ ID NO: 1107658
aguucaggcaaguuauucu

SEQ ID NO: 1107660 - RNA, 19 nt, Artificial Sequence
  Description of Artificial Sequence: Synthetic oligonucleotide
  Sense strand starting at position 874 of SEQ ID NO: 915808
acuagaaucugggcucuga

SEQ ID NO: 1107661 - RNA, 19 nt, Artificial Sequence
  Description of Artificial Sequence: Synthetic oligonucleotide
  Antisense strand to SEQ ID NO: 1107660
ucagagcccagauucuagu

SEQ ID NO: 1107662 - RNA, 19 nt, Artificial Sequence
  Description of Artificial Sequence: Synthetic oligonucleotide
  Sense strand starting at position 878 of SEQ ID NO: 915808
gaaucugggcucugagacu

SEQ ID NO: 1107663 - RNA, 19 nt, Artificial Sequence
  Description of Artificial Sequence: Synthetic oligonucleotide
  Antisense strand to SEQ ID NO: 1107662
agucucagagcccagauuc

SEQ ID NO: 1107664 - RNA, 19 nt, Artificial Sequence
  Description of Artificial Sequence: Synthetic oligonucleotide
  Sense strand starting at position 1196 of SEQ ID NO: 915808
agaggagacucauccuuuc

SEQ ID NO: 1107665 - RNA, 19 nt, Artificial Sequence
  Description of Artificial Sequence: Synthetic oligonucleotide
  Antisense strand to SEQ ID NO: 1107664
gaaaggaugagucuccucu

SEQ ID NO: 1107666 - RNA, 19 nt, Artificial Sequence
  Description of Artificial Sequence: Synthetic oligonucleotide
  Sense strand starting at position 1542 of SEQ ID NO: 915808
gggcaugaguugguaggaa

SEQ ID NO: 1107667 - RNA, 19 nt, Artificial Sequence
  Description of Artificial Sequence: Synthetic oligonucleotide
  Antisense strand to SEQ ID NO: 1107666
uuccuaccaacucaugccc

SEQ ID NO: 1107668 - RNA, 19 nt, Artificial Sequence
  Description of Artificial Sequence: Synthetic oligonucleotide
  Sense strand starting at position 1668 of SEQ ID NO: 915808
ccuccuuaugcggagaaac

SEQ ID NO: 1107669 - RNA, 19 nt, Artificial Sequence
  Description of Artificial Sequence: Synthetic oligonucleotide
  Antisense strand to SEQ ID NO: 1107668
guuucuccgcauaaggagg

SEQ ID NO: 1107670 - RNA, 19 nt, Artificial Sequence
  Description of Artificial Sequence: Synthetic oligonucleotide
  Sense strand starting at position 2238 of SEQ ID NO: 915808
cuaaguuaugucugggagg

SEQ ID NO: 1107671 - RNA, 19 nt, Artificial Sequence
  Description of Artificial Sequence: Synthetic oligonucleotide
  Antisense strand to SEQ ID NO: 1107670
ccucccagacauaacuuag

SEQ ID NO: 1107672 - RNA, 19 nt, Artificial Sequence
  Description of Artificial Sequence: Synthetic oligonucleotide
  Sense strand starting at position 2436 of SEQ ID NO: 915808
accuguucucuggacucua

SEQ ID NO: 1107673 - RNA, 19 nt, Artificial Sequence
  Description of Artificial Sequence: Synthetic oligonucleotide
  Antisense strand to SEQ ID NO: 1107672
uagaguccagagaacaggu

SEQ ID NO: 1107674 - RNA, 19 nt, Artificial Sequence
  Description of Artificial Sequence: Synthetic oligonucleotide
  Sense strand starting at position 2786 of SEQ ID NO: 915808
ggaccagcuaugugaucaa

SEQ ID NO: 1107675 - RNA, 19 nt, Artificial Sequence
  Description of Artificial Sequence: Synthetic oligonucleotide
  Antisense strand to SEQ ID NO: 1107674
uugaucacauagcuggucc

SEQ ID NO: 1107676 - RNA, 19 nt, Artificial Sequence
  Description of Artificial Sequence: Synthetic oligonucleotide
  Sense strand starting at position 2795 of SEQ ID NO: 915808
augugaucaauugguauug

SEQ ID NO: 1107677 - RNA, 19 nt, Artificial Sequence
  Description of Artificial Sequence: Synthetic oligonucleotide
  Antisense strand to SEQ ID NO: 1107676
caauaccaauugaucacau

SEQ ID NO: 1107678 - RNA, 19 nt, Artificial Sequence
  Description of Artificial Sequence: Synthetic oligonucleotide
  Sense strand starting at position 2884 of SEQ ID NO: 915808
uuaaguagaaucuggguca

SEQ ID NO: 1107679 - RNA, 19 nt, Artificial Sequence
  Description of Artificial Sequence: Synthetic oligonucleotide
  Antisense strand to SEQ ID NO: 1107678
ugacccagauucuacuuaa

SEQ ID NO: 1107680 - RNA, 19 nt, Artificial Sequence
  Description of Artificial Sequence: Synthetic oligonucleotide
  Sense strand starting at position 2891 of SEQ ID NO: 915808
gaaucugggucacucuaga

SEQ ID NO: 1107681 - RNA, 19 nt, Artificial Sequence
  Description of Artificial Sequence: Synthetic oligonucleotide
  Antisense strand to SEQ ID NO: 1107680
ucuagagugacccagauuc

SEQ ID NO: 1107682 - RNA, 19 nt, Artificial Sequence
  Description of Artificial Sequence: Synthetic oligonucleotide
  Sense strand starting at position 3005 of SEQ ID NO: 915808
agucuugauuacucccuga

SEQ ID NO: 1107683 - RNA, 19 nt, Artificial Sequence
  Description of Artificial Sequence: Synthetic oligonucleotide
  Antisense strand to SEQ ID NO: 1107682
ucagggaguaaucaagacu

SEQ ID NO: 1107684 - RNA, 19 nt, Artificial Sequence
  Description of Artificial Sequence: Synthetic oligonucleotide
  Sense strand starting at position 3008 of SEQ ID NO: 915808
cuugauuacucccugaaga

SEQ ID NO: 1107685 - RNA, 19 nt, Artificial Sequence
  Description of Artificial Sequence: Synthetic oligonucleotide
  Antisense strand to SEQ ID NO: 1107684
ucuucagggaguaaucaag

SEQ ID NO: 1107686 - RNA, 19 nt, Artificial Sequence
  Description of Artificial Sequence: Synthetic oligonucleotide
  Sense strand starting at position 3009 of SEQ ID NO: 915808
uugauuacucccugaagac

SEQ ID NO: 1107687 - RNA, 19 nt, Artificial Sequence
  Description of Artificial Sequence: Synthetic oligonucleotide
  Antisense strand to SEQ ID NO: 1107686
gucuucagggaguaaucaa

SEQ ID NO: 1107688 - RNA, 19 nt, Artificial Sequence
  Description of Artificial Sequence: Synthetic oligonucleotide
  Sense strand starting at position 3150 of SEQ ID NO: 915808
auguauggguguucugaga

SEQ ID NO: 1107689 - RNA, 19 nt, Artificial Sequence
  Description of Artificial Sequence: Synthetic oligonucleotide
  Antisense strand to SEQ ID NO: 1107688
ucucagaacacccauacau

SEQ ID NO: 1107690 - RNA, 19 nt, Artificial Sequence
  Description of Artificial Sequence: Synthetic oligonucleotide
  Sense strand starting at position 3157 of SEQ ID NO: 915808
gguguucugagauaaguca

SEQ ID NO: 1107691 - RNA, 19 nt, Artificial Sequence
  Description of Artificial Sequence: Synthetic oligonucleotide
  Antisense strand to SEQ ID NO: 1107690
ugacuuaucucagaacacc

SEQ ID NO: 1107692 - RNA, 19 nt, Artificial Sequence
  Description of Artificial Sequence: Synthetic oligonucleotide
  Sense strand starting at position 3166 of SEQ ID NO: 915808
agauaagucauguguauga

SEQ ID NO: 1107693 - RNA, 19 nt, Artificial Sequence
  Description of Artificial Sequence: Synthetic oligonucleotide
  Antisense strand to SEQ ID NO: 1107692
ucauacacaugacuuaucu

SEQ ID NO: 1107694 - RNA, 19 nt, Artificial Sequence
  Description of Artificial Sequence: Synthetic oligonucleotide
  Sense strand starting at position 3168 of SEQ ID NO: 915808
auaagucauguguaugaca

SEQ ID NO: 1107695 - RNA, 19 nt, Artificial Sequence
  Description of Artificial Sequence: Synthetic oligonucleotide
  Antisense strand to SEQ ID NO: 1107694
ugucauacacaugacuuau

SEQ ID NO: 1107696 - RNA, 19 nt, Artificial Sequence
  Description of Artificial Sequence: Synthetic oligonucleotide
  Sense strand starting at position 3264 of SEQ ID NO: 915808
ugugaacuccuuugaagag

SEQ ID NO: 1107697 - RNA, 19 nt, Artificial Sequence
  Description of Artificial Sequence: Synthetic oligonucleotide
  Antisense strand to SEQ ID NO: 1107696
cucuucaaaggaguucaca

SEQ ID NO: 1107698 - RNA, 19 nt, Artificial Sequence
  Description of Artificial Sequence: Synthetic oligonucleotide
  Sense strand starting at position 3406 of SEQ ID NO: 915808
agggaauguuucguggaag

SEQ ID NO: 1107699 - RNA, 19 nt, Artificial Sequence
  Description of Artificial Sequence: Synthetic oligonucleotide
  Antisense strand to SEQ ID NO: 1107698
cuuccacgaaacauucccu

SEQ ID NO: 1107700 - RNA, 19 nt, Artificial Sequence
  Description of Artificial Sequence: Synthetic oligonucleotide
  Sense strand starting at position 3409 of SEQ ID NO: 915808
gaauguuucguggaagaag

SEQ ID NO: 1107701 - RNA, 19 nt, Artificial Sequence
  Description of Artificial Sequence: Synthetic oligonucleotide
  Antisense strand to SEQ ID NO: 1107700
cuucuuccacgaaacauuc

SEQ ID NO: 1107702 - RNA, 19 nt, Artificial Sequence
  Description of Artificial Sequence: Synthetic oligonucleotide
  Sense strand starting at position 3412 of SEQ ID NO: 915808
uguuucguggaagaagaaa

SEQ ID NO: 1107703 - RNA, 19 nt, Artificial Sequence
  Description of Artificial Sequence: Synthetic oligonucleotide
  Antisense strand to SEQ ID NO: 1107702
uuucuucuuccacgaaaca

SEQ ID NO: 1107704 - RNA, 19 nt, Artificial Sequence
  Description of Artificial Sequence: Synthetic oligonucleotide
  Sense strand starting at position 3524 of SEQ ID NO: 915808
acuuguggucaagaguuua

SEQ ID NO: 1107705 - RNA, 19 nt, Artificial Sequence
  Description of Artificial Sequence: Synthetic oligonucleotide
  Antisense strand to SEQ ID NO: 1107704
uaaacucuugaccacaagu

SEQ ID NO: 1107706 - RNA, 19 nt, Artificial Sequence
  Description of Artificial Sequence: Synthetic oligonucleotide
  Sense strand starting at position 3774 of SEQ ID NO: 915808
uuuguuccaggucaaagaa

SEQ ID NO: 1107707 - RNA, 19 nt, Artificial Sequence
  Description of Artificial Sequence: Synthetic oligonucleotide
  Antisense strand to SEQ ID NO: 1107706
uucuuugaccuggaacaaa

SEQ ID NO: 1107708 - RNA, 19 nt, Artificial Sequence
  Description of Artificial Sequence: Synthetic oligonucleotide
  Sense strand starting at position 3783 of SEQ ID NO: 915808
ggucaaagaagccauguuu

SEQ ID NO: 1107709 - RNA, 19 nt, Artificial Sequence
  Description of Artificial Sequence: Synthetic oligonucleotide
  Antisense strand to SEQ ID NO: 1107708
aaacauggcuucuuugacc

SEQ ID NO: 1107710 - RNA, 19 nt, Artificial Sequence
  Description of Artificial Sequence: Synthetic oligonucleotide
  Sense strand starting at position 3798 of SEQ ID NO: 915808
guuugcagagauugggaau

SEQ ID NO: 1107711 - RNA, 19 nt, Artificial Sequence
  Description of Artificial Sequence: Synthetic oligonucleotide
  Antisense strand to SEQ ID NO: 1107710
auucccaaucucugcaaac

SEQ ID NO: 1107712 - RNA, 19 nt, Artificial Sequence
  Description of Artificial Sequence: Synthetic oligonucleotide
  Sense strand starting at position 3799 of SEQ ID NO: 915808
uuugcagagauugggaauu

SEQ ID NO: 1107713 - RNA, 19 nt, Artificial Sequence
  Description of Artificial Sequence: Synthetic oligonucleotide
  Antisense strand to SEQ ID NO: 1107712
aauucccaaucucugcaaa

SEQ ID NO: 1107714 - RNA, 19 nt, Artificial Sequence
  Description of Artificial Sequence: Synthetic oligonucleotide
  Sense strand starting at position 3801 of SEQ ID NO: 915808
ugcagagauugggaauuua

SEQ ID NO: 1107715 - RNA, 19 nt, Artificial Sequence
  Description of Artificial Sequence: Synthetic oligonucleotide
  Antisense strand to SEQ ID NO: 1107714
uaaauucccaaucucugca

SEQ ID NO: 1107716 - RNA, 19 nt, Artificial Sequence
  Description of Artificial Sequence: Synthetic oligonucleotide
  Sense strand starting at position 3973 of SEQ ID NO: 915808
uggagaguucuggguaagg

SEQ ID NO: 1107717 - RNA, 19 nt, Artificial Sequence
  Description of Artificial Sequence: Synthetic oligonucleotide
  Antisense strand to SEQ ID NO: 1107716
ccuuacccagaacucucca

SEQ ID NO: 1107718 - RNA, 19 nt, Artificial Sequence
  Description of Artificial Sequence: Synthetic oligonucleotide
  Sense strand starting at position 3974 of SEQ ID NO: 915808
ggagaguucuggguaaggu

SEQ ID NO: 1107719 - RNA, 19 nt, Artificial Sequence
  Description of Artificial Sequence: Synthetic oligonucleotide
  Antisense strand to SEQ ID NO: 1107718
accuuacccagaacucucc

SEQ ID NO: 1107720 - RNA, 19 nt, Artificial Sequence
  Description of Artificial Sequence: Synthetic oligonucleotide
  Sense strand starting at position 3975 of SEQ ID NO: 915808
gagaguucuggguaaggua

SEQ ID NO: 1107721 - RNA, 19 nt, Artificial Sequence
  Description of Artificial Sequence: Synthetic oligonucleotide
  Antisense strand to SEQ ID NO: 1107720
uaccuuacccagaacucuc

SEQ ID NO: 1107722 - RNA, 19 nt, Artificial Sequence
  Description of Artificial Sequence: Synthetic oligonucleotide
  Sense strand starting at position 18 of SEQ ID NO: 915809
ggugauauguugcuaaauu

SEQ ID NO: 1107723 - RNA, 19 nt, Artificial Sequence
  Description of Artificial Sequence: Synthetic oligonucleotide
  Antisense strand to SEQ ID NO: 1107722
aauuuagcaacauaucacc

SEQ ID NO: 1107724 - RNA, 19 nt, Artificial Sequence
  Description of Artificial Sequence: Synthetic oligonucleotide
  Sense strand starting at position 54 of SEQ ID NO: 915809
cgcaacucugaauauauua

SEQ ID NO: 1107725 - RNA, 19 nt, Artificial Sequence
  Description of Artificial Sequence: Synthetic oligonucleotide
  Antisense strand to SEQ ID NO: 1107724
uaauauauucagaguugcg

SEQ ID NO: 1107726 - RNA, 19 nt, Artificial Sequence
  Description of Artificial Sequence: Synthetic oligonucleotide
  Sense strand starting at position 620 of SEQ ID NO: 915809
augggugaacuguaaggua

SEQ ID NO: 1107727 - RNA, 19 nt, Artificial Sequence
  Description of Artificial Sequence: Synthetic oligonucleotide
  Antisense strand to SEQ ID NO: 1107726
uaccuuacaguucacccau

SEQ ID NO: 1107728 - RNA, 19 nt, Artificial Sequence
  Description of Artificial Sequence: Synthetic oligonucleotide
  Sense strand starting at position 707 of SEQ ID NO: 915809
gcacucaaguaucuguaga

SEQ ID NO: 1107729 - RNA, 19 nt, Artificial Sequence
  Description of Artificial Sequence: Synthetic oligonucleotide
  Antisense strand to SEQ ID NO: 1107728
ucuacagauacuugagugc

SEQ ID NO: 1107730 - RNA, 19 nt, Artificial Sequence
  Description of Artificial Sequence: Synthetic oligonucleotide
  Sense strand starting at position 709 of SEQ ID NO: 915809
acucaaguaucuguagaca

SEQ ID NO: 1107731 - RNA, 19 nt, Artificial Sequence
  Description of Artificial Sequence: Synthetic oligonucleotide
  Antisense strand to SEQ ID NO: 1107730
ugucuacagauacuugagu

SEQ ID NO: 1107732 - RNA, 19 nt, Artificial Sequence
  Description of Artificial Sequence: Synthetic oligonucleotide
  Sense strand starting at position 725 of SEQ ID NO: 915809
acagcugacugcucauaga

SEQ ID NO: 1107733 - RNA, 19 nt, Artificial Sequence
  Description of Artificial Sequence: Synthetic oligonucleotide
  Antisense strand to SEQ ID NO: 1107732
ucuaugagcagucagcugu

SEQ ID NO: 1107734 - RNA, 19 nt, Artificial Sequence
  Description of Artificial Sequence: Synthetic oligonucleotide
  Sense strand starting at position 842 of SEQ ID NO: 915809
gagugaucuccuuaucacg

SEQ ID NO: 1107735 - RNA, 19 nt, Artificial Sequence
  Description of Artificial Sequence: Synthetic oligonucleotide
  Antisense strand to SEQ ID NO: 1107734
cgugauaaggagaucacuc

SEQ ID NO: 1107736 - RNA, 19 nt, Artificial Sequence
  Description of Artificial Sequence: Synthetic oligonucleotide
  Sense strand starting at position 876 of SEQ ID NO: 915809
acguaaacuugaucuacau

SEQ ID NO: 1107737 - RNA, 19 nt, Artificial Sequence
  Description of Artificial Sequence: Synthetic oligonucleotide
  Antisense strand to SEQ ID NO: 1107736
auguagaucaaguuuacgu

SEQ ID NO: 1107738 - RNA, 19 nt, Artificial Sequence
  Description of Artificial Sequence: Synthetic oligonucleotide
  Sense strand starting at position 1026 of SEQ ID NO: 915809
uugauuauaucagcugauu

SEQ ID NO: 1107739 - RNA, 19 nt, Artificial Sequence
  Description of Artificial Sequence: Synthetic oligonucleotide
  Antisense strand to SEQ ID NO: 1107738
aaucagcugauauaaucaa

SEQ ID NO: 1107740 - RNA, 19 nt, Artificial Sequence
  Description of Artificial Sequence: Synthetic oligonucleotide
  Sense strand starting at position 1083 of SEQ ID NO: 915809
caaauaaugggcuggcaau

SEQ ID NO: 1107741 - RNA, 19 nt, Artificial Sequence
  Description of Artificial Sequence: Synthetic oligonucleotide
  Antisense strand to SEQ ID NO: 1107740
auugccagcccauuauuug

SEQ ID NO: 1107742 - RNA, 19 nt, Artificial Sequence
  Description of Artificial Sequence: Synthetic oligonucleotide
  Sense strand starting at position 1126 of SEQ ID NO: 915809
cuucguuauuauguggaaa

SEQ ID NO: 1107743 - RNA, 19 nt, Artificial Sequence
  Description of Artificial Sequence: Synthetic oligonucleotide
  Antisense strand to SEQ ID NO: 1107742
uuuccacauaauaacgaag

SEQ ID NO: 1107744 - RNA, 19 nt, Artificial Sequence
  Description of Artificial Sequence: Synthetic oligonucleotide
  Sense strand starting at position 1182 of SEQ ID NO: 915809
cuaguucgcguuccacaau

SEQ ID NO: 1107745 - RNA, 19 nt, Artificial Sequence
  Description of Artificial Sequence: Synthetic oligonucleotide
  Antisense strand to SEQ ID NO: 1107744
auuguggaacgcgaacuag

SEQ ID NO: 1107746 - RNA, 19 nt, Artificial Sequence
  Description of Artificial Sequence: Synthetic oligonucleotide
  Sense strand starting at position 1275 of SEQ ID NO: 915809
guaaauuucuaauauccga

SEQ ID NO: 1107747 - RNA, 19 nt, Artificial Sequence
  Description of Artificial Sequence: Synthetic oligonucleotide
  Antisense strand to SEQ ID NO: 1107746
ucggauauuagaaauuuac

SEQ ID NO: 1107748 - RNA, 19 nt, Artificial Sequence
  Description of Artificial Sequence: Synthetic oligonucleotide
  Sense strand starting at position 1282 of SEQ ID NO: 915809
ucuaauauccgauguuaga

SEQ ID NO: 1107749 - RNA, 19 nt, Artificial Sequence
  Description of Artificial Sequence: Synthetic oligonucleotide
  Antisense strand to SEQ ID NO: 1107748
ucuaacaucggauauuaga

SEQ ID NO: 1107750 - RNA, 19 nt, Artificial Sequence
  Description of Artificial Sequence: Synthetic oligonucleotide
  Sense strand starting at position 1292 of SEQ ID NO: 915809
gauguuagaccucaguaac

SEQ ID NO: 1107751 - RNA, 19 nt, Artificial Sequence
  Description of Artificial Sequence: Synthetic oligonucleotide
  Antisense strand to SEQ ID NO: 1107750
guuacugaggucuaacauc

SEQ ID NO: 1107752 - RNA, 19 nt, Artificial Sequence
  Description of Artificial Sequence: Synthetic oligonucleotide
  Sense strand starting at position 1295 of SEQ ID NO: 915809
guuagaccucaguaaccuu

SEQ ID NO: 1107753 - RNA, 19 nt, Artificial Sequence
  Description of Artificial Sequence: Synthetic oligonucleotide
  Antisense strand to SEQ ID NO: 1107752
aagguuacugaggucuaac

SEQ ID NO: 1107754 - RNA, 19 nt, Artificial Sequence
  Description of Artificial Sequence: Synthetic oligonucleotide
  Sense strand starting at position 1648 of SEQ ID NO: 915809
ggaguugaguccucaacga

SEQ ID NO: 1107755 - RNA, 19 nt, Artificial Sequence
  Description of Artificial Sequence: Synthetic oligonucleotide
  Antisense strand to SEQ ID NO: 1107754
ucguugaggacucaacucc

SEQ ID NO: 1107756 - RNA, 19 nt, Artificial Sequence
  Description of Artificial Sequence: Synthetic oligonucleotide
  Sense strand starting at position 1838 of SEQ ID NO: 915809
cggccaggcggagaauaau

SEQ ID NO: 1107757 - RNA, 19 nt, Artificial Sequence
  Description of Artificial Sequence: Synthetic oligonucleotide
  Antisense strand to SEQ ID NO: 1107756
auuauucuccgccuggccg

SEQ ID NO: 1107758 - RNA, 19 nt, Artificial Sequence
  Description of Artificial Sequence: Synthetic oligonucleotide
  Sense strand starting at position 2062 of SEQ ID NO: 915809
cacguuuggucgacgcgaa

SEQ ID NO: 1107759 - RNA, 19 nt, Artificial Sequence
  Description of Artificial Sequence: Synthetic oligonucleotide
  Antisense strand to SEQ ID NO: 1107758
uucgcgucgaccaaacgug

SEQ ID NO: 1107760 - RNA, 19 nt, Artificial Sequence
  Description of Artificial Sequence: Synthetic oligonucleotide
  Sense strand starting at position 2184 of SEQ ID NO: 915809
gucugacugguugacauaa

SEQ ID NO: 1107761 - RNA, 19 nt, Artificial Sequence
  Description of Artificial Sequence: Synthetic oligonucleotide
  Antisense strand to SEQ ID NO: 1107760
uuaugucaaccagucagac

SEQ ID NO: 1107762 - RNA, 19 nt, Artificial Sequence
  Description of Artificial Sequence: Synthetic oligonucleotide
  Sense strand starting at position 2307 of SEQ ID NO: 915809
ugugauuacccgggaggga

SEQ ID NO: 1107763 - RNA, 19 nt, Artificial Sequence
  Description of Artificial Sequence: Synthetic oligonucleotide
  Antisense strand to SEQ ID NO: 1107762
ucccucccggguaaucaca

SEQ ID NO: 1107764 - RNA, 19 nt, Artificial Sequence
  Description of Artificial Sequence: Synthetic oligonucleotide
  Sense strand starting at position 2671 of SEQ ID NO: 915809
gcugaaauuccggcggcuu

SEQ ID NO: 1107765 - RNA, 19 nt, Artificial Sequence
  Description of Artificial Sequence: Synthetic oligonucleotide
  Antisense strand to SEQ ID NO: 1107764
aagccgccggaauuucagc

SEQ ID NO: 1107766 - RNA, 19 nt, Artificial Sequence
  Description of Artificial Sequence: Synthetic oligonucleotide
  Sense strand starting at position 2736 of SEQ ID NO: 915809
ugcuuugugguuucacgua

SEQ ID NO: 1107767 - RNA, 19 nt, Artificial Sequence
  Description of Artificial Sequence: Synthetic oligonucleotide
  Antisense strand to SEQ ID NO: 1107766
uacgugaaaccacaaagca

SEQ ID NO: 1107768 - RNA, 19 nt, Artificial Sequence
  Description of Artificial Sequence: Synthetic oligonucleotide
  Sense strand starting at position 2768 of SEQ ID NO: 915809
aguugaaggcgucagaaau

SEQ ID NO: 1107769 - RNA, 19 nt, Artificial Sequence
  Description of Artificial Sequence: Synthetic oligonucleotide
  Antisense strand to SEQ ID NO: 1107768
auuucugacgccuucaacu

SEQ ID NO: 1107770 - RNA, 19 nt, Artificial Sequence
  Description of Artificial Sequence: Synthetic oligonucleotide
  Sense strand starting at position 2808 of SEQ ID NO: 915809
uauguucuuguguugcgaa

SEQ ID NO: 1107771 - RNA, 19 nt, Artificial Sequence
  Description of Artificial Sequence: Synthetic oligonucleotide
  Antisense strand to SEQ ID NO: 1107770
uucgcaacacaagaacaua

SEQ ID NO: 1107772 - RNA, 19 nt, Artificial Sequence
  Description of Artificial Sequence: Synthetic oligonucleotide
  Sense strand starting at position 2816 of SEQ ID NO: 915809
uguguugcgaacuaauaaa

SEQ ID NO: 1107773 - RNA, 19 nt, Artificial Sequence
  Description of Artificial Sequence: Synthetic oligonucleotide
  Antisense strand to SEQ ID NO: 1107772
uuuauuaguucgcaacaca

SEQ ID NO: 1107774 - RNA, 19 nt, Artificial Sequence
  Description of Artificial Sequence: Synthetic oligonucleotide
  Sense strand starting at position 2916 of SEQ ID NO: 915809
gcgguuaaugcuucuugua

SEQ ID NO: 1107775 - RNA, 19 nt, Artificial Sequence
  Description of Artificial Sequence: Synthetic oligonucleotide
  Antisense strand to SEQ ID NO: 1107774
uacaagaagcauuaaccgc

SEQ ID NO: 1107776 - RNA, 19 nt, Artificial Sequence
  Description of Artificial Sequence: Synthetic oligonucleotide
  Sense strand starting at position 2963 of SEQ ID NO: 915809
uggauauacuuacuaguca

SEQ ID NO: 1107777 - RNA, 19 nt, Artificial Sequence
  Description of Artificial Sequence: Synthetic oligonucleotide
  Antisense strand to SEQ ID NO: 1107776
ugacuaguaaguauaucca

SEQ ID NO: 1107778 - RNA, 19 nt, Artificial Sequence
  Description of Artificial Sequence: Synthetic oligonucleotide
  Sense strand starting at position 3032 of SEQ ID NO: 915809
agaugagguggguguauua

SEQ ID NO: 1107779 - RNA, 19 nt, Artificial Sequence
  Description of Artificial Sequence: Synthetic oligonucleotide
  Antisense strand to SEQ ID NO: 1107778
uaauacacccaccucaucu

SEQ ID NO: 1107780 - RNA, 19 nt, Artificial Sequence
  Description of Artificial Sequence: Synthetic oligonucleotide
  Sense strand starting at position 3104 of SEQ ID NO: 915809
gagagacuacccuguugua

SEQ ID NO: 1107781 - RNA, 19 nt, Artificial Sequence
  Description of Artificial Sequence: Synthetic oligonucleotide
  Antisense strand to SEQ ID NO: 1107780
uacaacaggguagucucuc

SEQ ID NO: 1107782 - RNA, 19 nt, Artificial Sequence
  Description of Artificial Sequence: Synthetic oligonucleotide
  Sense strand starting at position 3153 of SEQ ID NO: 915809
gagaaagcuggaugauguu

SEQ ID NO: 1107783 - RNA, 19 nt, Artificial Sequence
  Description of Artificial Sequence: Synthetic oligonucleotide
  Antisense strand to SEQ ID NO: 1107782
aacaucauccagcuuucuc

SEQ ID NO: 1107784 - RNA, 19 nt, Artificial Sequence
  Description of Artificial Sequence: Synthetic oligonucleotide
  Sense strand starting at position 3235 of SEQ ID NO: 915809
cagauagcccucuaagugu

SEQ ID NO: 1107785 - RNA, 19 nt, Artificial Sequence
  Description of Artificial Sequence: Synthetic oligonucleotide
  Antisense strand to SEQ ID NO: 1107784
acacuuagagggcuaucug

SEQ ID NO: 1107786 - RNA, 19 nt, Artificial Sequence
  Description of Artificial Sequence: Synthetic oligonucleotide
  Sense strand starting at position 3243 of SEQ ID NO: 915809
ccucuaaguguggauagua

SEQ ID NO: 1107787 - RNA, 19 nt, Artificial Sequence
  Description of Artificial Sequence: Synthetic oligonucleotide
  Antisense strand to SEQ ID NO: 1107786
uacuauccacacuuagagg

SEQ ID NO: 1107788 - RNA, 19 nt, Artificial Sequence
  Description of Artificial Sequence: Synthetic oligonucleotide
  Sense strand starting at position 3311 of SEQ ID NO: 915809
acggauaguugaguaauag

SEQ ID NO: 1107789 - RNA, 19 nt, Artificial Sequence
  Description of Artificial Sequence: Synthetic oligonucleotide
  Antisense strand to SEQ ID NO: 1107788
cuauuacucaacuauccgu

SEQ ID NO: 1107790 - RNA, 19 nt, Artificial Sequence
  Description of Artificial Sequence: Synthetic oligonucleotide
  Sense strand starting at position 3312 of SEQ ID NO: 915809
cggauaguugaguaauagg

SEQ ID NO: 1107791 - RNA, 19 nt, Artificial Sequence
  Description of Artificial Sequence: Synthetic oligonucleotide
  Antisense strand to SEQ ID NO: 1107790
ccuauuacucaacuauccg

SEQ ID NO: 1107792 - RNA, 19 nt, Artificial Sequence
  Description of Artificial Sequence: Synthetic oligonucleotide
  Sense strand starting at position 3359 of SEQ ID NO: 915809
gacuuuaagcuuuguuuga

SEQ ID NO: 1107793 - RNA, 19 nt, Artificial Sequence
  Description of Artificial Sequence: Synthetic oligonucleotide
  Antisense strand to SEQ ID NO: 1107792
ucaaacaaagcuuaaaguc

SEQ ID NO: 1107794 - RNA, 19 nt, Artificial Sequence
  Description of Artificial Sequence: Synthetic oligonucleotide
  Sense strand starting at position 3360 of SEQ ID NO: 915809
acuuuaagcuuuguuugaa

SEQ ID NO: 1107795 - RNA, 19 nt, Artificial Sequence
  Description of Artificial Sequence: Synthetic oligonucleotide
  Antisense strand to SEQ ID NO: 1107794
uucaaacaaagcuuaaagu

SEQ ID NO: 1107796 - RNA, 19 nt, Artificial Sequence
  Description of Artificial Sequence: Synthetic oligonucleotide
  Sense strand starting at position 3363 of SEQ ID NO: 915809
uuaagcuuuguuugaacau

SEQ ID NO: 1107797 - RNA, 19 nt, Artificial Sequence
  Description of Artificial Sequence: Synthetic oligonucleotide
  Antisense strand to SEQ ID NO: 1107796
auguucaaacaaagcuuaa

SEQ ID NO: 1107798 - RNA, 19 nt, Artificial Sequence
  Description of Artificial Sequence: Synthetic oligonucleotide
  Sense strand starting at position 3399 of SEQ ID NO: 915809
aaguuuaaaucaguucgga

SEQ ID NO: 1107799 - RNA, 19 nt, Artificial Sequence
  Description of Artificial Sequence: Synthetic oligonucleotide
  Antisense strand to SEQ ID NO: 1107798
uccgaacugauuuaaacuu

SEQ ID NO: 1107800 - RNA, 19 nt, Artificial Sequence
  Description of Artificial Sequence: Synthetic oligonucleotide
  Sense strand starting at position 3402 of SEQ ID NO: 915809
uuuaaaucaguucggauua

SEQ ID NO: 1107801 - RNA, 19 nt, Artificial Sequence
  Description of Artificial Sequence: Synthetic oligonucleotide
  Antisense strand to SEQ ID NO: 1107800
uaauccgaacugauuuaaa

SEQ ID NO: 1107802 - RNA, 19 nt, Artificial Sequence
  Description of Artificial Sequence: Synthetic oligonucleotide
  Sense strand starting at position 70 of SEQ ID NO: 915810
gcuauucuauuccuuggga

SEQ ID NO: 1107803 - RNA, 19 nt, Artificial Sequence
  Description of Artificial Sequence: Synthetic oligonucleotide
  Antisense strand to SEQ ID NO: 1107802
ucccaaggaauagaauagc

SEQ ID NO: 1107804 - RNA, 19 nt, Artificial Sequence
  Description of Artificial Sequence: Synthetic oligonucleotide
  Sense strand starting at position 73 of SEQ ID NO: 915810
auucuauuccuugggagau

SEQ ID NO: 1107805 - RNA, 19 nt, Artificial Sequence
  Description of Artificial Sequence: Synthetic oligonucleotide
  Antisense strand to SEQ ID NO: 1107804
aucucccaaggaauagaau

SEQ ID NO: 1107806 - RNA, 19 nt, Artificial Sequence
  Description of Artificial Sequence: Synthetic oligonucleotide
  Sense strand starting at position 332 of SEQ ID NO: 915810
augugucuccagggauuga

SEQ ID NO: 1107807 - RNA, 19 nt, Artificial Sequence
  Description of Artificial Sequence: Synthetic oligonucleotide
  Antisense strand to SEQ ID NO: 1107806
ucaaucccuggagacacau

SEQ ID NO: 1107808 - RNA, 19 nt, Artificial Sequence
  Description of Artificial Sequence: Synthetic oligonucleotide
  Sense strand starting at position 333 of SEQ ID NO: 915810
ugugucuccagggauugaa

SEQ ID NO: 1107809 - RNA, 19 nt, Artificial Sequence
  Description of Artificial Sequence: Synthetic oligonucleotide
  Antisense strand to SEQ ID NO: 1107808
uucaaucccuggagacaca

SEQ ID NO: 1107810 - RNA, 19 nt, Artificial Sequence
  Description of Artificial Sequence: Synthetic oligonucleotide
  Sense strand starting at position 349 of SEQ ID NO: 915810
gaaaguuggguugggugaa

SEQ ID NO: 1107811 - RNA, 19 nt, Artificial Sequence
  Description of Artificial Sequence: Synthetic oligonucleotide
  Antisense strand to SEQ ID NO: 1107810
uucacccaacccaacuuuc

SEQ ID NO: 1107812 - RNA, 19 nt, Artificial Sequence
  Description of Artificial Sequence: Synthetic oligonucleotide
  Sense strand starting at position 387 of SEQ ID NO: 915810
gugguuaccucuuuagagg

SEQ ID NO: 1107813 - RNA, 19 nt, Artificial Sequence
  Description of Artificial Sequence: Synthetic oligonucleotide
  Antisense strand to SEQ ID NO: 1107812
ccucuaaagagguaaccac

SEQ ID NO: 1107814 - RNA, 19 nt, Artificial Sequence
  Description of Artificial Sequence: Synthetic oligonucleotide
  Sense strand starting at position 478 of SEQ ID NO: 915810
caggcuguccucugagaaa

SEQ ID NO: 1107815 - RNA, 19 nt, Artificial Sequence
  Description of Artificial Sequence: Synthetic oligonucleotide
  Antisense strand to SEQ ID NO: 1107814
uuucucagaggacagccug

SEQ ID NO: 1107816 - RNA, 19 nt, Artificial Sequence
  Description of Artificial Sequence: Synthetic oligonucleotide
  Sense strand starting at position 554 of SEQ ID NO: 915810
cuguguuaucccuggacaa

SEQ ID NO: 1107817 - RNA, 19 nt, Artificial Sequence
  Description of Artificial Sequence: Synthetic oligonucleotide
  Antisense strand to SEQ ID NO: 1107816
uuguccagggauaacacag

SEQ ID NO: 1107818 - RNA, 19 nt, Artificial Sequence
  Description of Artificial Sequence: Synthetic oligonucleotide
  Sense strand starting at position 556 of SEQ ID NO: 915810
guguuaucccuggacaaua

SEQ ID NO: 1107819 - RNA, 19 nt, Artificial Sequence
  Description of Artificial Sequence: Synthetic oligonucleotide
  Antisense strand to SEQ ID NO: 1107818
uauuguccagggauaacac

SEQ ID NO: 1107820 - RNA, 19 nt, Artificial Sequence
  Description of Artificial Sequence: Synthetic oligonucleotide
  Sense strand starting at position 610 of SEQ ID NO: 915810
agcaaaucacccugucaag

SEQ ID NO: 1107821 - RNA, 19 nt, Artificial Sequence
  Description of Artificial Sequence: Synthetic oligonucleotide
  Antisense strand to SEQ ID NO: 1107820
cuugacagggugauuugcu

SEQ ID NO: 1107822 - RNA, 19 nt, Artificial Sequence
  Description of Artificial Sequence: Synthetic oligonucleotide
  Sense strand starting at position 749 of SEQ ID NO: 915810
uccugucacguggaaugau

SEQ ID NO: 1107823 - RNA, 19 nt, Artificial Sequence
  Description of Artificial Sequence: Synthetic oligonucleotide
  Antisense strand to SEQ ID NO: 1107822
aucauuccacgugacagga

SEQ ID NO: 1107824 - RNA, 19 nt, Artificial Sequence
  Description of Artificial Sequence: Synthetic oligonucleotide
  Sense strand starting at position 1172 of SEQ ID NO: 915810
cucagaugcguuucuugca

SEQ ID NO: 1107825 - RNA, 19 nt, Artificial Sequence
  Description of Artificial Sequence: Synthetic oligonucleotide
  Antisense strand to SEQ ID NO: 1107824
ugcaagaaacgcaucugag

SEQ ID NO: 1107826 - RNA, 19 nt, Artificial Sequence
  Description of Artificial Sequence: Synthetic oligonucleotide
  Sense strand starting at position 1303 of SEQ ID NO: 915810
cguaacuguaccgaacuaa

SEQ ID NO: 1107827 - RNA, 19 nt, Artificial Sequence
  Description of Artificial Sequence: Synthetic oligonucleotide
  Antisense strand to SEQ ID NO: 1107826
uuaguucgguacaguuacg

SEQ ID NO: 1107828 - RNA, 19 nt, Artificial Sequence
  Description of Artificial Sequence: Synthetic oligonucleotide
  Sense strand starting at position 1314 of SEQ ID NO: 915810
cgaacuaaugaaugaaugu

SEQ ID NO: 1107829 - RNA, 19 nt, Artificial Sequence
  Description of Artificial Sequence: Synthetic oligonucleotide
  Antisense strand to SEQ ID NO: 1107828
acauucauucauuaguucg

SEQ ID NO: 1107830 - RNA, 19 nt, Artificial Sequence
  Description of Artificial Sequence: Synthetic oligonucleotide
  Sense strand starting at position 1471 of SEQ ID NO: 915810
caaggacucccucgagaga

SEQ ID NO: 1107831 - RNA, 19 nt, Artificial Sequence
  Description of Artificial Sequence: Synthetic oligonucleotide
  Antisense strand to SEQ ID NO: 1107830
ucucucgagggaguccuug

SEQ ID NO: 1107832 - RNA, 19 nt, Artificial Sequence
  Description of Artificial Sequence: Synthetic oligonucleotide
  Sense strand starting at position 1926 of SEQ ID NO: 915810
gagcucugucgggacaaag

SEQ ID NO: 1107833 - RNA, 19 nt, Artificial Sequence
  Description of Artificial Sequence: Synthetic oligonucleotide
  Antisense strand to SEQ ID NO: 1107832
cuuugucccgacagagcuc

SEQ ID NO: 1107834 - RNA, 19 nt, Artificial Sequence
  Description of Artificial Sequence: Synthetic oligonucleotide
  Sense strand starting at position 1981 of SEQ ID NO: 915810
agacaugugccugauugga

SEQ ID NO: 1107835 - RNA, 19 nt, Artificial Sequence
  Description of Artificial Sequence: Synthetic oligonucleotide
  Antisense strand to SEQ ID NO: 1107834
uccaaucaggcacaugucu

SEQ ID NO: 1107836 - RNA, 19 nt, Artificial Sequence
  Description of Artificial Sequence: Synthetic oligonucleotide
  Sense strand starting at position 1983 of SEQ ID NO: 915810
acaugugccugauuggaca

SEQ ID NO: 1107837 - RNA, 19 nt, Artificial Sequence
  Description of Artificial Sequence: Synthetic oligonucleotide
  Antisense strand to SEQ ID NO: 1107836
uguccaaucaggcacaugu

SEQ ID NO: 1107838 - RNA, 19 nt, Artificial Sequence
  Description of Artificial Sequence: Synthetic oligonucleotide
  Sense strand starting at position 2012 of SEQ ID NO: 915810
cuacuccucugauuggaua

SEQ ID NO: 1107839 - RNA, 19 nt, Artificial Sequence
  Description of Artificial Sequence: Synthetic oligonucleotide
  Antisense strand to SEQ ID NO: 1107838
uauccaaucagaggaguag

SEQ ID NO: 1107840 - RNA, 19 nt, Artificial Sequence
  Description of Artificial Sequence: Synthetic oligonucleotide
  Sense strand starting at position 2190 of SEQ ID NO: 915810
uugugacugcgguuauguu

SEQ ID NO: 1107841 - RNA, 19 nt, Artificial Sequence
  Description of Artificial Sequence: Synthetic oligonucleotide
  Antisense strand to SEQ ID NO: 1107840
aacauaaccgcagucacaa

SEQ ID NO: 1107842 - RNA, 19 nt, Artificial Sequence
  Description of Artificial Sequence: Synthetic oligonucleotide
  Sense strand starting at position 2197 of SEQ ID NO: 915810
ugcgguuauguuuauuuau

SEQ ID NO: 1107843 - RNA, 19 nt, Artificial Sequence
  Description of Artificial Sequence: Synthetic oligonucleotide
  Antisense strand to SEQ ID NO: 1107842
auaaauaaacauaaccgca

SEQ ID NO: 1107844 - RNA, 19 nt, Artificial Sequence
  Description of Artificial Sequence: Synthetic oligonucleotide
  Sense strand starting at position 2417 of SEQ ID NO: 915810
cuaagaaacaggugaaguu

SEQ ID NO: 1107845 - RNA, 19 nt, Artificial Sequence
  Description of Artificial Sequence: Synthetic oligonucleotide
  Antisense strand to SEQ ID NO: 1107844
aacuucaccuguuucuuag

SEQ ID NO: 1107846 - RNA, 19 nt, Artificial Sequence
  Description of Artificial Sequence: Synthetic oligonucleotide
  Sense strand starting at position 2424 of SEQ ID NO: 915810
acaggugaaguugauugua

SEQ ID NO: 1107847 - RNA, 19 nt, Artificial Sequence
  Description of Artificial Sequence: Synthetic oligonucleotide
  Antisense strand to SEQ ID NO: 1107846
uacaaucaacuucaccugu

SEQ ID NO: 1107848 - RNA, 19 nt, Artificial Sequence
  Description of Artificial Sequence: Synthetic oligonucleotide
  Sense strand starting at position 2426 of SEQ ID NO: 915810
aggugaaguugauuguaau

SEQ ID NO: 1107849 - RNA, 19 nt, Artificial Sequence
  Description of Artificial Sequence: Synthetic oligonucleotide
  Antisense strand to SEQ ID NO: 1107848
auuacaaucaacuucaccu

SEQ ID NO: 1107850 - RNA, 19 nt, Artificial Sequence
  Description of Artificial Sequence: Synthetic oligonucleotide
  Sense strand starting at position 2427 of SEQ ID NO: 915810
ggugaaguugauuguaaua

SEQ ID NO: 1107851 - RNA, 19 nt, Artificial Sequence
  Description of Artificial Sequence: Synthetic oligonucleotide
  Antisense strand to SEQ ID NO: 1107850
uauuacaaucaacuucacc

SEQ ID NO: 1107852 - RNA, 19 nt, Artificial Sequence
  Description of Artificial Sequence: Synthetic oligonucleotide
  Sense strand starting at position 2516 of SEQ ID NO: 915810
guacuaaaucuuugaagcu

SEQ ID NO: 1107853 - RNA, 19 nt, Artificial Sequence
  Description of Artificial Sequence: Synthetic oligonucleotide
  Antisense strand to SEQ ID NO: 1107852
agcuucaaagauuuaguac

SEQ ID NO: 1107854 - RNA, 19 nt, Artificial Sequence
  Description of Artificial Sequence: Synthetic oligonucleotide
  Sense strand starting at position 2528 of SEQ ID NO: 915810
ugaagcucacucuguauuu

SEQ ID NO: 1107855 - RNA, 19 nt, Artificial Sequence
  Description of Artificial Sequence: Synthetic oligonucleotide
  Antisense strand to SEQ ID NO: 1107854
aaauacagagugagcuuca

SEQ ID NO: 1107856 - RNA, 19 nt, Artificial Sequence
  Description of Artificial Sequence: Synthetic oligonucleotide
  Sense strand starting at position 2751 of SEQ ID NO: 915810
acgagauggugauccuaga

SEQ ID NO: 1107857 - RNA, 19 nt, Artificial Sequence
  Description of Artificial Sequence: Synthetic oligonucleotide
  Antisense strand to SEQ ID NO: 1107856
ucuaggaucaccaucucgu

SEQ ID NO: 1107858 - RNA, 19 nt, Artificial Sequence
  Description of Artificial Sequence: Synthetic oligonucleotide
  Sense strand starting at position 2807 of SEQ ID NO: 915810
gaggacugcugcccaucaa

SEQ ID NO: 1107859 - RNA, 19 nt, Artificial Sequence
  Description of Artificial Sequence: Synthetic oligonucleotide
  Antisense strand to SEQ ID NO: 1107858
uugaugggcagcaguccuc

SEQ ID NO: 1107860 - RNA, 19 nt, Artificial Sequence
  Description of Artificial Sequence: Synthetic oligonucleotide
  Sense strand starting at position 2808 of SEQ ID NO: 915810
aggacugcugcccaucaau

SEQ ID NO: 1107861 - RNA, 19 nt, Artificial Sequence
  Description of Artificial Sequence: Synthetic oligonucleotide
  Antisense strand to SEQ ID NO: 1107860
auugaugggcagcaguccu

SEQ ID NO: 1107862 - RNA, 19 nt, Artificial Sequence
  Description of Artificial Sequence: Synthetic oligonucleotide
  Sense strand starting at position 2885 of SEQ ID NO: 915810
acauuuagauauggaggaa

SEQ ID NO: 1107863 - RNA, 19 nt, Artificial Sequence
  Description of Artificial Sequence: Synthetic oligonucleotide
  Antisense strand to SEQ ID NO: 1107862
uuccuccauaucuaaaugu

SEQ ID NO: 1107864 - RNA, 19 nt, Artificial Sequence
  Description of Artificial Sequence: Synthetic oligonucleotide
  Sense strand starting at position 2934 of SEQ ID NO: 915810
uggccuuagcccuaaugau

SEQ ID NO: 1107865 - RNA, 19 nt, Artificial Sequence
  Description of Artificial Sequence: Synthetic oligonucleotide
  Antisense strand to SEQ ID NO: 1107864
aucauuagggcuaaggcca

SEQ ID NO: 1107866 - RNA, 19 nt, Artificial Sequence
  Description of Artificial Sequence: Synthetic oligonucleotide
  Sense strand starting at position 3033 of SEQ ID NO: 915810
ugcauuucuguaugacgga

SEQ ID NO: 1107867 - RNA, 19 nt, Artificial Sequence
  Description of Artificial Sequence: Synthetic oligonucleotide
  Antisense strand to SEQ ID NO: 1107866
uccgucauacagaaaugca

SEQ ID NO: 1107868 - RNA, 19 nt, Artificial Sequence
  Description of Artificial Sequence: Synthetic oligonucleotide
  Sense strand starting at position 3038 of SEQ ID NO: 915810
uucuguaugacggaacauu

SEQ ID NO: 1107869 - RNA, 19 nt, Artificial Sequence
  Description of Artificial Sequence: Synthetic oligonucleotide
  Antisense strand to SEQ ID NO: 1107868
aauguuccgucauacagaa

SEQ ID NO: 1107870 - RNA, 19 nt, Artificial Sequence
  Description of Artificial Sequence: Synthetic oligonucleotide
  Sense strand starting at position 3047 of SEQ ID NO: 915810
acggaacauuaucuuacaa

SEQ ID NO: 1107871 - RNA, 19 nt, Artificial Sequence
  Description of Artificial Sequence: Synthetic oligonucleotide
  Antisense strand to SEQ ID NO: 1107870
uuguaagauaauguuccgu

SEQ ID NO: 1107872 - RNA, 19 nt, Artificial Sequence
  Description of Artificial Sequence: Synthetic oligonucleotide
  Sense strand starting at position 3221 of SEQ ID NO: 915810
aauagcucaugauugaguu

SEQ ID NO: 1107873 - RNA, 19 nt, Artificial Sequence
  Description of Artificial Sequence: Synthetic oligonucleotide
  Antisense strand to SEQ ID NO: 1107872
aacucaaucaugagcuauu

SEQ ID NO: 1107874 - RNA, 19 nt, Artificial Sequence
  Description of Artificial Sequence: Synthetic oligonucleotide
  Sense strand starting at position 3433 of SEQ ID NO: 915810
uucugauagcuugaucuca

SEQ ID NO: 1107875 - RNA, 19 nt, Artificial Sequence
  Description of Artificial Sequence: Synthetic oligonucleotide
  Antisense strand to SEQ ID NO: 1107874
ugagaucaagcuaucagaa

SEQ ID NO: 1107876 - RNA, 19 nt, Artificial Sequence
  Description of Artificial Sequence: Synthetic oligonucleotide
  Sense strand starting at position 3435 of SEQ ID NO: 915810
cugauagcuugaucucaua

SEQ ID NO: 1107877 - RNA, 19 nt, Artificial Sequence
  Description of Artificial Sequence: Synthetic oligonucleotide
  Antisense strand to SEQ ID NO: 1107876
uaugagaucaagcuaucag

SEQ ID NO: 1107878 - RNA, 19 nt, Artificial Sequence
  Description of Artificial Sequence: Synthetic oligonucleotide
  Sense strand starting at position 3934 of SEQ ID NO: 915810
agaugcaaaguuugggaaa

SEQ ID NO: 1107879 - RNA, 19 nt, Artificial Sequence
  Description of Artificial Sequence: Synthetic oligonucleotide
  Antisense strand to SEQ ID NO: 1107878
uuucccaaacuuugcaucu

SEQ ID NO: 1107880 - RNA, 19 nt, Artificial Sequence
  Description of Artificial Sequence: Synthetic oligonucleotide
  Sense strand starting at position 3978 of SEQ ID NO: 915810
gcuguaagagcacacaaua

SEQ ID NO: 1107881 - RNA, 19 nt, Artificial Sequence
  Description of Artificial Sequence: Synthetic oligonucleotide
  Antisense strand to SEQ ID NO: 1107880
uauugugugcucuuacagc

SEQ ID NO: 1107882 - RNA, 19 nt, Artificial Sequence
  Description of Artificial Sequence: Synthetic oligonucleotide
  Sense strand starting at position 91 of SEQ ID NO: 915811
aaagguaguuguucucaaa

SEQ ID NO: 1107883 - RNA, 19 nt, Artificial Sequence
  Description of Artificial Sequence: Synthetic oligonucleotide
  Antisense strand to SEQ ID NO: 1107882
uuugagaacaacuaccuuu

SEQ ID NO: 1107884 - RNA, 19 nt, Artificial Sequence
  Description of Artificial Sequence: Synthetic oligonucleotide
  Sense strand starting at position 138 of SEQ ID NO: 915811
accugagccuuguuagaag

SEQ ID NO: 1107885 - RNA, 19 nt, Artificial Sequence
  Description of Artificial Sequence: Synthetic oligonucleotide
  Antisense strand to SEQ ID NO: 1107884
cuucuaacaaggcucaggu

SEQ ID NO: 1107886 - RNA, 19 nt, Artificial Sequence
  Description of Artificial Sequence: Synthetic oligonucleotide
  Sense strand starting at position 215 of SEQ ID NO: 915811
gcaauaugcguuuaacuag

SEQ ID NO: 1107887 - RNA, 19 nt, Artificial Sequence
  Description of Artificial Sequence: Synthetic oligonucleotide
  Antisense strand to SEQ ID NO: 1107886
cuaguuaaacgcauauugc

SEQ ID NO: 1107888 - RNA, 19 nt, Artificial Sequence
  Description of Artificial Sequence: Synthetic oligonucleotide
  Sense strand starting at position 307 of SEQ ID NO: 915811
gccauugcuggccaaacua

SEQ ID NO: 1107889 - RNA, 19 nt, Artificial Sequence
  Description of Artificial Sequence: Synthetic oligonucleotide
  Antisense strand to SEQ ID NO: 1107888
uaguuuggccagcaauggc

SEQ ID NO: 1107890 - RNA, 19 nt, Artificial Sequence
  Description of Artificial Sequence: Synthetic oligonucleotide
  Sense strand starting at position 455 of SEQ ID NO: 915811
ggcugagucccucacauug

SEQ ID NO: 1107891 - RNA, 19 nt, Artificial Sequence
  Description of Artificial Sequence: Synthetic oligonucleotide
  Antisense strand to SEQ ID NO: 1107890
caaugugagggacucagcc

SEQ ID NO: 1107892 - RNA, 19 nt, Artificial Sequence
  Description of Artificial Sequence: Synthetic oligonucleotide
  Sense strand starting at position 484 of SEQ ID NO: 915811
uguuguacccuuggaauga

SEQ ID NO: 1107893 - RNA, 19 nt, Artificial Sequence
  Description of Artificial Sequence: Synthetic oligonucleotide
  Antisense strand to SEQ ID NO: 1107892
ucauuccaaggguacaaca

SEQ ID NO: 1107894 - RNA, 19 nt, Artificial Sequence
  Description of Artificial Sequence: Synthetic oligonucleotide
  Sense strand starting at position 494 of SEQ ID NO: 915811
uuggaaugauugucuacug

SEQ ID NO: 1107895 - RNA, 19 nt, Artificial Sequence
  Description of Artificial Sequence: Synthetic oligonucleotide
  Antisense strand to SEQ ID NO: 1107894
caguagacaaucauuccaa

SEQ ID NO: 1107896 - RNA, 19 nt, Artificial Sequence
  Description of Artificial Sequence: Synthetic oligonucleotide
  Sense strand starting at position 542 of SEQ ID NO: 915811
ggguauagcuggaggagaa

SEQ ID NO: 1107897 - RNA, 19 nt, Artificial Sequence
  Description of Artificial Sequence: Synthetic oligonucleotide
  Antisense strand to SEQ ID NO: 1107896
uucuccuccagcuauaccc

SEQ ID NO: 1107898 - RNA, 19 nt, Artificial Sequence
  Description of Artificial Sequence: Synthetic oligonucleotide
  Sense strand starting at position 543 of SEQ ID NO: 915811
gguauagcuggaggagaaa

SEQ ID NO: 1107899 - RNA, 19 nt, Artificial Sequence
  Description of Artificial Sequence: Synthetic oligonucleotide
  Antisense strand to SEQ ID NO: 1107898
uuucuccuccagcuauacc

SEQ ID NO: 1107900 - RNA, 19 nt, Artificial Sequence
  Description of Artificial Sequence: Synthetic oligonucleotide
  Sense strand starting at position 585 of SEQ ID NO: 915811
gcguuugguccuaggagga

SEQ ID NO: 1107901 - RNA, 19 nt, Artificial Sequence
  Description of Artificial Sequence: Synthetic oligonucleotide
  Antisense strand to SEQ ID NO: 1107900
uccuccuaggaccaaacgc

SEQ ID NO: 1107902 - RNA, 19 nt, Artificial Sequence
  Description of Artificial Sequence: Synthetic oligonucleotide
  Sense strand starting at position 636 of SEQ ID NO: 915811
ccucuuaugcuagauagua

SEQ ID NO: 1107903 - RNA, 19 nt, Artificial Sequence
  Description of Artificial Sequence: Synthetic oligonucleotide
  Antisense strand to SEQ ID NO: 1107902
uacuaucuagcauaagagg

SEQ ID NO: 1107904 - RNA, 19 nt, Artificial Sequence
  Description of Artificial Sequence: Synthetic oligonucleotide
  Sense strand starting at position 649 of SEQ ID NO: 915811
auaguaacagcagaaaguu

SEQ ID NO: 1107905 - RNA, 19 nt, Artificial Sequence
  Description of Artificial Sequence: Synthetic oligonucleotide
  Antisense strand to SEQ ID NO: 1107904
aacuuucugcuguuacuau

SEQ ID NO: 1107906 - RNA, 19 nt, Artificial Sequence
  Description of Artificial Sequence: Synthetic oligonucleotide
  Sense strand starting at position 657 of SEQ ID NO: 915811
agcagaaaguuaucccaga

SEQ ID NO: 1107907 - RNA, 19 nt, Artificial Sequence
  Description of Artificial Sequence: Synthetic oligonucleotide
  Antisense strand to SEQ ID NO: 1107906
ucugggauaacuuucugcu

SEQ ID NO: 1107908 - RNA, 19 nt, Artificial Sequence
  Description of Artificial Sequence: Synthetic oligonucleotide
  Sense strand starting at position 658 of SEQ ID NO: 915811
gcagaaaguuaucccagac

SEQ ID NO: 1107909 - RNA, 19 nt, Artificial Sequence
  Description of Artificial Sequence: Synthetic oligonucleotide
  Antisense strand to SEQ ID NO: 1107908
gucugggauaacuuucugc

SEQ ID NO: 1107910 - RNA, 19 nt, Artificial Sequence
  Description of Artificial Sequence: Synthetic oligonucleotide
  Sense strand starting at position 935 of SEQ ID NO: 915811
ggaccaagguuguucaaga

SEQ ID NO: 1107911 - RNA, 19 nt, Artificial Sequence
  Description of Artificial Sequence: Synthetic oligonucleotide
  Antisense strand to SEQ ID NO: 1107910
ucuugaacaaccuuggucc

SEQ ID NO: 1107912 - RNA, 19 nt, Artificial Sequence
  Description of Artificial Sequence: Synthetic oligonucleotide
  Sense strand starting at position 948 of SEQ ID NO: 915811
ucaagaaaggcugggucua

SEQ ID NO: 1107913 - RNA, 19 nt, Artificial Sequence
  Description of Artificial Sequence: Synthetic oligonucleotide
  Antisense strand to SEQ ID NO: 1107912
uagacccagccuuucuuga

SEQ ID NO: 1107914 - RNA, 19 nt, Artificial Sequence
  Description of Artificial Sequence: Synthetic oligonucleotide
  Sense strand starting at position 949 of SEQ ID NO: 915811
caagaaaggcugggucuaa

SEQ ID NO: 1107915 - RNA, 19 nt, Artificial Sequence
  Description of Artificial Sequence: Synthetic oligonucleotide
  Antisense strand to SEQ ID NO: 1107914
uuagacccagccuuucuug

SEQ ID NO: 1107916 - RNA, 19 nt, Artificial Sequence
  Description of Artificial Sequence: Synthetic oligonucleotide
  Sense strand starting at position 1015 of SEQ ID NO: 915811
uaucaaagcgccuagaaga

SEQ ID NO: 1107917 - RNA, 19 nt, Artificial Sequence
  Description of Artificial Sequence: Synthetic oligonucleotide
  Antisense strand to SEQ ID NO: 1107916
ucuucuaggcgcuuugaua

SEQ ID NO: 1107918 - RNA, 19 nt, Artificial Sequence
  Description of Artificial Sequence: Synthetic oligonucleotide
  Sense strand starting at position 1432 of SEQ ID NO: 915811
agaugaucuuaagcaaucu

SEQ ID NO: 1107919 - RNA, 19 nt, Artificial Sequence
  Description of Artificial Sequence: Synthetic oligonucleotide
  Antisense strand to SEQ ID NO: 1107918
agauugcuuaagaucaucu

SEQ ID NO: 1107920 - RNA, 19 nt, Artificial Sequence
  Description of Artificial Sequence: Synthetic oligonucleotide
  Sense strand starting at position 2020 of SEQ ID NO: 915811
gccuucucgccgaguagga

SEQ ID NO: 1107921 - RNA, 19 nt, Artificial Sequence
  Description of Artificial Sequence: Synthetic oligonucleotide
  Antisense strand to SEQ ID NO: 1107920
uccuacucggcgagaaggc

SEQ ID NO: 1107922 - RNA, 19 nt, Artificial Sequence
  Description of Artificial Sequence: Synthetic oligonucleotide
  Sense strand starting at position 2056 of SEQ ID NO: 915811
gagguuugauccucucuau

SEQ ID NO: 1107923 - RNA, 19 nt, Artificial Sequence
  Description of Artificial Sequence: Synthetic oligonucleotide
  Antisense strand to SEQ ID NO: 1107922
auagagaggaucaaaccuc

SEQ ID NO: 1107924 - RNA, 19 nt, Artificial Sequence
  Description of Artificial Sequence: Synthetic oligonucleotide
  Sense strand starting at position 2168 of SEQ ID NO: 915811
cucugcagcgaauaaauua

SEQ ID NO: 1107925 - RNA, 19 nt, Artificial Sequence
  Description of Artificial Sequence: Synthetic oligonucleotide
  Antisense strand to SEQ ID NO: 1107924
uaauuuauucgcugcagag

SEQ ID NO: 1107926 - RNA, 19 nt, Artificial Sequence
  Description of Artificial Sequence: Synthetic oligonucleotide
  Sense strand starting at position 2287 of SEQ ID NO: 915811
uuuggauaccucuacgugu

SEQ ID NO: 1107927 - RNA, 19 nt, Artificial Sequence
  Description of Artificial Sequence: Synthetic oligonucleotide
  Antisense strand to SEQ ID NO: 1107926
acacguagagguauccaaa

SEQ ID NO: 1107928 - RNA, 19 nt, Artificial Sequence
  Description of Artificial Sequence: Synthetic oligonucleotide
  Sense strand starting at position 2413 of SEQ ID NO: 915811
gccgaaucucuccaucuuu

SEQ ID NO: 1107929 - RNA, 19 nt, Artificial Sequence
  Description of Artificial Sequence: Synthetic oligonucleotide
  Antisense strand to SEQ ID NO: 1107928
aaagauggagagauucggc

SEQ ID NO: 1107930 - RNA, 19 nt, Artificial Sequence
  Description of Artificial Sequence: Synthetic oligonucleotide
  Sense strand starting at position 2472 of SEQ ID NO: 915811
cguuacucugaggacuaaa

SEQ ID NO: 1107931 - RNA, 19 nt, Artificial Sequence
  Description of Artificial Sequence: Synthetic oligonucleotide
  Antisense strand to SEQ ID NO: 1107930
uuuaguccucagaguaacg

SEQ ID NO: 1107932 - RNA, 19 nt, Artificial Sequence
  Description of Artificial Sequence: Synthetic oligonucleotide
  Sense strand starting at position 2572 of SEQ ID NO: 915811
uugaguguugcuucguauu

SEQ ID NO: 1107933 - RNA, 19 nt, Artificial Sequence
  Description of Artificial Sequence: Synthetic oligonucleotide
  Antisense strand to SEQ ID NO: 1107932
aauacgaagcaacacucaa

SEQ ID NO: 1107934 - RNA, 19 nt, Artificial Sequence
  Description of Artificial Sequence: Synthetic oligonucleotide
  Sense strand starting at position 2578 of SEQ ID NO: 915811
guugcuucguauuucuuua

SEQ ID NO: 1107935 - RNA, 19 nt, Artificial Sequence
  Description of Artificial Sequence: Synthetic oligonucleotide
  Antisense strand to SEQ ID NO: 1107934
uaaagaaauacgaagcaac

SEQ ID NO: 1107936 - RNA, 19 nt, Artificial Sequence
  Description of Artificial Sequence: Synthetic oligonucleotide
  Sense strand starting at position 2582 of SEQ ID NO: 915811
cuucguauuucuuuacuuu

SEQ ID NO: 1107937 - RNA, 19 nt, Artificial Sequence
  Description of Artificial Sequence: Synthetic oligonucleotide
  Antisense strand to SEQ ID NO: 1107936
aaaguaaagaaauacgaag

SEQ ID NO: 1107938 - RNA, 19 nt, Artificial Sequence
  Description of Artificial Sequence: Synthetic oligonucleotide
  Sense strand starting at position 2760 of SEQ ID NO: 915811
aucuguuuacuggguuuga

SEQ ID NO: 1107939 - RNA, 19 nt, Artificial Sequence
  Description of Artificial Sequence: Synthetic oligonucleotide
  Antisense strand to SEQ ID NO: 1107938
ucaaacccaguaaacagau

SEQ ID NO: 1107940 - RNA, 19 nt, Artificial Sequence
  Description of Artificial Sequence: Synthetic oligonucleotide
  Sense strand starting at position 2761 of SEQ ID NO: 915811
ucuguuuacuggguuugaa

SEQ ID NO: 1107941 - RNA, 19 nt, Artificial Sequence
  Description of Artificial Sequence: Synthetic oligonucleotide
  Antisense strand to SEQ ID NO: 1107940
uucaaacccaguaaacaga

SEQ ID NO: 1107942 - RNA, 19 nt, Artificial Sequence
  Description of Artificial Sequence: Synthetic oligonucleotide
  Sense strand starting at position 2810 of SEQ ID NO: 915811
caguguauuagcgaaacag

SEQ ID NO: 1107943 - RNA, 19 nt, Artificial Sequence
  Description of Artificial Sequence: Synthetic oligonucleotide
  Antisense strand to SEQ ID NO: 1107942
cuguuucgcuaauacacug

SEQ ID NO: 1107944 - RNA, 19 nt, Artificial Sequence
  Description of Artificial Sequence: Synthetic oligonucleotide
  Sense strand starting at position 2814 of SEQ ID NO: 915811
guauuagcgaaacagaacu

SEQ ID NO: 1107945 - RNA, 19 nt, Artificial Sequence
  Description of Artificial Sequence: Synthetic oligonucleotide
  Antisense strand to SEQ ID NO: 1107944
aguucuguuucgcuaauac

SEQ ID NO: 1107946 - RNA, 19 nt, Artificial Sequence
  Description of Artificial Sequence: Synthetic oligonucleotide
  Sense strand starting at position 2827 of SEQ ID NO: 915811
agaacuaauaggugugaac

SEQ ID NO: 1107947 - RNA, 19 nt, Artificial Sequence
  Description of Artificial Sequence: Synthetic oligonucleotide
  Antisense strand to SEQ ID NO: 1107946
guucacaccuauuaguucu

SEQ ID NO: 1107948 - RNA, 19 nt, Artificial Sequence
  Description of Artificial Sequence: Synthetic oligonucleotide
  Sense strand starting at position 3118 of SEQ ID NO: 915811
auuauaaggaguuggcuua

SEQ ID NO: 1107949 - RNA, 19 nt, Artificial Sequence
  Description of Artificial Sequence: Synthetic oligonucleotide
  Antisense strand to SEQ ID NO: 1107948
uaagccaacuccuuauaau

SEQ ID NO: 1107950 - RNA, 19 nt, Artificial Sequence
  Description of Artificial Sequence: Synthetic oligonucleotide
  Sense strand starting at position 3140 of SEQ ID NO: 915811
aauuauggacguugagaag

SEQ ID NO: 1107951 - RNA, 19 nt, Artificial Sequence
  Description of Artificial Sequence: Synthetic oligonucleotide
  Antisense strand to SEQ ID NO: 1107950
cuucucaacguccauaauu

SEQ ID NO: 1107952 - RNA, 19 nt, Artificial Sequence
  Description of Artificial Sequence: Synthetic oligonucleotide
  Sense strand starting at position 3173 of SEQ ID NO: 915811
uacugcaagcuggagaaau

SEQ ID NO: 1107953 - RNA, 19 nt, Artificial Sequence
  Description of Artificial Sequence: Synthetic oligonucleotide
  Antisense strand to SEQ ID NO: 1107952
auuucuccagcuugcagua

SEQ ID NO: 1107954 - RNA, 19 nt, Artificial Sequence
  Description of Artificial Sequence: Synthetic oligonucleotide
  Sense strand starting at position 3825 of SEQ ID NO: 915811
ugguauuaagugcauaaau

SEQ ID NO: 1107955 - RNA, 19 nt, Artificial Sequence
  Description of Artificial Sequence: Synthetic oligonucleotide
  Antisense strand to SEQ ID NO: 1107954
auuuaugcacuuaauacca

SEQ ID NO: 1107956 - RNA, 19 nt, Artificial Sequence
  Description of Artificial Sequence: Synthetic oligonucleotide
  Sense strand starting at position 3904 of SEQ ID NO: 915811
cagugauacuuguuagagc

SEQ ID NO: 1107957 - RNA, 19 nt, Artificial Sequence
  Description of Artificial Sequence: Synthetic oligonucleotide
  Antisense strand to SEQ ID NO: 1107956
gcucuaacaaguaucacug

SEQ ID NO: 1107958 - RNA, 19 nt, Artificial Sequence
  Description of Artificial Sequence: Synthetic oligonucleotide
  Sense strand starting at position 3976 of SEQ ID NO: 915811
gaagucuugcuguagggau

SEQ ID NO: 1107959 - RNA, 19 nt, Artificial Sequence
  Description of Artificial Sequence: Synthetic oligonucleotide
  Antisense strand to SEQ ID NO: 1107958
aucccuacagcaagacuuc

SEQ ID NO: 1107960 - RNA, 19 nt, Artificial Sequence
  Description of Artificial Sequence: Synthetic oligonucleotide
  Sense strand starting at position 3978 of SEQ ID NO: 915811
agucuugcuguagggauga

SEQ ID NO: 1107961 - RNA, 19 nt, Artificial Sequence
  Description of Artificial Sequence: Synthetic oligonucleotide
  Antisense strand to SEQ ID NO: 1107960
ucaucccuacagcaagacu

SEQ ID NO: 1107962 - RNA, 19 nt, Artificial Sequence
  Description of Artificial Sequence: Synthetic oligonucleotide
  Sense strand starting at position 104 of SEQ ID NO: 915812
acaaauucucugugguaca

SEQ ID NO: 1107963 - RNA, 19 nt, Artificial Sequence
  Description of Artificial Sequence: Synthetic oligonucleotide
  Antisense strand to SEQ ID NO: 1107962
uguaccacagagaauuugu

SEQ ID NO: 1107964 - RNA, 19 nt, Artificial Sequence
  Description of Artificial Sequence: Synthetic oligonucleotide
  Sense strand starting at position 111 of SEQ ID NO: 915812
cucugugguacagagguaa

SEQ ID NO: 1107965 - RNA, 19 nt, Artificial Sequence
  Description of Artificial Sequence: Synthetic oligonucleotide
  Antisense strand to SEQ ID NO: 1107964
uuaccucuguaccacagag

SEQ ID NO: 1107966 - RNA, 19 nt, Artificial Sequence
  Description of Artificial Sequence: Synthetic oligonucleotide
  Sense strand starting at position 244 of SEQ ID NO: 915812
aggcaaagaucaguaauau

SEQ ID NO: 1107967 - RNA, 19 nt, Artificial Sequence
  Description of Artificial Sequence: Synthetic oligonucleotide
  Antisense strand to SEQ ID NO: 1107966
auauuacugaucuuugccu

SEQ ID NO: 1107968 - RNA, 19 nt, Artificial Sequence
  Description of Artificial Sequence: Synthetic oligonucleotide
  Sense strand starting at position 302 of SEQ ID NO: 915812
ccaccaucuuugguaggaa

SEQ ID NO: 1107969 - RNA, 19 nt, Artificial Sequence
  Description of Artificial Sequence: Synthetic oligonucleotide
  Antisense strand to SEQ ID NO: 1107968
uuccuaccaaagauggugg

SEQ ID NO: 1107970 - RNA, 19 nt, Artificial Sequence
  Description of Artificial Sequence: Synthetic oligonucleotide
  Sense strand starting at position 490 of SEQ ID NO: 915812
ucuugacauccuggauucu

SEQ ID NO: 1107971 - RNA, 19 nt, Artificial Sequence
  Description of Artificial Sequence: Synthetic oligonucleotide
  Antisense strand to SEQ ID NO: 1107970
agaauccaggaugucaaga

SEQ ID NO: 1107972 - RNA, 19 nt, Artificial Sequence
  Description of Artificial Sequence: Synthetic oligonucleotide
  Sense strand starting at position 540 of SEQ ID NO: 915812
gcuuccuugguauaggaga

SEQ ID NO: 1107973 - RNA, 19 nt, Artificial Sequence
  Description of Artificial Sequence: Synthetic oligonucleotide
  Antisense strand to SEQ ID NO: 1107972
ucuccuauaccaaggaagc

SEQ ID NO: 1107974 - RNA, 19 nt, Artificial Sequence
  Description of Artificial Sequence: Synthetic oligonucleotide
  Sense strand starting at position 542 of SEQ ID NO: 915812
uuccuugguauaggagaaa

SEQ ID NO: 1107975 - RNA, 19 nt, Artificial Sequence
  Description of Artificial Sequence: Synthetic oligonucleotide
  Antisense strand to SEQ ID NO: 1107974
uuucuccuauaccaaggaa

SEQ ID NO: 1107976 - RNA, 19 nt, Artificial Sequence
  Description of Artificial Sequence: Synthetic oligonucleotide
  Sense strand starting at position 830 of SEQ ID NO: 915812
uggacagucaccugggaau

SEQ ID NO: 1107977 - RNA, 19 nt, Artificial Sequence
  Description of Artificial Sequence: Synthetic oligonucleotide
  Antisense strand to SEQ ID NO: 1107976
auucccaggugacugucca

SEQ ID NO: 1107978 - RNA, 19 nt, Artificial Sequence
  Description of Artificial Sequence: Synthetic oligonucleotide
  Sense strand starting at position 891 of SEQ ID NO: 915812
gguugucacgggagcuuau

SEQ ID NO: 1107979 - RNA, 19 nt, Artificial Sequence
  Description of Artificial Sequence: Synthetic oligonucleotide
  Antisense strand to SEQ ID NO: 1107978
auaagcucccgugacaacc

SEQ ID NO: 1107980 - RNA, 19 nt, Artificial Sequence
  Description of Artificial Sequence: Synthetic oligonucleotide
  Sense strand starting at position 1290 of SEQ ID NO: 915812
cucagauggucccuauaca

SEQ ID NO: 1107981 - RNA, 19 nt, Artificial Sequence
  Description of Artificial Sequence: Synthetic oligonucleotide
  Antisense strand to SEQ ID NO: 1107980
uguauagggaccaucugag

SEQ ID NO: 1107982 - RNA, 19 nt, Artificial Sequence
  Description of Artificial Sequence: Synthetic oligonucleotide
  Sense strand starting at position 1302 of SEQ ID NO: 915812
cuauacagguguuccaaua

SEQ ID NO: 1107983 - RNA, 19 nt, Artificial Sequence
  Description of Artificial Sequence: Synthetic oligonucleotide
  Antisense strand to SEQ ID NO: 1107982
uauuggaacaccuguauag

SEQ ID NO: 1107984 - RNA, 19 nt, Artificial Sequence
  Description of Artificial Sequence: Synthetic oligonucleotide
  Sense strand starting at position 1391 of SEQ ID NO: 915812
ggcagagcccacuaauaau

SEQ ID NO: 1107985 - RNA, 19 nt, Artificial Sequence
  Description of Artificial Sequence: Synthetic oligonucleotide
  Antisense strand to SEQ ID NO: 1107984
auuauuagugggcucugcc

SEQ ID NO: 1107986 - RNA, 19 nt, Artificial Sequence
  Description of Artificial Sequence: Synthetic oligonucleotide
  Sense strand starting at position 1614 of SEQ ID NO: 915812
acgguaagaaauuguucca

SEQ ID NO: 1107987 - RNA, 19 nt, Artificial Sequence
  Description of Artificial Sequence: Synthetic oligonucleotide
  Antisense strand to SEQ ID NO: 1107986
uggaacaauuucuuaccgu

SEQ ID NO: 1107988 - RNA, 19 nt, Artificial Sequence
  Description of Artificial Sequence: Synthetic oligonucleotide
  Sense strand starting at position 1785 of SEQ ID NO: 915812
gggucaucccucuguaaga

SEQ ID NO: 1107989 - RNA, 19 nt, Artificial Sequence
  Description of Artificial Sequence: Synthetic oligonucleotide
  Antisense strand to SEQ ID NO: 1107988
ucuuacagagggaugaccc

SEQ ID NO: 1107990 - RNA, 19 nt, Artificial Sequence
  Description of Artificial Sequence: Synthetic oligonucleotide
  Sense strand starting at position 1787 of SEQ ID NO: 915812
gucaucccucuguaagaca

SEQ ID NO: 1107991 - RNA, 19 nt, Artificial Sequence
  Description of Artificial Sequence: Synthetic oligonucleotide
  Antisense strand to SEQ ID NO: 1107990
ugucuuacagagggaugac

SEQ ID NO: 1107992 - RNA, 19 nt, Artificial Sequence
  Description of Artificial Sequence: Synthetic oligonucleotide
  Sense strand starting at position 2026 of SEQ ID NO: 915812
agaguauaagcaugaaacu

SEQ ID NO: 1107993 - RNA, 19 nt, Artificial Sequence
  Description of Artificial Sequence: Synthetic oligonucleotide
  Antisense strand to SEQ ID NO: 1107992
aguuucaugcuuauacucu

SEQ ID NO: 1107994 - RNA, 19 nt, Artificial Sequence
  Description of Artificial Sequence: Synthetic oligonucleotide
  Sense strand starting at position 2345 of SEQ ID NO: 915812
cuggacuacugcucuaacu

SEQ ID NO: 1107995 - RNA, 19 nt, Artificial Sequence
  Description of Artificial Sequence: Synthetic oligonucleotide
  Antisense strand to SEQ ID NO: 1107994
aguuagagcaguaguccag

SEQ ID NO: 1107996 - RNA, 19 nt, Artificial Sequence
  Description of Artificial Sequence: Synthetic oligonucleotide
  Sense strand starting at position 2347 of SEQ ID NO: 915812
ggacuacugcucuaacuuc

SEQ ID NO: 1107997 - RNA, 19 nt, Artificial Sequence
  Description of Artificial Sequence: Synthetic oligonucleotide
  Antisense strand to SEQ ID NO: 1107996
gaaguuagagcaguagucc

SEQ ID NO: 1107998 - RNA, 19 nt, Artificial Sequence
  Description of Artificial Sequence: Synthetic oligonucleotide
  Sense strand starting at position 2366 of SEQ ID NO: 915812
cuaagaucccugcaguacu

SEQ ID NO: 1107999 - RNA, 19 nt, Artificial Sequence
  Description of Artificial Sequence: Synthetic oligonucleotide
  Antisense strand to SEQ ID NO: 1107998
aguacugcagggaucuuag

SEQ ID NO: 1108000 - RNA, 19 nt, Artificial Sequence
  Description of Artificial Sequence: Synthetic oligonucleotide
  Sense strand starting at position 2479 of SEQ ID NO: 915812
agguaacuguauguuuaga

SEQ ID NO: 1108001 - RNA, 19 nt, Artificial Sequence
  Description of Artificial Sequence: Synthetic oligonucleotide
  Antisense strand to SEQ ID NO: 1108000
ucuaaacauacaguuaccu

SEQ ID NO: 1108002 - RNA, 19 nt, Artificial Sequence
  Description of Artificial Sequence: Synthetic oligonucleotide
  Sense strand starting at position 2481 of SEQ ID NO: 915812
guaacuguauguuuagaga

SEQ ID NO: 1108003 - RNA, 19 nt, Artificial Sequence
  Description of Artificial Sequence: Synthetic oligonucleotide
  Antisense strand to SEQ ID NO: 1108002
ucucuaaacauacaguuac

SEQ ID NO: 1108004 - RNA, 19 nt, Artificial Sequence
  Description of Artificial Sequence: Synthetic oligonucleotide
  Sense strand starting at position 2519 of SEQ ID NO: 915812
guguauccaugguugagaa

SEQ ID NO: 1108005 - RNA, 19 nt, Artificial Sequence
  Description of Artificial Sequence: Synthetic oligonucleotide
  Antisense strand to SEQ ID NO: 1108004
uucucaaccauggauacac

SEQ ID NO: 1108006 - RNA, 19 nt, Artificial Sequence
  Description of Artificial Sequence: Synthetic oligonucleotide
  Sense strand starting at position 2520 of SEQ ID NO: 915812
uguauccaugguugagaaa

SEQ ID NO: 1108007 - RNA, 19 nt, Artificial Sequence
  Description of Artificial Sequence: Synthetic oligonucleotide
  Antisense strand to SEQ ID NO: 1108006
uuucucaaccauggauaca

SEQ ID NO: 1108008 - RNA, 19 nt, Artificial Sequence
  Description of Artificial Sequence: Synthetic oligonucleotide
  Sense strand starting at position 2545 of SEQ ID NO: 915812
ccaugagggagauguguaa

SEQ ID NO: 1108009 - RNA, 19 nt, Artificial Sequence
  Description of Artificial Sequence: Synthetic oligonucleotide
  Antisense strand to SEQ ID NO: 1108008
uuacacaucucccucaugg

SEQ ID NO: 1108010 - RNA, 19 nt, Artificial Sequence
  Description of Artificial Sequence: Synthetic oligonucleotide
  Sense strand starting at position 2549 of SEQ ID NO: 915812
gagggagauguguaagguu

SEQ ID NO: 1108011 - RNA, 19 nt, Artificial Sequence
  Description of Artificial Sequence: Synthetic oligonucleotide
  Antisense strand to SEQ ID NO: 1108010
aaccuuacacaucucccuc

SEQ ID NO: 1108012 - RNA, 19 nt, Artificial Sequence
  Description of Artificial Sequence: Synthetic oligonucleotide
  Sense strand starting at position 2562 of SEQ ID NO: 915812
aagguuaugagcgaaaguu

SEQ ID NO: 1108013 - RNA, 19 nt, Artificial Sequence
  Description of Artificial Sequence: Synthetic oligonucleotide
  Antisense strand to SEQ ID NO: 1108012
aacuuucgcucauaaccuu

SEQ ID NO: 1108014 - RNA, 19 nt, Artificial Sequence
  Description of Artificial Sequence: Synthetic oligonucleotide
  Sense strand starting at position 2572 of SEQ ID NO: 915812
gcgaaaguucuggagucaa

SEQ ID NO: 1108015 - RNA, 19 nt, Artificial Sequence
  Description of Artificial Sequence: Synthetic oligonucleotide
  Antisense strand to SEQ ID NO: 1108014
uugacuccagaacuuucgc

SEQ ID NO: 1108016 - RNA, 19 nt, Artificial Sequence
  Description of Artificial Sequence: Synthetic oligonucleotide
  Sense strand starting at position 2616 of SEQ ID NO: 915812
ugucgcuuacuagguauuu

SEQ ID NO: 1108017 - RNA, 19 nt, Artificial Sequence
  Description of Artificial Sequence: Synthetic oligonucleotide
  Antisense strand to SEQ ID NO: 1108016
aaauaccuaguaagcgaca

SEQ ID NO: 1108018 - RNA, 19 nt, Artificial Sequence
  Description of Artificial Sequence: Synthetic oligonucleotide
  Sense strand starting at position 2715 of SEQ ID NO: 915812
aucuaauaggcuuacugua

SEQ ID NO: 1108019 - RNA, 19 nt, Artificial Sequence
  Description of Artificial Sequence: Synthetic oligonucleotide
  Antisense strand to SEQ ID NO: 1108018
uacaguaagccuauuagau

SEQ ID NO: 1108020 - RNA, 19 nt, Artificial Sequence
  Description of Artificial Sequence: Synthetic oligonucleotide
  Sense strand starting at position 2720 of SEQ ID NO: 915812
auaggcuuacuguaaggau

SEQ ID NO: 1108021 - RNA, 19 nt, Artificial Sequence
  Description of Artificial Sequence: Synthetic oligonucleotide
  Antisense strand to SEQ ID NO: 1108020
auccuuacaguaagccuau

SEQ ID NO: 1108022 - RNA, 19 nt, Artificial Sequence
  Description of Artificial Sequence: Synthetic oligonucleotide
  Sense strand starting at position 2755 of SEQ ID NO: 915812
gccuaugagcauuaaaugu

SEQ ID NO: 1108023 - RNA, 19 nt, Artificial Sequence
  Description of Artificial Sequence: Synthetic oligonucleotide
  Antisense strand to SEQ ID NO: 1108022
acauuuaaugcucauaggc

SEQ ID NO: 1108024 - RNA, 19 nt, Artificial Sequence
  Description of Artificial Sequence: Synthetic oligonucleotide
  Sense strand starting at position 2777 of SEQ ID NO: 915812
acuaucuuugcuuagaaga

SEQ ID NO: 1108025 - RNA, 19 nt, Artificial Sequence
  Description of Artificial Sequence: Synthetic oligonucleotide
  Antisense strand to SEQ ID NO: 1108024
ucuucuaagcaaagauagu

SEQ ID NO: 1108026 - RNA, 19 nt, Artificial Sequence
  Description of Artificial Sequence: Synthetic oligonucleotide
  Sense strand starting at position 2782 of SEQ ID NO: 915812
cuuugcuuagaagagugau

SEQ ID NO: 1108027 - RNA, 19 nt, Artificial Sequence
  Description of Artificial Sequence: Synthetic oligonucleotide
  Antisense strand to SEQ ID NO: 1108026
aucacucuucuaagcaaag

SEQ ID NO: 1108028 - RNA, 19 nt, Artificial Sequence
  Description of Artificial Sequence: Synthetic oligonucleotide
  Sense strand starting at position 2794 of SEQ ID NO: 915812
gagugauggcaccagcuau

SEQ ID NO: 1108029 - RNA, 19 nt, Artificial Sequence
  Description of Artificial Sequence: Synthetic oligonucleotide
  Antisense strand to SEQ ID NO: 1108028
auagcuggugccaucacuc

SEQ ID NO: 1108030 - RNA, 19 nt, Artificial Sequence
  Description of Artificial Sequence: Synthetic oligonucleotide
  Sense strand starting at position 2908 of SEQ ID NO: 915812
acacgaagcucuuuacaau

SEQ ID NO: 1108031 - RNA, 19 nt, Artificial Sequence
  Description of Artificial Sequence: Synthetic oligonucleotide
  Antisense strand to SEQ ID NO: 1108030
auuguaaagagcuucgugu

SEQ ID NO: 1108032 - RNA, 19 nt, Artificial Sequence
  Description of Artificial Sequence: Synthetic oligonucleotide
  Sense strand starting at position 2971 of SEQ ID NO: 915812
uguaucaccugguuauaaa

SEQ ID NO: 1108033 - RNA, 19 nt, Artificial Sequence
  Description of Artificial Sequence: Synthetic oligonucleotide
  Antisense strand to SEQ ID NO: 1108032
uuuauaaccaggugauaca

SEQ ID NO: 1108034 - RNA, 19 nt, Artificial Sequence
  Description of Artificial Sequence: Synthetic oligonucleotide
  Sense strand starting at position 3646 of SEQ ID NO: 915812
ucucuaucccaguauuggu

SEQ ID NO: 1108035 - RNA, 19 nt, Artificial Sequence
  Description of Artificial Sequence: Synthetic oligonucleotide
  Antisense strand to SEQ ID NO: 1108034
accaauacugggauagaga

SEQ ID NO: 1108036 - RNA, 19 nt, Artificial Sequence
  Description of Artificial Sequence: Synthetic oligonucleotide
  Sense strand starting at position 3653 of SEQ ID NO: 915812
cccaguauuggucauauua

SEQ ID NO: 1108037 - RNA, 19 nt, Artificial Sequence
  Description of Artificial Sequence: Synthetic oligonucleotide
  Antisense strand to SEQ ID NO: 1108036
uaauaugaccaauacuggg

SEQ ID NO: 1108038 - RNA, 19 nt, Artificial Sequence
  Description of Artificial Sequence: Synthetic oligonucleotide
  Sense strand starting at position 3693 of SEQ ID NO: 915812
cugugaaacucuuugaggu

SEQ ID NO: 1108039 - RNA, 19 nt, Artificial Sequence
  Description of Artificial Sequence: Synthetic oligonucleotide
  Antisense strand to SEQ ID NO: 1108038
accucaaagaguuucacag

SEQ ID NO: 1108040 - RNA, 19 nt, Artificial Sequence
  Description of Artificial Sequence: Synthetic oligonucleotide
  Sense strand starting at position 3694 of SEQ ID NO: 915812
ugugaaacucuuugagguc

SEQ ID NO: 1108041 - RNA, 19 nt, Artificial Sequence
  Description of Artificial Sequence: Synthetic oligonucleotide
  Antisense strand to SEQ ID NO: 1108040
gaccucaaagaguuucaca

SEQ ID NO: 1108042 - RNA, 19 nt, Artificial Sequence
  Description of Artificial Sequence: Synthetic oligonucleotide
  Sense strand starting at position 72 of SEQ ID NO: 915813
cuguuuaaugucgauaacu

SEQ ID NO: 1108043 - RNA, 19 nt, Artificial Sequence
  Description of Artificial Sequence: Synthetic oligonucleotide
  Antisense strand to SEQ ID NO: 1108042
aguuaucgacauuaaacag

SEQ ID NO: 1108044 - RNA, 19 nt, Artificial Sequence
  Description of Artificial Sequence: Synthetic oligonucleotide
  Sense strand starting at position 74 of SEQ ID NO: 915813
guuuaaugucgauaacuuc

SEQ ID NO: 1108045 - RNA, 19 nt, Artificial Sequence
  Description of Artificial Sequence: Synthetic oligonucleotide
  Antisense strand to SEQ ID NO: 1108044
gaaguuaucgacauuaaac

SEQ ID NO: 1108046 - RNA, 19 nt, Artificial Sequence
  Description of Artificial Sequence: Synthetic oligonucleotide
  Sense strand starting at position 501 of SEQ ID NO: 915813
acuagacuugagugacuga

SEQ ID NO: 1108047 - RNA, 19 nt, Artificial Sequence
  Description of Artificial Sequence: Synthetic oligonucleotide
  Antisense strand to SEQ ID NO: 1108046
ucagucacucaagucuagu

SEQ ID NO: 1108048 - RNA, 19 nt, Artificial Sequence
  Description of Artificial Sequence: Synthetic oligonucleotide
  Sense strand starting at position 659 of SEQ ID NO: 915813
uggagaaugcagggacauu

SEQ ID NO: 1108049 - RNA, 19 nt, Artificial Sequence
  Description of Artificial Sequence: Synthetic oligonucleotide
  Antisense strand to SEQ ID NO: 1108048
aaugucccugcauucucca

SEQ ID NO: 1108050 - RNA, 19 nt, Artificial Sequence
  Description of Artificial Sequence: Synthetic oligonucleotide
  Sense strand starting at position 711 of SEQ ID NO: 915813
ggaucagacuaugagggaa

SEQ ID NO: 1108051 - RNA, 19 nt, Artificial Sequence
  Description of Artificial Sequence: Synthetic oligonucleotide
  Antisense strand to SEQ ID NO: 1108050
uucccucauagucugaucc

SEQ ID NO: 1108052 - RNA, 19 nt, Artificial Sequence
  Description of Artificial Sequence: Synthetic oligonucleotide
  Sense strand starting at position 823 of SEQ ID NO: 915813
uggguauggcuuuaaauuc

SEQ ID NO: 1108053 - RNA, 19 nt, Artificial Sequence
  Description of Artificial Sequence: Synthetic oligonucleotide
  Antisense strand to SEQ ID NO: 1108052
gaauuuaaagccauaccca

SEQ ID NO: 1108054 - RNA, 19 nt, Artificial Sequence
  Description of Artificial Sequence: Synthetic oligonucleotide
  Sense strand starting at position 1229 of SEQ ID NO: 915813
cucccagguccugaucaaa

SEQ ID NO: 1108055 - RNA, 19 nt, Artificial Sequence
  Description of Artificial Sequence: Synthetic oligonucleotide
  Antisense strand to SEQ ID NO: 1108054
uuugaucaggaccugggag

SEQ ID NO: 1108056 - RNA, 19 nt, Artificial Sequence
  Description of Artificial Sequence: Synthetic oligonucleotide
  Sense strand starting at position 1384 of SEQ ID NO: 915813
uagguuccugggcaaagua

SEQ ID NO: 1108057 - RNA, 19 nt, Artificial Sequence
  Description of Artificial Sequence: Synthetic oligonucleotide
  Antisense strand to SEQ ID NO: 1108056
uacuuugcccaggaaccua

SEQ ID NO: 1108058 - RNA, 19 nt, Artificial Sequence
  Description of Artificial Sequence: Synthetic oligonucleotide
  Sense strand starting at position 1724 of SEQ ID NO: 915813
uaagucuuaacgugggaga

SEQ ID NO: 1108059 - RNA, 19 nt, Artificial Sequence
  Description of Artificial Sequence: Synthetic oligonucleotide
  Antisense strand to SEQ ID NO: 1108058
ucucccacguuaagacuua

SEQ ID NO: 1108060 - RNA, 19 nt, Artificial Sequence
  Description of Artificial Sequence: Synthetic oligonucleotide
  Sense strand starting at position 1726 of SEQ ID NO: 915813
agucuuaacgugggagaga

SEQ ID NO: 1108061 - RNA, 19 nt, Artificial Sequence
  Description of Artificial Sequence: Synthetic oligonucleotide
  Antisense strand to SEQ ID NO: 1108060
ucucucccacguuaagacu

SEQ ID NO: 1108062 - RNA, 19 nt, Artificial Sequence
  Description of Artificial Sequence: Synthetic oligonucleotide
  Sense strand starting at position 1738 of SEQ ID NO: 915813
ggagagaagccgugaugua

SEQ ID NO: 1108063 - RNA, 19 nt, Artificial Sequence
  Description of Artificial Sequence: Synthetic oligonucleotide
  Antisense strand to SEQ ID NO: 1108062
uacaucacggcuucucucc

SEQ ID NO: 1108064 - RNA, 19 nt, Artificial Sequence
  Description of Artificial Sequence: Synthetic oligonucleotide
  Sense strand starting at position 1739 of SEQ ID NO: 915813
gagagaagccgugauguac

SEQ ID NO: 1108065 - RNA, 19 nt, Artificial Sequence
  Description of Artificial Sequence: Synthetic oligonucleotide
  Antisense strand to SEQ ID NO: 1108064
guacaucacggcuucucuc

SEQ ID NO: 1108066 - RNA, 19 nt, Artificial Sequence
  Description of Artificial Sequence: Synthetic oligonucleotide
  Sense strand starting at position 1779 of SEQ ID NO: 915813
ggguuucuaaaccggagua

SEQ ID NO: 1108067 - RNA, 19 nt, Artificial Sequence
  Description of Artificial Sequence: Synthetic oligonucleotide
  Antisense strand to SEQ ID NO: 1108066
uacuccgguuuagaaaccc

SEQ ID NO: 1108068 - RNA, 19 nt, Artificial Sequence
  Description of Artificial Sequence: Synthetic oligonucleotide
  Sense strand starting at position 1874 of SEQ ID NO: 915813
cucaguccuccugagaguu

SEQ ID NO: 1108069 - RNA, 19 nt, Artificial Sequence
  Description of Artificial Sequence: Synthetic oligonucleotide
  Antisense strand to SEQ ID NO: 1108068
aacucucaggaggacugag

SEQ ID NO: 1108070 - RNA, 19 nt, Artificial Sequence
  Description of Artificial Sequence: Synthetic oligonucleotide
  Sense strand starting at position 2076 of SEQ ID NO: 915813
ccugauuggccagaaguau

SEQ ID NO: 1108071 - RNA, 19 nt, Artificial Sequence
  Description of Artificial Sequence: Synthetic oligonucleotide
  Antisense strand to SEQ ID NO: 1108070
auacuucuggccaaucagg

SEQ ID NO: 1108072 - RNA, 19 nt, Artificial Sequence
  Description of Artificial Sequence: Synthetic oligonucleotide
  Sense strand starting at position 2403 of SEQ ID NO: 915813
cucuaaacucaagguuaga

SEQ ID NO: 1108073 - RNA, 19 nt, Artificial Sequence
  Description of Artificial Sequence: Synthetic oligonucleotide
  Antisense strand to SEQ ID NO: 1108072
ucuaaccuugaguuuagag

SEQ ID NO: 1108074 - RNA, 19 nt, Artificial Sequence
  Description of Artificial Sequence: Synthetic oligonucleotide
  Sense strand starting at position 2628 of SEQ ID NO: 915813
uucuauuauuuagcugagu

SEQ ID NO: 1108075 - RNA, 19 nt, Artificial Sequence
  Description of Artificial Sequence: Synthetic oligonucleotide
  Antisense strand to SEQ ID NO: 1108074
acucagcuaaauaauagaa

SEQ ID NO: 1108076 - RNA, 19 nt, Artificial Sequence
  Description of Artificial Sequence: Synthetic oligonucleotide
  Sense strand starting at position 2633 of SEQ ID NO: 915813
uuauuuagcugaguguguu

SEQ ID NO: 1108077 - RNA, 19 nt, Artificial Sequence
  Description of Artificial Sequence: Synthetic oligonucleotide
  Antisense strand to SEQ ID NO: 1108076
aacacacucagcuaaauaa

SEQ ID NO: 1108078 - RNA, 19 nt, Artificial Sequence
  Description of Artificial Sequence: Synthetic oligonucleotide
  Sense strand starting at position 2634 of SEQ ID NO: 915813
uauuuagcugaguguguua

SEQ ID NO: 1108079 - RNA, 19 nt, Artificial Sequence
  Description of Artificial Sequence: Synthetic oligonucleotide
  Antisense strand to SEQ ID NO: 1108078
uaacacacucagcuaaaua

SEQ ID NO: 1108080 - RNA, 19 nt, Artificial Sequence
  Description of Artificial Sequence: Synthetic oligonucleotide
  Sense strand starting at position 2698 of SEQ ID NO: 915813
ugggcuggaucaguaauau

SEQ ID NO: 1108081 - RNA, 19 nt, Artificial Sequence
  Description of Artificial Sequence: Synthetic oligonucleotide
  Antisense strand to SEQ ID NO: 1108080
auauuacugauccagccca

SEQ ID NO: 1108082 - RNA, 19 nt, Artificial Sequence
  Description of Artificial Sequence: Synthetic oligonucleotide
  Sense strand starting at position 2747 of SEQ ID NO: 915813
guaggauagucauuacaag

SEQ ID NO: 1108083 - RNA, 19 nt, Artificial Sequence
  Description of Artificial Sequence: Synthetic oligonucleotide
  Antisense strand to SEQ ID NO: 1108082
cuuguaaugacuauccuac

SEQ ID NO: 1108084 - RNA, 19 nt, Artificial Sequence
  Description of Artificial Sequence: Synthetic oligonucleotide
  Sense strand starting at position 2802 of SEQ ID NO: 915813
uuacgagaucuuggcugga

SEQ ID NO: 1108085 - RNA, 19 nt, Artificial Sequence
  Description of Artificial Sequence: Synthetic oligonucleotide
  Antisense strand to SEQ ID NO: 1108084
uccagccaagaucucguaa

SEQ ID NO: 1108086 - RNA, 19 nt, Artificial Sequence
  Description of Artificial Sequence: Synthetic oligonucleotide
  Sense strand starting at position 2804 of SEQ ID NO: 915813
acgagaucuuggcuggauu

SEQ ID NO: 1108087 - RNA, 19 nt, Artificial Sequence
  Description of Artificial Sequence: Synthetic oligonucleotide
  Antisense strand to SEQ ID NO: 1108086
aauccagccaagaucucgu

SEQ ID NO: 1108088 - RNA, 19 nt, Artificial Sequence
  Description of Artificial Sequence: Synthetic oligonucleotide
  Sense strand starting at position 2805 of SEQ ID NO: 915813
cgagaucuuggcuggauua

SEQ ID NO: 1108089 - RNA, 19 nt, Artificial Sequence
  Description of Artificial Sequence: Synthetic oligonucleotide
  Antisense strand to SEQ ID NO: 1108088
uaauccagccaagaucucg

SEQ ID NO: 1108090 - RNA, 19 nt, Artificial Sequence
  Description of Artificial Sequence: Synthetic oligonucleotide
  Sense strand starting at position 2806 of SEQ ID NO: 915813
gagaucuuggcuggauuac

SEQ ID NO: 1108091 - RNA, 19 nt, Artificial Sequence
  Description of Artificial Sequence: Synthetic oligonucleotide
  Antisense strand to SEQ ID NO: 1108090
guaauccagccaagaucuc

SEQ ID NO: 1108092 - RNA, 19 nt, Artificial Sequence
  Description of Artificial Sequence: Synthetic oligonucleotide
  Sense strand starting at position 2886 of SEQ ID NO: 915813
guaacagacuuguuagauu

SEQ ID NO: 1108093 - RNA, 19 nt, Artificial Sequence
  Description of Artificial Sequence: Synthetic oligonucleotide
  Antisense strand to SEQ ID NO: 1108092
aaucuaacaagucuguuac

SEQ ID NO: 1108094 - RNA, 19 nt, Artificial Sequence
  Description of Artificial Sequence: Synthetic oligonucleotide
  Sense strand starting at position 2897 of SEQ ID NO: 915813
guuagauugaaaugaguua

SEQ ID NO: 1108095 - RNA, 19 nt, Artificial Sequence
  Description of Artificial Sequence: Synthetic oligonucleotide
  Antisense strand to SEQ ID NO: 1108094
uaacucauuucaaucuaac

SEQ ID NO: 1108096 - RNA, 19 nt, Artificial Sequence
  Description of Artificial Sequence: Synthetic oligonucleotide
  Sense strand starting at position 2902 of SEQ ID NO: 915813
auugaaaugaguuagugua

SEQ ID NO: 1108097 - RNA, 19 nt, Artificial Sequence
  Description of Artificial Sequence: Synthetic oligonucleotide
  Antisense strand to SEQ ID NO: 1108096
uacacuaacucauuucaau

SEQ ID NO: 1108098 - RNA, 19 nt, Artificial Sequence
  Description of Artificial Sequence: Synthetic oligonucleotide
  Sense strand starting at position 2904 of SEQ ID NO: 915813
ugaaaugaguuaguguagu

SEQ ID NO: 1108099 - RNA, 19 nt, Artificial Sequence
  Description of Artificial Sequence: Synthetic oligonucleotide
  Antisense strand to SEQ ID NO: 1108098
acuacacuaacucauuuca

SEQ ID NO: 1108100 - RNA, 19 nt, Artificial Sequence
  Description of Artificial Sequence: Synthetic oligonucleotide
  Sense strand starting at position 3162 of SEQ ID NO: 915813
gucugacggaacugacauu

SEQ ID NO: 1108101 - RNA, 19 nt, Artificial Sequence
  Description of Artificial Sequence: Synthetic oligonucleotide
  Antisense strand to SEQ ID NO: 1108100
aaugucaguuccgucagac

SEQ ID NO: 1108102 - RNA, 19 nt, Artificial Sequence
  Description of Artificial Sequence: Synthetic oligonucleotide
  Sense strand starting at position 3187 of SEQ ID NO: 915813
ugucaaucauuguuaucca

SEQ ID NO: 1108103 - RNA, 19 nt, Artificial Sequence
  Description of Artificial Sequence: Synthetic oligonucleotide
  Antisense strand to SEQ ID NO: 1108102
uggauaacaaugauugaca

SEQ ID NO: 1108104 - RNA, 19 nt, Artificial Sequence
  Description of Artificial Sequence: Synthetic oligonucleotide
  Sense strand starting at position 3452 of SEQ ID NO: 915813
guauuuaaauagccgcaau

SEQ ID NO: 1108105 - RNA, 19 nt, Artificial Sequence
  Description of Artificial Sequence: Synthetic oligonucleotide
  Antisense strand to SEQ ID NO: 1108104
auugcggcuauuuaaauac

SEQ ID NO: 1108106 - RNA, 19 nt, Artificial Sequence
  Description of Artificial Sequence: Synthetic oligonucleotide
  Sense strand starting at position 3455 of SEQ ID NO: 915813
uuuaaauagccgcaauuga

SEQ ID NO: 1108107 - RNA, 19 nt, Artificial Sequence
  Description of Artificial Sequence: Synthetic oligonucleotide
  Antisense strand to SEQ ID NO: 1108106
ucaauugcggcuauuuaaa

SEQ ID NO: 1108108 - RNA, 19 nt, Artificial Sequence
  Description of Artificial Sequence: Synthetic oligonucleotide
  Sense strand starting at position 3492 of SEQ ID NO: 915813
cagagacauugaccgguaa

SEQ ID NO: 1108109 - RNA, 19 nt, Artificial Sequence
  Description of Artificial Sequence: Synthetic oligonucleotide
  Antisense strand to SEQ ID NO: 1108108
uuaccggucaaugucucug

SEQ ID NO: 1108110 - RNA, 19 nt, Artificial Sequence
  Description of Artificial Sequence: Synthetic oligonucleotide
  Sense strand starting at position 3494 of SEQ ID NO: 915813
gagacauugaccgguaaga

SEQ ID NO: 1108111 - RNA, 19 nt, Artificial Sequence
  Description of Artificial Sequence: Synthetic oligonucleotide
  Antisense strand to SEQ ID NO: 1108110
ucuuaccggucaaugucuc

SEQ ID NO: 1108112 - RNA, 19 nt, Artificial Sequence
  Description of Artificial Sequence: Synthetic oligonucleotide
  Sense strand starting at position 3545 of SEQ ID NO: 915813
ugcuuccaaccugagaaua

SEQ ID NO: 1108113 - RNA, 19 nt, Artificial Sequence
  Description of Artificial Sequence: Synthetic oligonucleotide
  Antisense strand to SEQ ID NO: 1108112
uauucucagguuggaagca

SEQ ID NO: 1108114 - RNA, 19 nt, Artificial Sequence
  Description of Artificial Sequence: Synthetic oligonucleotide
  Sense strand starting at position 3643 of SEQ ID NO: 915813
uguguaucugaaggaauau

SEQ ID NO: 1108115 - RNA, 19 nt, Artificial Sequence
  Description of Artificial Sequence: Synthetic oligonucleotide
  Antisense strand to SEQ ID NO: 1108114
auauuccuucagauacaca

SEQ ID NO: 1108116 - RNA, 19 nt, Artificial Sequence
  Description of Artificial Sequence: Synthetic oligonucleotide
  Sense strand starting at position 3703 of SEQ ID NO: 915813
ccaaguauagcauacgcaa

SEQ ID NO: 1108117 - RNA, 19 nt, Artificial Sequence
  Description of Artificial Sequence: Synthetic oligonucleotide
  Antisense strand to SEQ ID NO: 1108116
uugcguaugcuauacuugg

SEQ ID NO: 1108118 - RNA, 19 nt, Artificial Sequence
  Description of Artificial Sequence: Synthetic oligonucleotide
  Sense strand starting at position 3936 of SEQ ID NO: 915813
accagaugccuagagaugu

SEQ ID NO: 1108119 - RNA, 19 nt, Artificial Sequence
  Description of Artificial Sequence: Synthetic oligonucleotide
  Antisense strand to SEQ ID NO: 1108118
acaucucuaggcaucuggu

SEQ ID NO: 1108120 - RNA, 19 nt, Artificial Sequence
  Description of Artificial Sequence: Synthetic oligonucleotide
  Sense strand starting at position 3969 of SEQ ID NO: 915813
ugaagaaacugccuugcau

SEQ ID NO: 1108121 - RNA, 19 nt, Artificial Sequence
  Description of Artificial Sequence: Synthetic oligonucleotide
  Antisense strand to SEQ ID NO: 1108120
augcaaggcaguuucuuca

SEQ ID NO: 1108122 - RNA, 19 nt, Artificial Sequence
  Description of Artificial Sequence: Synthetic oligonucleotide
  Sense strand starting at position 54 of SEQ ID NO: 915814
ugaagucaacagugauaca

SEQ ID NO: 1108123 - RNA, 19 nt, Artificial Sequence
  Description of Artificial Sequence: Synthetic oligonucleotide
  Antisense strand to SEQ ID NO: 1108122
uguaucacuguugacuuca

SEQ ID NO: 1108124 - RNA, 19 nt, Artificial Sequence
  Description of Artificial Sequence: Synthetic oligonucleotide
  Sense strand starting at position 79 of SEQ ID NO: 915814
augggauauuagguaacuu

SEQ ID NO: 1108125 - RNA, 19 nt, Artificial Sequence
  Description of Artificial Sequence: Synthetic oligonucleotide
  Antisense strand to SEQ ID NO: 1108124
aaguuaccuaauaucccau

SEQ ID NO: 1108126 - RNA, 19 nt, Artificial Sequence
  Description of Artificial Sequence: Synthetic oligonucleotide
  Sense strand starting at position 152 of SEQ ID NO: 915814
auaugcuuagccuaauaga

SEQ ID NO: 1108127 - RNA, 19 nt, Artificial Sequence
  Description of Artificial Sequence: Synthetic oligonucleotide
  Antisense strand to SEQ ID NO: 1108126
ucuauuaggcuaagcauau

SEQ ID NO: 1108128 - RNA, 19 nt, Artificial Sequence
  Description of Artificial Sequence: Synthetic oligonucleotide
  Sense strand starting at position 574 of SEQ ID NO: 915814
gggagguuuguaggugaaa

SEQ ID NO: 1108129 - RNA, 19 nt, Artificial Sequence
  Description of Artificial Sequence: Synthetic oligonucleotide
  Antisense strand to SEQ ID NO: 1108128
uuucaccuacaaaccuccc

SEQ ID NO: 1108130 - RNA, 19 nt, Artificial Sequence
  Description of Artificial Sequence: Synthetic oligonucleotide
  Sense strand starting at position 809 of SEQ ID NO: 915814
cugaauagaugccucugau

SEQ ID NO: 1108131 - RNA, 19 nt, Artificial Sequence
  Description of Artificial Sequence: Synthetic oligonucleotide
  Antisense strand to SEQ ID NO: 1108130
aucagaggcaucuauucag

SEQ ID NO: 1108132 - RNA, 19 nt, Artificial Sequence
  Description of Artificial Sequence: Synthetic oligonucleotide
  Sense strand starting at position 982 of SEQ ID NO: 915814
aaagguacugucugugaag

SEQ ID NO: 1108133 - RNA, 19 nt, Artificial Sequence
  Description of Artificial Sequence: Synthetic oligonucleotide
  Antisense strand to SEQ ID NO: 1108132
cuucacagacaguaccuuu

SEQ ID NO: 1108134 - RNA, 19 nt, Artificial Sequence
  Description of Artificial Sequence: Synthetic oligonucleotide
  Sense strand starting at position 991 of SEQ ID NO: 915814
gucugugaagaggguuauu

SEQ ID NO: 1108135 - RNA, 19 nt, Artificial Sequence
  Description of Artificial Sequence: Synthetic oligonucleotide
  Antisense strand to SEQ ID NO: 1108134
aauaacccucuucacagac

SEQ ID NO: 1108136 - RNA, 19 nt, Artificial Sequence
  Description of Artificial Sequence: Synthetic oligonucleotide
  Sense strand starting at position 1000 of SEQ ID NO: 915814
gaggguuauuucuaaucaa

SEQ ID NO: 1108137 - RNA, 19 nt, Artificial Sequence
  Description of Artificial Sequence: Synthetic oligonucleotide
  Antisense strand to SEQ ID NO: 1108136
uugauuagaaauaacccuc

SEQ ID NO: 1108138 - RNA, 19 nt, Artificial Sequence
  Description of Artificial Sequence: Synthetic oligonucleotide
  Sense strand starting at position 1032 of SEQ ID NO: 915814
aggacagcugcuugaggua

SEQ ID NO: 1108139 - RNA, 19 nt, Artificial Sequence
  Description of Artificial Sequence: Synthetic oligonucleotide
  Antisense strand to SEQ ID NO: 1108138
uaccucaagcagcuguccu

SEQ ID NO: 1108140 - RNA, 19 nt, Artificial Sequence
  Description of Artificial Sequence: Synthetic oligonucleotide
  Sense strand starting at position 1062 of SEQ ID NO: 915814
gcgagaguagcuuagauaa

SEQ ID NO: 1108141 - RNA, 19 nt, Artificial Sequence
  Description of Artificial Sequence: Synthetic oligonucleotide
  Antisense strand to SEQ ID NO: 1108140
uuaucuaagcuacucucgc

SEQ ID NO: 1108142 - RNA, 19 nt, Artificial Sequence
  Description of Artificial Sequence: Synthetic oligonucleotide
  Sense strand starting at position 1101 of SEQ ID NO: 915814
gcaaauaagugacugaaua

SEQ ID NO: 1108143 - RNA, 19 nt, Artificial Sequence
  Description of Artificial Sequence: Synthetic oligonucleotide
  Antisense strand to SEQ ID NO: 1108142
uauucagucacuuauuugc

SEQ ID NO: 1108144 - RNA, 19 nt, Artificial Sequence
  Description of Artificial Sequence: Synthetic oligonucleotide
  Sense strand starting at position 1368 of SEQ ID NO: 915814
ccuauugcagaguggaaga

SEQ ID NO: 1108145 - RNA, 19 nt, Artificial Sequence
  Description of Artificial Sequence: Synthetic oligonucleotide
  Antisense strand to SEQ ID NO: 1108144
ucuuccacucugcaauagg

SEQ ID NO: 1108146 - RNA, 19 nt, Artificial Sequence
  Description of Artificial Sequence: Synthetic oligonucleotide
  Sense strand starting at position 1391 of SEQ ID NO: 915814
acaggagugugguuaaauc

SEQ ID NO: 1108147 - RNA, 19 nt, Artificial Sequence
  Description of Artificial Sequence: Synthetic oligonucleotide
  Antisense strand to SEQ ID NO: 1108146
gauuuaaccacacuccugu

SEQ ID NO: 1108148 - RNA, 19 nt, Artificial Sequence
  Description of Artificial Sequence: Synthetic oligonucleotide
  Sense strand starting at position 2045 of SEQ ID NO: 915814
gaacucuggcccugugaau

SEQ ID NO: 1108149 - RNA, 19 nt, Artificial Sequence
  Description of Artificial Sequence: Synthetic oligonucleotide
  Antisense strand to SEQ ID NO: 1108148
auucacagggccagaguuc

SEQ ID NO: 1108150 - RNA, 19 nt, Artificial Sequence
  Description of Artificial Sequence: Synthetic oligonucleotide
  Sense strand starting at position 2078 of SEQ ID NO: 915814
cuucuaguggcuuaaagaa

SEQ ID NO: 1108151 - RNA, 19 nt, Artificial Sequence
  Description of Artificial Sequence: Synthetic oligonucleotide
  Antisense strand to SEQ ID NO: 1108150
uucuuuaagccacuagaag

SEQ ID NO: 1108152 - RNA, 19 nt, Artificial Sequence
  Description of Artificial Sequence: Synthetic oligonucleotide
  Sense strand starting at position 2086 of SEQ ID NO: 915814
ggcuuaaagaaaugagcgu

SEQ ID NO: 1108153 - RNA, 19 nt, Artificial Sequence
  Description of Artificial Sequence: Synthetic oligonucleotide
  Antisense strand to SEQ ID NO: 1108152
acgcucauuucuuuaagcc

SEQ ID NO: 1108154 - RNA, 19 nt, Artificial Sequence
  Description of Artificial Sequence: Synthetic oligonucleotide
  Sense strand starting at position 2090 of SEQ ID NO: 915814
uaaagaaaugagcgucaua

SEQ ID NO: 1108155 - RNA, 19 nt, Artificial Sequence
  Description of Artificial Sequence: Synthetic oligonucleotide
  Antisense strand to SEQ ID NO: 1108154
uaugacgcucauuucuuua

SEQ ID NO: 1108156 - RNA, 19 nt, Artificial Sequence
  Description of Artificial Sequence: Synthetic oligonucleotide
  Sense strand starting at position 2093 of SEQ ID NO: 915814
agaaaugagcgucauacuu

SEQ ID NO: 1108157 - RNA, 19 nt, Artificial Sequence
  Description of Artificial Sequence: Synthetic oligonucleotide
  Antisense strand to SEQ ID NO: 1108156
aaguaugacgcucauuucu

SEQ ID NO: 1108158 - RNA, 19 nt, Artificial Sequence
  Description of Artificial Sequence: Synthetic oligonucleotide
  Sense strand starting at position 2220 of SEQ ID NO: 915814
ucucuuacauggucuuuau

SEQ ID NO: 1108159 - RNA, 19 nt, Artificial Sequence
  Description of Artificial Sequence: Synthetic oligonucleotide
  Antisense strand to SEQ ID NO: 1108158
auaaagaccauguaagaga

SEQ ID NO: 1108160 - RNA, 19 nt, Artificial Sequence
  Description of Artificial Sequence: Synthetic oligonucleotide
  Sense strand starting at position 2316 of SEQ ID NO: 915814
gcuuguuaagacugaggua

SEQ ID NO: 1108161 - RNA, 19 nt, Artificial Sequence
  Description of Artificial Sequence: Synthetic oligonucleotide
  Antisense strand to SEQ ID NO: 1108160
uaccucagucuuaacaagc

SEQ ID NO: 1108162 - RNA, 19 nt, Artificial Sequence
  Description of Artificial Sequence: Synthetic oligonucleotide
  Sense strand starting at position 2335 of SEQ ID NO: 915814
cuuuguggcaucugagaag

SEQ ID NO: 1108163 - RNA, 19 nt, Artificial Sequence
  Description of Artificial Sequence: Synthetic oligonucleotide
  Antisense strand to SEQ ID NO: 1108162
cuucucagaugccacaaag

SEQ ID NO: 1108164 - RNA, 19 nt, Artificial Sequence
  Description of Artificial Sequence: Synthetic oligonucleotide
  Sense strand starting at position 2347 of SEQ ID NO: 915814
ugagaagcauugucaauua

SEQ ID NO: 1108165 - RNA, 19 nt, Artificial Sequence
  Description of Artificial Sequence: Synthetic oligonucleotide
  Antisense strand to SEQ ID NO: 1108164
uaauugacaaugcuucuca

SEQ ID NO: 1108166 - RNA, 19 nt, Artificial Sequence
  Description of Artificial Sequence: Synthetic oligonucleotide
  Sense strand starting at position 2425 of SEQ ID NO: 915814
ugggucaaucuggguagau

SEQ ID NO: 1108167 - RNA, 19 nt, Artificial Sequence
  Description of Artificial Sequence: Synthetic oligonucleotide
  Antisense strand to SEQ ID NO: 1108166
aucuacccagauugaccca

SEQ ID NO: 1108168 - RNA, 19 nt, Artificial Sequence
  Description of Artificial Sequence: Synthetic oligonucleotide
  Sense strand starting at position 2426 of SEQ ID NO: 915814
gggucaaucuggguagaug

SEQ ID NO: 1108169 - RNA, 19 nt, Artificial Sequence
  Description of Artificial Sequence: Synthetic oligonucleotide
  Antisense strand to SEQ ID NO: 1108168
caucuacccagauugaccc

SEQ ID NO: 1108170 - RNA, 19 nt, Artificial Sequence
  Description of Artificial Sequence: Synthetic oligonucleotide
  Sense strand starting at position 2523 of SEQ ID NO: 915814
ggaauuggcccagggaaca

SEQ ID NO: 1108171 - RNA, 19 nt, Artificial Sequence
  Description of Artificial Sequence: Synthetic oligonucleotide
  Antisense strand to SEQ ID NO: 1108170
uguucccugggccaauucc

SEQ ID NO: 1108172 - RNA, 19 nt, Artificial Sequence
  Description of Artificial Sequence: Synthetic oligonucleotide
  Sense strand starting at position 2667 of SEQ ID NO: 915814
gagagaaugcuugguggca

SEQ ID NO: 1108173 - RNA, 19 nt, Artificial Sequence
  Description of Artificial Sequence: Synthetic oligonucleotide
  Antisense strand to SEQ ID NO: 1108172
ugccaccaagcauucucuc

SEQ ID NO: 1108174 - RNA, 19 nt, Artificial Sequence
  Description of Artificial Sequence: Synthetic oligonucleotide
  Sense strand starting at position 2668 of SEQ ID NO: 915814
agagaaugcuugguggcau

SEQ ID NO: 1108175 - RNA, 19 nt, Artificial Sequence
  Description of Artificial Sequence: Synthetic oligonucleotide
  Antisense strand to SEQ ID NO: 1108174
augccaccaagcauucucu

SEQ ID NO: 1108176 - RNA, 19 nt, Artificial Sequence
  Description of Artificial Sequence: Synthetic oligonucleotide
  Sense strand starting at position 2681 of SEQ ID NO: 915814
uggcauuaaguacaugaua

SEQ ID NO: 1108177 - RNA, 19 nt, Artificial Sequence
  Description of Artificial Sequence: Synthetic oligonucleotide
  Antisense strand to SEQ ID NO: 1108176
uaucauguacuuaaugcca

SEQ ID NO: 1108178 - RNA, 19 nt, Artificial Sequence
  Description of Artificial Sequence: Synthetic oligonucleotide
  Sense strand starting at position 3452 of SEQ ID NO: 915814
ggaccagacuucuuuagcu

SEQ ID NO: 1108179 - RNA, 19 nt, Artificial Sequence
  Description of Artificial Sequence: Synthetic oligonucleotide
  Antisense strand to SEQ ID NO: 1108178
agcuaaagaagucuggucc

SEQ ID NO: 1108180 - RNA, 19 nt, Artificial Sequence
  Description of Artificial Sequence: Synthetic oligonucleotide
  Sense strand starting at position 3461 of SEQ ID NO: 915814
uucuuuagcugguuuauuu

SEQ ID NO: 1108181 - RNA, 19 nt, Artificial Sequence
  Description of Artificial Sequence: Synthetic oligonucleotide
  Antisense strand to SEQ ID NO: 1108180
aaauaaaccagcuaaagaa

SEQ ID NO: 1108182 - RNA, 19 nt, Artificial Sequence
  Description of Artificial Sequence: Synthetic oligonucleotide
  Sense strand starting at position 3616 of SEQ ID NO: 915814
ggcaguguugaggaguacu

SEQ ID NO: 1108183 - RNA, 19 nt, Artificial Sequence
  Description of Artificial Sequence: Synthetic oligonucleotide
  Antisense strand to SEQ ID NO: 1108182
aguacuccucaacacugcc

SEQ ID NO: 1108184 - RNA, 19 nt, Artificial Sequence
  Description of Artificial Sequence: Synthetic oligonucleotide
  Sense strand starting at position 3645 of SEQ ID NO: 915814
uuuguaugaucucccucua

SEQ ID NO: 1108185 - RNA, 19 nt, Artificial Sequence
  Description of Artificial Sequence: Synthetic oligonucleotide
  Antisense strand to SEQ ID NO: 1108184
uagagggagaucauacaaa

SEQ ID NO: 1108186 - RNA, 19 nt, Artificial Sequence
  Description of Artificial Sequence: Synthetic oligonucleotide
  Sense strand starting at position 3788 of SEQ ID NO: 915814
ucaauuugaucgccugacu

SEQ ID NO: 1108187 - RNA, 19 nt, Artificial Sequence
  Description of Artificial Sequence: Synthetic oligonucleotide
  Antisense strand to SEQ ID NO: 1108186
agucaggcgaucaaauuga

SEQ ID NO: 1108188 - RNA, 19 nt, Artificial Sequence
  Description of Artificial Sequence: Synthetic oligonucleotide
  Sense strand starting at position 3916 of SEQ ID NO: 915814
gguguuggcagguaaauca

SEQ ID NO: 1108189 - RNA, 19 nt, Artificial Sequence
  Description of Artificial Sequence: Synthetic oligonucleotide
  Antisense strand to SEQ ID NO: 1108188
ugauuuaccugccaacacc

SEQ ID NO: 1108190 - RNA, 19 nt, Artificial Sequence
  Description of Artificial Sequence: Synthetic oligonucleotide
  Sense strand starting at position 3936 of SEQ ID NO: 915814
gcuucuagugcugaaugga

SEQ ID NO: 1108191 - RNA, 19 nt, Artificial Sequence
  Description of Artificial Sequence: Synthetic oligonucleotide
  Antisense strand to SEQ ID NO: 1108190
uccauucagcacuagaagc

SEQ ID NO: 1108192 - RNA, 19 nt, Artificial Sequence
  Description of Artificial Sequence: Synthetic oligonucleotide
  Sense strand starting at position 3939 of SEQ ID NO: 915814
ucuagugcugaauggaagu

SEQ ID NO: 1108193 - RNA, 19 nt, Artificial Sequence
  Description of Artificial Sequence: Synthetic oligonucleotide
  Antisense strand to SEQ ID NO: 1108192
acuuccauucagcacuaga

SEQ ID NO: 1108194 - RNA, 19 nt, Artificial Sequence
  Description of Artificial Sequence: Synthetic oligonucleotide
  Sense strand starting at position 3950 of SEQ ID NO: 915814
auggaagucuuguccucau

SEQ ID NO: 1108195 - RNA, 19 nt, Artificial Sequence
  Description of Artificial Sequence: Synthetic oligonucleotide
  Antisense strand to SEQ ID NO: 1108194
augaggacaagacuuccau

SEQ ID NO: 1108196 - RNA, 19 nt, Artificial Sequence
  Description of Artificial Sequence: Synthetic oligonucleotide
  Sense strand starting at position 3953 of SEQ ID NO: 915814
gaagucuuguccucauaga

SEQ ID NO: 1108197 - RNA, 19 nt, Artificial Sequence
  Description of Artificial Sequence: Synthetic oligonucleotide
  Antisense strand to SEQ ID NO: 1108196
ucuaugaggacaagacuuc

SEQ ID NO: 1108198 - RNA, 19 nt, Artificial Sequence
  Description of Artificial Sequence: Synthetic oligonucleotide
  Sense strand starting at position 3954 of SEQ ID NO: 915814
aagucuuguccucauagag

SEQ ID NO: 1108199 - RNA, 19 nt, Artificial Sequence
  Description of Artificial Sequence: Synthetic oligonucleotide
  Antisense strand to SEQ ID NO: 1108198
cucuaugaggacaagacuu

SEQ ID NO: 1108200 - RNA, 19 nt, Artificial Sequence
  Description of Artificial Sequence: Synthetic oligonucleotide
  Sense strand starting at position 3970 of SEQ ID NO: 915814
gagccaauucugugguaca

SEQ ID NO: 1108201 - RNA, 19 nt, Artificial Sequence
  Description of Artificial Sequence: Synthetic oligonucleotide
  Antisense strand to SEQ ID NO: 1108200
uguaccacagaauuggcuc

SEQ ID NO: 1108202 - RNA, 19 nt, Artificial Sequence
  Description of Artificial Sequence: Synthetic oligonucleotide
  Sense strand starting at position 135 of SEQ ID NO: 915815
cuaggagaugcucacuauu

SEQ ID NO: 1108203 - RNA, 19 nt, Artificial Sequence
  Description of Artificial Sequence: Synthetic oligonucleotide
  Antisense strand to SEQ ID NO: 1108202
aauagugagcaucuccuag

SEQ ID NO: 1108204 - RNA, 19 nt, Artificial Sequence
  Description of Artificial Sequence: Synthetic oligonucleotide
  Sense strand starting at position 184 of SEQ ID NO: 915815
caagcagucuggguccuaa

SEQ ID NO: 1108205 - RNA, 19 nt, Artificial Sequence
  Description of Artificial Sequence: Synthetic oligonucleotide
  Antisense strand to SEQ ID NO: 1108204
uuaggacccagacugcuug

SEQ ID NO: 1108206 - RNA, 19 nt, Artificial Sequence
  Description of Artificial Sequence: Synthetic oligonucleotide
  Sense strand starting at position 382 of SEQ ID NO: 915815
augacagguucugaaauaa

SEQ ID NO: 1108207 - RNA, 19 nt, Artificial Sequence
  Description of Artificial Sequence: Synthetic oligonucleotide
  Antisense strand to SEQ ID NO: 1108206
uuauuucagaaccugucau

SEQ ID NO: 1108208 - RNA, 19 nt, Artificial Sequence
  Description of Artificial Sequence: Synthetic oligonucleotide
  Sense strand starting at position 506 of SEQ ID NO: 915815
guuagaagccucugguucu

SEQ ID NO: 1108209 - RNA, 19 nt, Artificial Sequence
  Description of Artificial Sequence: Synthetic oligonucleotide
  Antisense strand to SEQ ID NO: 1108208
agaaccagaggcuucuaac

SEQ ID NO: 1108210 - RNA, 19 nt, Artificial Sequence
  Description of Artificial Sequence: Synthetic oligonucleotide
  Sense strand starting at position 513 of SEQ ID NO: 915815
gccucugguucuccucuaa

SEQ ID NO: 1108211 - RNA, 19 nt, Artificial Sequence
  Description of Artificial Sequence: Synthetic oligonucleotide
  Antisense strand to SEQ ID NO: 1108210
uuagaggagaaccagaggc

SEQ ID NO: 1108212 - RNA, 19 nt, Artificial Sequence
  Description of Artificial Sequence: Synthetic oligonucleotide
  Sense strand starting at position 535 of SEQ ID NO: 915815
gacagugcugucugauucu

SEQ ID NO: 1108213 - RNA, 19 nt, Artificial Sequence
  Description of Artificial Sequence: Synthetic oligonucleotide
  Antisense strand to SEQ ID NO: 1108212
agaaucagacagcacuguc

SEQ ID NO: 1108214 - RNA, 19 nt, Artificial Sequence
  Description of Artificial Sequence: Synthetic oligonucleotide
  Sense strand starting at position 631 of SEQ ID NO: 915815
acugucuuccagugaguac

SEQ ID NO: 1108215 - RNA, 19 nt, Artificial Sequence
  Description of Artificial Sequence: Synthetic oligonucleotide
  Antisense strand to SEQ ID NO: 1108214
guacucacuggaagacagu

SEQ ID NO: 1108216 - RNA, 19 nt, Artificial Sequence
  Description of Artificial Sequence: Synthetic oligonucleotide
  Sense strand starting at position 632 of SEQ ID NO: 915815
cugucuuccagugaguacu

SEQ ID NO: 1108217 - RNA, 19 nt, Artificial Sequence
  Description of Artificial Sequence: Synthetic oligonucleotide
  Antisense strand to SEQ ID NO: 1108216
aguacucacuggaagacag

SEQ ID NO: 1108218 - RNA, 19 nt, Artificial Sequence
  Description of Artificial Sequence: Synthetic oligonucleotide
  Sense strand starting at position 634 of SEQ ID NO: 915815
gucuuccagugaguacuaa

SEQ ID NO: 1108219 - RNA, 19 nt, Artificial Sequence
  Description of Artificial Sequence: Synthetic oligonucleotide
  Antisense strand to SEQ ID NO: 1108218
uuaguacucacuggaagac

SEQ ID NO: 1108220 - RNA, 19 nt, Artificial Sequence
  Description of Artificial Sequence: Synthetic oligonucleotide
  Sense strand starting at position 635 of SEQ ID NO: 915815
ucuuccagugaguacuaaa

SEQ ID NO: 1108221 - RNA, 19 nt, Artificial Sequence
  Description of Artificial Sequence: Synthetic oligonucleotide
  Antisense strand to SEQ ID NO: 1108220
uuuaguacucacuggaaga

SEQ ID NO: 1108222 - RNA, 19 nt, Artificial Sequence
  Description of Artificial Sequence: Synthetic oligonucleotide
  Sense strand starting at position 1010 of SEQ ID NO: 915815
gguacuuauugugcaguga

SEQ ID NO: 1108223 - RNA, 19 nt, Artificial Sequence
  Description of Artificial Sequence: Synthetic oligonucleotide
  Antisense strand to SEQ ID NO: 1108222
ucacugcacaauaaguacc

SEQ ID NO: 1108224 - RNA, 19 nt, Artificial Sequence
  Description of Artificial Sequence: Synthetic oligonucleotide
  Sense strand starting at position 1011 of SEQ ID NO: 915815
guacuuauugugcagugaa

SEQ ID NO: 1108225 - RNA, 19 nt, Artificial Sequence
  Description of Artificial Sequence: Synthetic oligonucleotide
  Antisense strand to SEQ ID NO: 1108224
uucacugcacaauaaguac

SEQ ID NO: 1108226 - RNA, 19 nt, Artificial Sequence
  Description of Artificial Sequence: Synthetic oligonucleotide
  Sense strand starting at position 1132 of SEQ ID NO: 915815
aggugacaaagcuggaauu

SEQ ID NO: 1108227 - RNA, 19 nt, Artificial Sequence
  Description of Artificial Sequence: Synthetic oligonucleotide
  Antisense strand to SEQ ID NO: 1108226
aauuccagcuuugucaccu

SEQ ID NO: 1108228 - RNA, 19 nt, Artificial Sequence
  Description of Artificial Sequence: Synthetic oligonucleotide
  Sense strand starting at position 1145 of SEQ ID NO: 915815
ggaauuugaucccaugcuu

SEQ ID NO: 1108229 - RNA, 19 nt, Artificial Sequence
  Description of Artificial Sequence: Synthetic oligonucleotide
  Antisense strand to SEQ ID NO: 1108228
aagcaugggaucaaauucc

SEQ ID NO: 1108230 - RNA, 19 nt, Artificial Sequence
  Description of Artificial Sequence: Synthetic oligonucleotide
  Sense strand starting at position 1275 of SEQ ID NO: 915815
aggagacaguccugaagag

SEQ ID NO: 1108231 - RNA, 19 nt, Artificial Sequence
  Description of Artificial Sequence: Synthetic oligonucleotide
  Antisense strand to SEQ ID NO: 1108230
cucuucaggacugucuccu

SEQ ID NO: 1108232 - RNA, 19 nt, Artificial Sequence
  Description of Artificial Sequence: Synthetic oligonucleotide
  Sense strand starting at position 1349 of SEQ ID NO: 915815
gcugucuagcaauguccaa

SEQ ID NO: 1108233 - RNA, 19 nt, Artificial Sequence
  Description of Artificial Sequence: Synthetic oligonucleotide
  Antisense strand to SEQ ID NO: 1108232
uuggacauugcuagacagc

SEQ ID NO: 1108234 - RNA, 19 nt, Artificial Sequence
  Description of Artificial Sequence: Synthetic oligonucleotide
  Sense strand starting at position 1817 of SEQ ID NO: 915815
uaaggagggcccugaaagu

SEQ ID NO: 1108235 - RNA, 19 nt, Artificial Sequence
  Description of Artificial Sequence: Synthetic oligonucleotide
  Antisense strand to SEQ ID NO: 1108234
acuuucagggcccuccuua

SEQ ID NO: 1108236 - RNA, 19 nt, Artificial Sequence
  Description of Artificial Sequence: Synthetic oligonucleotide
  Sense strand starting at position 1910 of SEQ ID NO: 915815
agagaagacugaggagaaa

SEQ ID NO: 1108237 - RNA, 19 nt, Artificial Sequence
  Description of Artificial Sequence: Synthetic oligonucleotide
  Antisense strand to SEQ ID NO: 1108236
uuucuccucagucuucucu

SEQ ID NO: 1108238 - RNA, 19 nt, Artificial Sequence
  Description of Artificial Sequence: Synthetic oligonucleotide
  Sense strand starting at position 2317 of SEQ ID NO: 915815
ucggacaguuaugcuguua

SEQ ID NO: 1108239 - RNA, 19 nt, Artificial Sequence
  Description of Artificial Sequence: Synthetic oligonucleotide
  Antisense strand to SEQ ID NO: 1108238
uaacagcauaacuguccga

SEQ ID NO: 1108240 - RNA, 19 nt, Artificial Sequence
  Description of Artificial Sequence: Synthetic oligonucleotide
  Sense strand starting at position 2790 of SEQ ID NO: 915815
gccggaucgcugucaucca

SEQ ID NO: 1108241 - RNA, 19 nt, Artificial Sequence
  Description of Artificial Sequence: Synthetic oligonucleotide
  Antisense strand to SEQ ID NO: 1108240
uggaugacagcgauccggc

SEQ ID NO: 1108242 - RNA, 19 nt, Artificial Sequence
  Description of Artificial Sequence: Synthetic oligonucleotide
  Sense strand starting at position 3257 of SEQ ID NO: 915815
ggcuuuguaaaccgugaag

SEQ ID NO: 1108243 - RNA, 19 nt, Artificial Sequence
  Description of Artificial Sequence: Synthetic oligonucleotide
  Antisense strand to SEQ ID NO: 1108242
cuucacgguuuacaaagcc

SEQ ID NO: 1108244 - RNA, 19 nt, Artificial Sequence
  Description of Artificial Sequence: Synthetic oligonucleotide
  Sense strand starting at position 3259 of SEQ ID NO: 915815
cuuuguaaaccgugaagcu

SEQ ID NO: 1108245 - RNA, 19 nt, Artificial Sequence
  Description of Artificial Sequence: Synthetic oligonucleotide
  Antisense strand to SEQ ID NO: 1108244
agcuucacgguuuacaaag

SEQ ID NO: 1108246 - RNA, 19 nt, Artificial Sequence
  Description of Artificial Sequence: Synthetic oligonucleotide
  Sense strand starting at position 3269 of SEQ ID NO: 915815
cgugaagcucuaugcaaac

SEQ ID NO: 1108247 - RNA, 19 nt, Artificial Sequence
  Description of Artificial Sequence: Synthetic oligonucleotide
  Antisense strand to SEQ ID NO: 1108246
guuugcauagagcuucacg

SEQ ID NO: 1108248 - RNA, 19 nt, Artificial Sequence
  Description of Artificial Sequence: Synthetic oligonucleotide
  Sense strand starting at position 3286 of SEQ ID NO: 915815
acauaauuguaguugagag

SEQ ID NO: 1108249 - RNA, 19 nt, Artificial Sequence
  Description of Artificial Sequence: Synthetic oligonucleotide
  Antisense strand to SEQ ID NO: 1108248
cucucaacuacaauuaugu

SEQ ID NO: 1108250 - RNA, 19 nt, Artificial Sequence
  Description of Artificial Sequence: Synthetic oligonucleotide
  Sense strand starting at position 3288 of SEQ ID NO: 915815
auaauuguaguugagaguu

SEQ ID NO: 1108251 - RNA, 19 nt, Artificial Sequence
  Description of Artificial Sequence: Synthetic oligonucleotide
  Antisense strand to SEQ ID NO: 1108250
aacucucaacuacaauuau

SEQ ID NO: 1108252 - RNA, 19 nt, Artificial Sequence
  Description of Artificial Sequence: Synthetic oligonucleotide
  Sense strand starting at position 3294 of SEQ ID NO: 915815
guaguugagaguuguaauu

SEQ ID NO: 1108253 - RNA, 19 nt, Artificial Sequence
  Description of Artificial Sequence: Synthetic oligonucleotide
  Antisense strand to SEQ ID NO: 1108252
aauuacaacucucaacuac

SEQ ID NO: 1108254 - RNA, 19 nt, Artificial Sequence
  Description of Artificial Sequence: Synthetic oligonucleotide
  Sense strand starting at position 3300 of SEQ ID NO: 915815
gagaguuguaauugcuguu

SEQ ID NO: 1108255 - RNA, 19 nt, Artificial Sequence
  Description of Artificial Sequence: Synthetic oligonucleotide
  Antisense strand to SEQ ID NO: 1108254
aacagcaauuacaacucuc

SEQ ID NO: 1108256 - RNA, 19 nt, Artificial Sequence
  Description of Artificial Sequence: Synthetic oligonucleotide
  Sense strand starting at position 3304 of SEQ ID NO: 915815
guuguaauugcuguuguau

SEQ ID NO: 1108257 - RNA, 19 nt, Artificial Sequence
  Description of Artificial Sequence: Synthetic oligonucleotide
  Antisense strand to SEQ ID NO: 1108256
auacaacagcaauuacaac

SEQ ID NO: 1108258 - RNA, 19 nt, Artificial Sequence
  Description of Artificial Sequence: Synthetic oligonucleotide
  Sense strand starting at position 3317 of SEQ ID NO: 915815
uuguauuguggugggauuu

SEQ ID NO: 1108259 - RNA, 19 nt, Artificial Sequence
  Description of Artificial Sequence: Synthetic oligonucleotide
  Antisense strand to SEQ ID NO: 1108258
aaaucccaccacaauacaa

SEQ ID NO: 1108260 - RNA, 19 nt, Artificial Sequence
  Description of Artificial Sequence: Synthetic oligonucleotide
  Sense strand starting at position 3349 of SEQ ID NO: 915815
cgauuccaacguugagaau

SEQ ID NO: 1108261 - RNA, 19 nt, Artificial Sequence
  Description of Artificial Sequence: Synthetic oligonucleotide
  Antisense strand to SEQ ID NO: 1108260
auucucaacguuggaaucg

SEQ ID NO: 1108262 - RNA, 19 nt, Artificial Sequence
  Description of Artificial Sequence: Synthetic oligonucleotide
  Sense strand starting at position 3358 of SEQ ID NO: 915815
cguugagaauaugauuucu

SEQ ID NO: 1108263 - RNA, 19 nt, Artificial Sequence
  Description of Artificial Sequence: Synthetic oligonucleotide
  Antisense strand to SEQ ID NO: 1108262
agaaaucauauucucaacg

SEQ ID NO: 1108264 - RNA, 19 nt, Artificial Sequence
  Description of Artificial Sequence: Synthetic oligonucleotide
  Sense strand starting at position 3695 of SEQ ID NO: 915815
aaaugagcuuaguagaaca

SEQ ID NO: 1108265 - RNA, 19 nt, Artificial Sequence
  Description of Artificial Sequence: Synthetic oligonucleotide
  Antisense strand to SEQ ID NO: 1108264
uguucuacuaagcucauuu

SEQ ID NO: 1108266 - RNA, 19 nt, Artificial Sequence
  Description of Artificial Sequence: Synthetic oligonucleotide
  Sense strand starting at position 3715 of SEQ ID NO: 915815
gccucaucagugcuaucgu

SEQ ID NO: 1108267 - RNA, 19 nt, Artificial Sequence
  Description of Artificial Sequence: Synthetic oligonucleotide
  Antisense strand to SEQ ID NO: 1108266
acgauagcacugaugaggc

SEQ ID NO: 1108268 - RNA, 19 nt, Artificial Sequence
  Description of Artificial Sequence: Synthetic oligonucleotide
  Sense strand starting at position 3723 of SEQ ID NO: 915815
agugcuaucgugagguuga

SEQ ID NO: 1108269 - RNA, 19 nt, Artificial Sequence
  Description of Artificial Sequence: Synthetic oligonucleotide
  Antisense strand to SEQ ID NO: 1108268
ucaaccucacgauagcacu

SEQ ID NO: 1108270 - RNA, 19 nt, Artificial Sequence
  Description of Artificial Sequence: Synthetic oligonucleotide
  Sense strand starting at position 3788 of SEQ ID NO: 915815
ggguucccuucuuuacuua

SEQ ID NO: 1108271 - RNA, 19 nt, Artificial Sequence
  Description of Artificial Sequence: Synthetic oligonucleotide
  Antisense strand to SEQ ID NO: 1108270
uaaguaaagaagggaaccc

SEQ ID NO: 1108272 - RNA, 19 nt, Artificial Sequence
  Description of Artificial Sequence: Synthetic oligonucleotide
  Sense strand starting at position 3796 of SEQ ID NO: 915815
uucuuuacuuaggagauga

SEQ ID NO: 1108273 - RNA, 19 nt, Artificial Sequence
  Description of Artificial Sequence: Synthetic oligonucleotide
  Antisense strand to SEQ ID NO: 1108272
ucaucuccuaaguaaagaa

SEQ ID NO: 1108274 - RNA, 19 nt, Artificial Sequence
  Description of Artificial Sequence: Synthetic oligonucleotide
  Sense strand starting at position 3880 of SEQ ID NO: 915815
accagaaguucuuaaacag

SEQ ID NO: 1108275 - RNA, 19 nt, Artificial Sequence
  Description of Artificial Sequence: Synthetic oligonucleotide
  Antisense strand to SEQ ID NO: 1108274
cuguuuaagaacuucuggu

SEQ ID NO: 1108276 - RNA, 19 nt, Artificial Sequence
  Description of Artificial Sequence: Synthetic oligonucleotide
  Sense strand starting at position 3887 of SEQ ID NO: 915815
guucuuaaacagugauucu

SEQ ID NO: 1108277 - RNA, 19 nt, Artificial Sequence
  Description of Artificial Sequence: Synthetic oligonucleotide
  Antisense strand to SEQ ID NO: 1108276
agaaucacuguuuaagaac

SEQ ID NO: 1108278 - RNA, 19 nt, Artificial Sequence
  Description of Artificial Sequence: Synthetic oligonucleotide
  Sense strand starting at position 3899 of SEQ ID NO: 915815
ugauucucagaagguguau

SEQ ID NO: 1108279 - RNA, 19 nt, Artificial Sequence
  Description of Artificial Sequence: Synthetic oligonucleotide
  Antisense strand to SEQ ID NO: 1108278
auacaccuucugagaauca

SEQ ID NO: 1108280 - RNA, 19 nt, Artificial Sequence
  Description of Artificial Sequence: Synthetic oligonucleotide
  Sense strand starting at position 3901 of SEQ ID NO: 915815
auucucagaagguguauga

SEQ ID NO: 1108281 - RNA, 19 nt, Artificial Sequence
  Description of Artificial Sequence: Synthetic oligonucleotide
  Antisense strand to SEQ ID NO: 1108280
ucauacaccuucugagaau

SEQ ID NO: 1108282 - RNA, 19 nt, Artificial Sequence
  Description of Artificial Sequence: Synthetic oligonucleotide
  Sense strand starting at position 55 of SEQ ID NO: 915816
augacagguucugaaauaa

SEQ ID NO: 1108283 - RNA, 19 nt, Artificial Sequence
  Description of Artificial Sequence: Synthetic oligonucleotide
  Antisense strand to SEQ ID NO: 1108282
uuauuucagaaccugucau

SEQ ID NO: 1108284 - RNA, 19 nt, Artificial Sequence
  Description of Artificial Sequence: Synthetic oligonucleotide
  Sense strand starting at position 179 of SEQ ID NO: 915816
guuagaagccucugguucu

SEQ ID NO: 1108285 - RNA, 19 nt, Artificial Sequence
  Description of Artificial Sequence: Synthetic oligonucleotide
  Antisense strand to SEQ ID NO: 1108284
agaaccagaggcuucuaac

SEQ ID NO: 1108286 - RNA, 19 nt, Artificial Sequence
  Description of Artificial Sequence: Synthetic oligonucleotide
  Sense strand starting at position 186 of SEQ ID NO: 915816
gccucugguucuccucuaa

SEQ ID NO: 1108287 - RNA, 19 nt, Artificial Sequence
  Description of Artificial Sequence: Synthetic oligonucleotide
  Antisense strand to SEQ ID NO: 1108286
uuagaggagaaccagaggc

SEQ ID NO: 1108288 - RNA, 19 nt, Artificial Sequence
  Description of Artificial Sequence: Synthetic oligonucleotide
  Sense strand starting at position 208 of SEQ ID NO: 915816
gacagugcugucugauucu

SEQ ID NO: 1108289 - RNA, 19 nt, Artificial Sequence
  Description of Artificial Sequence: Synthetic oligonucleotide
  Antisense strand to SEQ ID NO: 1108288
agaaucagacagcacuguc

SEQ ID NO: 1108290 - RNA, 19 nt, Artificial Sequence
  Description of Artificial Sequence: Synthetic oligonucleotide
  Sense strand starting at position 304 of SEQ ID NO: 915816
acugucuuccagugaguac

SEQ ID NO: 1108291 - RNA, 19 nt, Artificial Sequence
  Description of Artificial Sequence: Synthetic oligonucleotide
  Antisense strand to SEQ ID NO: 1108290
guacucacuggaagacagu

SEQ ID NO: 1108292 - RNA, 19 nt, Artificial Sequence
  Description of Artificial Sequence: Synthetic oligonucleotide
  Sense strand starting at position 305 of SEQ ID NO: 915816
cugucuuccagugaguacu

SEQ ID NO: 1108293 - RNA, 19 nt, Artificial Sequence
  Description of Artificial Sequence: Synthetic oligonucleotide
  Antisense strand to SEQ ID NO: 1108292
aguacucacuggaagacag

SEQ ID NO: 1108294 - RNA, 19 nt, Artificial Sequence
  Description of Artificial Sequence: Synthetic oligonucleotide
  Sense strand starting at position 307 of SEQ ID NO: 915816
gucuuccagugaguacuaa

SEQ ID NO: 1108295 - RNA, 19 nt, Artificial Sequence
  Description of Artificial Sequence: Synthetic oligonucleotide
  Antisense strand to SEQ ID NO: 1108294
uuaguacucacuggaagac

SEQ ID NO: 1108296 - RNA, 19 nt, Artificial Sequence
  Description of Artificial Sequence: Synthetic oligonucleotide
  Sense strand starting at position 308 of SEQ ID NO: 915816
ucuuccagugaguacuaaa

SEQ ID NO: 1108297 - RNA, 19 nt, Artificial Sequence
  Description of Artificial Sequence: Synthetic oligonucleotide
  Antisense strand to SEQ ID NO: 1108296
uuuaguacucacuggaaga

SEQ ID NO: 1108298 - RNA, 19 nt, Artificial Sequence
  Description of Artificial Sequence: Synthetic oligonucleotide
  Sense strand starting at position 683 of SEQ ID NO: 915816
gguacuuauugugcaguga

SEQ ID NO: 1108299 - RNA, 19 nt, Artificial Sequence
  Description of Artificial Sequence: Synthetic oligonucleotide
  Antisense strand to SEQ ID NO: 1108298
ucacugcacaauaaguacc

SEQ ID NO: 1108300 - RNA, 19 nt, Artificial Sequence
  Description of Artificial Sequence: Synthetic oligonucleotide
  Sense strand starting at position 684 of SEQ ID NO: 915816
guacuuauugugcagugaa

SEQ ID NO: 1108301 - RNA, 19 nt, Artificial Sequence
  Description of Artificial Sequence: Synthetic oligonucleotide
  Antisense strand to SEQ ID NO: 1108300
uucacugcacaauaaguac

SEQ ID NO: 1108302 - RNA, 19 nt, Artificial Sequence
  Description of Artificial Sequence: Synthetic oligonucleotide
  Sense strand starting at position 805 of SEQ ID NO: 915816
aggugacaaagcuggaauu

SEQ ID NO: 1108303 - RNA, 19 nt, Artificial Sequence
  Description of Artificial Sequence: Synthetic oligonucleotide
  Antisense strand to SEQ ID NO: 1108302
aauuccagcuuugucaccu

SEQ ID NO: 1108304 - RNA, 19 nt, Artificial Sequence
  Description of Artificial Sequence: Synthetic oligonucleotide
  Sense strand starting at position 818 of SEQ ID NO: 915816
ggaauuugaucccaugcuu

SEQ ID NO: 1108305 - RNA, 19 nt, Artificial Sequence
  Description of Artificial Sequence: Synthetic oligonucleotide
  Antisense strand to SEQ ID NO: 1108304
aagcaugggaucaaauucc

SEQ ID NO: 1108306 - RNA, 19 nt, Artificial Sequence
  Description of Artificial Sequence: Synthetic oligonucleotide
  Sense strand starting at position 1490 of SEQ ID NO: 915816
uaaggagggcccugaaagu

SEQ ID NO: 1108307 - RNA, 19 nt, Artificial Sequence
  Description of Artificial Sequence: Synthetic oligonucleotide
  Antisense strand to SEQ ID NO: 1108306
acuuucagggcccuccuua

SEQ ID NO: 1108308 - RNA, 19 nt, Artificial Sequence
  Description of Artificial Sequence: Synthetic oligonucleotide
  Sense strand starting at position 1583 of SEQ ID NO: 915816
agagaagacugaggagaaa

SEQ ID NO: 1108309 - RNA, 19 nt, Artificial Sequence
  Description of Artificial Sequence: Synthetic oligonucleotide
  Antisense strand to SEQ ID NO: 1108308
uuucuccucagucuucucu

SEQ ID NO: 1108310 - RNA, 19 nt, Artificial Sequence
  Description of Artificial Sequence: Synthetic oligonucleotide
  Sense strand starting at position 2463 of SEQ ID NO: 915816
gccggaucgcugucaucca

SEQ ID NO: 1108311 - RNA, 19 nt, Artificial Sequence
  Description of Artificial Sequence: Synthetic oligonucleotide
  Antisense strand to SEQ ID NO: 1108310
uggaugacagcgauccggc

SEQ ID NO: 1108312 - RNA, 19 nt, Artificial Sequence
  Description of Artificial Sequence: Synthetic oligonucleotide
  Sense strand starting at position 2930 of SEQ ID NO: 915816
ggcuuuguaaaccgugaag

SEQ ID NO: 1108313 - RNA, 19 nt, Artificial Sequence
  Description of Artificial Sequence: Synthetic oligonucleotide
  Antisense strand to SEQ ID NO: 1108312
cuucacgguuuacaaagcc

SEQ ID NO: 1108314 - RNA, 19 nt, Artificial Sequence
  Description of Artificial Sequence: Synthetic oligonucleotide
  Sense strand starting at position 2959 of SEQ ID NO: 915816
acauaauuguaguugagag

SEQ ID NO: 1108315 - RNA, 19 nt, Artificial Sequence
  Description of Artificial Sequence: Synthetic oligonucleotide
  Antisense strand to SEQ ID NO: 1108314
cucucaacuacaauuaugu

SEQ ID NO: 1108316 - RNA, 19 nt, Artificial Sequence
  Description of Artificial Sequence: Synthetic oligonucleotide
  Sense strand starting at position 2961 of SEQ ID NO: 915816
auaauuguaguugagaguu

SEQ ID NO: 1108317 - RNA, 19 nt, Artificial Sequence
  Description of Artificial Sequence: Synthetic oligonucleotide
  Antisense strand to SEQ ID NO: 1108316
aacucucaacuacaauuau

SEQ ID NO: 1108318 - RNA, 19 nt, Artificial Sequence
  Description of Artificial Sequence: Synthetic oligonucleotide
  Sense strand starting at position 2967 of SEQ ID NO: 915816
guaguugagaguuguaauu

SEQ ID NO: 1108319 - RNA, 19 nt, Artificial Sequence
  Description of Artificial Sequence: Synthetic oligonucleotide
  Antisense strand to SEQ ID NO: 1108318
aauuacaacucucaacuac

SEQ ID NO: 1108320 - RNA, 19 nt, Artificial Sequence
  Description of Artificial Sequence: Synthetic oligonucleotide
  Sense strand starting at position 2973 of SEQ ID NO: 915816
gagaguuguaauugcuguu

SEQ ID NO: 1108321 - RNA, 19 nt, Artificial Sequence
  Description of Artificial Sequence: Synthetic oligonucleotide
  Antisense strand to SEQ ID NO: 1108320
aacagcaauuacaacucuc

SEQ ID NO: 1108322 - RNA, 19 nt, Artificial Sequence
  Description of Artificial Sequence: Synthetic oligonucleotide
  Sense strand starting at position 2977 of SEQ ID NO: 915816
guuguaauugcuguuguau

SEQ ID NO: 1108323 - RNA, 19 nt, Artificial Sequence
  Description of Artificial Sequence: Synthetic oligonucleotide
  Antisense strand to SEQ ID NO: 1108322
auacaacagcaauuacaac

SEQ ID NO: 1108324 - RNA, 19 nt, Artificial Sequence
  Description of Artificial Sequence: Synthetic oligonucleotide
  Sense strand starting at position 2990 of SEQ ID NO: 915816
uuguauuguggugggauuu

SEQ ID NO: 1108325 - RNA, 19 nt, Artificial Sequence
  Description of Artificial Sequence: Synthetic oligonucleotide
  Antisense strand to SEQ ID NO: 1108324
aaaucccaccacaauacaa

SEQ ID NO: 1108326 - RNA, 19 nt, Artificial Sequence
  Description of Artificial Sequence: Synthetic oligonucleotide
  Sense strand starting at position 3022 of SEQ ID NO: 915816
cgauuccaacguugagaau

SEQ ID NO: 1108327 - RNA, 19 nt, Artificial Sequence
  Description of Artificial Sequence: Synthetic oligonucleotide
  Antisense strand to SEQ ID NO: 1108326
auucucaacguuggaaucg

SEQ ID NO: 1108328 - RNA, 19 nt, Artificial Sequence
  Description of Artificial Sequence: Synthetic oligonucleotide
  Sense strand starting at position 3031 of SEQ ID NO: 915816
cguugagaauaugauuucu

SEQ ID NO: 1108329 - RNA, 19 nt, Artificial Sequence
  Description of Artificial Sequence: Synthetic oligonucleotide
  Antisense strand to SEQ ID NO: 1108328
agaaaucauauucucaacg

SEQ ID NO: 1108330 - RNA, 19 nt, Artificial Sequence
  Description of Artificial Sequence: Synthetic oligonucleotide
  Sense strand starting at position 3388 of SEQ ID NO: 915816
gccucaucagugcuaucgu

SEQ ID NO: 1108331 - RNA, 19 nt, Artificial Sequence
  Description of Artificial Sequence: Synthetic oligonucleotide
  Antisense strand to SEQ ID NO: 1108330
acgauagcacugaugaggc

SEQ ID NO: 1108332 - RNA, 19 nt, Artificial Sequence
  Description of Artificial Sequence: Synthetic oligonucleotide
  Sense strand starting at position 3396 of SEQ ID NO: 915816
agugcuaucgugagguuga

SEQ ID NO: 1108333 - RNA, 19 nt, Artificial Sequence
  Description of Artificial Sequence: Synthetic oligonucleotide
  Antisense strand to SEQ ID NO: 1108332
ucaaccucacgauagcacu

SEQ ID NO: 1108334 - RNA, 19 nt, Artificial Sequence
  Description of Artificial Sequence: Synthetic oligonucleotide
  Sense strand starting at position 3461 of SEQ ID NO: 915816
ggguucccuucuuuacuua

SEQ ID NO: 1108335 - RNA, 19 nt, Artificial Sequence
  Description of Artificial Sequence: Synthetic oligonucleotide
  Antisense strand to SEQ ID NO: 1108334
uaaguaaagaagggaaccc

SEQ ID NO: 1108336 - RNA, 19 nt, Artificial Sequence
  Description of Artificial Sequence: Synthetic oligonucleotide
  Sense strand starting at position 3553 of SEQ ID NO: 915816
accagaaguucuuaaacag

SEQ ID NO: 1108337 - RNA, 19 nt, Artificial Sequence
  Description of Artificial Sequence: Synthetic oligonucleotide
  Antisense strand to SEQ ID NO: 1108336
cuguuuaagaacuucuggu

SEQ ID NO: 1108338 - RNA, 19 nt, Artificial Sequence
  Description of Artificial Sequence: Synthetic oligonucleotide
  Sense strand starting at position 3560 of SEQ ID NO: 915816
guucuuaaacagugauucu

SEQ ID NO: 1108339 - RNA, 19 nt, Artificial Sequence
  Description of Artificial Sequence: Synthetic oligonucleotide
  Antisense strand to SEQ ID NO: 1108338
agaaucacuguuuaagaac

SEQ ID NO: 1108340 - RNA, 19 nt, Artificial Sequence
  Description of Artificial Sequence: Synthetic oligonucleotide
  Sense strand starting at position 3572 of SEQ ID NO: 915816
ugauucucagaagguguau

SEQ ID NO: 1108341 - RNA, 19 nt, Artificial Sequence
  Description of Artificial Sequence: Synthetic oligonucleotide
  Antisense strand to SEQ ID NO: 1108340
auacaccuucugagaauca

SEQ ID NO: 1108342 - RNA, 19 nt, Artificial Sequence
  Description of Artificial Sequence: Synthetic oligonucleotide
  Sense strand starting at position 3574 of SEQ ID NO: 915816
auucucagaagguguauga

SEQ ID NO: 1108343 - RNA, 19 nt, Artificial Sequence
  Description of Artificial Sequence: Synthetic oligonucleotide
  Antisense strand to SEQ ID NO: 1108342
ucauacaccuucugagaau

SEQ ID NO: 1108344 - RNA, 19 nt, Artificial Sequence
  Description of Artificial Sequence: Synthetic oligonucleotide
  Sense strand starting at position 3689 of SEQ ID NO: 915816
ugccuaaggugauccuuaa

SEQ ID NO: 1108345 - RNA, 19 nt, Artificial Sequence
  Description of Artificial Sequence: Synthetic oligonucleotide
  Antisense strand to SEQ ID NO: 1108344
uuaaggaucaccuuaggca

SEQ ID NO: 1108346 - RNA, 19 nt, Artificial Sequence
  Description of Artificial Sequence: Synthetic oligonucleotide
  Sense strand starting at position 3720 of SEQ ID NO: 915816
gguuuaccugcugagaaug

SEQ ID NO: 1108347 - RNA, 19 nt, Artificial Sequence
  Description of Artificial Sequence: Synthetic oligonucleotide
  Antisense strand to SEQ ID NO: 1108346
cauucucagcagguaaacc

SEQ ID NO: 1108348 - RNA, 19 nt, Artificial Sequence
  Description of Artificial Sequence: Synthetic oligonucleotide
  Sense strand starting at position 3750 of SEQ ID NO: 915816
cucagaguuggguguauuu

SEQ ID NO: 1108349 - RNA, 19 nt, Artificial Sequence
  Description of Artificial Sequence: Synthetic oligonucleotide
  Antisense strand to SEQ ID NO: 1108348
aaauacacccaacucugag

SEQ ID NO: 1108350 - RNA, 19 nt, Artificial Sequence
  Description of Artificial Sequence: Synthetic oligonucleotide
  Sense strand starting at position 3827 of SEQ ID NO: 915816
uuucuacuacuugauguua

SEQ ID NO: 1108351 - RNA, 19 nt, Artificial Sequence
  Description of Artificial Sequence: Synthetic oligonucleotide
  Antisense strand to SEQ ID NO: 1108350
uaacaucaaguaguagaaa

SEQ ID NO: 1108352 - RNA, 19 nt, Artificial Sequence
  Description of Artificial Sequence: Synthetic oligonucleotide
  Sense strand starting at position 3842 of SEQ ID NO: 915816
guuagaauuucccugugcu

SEQ ID NO: 1108353 - RNA, 19 nt, Artificial Sequence
  Description of Artificial Sequence: Synthetic oligonucleotide
  Antisense strand to SEQ ID NO: 1108352
agcacagggaaauucuaac

SEQ ID NO: 1108354 - RNA, 19 nt, Artificial Sequence
  Description of Artificial Sequence: Synthetic oligonucleotide
  Sense strand starting at position 3843 of SEQ ID NO: 915816
uuagaauuucccugugcua

SEQ ID NO: 1108355 - RNA, 19 nt, Artificial Sequence
  Description of Artificial Sequence: Synthetic oligonucleotide
  Antisense strand to SEQ ID NO: 1108354
uagcacagggaaauucuaa

SEQ ID NO: 1108356 - RNA, 19 nt, Artificial Sequence
  Description of Artificial Sequence: Synthetic oligonucleotide
  Sense strand starting at position 3941 of SEQ ID NO: 915816
gccagucugacugggagau

SEQ ID NO: 1108357 - RNA, 19 nt, Artificial Sequence
  Description of Artificial Sequence: Synthetic oligonucleotide
  Antisense strand to SEQ ID NO: 1108356
aucucccagucagacuggc

SEQ ID NO: 1108358 - RNA, 19 nt, Artificial Sequence
  Description of Artificial Sequence: Synthetic oligonucleotide
  Sense strand starting at position 3970 of SEQ ID NO: 915816
gggcuuaguuaugcuggga

SEQ ID NO: 1108359 - RNA, 19 nt, Artificial Sequence
  Description of Artificial Sequence: Synthetic oligonucleotide
  Antisense strand to SEQ ID NO: 1108358
ucccagcauaacuaagccc

SEQ ID NO: 1108360 - RNA, 19 nt, Artificial Sequence
  Description of Artificial Sequence: Synthetic oligonucleotide
  Sense strand starting at position 3973 of SEQ ID NO: 915816
cuuaguuaugcugggaaag

SEQ ID NO: 1108361 - RNA, 19 nt, Artificial Sequence
  Description of Artificial Sequence: Synthetic oligonucleotide
  Antisense strand to SEQ ID NO: 1108360
cuuucccagcauaacuaag

SEQ ID NO: 1108362 - RNA, 19 nt, Artificial Sequence
  Description of Artificial Sequence: Synthetic oligonucleotide
  Sense strand starting at position 357 of SEQ ID NO: 915817
ucaguaguaagcugguauc

SEQ ID NO: 1108363 - RNA, 19 nt, Artificial Sequence
  Description of Artificial Sequence: Synthetic oligonucleotide
  Antisense strand to SEQ ID NO: 1108362
gauaccagcuuacuacuga

SEQ ID NO: 1108364 - RNA, 19 nt, Artificial Sequence
  Description of Artificial Sequence: Synthetic oligonucleotide
  Sense strand starting at position 490 of SEQ ID NO: 915817
guuaaucaccucuacguaa

SEQ ID NO: 1108365 - RNA, 19 nt, Artificial Sequence
  Description of Artificial Sequence: Synthetic oligonucleotide
  Antisense strand to SEQ ID NO: 1108364
uuacguagaggugauuaac

SEQ ID NO: 1108366 - RNA, 19 nt, Artificial Sequence
  Description of Artificial Sequence: Synthetic oligonucleotide
  Sense strand starting at position 497 of SEQ ID NO: 915817
accucuacguaacgaauua

SEQ ID NO: 1108367 - RNA, 19 nt, Artificial Sequence
  Description of Artificial Sequence: Synthetic oligonucleotide
  Antisense strand to SEQ ID NO: 1108366
uaauucguuacguagaggu

SEQ ID NO: 1108368 - RNA, 19 nt, Artificial Sequence
  Description of Artificial Sequence: Synthetic oligonucleotide
  Sense strand starting at position 619 of SEQ ID NO: 915817
uaagcacgacugugaugaa

SEQ ID NO: 1108369 - RNA, 19 nt, Artificial Sequence
  Description of Artificial Sequence: Synthetic oligonucleotide
  Antisense strand to SEQ ID NO: 1108368
uucaucacagucgugcuua

SEQ ID NO: 1108370 - RNA, 19 nt, Artificial Sequence
  Description of Artificial Sequence: Synthetic oligonucleotide
  Sense strand starting at position 620 of SEQ ID NO: 915817
aagcacgacugugaugaaa

SEQ ID NO: 1108371 - RNA, 19 nt, Artificial Sequence
  Description of Artificial Sequence: Synthetic oligonucleotide
  Antisense strand to SEQ ID NO: 1108370
uuucaucacagucgugcuu

SEQ ID NO: 1108372 - RNA, 19 nt, Artificial Sequence
  Description of Artificial Sequence: Synthetic oligonucleotide
  Sense strand starting at position 622 of SEQ ID NO: 915817
gcacgacugugaugaaaua

SEQ ID NO: 1108373 - RNA, 19 nt, Artificial Sequence
  Description of Artificial Sequence: Synthetic oligonucleotide
  Antisense strand to SEQ ID NO: 1108372
uauuucaucacagucgugc

SEQ ID NO: 1108374 - RNA, 19 nt, Artificial Sequence
  Description of Artificial Sequence: Synthetic oligonucleotide
  Sense strand starting at position 735 of SEQ ID NO: 915817
uguguuuccuaucuagcaa

SEQ ID NO: 1108375 - RNA, 19 nt, Artificial Sequence
  Description of Artificial Sequence: Synthetic oligonucleotide
  Antisense strand to SEQ ID NO: 1108374
uugcuagauaggaaacaca

SEQ ID NO: 1108376 - RNA, 19 nt, Artificial Sequence
  Description of Artificial Sequence: Synthetic oligonucleotide
  Sense strand starting at position 971 of SEQ ID NO: 915817
gaggaaaucuuagucugau

SEQ ID NO: 1108377 - RNA, 19 nt, Artificial Sequence
  Description of Artificial Sequence: Synthetic oligonucleotide
  Antisense strand to SEQ ID NO: 1108376
aucagacuaagauuuccuc

SEQ ID NO: 1108378 - RNA, 19 nt, Artificial Sequence
  Description of Artificial Sequence: Synthetic oligonucleotide
  Sense strand starting at position 972 of SEQ ID NO: 915817
aggaaaucuuagucugaug

SEQ ID NO: 1108379 - RNA, 19 nt, Artificial Sequence
  Description of Artificial Sequence: Synthetic oligonucleotide
  Antisense strand to SEQ ID NO: 1108378
caucagacuaagauuuccu

SEQ ID NO: 1108380 - RNA, 19 nt, Artificial Sequence
  Description of Artificial Sequence: Synthetic oligonucleotide
  Sense strand starting at position 974 of SEQ ID NO: 915817
gaaaucuuagucugaugau

SEQ ID NO: 1108381 - RNA, 19 nt, Artificial Sequence
  Description of Artificial Sequence: Synthetic oligonucleotide
  Antisense strand to SEQ ID NO: 1108380
aucaucagacuaagauuuc

SEQ ID NO: 1108382 - RNA, 19 nt, Artificial Sequence
  Description of Artificial Sequence: Synthetic oligonucleotide
  Sense strand starting at position 983 of SEQ ID NO: 915817
gucugaugauuccugugau

SEQ ID NO: 1108383 - RNA, 19 nt, Artificial Sequence
  Description of Artificial Sequence: Synthetic oligonucleotide
  Antisense strand to SEQ ID NO: 1108382
aucacaggaaucaucagac

SEQ ID NO: 1108384 - RNA, 19 nt, Artificial Sequence
  Description of Artificial Sequence: Synthetic oligonucleotide
  Sense strand starting at position 984 of SEQ ID NO: 915817
ucugaugauuccugugaua

SEQ ID NO: 1108385 - RNA, 19 nt, Artificial Sequence
  Description of Artificial Sequence: Synthetic oligonucleotide
  Antisense strand to SEQ ID NO: 1108384
uaucacaggaaucaucaga

SEQ ID NO: 1108386 - RNA, 19 nt, Artificial Sequence
  Description of Artificial Sequence: Synthetic oligonucleotide
  Sense strand starting at position 986 of SEQ ID NO: 915817
ugaugauuccugugauaug

SEQ ID NO: 1108387 - RNA, 19 nt, Artificial Sequence
  Description of Artificial Sequence: Synthetic oligonucleotide
  Antisense strand to SEQ ID NO: 1108386
cauaucacaggaaucauca

SEQ ID NO: 1108388 - RNA, 19 nt, Artificial Sequence
  Description of Artificial Sequence: Synthetic oligonucleotide
  Sense strand starting at position 1138 of SEQ ID NO: 915817
uauaaagcguuuccacaga

SEQ ID NO: 1108389 - RNA, 19 nt, Artificial Sequence
  Description of Artificial Sequence: Synthetic oligonucleotide
  Antisense strand to SEQ ID NO: 1108388
ucuguggaaacgcuuuaua

SEQ ID NO: 1108390 - RNA, 19 nt, Artificial Sequence
  Description of Artificial Sequence: Synthetic oligonucleotide
  Sense strand starting at position 2206 of SEQ ID NO: 915817
acagauaucucgugaauga

SEQ ID NO: 1108391 - RNA, 19 nt, Artificial Sequence
  Description of Artificial Sequence: Synthetic oligonucleotide
  Antisense strand to SEQ ID NO: 1108390
ucauucacgagauaucugu

SEQ ID NO: 1108392 - RNA, 19 nt, Artificial Sequence
  Description of Artificial Sequence: Synthetic oligonucleotide
  Sense strand starting at position 2210 of SEQ ID NO: 915817
auaucucgugaaugagaac

SEQ ID NO: 1108393 - RNA, 19 nt, Artificial Sequence
  Description of Artificial Sequence: Synthetic oligonucleotide
  Antisense strand to SEQ ID NO: 1108392
guucucauucacgagauau

SEQ ID NO: 1108394 - RNA, 19 nt, Artificial Sequence
  Description of Artificial Sequence: Synthetic oligonucleotide
  Sense strand starting at position 2505 of SEQ ID NO: 915817
guaagaaucuguucuacgg

SEQ ID NO: 1108395 - RNA, 19 nt, Artificial Sequence
  Description of Artificial Sequence: Synthetic oligonucleotide
  Antisense strand to SEQ ID NO: 1108394
ccguagaacagauucuuac

SEQ ID NO: 1108396 - RNA, 19 nt, Artificial Sequence
  Description of Artificial Sequence: Synthetic oligonucleotide
  Sense strand starting at position 2509 of SEQ ID NO: 915817
gaaucuguucuacggucga

SEQ ID NO: 1108397 - RNA, 19 nt, Artificial Sequence
  Description of Artificial Sequence: Synthetic oligonucleotide
  Antisense strand to SEQ ID NO: 1108396
ucgaccguagaacagauuc

SEQ ID NO: 1108398 - RNA, 19 nt, Artificial Sequence
  Description of Artificial Sequence: Synthetic oligonucleotide
  Sense strand starting at position 2911 of SEQ ID NO: 915817
aucagaaauuaacaggagu

SEQ ID NO: 1108399 - RNA, 19 nt, Artificial Sequence
  Description of Artificial Sequence: Synthetic oligonucleotide
  Antisense strand to SEQ ID NO: 1108398
acuccuguuaauuucugau

SEQ ID NO: 1108400 - RNA, 19 nt, Artificial Sequence
  Description of Artificial Sequence: Synthetic oligonucleotide
  Sense strand starting at position 2922 of SEQ ID NO: 915817
acaggaguaccuugagucu

SEQ ID NO: 1108401 - RNA, 19 nt, Artificial Sequence
  Description of Artificial Sequence: Synthetic oligonucleotide
  Antisense strand to SEQ ID NO: 1108400
agacucaagguacuccugu

SEQ ID NO: 1108402 - RNA, 19 nt, Artificial Sequence
  Description of Artificial Sequence: Synthetic oligonucleotide
  Sense strand starting at position 2929 of SEQ ID NO: 915817
uaccuugagucuugguguu

SEQ ID NO: 1108403 - RNA, 19 nt, Artificial Sequence
  Description of Artificial Sequence: Synthetic oligonucleotide
  Antisense strand to SEQ ID NO: 1108402
aacaccaagacucaaggua

SEQ ID NO: 1108404 - RNA, 19 nt, Artificial Sequence
  Description of Artificial Sequence: Synthetic oligonucleotide
  Sense strand starting at position 3536 of SEQ ID NO: 915817
uuauauucugccugucacu

SEQ ID NO: 1108405 - RNA, 19 nt, Artificial Sequence
  Description of Artificial Sequence: Synthetic oligonucleotide
  Antisense strand to SEQ ID NO: 1108404
agugacaggcagaauauaa

SEQ ID NO: 1108406 - RNA, 19 nt, Artificial Sequence
  Description of Artificial Sequence: Synthetic oligonucleotide
  Sense strand starting at position 3787 of SEQ ID NO: 915817
gccuguccguuccaugaau

SEQ ID NO: 1108407 - RNA, 19 nt, Artificial Sequence
  Description of Artificial Sequence: Synthetic oligonucleotide
  Antisense strand to SEQ ID NO: 1108406
auucauggaacggacaggc

SEQ ID NO: 1108408 - RNA, 19 nt, Artificial Sequence
  Description of Artificial Sequence: Synthetic oligonucleotide
  Sense strand starting at position 3934 of SEQ ID NO: 915817
cauguaagcucuuccucga

SEQ ID NO: 1108409 - RNA, 19 nt, Artificial Sequence
  Description of Artificial Sequence: Synthetic oligonucleotide
  Antisense strand to SEQ ID NO: 1108408
ucgaggaagagcuuacaug

SEQ ID NO: 1108410 - RNA, 19 nt, Artificial Sequence
  Description of Artificial Sequence: Synthetic oligonucleotide
  Sense strand starting at position 3937 of SEQ ID NO: 915817
guaagcucuuccucgaaua

SEQ ID NO: 1108411 - RNA, 19 nt, Artificial Sequence
  Description of Artificial Sequence: Synthetic oligonucleotide
  Antisense strand to SEQ ID NO: 1108410
uauucgaggaagagcuuac

SEQ ID NO: 1108412 - RNA, 19 nt, Artificial Sequence
  Description of Artificial Sequence: Synthetic oligonucleotide
  Sense strand starting at position 19 of SEQ ID NO: 915818
ccgugugcuuugcugcaga

SEQ ID NO: 1108413 - RNA, 19 nt, Artificial Sequence
  Description of Artificial Sequence: Synthetic oligonucleotide
  Antisense strand to SEQ ID NO: 1108412
ucugcagcaaagcacacgg

SEQ ID NO: 1108414 - RNA, 19 nt, Artificial Sequence
  Description of Artificial Sequence: Synthetic oligonucleotide
  Sense strand starting at position 74 of SEQ ID NO: 915818
ugagccaugagguguggaa

SEQ ID NO: 1108415 - RNA, 19 nt, Artificial Sequence
  Description of Artificial Sequence: Synthetic oligonucleotide
  Antisense strand to SEQ ID NO: 1108414
uuccacaccucauggcuca

SEQ ID NO: 1108416 - RNA, 19 nt, Artificial Sequence
  Description of Artificial Sequence: Synthetic oligonucleotide
  Sense strand starting at position 86 of SEQ ID NO: 915818
uguggaaacguuugugaac

SEQ ID NO: 1108417 - RNA, 19 nt, Artificial Sequence
  Description of Artificial Sequence: Synthetic oligonucleotide
  Antisense strand to SEQ ID NO: 1108416
guucacaaacguuuccaca

SEQ ID NO: 1108418 - RNA, 19 nt, Artificial Sequence
  Description of Artificial Sequence: Synthetic oligonucleotide
  Sense strand starting at position 87 of SEQ ID NO: 915818
guggaaacguuugugaacu

SEQ ID NO: 1108419 - RNA, 19 nt, Artificial Sequence
  Description of Artificial Sequence: Synthetic oligonucleotide
  Antisense strand to SEQ ID NO: 1108418
aguucacaaacguuuccac

SEQ ID NO: 1108420 - RNA, 19 nt, Artificial Sequence
  Description of Artificial Sequence: Synthetic oligonucleotide
  Sense strand starting at position 88 of SEQ ID NO: 915818
uggaaacguuugugaacug

SEQ ID NO: 1108421 - RNA, 19 nt, Artificial Sequence
  Description of Artificial Sequence: Synthetic oligonucleotide
  Antisense strand to SEQ ID NO: 1108420
caguucacaaacguuucca

SEQ ID NO: 1108422 - RNA, 19 nt, Artificial Sequence
  Description of Artificial Sequence: Synthetic oligonucleotide
  Sense strand starting at position 568 of SEQ ID NO: 915818
cagcacugaucagggagaa

SEQ ID NO: 1108423 - RNA, 19 nt, Artificial Sequence
  Description of Artificial Sequence: Synthetic oligonucleotide
  Antisense strand to SEQ ID NO: 1108422
uucucccugaucagugcug

SEQ ID NO: 1108424 - RNA, 19 nt, Artificial Sequence
  Description of Artificial Sequence: Synthetic oligonucleotide
  Sense strand starting at position 671 of SEQ ID NO: 915818
gucacagcuuuauuaauga

SEQ ID NO: 1108425 - RNA, 19 nt, Artificial Sequence
  Description of Artificial Sequence: Synthetic oligonucleotide
  Antisense strand to SEQ ID NO: 1108424
ucauuaauaaagcugugac

SEQ ID NO: 1108426 - RNA, 19 nt, Artificial Sequence
  Description of Artificial Sequence: Synthetic oligonucleotide
  Sense strand starting at position 712 of SEQ ID NO: 915818
ggagcuccucaaugagagu

SEQ ID NO: 1108427 - RNA, 19 nt, Artificial Sequence
  Description of Artificial Sequence: Synthetic oligonucleotide
  Antisense strand to SEQ ID NO: 1108426
acucucauugaggagcucc

SEQ ID NO: 1108428 - RNA, 19 nt, Artificial Sequence
  Description of Artificial Sequence: Synthetic oligonucleotide
  Sense strand starting at position 850 of SEQ ID NO: 915818
gugugagggccgccucauu

SEQ ID NO: 1108429 - RNA, 19 nt, Artificial Sequence
  Description of Artificial Sequence: Synthetic oligonucleotide
  Antisense strand to SEQ ID NO: 1108428
aaugaggcggcccucacac

SEQ ID NO: 1108430 - RNA, 19 nt, Artificial Sequence
  Description of Artificial Sequence: Synthetic oligonucleotide
  Sense strand starting at position 997 of SEQ ID NO: 915818
gcguguagccuuucugguu

SEQ ID NO: 1108431 - RNA, 19 nt, Artificial Sequence
  Description of Artificial Sequence: Synthetic oligonucleotide
  Antisense strand to SEQ ID NO: 1108430
aaccagaaaggcuacacgc

SEQ ID NO: 1108432 - RNA, 19 nt, Artificial Sequence
  Description of Artificial Sequence: Synthetic oligonucleotide
  Sense strand starting at position 1213 of SEQ ID NO: 915818
cgucgucaccgccgugaua

SEQ ID NO: 1108433 - RNA, 19 nt, Artificial Sequence
  Description of Artificial Sequence: Synthetic oligonucleotide
  Antisense strand to SEQ ID NO: 1108432
uaucacggcggugacgacg

SEQ ID NO: 1108434 - RNA, 19 nt, Artificial Sequence
  Description of Artificial Sequence: Synthetic oligonucleotide
  Sense strand starting at position 1215 of SEQ ID NO: 915818
ucgucaccgccgugauaca

SEQ ID NO: 1108435 - RNA, 19 nt, Artificial Sequence
  Description of Artificial Sequence: Synthetic oligonucleotide
  Antisense strand to SEQ ID NO: 1108434
uguaucacggcggugacga

SEQ ID NO: 1108436 - RNA, 19 nt, Artificial Sequence
  Description of Artificial Sequence: Synthetic oligonucleotide
  Sense strand starting at position 1765 of SEQ ID NO: 915818
gcaccuggucacgguagaa

SEQ ID NO: 1108437 - RNA, 19 nt, Artificial Sequence
  Description of Artificial Sequence: Synthetic oligonucleotide
  Antisense strand to SEQ ID NO: 1108436
uucuaccgugaccaggugc

SEQ ID NO: 1108438 - RNA, 19 nt, Artificial Sequence
  Description of Artificial Sequence: Synthetic oligonucleotide
  Sense strand starting at position 1927 of SEQ ID NO: 915818
ccgcgaucuaccugcgaac

SEQ ID NO: 1108439 - RNA, 19 nt, Artificial Sequence
  Description of Artificial Sequence: Synthetic oligonucleotide
  Antisense strand to SEQ ID NO: 1108438
guucgcagguagaucgcgg

SEQ ID NO: 1108440 - RNA, 19 nt, Artificial Sequence
  Description of Artificial Sequence: Synthetic oligonucleotide
  Sense strand starting at position 1983 of SEQ ID NO: 915818
cgauuacuuccgguucgca

SEQ ID NO: 1108441 - RNA, 19 nt, Artificial Sequence
  Description of Artificial Sequence: Synthetic oligonucleotide
  Antisense strand to SEQ ID NO: 1108440
ugcgaaccggaaguaaucg

SEQ ID NO: 1108442 - RNA, 19 nt, Artificial Sequence
  Description of Artificial Sequence: Synthetic oligonucleotide
  Sense strand starting at position 2027 of SEQ ID NO: 915818
ucgcaaagcuuccgaggau

SEQ ID NO: 1108443 - RNA, 19 nt, Artificial Sequence
  Description of Artificial Sequence: Synthetic oligonucleotide
  Antisense strand to SEQ ID NO: 1108442
auccucggaagcuuugcga

SEQ ID NO: 1108444 - RNA, 19 nt, Artificial Sequence
  Description of Artificial Sequence: Synthetic oligonucleotide
  Sense strand starting at position 2028 of SEQ ID NO: 915818
cgcaaagcuuccgaggauu

SEQ ID NO: 1108445 - RNA, 19 nt, Artificial Sequence
  Description of Artificial Sequence: Synthetic oligonucleotide
  Antisense strand to SEQ ID NO: 1108444
aauccucggaagcuuugcg

SEQ ID NO: 1108446 - RNA, 19 nt, Artificial Sequence
  Description of Artificial Sequence: Synthetic oligonucleotide
  Sense strand starting at position 2030 of SEQ ID NO: 915818
caaagcuuccgaggauucu

SEQ ID NO: 1108447 - RNA, 19 nt, Artificial Sequence
  Description of Artificial Sequence: Synthetic oligonucleotide
  Antisense strand to SEQ ID NO: 1108446
agaauccucggaagcuuug

SEQ ID NO: 1108448 - RNA, 19 nt, Artificial Sequence
  Description of Artificial Sequence: Synthetic oligonucleotide
  Sense strand starting at position 2036 of SEQ ID NO: 915818
uuccgaggauucucggcaa

SEQ ID NO: 1108449 - RNA, 19 nt, Artificial Sequence
  Description of Artificial Sequence: Synthetic oligonucleotide
  Antisense strand to SEQ ID NO: 1108448
uugccgagaauccucggaa

SEQ ID NO: 1108450 - RNA, 19 nt, Artificial Sequence
  Description of Artificial Sequence: Synthetic oligonucleotide
  Sense strand starting at position 2039 of SEQ ID NO: 915818
cgaggauucucggcaauuu

SEQ ID NO: 1108451 - RNA, 19 nt, Artificial Sequence
  Description of Artificial Sequence: Synthetic oligonucleotide
  Antisense strand to SEQ ID NO: 1108450
aaauugccgagaauccucg

SEQ ID NO: 1108452 - RNA, 19 nt, Artificial Sequence
  Description of Artificial Sequence: Synthetic oligonucleotide
  Sense strand starting at position 2271 of SEQ ID NO: 915818
uacaaugugcuguggcaua

SEQ ID NO: 1108453 - RNA, 19 nt, Artificial Sequence
  Description of Artificial Sequence: Synthetic oligonucleotide
  Antisense strand to SEQ ID NO: 1108452
uaugccacagcacauugua

SEQ ID NO: 1108454 - RNA, 19 nt, Artificial Sequence
  Description of Artificial Sequence: Synthetic oligonucleotide
  Sense strand starting at position 2726 of SEQ ID NO: 915818
agcagcauuuaagaaauau

SEQ ID NO: 1108455 - RNA, 19 nt, Artificial Sequence
  Description of Artificial Sequence: Synthetic oligonucleotide
  Antisense strand to SEQ ID NO: 1108454
auauuucuuaaaugcugcu

SEQ ID NO: 1108456 - RNA, 19 nt, Artificial Sequence
  Description of Artificial Sequence: Synthetic oligonucleotide
  Sense strand starting at position 2737 of SEQ ID NO: 915818
agaaauaucugagcuccua

SEQ ID NO: 1108457 - RNA, 19 nt, Artificial Sequence
  Description of Artificial Sequence: Synthetic oligonucleotide
  Antisense strand to SEQ ID NO: 1108456
uaggagcucagauauuucu

SEQ ID NO: 1108458 - RNA, 19 nt, Artificial Sequence
  Description of Artificial Sequence: Synthetic oligonucleotide
  Sense strand starting at position 2889 of SEQ ID NO: 915818
gggucccuguucuaauaga

SEQ ID NO: 1108459 - RNA, 19 nt, Artificial Sequence
  Description of Artificial Sequence: Synthetic oligonucleotide
  Antisense strand to SEQ ID NO: 1108458
ucuauuagaacagggaccc

SEQ ID NO: 1108460 - RNA, 19 nt, Artificial Sequence
  Description of Artificial Sequence: Synthetic oligonucleotide
  Sense strand starting at position 2940 of SEQ ID NO: 915818
gaaccaaacugugaguguu

SEQ ID NO: 1108461 - RNA, 19 nt, Artificial Sequence
  Description of Artificial Sequence: Synthetic oligonucleotide
  Antisense strand to SEQ ID NO: 1108460
aacacucacaguuugguuc

SEQ ID NO: 1108462 - RNA, 19 nt, Artificial Sequence
  Description of Artificial Sequence: Synthetic oligonucleotide
  Sense strand starting at position 2943 of SEQ ID NO: 915818
ccaaacugugaguguucuu

SEQ ID NO: 1108463 - RNA, 19 nt, Artificial Sequence
  Description of Artificial Sequence: Synthetic oligonucleotide
  Antisense strand to SEQ ID NO: 1108462
aagaacacucacaguuugg

SEQ ID NO: 1108464 - RNA, 19 nt, Artificial Sequence
  Description of Artificial Sequence: Synthetic oligonucleotide
  Sense strand starting at position 2948 of SEQ ID NO: 915818
cugugaguguucuuugcau

SEQ ID NO: 1108465 - RNA, 19 nt, Artificial Sequence
  Description of Artificial Sequence: Synthetic oligonucleotide
  Antisense strand to SEQ ID NO: 1108464
augcaaagaacacucacag

SEQ ID NO: 1108466 - RNA, 19 nt, Artificial Sequence
  Description of Artificial Sequence: Synthetic oligonucleotide
  Sense strand starting at position 2952 of SEQ ID NO: 915818
gaguguucuuugcaucccu

SEQ ID NO: 1108467 - RNA, 19 nt, Artificial Sequence
  Description of Artificial Sequence: Synthetic oligonucleotide
  Antisense strand to SEQ ID NO: 1108466
agggaugcaaagaacacuc

SEQ ID NO: 1108468 - RNA, 19 nt, Artificial Sequence
  Description of Artificial Sequence: Synthetic oligonucleotide
  Sense strand starting at position 2971 of SEQ ID NO: 915818
gcuacuacugguggucuaa

SEQ ID NO: 1108469 - RNA, 19 nt, Artificial Sequence
  Description of Artificial Sequence: Synthetic oligonucleotide
  Antisense strand to SEQ ID NO: 1108468
uuagaccaccaguaguagc

SEQ ID NO: 1108470 - RNA, 19 nt, Artificial Sequence
  Description of Artificial Sequence: Synthetic oligonucleotide
  Sense strand starting at position 3080 of SEQ ID NO: 915818
gaucacaagucagaugaga

SEQ ID NO: 1108471 - RNA, 19 nt, Artificial Sequence
  Description of Artificial Sequence: Synthetic oligonucleotide
  Antisense strand to SEQ ID NO: 1108470
ucucaucugacuugugauc

SEQ ID NO: 1108472 - RNA, 19 nt, Artificial Sequence
  Description of Artificial Sequence: Synthetic oligonucleotide
  Sense strand starting at position 3238 of SEQ ID NO: 915818
guccucuaggcuugaaaua

SEQ ID NO: 1108473 - RNA, 19 nt, Artificial Sequence
  Description of Artificial Sequence: Synthetic oligonucleotide
  Antisense strand to SEQ ID NO: 1108472
uauuucaagccuagaggac

SEQ ID NO: 1108474 - RNA, 19 nt, Artificial Sequence
  Description of Artificial Sequence: Synthetic oligonucleotide
  Sense strand starting at position 3239 of SEQ ID NO: 915818
uccucuaggcuugaaauau

SEQ ID NO: 1108475 - RNA, 19 nt, Artificial Sequence
  Description of Artificial Sequence: Synthetic oligonucleotide
  Antisense strand to SEQ ID NO: 1108474
auauuucaagccuagagga

SEQ ID NO: 1108476 - RNA, 19 nt, Artificial Sequence
  Description of Artificial Sequence: Synthetic oligonucleotide
  Sense strand starting at position 3290 of SEQ ID NO: 915818
aggucucacucacgucauu

SEQ ID NO: 1108477 - RNA, 19 nt, Artificial Sequence
  Description of Artificial Sequence: Synthetic oligonucleotide
  Antisense strand to SEQ ID NO: 1108476
aaugacgugagugagaccu

SEQ ID NO: 1108478 - RNA, 19 nt, Artificial Sequence
  Description of Artificial Sequence: Synthetic oligonucleotide
  Sense strand starting at position 3940 of SEQ ID NO: 915818
cugggaugcuauuguaucu

SEQ ID NO: 1108479 - RNA, 19 nt, Artificial Sequence
  Description of Artificial Sequence: Synthetic oligonucleotide
  Antisense strand to SEQ ID NO: 1108478
agauacaauagcaucccag

SEQ ID NO: 1108480 - RNA, 19 nt, Artificial Sequence
  Description of Artificial Sequence: Synthetic oligonucleotide
  Sense strand starting at position 3947 of SEQ ID NO: 915818
gcuauuguaucuguccaca

SEQ ID NO: 1108481 - RNA, 19 nt, Artificial Sequence
  Description of Artificial Sequence: Synthetic oligonucleotide
  Antisense strand to SEQ ID NO: 1108480
uguggacagauacaauagc

SEQ ID NO: 1108482 - RNA, 19 nt, Artificial Sequence
  Description of Artificial Sequence: Synthetic oligonucleotide
  Sense strand starting at position 169 of SEQ ID NO: 915819
ucaacagaucuucggcuuu

SEQ ID NO: 1108483 - RNA, 19 nt, Artificial Sequence
  Description of Artificial Sequence: Synthetic oligonucleotide
  Antisense strand to SEQ ID NO: 1108482
aaagccgaagaucuguuga

SEQ ID NO: 1108484 - RNA, 19 nt, Artificial Sequence
  Description of Artificial Sequence: Synthetic oligonucleotide
  Sense strand starting at position 486 of SEQ ID NO: 915819
ccaggagaccuggguucuu

SEQ ID NO: 1108485 - RNA, 19 nt, Artificial Sequence
  Description of Artificial Sequence: Synthetic oligonucleotide
  Antisense strand to SEQ ID NO: 1108484
aagaacccaggucuccugg

SEQ ID NO: 1108486 - RNA, 19 nt, Artificial Sequence
  Description of Artificial Sequence: Synthetic oligonucleotide
  Sense strand starting at position 603 of SEQ ID NO: 915819
ggaucuuucuagcuagggu

SEQ ID NO: 1108487 - RNA, 19 nt, Artificial Sequence
  Description of Artificial Sequence: Synthetic oligonucleotide
  Antisense strand to SEQ ID NO: 1108486
acccuagcuagaaagaucc

SEQ ID NO: 1108488 - RNA, 19 nt, Artificial Sequence
  Description of Artificial Sequence: Synthetic oligonucleotide
  Sense strand starting at position 689 of SEQ ID NO: 915819
caggcacuggccugaguau

SEQ ID NO: 1108489 - RNA, 19 nt, Artificial Sequence
  Description of Artificial Sequence: Synthetic oligonucleotide
  Antisense strand to SEQ ID NO: 1108488
auacucaggccagugccug

SEQ ID NO: 1108490 - RNA, 19 nt, Artificial Sequence
  Description of Artificial Sequence: Synthetic oligonucleotide
  Sense strand starting at position 690 of SEQ ID NO: 915819
aggcacuggccugaguauu

SEQ ID NO: 1108491 - RNA, 19 nt, Artificial Sequence
  Description of Artificial Sequence: Synthetic oligonucleotide
  Antisense strand to SEQ ID NO: 1108490
aauacucaggccagugccu

SEQ ID NO: 1108492 - RNA, 19 nt, Artificial Sequence
  Description of Artificial Sequence: Synthetic oligonucleotide
  Sense strand starting at position 771 of SEQ ID NO: 915819
gggugcgugagcuuucuua

SEQ ID NO: 1108493 - RNA, 19 nt, Artificial Sequence
  Description of Artificial Sequence: Synthetic oligonucleotide
  Antisense strand to SEQ ID NO: 1108492
uaagaaagcucacgcaccc

SEQ ID NO: 1108494 - RNA, 19 nt, Artificial Sequence
  Description of Artificial Sequence: Synthetic oligonucleotide
  Sense strand starting at position 779 of SEQ ID NO: 915819
gagcuuucuuaggugcaca

SEQ ID NO: 1108495 - RNA, 19 nt, Artificial Sequence
  Description of Artificial Sequence: Synthetic oligonucleotide
  Antisense strand to SEQ ID NO: 1108494
ugugcaccuaagaaagcuc

SEQ ID NO: 1108496 - RNA, 19 nt, Artificial Sequence
  Description of Artificial Sequence: Synthetic oligonucleotide
  Sense strand starting at position 810 of SEQ ID NO: 915819
gaaugaggauuugaauccu

SEQ ID NO: 1108497 - RNA, 19 nt, Artificial Sequence
  Description of Artificial Sequence: Synthetic oligonucleotide
  Antisense strand to SEQ ID NO: 1108496
aggauucaaauccucauuc

SEQ ID NO: 1108498 - RNA, 19 nt, Artificial Sequence
  Description of Artificial Sequence: Synthetic oligonucleotide
  Sense strand starting at position 823 of SEQ ID NO: 915819
aauccugggcuuuguagaa

SEQ ID NO: 1108499 - RNA, 19 nt, Artificial Sequence
  Description of Artificial Sequence: Synthetic oligonucleotide
  Antisense strand to SEQ ID NO: 1108498
uucuacaaagcccaggauu

SEQ ID NO: 1108500 - RNA, 19 nt, Artificial Sequence
  Description of Artificial Sequence: Synthetic oligonucleotide
  Sense strand starting at position 827 of SEQ ID NO: 915819
cugggcuuuguagaaagau

SEQ ID NO: 1108501 - RNA, 19 nt, Artificial Sequence
  Description of Artificial Sequence: Synthetic oligonucleotide
  Antisense strand to SEQ ID NO: 1108500
aucuuucuacaaagcccag

SEQ ID NO: 1108502 - RNA, 19 nt, Artificial Sequence
  Description of Artificial Sequence: Synthetic oligonucleotide
  Sense strand starting at position 836 of SEQ ID NO: 915819
guagaaagaucugaaccca

SEQ ID NO: 1108503 - RNA, 19 nt, Artificial Sequence
  Description of Artificial Sequence: Synthetic oligonucleotide
  Antisense strand to SEQ ID NO: 1108502
uggguucagaucuuucuac

SEQ ID NO: 1108504 - RNA, 19 nt, Artificial Sequence
  Description of Artificial Sequence: Synthetic oligonucleotide
  Sense strand starting at position 1027 of SEQ ID NO: 915819
aggcuuaugagucagguca

SEQ ID NO: 1108505 - RNA, 19 nt, Artificial Sequence
  Description of Artificial Sequence: Synthetic oligonucleotide
  Antisense strand to SEQ ID NO: 1108504
ugaccugacucauaagccu

SEQ ID NO: 1108506 - RNA, 19 nt, Artificial Sequence
  Description of Artificial Sequence: Synthetic oligonucleotide
  Sense strand starting at position 1165 of SEQ ID NO: 915819
uugacugagcgugguuaga

SEQ ID NO: 1108507 - RNA, 19 nt, Artificial Sequence
  Description of Artificial Sequence: Synthetic oligonucleotide
  Antisense strand to SEQ ID NO: 1108506
ucuaaccacgcucagucaa

SEQ ID NO: 1108508 - RNA, 19 nt, Artificial Sequence
  Description of Artificial Sequence: Synthetic oligonucleotide
  Sense strand starting at position 1167 of SEQ ID NO: 915819
gacugagcgugguuagaga

SEQ ID NO: 1108509 - RNA, 19 nt, Artificial Sequence
  Description of Artificial Sequence: Synthetic oligonucleotide
  Antisense strand to SEQ ID NO: 1108508
ucucuaaccacgcucaguc

SEQ ID NO: 1108510 - RNA, 19 nt, Artificial Sequence
  Description of Artificial Sequence: Synthetic oligonucleotide
  Sense strand starting at position 1178 of SEQ ID NO: 915819
guuagagaugcagagccua

SEQ ID NO: 1108511 - RNA, 19 nt, Artificial Sequence
  Description of Artificial Sequence: Synthetic oligonucleotide
  Antisense strand to SEQ ID NO: 1108510
uaggcucugcaucucuaac

SEQ ID NO: 1108512 - RNA, 19 nt, Artificial Sequence
  Description of Artificial Sequence: Synthetic oligonucleotide
  Sense strand starting at position 1441 of SEQ ID NO: 915819
ugcacucaagccuggagaa

SEQ ID NO: 1108513 - RNA, 19 nt, Artificial Sequence
  Description of Artificial Sequence: Synthetic oligonucleotide
  Antisense strand to SEQ ID NO: 1108512
uucuccaggcuugagugca

SEQ ID NO: 1108514 - RNA, 19 nt, Artificial Sequence
  Description of Artificial Sequence: Synthetic oligonucleotide
  Sense strand starting at position 1575 of SEQ ID NO: 915819
agguguuucccaugcacac

SEQ ID NO: 1108515 - RNA, 19 nt, Artificial Sequence
  Description of Artificial Sequence: Synthetic oligonucleotide
  Antisense strand to SEQ ID NO: 1108514
gugugcaugggaaacaccu

SEQ ID NO: 1108516 - RNA, 19 nt, Artificial Sequence
  Description of Artificial Sequence: Synthetic oligonucleotide
  Sense strand starting at position 1615 of SEQ ID NO: 915819
gggugaugauucuccuccu

SEQ ID NO: 1108517 - RNA, 19 nt, Artificial Sequence
  Description of Artificial Sequence: Synthetic oligonucleotide
  Antisense strand to SEQ ID NO: 1108516
aggaggagaaucaucaccc

SEQ ID NO: 1108518 - RNA, 19 nt, Artificial Sequence
  Description of Artificial Sequence: Synthetic oligonucleotide
  Sense strand starting at position 1616 of SEQ ID NO: 915819
ggugaugauucuccuccuu

SEQ ID NO: 1108519 - RNA, 19 nt, Artificial Sequence
  Description of Artificial Sequence: Synthetic oligonucleotide
  Antisense strand to SEQ ID NO: 1108518
aaggaggagaaucaucacc

SEQ ID NO: 1108520 - RNA, 19 nt, Artificial Sequence
  Description of Artificial Sequence: Synthetic oligonucleotide
  Sense strand starting at position 1682 of SEQ ID NO: 915819
gagggaggccucuguucuu

SEQ ID NO: 1108521 - RNA, 19 nt, Artificial Sequence
  Description of Artificial Sequence: Synthetic oligonucleotide
  Antisense strand to SEQ ID NO: 1108520
aagaacagaggccucccuc

SEQ ID NO: 1108522 - RNA, 19 nt, Artificial Sequence
  Description of Artificial Sequence: Synthetic oligonucleotide
  Sense strand starting at position 2542 of SEQ ID NO: 915819
aagggcucuccugaggauu

SEQ ID NO: 1108523 - RNA, 19 nt, Artificial Sequence
  Description of Artificial Sequence: Synthetic oligonucleotide
  Antisense strand to SEQ ID NO: 1108522
aauccucaggagagcccuu

SEQ ID NO: 1108524 - RNA, 19 nt, Artificial Sequence
  Description of Artificial Sequence: Synthetic oligonucleotide
  Sense strand starting at position 2554 of SEQ ID NO: 915819
gaggauucagccggucagu

SEQ ID NO: 1108525 - RNA, 19 nt, Artificial Sequence
  Description of Artificial Sequence: Synthetic oligonucleotide
  Antisense strand to SEQ ID NO: 1108524
acugaccggcugaauccuc

SEQ ID NO: 1108526 - RNA, 19 nt, Artificial Sequence
  Description of Artificial Sequence: Synthetic oligonucleotide
  Sense strand starting at position 2629 of SEQ ID NO: 915819
ucuggaugggaucguggaa

SEQ ID NO: 1108527 - RNA, 19 nt, Artificial Sequence
  Description of Artificial Sequence: Synthetic oligonucleotide
  Antisense strand to SEQ ID NO: 1108526
uuccacgaucccauccaga

SEQ ID NO: 1108528 - RNA, 19 nt, Artificial Sequence
  Description of Artificial Sequence: Synthetic oligonucleotide
  Sense strand starting at position 2689 of SEQ ID NO: 915819
auaauaauguguccacauu

SEQ ID NO: 1108529 - RNA, 19 nt, Artificial Sequence
  Description of Artificial Sequence: Synthetic oligonucleotide
  Antisense strand to SEQ ID NO: 1108528
aauguggacacauuauuau

SEQ ID NO: 1108530 - RNA, 19 nt, Artificial Sequence
  Description of Artificial Sequence: Synthetic oligonucleotide
  Sense strand starting at position 2793 of SEQ ID NO: 915819
ucuguacuaucuucucagu

SEQ ID NO: 1108531 - RNA, 19 nt, Artificial Sequence
  Description of Artificial Sequence: Synthetic oligonucleotide
  Antisense strand to SEQ ID NO: 1108530
acugagaagauaguacaga

SEQ ID NO: 1108532 - RNA, 19 nt, Artificial Sequence
  Description of Artificial Sequence: Synthetic oligonucleotide
  Sense strand starting at position 2803 of SEQ ID NO: 915819
cuucucaguucuguaaauc

SEQ ID NO: 1108533 - RNA, 19 nt, Artificial Sequence
  Description of Artificial Sequence: Synthetic oligonucleotide
  Antisense strand to SEQ ID NO: 1108532
gauuuacagaacugagaag

SEQ ID NO: 1108534 - RNA, 19 nt, Artificial Sequence
  Description of Artificial Sequence: Synthetic oligonucleotide
  Sense strand starting at position 2804 of SEQ ID NO: 915819
uucucaguucuguaaaucu

SEQ ID NO: 1108535 - RNA, 19 nt, Artificial Sequence
  Description of Artificial Sequence: Synthetic oligonucleotide
  Antisense strand to SEQ ID NO: 1108534
agauuuacagaacugagaa

SEQ ID NO: 1108536 - RNA, 19 nt, Artificial Sequence
  Description of Artificial Sequence: Synthetic oligonucleotide
  Sense strand starting at position 2870 of SEQ ID NO: 915819
uguggucugccaugauuac

SEQ ID NO: 1108537 - RNA, 19 nt, Artificial Sequence
  Description of Artificial Sequence: Synthetic oligonucleotide
  Antisense strand to SEQ ID NO: 1108536
guaaucauggcagaccaca

SEQ ID NO: 1108538 - RNA, 19 nt, Artificial Sequence
  Description of Artificial Sequence: Synthetic oligonucleotide
  Sense strand starting at position 2871 of SEQ ID NO: 915819
guggucugccaugauuaca

SEQ ID NO: 1108539 - RNA, 19 nt, Artificial Sequence
  Description of Artificial Sequence: Synthetic oligonucleotide
  Antisense strand to SEQ ID NO: 1108538
uguaaucauggcagaccac

SEQ ID NO: 1108540 - RNA, 19 nt, Artificial Sequence
  Description of Artificial Sequence: Synthetic oligonucleotide
  Sense strand starting at position 2905 of SEQ ID NO: 915819
uguguuagauccuuauacc

SEQ ID NO: 1108541 - RNA, 19 nt, Artificial Sequence
  Description of Artificial Sequence: Synthetic oligonucleotide
  Antisense strand to SEQ ID NO: 1108540
gguauaaggaucuaacaca

SEQ ID NO: 1108542 - RNA, 19 nt, Artificial Sequence
  Description of Artificial Sequence: Synthetic oligonucleotide
  Sense strand starting at position 2926 of SEQ ID NO: 915819
cugaccauccucugaggaa

SEQ ID NO: 1108543 - RNA, 19 nt, Artificial Sequence
  Description of Artificial Sequence: Synthetic oligonucleotide
  Antisense strand to SEQ ID NO: 1108542
uuccucagaggauggucag

SEQ ID NO: 1108544 - RNA, 19 nt, Artificial Sequence
  Description of Artificial Sequence: Synthetic oligonucleotide
  Sense strand starting at position 2980 of SEQ ID NO: 915819
ccugcaagugauuagccua

SEQ ID NO: 1108545 - RNA, 19 nt, Artificial Sequence
  Description of Artificial Sequence: Synthetic oligonucleotide
  Antisense strand to SEQ ID NO: 1108544
uaggcuaaucacuugcagg

SEQ ID NO: 1108546 - RNA, 19 nt, Artificial Sequence
  Description of Artificial Sequence: Synthetic oligonucleotide
  Sense strand starting at position 3008 of SEQ ID NO: 915819
agcguuugagcucagcaaa

SEQ ID NO: 1108547 - RNA, 19 nt, Artificial Sequence
  Description of Artificial Sequence: Synthetic oligonucleotide
  Antisense strand to SEQ ID NO: 1108546
uuugcugagcucaaacgcu

SEQ ID NO: 1108548 - RNA, 19 nt, Artificial Sequence
  Description of Artificial Sequence: Synthetic oligonucleotide
  Sense strand starting at position 3011 of SEQ ID NO: 915819
guuugagcucagcaaacau

SEQ ID NO: 1108549 - RNA, 19 nt, Artificial Sequence
  Description of Artificial Sequence: Synthetic oligonucleotide
  Antisense strand to SEQ ID NO: 1108548
auguuugcugagcucaaac

SEQ ID NO: 1108550 - RNA, 19 nt, Artificial Sequence
  Description of Artificial Sequence: Synthetic oligonucleotide
  Sense strand starting at position 3153 of SEQ ID NO: 915819
uguaaauugguuugaccac

SEQ ID NO: 1108551 - RNA, 19 nt, Artificial Sequence
  Description of Artificial Sequence: Synthetic oligonucleotide
  Antisense strand to SEQ ID NO: 1108550
guggucaaaccaauuuaca

SEQ ID NO: 1108552 - RNA, 19 nt, Artificial Sequence
  Description of Artificial Sequence: Synthetic oligonucleotide
  Sense strand starting at position 3160 of SEQ ID NO: 915819
ugguuugaccacuguggga

SEQ ID NO: 1108553 - RNA, 19 nt, Artificial Sequence
  Description of Artificial Sequence: Synthetic oligonucleotide
  Antisense strand to SEQ ID NO: 1108552
ucccacaguggucaaacca

SEQ ID NO: 1108554 - RNA, 19 nt, Artificial Sequence
  Description of Artificial Sequence: Synthetic oligonucleotide
  Sense strand starting at position 3211 of SEQ ID NO: 915819
acuaucauuugaugcagaa

SEQ ID NO: 1108555 - RNA, 19 nt, Artificial Sequence
  Description of Artificial Sequence: Synthetic oligonucleotide
  Antisense strand to SEQ ID NO: 1108554
uucugcaucaaaugauagu

SEQ ID NO: 1108556 - RNA, 19 nt, Artificial Sequence
  Description of Artificial Sequence: Synthetic oligonucleotide
  Sense strand starting at position 3220 of SEQ ID NO: 915819
ugaugcagaaaucgcauua

SEQ ID NO: 1108557 - RNA, 19 nt, Artificial Sequence
  Description of Artificial Sequence: Synthetic oligonucleotide
  Antisense strand to SEQ ID NO: 1108556
uaaugcgauuucugcauca

SEQ ID NO: 1108558 - RNA, 19 nt, Artificial Sequence
  Description of Artificial Sequence: Synthetic oligonucleotide
  Sense strand starting at position 3852 of SEQ ID NO: 915819
cuuauaacugaaggcuaaa

SEQ ID NO: 1108559 - RNA, 19 nt, Artificial Sequence
  Description of Artificial Sequence: Synthetic oligonucleotide
  Antisense strand to SEQ ID NO: 1108558
uuuagccuucaguuauaag

SEQ ID NO: 1108560 - RNA, 19 nt, Artificial Sequence
  Description of Artificial Sequence: Synthetic oligonucleotide
  Sense strand starting at position 3914 of SEQ ID NO: 915819
gggccuauugaaggguaga

SEQ ID NO: 1108561 - RNA, 19 nt, Artificial Sequence
  Description of Artificial Sequence: Synthetic oligonucleotide
  Antisense strand to SEQ ID NO: 1108560
ucuacccuucaauaggccc

SEQ ID NO: 1108562 - RNA, 19 nt, Artificial Sequence
  Description of Artificial Sequence: Synthetic oligonucleotide
  Sense strand starting at position 81 of SEQ ID NO: 915820
gcacucaugccacguuaga

SEQ ID NO: 1108563 - RNA, 19 nt, Artificial Sequence
  Description of Artificial Sequence: Synthetic oligonucleotide
  Antisense strand to SEQ ID NO: 1108562
ucuaacguggcaugagugc

SEQ ID NO: 1108564 - RNA, 19 nt, Artificial Sequence
  Description of Artificial Sequence: Synthetic oligonucleotide
  Sense strand starting at position 88 of SEQ ID NO: 915820
ugccacguuagagauauaa

SEQ ID NO: 1108565 - RNA, 19 nt, Artificial Sequence
  Description of Artificial Sequence: Synthetic oligonucleotide
  Antisense strand to SEQ ID NO: 1108564
uuauaucucuaacguggca

SEQ ID NO: 1108566 - RNA, 19 nt, Artificial Sequence
  Description of Artificial Sequence: Synthetic oligonucleotide
  Sense strand starting at position 92 of SEQ ID NO: 915820
acguuagagauauaauagu

SEQ ID NO: 1108567 - RNA, 19 nt, Artificial Sequence
  Description of Artificial Sequence: Synthetic oligonucleotide
  Antisense strand to SEQ ID NO: 1108566
acuauuauaucucuaacgu

SEQ ID NO: 1108568 - RNA, 19 nt, Artificial Sequence
  Description of Artificial Sequence: Synthetic oligonucleotide
  Sense strand starting at position 113 of SEQ ID NO: 915820
auauaucaguccucucaug

SEQ ID NO: 1108569 - RNA, 19 nt, Artificial Sequence
  Description of Artificial Sequence: Synthetic oligonucleotide
  Antisense strand to SEQ ID NO: 1108568
caugagaggacugauauau

SEQ ID NO: 1108570 - RNA, 19 nt, Artificial Sequence
  Description of Artificial Sequence: Synthetic oligonucleotide
  Sense strand starting at position 273 of SEQ ID NO: 915820
aauguuauauugucugaug

SEQ ID NO: 1108571 - RNA, 19 nt, Artificial Sequence
  Description of Artificial Sequence: Synthetic oligonucleotide
  Antisense strand to SEQ ID NO: 1108570
caucagacaauauaacauu

SEQ ID NO: 1108572 - RNA, 19 nt, Artificial Sequence
  Description of Artificial Sequence: Synthetic oligonucleotide
  Sense strand starting at position 274 of SEQ ID NO: 915820
auguuauauugucugauga

SEQ ID NO: 1108573 - RNA, 19 nt, Artificial Sequence
  Description of Artificial Sequence: Synthetic oligonucleotide
  Antisense strand to SEQ ID NO: 1108572
ucaucagacaauauaacau

SEQ ID NO: 1108574 - RNA, 19 nt, Artificial Sequence
  Description of Artificial Sequence: Synthetic oligonucleotide
  Sense strand starting at position 275 of SEQ ID NO: 915820
uguuauauugucugaugag

SEQ ID NO: 1108575 - RNA, 19 nt, Artificial Sequence
  Description of Artificial Sequence: Synthetic oligonucleotide
  Antisense strand to SEQ ID NO: 1108574
cucaucagacaauauaaca

SEQ ID NO: 1108576 - RNA, 19 nt, Artificial Sequence
  Description of Artificial Sequence: Synthetic oligonucleotide
  Sense strand starting at position 296 of SEQ ID NO: 915820
cugaauauauacugaggga

SEQ ID NO: 1108577 - RNA, 19 nt, Artificial Sequence
  Description of Artificial Sequence: Synthetic oligonucleotide
  Antisense strand to SEQ ID NO: 1108576
ucccucaguauauauucag

SEQ ID NO: 1108578 - RNA, 19 nt, Artificial Sequence
  Description of Artificial Sequence: Synthetic oligonucleotide
  Sense strand starting at position 388 of SEQ ID NO: 915820
gcaaguuuccaacacuuag

SEQ ID NO: 1108579 - RNA, 19 nt, Artificial Sequence
  Description of Artificial Sequence: Synthetic oligonucleotide
  Antisense strand to SEQ ID NO: 1108578
cuaaguguuggaaacuugc

SEQ ID NO: 1108580 - RNA, 19 nt, Artificial Sequence
  Description of Artificial Sequence: Synthetic oligonucleotide
  Sense strand starting at position 395 of SEQ ID NO: 915820
uccaacacuuagucagaga

SEQ ID NO: 1108581 - RNA, 19 nt, Artificial Sequence
  Description of Artificial Sequence: Synthetic oligonucleotide
  Antisense strand to SEQ ID NO: 1108580
ucucugacuaaguguugga

SEQ ID NO: 1108582 - RNA, 19 nt, Artificial Sequence
  Description of Artificial Sequence: Synthetic oligonucleotide
  Sense strand starting at position 443 of SEQ ID NO: 915820
agcaauuauuccuugagcu

SEQ ID NO: 1108583 - RNA, 19 nt, Artificial Sequence
  Description of Artificial Sequence: Synthetic oligonucleotide
  Antisense strand to SEQ ID NO: 1108582
agcucaaggaauaauugcu

SEQ ID NO: 1108584 - RNA, 19 nt, Artificial Sequence
  Description of Artificial Sequence: Synthetic oligonucleotide
  Sense strand starting at position 444 of SEQ ID NO: 915820
gcaauuauuccuugagcug

SEQ ID NO: 1108585 - RNA, 19 nt, Artificial Sequence
  Description of Artificial Sequence: Synthetic oligonucleotide
  Antisense strand to SEQ ID NO: 1108584
cagcucaaggaauaauugc

SEQ ID NO: 1108586 - RNA, 19 nt, Artificial Sequence
  Description of Artificial Sequence: Synthetic oligonucleotide
  Sense strand starting at position 549 of SEQ ID NO: 915820
guggucagagcuugugaac

SEQ ID NO: 1108587 - RNA, 19 nt, Artificial Sequence
  Description of Artificial Sequence: Synthetic oligonucleotide
  Antisense strand to SEQ ID NO: 1108586
guucacaagcucugaccac

SEQ ID NO: 1108588 - RNA, 19 nt, Artificial Sequence
  Description of Artificial Sequence: Synthetic oligonucleotide
  Sense strand starting at position 605 of SEQ ID NO: 915820
cuaucaagucccuguauga

SEQ ID NO: 1108589 - RNA, 19 nt, Artificial Sequence
  Description of Artificial Sequence: Synthetic oligonucleotide
  Antisense strand to SEQ ID NO: 1108588
ucauacagggacuugauag

SEQ ID NO: 1108590 - RNA, 19 nt, Artificial Sequence
  Description of Artificial Sequence: Synthetic oligonucleotide
  Sense strand starting at position 639 of SEQ ID NO: 915820
uugaacucucugggucuua

SEQ ID NO: 1108591 - RNA, 19 nt, Artificial Sequence
  Description of Artificial Sequence: Synthetic oligonucleotide
  Antisense strand to SEQ ID NO: 1108590
uaagacccagagaguucaa

SEQ ID NO: 1108592 - RNA, 19 nt, Artificial Sequence
  Description of Artificial Sequence: Synthetic oligonucleotide
  Sense strand starting at position 640 of SEQ ID NO: 915820
ugaacucucugggucuuaa

SEQ ID NO: 1108593 - RNA, 19 nt, Artificial Sequence
  Description of Artificial Sequence: Synthetic oligonucleotide
  Antisense strand to SEQ ID NO: 1108592
uuaagacccagagaguuca

SEQ ID NO: 1108594 - RNA, 19 nt, Artificial Sequence
  Description of Artificial Sequence: Synthetic oligonucleotide
  Sense strand starting at position 821 of SEQ ID NO: 915820
ucacaaugauuacauggua

SEQ ID NO: 1108595 - RNA, 19 nt, Artificial Sequence
  Description of Artificial Sequence: Synthetic oligonucleotide
  Antisense strand to SEQ ID NO: 1108594
uaccauguaaucauuguga

SEQ ID NO: 1108596 - RNA, 19 nt, Artificial Sequence
  Description of Artificial Sequence: Synthetic oligonucleotide
  Sense strand starting at position 886 of SEQ ID NO: 915820
gaaagaggguaagauucua

SEQ ID NO: 1108597 - RNA, 19 nt, Artificial Sequence
  Description of Artificial Sequence: Synthetic oligonucleotide
  Antisense strand to SEQ ID NO: 1108596
uagaaucuuacccucuuuc

SEQ ID NO: 1108598 - RNA, 19 nt, Artificial Sequence
  Description of Artificial Sequence: Synthetic oligonucleotide
  Sense strand starting at position 894 of SEQ ID NO: 915820
guaagauucuagcuacaug

SEQ ID NO: 1108599 - RNA, 19 nt, Artificial Sequence
  Description of Artificial Sequence: Synthetic oligonucleotide
  Antisense strand to SEQ ID NO: 1108598
cauguagcuagaaucuuac

SEQ ID NO: 1108600 - RNA, 19 nt, Artificial Sequence
  Description of Artificial Sequence: Synthetic oligonucleotide
  Sense strand starting at position 1027 of SEQ ID NO: 915820
uguucauguccugggaaga

SEQ ID NO: 1108601 - RNA, 19 nt, Artificial Sequence
  Description of Artificial Sequence: Synthetic oligonucleotide
  Antisense strand to SEQ ID NO: 1108600
ucuucccaggacaugaaca

SEQ ID NO: 1108602 - RNA, 19 nt, Artificial Sequence
  Description of Artificial Sequence: Synthetic oligonucleotide
  Sense strand starting at position 1028 of SEQ ID NO: 915820
guucauguccugggaagaa

SEQ ID NO: 1108603 - RNA, 19 nt, Artificial Sequence
  Description of Artificial Sequence: Synthetic oligonucleotide
  Antisense strand to SEQ ID NO: 1108602
uucuucccaggacaugaac

SEQ ID NO: 1108604 - RNA, 19 nt, Artificial Sequence
  Description of Artificial Sequence: Synthetic oligonucleotide
  Sense strand starting at position 1164 of SEQ ID NO: 915820
ccagacugcuccuuucgaa

SEQ ID NO: 1108605 - RNA, 19 nt, Artificial Sequence
  Description of Artificial Sequence: Synthetic oligonucleotide
  Antisense strand to SEQ ID NO: 1108604
uucgaaaggagcagucugg

SEQ ID NO: 1108606 - RNA, 19 nt, Artificial Sequence
  Description of Artificial Sequence: Synthetic oligonucleotide
  Sense strand starting at position 1171 of SEQ ID NO: 915820
gcuccuuucgaauaguaca

SEQ ID NO: 1108607 - RNA, 19 nt, Artificial Sequence
  Description of Artificial Sequence: Synthetic oligonucleotide
  Antisense strand to SEQ ID NO: 1108606
uguacuauucgaaaggagc

SEQ ID NO: 1108608 - RNA, 19 nt, Artificial Sequence
  Description of Artificial Sequence: Synthetic oligonucleotide
  Sense strand starting at position 1204 of SEQ ID NO: 915820
ggcuguccaaauggugaga

SEQ ID NO: 1108609 - RNA, 19 nt, Artificial Sequence
  Description of Artificial Sequence: Synthetic oligonucleotide
  Antisense strand to SEQ ID NO: 1108608
ucucaccauuuggacagcc

SEQ ID NO: 1108610 - RNA, 19 nt, Artificial Sequence
  Description of Artificial Sequence: Synthetic oligonucleotide
  Sense strand starting at position 1209 of SEQ ID NO: 915820
uccaaauggugagaauacu

SEQ ID NO: 1108611 - RNA, 19 nt, Artificial Sequence
  Description of Artificial Sequence: Synthetic oligonucleotide
  Antisense strand to SEQ ID NO: 1108610
aguauucucaccauuugga

SEQ ID NO: 1108612 - RNA, 19 nt, Artificial Sequence
  Description of Artificial Sequence: Synthetic oligonucleotide
  Sense strand starting at position 1296 of SEQ ID NO: 915820
cucacuugagcugaugaca

SEQ ID NO: 1108613 - RNA, 19 nt, Artificial Sequence
  Description of Artificial Sequence: Synthetic oligonucleotide
  Antisense strand to SEQ ID NO: 1108612
ugucaucagcucaagugag

SEQ ID NO: 1108614 - RNA, 19 nt, Artificial Sequence
  Description of Artificial Sequence: Synthetic oligonucleotide
  Sense strand starting at position 1792 of SEQ ID NO: 915820
cucacauugcaguaacagu

SEQ ID NO: 1108615 - RNA, 19 nt, Artificial Sequence
  Description of Artificial Sequence: Synthetic oligonucleotide
  Antisense strand to SEQ ID NO: 1108614
acuguuacugcaaugugag

SEQ ID NO: 1108616 - RNA, 19 nt, Artificial Sequence
  Description of Artificial Sequence: Synthetic oligonucleotide
  Sense strand starting at position 2122 of SEQ ID NO: 915820
ggguuuauauggcucgaac

SEQ ID NO: 1108617 - RNA, 19 nt, Artificial Sequence
  Description of Artificial Sequence: Synthetic oligonucleotide
  Antisense strand to SEQ ID NO: 1108616
guucgagccauauaaaccc

SEQ ID NO: 1108618 - RNA, 19 nt, Artificial Sequence
  Description of Artificial Sequence: Synthetic oligonucleotide
  Sense strand starting at position 2124 of SEQ ID NO: 915820
guuuauauggcucgaaccu

SEQ ID NO: 1108619 - RNA, 19 nt, Artificial Sequence
  Description of Artificial Sequence: Synthetic oligonucleotide
  Antisense strand to SEQ ID NO: 1108618
agguucgagccauauaaac

SEQ ID NO: 1108620 - RNA, 19 nt, Artificial Sequence
  Description of Artificial Sequence: Synthetic oligonucleotide
  Sense strand starting at position 2125 of SEQ ID NO: 915820
uuuauauggcucgaaccuu

SEQ ID NO: 1108621 - RNA, 19 nt, Artificial Sequence
  Description of Artificial Sequence: Synthetic oligonucleotide
  Antisense strand to SEQ ID NO: 1108620
aagguucgagccauauaaa

SEQ ID NO: 1108622 - RNA, 19 nt, Artificial Sequence
  Description of Artificial Sequence: Synthetic oligonucleotide
  Sense strand starting at position 2297 of SEQ ID NO: 915820
cuggacuugucccugagga

SEQ ID NO: 1108623 - RNA, 19 nt, Artificial Sequence
  Description of Artificial Sequence: Synthetic oligonucleotide
  Antisense strand to SEQ ID NO: 1108622
uccucagggacaaguccag

SEQ ID NO: 1108624 - RNA, 19 nt, Artificial Sequence
  Description of Artificial Sequence: Synthetic oligonucleotide
  Sense strand starting at position 2298 of SEQ ID NO: 915820
uggacuugucccugaggaa

SEQ ID NO: 1108625 - RNA, 19 nt, Artificial Sequence
  Description of Artificial Sequence: Synthetic oligonucleotide
  Antisense strand to SEQ ID NO: 1108624
uuccucagggacaagucca

SEQ ID NO: 1108626 - RNA, 19 nt, Artificial Sequence
  Description of Artificial Sequence: Synthetic oligonucleotide
  Sense strand starting at position 2658 of SEQ ID NO: 915820
ccaguucuguugccaacau

SEQ ID NO: 1108627 - RNA, 19 nt, Artificial Sequence
  Description of Artificial Sequence: Synthetic oligonucleotide
  Antisense strand to SEQ ID NO: 1108626
auguuggcaacagaacugg

SEQ ID NO: 1108628 - RNA, 19 nt, Artificial Sequence
  Description of Artificial Sequence: Synthetic oligonucleotide
  Sense strand starting at position 2665 of SEQ ID NO: 915820
uguugccaacauugucaaa

SEQ ID NO: 1108629 - RNA, 19 nt, Artificial Sequence
  Description of Artificial Sequence: Synthetic oligonucleotide
  Antisense strand to SEQ ID NO: 1108628
uuugacaauguuggcaaca

SEQ ID NO: 1108630 - RNA, 19 nt, Artificial Sequence
  Description of Artificial Sequence: Synthetic oligonucleotide
  Sense strand starting at position 2715 of SEQ ID NO: 915820
gcaugaugagccuacauau

SEQ ID NO: 1108631 - RNA, 19 nt, Artificial Sequence
  Description of Artificial Sequence: Synthetic oligonucleotide
  Antisense strand to SEQ ID NO: 1108630
auauguaggcucaucaugc

SEQ ID NO: 1108632 - RNA, 19 nt, Artificial Sequence
  Description of Artificial Sequence: Synthetic oligonucleotide
  Sense strand starting at position 3370 of SEQ ID NO: 915820
gagccagaagucuaggcuu

SEQ ID NO: 1108633 - RNA, 19 nt, Artificial Sequence
  Description of Artificial Sequence: Synthetic oligonucleotide
  Antisense strand to SEQ ID NO: 1108632
aagccuagacuucuggcuc

SEQ ID NO: 1108634 - RNA, 19 nt, Artificial Sequence
  Description of Artificial Sequence: Synthetic oligonucleotide
  Sense strand starting at position 3734 of SEQ ID NO: 915820
agccaaacuccaggaugua

SEQ ID NO: 1108635 - RNA, 19 nt, Artificial Sequence
  Description of Artificial Sequence: Synthetic oligonucleotide
  Antisense strand to SEQ ID NO: 1108634
uacauccuggaguuuggcu

SEQ ID NO: 1108636 - RNA, 19 nt, Artificial Sequence
  Description of Artificial Sequence: Synthetic oligonucleotide
  Sense strand starting at position 3846 of SEQ ID NO: 915820
ggaguaacucaugagcauu

SEQ ID NO: 1108637 - RNA, 19 nt, Artificial Sequence
  Description of Artificial Sequence: Synthetic oligonucleotide
  Antisense strand to SEQ ID NO: 1108636
aaugcucaugaguuacucc

SEQ ID NO: 1108638 - RNA, 19 nt, Artificial Sequence
  Description of Artificial Sequence: Synthetic oligonucleotide
  Sense strand starting at position 3854 of SEQ ID NO: 915820
ucaugagcauucccaaaug

SEQ ID NO: 1108639 - RNA, 19 nt, Artificial Sequence
  Description of Artificial Sequence: Synthetic oligonucleotide
  Antisense strand to SEQ ID NO: 1108638
cauuugggaaugcucauga

SEQ ID NO: 1108640 - RNA, 19 nt, Artificial Sequence
  Description of Artificial Sequence: Synthetic oligonucleotide
  Sense strand starting at position 3890 of SEQ ID NO: 915820
uuugcaaagccuggugaau

SEQ ID NO: 1108641 - RNA, 19 nt, Artificial Sequence
  Description of Artificial Sequence: Synthetic oligonucleotide
  Antisense strand to SEQ ID NO: 1108640
auucaccaggcuuugcaaa

SEQ ID NO: 1108642 - RNA, 19 nt, Artificial Sequence
  Description of Artificial Sequence: Synthetic oligonucleotide
  Sense strand starting at position 143 of SEQ ID NO: 915821
cucaaauuccuacguagua

SEQ ID NO: 1108643 - RNA, 19 nt, Artificial Sequence
  Description of Artificial Sequence: Synthetic oligonucleotide
  Antisense strand to SEQ ID NO: 1108642
uacuacguaggaauuugag

SEQ ID NO: 1108644 - RNA, 19 nt, Artificial Sequence
  Description of Artificial Sequence: Synthetic oligonucleotide
  Sense strand starting at position 144 of SEQ ID NO: 915821
ucaaauuccuacguaguaa

SEQ ID NO: 1108645 - RNA, 19 nt, Artificial Sequence
  Description of Artificial Sequence: Synthetic oligonucleotide
  Antisense strand to SEQ ID NO: 1108644
uuacuacguaggaauuuga

SEQ ID NO: 1108646 - RNA, 19 nt, Artificial Sequence
  Description of Artificial Sequence: Synthetic oligonucleotide
  Sense strand starting at position 416 of SEQ ID NO: 915821
auucucaauuggcugaaga

SEQ ID NO: 1108647 - RNA, 19 nt, Artificial Sequence
  Description of Artificial Sequence: Synthetic oligonucleotide
  Antisense strand to SEQ ID NO: 1108646
ucuucagccaauugagaau

SEQ ID NO: 1108648 - RNA, 19 nt, Artificial Sequence
  Description of Artificial Sequence: Synthetic oligonucleotide
  Sense strand starting at position 418 of SEQ ID NO: 915821
ucucaauuggcugaagauu

SEQ ID NO: 1108649 - RNA, 19 nt, Artificial Sequence
  Description of Artificial Sequence: Synthetic oligonucleotide
  Antisense strand to SEQ ID NO: 1108648
aaucuucagccaauugaga

SEQ ID NO: 1108650 - RNA, 19 nt, Artificial Sequence
  Description of Artificial Sequence: Synthetic oligonucleotide
  Sense strand starting at position 473 of SEQ ID NO: 915821
gcauguuggguccagaaca

SEQ ID NO: 1108651 - RNA, 19 nt, Artificial Sequence
  Description of Artificial Sequence: Synthetic oligonucleotide
  Antisense strand to SEQ ID NO: 1108650
uguucuggacccaacaugc

SEQ ID NO: 1108652 - RNA, 19 nt, Artificial Sequence
  Description of Artificial Sequence: Synthetic oligonucleotide
  Sense strand starting at position 551 of SEQ ID NO: 915821
cacauuaaacaguggugaa

SEQ ID NO: 1108653 - RNA, 19 nt, Artificial Sequence
  Description of Artificial Sequence: Synthetic oligonucleotide
  Antisense strand to SEQ ID NO: 1108652
uucaccacuguuuaaugug

SEQ ID NO: 1108654 - RNA, 19 nt, Artificial Sequence
  Description of Artificial Sequence: Synthetic oligonucleotide
  Sense strand starting at position 650 of SEQ ID NO: 915821
agcuguuaggaaggguuau

SEQ ID NO: 1108655 - RNA, 19 nt, Artificial Sequence
  Description of Artificial Sequence: Synthetic oligonucleotide
  Antisense strand to SEQ ID NO: 1108654
auaacccuuccuaacagcu

SEQ ID NO: 1108656 - RNA, 19 nt, Artificial Sequence
  Description of Artificial Sequence: Synthetic oligonucleotide
  Sense strand starting at position 651 of SEQ ID NO: 915821
gcuguuaggaaggguuaua

SEQ ID NO: 1108657 - RNA, 19 nt, Artificial Sequence
  Description of Artificial Sequence: Synthetic oligonucleotide
  Antisense strand to SEQ ID NO: 1108656
uauaacccuuccuaacagc

SEQ ID NO: 1108658 - RNA, 19 nt, Artificial Sequence
  Description of Artificial Sequence: Synthetic oligonucleotide
  Sense strand starting at position 893 of SEQ ID NO: 915821
gugcuuguagaugaaguuu

SEQ ID NO: 1108659 - RNA, 19 nt, Artificial Sequence
  Description of Artificial Sequence: Synthetic oligonucleotide
  Antisense strand to SEQ ID NO: 1108658
aaacuucaucuacaagcac

SEQ ID NO: 1108660 - RNA, 19 nt, Artificial Sequence
  Description of Artificial Sequence: Synthetic oligonucleotide
  Sense strand starting at position 1293 of SEQ ID NO: 915821
ggugcaauccuccaggcua

SEQ ID NO: 1108661 - RNA, 19 nt, Artificial Sequence
  Description of Artificial Sequence: Synthetic oligonucleotide
  Antisense strand to SEQ ID NO: 1108660
uagccuggaggauugcacc

SEQ ID NO: 1108662 - RNA, 19 nt, Artificial Sequence
  Description of Artificial Sequence: Synthetic oligonucleotide
  Sense strand starting at position 1295 of SEQ ID NO: 915821
ugcaauccuccaggcuauu

SEQ ID NO: 1108663 - RNA, 19 nt, Artificial Sequence
  Description of Artificial Sequence: Synthetic oligonucleotide
  Antisense strand to SEQ ID NO: 1108662
aauagccuggaggauugca

SEQ ID NO: 1108664 - RNA, 19 nt, Artificial Sequence
  Description of Artificial Sequence: Synthetic oligonucleotide
  Sense strand starting at position 2343 of SEQ ID NO: 915821
cgcccucuagaguugugua

SEQ ID NO: 1108665 - RNA, 19 nt, Artificial Sequence
  Description of Artificial Sequence: Synthetic oligonucleotide
  Antisense strand to SEQ ID NO: 1108664
uacacaacucuagagggcg

SEQ ID NO: 1108666 - RNA, 19 nt, Artificial Sequence
  Description of Artificial Sequence: Synthetic oligonucleotide
  Sense strand starting at position 2348 of SEQ ID NO: 915821
ucuagaguuguguaaagaa

SEQ ID NO: 1108667 - RNA, 19 nt, Artificial Sequence
  Description of Artificial Sequence: Synthetic oligonucleotide
  Antisense strand to SEQ ID NO: 1108666
uucuuuacacaacucuaga

SEQ ID NO: 1108668 - RNA, 19 nt, Artificial Sequence
  Description of Artificial Sequence: Synthetic oligonucleotide
  Sense strand starting at position 2369 of SEQ ID NO: 915821
ggcgucaccucauuauaaa

SEQ ID NO: 1108669 - RNA, 19 nt, Artificial Sequence
  Description of Artificial Sequence: Synthetic oligonucleotide
  Antisense strand to SEQ ID NO: 1108668
uuuauaaugaggugacgcc

SEQ ID NO: 1108670 - RNA, 19 nt, Artificial Sequence
  Description of Artificial Sequence: Synthetic oligonucleotide
  Sense strand starting at position 2370 of SEQ ID NO: 915821
gcgucaccucauuauaaau

SEQ ID NO: 1108671 - RNA, 19 nt, Artificial Sequence
  Description of Artificial Sequence: Synthetic oligonucleotide
  Antisense strand to SEQ ID NO: 1108670
auuuauaaugaggugacgc

SEQ ID NO: 1108672 - RNA, 19 nt, Artificial Sequence
  Description of Artificial Sequence: Synthetic oligonucleotide
  Sense strand starting at position 2406 of SEQ ID NO: 915821
ugcaucuauguacauauau

SEQ ID NO: 1108673 - RNA, 19 nt, Artificial Sequence
  Description of Artificial Sequence: Synthetic oligonucleotide
  Antisense strand to SEQ ID NO: 1108672
auauauguacauagaugca

SEQ ID NO: 1108674 - RNA, 19 nt, Artificial Sequence
  Description of Artificial Sequence: Synthetic oligonucleotide
  Sense strand starting at position 2421 of SEQ ID NO: 915821
auauuacaucuacgugaua

SEQ ID NO: 1108675 - RNA, 19 nt, Artificial Sequence
  Description of Artificial Sequence: Synthetic oligonucleotide
  Antisense strand to SEQ ID NO: 1108674
uaucacguagauguaauau

SEQ ID NO: 1108676 - RNA, 19 nt, Artificial Sequence
  Description of Artificial Sequence: Synthetic oligonucleotide
  Sense strand starting at position 2424 of SEQ ID NO: 915821
uuacaucuacgugauacau

SEQ ID NO: 1108677 - RNA, 19 nt, Artificial Sequence
  Description of Artificial Sequence: Synthetic oligonucleotide
  Antisense strand to SEQ ID NO: 1108676
auguaucacguagauguaa

SEQ ID NO: 1108678 - RNA, 19 nt, Artificial Sequence
  Description of Artificial Sequence: Synthetic oligonucleotide
  Sense strand starting at position 2433 of SEQ ID NO: 915821
cgugauacauuacacauuu

SEQ ID NO: 1108679 - RNA, 19 nt, Artificial Sequence
  Description of Artificial Sequence: Synthetic oligonucleotide
  Antisense strand to SEQ ID NO: 1108678
aaauguguaauguaucacg

SEQ ID NO: 1108680 - RNA, 19 nt, Artificial Sequence
  Description of Artificial Sequence: Synthetic oligonucleotide
  Sense strand starting at position 2494 of SEQ ID NO: 915821
auauuaguccugugugaac

SEQ ID NO: 1108681 - RNA, 19 nt, Artificial Sequence
  Description of Artificial Sequence: Synthetic oligonucleotide
  Antisense strand to SEQ ID NO: 1108680
guucacacaggacuaauau

SEQ ID NO: 1108682 - RNA, 19 nt, Artificial Sequence
  Description of Artificial Sequence: Synthetic oligonucleotide
  Sense strand starting at position 2496 of SEQ ID NO: 915821
auuaguccugugugaacaa

SEQ ID NO: 1108683 - RNA, 19 nt, Artificial Sequence
  Description of Artificial Sequence: Synthetic oligonucleotide
  Antisense strand to SEQ ID NO: 1108682
uuguucacacaggacuaau

SEQ ID NO: 1108684 - RNA, 19 nt, Artificial Sequence
  Description of Artificial Sequence: Synthetic oligonucleotide
  Sense strand starting at position 2503 of SEQ ID NO: 915821
cugugugaacaagauacuu

SEQ ID NO: 1108685 - RNA, 19 nt, Artificial Sequence
  Description of Artificial Sequence: Synthetic oligonucleotide
  Antisense strand to SEQ ID NO: 1108684
aaguaucuuguucacacag

SEQ ID NO: 1108686 - RNA, 19 nt, Artificial Sequence
  Description of Artificial Sequence: Synthetic oligonucleotide
  Sense strand starting at position 2520 of SEQ ID NO: 915821
uuaguacuuucugucauau

SEQ ID NO: 1108687 - RNA, 19 nt, Artificial Sequence
  Description of Artificial Sequence: Synthetic oligonucleotide
  Antisense strand to SEQ ID NO: 1108686
auaugacagaaaguacuaa

SEQ ID NO: 1108688 - RNA, 19 nt, Artificial Sequence
  Description of Artificial Sequence: Synthetic oligonucleotide
  Sense strand starting at position 2657 of SEQ ID NO: 915821
guguauaaccauuggucag

SEQ ID NO: 1108689 - RNA, 19 nt, Artificial Sequence
  Description of Artificial Sequence: Synthetic oligonucleotide
  Antisense strand to SEQ ID NO: 1108688
cugaccaaugguuauacac

SEQ ID NO: 1108690 - RNA, 19 nt, Artificial Sequence
  Description of Artificial Sequence: Synthetic oligonucleotide
  Sense strand starting at position 2659 of SEQ ID NO: 915821
guauaaccauuggucagaa

SEQ ID NO: 1108691 - RNA, 19 nt, Artificial Sequence
  Description of Artificial Sequence: Synthetic oligonucleotide
  Antisense strand to SEQ ID NO: 1108690
uucugaccaaugguuauac

SEQ ID NO: 1108692 - RNA, 19 nt, Artificial Sequence
  Description of Artificial Sequence: Synthetic oligonucleotide
  Sense strand starting at position 2735 of SEQ ID NO: 915821
guggauuuaugguauuuau

SEQ ID NO: 1108693 - RNA, 19 nt, Artificial Sequence
  Description of Artificial Sequence: Synthetic oligonucleotide
  Antisense strand to SEQ ID NO: 1108692
auaaauaccauaaauccac

SEQ ID NO: 1108694 - RNA, 19 nt, Artificial Sequence
  Description of Artificial Sequence: Synthetic oligonucleotide
  Sense strand starting at position 2891 of SEQ ID NO: 915821
ugauguaauguuuacaagu

SEQ ID NO: 1108695 - RNA, 19 nt, Artificial Sequence
  Description of Artificial Sequence: Synthetic oligonucleotide
  Antisense strand to SEQ ID NO: 1108694
acuuguaaacauuacauca

SEQ ID NO: 1108696 - RNA, 19 nt, Artificial Sequence
  Description of Artificial Sequence: Synthetic oligonucleotide
  Sense strand starting at position 2979 of SEQ ID NO: 915821
aucuaaaugcuauagaguc

SEQ ID NO: 1108697 - RNA, 19 nt, Artificial Sequence
  Description of Artificial Sequence: Synthetic oligonucleotide
  Antisense strand to SEQ ID NO: 1108696
gacucuauagcauuuagau

SEQ ID NO: 1108698 - RNA, 19 nt, Artificial Sequence
  Description of Artificial Sequence: Synthetic oligonucleotide
  Sense strand starting at position 3084 of SEQ ID NO: 915821
uugguuggauccguggaua

SEQ ID NO: 1108699 - RNA, 19 nt, Artificial Sequence
  Description of Artificial Sequence: Synthetic oligonucleotide
  Antisense strand to SEQ ID NO: 1108698
uauccacggauccaaccaa

SEQ ID NO: 1108700 - RNA, 19 nt, Artificial Sequence
  Description of Artificial Sequence: Synthetic oligonucleotide
  Sense strand starting at position 3087 of SEQ ID NO: 915821
guuggauccguggauacca

SEQ ID NO: 1108701 - RNA, 19 nt, Artificial Sequence
  Description of Artificial Sequence: Synthetic oligonucleotide
  Antisense strand to SEQ ID NO: 1108700
ugguauccacggauccaac

SEQ ID NO: 1108702 - RNA, 19 nt, Artificial Sequence
  Description of Artificial Sequence: Synthetic oligonucleotide
  Sense strand starting at position 3209 of SEQ ID NO: 915821
uguuaagugucuuugagac

SEQ ID NO: 1108703 - RNA, 19 nt, Artificial Sequence
  Description of Artificial Sequence: Synthetic oligonucleotide
  Antisense strand to SEQ ID NO: 1108702
gucucaaagacacuuaaca

SEQ ID NO: 1108704 - RNA, 19 nt, Artificial Sequence
  Description of Artificial Sequence: Synthetic oligonucleotide
  Sense strand starting at position 3215 of SEQ ID NO: 915821
gugucuuugagacaaucug

SEQ ID NO: 1108705 - RNA, 19 nt, Artificial Sequence
  Description of Artificial Sequence: Synthetic oligonucleotide
  Antisense strand to SEQ ID NO: 1108704
cagauugucucaaagacac

SEQ ID NO: 1108706 - RNA, 19 nt, Artificial Sequence
  Description of Artificial Sequence: Synthetic oligonucleotide
  Sense strand starting at position 3221 of SEQ ID NO: 915821
uugagacaaucugcuuauc

SEQ ID NO: 1108707 - RNA, 19 nt, Artificial Sequence
  Description of Artificial Sequence: Synthetic oligonucleotide
  Antisense strand to SEQ ID NO: 1108706
gauaagcagauugucucaa

SEQ ID NO: 1108708 - RNA, 19 nt, Artificial Sequence
  Description of Artificial Sequence: Synthetic oligonucleotide
  Sense strand starting at position 3232 of SEQ ID NO: 915821
ugcuuaucccagugaagca

SEQ ID NO: 1108709 - RNA, 19 nt, Artificial Sequence
  Description of Artificial Sequence: Synthetic oligonucleotide
  Antisense strand to SEQ ID NO: 1108708
ugcuucacugggauaagca

SEQ ID NO: 1108710 - RNA, 19 nt, Artificial Sequence
  Description of Artificial Sequence: Synthetic oligonucleotide
  Sense strand starting at position 3428 of SEQ ID NO: 915821
aagaaugacugauagauga

SEQ ID NO: 1108711 - RNA, 19 nt, Artificial Sequence
  Description of Artificial Sequence: Synthetic oligonucleotide
  Antisense strand to SEQ ID NO: 1108710
ucaucuaucagucauucuu

SEQ ID NO: 1108712 - RNA, 19 nt, Artificial Sequence
  Description of Artificial Sequence: Synthetic oligonucleotide
  Sense strand starting at position 3490 of SEQ ID NO: 915821
cauagcagacauugugcua

SEQ ID NO: 1108713 - RNA, 19 nt, Artificial Sequence
  Description of Artificial Sequence: Synthetic oligonucleotide
  Antisense strand to SEQ ID NO: 1108712
uagcacaaugucugcuaug

SEQ ID NO: 1108714 - RNA, 19 nt, Artificial Sequence
  Description of Artificial Sequence: Synthetic oligonucleotide
  Sense strand starting at position 3709 of SEQ ID NO: 915821
aguaaugagcugugaaguu

SEQ ID NO: 1108715 - RNA, 19 nt, Artificial Sequence
  Description of Artificial Sequence: Synthetic oligonucleotide
  Antisense strand to SEQ ID NO: 1108714
aacuucacagcucauuacu

SEQ ID NO: 1108716 - RNA, 19 nt, Artificial Sequence
  Description of Artificial Sequence: Synthetic oligonucleotide
  Sense strand starting at position 3749 of SEQ ID NO: 915821
gcaaauggcagaggaaaua

SEQ ID NO: 1108717 - RNA, 19 nt, Artificial Sequence
  Description of Artificial Sequence: Synthetic oligonucleotide
  Antisense strand to SEQ ID NO: 1108716
uauuuccucugccauuugc

SEQ ID NO: 1108718 - RNA, 19 nt, Artificial Sequence
  Description of Artificial Sequence: Synthetic oligonucleotide
  Sense strand starting at position 3782 of SEQ ID NO: 915821
cccagucucugacugaauu

SEQ ID NO: 1108719 - RNA, 19 nt, Artificial Sequence
  Description of Artificial Sequence: Synthetic oligonucleotide
  Antisense strand to SEQ ID NO: 1108718
aauucagucagagacuggg

SEQ ID NO: 1108720 - RNA, 19 nt, Artificial Sequence
  Description of Artificial Sequence: Synthetic oligonucleotide
  Sense strand starting at position 3783 of SEQ ID NO: 915821
ccagucucugacugaauua

SEQ ID NO: 1108721 - RNA, 19 nt, Artificial Sequence
  Description of Artificial Sequence: Synthetic oligonucleotide
  Antisense strand to SEQ ID NO: 1108720
uaauucagucagagacugg

SEQ ID NO: 1108722 - RNA, 19 nt, Artificial Sequence
  Description of Artificial Sequence: Synthetic oligonucleotide
  Sense strand starting at position 93 of SEQ ID NO: 915822
caaagaaagugagccauua

SEQ ID NO: 1108723 - RNA, 19 nt, Artificial Sequence
  Description of Artificial Sequence: Synthetic oligonucleotide
  Antisense strand to SEQ ID NO: 1108722
uaauggcucacuuucuuug

SEQ ID NO: 1108724 - RNA, 19 nt, Artificial Sequence
  Description of Artificial Sequence: Synthetic oligonucleotide
  Sense strand starting at position 155 of SEQ ID NO: 915822
aguguuaccuaaccaugga

SEQ ID NO: 1108725 - RNA, 19 nt, Artificial Sequence
  Description of Artificial Sequence: Synthetic oligonucleotide
  Antisense strand to SEQ ID NO: 1108724
uccaugguuagguaacacu

SEQ ID NO: 1108726 - RNA, 19 nt, Artificial Sequence
  Description of Artificial Sequence: Synthetic oligonucleotide
  Sense strand starting at position 240 of SEQ ID NO: 915822
ucuggugauugacuuuaga

SEQ ID NO: 1108727 - RNA, 19 nt, Artificial Sequence
  Description of Artificial Sequence: Synthetic oligonucleotide
  Antisense strand to SEQ ID NO: 1108726
ucuaaagucaaucaccaga

SEQ ID NO: 1108728 - RNA, 19 nt, Artificial Sequence
  Description of Artificial Sequence: Synthetic oligonucleotide
  Sense strand starting at position 250 of SEQ ID NO: 915822
gacuuuagaccuugguaac

SEQ ID NO: 1108729 - RNA, 19 nt, Artificial Sequence
  Description of Artificial Sequence: Synthetic oligonucleotide
  Antisense strand to SEQ ID NO: 1108728
guuaccaaggucuaaaguc

SEQ ID NO: 1108730 - RNA, 19 nt, Artificial Sequence
  Description of Artificial Sequence: Synthetic oligonucleotide
  Sense strand starting at position 251 of SEQ ID NO: 915822
acuuuagaccuugguaacu

SEQ ID NO: 1108731 - RNA, 19 nt, Artificial Sequence
  Description of Artificial Sequence: Synthetic oligonucleotide
  Antisense strand to SEQ ID NO: 1108730
aguuaccaaggucuaaagu

SEQ ID NO: 1108732 - RNA, 19 nt, Artificial Sequence
  Description of Artificial Sequence: Synthetic oligonucleotide
  Sense strand starting at position 267 of SEQ ID NO: 915822
acucaugugcaguacagaa

SEQ ID NO: 1108733 - RNA, 19 nt, Artificial Sequence
  Description of Artificial Sequence: Synthetic oligonucleotide
  Antisense strand to SEQ ID NO: 1108732
uucuguacugcacaugagu

SEQ ID NO: 1108734 - RNA, 19 nt, Artificial Sequence
  Description of Artificial Sequence: Synthetic oligonucleotide
  Sense strand starting at position 786 of SEQ ID NO: 915822
uaacauauguggguaggua

SEQ ID NO: 1108735 - RNA, 19 nt, Artificial Sequence
  Description of Artificial Sequence: Synthetic oligonucleotide
  Antisense strand to SEQ ID NO: 1108734
uaccuacccacauauguua

SEQ ID NO: 1108736 - RNA, 19 nt, Artificial Sequence
  Description of Artificial Sequence: Synthetic oligonucleotide
  Sense strand starting at position 787 of SEQ ID NO: 915822
aacauauguggguagguaa

SEQ ID NO: 1108737 - RNA, 19 nt, Artificial Sequence
  Description of Artificial Sequence: Synthetic oligonucleotide
  Antisense strand to SEQ ID NO: 1108736
uuaccuacccacauauguu

SEQ ID NO: 1108738 - RNA, 19 nt, Artificial Sequence
  Description of Artificial Sequence: Synthetic oligonucleotide
  Sense strand starting at position 790 of SEQ ID NO: 915822
auauguggguagguaaauu

SEQ ID NO: 1108739 - RNA, 19 nt, Artificial Sequence
  Description of Artificial Sequence: Synthetic oligonucleotide
  Antisense strand to SEQ ID NO: 1108738
aauuuaccuacccacauau

SEQ ID NO: 1108740 - RNA, 19 nt, Artificial Sequence
  Description of Artificial Sequence: Synthetic oligonucleotide
  Sense strand starting at position 972 of SEQ ID NO: 915822
ugaagcacaucuuuaauga

SEQ ID NO: 1108741 - RNA, 19 nt, Artificial Sequence
  Description of Artificial Sequence: Synthetic oligonucleotide
  Antisense strand to SEQ ID NO: 1108740
ucauuaaagaugugcuuca

SEQ ID NO: 1108742 - RNA, 19 nt, Artificial Sequence
  Description of Artificial Sequence: Synthetic oligonucleotide
  Sense strand starting at position 988 of SEQ ID NO: 915822
ugagaaugaugagcuguuu

SEQ ID NO: 1108743 - RNA, 19 nt, Artificial Sequence
  Description of Artificial Sequence: Synthetic oligonucleotide
  Antisense strand to SEQ ID NO: 1108742
aaacagcucaucauucuca

SEQ ID NO: 1108744 - RNA, 19 nt, Artificial Sequence
  Description of Artificial Sequence: Synthetic oligonucleotide
  Sense strand starting at position 1026 of SEQ ID NO: 915822
gcauccauggauugcaaga

SEQ ID NO: 1108745 - RNA, 19 nt, Artificial Sequence
  Description of Artificial Sequence: Synthetic oligonucleotide
  Antisense strand to SEQ ID NO: 1108744
ucuugcaauccauggaugc

SEQ ID NO: 1108746 - RNA, 19 nt, Artificial Sequence
  Description of Artificial Sequence: Synthetic oligonucleotide
  Sense strand starting at position 1431 of SEQ ID NO: 915822
gugggagagaauugucuuu

SEQ ID NO: 1108747 - RNA, 19 nt, Artificial Sequence
  Description of Artificial Sequence: Synthetic oligonucleotide
  Antisense strand to SEQ ID NO: 1108746
aaagacaauucucucccac

SEQ ID NO: 1108748 - RNA, 19 nt, Artificial Sequence
  Description of Artificial Sequence: Synthetic oligonucleotide
  Sense strand starting at position 1499 of SEQ ID NO: 915822
gauaaauagcauggucuca

SEQ ID NO: 1108749 - RNA, 19 nt, Artificial Sequence
  Description of Artificial Sequence: Synthetic oligonucleotide
  Antisense strand to SEQ ID NO: 1108748
ugagaccaugcuauuuauc

SEQ ID NO: 1108750 - RNA, 19 nt, Artificial Sequence
  Description of Artificial Sequence: Synthetic oligonucleotide
  Sense strand starting at position 1510 of SEQ ID NO: 915822
uggucucaaguagaucaau

SEQ ID NO: 1108751 - RNA, 19 nt, Artificial Sequence
  Description of Artificial Sequence: Synthetic oligonucleotide
  Antisense strand to SEQ ID NO: 1108750
auugaucuacuugagacca

SEQ ID NO: 1108752 - RNA, 19 nt, Artificial Sequence
  Description of Artificial Sequence: Synthetic oligonucleotide
  Sense strand starting at position 1590 of SEQ ID NO: 915822
gaaggcuuugcauauuaga

SEQ ID NO: 1108753 - RNA, 19 nt, Artificial Sequence
  Description of Artificial Sequence: Synthetic oligonucleotide
  Antisense strand to SEQ ID NO: 1108752
ucuaauaugcaaagccuuc

SEQ ID NO: 1108754 - RNA, 19 nt, Artificial Sequence
  Description of Artificial Sequence: Synthetic oligonucleotide
  Sense strand starting at position 1644 of SEQ ID NO: 915822
gcaaguaaugaguaaacua

SEQ ID NO: 1108755 - RNA, 19 nt, Artificial Sequence
  Description of Artificial Sequence: Synthetic oligonucleotide
  Antisense strand to SEQ ID NO: 1108754
uaguuuacucauuacuugc

SEQ ID NO: 1108756 - RNA, 19 nt, Artificial Sequence
  Description of Artificial Sequence: Synthetic oligonucleotide
  Sense strand starting at position 1678 of SEQ ID NO: 915822
gaaggaaucuuagagauaa

SEQ ID NO: 1108757 - RNA, 19 nt, Artificial Sequence
  Description of Artificial Sequence: Synthetic oligonucleotide
  Antisense strand to SEQ ID NO: 1108756
uuaucucuaagauuccuuc

SEQ ID NO: 1108758 - RNA, 19 nt, Artificial Sequence
  Description of Artificial Sequence: Synthetic oligonucleotide
  Sense strand starting at position 2038 of SEQ ID NO: 915822
aguugaggucucugaacau

SEQ ID NO: 1108759 - RNA, 19 nt, Artificial Sequence
  Description of Artificial Sequence: Synthetic oligonucleotide
  Antisense strand to SEQ ID NO: 1108758
auguucagagaccucaacu

SEQ ID NO: 1108760 - RNA, 19 nt, Artificial Sequence
  Description of Artificial Sequence: Synthetic oligonucleotide
  Sense strand starting at position 2047 of SEQ ID NO: 915822
cucugaacauucucuggaa

SEQ ID NO: 1108761 - RNA, 19 nt, Artificial Sequence
  Description of Artificial Sequence: Synthetic oligonucleotide
  Antisense strand to SEQ ID NO: 1108760
uuccagagaauguucagag

SEQ ID NO: 1108762 - RNA, 19 nt, Artificial Sequence
  Description of Artificial Sequence: Synthetic oligonucleotide
  Sense strand starting at position 2078 of SEQ ID NO: 915822
gccuauuuauagucaaggu

SEQ ID NO: 1108763 - RNA, 19 nt, Artificial Sequence
  Description of Artificial Sequence: Synthetic oligonucleotide
  Antisense strand to SEQ ID NO: 1108762
accuugacuauaaauaggc

SEQ ID NO: 1108764 - RNA, 19 nt, Artificial Sequence
  Description of Artificial Sequence: Synthetic oligonucleotide
  Sense strand starting at position 2255 of SEQ ID NO: 915822
acaucucuuguaugaauag

SEQ ID NO: 1108765 - RNA, 19 nt, Artificial Sequence
  Description of Artificial Sequence: Synthetic oligonucleotide
  Antisense strand to SEQ ID NO: 1108764
cuauucauacaagagaugu

SEQ ID NO: 1108766 - RNA, 19 nt, Artificial Sequence
  Description of Artificial Sequence: Synthetic oligonucleotide
  Sense strand starting at position 2347 of SEQ ID NO: 915822
cugcaaguucuccauuaga

SEQ ID NO: 1108767 - RNA, 19 nt, Artificial Sequence
  Description of Artificial Sequence: Synthetic oligonucleotide
  Antisense strand to SEQ ID NO: 1108766
ucuaauggagaacuugcag

SEQ ID NO: 1108768 - RNA, 19 nt, Artificial Sequence
  Description of Artificial Sequence: Synthetic oligonucleotide
  Sense strand starting at position 2456 of SEQ ID NO: 915822
gggauauuacuggguugca

SEQ ID NO: 1108769 - RNA, 19 nt, Artificial Sequence
  Description of Artificial Sequence: Synthetic oligonucleotide
  Antisense strand to SEQ ID NO: 1108768
ugcaacccaguaauauccc

SEQ ID NO: 1108770 - RNA, 19 nt, Artificial Sequence
  Description of Artificial Sequence: Synthetic oligonucleotide
  Sense strand starting at position 2457 of SEQ ID NO: 915822
ggauauuacuggguugcag

SEQ ID NO: 1108771 - RNA, 19 nt, Artificial Sequence
  Description of Artificial Sequence: Synthetic oligonucleotide
  Antisense strand to SEQ ID NO: 1108770
cugcaacccaguaauaucc

SEQ ID NO: 1108772 - RNA, 19 nt, Artificial Sequence
  Description of Artificial Sequence: Synthetic oligonucleotide
  Sense strand starting at position 2781 of SEQ ID NO: 915822
agggcuagacaucaugcaa

SEQ ID NO: 1108773 - RNA, 19 nt, Artificial Sequence
  Description of Artificial Sequence: Synthetic oligonucleotide
  Antisense strand to SEQ ID NO: 1108772
uugcaugaugucuagcccu

SEQ ID NO: 1108774 - RNA, 19 nt, Artificial Sequence
  Description of Artificial Sequence: Synthetic oligonucleotide
  Sense strand starting at position 3102 of SEQ ID NO: 915822
agugguugucucgaagaac

SEQ ID NO: 1108775 - RNA, 19 nt, Artificial Sequence
  Description of Artificial Sequence: Synthetic oligonucleotide
  Antisense strand to SEQ ID NO: 1108774
guucuucgagacaaccacu

SEQ ID NO: 1108776 - RNA, 19 nt, Artificial Sequence
  Description of Artificial Sequence: Synthetic oligonucleotide
  Sense strand starting at position 3105 of SEQ ID NO: 915822
gguugucucgaagaacaaa

SEQ ID NO: 1108777 - RNA, 19 nt, Artificial Sequence
  Description of Artificial Sequence: Synthetic oligonucleotide
  Antisense strand to SEQ ID NO: 1108776
uuuguucuucgagacaacc

SEQ ID NO: 1108778 - RNA, 19 nt, Artificial Sequence
  Description of Artificial Sequence: Synthetic oligonucleotide
  Sense strand starting at position 3133 of SEQ ID NO: 915822
agagcuuucuaagcauaac

SEQ ID NO: 1108779 - RNA, 19 nt, Artificial Sequence
  Description of Artificial Sequence: Synthetic oligonucleotide
  Antisense strand to SEQ ID NO: 1108778
guuaugcuuagaaagcucu

SEQ ID NO: 1108780 - RNA, 19 nt, Artificial Sequence
  Description of Artificial Sequence: Synthetic oligonucleotide
  Sense strand starting at position 3136 of SEQ ID NO: 915822
gcuuucuaagcauaacgaa

SEQ ID NO: 1108781 - RNA, 19 nt, Artificial Sequence
  Description of Artificial Sequence: Synthetic oligonucleotide
  Antisense strand to SEQ ID NO: 1108780
uucguuaugcuuagaaagc

SEQ ID NO: 1108782 - RNA, 19 nt, Artificial Sequence
  Description of Artificial Sequence: Synthetic oligonucleotide
  Sense strand starting at position 3143 of SEQ ID NO: 915822
aagcauaacgaaugacaga

SEQ ID NO: 1108783 - RNA, 19 nt, Artificial Sequence
  Description of Artificial Sequence: Synthetic oligonucleotide
  Antisense strand to SEQ ID NO: 1108782
ucugucauucguuaugcuu

SEQ ID NO: 1108784 - RNA, 19 nt, Artificial Sequence
  Description of Artificial Sequence: Synthetic oligonucleotide
  Sense strand starting at position 3284 of SEQ ID NO: 915822
aggaguacucaguggauug

SEQ ID NO: 1108785 - RNA, 19 nt, Artificial Sequence
  Description of Artificial Sequence: Synthetic oligonucleotide
  Antisense strand to SEQ ID NO: 1108784
caauccacugaguacuccu

SEQ ID NO: 1108786 - RNA, 19 nt, Artificial Sequence
  Description of Artificial Sequence: Synthetic oligonucleotide
  Sense strand starting at position 3285 of SEQ ID NO: 915822
ggaguacucaguggauuga

SEQ ID NO: 1108787 - RNA, 19 nt, Artificial Sequence
  Description of Artificial Sequence: Synthetic oligonucleotide
  Antisense strand to SEQ ID NO: 1108786
ucaauccacugaguacucc

SEQ ID NO: 1108788 - RNA, 19 nt, Artificial Sequence
  Description of Artificial Sequence: Synthetic oligonucleotide
  Sense strand starting at position 3295 of SEQ ID NO: 915822
guggauugacuucagguuu

SEQ ID NO: 1108789 - RNA, 19 nt, Artificial Sequence
  Description of Artificial Sequence: Synthetic oligonucleotide
  Antisense strand to SEQ ID NO: 1108788
aaaccugaagucaauccac

SEQ ID NO: 1108790 - RNA, 19 nt, Artificial Sequence
  Description of Artificial Sequence: Synthetic oligonucleotide
  Sense strand starting at position 3307 of SEQ ID NO: 915822
cagguuuguuuccuggaaa

SEQ ID NO: 1108791 - RNA, 19 nt, Artificial Sequence
  Description of Artificial Sequence: Synthetic oligonucleotide
  Antisense strand to SEQ ID NO: 1108790
uuuccaggaaacaaaccug

SEQ ID NO: 1108792 - RNA, 19 nt, Artificial Sequence
  Description of Artificial Sequence: Synthetic oligonucleotide
  Sense strand starting at position 3355 of SEQ ID NO: 915822
gcuagaaagaggugaucca

SEQ ID NO: 1108793 - RNA, 19 nt, Artificial Sequence
  Description of Artificial Sequence: Synthetic oligonucleotide
  Antisense strand to SEQ ID NO: 1108792
uggaucaccucuuucuagc

SEQ ID NO: 1108794 - RNA, 19 nt, Artificial Sequence
  Description of Artificial Sequence: Synthetic oligonucleotide
  Sense strand starting at position 3362 of SEQ ID NO: 915822
agaggugauccaggaugca

SEQ ID NO: 1108795 - RNA, 19 nt, Artificial Sequence
  Description of Artificial Sequence: Synthetic oligonucleotide
  Antisense strand to SEQ ID NO: 1108794
ugcauccuggaucaccucu

SEQ ID NO: 1108796 - RNA, 19 nt, Artificial Sequence
  Description of Artificial Sequence: Synthetic oligonucleotide
  Sense strand starting at position 3400 of SEQ ID NO: 915822
gguguaauaauauagguga

SEQ ID NO: 1108797 - RNA, 19 nt, Artificial Sequence
  Description of Artificial Sequence: Synthetic oligonucleotide
  Antisense strand to SEQ ID NO: 1108796
ucaccuauauuauuacacc

SEQ ID NO: 1108798 - RNA, 19 nt, Artificial Sequence
  Description of Artificial Sequence: Synthetic oligonucleotide
  Sense strand starting at position 3708 of SEQ ID NO: 915822
acaggaguuugacauuuga

SEQ ID NO: 1108799 - RNA, 19 nt, Artificial Sequence
  Description of Artificial Sequence: Synthetic oligonucleotide
  Antisense strand to SEQ ID NO: 1108798
ucaaaugucaaacuccugu

SEQ ID NO: 1108800 - RNA, 19 nt, Artificial Sequence
  Description of Artificial Sequence: Synthetic oligonucleotide
  Sense strand starting at position 3766 of SEQ ID NO: 915822
ugugaucgcccuguguaau

SEQ ID NO: 1108801 - RNA, 19 nt, Artificial Sequence
  Description of Artificial Sequence: Synthetic oligonucleotide
  Antisense strand to SEQ ID NO: 1108800
auuacacagggcgaucaca

SEQ ID NO: 1108802 - RNA, 19 nt, Artificial Sequence
  Description of Artificial Sequence: Synthetic oligonucleotide
  Sense strand starting at position 36 of SEQ ID NO: 915823
agaggaaagcucugucuau

SEQ ID NO: 1108803 - RNA, 19 nt, Artificial Sequence
  Description of Artificial Sequence: Synthetic oligonucleotide
  Antisense strand to SEQ ID NO: 1108802
auagacagagcuuuccucu

SEQ ID NO: 1108804 - RNA, 19 nt, Artificial Sequence
  Description of Artificial Sequence: Synthetic oligonucleotide
  Sense strand starting at position 37 of SEQ ID NO: 915823
gaggaaagcucugucuaua

SEQ ID NO: 1108805 - RNA, 19 nt, Artificial Sequence
  Description of Artificial Sequence: Synthetic oligonucleotide
  Antisense strand to SEQ ID NO: 1108804
uauagacagagcuuuccuc

SEQ ID NO: 1108806 - RNA, 19 nt, Artificial Sequence
  Description of Artificial Sequence: Synthetic oligonucleotide
  Sense strand starting at position 227 of SEQ ID NO: 915823
aguguaaugguguguucuu

SEQ ID NO: 1108807 - RNA, 19 nt, Artificial Sequence
  Description of Artificial Sequence: Synthetic oligonucleotide
  Antisense strand to SEQ ID NO: 1108806
aagaacacaccauuacacu

SEQ ID NO: 1108808 - RNA, 19 nt, Artificial Sequence
  Description of Artificial Sequence: Synthetic oligonucleotide
  Sense strand starting at position 228 of SEQ ID NO: 915823
guguaaugguguguucuuu

SEQ ID NO: 1108809 - RNA, 19 nt, Artificial Sequence
  Description of Artificial Sequence: Synthetic oligonucleotide
  Antisense strand to SEQ ID NO: 1108808
aaagaacacaccauuacac

SEQ ID NO: 1108810 - RNA, 19 nt, Artificial Sequence
  Description of Artificial Sequence: Synthetic oligonucleotide
  Sense strand starting at position 685 of SEQ ID NO: 915823
ucuucuuucccugacuugu

SEQ ID NO: 1108811 - RNA, 19 nt, Artificial Sequence
  Description of Artificial Sequence: Synthetic oligonucleotide
  Antisense strand to SEQ ID NO: 1108810
acaagucagggaaagaaga

SEQ ID NO: 1108812 - RNA, 19 nt, Artificial Sequence
  Description of Artificial Sequence: Synthetic oligonucleotide
  Sense strand starting at position 696 of SEQ ID NO: 915823
ugacuugucuuguuuccaa

SEQ ID NO: 1108813 - RNA, 19 nt, Artificial Sequence
  Description of Artificial Sequence: Synthetic oligonucleotide
  Antisense strand to SEQ ID NO: 1108812
uuggaaacaagacaaguca

SEQ ID NO: 1108814 - RNA, 19 nt, Artificial Sequence
  Description of Artificial Sequence: Synthetic oligonucleotide
  Sense strand starting at position 779 of SEQ ID NO: 915823
uuaccugauugucaaagca

SEQ ID NO: 1108815 - RNA, 19 nt, Artificial Sequence
  Description of Artificial Sequence: Synthetic oligonucleotide
  Antisense strand to SEQ ID NO: 1108814
ugcuuugacaaucagguaa

SEQ ID NO: 1108816 - RNA, 19 nt, Artificial Sequence
  Description of Artificial Sequence: Synthetic oligonucleotide
  Sense strand starting at position 1030 of SEQ ID NO: 915823
ggugcaaguuacuucucau

SEQ ID NO: 1108817 - RNA, 19 nt, Artificial Sequence
  Description of Artificial Sequence: Synthetic oligonucleotide
  Antisense strand to SEQ ID NO: 1108816
augagaaguaacuugcacc

SEQ ID NO: 1108818 - RNA, 19 nt, Artificial Sequence
  Description of Artificial Sequence: Synthetic oligonucleotide
  Sense strand starting at position 1059 of SEQ ID NO: 915823
uccugugauaacuguuagu

SEQ ID NO: 1108819 - RNA, 19 nt, Artificial Sequence
  Description of Artificial Sequence: Synthetic oligonucleotide
  Antisense strand to SEQ ID NO: 1108818
acuaacaguuaucacagga

SEQ ID NO: 1108820 - RNA, 19 nt, Artificial Sequence
  Description of Artificial Sequence: Synthetic oligonucleotide
  Sense strand starting at position 1086 of SEQ ID NO: 915823
uccauuacuucuguggaua

SEQ ID NO: 1108821 - RNA, 19 nt, Artificial Sequence
  Description of Artificial Sequence: Synthetic oligonucleotide
  Antisense strand to SEQ ID NO: 1108820
uauccacagaaguaaugga

SEQ ID NO: 1108822 - RNA, 19 nt, Artificial Sequence
  Description of Artificial Sequence: Synthetic oligonucleotide
  Sense strand starting at position 1087 of SEQ ID NO: 915823
ccauuacuucuguggauaa

SEQ ID NO: 1108823 - RNA, 19 nt, Artificial Sequence
  Description of Artificial Sequence: Synthetic oligonucleotide
  Antisense strand to SEQ ID NO: 1108822
uuauccacagaaguaaugg

SEQ ID NO: 1108824 - RNA, 19 nt, Artificial Sequence
  Description of Artificial Sequence: Synthetic oligonucleotide
  Sense strand starting at position 1088 of SEQ ID NO: 915823
cauuacuucuguggauaag

SEQ ID NO: 1108825 - RNA, 19 nt, Artificial Sequence
  Description of Artificial Sequence: Synthetic oligonucleotide
  Antisense strand to SEQ ID NO: 1108824
cuuauccacagaaguaaug

SEQ ID NO: 1108826 - RNA, 19 nt, Artificial Sequence
  Description of Artificial Sequence: Synthetic oligonucleotide
  Sense strand starting at position 1797 of SEQ ID NO: 915823
ggaggagucugacagcaua

SEQ ID NO: 1108827 - RNA, 19 nt, Artificial Sequence
  Description of Artificial Sequence: Synthetic oligonucleotide
  Antisense strand to SEQ ID NO: 1108826
uaugcugucagacuccucc

SEQ ID NO: 1108828 - RNA, 19 nt, Artificial Sequence
  Description of Artificial Sequence: Synthetic oligonucleotide
  Sense strand starting at position 1819 of SEQ ID NO: 915823
auuguuccucaccauagau

SEQ ID NO: 1108829 - RNA, 19 nt, Artificial Sequence
  Description of Artificial Sequence: Synthetic oligonucleotide
  Antisense strand to SEQ ID NO: 1108828
aucuauggugaggaacaau

SEQ ID NO: 1108830 - RNA, 19 nt, Artificial Sequence
  Description of Artificial Sequence: Synthetic oligonucleotide
  Sense strand starting at position 2014 of SEQ ID NO: 915823
ggagaaaucuccucuucua

SEQ ID NO: 1108831 - RNA, 19 nt, Artificial Sequence
  Description of Artificial Sequence: Synthetic oligonucleotide
  Antisense strand to SEQ ID NO: 1108830
uagaagaggagauuucucc

SEQ ID NO: 1108832 - RNA, 19 nt, Artificial Sequence
  Description of Artificial Sequence: Synthetic oligonucleotide
  Sense strand starting at position 2045 of SEQ ID NO: 915823
cguccacucucacuugaaa

SEQ ID NO: 1108833 - RNA, 19 nt, Artificial Sequence
  Description of Artificial Sequence: Synthetic oligonucleotide
  Antisense strand to SEQ ID NO: 1108832
uuucaagugagaguggacg

SEQ ID NO: 1108834 - RNA, 19 nt, Artificial Sequence
  Description of Artificial Sequence: Synthetic oligonucleotide
  Sense strand starting at position 2062 of SEQ ID NO: 915823
aacagaacucggugaucuu

SEQ ID NO: 1108835 - RNA, 19 nt, Artificial Sequence
  Description of Artificial Sequence: Synthetic oligonucleotide
  Antisense strand to SEQ ID NO: 1108834
aagaucaccgaguucuguu

SEQ ID NO: 1108836 - RNA, 19 nt, Artificial Sequence
  Description of Artificial Sequence: Synthetic oligonucleotide
  Sense strand starting at position 2071 of SEQ ID NO: 915823
cggugaucuuguuugcaag

SEQ ID NO: 1108837 - RNA, 19 nt, Artificial Sequence
  Description of Artificial Sequence: Synthetic oligonucleotide
  Antisense strand to SEQ ID NO: 1108836
cuugcaaacaagaucaccg

SEQ ID NO: 1108838 - RNA, 19 nt, Artificial Sequence
  Description of Artificial Sequence: Synthetic oligonucleotide
  Sense strand starting at position 2073 of SEQ ID NO: 915823
gugaucuuguuugcaagca

SEQ ID NO: 1108839 - RNA, 19 nt, Artificial Sequence
  Description of Artificial Sequence: Synthetic oligonucleotide
  Antisense strand to SEQ ID NO: 1108838
ugcuugcaaacaagaucac

SEQ ID NO: 1108840 - RNA, 19 nt, Artificial Sequence
  Description of Artificial Sequence: Synthetic oligonucleotide
  Sense strand starting at position 2229 of SEQ ID NO: 915823
ccgcuuuaucacuggacuu

SEQ ID NO: 1108841 - RNA, 19 nt, Artificial Sequence
  Description of Artificial Sequence: Synthetic oligonucleotide
  Antisense strand to SEQ ID NO: 1108840
aaguccagugauaaagcgg

SEQ ID NO: 1108842 - RNA, 19 nt, Artificial Sequence
  Description of Artificial Sequence: Synthetic oligonucleotide
  Sense strand starting at position 2231 of SEQ ID NO: 915823
gcuuuaucacuggacuugu

SEQ ID NO: 1108843 - RNA, 19 nt, Artificial Sequence
  Description of Artificial Sequence: Synthetic oligonucleotide
  Antisense strand to SEQ ID NO: 1108842
acaaguccagugauaaagc

SEQ ID NO: 1108844 - RNA, 19 nt, Artificial Sequence
  Description of Artificial Sequence: Synthetic oligonucleotide
  Sense strand starting at position 2355 of SEQ ID NO: 915823
gagaaagucucucauagac

SEQ ID NO: 1108845 - RNA, 19 nt, Artificial Sequence
  Description of Artificial Sequence: Synthetic oligonucleotide
  Antisense strand to SEQ ID NO: 1108844
gucuaugagagacuuucuc

SEQ ID NO: 1108846 - RNA, 19 nt, Artificial Sequence
  Description of Artificial Sequence: Synthetic oligonucleotide
  Sense strand starting at position 2357 of SEQ ID NO: 915823
gaaagucucucauagacug

SEQ ID NO: 1108847 - RNA, 19 nt, Artificial Sequence
  Description of Artificial Sequence: Synthetic oligonucleotide
  Antisense strand to SEQ ID NO: 1108846
cagucuaugagagacuuuc

SEQ ID NO: 1108848 - RNA, 19 nt, Artificial Sequence
  Description of Artificial Sequence: Synthetic oligonucleotide
  Sense strand starting at position 2407 of SEQ ID NO: 915823
gccaucaaaccugagguuu

SEQ ID NO: 1108849 - RNA, 19 nt, Artificial Sequence
  Description of Artificial Sequence: Synthetic oligonucleotide
  Antisense strand to SEQ ID NO: 1108848
aaaccucagguuugauggc

SEQ ID NO: 1108850 - RNA, 19 nt, Artificial Sequence
  Description of Artificial Sequence: Synthetic oligonucleotide
  Sense strand starting at position 2415 of SEQ ID NO: 915823
accugagguuuccauucua

SEQ ID NO: 1108851 - RNA, 19 nt, Artificial Sequence
  Description of Artificial Sequence: Synthetic oligonucleotide
  Antisense strand to SEQ ID NO: 1108850
uagaauggaaaccucaggu

SEQ ID NO: 1108852 - RNA, 19 nt, Artificial Sequence
  Description of Artificial Sequence: Synthetic oligonucleotide
  Sense strand starting at position 2458 of SEQ ID NO: 915823
aggaaagcugcuuauccuu

SEQ ID NO: 1108853 - RNA, 19 nt, Artificial Sequence
  Description of Artificial Sequence: Synthetic oligonucleotide
  Antisense strand to SEQ ID NO: 1108852
aaggauaagcagcuuuccu

SEQ ID NO: 1108854 - RNA, 19 nt, Artificial Sequence
  Description of Artificial Sequence: Synthetic oligonucleotide
  Sense strand starting at position 2522 of SEQ ID NO: 915823
gaggcugcuaucgauguga

SEQ ID NO: 1108855 - RNA, 19 nt, Artificial Sequence
  Description of Artificial Sequence: Synthetic oligonucleotide
  Antisense strand to SEQ ID NO: 1108854
ucacaucgauagcagccuc

SEQ ID NO: 1108856 - RNA, 19 nt, Artificial Sequence
  Description of Artificial Sequence: Synthetic oligonucleotide
  Sense strand starting at position 2524 of SEQ ID NO: 915823
ggcugcuaucgaugugaau

SEQ ID NO: 1108857 - RNA, 19 nt, Artificial Sequence
  Description of Artificial Sequence: Synthetic oligonucleotide
  Antisense strand to SEQ ID NO: 1108856
auucacaucgauagcagcc

SEQ ID NO: 1108858 - RNA, 19 nt, Artificial Sequence
  Description of Artificial Sequence: Synthetic oligonucleotide
  Sense strand starting at position 2526 of SEQ ID NO: 915823
cugcuaucgaugugaauuu

SEQ ID NO: 1108859 - RNA, 19 nt, Artificial Sequence
  Description of Artificial Sequence: Synthetic oligonucleotide
  Antisense strand to SEQ ID NO: 1108858
aaauucacaucgauagcag

SEQ ID NO: 1108860 - RNA, 19 nt, Artificial Sequence
  Description of Artificial Sequence: Synthetic oligonucleotide
  Sense strand starting at position 2527 of SEQ ID NO: 915823
ugcuaucgaugugaauuua

SEQ ID NO: 1108861 - RNA, 19 nt, Artificial Sequence
  Description of Artificial Sequence: Synthetic oligonucleotide
  Antisense strand to SEQ ID NO: 1108860
uaaauucacaucgauagca

SEQ ID NO: 1108862 - RNA, 19 nt, Artificial Sequence
  Description of Artificial Sequence: Synthetic oligonucleotide
  Sense strand starting at position 2880 of SEQ ID NO: 915823
uguguuccugcucagaauc

SEQ ID NO: 1108863 - RNA, 19 nt, Artificial Sequence
  Description of Artificial Sequence: Synthetic oligonucleotide
  Antisense strand to SEQ ID NO: 1108862
gauucugagcaggaacaca

SEQ ID NO: 1108864 - RNA, 19 nt, Artificial Sequence
  Description of Artificial Sequence: Synthetic oligonucleotide
  Sense strand starting at position 2949 of SEQ ID NO: 915823
aguaucucauagccacaua

SEQ ID NO: 1108865 - RNA, 19 nt, Artificial Sequence
  Description of Artificial Sequence: Synthetic oligonucleotide
  Antisense strand to SEQ ID NO: 1108864
uauguggcuaugagauacu

SEQ ID NO: 1108866 - RNA, 19 nt, Artificial Sequence
  Description of Artificial Sequence: Synthetic oligonucleotide
  Sense strand starting at position 3308 of SEQ ID NO: 915823
uugaaaugugcucagucca

SEQ ID NO: 1108867 - RNA, 19 nt, Artificial Sequence
  Description of Artificial Sequence: Synthetic oligonucleotide
  Antisense strand to SEQ ID NO: 1108866
uggacugagcacauuucaa

SEQ ID NO: 1108868 - RNA, 19 nt, Artificial Sequence
  Description of Artificial Sequence: Synthetic oligonucleotide
  Sense strand starting at position 3330 of SEQ ID NO: 915823
ugagauacgcuuuaagugu

SEQ ID NO: 1108869 - RNA, 19 nt, Artificial Sequence
  Description of Artificial Sequence: Synthetic oligonucleotide
  Antisense strand to SEQ ID NO: 1108868
acacuuaaagcguaucuca

SEQ ID NO: 1108870 - RNA, 19 nt, Artificial Sequence
  Description of Artificial Sequence: Synthetic oligonucleotide
  Sense strand starting at position 3367 of SEQ ID NO: 915823
caaagacaccguugaaaca

SEQ ID NO: 1108871 - RNA, 19 nt, Artificial Sequence
  Description of Artificial Sequence: Synthetic oligonucleotide
  Antisense strand to SEQ ID NO: 1108870
uguuucaacggugucuuug

SEQ ID NO: 1108872 - RNA, 19 nt, Artificial Sequence
  Description of Artificial Sequence: Synthetic oligonucleotide
  Sense strand starting at position 3412 of SEQ ID NO: 915823
uuuauauggcuuucguguu

SEQ ID NO: 1108873 - RNA, 19 nt, Artificial Sequence
  Description of Artificial Sequence: Synthetic oligonucleotide
  Antisense strand to SEQ ID NO: 1108872
aacacgaaagccauauaaa

SEQ ID NO: 1108874 - RNA, 19 nt, Artificial Sequence
  Description of Artificial Sequence: Synthetic oligonucleotide
  Sense strand starting at position 3578 of SEQ ID NO: 915823
ggcugacucuucucauucu

SEQ ID NO: 1108875 - RNA, 19 nt, Artificial Sequence
  Description of Artificial Sequence: Synthetic oligonucleotide
  Antisense strand to SEQ ID NO: 1108874
agaaugagaagagucagcc

SEQ ID NO: 1108876 - RNA, 19 nt, Artificial Sequence
  Description of Artificial Sequence: Synthetic oligonucleotide
  Sense strand starting at position 3859 of SEQ ID NO: 915823
uuugaaacuuucccugaga

SEQ ID NO: 1108877 - RNA, 19 nt, Artificial Sequence
  Description of Artificial Sequence: Synthetic oligonucleotide
  Antisense strand to SEQ ID NO: 1108876
ucucagggaaaguuucaaa

SEQ ID NO: 1108878 - RNA, 19 nt, Artificial Sequence
  Description of Artificial Sequence: Synthetic oligonucleotide
  Sense strand starting at position 3861 of SEQ ID NO: 915823
ugaaacuuucccugagaau

SEQ ID NO: 1108879 - RNA, 19 nt, Artificial Sequence
  Description of Artificial Sequence: Synthetic oligonucleotide
  Antisense strand to SEQ ID NO: 1108878
auucucagggaaaguuuca

SEQ ID NO: 1108880 - RNA, 19 nt, Artificial Sequence
  Description of Artificial Sequence: Synthetic oligonucleotide
  Sense strand starting at position 3982 of SEQ ID NO: 915823
gagaauggcauguggguau

SEQ ID NO: 1108881 - RNA, 19 nt, Artificial Sequence
  Description of Artificial Sequence: Synthetic oligonucleotide
  Antisense strand to SEQ ID NO: 1108880
auacccacaugccauucuc

SEQ ID NO: 1108882 - RNA, 19 nt, Artificial Sequence
  Description of Artificial Sequence: Synthetic oligonucleotide
  Sense strand starting at position 244 of SEQ ID NO: 915824
cagggugccugacuuugaa

SEQ ID NO: 1108883 - RNA, 19 nt, Artificial Sequence
  Description of Artificial Sequence: Synthetic oligonucleotide
  Antisense strand to SEQ ID NO: 1108882
uucaaagucaggcacccug

SEQ ID NO: 1108884 - RNA, 19 nt, Artificial Sequence
  Description of Artificial Sequence: Synthetic oligonucleotide
  Sense strand starting at position 247 of SEQ ID NO: 915824
ggugccugacuuugaaauc

SEQ ID NO: 1108885 - RNA, 19 nt, Artificial Sequence
  Description of Artificial Sequence: Synthetic oligonucleotide
  Antisense strand to SEQ ID NO: 1108884
gauuucaaagucaggcacc

SEQ ID NO: 1108886 - RNA, 19 nt, Artificial Sequence
  Description of Artificial Sequence: Synthetic oligonucleotide
  Sense strand starting at position 257 of SEQ ID NO: 915824
uuugaaaucucagaaugaa

SEQ ID NO: 1108887 - RNA, 19 nt, Artificial Sequence
  Description of Artificial Sequence: Synthetic oligonucleotide
  Antisense strand to SEQ ID NO: 1108886
uucauucugagauuucaaa

SEQ ID NO: 1108888 - RNA, 19 nt, Artificial Sequence
  Description of Artificial Sequence: Synthetic oligonucleotide
  Sense strand starting at position 360 of SEQ ID NO: 915824
agugcuuucuuagccauuu

SEQ ID NO: 1108889 - RNA, 19 nt, Artificial Sequence
  Description of Artificial Sequence: Synthetic oligonucleotide
  Antisense strand to SEQ ID NO: 1108888
aaauggcuaagaaagcacu

SEQ ID NO: 1108890 - RNA, 19 nt, Artificial Sequence
  Description of Artificial Sequence: Synthetic oligonucleotide
  Sense strand starting at position 361 of SEQ ID NO: 915824
gugcuuucuuagccauuua

SEQ ID NO: 1108891 - RNA, 19 nt, Artificial Sequence
  Description of Artificial Sequence: Synthetic oligonucleotide
  Antisense strand to SEQ ID NO: 1108890
uaaauggcuaagaaagcac

SEQ ID NO: 1108892 - RNA, 19 nt, Artificial Sequence
  Description of Artificial Sequence: Synthetic oligonucleotide
  Sense strand starting at position 825 of SEQ ID NO: 915824
ggaggugguaccugaccaa

SEQ ID NO: 1108893 - RNA, 19 nt, Artificial Sequence
  Description of Artificial Sequence: Synthetic oligonucleotide
  Antisense strand to SEQ ID NO: 1108892
uuggucagguaccaccucc

SEQ ID NO: 1108894 - RNA, 19 nt, Artificial Sequence
  Description of Artificial Sequence: Synthetic oligonucleotide
  Sense strand starting at position 828 of SEQ ID NO: 915824
ggugguaccugaccaagaa

SEQ ID NO: 1108895 - RNA, 19 nt, Artificial Sequence
  Description of Artificial Sequence: Synthetic oligonucleotide
  Antisense strand to SEQ ID NO: 1108894
uucuuggucagguaccacc

SEQ ID NO: 1108896 - RNA, 19 nt, Artificial Sequence
  Description of Artificial Sequence: Synthetic oligonucleotide
  Sense strand starting at position 884 of SEQ ID NO: 915824
agaaucaacuggucucaac

SEQ ID NO: 1108897 - RNA, 19 nt, Artificial Sequence
  Description of Artificial Sequence: Synthetic oligonucleotide
  Antisense strand to SEQ ID NO: 1108896
guugagaccaguugauucu

SEQ ID NO: 1108898 - RNA, 19 nt, Artificial Sequence
  Description of Artificial Sequence: Synthetic oligonucleotide
  Sense strand starting at position 1004 of SEQ ID NO: 915824
ggagaaauccuaggucgag

SEQ ID NO: 1108899 - RNA, 19 nt, Artificial Sequence
  Description of Artificial Sequence: Synthetic oligonucleotide
  Antisense strand to SEQ ID NO: 1108898
cucgaccuaggauuucucc

SEQ ID NO: 1108900 - RNA, 19 nt, Artificial Sequence
  Description of Artificial Sequence: Synthetic oligonucleotide
  Sense strand starting at position 1007 of SEQ ID NO: 915824
gaaauccuaggucgaggaa

SEQ ID NO: 1108901 - RNA, 19 nt, Artificial Sequence
  Description of Artificial Sequence: Synthetic oligonucleotide
  Antisense strand to SEQ ID NO: 1108900
uuccucgaccuaggauuuc

SEQ ID NO: 1108902 - RNA, 19 nt, Artificial Sequence
  Description of Artificial Sequence: Synthetic oligonucleotide
  Sense strand starting at position 1022 of SEQ ID NO: 915824
ggaaaccgugggugaguua

SEQ ID NO: 1108903 - RNA, 19 nt, Artificial Sequence
  Description of Artificial Sequence: Synthetic oligonucleotide
  Antisense strand to SEQ ID NO: 1108902
uaacucacccacgguuucc

SEQ ID NO: 1108904 - RNA, 19 nt, Artificial Sequence
  Description of Artificial Sequence: Synthetic oligonucleotide
  Sense strand starting at position 1049 of SEQ ID NO: 915824
gauugagguuaaguugaga

SEQ ID NO: 1108905 - RNA, 19 nt, Artificial Sequence
  Description of Artificial Sequence: Synthetic oligonucleotide
  Antisense strand to SEQ ID NO: 1108904
ucucaacuuaaccucaauc

SEQ ID NO: 1108906 - RNA, 19 nt, Artificial Sequence
  Description of Artificial Sequence: Synthetic oligonucleotide
  Sense strand starting at position 1118 of SEQ ID NO: 915824
guagauuauagugagccua

SEQ ID NO: 1108907 - RNA, 19 nt, Artificial Sequence
  Description of Artificial Sequence: Synthetic oligonucleotide
  Antisense strand to SEQ ID NO: 1108906
uaggcucacuauaaucuac

SEQ ID NO: 1108908 - RNA, 19 nt, Artificial Sequence
  Description of Artificial Sequence: Synthetic oligonucleotide
  Sense strand starting at position 1152 of SEQ ID NO: 915824
aaguaagggauucgaguga

SEQ ID NO: 1108909 - RNA, 19 nt, Artificial Sequence
  Description of Artificial Sequence: Synthetic oligonucleotide
  Antisense strand to SEQ ID NO: 1108908
ucacucgaaucccuuacuu

SEQ ID NO: 1108910 - RNA, 19 nt, Artificial Sequence
  Description of Artificial Sequence: Synthetic oligonucleotide
  Sense strand starting at position 1174 of SEQ ID NO: 915824
cugagucugugcuuacaag

SEQ ID NO: 1108911 - RNA, 19 nt, Artificial Sequence
  Description of Artificial Sequence: Synthetic oligonucleotide
  Antisense strand to SEQ ID NO: 1108910
cuuguaagcacagacucag

SEQ ID NO: 1108912 - RNA, 19 nt, Artificial Sequence
  Description of Artificial Sequence: Synthetic oligonucleotide
  Sense strand starting at position 1175 of SEQ ID NO: 915824
ugagucugugcuuacaaga

SEQ ID NO: 1108913 - RNA, 19 nt, Artificial Sequence
  Description of Artificial Sequence: Synthetic oligonucleotide
  Antisense strand to SEQ ID NO: 1108912
ucuuguaagcacagacuca

SEQ ID NO: 1108914 - RNA, 19 nt, Artificial Sequence
  Description of Artificial Sequence: Synthetic oligonucleotide
  Sense strand starting at position 1451 of SEQ ID NO: 915824
gcaaguagcagugaauuag

SEQ ID NO: 1108915 - RNA, 19 nt, Artificial Sequence
  Description of Artificial Sequence: Synthetic oligonucleotide
  Antisense strand to SEQ ID NO: 1108914
cuaauucacugcuacuugc

SEQ ID NO: 1108916 - RNA, 19 nt, Artificial Sequence
  Description of Artificial Sequence: Synthetic oligonucleotide
  Sense strand starting at position 1600 of SEQ ID NO: 915824
ggaggaaauuaggccuauu

SEQ ID NO: 1108917 - RNA, 19 nt, Artificial Sequence
  Description of Artificial Sequence: Synthetic oligonucleotide
  Antisense strand to SEQ ID NO: 1108916
aauaggccuaauuuccucc

SEQ ID NO: 1108918 - RNA, 19 nt, Artificial Sequence
  Description of Artificial Sequence: Synthetic oligonucleotide
  Sense strand starting at position 1729 of SEQ ID NO: 915824
ggaggaaauuaagauaaac

SEQ ID NO: 1108919 - RNA, 19 nt, Artificial Sequence
  Description of Artificial Sequence: Synthetic oligonucleotide
  Antisense strand to SEQ ID NO: 1108918
guuuaucuuaauuuccucc

SEQ ID NO: 1108920 - RNA, 19 nt, Artificial Sequence
  Description of Artificial Sequence: Synthetic oligonucleotide
  Sense strand starting at position 1782 of SEQ ID NO: 915824
gagaaaguuaggcgaagaa

SEQ ID NO: 1108921 - RNA, 19 nt, Artificial Sequence
  Description of Artificial Sequence: Synthetic oligonucleotide
  Antisense strand to SEQ ID NO: 1108920
uucuucgccuaacuuucuc

SEQ ID NO: 1108922 - RNA, 19 nt, Artificial Sequence
  Description of Artificial Sequence: Synthetic oligonucleotide
  Sense strand starting at position 1839 of SEQ ID NO: 915824
cacggaaguucuucugcaa

SEQ ID NO: 1108923 - RNA, 19 nt, Artificial Sequence
  Description of Artificial Sequence: Synthetic oligonucleotide
  Antisense strand to SEQ ID NO: 1108922
uugcagaagaacuuccgug

SEQ ID NO: 1108924 - RNA, 19 nt, Artificial Sequence
  Description of Artificial Sequence: Synthetic oligonucleotide
  Sense strand starting at position 2055 of SEQ ID NO: 915824
uucuguaaccaccagguua

SEQ ID NO: 1108925 - RNA, 19 nt, Artificial Sequence
  Description of Artificial Sequence: Synthetic oligonucleotide
  Antisense strand to SEQ ID NO: 1108924
uaaccuggugguuacagaa

SEQ ID NO: 1108926 - RNA, 19 nt, Artificial Sequence
  Description of Artificial Sequence: Synthetic oligonucleotide
  Sense strand starting at position 2111 of SEQ ID NO: 915824
aaaguuguuucugccugga

SEQ ID NO: 1108927 - RNA, 19 nt, Artificial Sequence
  Description of Artificial Sequence: Synthetic oligonucleotide
  Antisense strand to SEQ ID NO: 1108926
uccaggcagaaacaacuuu

SEQ ID NO: 1108928 - RNA, 19 nt, Artificial Sequence
  Description of Artificial Sequence: Synthetic oligonucleotide
  Sense strand starting at position 2113 of SEQ ID NO: 915824
aguuguuucugccuggaac

SEQ ID NO: 1108929 - RNA, 19 nt, Artificial Sequence
  Description of Artificial Sequence: Synthetic oligonucleotide
  Antisense strand to SEQ ID NO: 1108928
guuccaggcagaaacaacu

SEQ ID NO: 1108930 - RNA, 19 nt, Artificial Sequence
  Description of Artificial Sequence: Synthetic oligonucleotide
  Sense strand starting at position 2114 of SEQ ID NO: 915824
guuguuucugccuggaaca

SEQ ID NO: 1108931 - RNA, 19 nt, Artificial Sequence
  Description of Artificial Sequence: Synthetic oligonucleotide
  Antisense strand to SEQ ID NO: 1108930
uguuccaggcagaaacaac

SEQ ID NO: 1108932 - RNA, 19 nt, Artificial Sequence
  Description of Artificial Sequence: Synthetic oligonucleotide
  Sense strand starting at position 2115 of SEQ ID NO: 915824
uuguuucugccuggaacau

SEQ ID NO: 1108933 - RNA, 19 nt, Artificial Sequence
  Description of Artificial Sequence: Synthetic oligonucleotide
  Antisense strand to SEQ ID NO: 1108932
auguuccaggcagaaacaa

SEQ ID NO: 1108934 - RNA, 19 nt, Artificial Sequence
  Description of Artificial Sequence: Synthetic oligonucleotide
  Sense strand starting at position 2337 of SEQ ID NO: 915824
guaaacuuggccggucaca

SEQ ID NO: 1108935 - RNA, 19 nt, Artificial Sequence
  Description of Artificial Sequence: Synthetic oligonucleotide
  Antisense strand to SEQ ID NO: 1108934
ugugaccggccaaguuuac

SEQ ID NO: 1108936 - RNA, 19 nt, Artificial Sequence
  Description of Artificial Sequence: Synthetic oligonucleotide
  Sense strand starting at position 2751 of SEQ ID NO: 915824
accaaagccuuugagauuu

SEQ ID NO: 1108937 - RNA, 19 nt, Artificial Sequence
  Description of Artificial Sequence: Synthetic oligonucleotide
  Antisense strand to SEQ ID NO: 1108936
aaaucucaaaggcuuuggu

SEQ ID NO: 1108938 - RNA, 19 nt, Artificial Sequence
  Description of Artificial Sequence: Synthetic oligonucleotide
  Sense strand starting at position 2759 of SEQ ID NO: 915824
cuuugagauuugcauauuc

SEQ ID NO: 1108939 - RNA, 19 nt, Artificial Sequence
  Description of Artificial Sequence: Synthetic oligonucleotide
  Antisense strand to SEQ ID NO: 1108938
gaauaugcaaaucucaaag

SEQ ID NO: 1108940 - RNA, 19 nt, Artificial Sequence
  Description of Artificial Sequence: Synthetic oligonucleotide
  Sense strand starting at position 2790 of SEQ ID NO: 915824
acuccuacucuggaaaugu

SEQ ID NO: 1108941 - RNA, 19 nt, Artificial Sequence
  Description of Artificial Sequence: Synthetic oligonucleotide
  Antisense strand to SEQ ID NO: 1108940
acauuuccagaguaggagu

SEQ ID NO: 1108942 - RNA, 19 nt, Artificial Sequence
  Description of Artificial Sequence: Synthetic oligonucleotide
  Sense strand starting at position 2799 of SEQ ID NO: 915824
cuggaaauguuucuuaaug

SEQ ID NO: 1108943 - RNA, 19 nt, Artificial Sequence
  Description of Artificial Sequence: Synthetic oligonucleotide
  Antisense strand to SEQ ID NO: 1108942
cauuaagaaacauuuccag

SEQ ID NO: 1108944 - RNA, 19 nt, Artificial Sequence
  Description of Artificial Sequence: Synthetic oligonucleotide
  Sense strand starting at position 2800 of SEQ ID NO: 915824
uggaaauguuucuuaauga

SEQ ID NO: 1108945 - RNA, 19 nt, Artificial Sequence
  Description of Artificial Sequence: Synthetic oligonucleotide
  Antisense strand to SEQ ID NO: 1108944
ucauuaagaaacauuucca

SEQ ID NO: 1108946 - RNA, 19 nt, Artificial Sequence
  Description of Artificial Sequence: Synthetic oligonucleotide
  Sense strand starting at position 2918 of SEQ ID NO: 915824
aguagagucucacuuuauc

SEQ ID NO: 1108947 - RNA, 19 nt, Artificial Sequence
  Description of Artificial Sequence: Synthetic oligonucleotide
  Antisense strand to SEQ ID NO: 1108946
gauaaagugagacucuacu

SEQ ID NO: 1108948 - RNA, 19 nt, Artificial Sequence
  Description of Artificial Sequence: Synthetic oligonucleotide
  Sense strand starting at position 3193 of SEQ ID NO: 915824
cccacaguguucuuuauga

SEQ ID NO: 1108949 - RNA, 19 nt, Artificial Sequence
  Description of Artificial Sequence: Synthetic oligonucleotide
  Antisense strand to SEQ ID NO: 1108948
ucauaaagaacacuguggg

SEQ ID NO: 1108950 - RNA, 19 nt, Artificial Sequence
  Description of Artificial Sequence: Synthetic oligonucleotide
  Sense strand starting at position 3195 of SEQ ID NO: 915824
cacaguguucuuuaugaug

SEQ ID NO: 1108951 - RNA, 19 nt, Artificial Sequence
  Description of Artificial Sequence: Synthetic oligonucleotide
  Antisense strand to SEQ ID NO: 1108950
caucauaaagaacacugug

SEQ ID NO: 1108952 - RNA, 19 nt, Artificial Sequence
  Description of Artificial Sequence: Synthetic oligonucleotide
  Sense strand starting at position 3241 of SEQ ID NO: 915824
aaauuagucuaagugcagu

SEQ ID NO: 1108953 - RNA, 19 nt, Artificial Sequence
  Description of Artificial Sequence: Synthetic oligonucleotide
  Antisense strand to SEQ ID NO: 1108952
acugcacuuagacuaauuu

SEQ ID NO: 1108954 - RNA, 19 nt, Artificial Sequence
  Description of Artificial Sequence: Synthetic oligonucleotide
  Sense strand starting at position 3501 of SEQ ID NO: 915824
ugagccuucguggaucaga

SEQ ID NO: 1108955 - RNA, 19 nt, Artificial Sequence
  Description of Artificial Sequence: Synthetic oligonucleotide
  Antisense strand to SEQ ID NO: 1108954
ucugauccacgaaggcuca

SEQ ID NO: 1108956 - RNA, 19 nt, Artificial Sequence
  Description of Artificial Sequence: Synthetic oligonucleotide
  Sense strand starting at position 3504 of SEQ ID NO: 915824
gccuucguggaucagaguu

SEQ ID NO: 1108957 - RNA, 19 nt, Artificial Sequence
  Description of Artificial Sequence: Synthetic oligonucleotide
  Antisense strand to SEQ ID NO: 1108956
aacucugauccacgaaggc

SEQ ID NO: 1108958 - RNA, 19 nt, Artificial Sequence
  Description of Artificial Sequence: Synthetic oligonucleotide
  Sense strand starting at position 3588 of SEQ ID NO: 915824
ggaaucauagagggucgaa

SEQ ID NO: 1108959 - RNA, 19 nt, Artificial Sequence
  Description of Artificial Sequence: Synthetic oligonucleotide
  Antisense strand to SEQ ID NO: 1108958
uucgacccucuaugauucc

SEQ ID NO: 1108960 - RNA, 19 nt, Artificial Sequence
  Description of Artificial Sequence: Synthetic oligonucleotide
  Sense strand starting at position 3661 of SEQ ID NO: 915824
ccagaugacuggucugugu

SEQ ID NO: 1108961 - RNA, 19 nt, Artificial Sequence
  Description of Artificial Sequence: Synthetic oligonucleotide
  Antisense strand to SEQ ID NO: 1108960
acacagaccagucaucugg

SEQ ID NO: 1108962 - RNA, 19 nt, Artificial Sequence
  Description of Artificial Sequence: Synthetic oligonucleotide
  Sense strand starting at position 547 of SEQ ID NO: 915825
guggaugaccuauguagga

SEQ ID NO: 1108963 - RNA, 19 nt, Artificial Sequence
  Description of Artificial Sequence: Synthetic oligonucleotide
  Antisense strand to SEQ ID NO: 1108962
uccuacauaggucauccac

SEQ ID NO: 1108964 - RNA, 19 nt, Artificial Sequence
  Description of Artificial Sequence: Synthetic oligonucleotide
  Sense strand starting at position 551 of SEQ ID NO: 915825
augaccuauguaggagauu

SEQ ID NO: 1108965 - RNA, 19 nt, Artificial Sequence
  Description of Artificial Sequence: Synthetic oligonucleotide
  Antisense strand to SEQ ID NO: 1108964
aaucuccuacauaggucau

SEQ ID NO: 1108966 - RNA, 19 nt, Artificial Sequence
  Description of Artificial Sequence: Synthetic oligonucleotide
  Sense strand starting at position 552 of SEQ ID NO: 915825
ugaccuauguaggagauua

SEQ ID NO: 1108967 - RNA, 19 nt, Artificial Sequence
  Description of Artificial Sequence: Synthetic oligonucleotide
  Antisense strand to SEQ ID NO: 1108966
uaaucuccuacauagguca

SEQ ID NO: 1108968 - RNA, 19 nt, Artificial Sequence
  Description of Artificial Sequence: Synthetic oligonucleotide
  Sense strand starting at position 574 of SEQ ID NO: 915825
agugcaaccuuauaucuga

SEQ ID NO: 1108969 - RNA, 19 nt, Artificial Sequence
  Description of Artificial Sequence: Synthetic oligonucleotide
  Antisense strand to SEQ ID NO: 1108968
ucagauauaagguugcacu

SEQ ID NO: 1108970 - RNA, 19 nt, Artificial Sequence
  Description of Artificial Sequence: Synthetic oligonucleotide
  Sense strand starting at position 680 of SEQ ID NO: 915825
aaggcaaguuacuagagau

SEQ ID NO: 1108971 - RNA, 19 nt, Artificial Sequence
  Description of Artificial Sequence: Synthetic oligonucleotide
  Antisense strand to SEQ ID NO: 1108970
aucucuaguaacuugccuu

SEQ ID NO: 1108972 - RNA, 19 nt, Artificial Sequence
  Description of Artificial Sequence: Synthetic oligonucleotide
  Sense strand starting at position 716 of SEQ ID NO: 915825
uccauaguguuccugggaa

SEQ ID NO: 1108973 - RNA, 19 nt, Artificial Sequence
  Description of Artificial Sequence: Synthetic oligonucleotide
  Antisense strand to SEQ ID NO: 1108972
uucccaggaacacuaugga

SEQ ID NO: 1108974 - RNA, 19 nt, Artificial Sequence
  Description of Artificial Sequence: Synthetic oligonucleotide
  Sense strand starting at position 750 of SEQ ID NO: 915825
ccugacauuuauugagcau

SEQ ID NO: 1108975 - RNA, 19 nt, Artificial Sequence
  Description of Artificial Sequence: Synthetic oligonucleotide
  Antisense strand to SEQ ID NO: 1108974
augcucaauaaaugucagg

SEQ ID NO: 1108976 - RNA, 19 nt, Artificial Sequence
  Description of Artificial Sequence: Synthetic oligonucleotide
  Sense strand starting at position 765 of SEQ ID NO: 915825
gcauuugaguucuauaaua

SEQ ID NO: 1108977 - RNA, 19 nt, Artificial Sequence
  Description of Artificial Sequence: Synthetic oligonucleotide
  Antisense strand to SEQ ID NO: 1108976
uauuauagaacucaaaugc

SEQ ID NO: 1108978 - RNA, 19 nt, Artificial Sequence
  Description of Artificial Sequence: Synthetic oligonucleotide
  Sense strand starting at position 770 of SEQ ID NO: 915825
ugaguucuauaauaaggac

SEQ ID NO: 1108979 - RNA, 19 nt, Artificial Sequence
  Description of Artificial Sequence: Synthetic oligonucleotide
  Antisense strand to SEQ ID NO: 1108978
guccuuauuauagaacuca

SEQ ID NO: 1108980 - RNA, 19 nt, Artificial Sequence
  Description of Artificial Sequence: Synthetic oligonucleotide
  Sense strand starting at position 773 of SEQ ID NO: 915825
guucuauaauaaggacuaa

SEQ ID NO: 1108981 - RNA, 19 nt, Artificial Sequence
  Description of Artificial Sequence: Synthetic oligonucleotide
  Antisense strand to SEQ ID NO: 1108980
uuaguccuuauuauagaac

SEQ ID NO: 1108982 - RNA, 19 nt, Artificial Sequence
  Description of Artificial Sequence: Synthetic oligonucleotide
  Sense strand starting at position 814 of SEQ ID NO: 915825
uacagcucucguggagaca

SEQ ID NO: 1108983 - RNA, 19 nt, Artificial Sequence
  Description of Artificial Sequence: Synthetic oligonucleotide
  Antisense strand to SEQ ID NO: 1108982
ugucuccacgagagcugua

SEQ ID NO: 1108984 - RNA, 19 nt, Artificial Sequence
  Description of Artificial Sequence: Synthetic oligonucleotide
  Sense strand starting at position 1028 of SEQ ID NO: 915825
gauccuuugucaguuguag

SEQ ID NO: 1108985 - RNA, 19 nt, Artificial Sequence
  Description of Artificial Sequence: Synthetic oligonucleotide
  Antisense strand to SEQ ID NO: 1108984
cuacaacugacaaaggauc

SEQ ID NO: 1108986 - RNA, 19 nt, Artificial Sequence
  Description of Artificial Sequence: Synthetic oligonucleotide
  Sense strand starting at position 1030 of SEQ ID NO: 915825
uccuuugucaguuguagga

SEQ ID NO: 1108987 - RNA, 19 nt, Artificial Sequence
  Description of Artificial Sequence: Synthetic oligonucleotide
  Antisense strand to SEQ ID NO: 1108986
uccuacaacugacaaagga

SEQ ID NO: 1108988 - RNA, 19 nt, Artificial Sequence
  Description of Artificial Sequence: Synthetic oligonucleotide
  Sense strand starting at position 1039 of SEQ ID NO: 915825
aguuguaggacaggaagau

SEQ ID NO: 1108989 - RNA, 19 nt, Artificial Sequence
  Description of Artificial Sequence: Synthetic oligonucleotide
  Antisense strand to SEQ ID NO: 1108988
aucuuccuguccuacaacu

SEQ ID NO: 1108990 - RNA, 19 nt, Artificial Sequence
  Description of Artificial Sequence: Synthetic oligonucleotide
  Sense strand starting at position 1113 of SEQ ID NO: 915825
aucuuuaauuccgugccau

SEQ ID NO: 1108991 - RNA, 19 nt, Artificial Sequence
  Description of Artificial Sequence: Synthetic oligonucleotide
  Antisense strand to SEQ ID NO: 1108990
auggcacggaauuaaagau

SEQ ID NO: 1108992 - RNA, 19 nt, Artificial Sequence
  Description of Artificial Sequence: Synthetic oligonucleotide
  Sense strand starting at position 1114 of SEQ ID NO: 915825
ucuuuaauuccgugccauc

SEQ ID NO: 1108993 - RNA, 19 nt, Artificial Sequence
  Description of Artificial Sequence: Synthetic oligonucleotide
  Antisense strand to SEQ ID NO: 1108992
gauggcacggaauuaaaga

SEQ ID NO: 1108994 - RNA, 19 nt, Artificial Sequence
  Description of Artificial Sequence: Synthetic oligonucleotide
  Sense strand starting at position 1159 of SEQ ID NO: 915825
agagauuccagaggucugu

SEQ ID NO: 1108995 - RNA, 19 nt, Artificial Sequence
  Description of Artificial Sequence: Synthetic oligonucleotide
  Antisense strand to SEQ ID NO: 1108994
acagaccucuggaaucucu

SEQ ID NO: 1108996 - RNA, 19 nt, Artificial Sequence
  Description of Artificial Sequence: Synthetic oligonucleotide
  Sense strand starting at position 1194 of SEQ ID NO: 915825
gcuaacacuugugagaaug

SEQ ID NO: 1108997 - RNA, 19 nt, Artificial Sequence
  Description of Artificial Sequence: Synthetic oligonucleotide
  Antisense strand to SEQ ID NO: 1108996
cauucucacaaguguuagc

SEQ ID NO: 1108998 - RNA, 19 nt, Artificial Sequence
  Description of Artificial Sequence: Synthetic oligonucleotide
  Sense strand starting at position 1229 of SEQ ID NO: 915825
ucccguaucugugcaacua

SEQ ID NO: 1108999 - RNA, 19 nt, Artificial Sequence
  Description of Artificial Sequence: Synthetic oligonucleotide
  Antisense strand to SEQ ID NO: 1108998
uaguugcacagauacggga

SEQ ID NO: 1109000 - RNA, 19 nt, Artificial Sequence
  Description of Artificial Sequence: Synthetic oligonucleotide
  Sense strand starting at position 1239 of SEQ ID NO: 915825
gugcaacuagaauaauauu

SEQ ID NO: 1109001 - RNA, 19 nt, Artificial Sequence
  Description of Artificial Sequence: Synthetic oligonucleotide
  Antisense strand to SEQ ID NO: 1109000
aauauuauucuaguugcac

SEQ ID NO: 1109002 - RNA, 19 nt, Artificial Sequence
  Description of Artificial Sequence: Synthetic oligonucleotide
  Sense strand starting at position 1264 of SEQ ID NO: 915825
gguugcugugauuaugaaa

SEQ ID NO: 1109003 - RNA, 19 nt, Artificial Sequence
  Description of Artificial Sequence: Synthetic oligonucleotide
  Antisense strand to SEQ ID NO: 1109002
uuucauaaucacagcaacc

SEQ ID NO: 1109004 - RNA, 19 nt, Artificial Sequence
  Description of Artificial Sequence: Synthetic oligonucleotide
  Sense strand starting at position 1267 of SEQ ID NO: 915825
ugcugugauuaugaaacca

SEQ ID NO: 1109005 - RNA, 19 nt, Artificial Sequence
  Description of Artificial Sequence: Synthetic oligonucleotide
  Antisense strand to SEQ ID NO: 1109004
ugguuucauaaucacagca

SEQ ID NO: 1109006 - RNA, 19 nt, Artificial Sequence
  Description of Artificial Sequence: Synthetic oligonucleotide
  Sense strand starting at position 1328 of SEQ ID NO: 915825
auagcaaacgcucaauaaa

SEQ ID NO: 1109007 - RNA, 19 nt, Artificial Sequence
  Description of Artificial Sequence: Synthetic oligonucleotide
  Antisense strand to SEQ ID NO: 1109006
uuuauugagcguuugcuau

SEQ ID NO: 1109008 - RNA, 19 nt, Artificial Sequence
  Description of Artificial Sequence: Synthetic oligonucleotide
  Sense strand starting at position 1331 of SEQ ID NO: 915825
gcaaacgcucaauaaaugu

SEQ ID NO: 1109009 - RNA, 19 nt, Artificial Sequence
  Description of Artificial Sequence: Synthetic oligonucleotide
  Antisense strand to SEQ ID NO: 1109008
acauuuauugagcguuugc

SEQ ID NO: 1109010 - RNA, 19 nt, Artificial Sequence
  Description of Artificial Sequence: Synthetic oligonucleotide
  Sense strand starting at position 1440 of SEQ ID NO: 915825
uuuagauaguucucccgca

SEQ ID NO: 1109011 - RNA, 19 nt, Artificial Sequence
  Description of Artificial Sequence: Synthetic oligonucleotide
  Antisense strand to SEQ ID NO: 1109010
ugcgggagaacuaucuaaa

SEQ ID NO: 1109012 - RNA, 19 nt, Artificial Sequence
  Description of Artificial Sequence: Synthetic oligonucleotide
  Sense strand starting at position 1441 of SEQ ID NO: 915825
uuagauaguucucccgcau

SEQ ID NO: 1109013 - RNA, 19 nt, Artificial Sequence
  Description of Artificial Sequence: Synthetic oligonucleotide
  Antisense strand to SEQ ID NO: 1109012
augcgggagaacuaucuaa

SEQ ID NO: 1109014 - RNA, 19 nt, Artificial Sequence
  Description of Artificial Sequence: Synthetic oligonucleotide
  Sense strand starting at position 1756 of SEQ ID NO: 915825
ccgucaccagcucguuauu

SEQ ID NO: 1109015 - RNA, 19 nt, Artificial Sequence
  Description of Artificial Sequence: Synthetic oligonucleotide
  Antisense strand to SEQ ID NO: 1109014
aauaacgagcuggugacgg

SEQ ID NO: 1109016 - RNA, 19 nt, Artificial Sequence
  Description of Artificial Sequence: Synthetic oligonucleotide
  Sense strand starting at position 1758 of SEQ ID NO: 915825
gucaccagcucguuauugu

SEQ ID NO: 1109017 - RNA, 19 nt, Artificial Sequence
  Description of Artificial Sequence: Synthetic oligonucleotide
  Antisense strand to SEQ ID NO: 1109016
acaauaacgagcuggugac

SEQ ID NO: 1109018 - RNA, 19 nt, Artificial Sequence
  Description of Artificial Sequence: Synthetic oligonucleotide
  Sense strand starting at position 1765 of SEQ ID NO: 915825
gcucguuauugugcucaua

SEQ ID NO: 1109019 - RNA, 19 nt, Artificial Sequence
  Description of Artificial Sequence: Synthetic oligonucleotide
  Antisense strand to SEQ ID NO: 1109018
uaugagcacaauaacgagc

SEQ ID NO: 1109020 - RNA, 19 nt, Artificial Sequence
  Description of Artificial Sequence: Synthetic oligonucleotide
  Sense strand starting at position 1767 of SEQ ID NO: 915825
ucguuauugugcucauaua

SEQ ID NO: 1109021 - RNA, 19 nt, Artificial Sequence
  Description of Artificial Sequence: Synthetic oligonucleotide
  Antisense strand to SEQ ID NO: 1109020
uauaugagcacaauaacga

SEQ ID NO: 1109022 - RNA, 19 nt, Artificial Sequence
  Description of Artificial Sequence: Synthetic oligonucleotide
  Sense strand starting at position 1768 of SEQ ID NO: 915825
cguuauugugcucauauag

SEQ ID NO: 1109023 - RNA, 19 nt, Artificial Sequence
  Description of Artificial Sequence: Synthetic oligonucleotide
  Antisense strand to SEQ ID NO: 1109022
cuauaugagcacaauaacg

SEQ ID NO: 1109024 - RNA, 19 nt, Artificial Sequence
  Description of Artificial Sequence: Synthetic oligonucleotide
  Sense strand starting at position 1920 of SEQ ID NO: 915825
gcuagauucguaugcggac

SEQ ID NO: 1109025 - RNA, 19 nt, Artificial Sequence
  Description of Artificial Sequence: Synthetic oligonucleotide
  Antisense strand to SEQ ID NO: 1109024
guccgcauacgaaucuagc

SEQ ID NO: 1109026 - RNA, 19 nt, Artificial Sequence
  Description of Artificial Sequence: Synthetic oligonucleotide
  Sense strand starting at position 2196 of SEQ ID NO: 915825
cucacuaucuuagcgcuua

SEQ ID NO: 1109027 - RNA, 19 nt, Artificial Sequence
  Description of Artificial Sequence: Synthetic oligonucleotide
  Antisense strand to SEQ ID NO: 1109026
uaagcgcuaagauagugag

SEQ ID NO: 1109028 - RNA, 19 nt, Artificial Sequence
  Description of Artificial Sequence: Synthetic oligonucleotide
  Sense strand starting at position 2201 of SEQ ID NO: 915825
uaucuuagcgcuuagaaag

SEQ ID NO: 1109029 - RNA, 19 nt, Artificial Sequence
  Description of Artificial Sequence: Synthetic oligonucleotide
  Antisense strand to SEQ ID NO: 1109028
cuuucuaagcgcuaagaua

SEQ ID NO: 1109030 - RNA, 19 nt, Artificial Sequence
  Description of Artificial Sequence: Synthetic oligonucleotide
  Sense strand starting at position 2474 of SEQ ID NO: 915825
gguggaucaucugaaagga

SEQ ID NO: 1109031 - RNA, 19 nt, Artificial Sequence
  Description of Artificial Sequence: Synthetic oligonucleotide
  Antisense strand to SEQ ID NO: 1109030
uccuuucagaugauccacc

SEQ ID NO: 1109032 - RNA, 19 nt, Artificial Sequence
  Description of Artificial Sequence: Synthetic oligonucleotide
  Sense strand starting at position 3319 of SEQ ID NO: 915825
gguggcaagcgucuuuagu

SEQ ID NO: 1109033 - RNA, 19 nt, Artificial Sequence
  Description of Artificial Sequence: Synthetic oligonucleotide
  Antisense strand to SEQ ID NO: 1109032
acuaaagacgcuugccacc

SEQ ID NO: 1109034 - RNA, 19 nt, Artificial Sequence
  Description of Artificial Sequence: Synthetic oligonucleotide
  Sense strand starting at position 3861 of SEQ ID NO: 915825
auugaauucuuugagucuc

SEQ ID NO: 1109035 - RNA, 19 nt, Artificial Sequence
  Description of Artificial Sequence: Synthetic oligonucleotide
  Antisense strand to SEQ ID NO: 1109034
gagacucaaagaauucaau

SEQ ID NO: 1109036 - RNA, 19 nt, Artificial Sequence
  Description of Artificial Sequence: Synthetic oligonucleotide
  Sense strand starting at position 3885 of SEQ ID NO: 915825
ucucauuugcaguguccua

SEQ ID NO: 1109037 - RNA, 19 nt, Artificial Sequence
  Description of Artificial Sequence: Synthetic oligonucleotide
  Antisense strand to SEQ ID NO: 1109036
uaggacacugcaaaugaga

SEQ ID NO: 1109038 - RNA, 19 nt, Artificial Sequence
  Description of Artificial Sequence: Synthetic oligonucleotide
  Sense strand starting at position 3972 of SEQ ID NO: 915825
aaacaaaugucagagguua

SEQ ID NO: 1109039 - RNA, 19 nt, Artificial Sequence
  Description of Artificial Sequence: Synthetic oligonucleotide
  Antisense strand to SEQ ID NO: 1109038
uaaccucugacauuuguuu

SEQ ID NO: 1109040 - RNA, 19 nt, Artificial Sequence
  Description of Artificial Sequence: Synthetic oligonucleotide
  Sense strand starting at position 3983 of SEQ ID NO: 915825
agagguuaauagcuauaac

SEQ ID NO: 1109041 - RNA, 19 nt, Artificial Sequence
  Description of Artificial Sequence: Synthetic oligonucleotide
  Antisense strand to SEQ ID NO: 1109040
guuauagcuauuaaccucu

SEQ ID NO: 1109042 - RNA, 19 nt, Artificial Sequence
  Description of Artificial Sequence: Synthetic oligonucleotide
  Sense strand starting at position 52 of SEQ ID NO: 915826
cugcuucuuccaggagucu

SEQ ID NO: 1109043 - RNA, 19 nt, Artificial Sequence
  Description of Artificial Sequence: Synthetic oligonucleotide
  Antisense strand to SEQ ID NO: 1109042
agacuccuggaagaagcag

SEQ ID NO: 1109044 - RNA, 19 nt, Artificial Sequence
  Description of Artificial Sequence: Synthetic oligonucleotide
  Sense strand starting at position 172 of SEQ ID NO: 915826
gaggaacagcucuggguua

SEQ ID NO: 1109045 - RNA, 19 nt, Artificial Sequence
  Description of Artificial Sequence: Synthetic oligonucleotide
  Antisense strand to SEQ ID NO: 1109044
uaacccagagcuguuccuc

SEQ ID NO: 1109046 - RNA, 19 nt, Artificial Sequence
  Description of Artificial Sequence: Synthetic oligonucleotide
  Sense strand starting at position 248 of SEQ ID NO: 915826
caggcagccgucugcaauu

SEQ ID NO: 1109047 - RNA, 19 nt, Artificial Sequence
  Description of Artificial Sequence: Synthetic oligonucleotide
  Antisense strand to SEQ ID NO: 1109046
aauugcagacggcugccug

SEQ ID NO: 1109048 - RNA, 19 nt, Artificial Sequence
  Description of Artificial Sequence: Synthetic oligonucleotide
  Sense strand starting at position 287 of SEQ ID NO: 915826
cugagaacuucugagccaa

SEQ ID NO: 1109049 - RNA, 19 nt, Artificial Sequence
  Description of Artificial Sequence: Synthetic oligonucleotide
  Antisense strand to SEQ ID NO: 1109048
uuggcucagaaguucucag

SEQ ID NO: 1109050 - RNA, 19 nt, Artificial Sequence
  Description of Artificial Sequence: Synthetic oligonucleotide
  Sense strand starting at position 315 of SEQ ID NO: 915826
aaguaagaccuguaugcuu

SEQ ID NO: 1109051 - RNA, 19 nt, Artificial Sequence
  Description of Artificial Sequence: Synthetic oligonucleotide
  Antisense strand to SEQ ID NO: 1109050
aagcauacaggucuuacuu

SEQ ID NO: 1109052 - RNA, 19 nt, Artificial Sequence
  Description of Artificial Sequence: Synthetic oligonucleotide
  Sense strand starting at position 333 of SEQ ID NO: 915826
ucaagauuacucuggcaaa

SEQ ID NO: 1109053 - RNA, 19 nt, Artificial Sequence
  Description of Artificial Sequence: Synthetic oligonucleotide
  Antisense strand to SEQ ID NO: 1109052
uuugccagaguaaucuuga

SEQ ID NO: 1109054 - RNA, 19 nt, Artificial Sequence
  Description of Artificial Sequence: Synthetic oligonucleotide
  Sense strand starting at position 401 of SEQ ID NO: 915826
acuguuuggugaggaggaa

SEQ ID NO: 1109055 - RNA, 19 nt, Artificial Sequence
  Description of Artificial Sequence: Synthetic oligonucleotide
  Antisense strand to SEQ ID NO: 1109054
uuccuccucaccaaacagu

SEQ ID NO: 1109056 - RNA, 19 nt, Artificial Sequence
  Description of Artificial Sequence: Synthetic oligonucleotide
  Sense strand starting at position 1065 of SEQ ID NO: 915826
ggcaguuucugagguucaa

SEQ ID NO: 1109057 - RNA, 19 nt, Artificial Sequence
  Description of Artificial Sequence: Synthetic oligonucleotide
  Antisense strand to SEQ ID NO: 1109056
uugaaccucagaaacugcc

SEQ ID NO: 1109058 - RNA, 19 nt, Artificial Sequence
  Description of Artificial Sequence: Synthetic oligonucleotide
  Sense strand starting at position 2225 of SEQ ID NO: 915826
guuuccuacacguguacau

SEQ ID NO: 1109059 - RNA, 19 nt, Artificial Sequence
  Description of Artificial Sequence: Synthetic oligonucleotide
  Antisense strand to SEQ ID NO: 1109058
auguacacguguaggaaac

SEQ ID NO: 1109060 - RNA, 19 nt, Artificial Sequence
  Description of Artificial Sequence: Synthetic oligonucleotide
  Sense strand starting at position 2253 of SEQ ID NO: 915826
gcuauuucuuccugcaggu

SEQ ID NO: 1109061 - RNA, 19 nt, Artificial Sequence
  Description of Artificial Sequence: Synthetic oligonucleotide
  Antisense strand to SEQ ID NO: 1109060
accugcaggaagaaauagc

SEQ ID NO: 1109062 - RNA, 19 nt, Artificial Sequence
  Description of Artificial Sequence: Synthetic oligonucleotide
  Sense strand starting at position 2286 of SEQ ID NO: 915826
ugcggcauucggaggacuu

SEQ ID NO: 1109063 - RNA, 19 nt, Artificial Sequence
  Description of Artificial Sequence: Synthetic oligonucleotide
  Antisense strand to SEQ ID NO: 1109062
aaguccuccgaaugccgca

SEQ ID NO: 1109064 - RNA, 19 nt, Artificial Sequence
  Description of Artificial Sequence: Synthetic oligonucleotide
  Sense strand starting at position 2287 of SEQ ID NO: 915826
gcggcauucggaggacuuu

SEQ ID NO: 1109065 - RNA, 19 nt, Artificial Sequence
  Description of Artificial Sequence: Synthetic oligonucleotide
  Antisense strand to SEQ ID NO: 1109064
aaaguccuccgaaugccgc

SEQ ID NO: 1109066 - RNA, 19 nt, Artificial Sequence
  Description of Artificial Sequence: Synthetic oligonucleotide
  Sense strand starting at position 2296 of SEQ ID NO: 915826
ggaggacuuugggagcuuu

SEQ ID NO: 1109067 - RNA, 19 nt, Artificial Sequence
  Description of Artificial Sequence: Synthetic oligonucleotide
  Antisense strand to SEQ ID NO: 1109066
aaagcucccaaaguccucc

SEQ ID NO: 1109068 - RNA, 19 nt, Artificial Sequence
  Description of Artificial Sequence: Synthetic oligonucleotide
  Sense strand starting at position 2308 of SEQ ID NO: 915826
gagcuuugcggauacagca

SEQ ID NO: 1109069 - RNA, 19 nt, Artificial Sequence
  Description of Artificial Sequence: Synthetic oligonucleotide
  Antisense strand to SEQ ID NO: 1109068
ugcuguauccgcaaagcuc

SEQ ID NO: 1109070 - RNA, 19 nt, Artificial Sequence
  Description of Artificial Sequence: Synthetic oligonucleotide
  Sense strand starting at position 2341 of SEQ ID NO: 915826
auucuuguucucugucaac

SEQ ID NO: 1109071 - RNA, 19 nt, Artificial Sequence
  Description of Artificial Sequence: Synthetic oligonucleotide
  Antisense strand to SEQ ID NO: 1109070
guugacagagaacaagaau

SEQ ID NO: 1109072 - RNA, 19 nt, Artificial Sequence
  Description of Artificial Sequence: Synthetic oligonucleotide
  Sense strand starting at position 2347 of SEQ ID NO: 915826
guucucugucaacaggaga

SEQ ID NO: 1109073 - RNA, 19 nt, Artificial Sequence
  Description of Artificial Sequence: Synthetic oligonucleotide
  Antisense strand to SEQ ID NO: 1109072
ucuccuguugacagagaac

SEQ ID NO: 1109074 - RNA, 19 nt, Artificial Sequence
  Description of Artificial Sequence: Synthetic oligonucleotide
  Sense strand starting at position 2392 of SEQ ID NO: 915826
ggagacgauuaacaaauaa

SEQ ID NO: 1109075 - RNA, 19 nt, Artificial Sequence
  Description of Artificial Sequence: Synthetic oligonucleotide
  Antisense strand to SEQ ID NO: 1109074
uuauuuguuaaucgucucc

SEQ ID NO: 1109076 - RNA, 19 nt, Artificial Sequence
  Description of Artificial Sequence: Synthetic oligonucleotide
  Sense strand starting at position 2407 of SEQ ID NO: 915826
auaaguacaucguguacau

SEQ ID NO: 1109077 - RNA, 19 nt, Artificial Sequence
  Description of Artificial Sequence: Synthetic oligonucleotide
  Antisense strand to SEQ ID NO: 1109076
auguacacgauguacuuau

SEQ ID NO: 1109078 - RNA, 19 nt, Artificial Sequence
  Description of Artificial Sequence: Synthetic oligonucleotide
  Sense strand starting at position 2428 of SEQ ID NO: 915826
acaagauaaugucauagua

SEQ ID NO: 1109079 - RNA, 19 nt, Artificial Sequence
  Description of Artificial Sequence: Synthetic oligonucleotide
  Antisense strand to SEQ ID NO: 1109078
uacuaugacauuaucuugu

SEQ ID NO: 1109080 - RNA, 19 nt, Artificial Sequence
  Description of Artificial Sequence: Synthetic oligonucleotide
  Sense strand starting at position 2463 of SEQ ID NO: 915826
auaguaugccaauggguau

SEQ ID NO: 1109081 - RNA, 19 nt, Artificial Sequence
  Description of Artificial Sequence: Synthetic oligonucleotide
  Antisense strand to SEQ ID NO: 1109080
auacccauuggcauacuau

SEQ ID NO: 1109082 - RNA, 19 nt, Artificial Sequence
  Description of Artificial Sequence: Synthetic oligonucleotide
  Sense strand starting at position 2467 of SEQ ID NO: 915826
uaugccaauggguaucaaa

SEQ ID NO: 1109083 - RNA, 19 nt, Artificial Sequence
  Description of Artificial Sequence: Synthetic oligonucleotide
  Antisense strand to SEQ ID NO: 1109082
uuugauacccauuggcaua

SEQ ID NO: 1109084 - RNA, 19 nt, Artificial Sequence
  Description of Artificial Sequence: Synthetic oligonucleotide
  Sense strand starting at position 2486 of SEQ ID NO: 915826
auacacauuugugaaagga

SEQ ID NO: 1109085 - RNA, 19 nt, Artificial Sequence
  Description of Artificial Sequence: Synthetic oligonucleotide
  Antisense strand to SEQ ID NO: 1109084
uccuuucacaaauguguau

SEQ ID NO: 1109086 - RNA, 19 nt, Artificial Sequence
  Description of Artificial Sequence: Synthetic oligonucleotide
  Sense strand starting at position 2607 of SEQ ID NO: 915826
gaguuaaaugcacaccuga

SEQ ID NO: 1109087 - RNA, 19 nt, Artificial Sequence
  Description of Artificial Sequence: Synthetic oligonucleotide
  Antisense strand to SEQ ID NO: 1109086
ucaggugugcauuuaacuc

SEQ ID NO: 1109088 - RNA, 19 nt, Artificial Sequence
  Description of Artificial Sequence: Synthetic oligonucleotide
  Sense strand starting at position 3456 of SEQ ID NO: 915826
guuuccugcuuccaugaca

SEQ ID NO: 1109089 - RNA, 19 nt, Artificial Sequence
  Description of Artificial Sequence: Synthetic oligonucleotide
  Antisense strand to SEQ ID NO: 1109088
ugucauggaagcaggaaac

SEQ ID NO: 1109090 - RNA, 19 nt, Artificial Sequence
  Description of Artificial Sequence: Synthetic oligonucleotide
  Sense strand starting at position 3648 of SEQ ID NO: 915826
gucuuaaugucagaggcau

SEQ ID NO: 1109091 - RNA, 19 nt, Artificial Sequence
  Description of Artificial Sequence: Synthetic oligonucleotide
  Antisense strand to SEQ ID NO: 1109090
augccucugacauuaagac

SEQ ID NO: 1109092 - RNA, 19 nt, Artificial Sequence
  Description of Artificial Sequence: Synthetic oligonucleotide
  Sense strand starting at position 3871 of SEQ ID NO: 915826
gagagugaccucugcuuga

SEQ ID NO: 1109093 - RNA, 19 nt, Artificial Sequence
  Description of Artificial Sequence: Synthetic oligonucleotide
  Antisense strand to SEQ ID NO: 1109092
ucaagcagaggucacucuc

SEQ ID NO: 1109094 - RNA, 19 nt, Artificial Sequence
  Description of Artificial Sequence: Synthetic oligonucleotide
  Sense strand starting at position 3874 of SEQ ID NO: 915826
agugaccucugcuugacuu

SEQ ID NO: 1109095 - RNA, 19 nt, Artificial Sequence
  Description of Artificial Sequence: Synthetic oligonucleotide
  Antisense strand to SEQ ID NO: 1109094
aagucaagcagaggucacu

SEQ ID NO: 1109096 - RNA, 19 nt, Artificial Sequence
  Description of Artificial Sequence: Synthetic oligonucleotide
  Sense strand starting at position 54 of SEQ ID NO: 915827
gacaguuacuccguuauuu

SEQ ID NO: 1109097 - RNA, 19 nt, Artificial Sequence
  Description of Artificial Sequence: Synthetic oligonucleotide
  Antisense strand to SEQ ID NO: 1109096
aaauaacggaguaacuguc

SEQ ID NO: 1109098 - RNA, 19 nt, Artificial Sequence
  Description of Artificial Sequence: Synthetic oligonucleotide
  Sense strand starting at position 187 of SEQ ID NO: 915827
ggcaaauugugagcacaug

SEQ ID NO: 1109099 - RNA, 19 nt, Artificial Sequence
  Description of Artificial Sequence: Synthetic oligonucleotide
  Antisense strand to SEQ ID NO: 1109098
caugugcucacaauuugcc

SEQ ID NO: 1109100 - RNA, 19 nt, Artificial Sequence
  Description of Artificial Sequence: Synthetic oligonucleotide
  Sense strand starting at position 235 of SEQ ID NO: 915827
caaggugguggccagaaua

SEQ ID NO: 1109101 - RNA, 19 nt, Artificial Sequence
  Description of Artificial Sequence: Synthetic oligonucleotide
  Antisense strand to SEQ ID NO: 1109100
uauucuggccaccaccuug

SEQ ID NO: 1109102 - RNA, 19 nt, Artificial Sequence
  Description of Artificial Sequence: Synthetic oligonucleotide
  Sense strand starting at position 302 of SEQ ID NO: 915827
ccugacuccgugcacuaaa

SEQ ID NO: 1109103 - RNA, 19 nt, Artificial Sequence
  Description of Artificial Sequence: Synthetic oligonucleotide
  Antisense strand to SEQ ID NO: 1109102
uuuagugcacggagucagg

SEQ ID NO: 1109104 - RNA, 19 nt, Artificial Sequence
  Description of Artificial Sequence: Synthetic oligonucleotide
  Sense strand starting at position 305 of SEQ ID NO: 915827
gacuccgugcacuaaagaa

SEQ ID NO: 1109105 - RNA, 19 nt, Artificial Sequence
  Description of Artificial Sequence: Synthetic oligonucleotide
  Antisense strand to SEQ ID NO: 1109104
uucuuuagugcacggaguc

SEQ ID NO: 1109106 - RNA, 19 nt, Artificial Sequence
  Description of Artificial Sequence: Synthetic oligonucleotide
  Sense strand starting at position 443 of SEQ ID NO: 915827
gacgauagauagcaguuau

SEQ ID NO: 1109107 - RNA, 19 nt, Artificial Sequence
  Description of Artificial Sequence: Synthetic oligonucleotide
  Antisense strand to SEQ ID NO: 1109106
auaacugcuaucuaucguc

SEQ ID NO: 1109108 - RNA, 19 nt, Artificial Sequence
  Description of Artificial Sequence: Synthetic oligonucleotide
  Sense strand starting at position 458 of SEQ ID NO: 915827
uuauuaugacgcugcaaca

SEQ ID NO: 1109109 - RNA, 19 nt, Artificial Sequence
  Description of Artificial Sequence: Synthetic oligonucleotide
  Antisense strand to SEQ ID NO: 1109108
uguugcagcgucauaauaa

SEQ ID NO: 1109110 - RNA, 19 nt, Artificial Sequence
  Description of Artificial Sequence: Synthetic oligonucleotide
  Sense strand starting at position 656 of SEQ ID NO: 915827
gguuaagugacacgcagaa

SEQ ID NO: 1109111 - RNA, 19 nt, Artificial Sequence
  Description of Artificial Sequence: Synthetic oligonucleotide
  Antisense strand to SEQ ID NO: 1109110
uucugcgugucacuuaacc

SEQ ID NO: 1109112 - RNA, 19 nt, Artificial Sequence
  Description of Artificial Sequence: Synthetic oligonucleotide
  Sense strand starting at position 1038 of SEQ ID NO: 915827
uugagaagcugucucaggu

SEQ ID NO: 1109113 - RNA, 19 nt, Artificial Sequence
  Description of Artificial Sequence: Synthetic oligonucleotide
  Antisense strand to SEQ ID NO: 1109112
accugagacagcuucucaa

SEQ ID NO: 1109114 - RNA, 19 nt, Artificial Sequence
  Description of Artificial Sequence: Synthetic oligonucleotide
  Sense strand starting at position 1056 of SEQ ID NO: 915827
ugcucucagcucuaggaga

SEQ ID NO: 1109115 - RNA, 19 nt, Artificial Sequence
  Description of Artificial Sequence: Synthetic oligonucleotide
  Antisense strand to SEQ ID NO: 1109114
ucuccuagagcugagagca

SEQ ID NO: 1109116 - RNA, 19 nt, Artificial Sequence
  Description of Artificial Sequence: Synthetic oligonucleotide
  Sense strand starting at position 1179 of SEQ ID NO: 915827
gcuuaaagcugucucaguu

SEQ ID NO: 1109117 - RNA, 19 nt, Artificial Sequence
  Description of Artificial Sequence: Synthetic oligonucleotide
  Antisense strand to SEQ ID NO: 1109116
aacugagacagcuuuaagc

SEQ ID NO: 1109118 - RNA, 19 nt, Artificial Sequence
  Description of Artificial Sequence: Synthetic oligonucleotide
  Sense strand starting at position 1183 of SEQ ID NO: 915827
aaagcugucucaguuaaug

SEQ ID NO: 1109119 - RNA, 19 nt, Artificial Sequence
  Description of Artificial Sequence: Synthetic oligonucleotide
  Antisense strand to SEQ ID NO: 1109118
cauuaacugagacagcuuu

SEQ ID NO: 1109120 - RNA, 19 nt, Artificial Sequence
  Description of Artificial Sequence: Synthetic oligonucleotide
  Sense strand starting at position 1845 of SEQ ID NO: 915827
ccgcgcugcucauugaaga

SEQ ID NO: 1109121 - RNA, 19 nt, Artificial Sequence
  Description of Artificial Sequence: Synthetic oligonucleotide
  Antisense strand to SEQ ID NO: 1109120
ucuucaaugagcagcgcgg

SEQ ID NO: 1109122 - RNA, 19 nt, Artificial Sequence
  Description of Artificial Sequence: Synthetic oligonucleotide
  Sense strand starting at position 2267 of SEQ ID NO: 915827
cggaaaugguuucaccuga

SEQ ID NO: 1109123 - RNA, 19 nt, Artificial Sequence
  Description of Artificial Sequence: Synthetic oligonucleotide
  Antisense strand to SEQ ID NO: 1109122
ucaggugaaaccauuuccg

SEQ ID NO: 1109124 - RNA, 19 nt, Artificial Sequence
  Description of Artificial Sequence: Synthetic oligonucleotide
  Sense strand starting at position 2498 of SEQ ID NO: 915827
uagugagggugucagacaa

SEQ ID NO: 1109125 - RNA, 19 nt, Artificial Sequence
  Description of Artificial Sequence: Synthetic oligonucleotide
  Antisense strand to SEQ ID NO: 1109124
uugucugacacccucacua

SEQ ID NO: 1109126 - RNA, 19 nt, Artificial Sequence
  Description of Artificial Sequence: Synthetic oligonucleotide
  Sense strand starting at position 2531 of SEQ ID NO: 915827
ugagauauauuggaaggga

SEQ ID NO: 1109127 - RNA, 19 nt, Artificial Sequence
  Description of Artificial Sequence: Synthetic oligonucleotide
  Antisense strand to SEQ ID NO: 1109126
ucccuuccaauauaucuca

SEQ ID NO: 1109128 - RNA, 19 nt, Artificial Sequence
  Description of Artificial Sequence: Synthetic oligonucleotide
  Sense strand starting at position 2611 of SEQ ID NO: 915827
agcgauauguccucaguga

SEQ ID NO: 1109129 - RNA, 19 nt, Artificial Sequence
  Description of Artificial Sequence: Synthetic oligonucleotide
  Antisense strand to SEQ ID NO: 1109128
ucacugaggacauaucgcu

SEQ ID NO: 1109130 - RNA, 19 nt, Artificial Sequence
  Description of Artificial Sequence: Synthetic oligonucleotide
  Sense strand starting at position 2612 of SEQ ID NO: 915827
gcgauauguccucagugac

SEQ ID NO: 1109131 - RNA, 19 nt, Artificial Sequence
  Description of Artificial Sequence: Synthetic oligonucleotide
  Antisense strand to SEQ ID NO: 1109130
gucacugaggacauaucgc

SEQ ID NO: 1109132 - RNA, 19 nt, Artificial Sequence
  Description of Artificial Sequence: Synthetic oligonucleotide
  Sense strand starting at position 2699 of SEQ ID NO: 915827
gacagaacaucagcaagua

SEQ ID NO: 1109133 - RNA, 19 nt, Artificial Sequence
  Description of Artificial Sequence: Synthetic oligonucleotide
  Antisense strand to SEQ ID NO: 1109132
uacuugcugauguucuguc

SEQ ID NO: 1109134 - RNA, 19 nt, Artificial Sequence
  Description of Artificial Sequence: Synthetic oligonucleotide
  Sense strand starting at position 2766 of SEQ ID NO: 915827
guguaagugaaaggugaga

SEQ ID NO: 1109135 - RNA, 19 nt, Artificial Sequence
  Description of Artificial Sequence: Synthetic oligonucleotide
  Antisense strand to SEQ ID NO: 1109134
ucucaccuuucacuuacac

SEQ ID NO: 1109136 - RNA, 19 nt, Artificial Sequence
  Description of Artificial Sequence: Synthetic oligonucleotide
  Sense strand starting at position 2804 of SEQ ID NO: 915827
ggaggaacauccuacgcua

SEQ ID NO: 1109137 - RNA, 19 nt, Artificial Sequence
  Description of Artificial Sequence: Synthetic oligonucleotide
  Antisense strand to SEQ ID NO: 1109136
uagcguaggauguuccucc

SEQ ID NO: 1109138 - RNA, 19 nt, Artificial Sequence
  Description of Artificial Sequence: Synthetic oligonucleotide
  Sense strand starting at position 2974 of SEQ ID NO: 915827
ccuggauccucugaucaga

SEQ ID NO: 1109139 - RNA, 19 nt, Artificial Sequence
  Description of Artificial Sequence: Synthetic oligonucleotide
  Antisense strand to SEQ ID NO: 1109138
ucugaucagaggauccagg

SEQ ID NO: 1109140 - RNA, 19 nt, Artificial Sequence
  Description of Artificial Sequence: Synthetic oligonucleotide
  Sense strand starting at position 3304 of SEQ ID NO: 915827
cucucugaauuggaaaugu

SEQ ID NO: 1109141 - RNA, 19 nt, Artificial Sequence
  Description of Artificial Sequence: Synthetic oligonucleotide
  Antisense strand to SEQ ID NO: 1109140
acauuuccaauucagagag

SEQ ID NO: 1109142 - RNA, 19 nt, Artificial Sequence
  Description of Artificial Sequence: Synthetic oligonucleotide
  Sense strand starting at position 3313 of SEQ ID NO: 915827
uuggaaauguccucugcua

SEQ ID NO: 1109143 - RNA, 19 nt, Artificial Sequence
  Description of Artificial Sequence: Synthetic oligonucleotide
  Antisense strand to SEQ ID NO: 1109142
uagcagaggacauuuccaa

SEQ ID NO: 1109144 - RNA, 19 nt, Artificial Sequence
  Description of Artificial Sequence: Synthetic oligonucleotide
  Sense strand starting at position 3315 of SEQ ID NO: 915827
ggaaauguccucugcuacu

SEQ ID NO: 1109145 - RNA, 19 nt, Artificial Sequence
  Description of Artificial Sequence: Synthetic oligonucleotide
  Antisense strand to SEQ ID NO: 1109144
aguagcagaggacauuucc

SEQ ID NO: 1109146 - RNA, 19 nt, Artificial Sequence
  Description of Artificial Sequence: Synthetic oligonucleotide
  Sense strand starting at position 3454 of SEQ ID NO: 915827
aaagguaguuacuacagua

SEQ ID NO: 1109147 - RNA, 19 nt, Artificial Sequence
  Description of Artificial Sequence: Synthetic oligonucleotide
  Antisense strand to SEQ ID NO: 1109146
uacuguaguaacuaccuuu

SEQ ID NO: 1109148 - RNA, 19 nt, Artificial Sequence
  Description of Artificial Sequence: Synthetic oligonucleotide
  Sense strand starting at position 3517 of SEQ ID NO: 915827
gccaaauaauuagagaaca

SEQ ID NO: 1109149 - RNA, 19 nt, Artificial Sequence
  Description of Artificial Sequence: Synthetic oligonucleotide
  Antisense strand to SEQ ID NO: 1109148
uguucucuaauuauuuggc

SEQ ID NO: 1109150 - RNA, 19 nt, Artificial Sequence
  Description of Artificial Sequence: Synthetic oligonucleotide
  Sense strand starting at position 3544 of SEQ ID NO: 915827
acagaauacucuguagcca

SEQ ID NO: 1109151 - RNA, 19 nt, Artificial Sequence
  Description of Artificial Sequence: Synthetic oligonucleotide
  Antisense strand to SEQ ID NO: 1109150
uggcuacagaguauucugu

SEQ ID NO: 1109152 - RNA, 19 nt, Artificial Sequence
  Description of Artificial Sequence: Synthetic oligonucleotide
  Sense strand starting at position 3580 of SEQ ID NO: 915827
gacauagaguuauauaaag

SEQ ID NO: 1109153 - RNA, 19 nt, Artificial Sequence
  Description of Artificial Sequence: Synthetic oligonucleotide
  Antisense strand to SEQ ID NO: 1109152
cuuuauauaacucuauguc

SEQ ID NO: 1109154 - RNA, 19 nt, Artificial Sequence
  Description of Artificial Sequence: Synthetic oligonucleotide
  Sense strand starting at position 3653 of SEQ ID NO: 915827
gaaccauguuacuauuggu

SEQ ID NO: 1109155 - RNA, 19 nt, Artificial Sequence
  Description of Artificial Sequence: Synthetic oligonucleotide
  Antisense strand to SEQ ID NO: 1109154
accaauaguaacaugguuc

SEQ ID NO: 1109156 - RNA, 19 nt, Artificial Sequence
  Description of Artificial Sequence: Synthetic oligonucleotide
  Sense strand starting at position 3658 of SEQ ID NO: 915827
auguuacuauuggugcaaa

SEQ ID NO: 1109157 - RNA, 19 nt, Artificial Sequence
  Description of Artificial Sequence: Synthetic oligonucleotide
  Antisense strand to SEQ ID NO: 1109156
uuugcaccaauaguaacau

SEQ ID NO: 1109158 - RNA, 19 nt, Artificial Sequence
  Description of Artificial Sequence: Synthetic oligonucleotide
  Sense strand starting at position 3690 of SEQ ID NO: 915827
aucuaauuguacuugaaga

SEQ ID NO: 1109159 - RNA, 19 nt, Artificial Sequence
  Description of Artificial Sequence: Synthetic oligonucleotide
  Antisense strand to SEQ ID NO: 1109158
ucuucaaguacaauuagau

SEQ ID NO: 1109160 - RNA, 19 nt, Artificial Sequence
  Description of Artificial Sequence: Synthetic oligonucleotide
  Sense strand starting at position 3703 of SEQ ID NO: 915827
ugaagacgauaucuuggau

SEQ ID NO: 1109161 - RNA, 19 nt, Artificial Sequence
  Description of Artificial Sequence: Synthetic oligonucleotide
  Antisense strand to SEQ ID NO: 1109160
auccaagauaucgucuuca

SEQ ID NO: 1109162 - RNA, 19 nt, Artificial Sequence
  Description of Artificial Sequence: Synthetic oligonucleotide
  Sense strand starting at position 3707 of SEQ ID NO: 915827
gacgauaucuuggauggac

SEQ ID NO: 1109163 - RNA, 19 nt, Artificial Sequence
  Description of Artificial Sequence: Synthetic oligonucleotide
  Antisense strand to SEQ ID NO: 1109162
guccauccaagauaucguc

SEQ ID NO: 1109164 - RNA, 19 nt, Artificial Sequence
  Description of Artificial Sequence: Synthetic oligonucleotide
  Sense strand starting at position 3736 of SEQ ID NO: 915827
gcaggagucacucagagcu

SEQ ID NO: 1109165 - RNA, 19 nt, Artificial Sequence
  Description of Artificial Sequence: Synthetic oligonucleotide
  Antisense strand to SEQ ID NO: 1109164
agcucugagugacuccugc

SEQ ID NO: 1109166 - RNA, 19 nt, Artificial Sequence
  Description of Artificial Sequence: Synthetic oligonucleotide
  Sense strand starting at position 3764 of SEQ ID NO: 915827
cauuuaugcugugugaccu

SEQ ID NO: 1109167 - RNA, 19 nt, Artificial Sequence
  Description of Artificial Sequence: Synthetic oligonucleotide
  Antisense strand to SEQ ID NO: 1109166
aggucacacagcauaaaug

SEQ ID NO: 1109168 - RNA, 19 nt, Artificial Sequence
  Description of Artificial Sequence: Synthetic oligonucleotide
  Sense strand starting at position 3768 of SEQ ID NO: 915827
uaugcugugugaccuuaaa

SEQ ID NO: 1109169 - RNA, 19 nt, Artificial Sequence
  Description of Artificial Sequence: Synthetic oligonucleotide
  Antisense strand to SEQ ID NO: 1109168
uuuaaggucacacagcaua

SEQ ID NO: 1109170 - RNA, 19 nt, Artificial Sequence
  Description of Artificial Sequence: Synthetic oligonucleotide
  Sense strand starting at position 3789 of SEQ ID NO: 915827
ggugacuuugccuaucuga

SEQ ID NO: 1109171 - RNA, 19 nt, Artificial Sequence
  Description of Artificial Sequence: Synthetic oligonucleotide
  Antisense strand to SEQ ID NO: 1109170
ucagauaggcaaagucacc

SEQ ID NO: 1109172 - RNA, 19 nt, Artificial Sequence
  Description of Artificial Sequence: Synthetic oligonucleotide
  Sense strand starting at position 3848 of SEQ ID NO: 915827
gacugcaucagguaaaggu

SEQ ID NO: 1109173 - RNA, 19 nt, Artificial Sequence
  Description of Artificial Sequence: Synthetic oligonucleotide
  Antisense strand to SEQ ID NO: 1109172
accuuuaccugaugcaguc

SEQ ID NO: 1109174 - RNA, 19 nt, Artificial Sequence
  Description of Artificial Sequence: Synthetic oligonucleotide
  Sense strand starting at position 3896 of SEQ ID NO: 915827
ccuggcaugugauaaacuu

SEQ ID NO: 1109175 - RNA, 19 nt, Artificial Sequence
  Description of Artificial Sequence: Synthetic oligonucleotide
  Antisense strand to SEQ ID NO: 1109174
aaguuuaucacaugccagg

SEQ ID NO: 1109176 - RNA, 19 nt, Artificial Sequence
  Description of Artificial Sequence: Synthetic oligonucleotide
  Sense strand starting at position 82 of SEQ ID NO: 915828
ggguuugggcuugaaauac

SEQ ID NO: 1109177 - RNA, 19 nt, Artificial Sequence
  Description of Artificial Sequence: Synthetic oligonucleotide
  Antisense strand to SEQ ID NO: 1109176
guauuucaagcccaaaccc

SEQ ID NO: 1109178 - RNA, 19 nt, Artificial Sequence
  Description of Artificial Sequence: Synthetic oligonucleotide
  Sense strand starting at position 233 of SEQ ID NO: 915828
uguaaacucccauaggcaa

SEQ ID NO: 1109179 - RNA, 19 nt, Artificial Sequence
  Description of Artificial Sequence: Synthetic oligonucleotide
  Antisense strand to SEQ ID NO: 1109178
uugccuaugggaguuuaca

SEQ ID NO: 1109180 - RNA, 19 nt, Artificial Sequence
  Description of Artificial Sequence: Synthetic oligonucleotide
  Sense strand starting at position 705 of SEQ ID NO: 915828
guguauauaccauaugaug

SEQ ID NO: 1109181 - RNA, 19 nt, Artificial Sequence
  Description of Artificial Sequence: Synthetic oligonucleotide
  Antisense strand to SEQ ID NO: 1109180
caucauaugguauauacac

SEQ ID NO: 1109182 - RNA, 19 nt, Artificial Sequence
  Description of Artificial Sequence: Synthetic oligonucleotide
  Sense strand starting at position 713 of SEQ ID NO: 915828
accauaugaugaguucuuu

SEQ ID NO: 1109183 - RNA, 19 nt, Artificial Sequence
  Description of Artificial Sequence: Synthetic oligonucleotide
  Antisense strand to SEQ ID NO: 1109182
aaagaacucaucauauggu

SEQ ID NO: 1109184 - RNA, 19 nt, Artificial Sequence
  Description of Artificial Sequence: Synthetic oligonucleotide
  Sense strand starting at position 1004 of SEQ ID NO: 915828
aggaaauggugugcagaga

SEQ ID NO: 1109185 - RNA, 19 nt, Artificial Sequence
  Description of Artificial Sequence: Synthetic oligonucleotide
  Antisense strand to SEQ ID NO: 1109184
ucucugcacaccauuuccu

SEQ ID NO: 1109186 - RNA, 19 nt, Artificial Sequence
  Description of Artificial Sequence: Synthetic oligonucleotide
  Sense strand starting at position 1255 of SEQ ID NO: 915828
cccaaauucuuugugaaug

SEQ ID NO: 1109187 - RNA, 19 nt, Artificial Sequence
  Description of Artificial Sequence: Synthetic oligonucleotide
  Antisense strand to SEQ ID NO: 1109186
cauucacaaagaauuuggg

SEQ ID NO: 1109188 - RNA, 19 nt, Artificial Sequence
  Description of Artificial Sequence: Synthetic oligonucleotide
  Sense strand starting at position 1344 of SEQ ID NO: 915828
ccagacaugucacucacua

SEQ ID NO: 1109189 - RNA, 19 nt, Artificial Sequence
  Description of Artificial Sequence: Synthetic oligonucleotide
  Antisense strand to SEQ ID NO: 1109188
uagugagugacaugucugg

SEQ ID NO: 1109190 - RNA, 19 nt, Artificial Sequence
  Description of Artificial Sequence: Synthetic oligonucleotide
  Sense strand starting at position 1407 of SEQ ID NO: 915828
uuuguuccugugcuuguaa

SEQ ID NO: 1109191 - RNA, 19 nt, Artificial Sequence
  Description of Artificial Sequence: Synthetic oligonucleotide
  Antisense strand to SEQ ID NO: 1109190
uuacaagcacaggaacaaa

SEQ ID NO: 1109192 - RNA, 19 nt, Artificial Sequence
  Description of Artificial Sequence: Synthetic oligonucleotide
  Sense strand starting at position 1421 of SEQ ID NO: 915828
uguaaauaggcuuacaaug

SEQ ID NO: 1109193 - RNA, 19 nt, Artificial Sequence
  Description of Artificial Sequence: Synthetic oligonucleotide
  Antisense strand to SEQ ID NO: 1109192
cauuguaagccuauuuaca

SEQ ID NO: 1109194 - RNA, 19 nt, Artificial Sequence
  Description of Artificial Sequence: Synthetic oligonucleotide
  Sense strand starting at position 1439 of SEQ ID NO: 915828
guggcauagucauuucuca

SEQ ID NO: 1109195 - RNA, 19 nt, Artificial Sequence
  Description of Artificial Sequence: Synthetic oligonucleotide
  Antisense strand to SEQ ID NO: 1109194
ugagaaaugacuaugccac

SEQ ID NO: 1109196 - RNA, 19 nt, Artificial Sequence
  Description of Artificial Sequence: Synthetic oligonucleotide
  Sense strand starting at position 1555 of SEQ ID NO: 915828
acuaaugcuguagaucuau

SEQ ID NO: 1109197 - RNA, 19 nt, Artificial Sequence
  Description of Artificial Sequence: Synthetic oligonucleotide
  Antisense strand to SEQ ID NO: 1109196
auagaucuacagcauuagu

SEQ ID NO: 1109198 - RNA, 19 nt, Artificial Sequence
  Description of Artificial Sequence: Synthetic oligonucleotide
  Sense strand starting at position 1780 of SEQ ID NO: 915828
agccauuagcgagauauau

SEQ ID NO: 1109199 - RNA, 19 nt, Artificial Sequence
  Description of Artificial Sequence: Synthetic oligonucleotide
  Antisense strand to SEQ ID NO: 1109198
auauaucucgcuaauggcu

SEQ ID NO: 1109200 - RNA, 19 nt, Artificial Sequence
  Description of Artificial Sequence: Synthetic oligonucleotide
  Sense strand starting at position 1985 of SEQ ID NO: 915828
ucuuauaugguuuacucua

SEQ ID NO: 1109201 - RNA, 19 nt, Artificial Sequence
  Description of Artificial Sequence: Synthetic oligonucleotide
  Antisense strand to SEQ ID NO: 1109200
uagaguaaaccauauaaga

SEQ ID NO: 1109202 - RNA, 19 nt, Artificial Sequence
  Description of Artificial Sequence: Synthetic oligonucleotide
  Sense strand starting at position 2061 of SEQ ID NO: 915828
uuauuaaagccuugaauag

SEQ ID NO: 1109203 - RNA, 19 nt, Artificial Sequence
  Description of Artificial Sequence: Synthetic oligonucleotide
  Antisense strand to SEQ ID NO: 1109202
cuauucaaggcuuuaauaa

SEQ ID NO: 1109204 - RNA, 19 nt, Artificial Sequence
  Description of Artificial Sequence: Synthetic oligonucleotide
  Sense strand starting at position 2070 of SEQ ID NO: 915828
ccuugaauagagggcuaua

SEQ ID NO: 1109205 - RNA, 19 nt, Artificial Sequence
  Description of Artificial Sequence: Synthetic oligonucleotide
  Antisense strand to SEQ ID NO: 1109204
uauagcccucuauucaagg

SEQ ID NO: 1109206 - RNA, 19 nt, Artificial Sequence
  Description of Artificial Sequence: Synthetic oligonucleotide
  Sense strand starting at position 2107 of SEQ ID NO: 915828
uuacuuugauagcugagga

SEQ ID NO: 1109207 - RNA, 19 nt, Artificial Sequence
  Description of Artificial Sequence: Synthetic oligonucleotide
  Antisense strand to SEQ ID NO: 1109206
uccucagcuaucaaaguaa

SEQ ID NO: 1109208 - RNA, 19 nt, Artificial Sequence
  Description of Artificial Sequence: Synthetic oligonucleotide
  Sense strand starting at position 2127 of SEQ ID NO: 915828
auaagaaacucugugccaa

SEQ ID NO: 1109209 - RNA, 19 nt, Artificial Sequence
  Description of Artificial Sequence: Synthetic oligonucleotide
  Antisense strand to SEQ ID NO: 1109208
uuggcacagaguuucuuau

SEQ ID NO: 1109210 - RNA, 19 nt, Artificial Sequence
  Description of Artificial Sequence: Synthetic oligonucleotide
  Sense strand starting at position 2168 of SEQ ID NO: 915828
aaauacguccuaugagauc

SEQ ID NO: 1109211 - RNA, 19 nt, Artificial Sequence
  Description of Artificial Sequence: Synthetic oligonucleotide
  Antisense strand to SEQ ID NO: 1109210
gaucucauaggacguauuu

SEQ ID NO: 1109212 - RNA, 19 nt, Artificial Sequence
  Description of Artificial Sequence: Synthetic oligonucleotide
  Sense strand starting at position 2271 of SEQ ID NO: 915828
ucaaaugagugucugacua

SEQ ID NO: 1109213 - RNA, 19 nt, Artificial Sequence
  Description of Artificial Sequence: Synthetic oligonucleotide
  Antisense strand to SEQ ID NO: 1109212
uagucagacacucauuuga

SEQ ID NO: 1109214 - RNA, 19 nt, Artificial Sequence
  Description of Artificial Sequence: Synthetic oligonucleotide
  Sense strand starting at position 2466 of SEQ ID NO: 915828
ucacuaguugugggaaaua

SEQ ID NO: 1109215 - RNA, 19 nt, Artificial Sequence
  Description of Artificial Sequence: Synthetic oligonucleotide
  Antisense strand to SEQ ID NO: 1109214
uauuucccacaacuaguga

SEQ ID NO: 1109216 - RNA, 19 nt, Artificial Sequence
  Description of Artificial Sequence: Synthetic oligonucleotide
  Sense strand starting at position 2529 of SEQ ID NO: 915828
aucagucuuucccugaaga

SEQ ID NO: 1109217 - RNA, 19 nt, Artificial Sequence
  Description of Artificial Sequence: Synthetic oligonucleotide
  Antisense strand to SEQ ID NO: 1109216
ucuucagggaaagacugau

SEQ ID NO: 1109218 - RNA, 19 nt, Artificial Sequence
  Description of Artificial Sequence: Synthetic oligonucleotide
  Sense strand starting at position 2530 of SEQ ID NO: 915828
ucagucuuucccugaagaa

SEQ ID NO: 1109219 - RNA, 19 nt, Artificial Sequence
  Description of Artificial Sequence: Synthetic oligonucleotide
  Antisense strand to SEQ ID NO: 1109218
uucuucagggaaagacuga

SEQ ID NO: 1109220 - RNA, 19 nt, Artificial Sequence
  Description of Artificial Sequence: Synthetic oligonucleotide
  Sense strand starting at position 2591 of SEQ ID NO: 915828
augacaagucaacgaaacu

SEQ ID NO: 1109221 - RNA, 19 nt, Artificial Sequence
  Description of Artificial Sequence: Synthetic oligonucleotide
  Antisense strand to SEQ ID NO: 1109220
aguuucguugacuugucau

SEQ ID NO: 1109222 - RNA, 19 nt, Artificial Sequence
  Description of Artificial Sequence: Synthetic oligonucleotide
  Sense strand starting at position 2624 of SEQ ID NO: 915828
guuagaauauucucacaag

SEQ ID NO: 1109223 - RNA, 19 nt, Artificial Sequence
  Description of Artificial Sequence: Synthetic oligonucleotide
  Antisense strand to SEQ ID NO: 1109222
cuugugagaauauucuaac

SEQ ID NO: 1109224 - RNA, 19 nt, Artificial Sequence
  Description of Artificial Sequence: Synthetic oligonucleotide
  Sense strand starting at position 2687 of SEQ ID NO: 915828
ggaaauugguacuccauga

SEQ ID NO: 1109225 - RNA, 19 nt, Artificial Sequence
  Description of Artificial Sequence: Synthetic oligonucleotide
  Antisense strand to SEQ ID NO: 1109224
ucauggaguaccaauuucc

SEQ ID NO: 1109226 - RNA, 19 nt, Artificial Sequence
  Description of Artificial Sequence: Synthetic oligonucleotide
  Sense strand starting at position 2692 of SEQ ID NO: 915828
uugguacuccaugaguaga

SEQ ID NO: 1109227 - RNA, 19 nt, Artificial Sequence
  Description of Artificial Sequence: Synthetic oligonucleotide
  Antisense strand to SEQ ID NO: 1109226
ucuacucauggaguaccaa

SEQ ID NO: 1109228 - RNA, 19 nt, Artificial Sequence
  Description of Artificial Sequence: Synthetic oligonucleotide
  Sense strand starting at position 2695 of SEQ ID NO: 915828
guacuccaugaguagaagu

SEQ ID NO: 1109229 - RNA, 19 nt, Artificial Sequence
  Description of Artificial Sequence: Synthetic oligonucleotide
  Antisense strand to SEQ ID NO: 1109228
acuucuacucauggaguac

SEQ ID NO: 1109230 - RNA, 19 nt, Artificial Sequence
  Description of Artificial Sequence: Synthetic oligonucleotide
  Sense strand starting at position 2705 of SEQ ID NO: 915828
aguagaaguagaugaguuu

SEQ ID NO: 1109231 - RNA, 19 nt, Artificial Sequence
  Description of Artificial Sequence: Synthetic oligonucleotide
  Antisense strand to SEQ ID NO: 1109230
aaacucaucuacuucuacu

SEQ ID NO: 1109232 - RNA, 19 nt, Artificial Sequence
  Description of Artificial Sequence: Synthetic oligonucleotide
  Sense strand starting at position 2706 of SEQ ID NO: 915828
guagaaguagaugaguuua

SEQ ID NO: 1109233 - RNA, 19 nt, Artificial Sequence
  Description of Artificial Sequence: Synthetic oligonucleotide
  Antisense strand to SEQ ID NO: 1109232
uaaacucaucuacuucuac

SEQ ID NO: 1109234 - RNA, 19 nt, Artificial Sequence
  Description of Artificial Sequence: Synthetic oligonucleotide
  Sense strand starting at position 2753 of SEQ ID NO: 915828
gugcuuuguaagucauugu

SEQ ID NO: 1109235 - RNA, 19 nt, Artificial Sequence
  Description of Artificial Sequence: Synthetic oligonucleotide
  Antisense strand to SEQ ID NO: 1109234
acaaugacuuacaaagcac

SEQ ID NO: 1109236 - RNA, 19 nt, Artificial Sequence
  Description of Artificial Sequence: Synthetic oligonucleotide
  Sense strand starting at position 2900 of SEQ ID NO: 915828
aaaggucugcuccaugaaa

SEQ ID NO: 1109237 - RNA, 19 nt, Artificial Sequence
  Description of Artificial Sequence: Synthetic oligonucleotide
  Antisense strand to SEQ ID NO: 1109236
uuucauggagcagaccuuu

SEQ ID NO: 1109238 - RNA, 19 nt, Artificial Sequence
  Description of Artificial Sequence: Synthetic oligonucleotide
  Sense strand starting at position 3139 of SEQ ID NO: 915828
auuucuuuccaccguauua

SEQ ID NO: 1109239 - RNA, 19 nt, Artificial Sequence
  Description of Artificial Sequence: Synthetic oligonucleotide
  Antisense strand to SEQ ID NO: 1109238
uaauacgguggaaagaaau

SEQ ID NO: 1109240 - RNA, 19 nt, Artificial Sequence
  Description of Artificial Sequence: Synthetic oligonucleotide
  Sense strand starting at position 3209 of SEQ ID NO: 915828
caaguagcaguuuaagauu

SEQ ID NO: 1109241 - RNA, 19 nt, Artificial Sequence
  Description of Artificial Sequence: Synthetic oligonucleotide
  Antisense strand to SEQ ID NO: 1109240
aaucuuaaacugcuacuug

SEQ ID NO: 1109242 - RNA, 19 nt, Artificial Sequence
  Description of Artificial Sequence: Synthetic oligonucleotide
  Sense strand starting at position 3416 of SEQ ID NO: 915828
gucaaugguagguaaauua

SEQ ID NO: 1109243 - RNA, 19 nt, Artificial Sequence
  Description of Artificial Sequence: Synthetic oligonucleotide
  Antisense strand to SEQ ID NO: 1109242
uaauuuaccuaccauugac

SEQ ID NO: 1109244 - RNA, 19 nt, Artificial Sequence
  Description of Artificial Sequence: Synthetic oligonucleotide
  Sense strand starting at position 3423 of SEQ ID NO: 915828
guagguaaauuauuagaga

SEQ ID NO: 1109245 - RNA, 19 nt, Artificial Sequence
  Description of Artificial Sequence: Synthetic oligonucleotide
  Antisense strand to SEQ ID NO: 1109244
ucucuaauaauuuaccuac

SEQ ID NO: 1109246 - RNA, 19 nt, Artificial Sequence
  Description of Artificial Sequence: Synthetic oligonucleotide
  Sense strand starting at position 3476 of SEQ ID NO: 915828
auaugaaugccucagcuaa

SEQ ID NO: 1109247 - RNA, 19 nt, Artificial Sequence
  Description of Artificial Sequence: Synthetic oligonucleotide
  Antisense strand to SEQ ID NO: 1109246
uuagcugaggcauucauau

SEQ ID NO: 1109248 - RNA, 19 nt, Artificial Sequence
  Description of Artificial Sequence: Synthetic oligonucleotide
  Sense strand starting at position 3650 of SEQ ID NO: 915828
gaaguuauacacuggguaa

SEQ ID NO: 1109249 - RNA, 19 nt, Artificial Sequence
  Description of Artificial Sequence: Synthetic oligonucleotide
  Antisense strand to SEQ ID NO: 1109248
uuacccaguguauaacuuc

SEQ ID NO: 1109250 - RNA, 19 nt, Artificial Sequence
  Description of Artificial Sequence: Synthetic oligonucleotide
  Sense strand starting at position 3652 of SEQ ID NO: 915828
aguuauacacuggguaaau

SEQ ID NO: 1109251 - RNA, 19 nt, Artificial Sequence
  Description of Artificial Sequence: Synthetic oligonucleotide
  Antisense strand to SEQ ID NO: 1109250
auuuacccaguguauaacu

SEQ ID NO: 1109252 - RNA, 19 nt, Artificial Sequence
  Description of Artificial Sequence: Synthetic oligonucleotide
  Sense strand starting at position 3653 of SEQ ID NO: 915828
guuauacacuggguaaauu

SEQ ID NO: 1109253 - RNA, 19 nt, Artificial Sequence
  Description of Artificial Sequence: Synthetic oligonucleotide
  Antisense strand to SEQ ID NO: 1109252
aauuuacccaguguauaac

SEQ ID NO: 1109254 - RNA, 19 nt, Artificial Sequence
  Description of Artificial Sequence: Synthetic oligonucleotide
  Sense strand starting at position 3764 of SEQ ID NO: 915828
guguauguuagauguauuu

SEQ ID NO: 1109255 - RNA, 19 nt, Artificial Sequence
  Description of Artificial Sequence: Synthetic oligonucleotide
  Antisense strand to SEQ ID NO: 1109254
aaauacaucuaacauacac

SEQ ID NO: 1109256 - RNA, 19 nt, Artificial Sequence
  Description of Artificial Sequence: Synthetic oligonucleotide
  Sense strand starting at position 126 of SEQ ID NO: 915829
gcuccauauugaucagaca

SEQ ID NO: 1109257 - RNA, 19 nt, Artificial Sequence
  Description of Artificial Sequence: Synthetic oligonucleotide
  Antisense strand to SEQ ID NO: 1109256
ugucugaucaauauggagc

SEQ ID NO: 1109258 - RNA, 19 nt, Artificial Sequence
  Description of Artificial Sequence: Synthetic oligonucleotide
  Sense strand starting at position 170 of SEQ ID NO: 915829
auaagaaacccuggcucuu

SEQ ID NO: 1109259 - RNA, 19 nt, Artificial Sequence
  Description of Artificial Sequence: Synthetic oligonucleotide
  Antisense strand to SEQ ID NO: 1109258
aagagccaggguuucuuau

SEQ ID NO: 1109260 - RNA, 19 nt, Artificial Sequence
  Description of Artificial Sequence: Synthetic oligonucleotide
  Sense strand starting at position 247 of SEQ ID NO: 915829
guggaaauauguuuagucu

SEQ ID NO: 1109261 - RNA, 19 nt, Artificial Sequence
  Description of Artificial Sequence: Synthetic oligonucleotide
  Antisense strand to SEQ ID NO: 1109260
agacuaaacauauuuccac

SEQ ID NO: 1109262 - RNA, 19 nt, Artificial Sequence
  Description of Artificial Sequence: Synthetic oligonucleotide
  Sense strand starting at position 248 of SEQ ID NO: 915829
uggaaauauguuuagucuu

SEQ ID NO: 1109263 - RNA, 19 nt, Artificial Sequence
  Description of Artificial Sequence: Synthetic oligonucleotide
  Antisense strand to SEQ ID NO: 1109262
aagacuaaacauauuucca

SEQ ID NO: 1109264 - RNA, 19 nt, Artificial Sequence
  Description of Artificial Sequence: Synthetic oligonucleotide
  Sense strand starting at position 250 of SEQ ID NO: 915829
gaaauauguuuagucuuag

SEQ ID NO: 1109265 - RNA, 19 nt, Artificial Sequence
  Description of Artificial Sequence: Synthetic oligonucleotide
  Antisense strand to SEQ ID NO: 1109264
cuaagacuaaacauauuuc

SEQ ID NO: 1109266 - RNA, 19 nt, Artificial Sequence
  Description of Artificial Sequence: Synthetic oligonucleotide
  Sense strand starting at position 296 of SEQ ID NO: 915829
ggugcuuuaggaugaccua

SEQ ID NO: 1109267 - RNA, 19 nt, Artificial Sequence
  Description of Artificial Sequence: Synthetic oligonucleotide
  Antisense strand to SEQ ID NO: 1109266
uaggucauccuaaagcacc

SEQ ID NO: 1109268 - RNA, 19 nt, Artificial Sequence
  Description of Artificial Sequence: Synthetic oligonucleotide
  Sense strand starting at position 312 of SEQ ID NO: 915829
cuaccaaguugggauuuaa

SEQ ID NO: 1109269 - RNA, 19 nt, Artificial Sequence
  Description of Artificial Sequence: Synthetic oligonucleotide
  Antisense strand to SEQ ID NO: 1109268
uuaaaucccaacuugguag

SEQ ID NO: 1109270 - RNA, 19 nt, Artificial Sequence
  Description of Artificial Sequence: Synthetic oligonucleotide
  Sense strand starting at position 454 of SEQ ID NO: 915829
ccuuuaacugguuacaguu

SEQ ID NO: 1109271 - RNA, 19 nt, Artificial Sequence
  Description of Artificial Sequence: Synthetic oligonucleotide
  Antisense strand to SEQ ID NO: 1109270
aacuguaaccaguuaaagg

SEQ ID NO: 1109272 - RNA, 19 nt, Artificial Sequence
  Description of Artificial Sequence: Synthetic oligonucleotide
  Sense strand starting at position 508 of SEQ ID NO: 915829
uuagaugucagaggaaucu

SEQ ID NO: 1109273 - RNA, 19 nt, Artificial Sequence
  Description of Artificial Sequence: Synthetic oligonucleotide
  Antisense strand to SEQ ID NO: 1109272
agauuccucugacaucuaa

SEQ ID NO: 1109274 - RNA, 19 nt, Artificial Sequence
  Description of Artificial Sequence: Synthetic oligonucleotide
  Sense strand starting at position 517 of SEQ ID NO: 915829
agaggaaucuaagacacua

SEQ ID NO: 1109275 - RNA, 19 nt, Artificial Sequence
  Description of Artificial Sequence: Synthetic oligonucleotide
  Antisense strand to SEQ ID NO: 1109274
uagugucuuagauuccucu

SEQ ID NO: 1109276 - RNA, 19 nt, Artificial Sequence
  Description of Artificial Sequence: Synthetic oligonucleotide
  Sense strand starting at position 832 of SEQ ID NO: 915829
gauguagcaguuugaauga

SEQ ID NO: 1109277 - RNA, 19 nt, Artificial Sequence
  Description of Artificial Sequence: Synthetic oligonucleotide
  Antisense strand to SEQ ID NO: 1109276
ucauucaaacugcuacauc

SEQ ID NO: 1109278 - RNA, 19 nt, Artificial Sequence
  Description of Artificial Sequence: Synthetic oligonucleotide
  Sense strand starting at position 839 of SEQ ID NO: 915829
caguuugaaugaguguaua

SEQ ID NO: 1109279 - RNA, 19 nt, Artificial Sequence
  Description of Artificial Sequence: Synthetic oligonucleotide
  Antisense strand to SEQ ID NO: 1109278
uauacacucauucaaacug

SEQ ID NO: 1109280 - RNA, 19 nt, Artificial Sequence
  Description of Artificial Sequence: Synthetic oligonucleotide
  Sense strand starting at position 852 of SEQ ID NO: 915829
uguauaggaggucagcauu

SEQ ID NO: 1109281 - RNA, 19 nt, Artificial Sequence
  Description of Artificial Sequence: Synthetic oligonucleotide
  Antisense strand to SEQ ID NO: 1109280
aaugcugaccuccuauaca

SEQ ID NO: 1109282 - RNA, 19 nt, Artificial Sequence
  Description of Artificial Sequence: Synthetic oligonucleotide
  Sense strand starting at position 858 of SEQ ID NO: 915829
ggaggucagcauuacaucu

SEQ ID NO: 1109283 - RNA, 19 nt, Artificial Sequence
  Description of Artificial Sequence: Synthetic oligonucleotide
  Antisense strand to SEQ ID NO: 1109282
agauguaaugcugaccucc

SEQ ID NO: 1109284 - RNA, 19 nt, Artificial Sequence
  Description of Artificial Sequence: Synthetic oligonucleotide
  Sense strand starting at position 931 of SEQ ID NO: 915829
auaauauccuccguaagag

SEQ ID NO: 1109285 - RNA, 19 nt, Artificial Sequence
  Description of Artificial Sequence: Synthetic oligonucleotide
  Antisense strand to SEQ ID NO: 1109284
cucuuacggaggauauuau

SEQ ID NO: 1109286 - RNA, 19 nt, Artificial Sequence
  Description of Artificial Sequence: Synthetic oligonucleotide
  Sense strand starting at position 932 of SEQ ID NO: 915829
uaauauccuccguaagaga

SEQ ID NO: 1109287 - RNA, 19 nt, Artificial Sequence
  Description of Artificial Sequence: Synthetic oligonucleotide
  Antisense strand to SEQ ID NO: 1109286
ucucuuacggaggauauua

SEQ ID NO: 1109288 - RNA, 19 nt, Artificial Sequence
  Description of Artificial Sequence: Synthetic oligonucleotide
  Sense strand starting at position 943 of SEQ ID NO: 915829
guaagagauuggucagggu

SEQ ID NO: 1109289 - RNA, 19 nt, Artificial Sequence
  Description of Artificial Sequence: Synthetic oligonucleotide
  Antisense strand to SEQ ID NO: 1109288
acccugaccaaucucuuac

SEQ ID NO: 1109290 - RNA, 19 nt, Artificial Sequence
  Description of Artificial Sequence: Synthetic oligonucleotide
  Sense strand starting at position 1086 of SEQ ID NO: 915829
ugcacuguugacgaaggua

SEQ ID NO: 1109291 - RNA, 19 nt, Artificial Sequence
  Description of Artificial Sequence: Synthetic oligonucleotide
  Antisense strand to SEQ ID NO: 1109290
uaccuucgucaacagugca

SEQ ID NO: 1109292 - RNA, 19 nt, Artificial Sequence
  Description of Artificial Sequence: Synthetic oligonucleotide
  Sense strand starting at position 1307 of SEQ ID NO: 915829
cuaguagcuguuugaagaa

SEQ ID NO: 1109293 - RNA, 19 nt, Artificial Sequence
  Description of Artificial Sequence: Synthetic oligonucleotide
  Antisense strand to SEQ ID NO: 1109292
uucuucaaacagcuacuag

SEQ ID NO: 1109294 - RNA, 19 nt, Artificial Sequence
  Description of Artificial Sequence: Synthetic oligonucleotide
  Sense strand starting at position 1368 of SEQ ID NO: 915829
ggugcaaugcaguauuucu

SEQ ID NO: 1109295 - RNA, 19 nt, Artificial Sequence
  Description of Artificial Sequence: Synthetic oligonucleotide
  Antisense strand to SEQ ID NO: 1109294
agaaauacugcauugcacc

SEQ ID NO: 1109296 - RNA, 19 nt, Artificial Sequence
  Description of Artificial Sequence: Synthetic oligonucleotide
  Sense strand starting at position 1375 of SEQ ID NO: 915829
ugcaguauuucuguguucu

SEQ ID NO: 1109297 - RNA, 19 nt, Artificial Sequence
  Description of Artificial Sequence: Synthetic oligonucleotide
  Antisense strand to SEQ ID NO: 1109296
agaacacagaaauacugca

SEQ ID NO: 1109298 - RNA, 19 nt, Artificial Sequence
  Description of Artificial Sequence: Synthetic oligonucleotide
  Sense strand starting at position 1376 of SEQ ID NO: 915829
gcaguauuucuguguucuc

SEQ ID NO: 1109299 - RNA, 19 nt, Artificial Sequence
  Description of Artificial Sequence: Synthetic oligonucleotide
  Antisense strand to SEQ ID NO: 1109298
gagaacacagaaauacugc

SEQ ID NO: 1109300 - RNA, 19 nt, Artificial Sequence
  Description of Artificial Sequence: Synthetic oligonucleotide
  Sense strand starting at position 1377 of SEQ ID NO: 915829
caguauuucuguguucucu

SEQ ID NO: 1109301 - RNA, 19 nt, Artificial Sequence
  Description of Artificial Sequence: Synthetic oligonucleotide
  Antisense strand to SEQ ID NO: 1109300
agagaacacagaaauacug

SEQ ID NO: 1109302 - RNA, 19 nt, Artificial Sequence
  Description of Artificial Sequence: Synthetic oligonucleotide
  Sense strand starting at position 1756 of SEQ ID NO: 915829
ugcaucuaccgggaaugau

SEQ ID NO: 1109303 - RNA, 19 nt, Artificial Sequence
  Description of Artificial Sequence: Synthetic oligonucleotide
  Antisense strand to SEQ ID NO: 1109302
aucauucccgguagaugca

SEQ ID NO: 1109304 - RNA, 19 nt, Artificial Sequence
  Description of Artificial Sequence: Synthetic oligonucleotide
  Sense strand starting at position 1765 of SEQ ID NO: 915829
cgggaaugauucucucaga

SEQ ID NO: 1109305 - RNA, 19 nt, Artificial Sequence
  Description of Artificial Sequence: Synthetic oligonucleotide
  Antisense strand to SEQ ID NO: 1109304
ucugagagaaucauucccg

SEQ ID NO: 1109306 - RNA, 19 nt, Artificial Sequence
  Description of Artificial Sequence: Synthetic oligonucleotide
  Sense strand starting at position 2049 of SEQ ID NO: 915829
uacaucacuucgguaagau

SEQ ID NO: 1109307 - RNA, 19 nt, Artificial Sequence
  Description of Artificial Sequence: Synthetic oligonucleotide
  Antisense strand to SEQ ID NO: 1109306
aucuuaccgaagugaugua

SEQ ID NO: 1109308 - RNA, 19 nt, Artificial Sequence
  Description of Artificial Sequence: Synthetic oligonucleotide
  Sense strand starting at position 2050 of SEQ ID NO: 915829
acaucacuucgguaagauu

SEQ ID NO: 1109309 - RNA, 19 nt, Artificial Sequence
  Description of Artificial Sequence: Synthetic oligonucleotide
  Antisense strand to SEQ ID NO: 1109308
aaucuuaccgaagugaugu

SEQ ID NO: 1109310 - RNA, 19 nt, Artificial Sequence
  Description of Artificial Sequence: Synthetic oligonucleotide
  Sense strand starting at position 2102 of SEQ ID NO: 915829
aagggagauuuccaagcga

SEQ ID NO: 1109311 - RNA, 19 nt, Artificial Sequence
  Description of Artificial Sequence: Synthetic oligonucleotide
  Antisense strand to SEQ ID NO: 1109310
ucgcuuggaaaucucccuu

SEQ ID NO: 1109312 - RNA, 19 nt, Artificial Sequence
  Description of Artificial Sequence: Synthetic oligonucleotide
  Sense strand starting at position 2240 of SEQ ID NO: 915829
aagggagauuugcaagagu

SEQ ID NO: 1109313 - RNA, 19 nt, Artificial Sequence
  Description of Artificial Sequence: Synthetic oligonucleotide
  Antisense strand to SEQ ID NO: 1109312
acucuugcaaaucucccuu

SEQ ID NO: 1109314 - RNA, 19 nt, Artificial Sequence
  Description of Artificial Sequence: Synthetic oligonucleotide
  Sense strand starting at position 2498 of SEQ ID NO: 915829
caaguuguaaucgaggguu

SEQ ID NO: 1109315 - RNA, 19 nt, Artificial Sequence
  Description of Artificial Sequence: Synthetic oligonucleotide
  Antisense strand to SEQ ID NO: 1109314
aacccucgauuacaacuug

SEQ ID NO: 1109316 - RNA, 19 nt, Artificial Sequence
  Description of Artificial Sequence: Synthetic oligonucleotide
  Sense strand starting at position 2510 of SEQ ID NO: 915829
gaggguuucccuuguaaau

SEQ ID NO: 1109317 - RNA, 19 nt, Artificial Sequence
  Description of Artificial Sequence: Synthetic oligonucleotide
  Antisense strand to SEQ ID NO: 1109316
auuuacaagggaaacccuc

SEQ ID NO: 1109318 - RNA, 19 nt, Artificial Sequence
  Description of Artificial Sequence: Synthetic oligonucleotide
  Sense strand starting at position 2815 of SEQ ID NO: 915829
ggaaauagcuucucuagga

SEQ ID NO: 1109319 - RNA, 19 nt, Artificial Sequence
  Description of Artificial Sequence: Synthetic oligonucleotide
  Antisense strand to SEQ ID NO: 1109318
uccuagagaagcuauuucc

SEQ ID NO: 1109320 - RNA, 19 nt, Artificial Sequence
  Description of Artificial Sequence: Synthetic oligonucleotide
  Sense strand starting at position 2891 of SEQ ID NO: 915829
uguuuagcuguagagauaa

SEQ ID NO: 1109321 - RNA, 19 nt, Artificial Sequence
  Description of Artificial Sequence: Synthetic oligonucleotide
  Antisense strand to SEQ ID NO: 1109320
uuaucucuacagcuaaaca

SEQ ID NO: 1109322 - RNA, 19 nt, Artificial Sequence
  Description of Artificial Sequence: Synthetic oligonucleotide
  Sense strand starting at position 3360 of SEQ ID NO: 915829
uaagucagggcugaguaua

SEQ ID NO: 1109323 - RNA, 19 nt, Artificial Sequence
  Description of Artificial Sequence: Synthetic oligonucleotide
  Antisense strand to SEQ ID NO: 1109322
uauacucagcccugacuua

SEQ ID NO: 1109324 - RNA, 19 nt, Artificial Sequence
  Description of Artificial Sequence: Synthetic oligonucleotide
  Sense strand starting at position 3446 of SEQ ID NO: 915829
ucggaaaucucccuuucug

SEQ ID NO: 1109325 - RNA, 19 nt, Artificial Sequence
  Description of Artificial Sequence: Synthetic oligonucleotide
  Antisense strand to SEQ ID NO: 1109324
cagaaagggagauuuccga

SEQ ID NO: 1109326 - RNA, 19 nt, Artificial Sequence
  Description of Artificial Sequence: Synthetic oligonucleotide
  Sense strand starting at position 3468 of SEQ ID NO: 915829
gcucuucugcuugugguau

SEQ ID NO: 1109327 - RNA, 19 nt, Artificial Sequence
  Description of Artificial Sequence: Synthetic oligonucleotide
  Antisense strand to SEQ ID NO: 1109326
auaccacaagcagaagagc

SEQ ID NO: 1109328 - RNA, 19 nt, Artificial Sequence
  Description of Artificial Sequence: Synthetic oligonucleotide
  Sense strand starting at position 3476 of SEQ ID NO: 915829
gcuugugguaucuacugaa

SEQ ID NO: 1109329 - RNA, 19 nt, Artificial Sequence
  Description of Artificial Sequence: Synthetic oligonucleotide
  Antisense strand to SEQ ID NO: 1109328
uucaguagauaccacaagc

SEQ ID NO: 1109330 - RNA, 19 nt, Artificial Sequence
  Description of Artificial Sequence: Synthetic oligonucleotide
  Sense strand starting at position 3717 of SEQ ID NO: 915829
acccuuaagcuaggaauga

SEQ ID NO: 1109331 - RNA, 19 nt, Artificial Sequence
  Description of Artificial Sequence: Synthetic oligonucleotide
  Antisense strand to SEQ ID NO: 1109330
ucauuccuagcuuaagggu

SEQ ID NO: 1109332 - RNA, 19 nt, Artificial Sequence
  Description of Artificial Sequence: Synthetic oligonucleotide
  Sense strand starting at position 3939 of SEQ ID NO: 915829
uuuauagaaguuugcaaac

SEQ ID NO: 1109333 - RNA, 19 nt, Artificial Sequence
  Description of Artificial Sequence: Synthetic oligonucleotide
  Antisense strand to SEQ ID NO: 1109332
guuugcaaacuucuauaaa

SEQ ID NO: 1109334 - RNA, 19 nt, Artificial Sequence
  Description of Artificial Sequence: Synthetic oligonucleotide
  Sense strand starting at position 3956 of SEQ ID NO: 915829
accucugugcuagaauaua

SEQ ID NO: 1109335 - RNA, 19 nt, Artificial Sequence
  Description of Artificial Sequence: Synthetic oligonucleotide
  Antisense strand to SEQ ID NO: 1109334
uauauucuagcacagaggu

SEQ ID NO: 1109336 - RNA, 19 nt, Artificial Sequence
  Description of Artificial Sequence: Synthetic oligonucleotide
  Sense strand starting at position 103 of SEQ ID NO: 915830
agaccuuuagaguguuuga

SEQ ID NO: 1109337 - RNA, 19 nt, Artificial Sequence
  Description of Artificial Sequence: Synthetic oligonucleotide
  Antisense strand to SEQ ID NO: 1109336
ucaaacacucuaaaggucu

SEQ ID NO: 1109338 - RNA, 19 nt, Artificial Sequence
  Description of Artificial Sequence: Synthetic oligonucleotide
  Sense strand starting at position 106 of SEQ ID NO: 915830
ccuuuagaguguuugaguu

SEQ ID NO: 1109339 - RNA, 19 nt, Artificial Sequence
  Description of Artificial Sequence: Synthetic oligonucleotide
  Antisense strand to SEQ ID NO: 1109338
aacucaaacacucuaaagg

SEQ ID NO: 1109340 - RNA, 19 nt, Artificial Sequence
  Description of Artificial Sequence: Synthetic oligonucleotide
  Sense strand starting at position 114 of SEQ ID NO: 915830
guguuugaguuucugcuuu

SEQ ID NO: 1109341 - RNA, 19 nt, Artificial Sequence
  Description of Artificial Sequence: Synthetic oligonucleotide
  Antisense strand to SEQ ID NO: 1109340
aaagcagaaacucaaacac

SEQ ID NO: 1109342 - RNA, 19 nt, Artificial Sequence
  Description of Artificial Sequence: Synthetic oligonucleotide
  Sense strand starting at position 170 of SEQ ID NO: 915830
caguuaccugcugaaugaa

SEQ ID NO: 1109343 - RNA, 19 nt, Artificial Sequence
  Description of Artificial Sequence: Synthetic oligonucleotide
  Antisense strand to SEQ ID NO: 1109342
uucauucagcagguaacug

SEQ ID NO: 1109344 - RNA, 19 nt, Artificial Sequence
  Description of Artificial Sequence: Synthetic oligonucleotide
  Sense strand starting at position 247 of SEQ ID NO: 915830
gaccgaggaucgcuugagu

SEQ ID NO: 1109345 - RNA, 19 nt, Artificial Sequence
  Description of Artificial Sequence: Synthetic oligonucleotide
  Antisense strand to SEQ ID NO: 1109344
acucaagcgauccucgguc

SEQ ID NO: 1109346 - RNA, 19 nt, Artificial Sequence
  Description of Artificial Sequence: Synthetic oligonucleotide
  Sense strand starting at position 287 of SEQ ID NO: 915830
gggcaauauggugagauuc

SEQ ID NO: 1109347 - RNA, 19 nt, Artificial Sequence
  Description of Artificial Sequence: Synthetic oligonucleotide
  Antisense strand to SEQ ID NO: 1109346
gaaucucaccauauugccc

SEQ ID NO: 1109348 - RNA, 19 nt, Artificial Sequence
  Description of Artificial Sequence: Synthetic oligonucleotide
  Sense strand starting at position 295 of SEQ ID NO: 915830
uggugagauucccauuucu

SEQ ID NO: 1109349 - RNA, 19 nt, Artificial Sequence
  Description of Artificial Sequence: Synthetic oligonucleotide
  Antisense strand to SEQ ID NO: 1109348
agaaaugggaaucucacca

SEQ ID NO: 1109350 - RNA, 19 nt, Artificial Sequence
  Description of Artificial Sequence: Synthetic oligonucleotide
  Sense strand starting at position 429 of SEQ ID NO: 915830
cuaugauccuaccaguaca

SEQ ID NO: 1109351 - RNA, 19 nt, Artificial Sequence
  Description of Artificial Sequence: Synthetic oligonucleotide
  Antisense strand to SEQ ID NO: 1109350
uguacugguaggaucauag

SEQ ID NO: 1109352 - RNA, 19 nt, Artificial Sequence
  Description of Artificial Sequence: Synthetic oligonucleotide
  Sense strand starting at position 651 of SEQ ID NO: 915830
ugaggucuucuagaaaguc

SEQ ID NO: 1109353 - RNA, 19 nt, Artificial Sequence
  Description of Artificial Sequence: Synthetic oligonucleotide
  Antisense strand to SEQ ID NO: 1109352
gacuuucuagaagaccuca

SEQ ID NO: 1109354 - RNA, 19 nt, Artificial Sequence
  Description of Artificial Sequence: Synthetic oligonucleotide
  Sense strand starting at position 873 of SEQ ID NO: 915830
gccugcaugccuggugaau

SEQ ID NO: 1109355 - RNA, 19 nt, Artificial Sequence
  Description of Artificial Sequence: Synthetic oligonucleotide
  Antisense strand to SEQ ID NO: 1109354
auucaccaggcaugcaggc

SEQ ID NO: 1109356 - RNA, 19 nt, Artificial Sequence
  Description of Artificial Sequence: Synthetic oligonucleotide
  Sense strand starting at position 1176 of SEQ ID NO: 915830
gaaggaaacuucugagaag

SEQ ID NO: 1109357 - RNA, 19 nt, Artificial Sequence
  Description of Artificial Sequence: Synthetic oligonucleotide
  Antisense strand to SEQ ID NO: 1109356
cuucucagaaguuuccuuc

SEQ ID NO: 1109358 - RNA, 19 nt, Artificial Sequence
  Description of Artificial Sequence: Synthetic oligonucleotide
  Sense strand starting at position 1179 of SEQ ID NO: 915830
ggaaacuucugagaaggcu

SEQ ID NO: 1109359 - RNA, 19 nt, Artificial Sequence
  Description of Artificial Sequence: Synthetic oligonucleotide
  Antisense strand to SEQ ID NO: 1109358
agccuucucagaaguuucc

SEQ ID NO: 1109360 - RNA, 19 nt, Artificial Sequence
  Description of Artificial Sequence: Synthetic oligonucleotide
  Sense strand starting at position 2090 of SEQ ID NO: 915830
ggugcuguguauuccugaa

SEQ ID NO: 1109361 - RNA, 19 nt, Artificial Sequence
  Description of Artificial Sequence: Synthetic oligonucleotide
  Antisense strand to SEQ ID NO: 1109360
uucaggaauacacagcacc

SEQ ID NO: 1109362 - RNA, 19 nt, Artificial Sequence
  Description of Artificial Sequence: Synthetic oligonucleotide
  Sense strand starting at position 2092 of SEQ ID NO: 915830
ugcuguguauuccugaaau

SEQ ID NO: 1109363 - RNA, 19 nt, Artificial Sequence
  Description of Artificial Sequence: Synthetic oligonucleotide
  Antisense strand to SEQ ID NO: 1109362
auuucaggaauacacagca

SEQ ID NO: 1109364 - RNA, 19 nt, Artificial Sequence
  Description of Artificial Sequence: Synthetic oligonucleotide
  Sense strand starting at position 2094 of SEQ ID NO: 915830
cuguguauuccugaaauac

SEQ ID NO: 1109365 - RNA, 19 nt, Artificial Sequence
  Description of Artificial Sequence: Synthetic oligonucleotide
  Antisense strand to SEQ ID NO: 1109364
guauuucaggaauacacag

SEQ ID NO: 1109366 - RNA, 19 nt, Artificial Sequence
  Description of Artificial Sequence: Synthetic oligonucleotide
  Sense strand starting at position 2141 of SEQ ID NO: 915830
cccugcucugccugaaaca

SEQ ID NO: 1109367 - RNA, 19 nt, Artificial Sequence
  Description of Artificial Sequence: Synthetic oligonucleotide
  Antisense strand to SEQ ID NO: 1109366
uguuucaggcagagcaggg

SEQ ID NO: 1109368 - RNA, 19 nt, Artificial Sequence
  Description of Artificial Sequence: Synthetic oligonucleotide
  Sense strand starting at position 2154 of SEQ ID NO: 915830
gaaacaggcuuggacauau

SEQ ID NO: 1109369 - RNA, 19 nt, Artificial Sequence
  Description of Artificial Sequence: Synthetic oligonucleotide
  Antisense strand to SEQ ID NO: 1109368
auauguccaagccuguuuc

SEQ ID NO: 1109370 - RNA, 19 nt, Artificial Sequence
  Description of Artificial Sequence: Synthetic oligonucleotide
  Sense strand starting at position 2282 of SEQ ID NO: 915830
guauaugaagugugcagaa

SEQ ID NO: 1109371 - RNA, 19 nt, Artificial Sequence
  Description of Artificial Sequence: Synthetic oligonucleotide
  Antisense strand to SEQ ID NO: 1109370
uucugcacacuucauauac

SEQ ID NO: 1109372 - RNA, 19 nt, Artificial Sequence
  Description of Artificial Sequence: Synthetic oligonucleotide
  Sense strand starting at position 2300 of SEQ ID NO: 915830
acaggccaaucuugagaga

SEQ ID NO: 1109373 - RNA, 19 nt, Artificial Sequence
  Description of Artificial Sequence: Synthetic oligonucleotide
  Antisense strand to SEQ ID NO: 1109372
ucucucaagauuggccugu

SEQ ID NO: 1109374 - RNA, 19 nt, Artificial Sequence
  Description of Artificial Sequence: Synthetic oligonucleotide
  Sense strand starting at position 2413 of SEQ ID NO: 915830
agcagauugaggugauggu

SEQ ID NO: 1109375 - RNA, 19 nt, Artificial Sequence
  Description of Artificial Sequence: Synthetic oligonucleotide
  Antisense strand to SEQ ID NO: 1109374
accaucaccucaaucugcu

SEQ ID NO: 1109376 - RNA, 19 nt, Artificial Sequence
  Description of Artificial Sequence: Synthetic oligonucleotide
  Sense strand starting at position 2414 of SEQ ID NO: 915830
gcagauugaggugaugguu

SEQ ID NO: 1109377 - RNA, 19 nt, Artificial Sequence
  Description of Artificial Sequence: Synthetic oligonucleotide
  Antisense strand to SEQ ID NO: 1109376
aaccaucaccucaaucugc

SEQ ID NO: 1109378 - RNA, 19 nt, Artificial Sequence
  Description of Artificial Sequence: Synthetic oligonucleotide
  Sense strand starting at position 2432 of SEQ ID NO: 915830
uguacagcucugugaauac

SEQ ID NO: 1109379 - RNA, 19 nt, Artificial Sequence
  Description of Artificial Sequence: Synthetic oligonucleotide
  Antisense strand to SEQ ID NO: 1109378
guauucacagagcuguaca

SEQ ID NO: 1109380 - RNA, 19 nt, Artificial Sequence
  Description of Artificial Sequence: Synthetic oligonucleotide
  Sense strand starting at position 2436 of SEQ ID NO: 915830
cagcucugugaauacaguu

SEQ ID NO: 1109381 - RNA, 19 nt, Artificial Sequence
  Description of Artificial Sequence: Synthetic oligonucleotide
  Antisense strand to SEQ ID NO: 1109380
aacuguauucacagagcug

SEQ ID NO: 1109382 - RNA, 19 nt, Artificial Sequence
  Description of Artificial Sequence: Synthetic oligonucleotide
  Sense strand starting at position 2462 of SEQ ID NO: 915830
auugacuuguccuuuacau

SEQ ID NO: 1109383 - RNA, 19 nt, Artificial Sequence
  Description of Artificial Sequence: Synthetic oligonucleotide
  Antisense strand to SEQ ID NO: 1109382
auguaaaggacaagucaau

SEQ ID NO: 1109384 - RNA, 19 nt, Artificial Sequence
  Description of Artificial Sequence: Synthetic oligonucleotide
  Sense strand starting at position 2464 of SEQ ID NO: 915830
ugacuuguccuuuacauga

SEQ ID NO: 1109385 - RNA, 19 nt, Artificial Sequence
  Description of Artificial Sequence: Synthetic oligonucleotide
  Antisense strand to SEQ ID NO: 1109384
ucauguaaaggacaaguca

SEQ ID NO: 1109386 - RNA, 19 nt, Artificial Sequence
  Description of Artificial Sequence: Synthetic oligonucleotide
  Sense strand starting at position 2471 of SEQ ID NO: 915830
uccuuuacaugaguggauu

SEQ ID NO: 1109387 - RNA, 19 nt, Artificial Sequence
  Description of Artificial Sequence: Synthetic oligonucleotide
  Antisense strand to SEQ ID NO: 1109386
aauccacucauguaaagga

SEQ ID NO: 1109388 - RNA, 19 nt, Artificial Sequence
  Description of Artificial Sequence: Synthetic oligonucleotide
  Sense strand starting at position 2474 of SEQ ID NO: 915830
uuuacaugaguggauugua

SEQ ID NO: 1109389 - RNA, 19 nt, Artificial Sequence
  Description of Artificial Sequence: Synthetic oligonucleotide
  Antisense strand to SEQ ID NO: 1109388
uacaauccacucauguaaa

SEQ ID NO: 1109390 - RNA, 19 nt, Artificial Sequence
  Description of Artificial Sequence: Synthetic oligonucleotide
  Sense strand starting at position 2486 of SEQ ID NO: 915830
gauuguaugccaugugaau

SEQ ID NO: 1109391 - RNA, 19 nt, Artificial Sequence
  Description of Artificial Sequence: Synthetic oligonucleotide
  Antisense strand to SEQ ID NO: 1109390
auucacauggcauacaauc

SEQ ID NO: 1109392 - RNA, 19 nt, Artificial Sequence
  Description of Artificial Sequence: Synthetic oligonucleotide
  Sense strand starting at position 2548 of SEQ ID NO: 915830
gaugcagucucccuuuguu

SEQ ID NO: 1109393 - RNA, 19 nt, Artificial Sequence
  Description of Artificial Sequence: Synthetic oligonucleotide
  Antisense strand to SEQ ID NO: 1109392
aacaaagggagacugcauc

SEQ ID NO: 1109394 - RNA, 19 nt, Artificial Sequence
  Description of Artificial Sequence: Synthetic oligonucleotide
  Sense strand starting at position 2728 of SEQ ID NO: 915830
ugaccagguugcucucuaa

SEQ ID NO: 1109395 - RNA, 19 nt, Artificial Sequence
  Description of Artificial Sequence: Synthetic oligonucleotide
  Antisense strand to SEQ ID NO: 1109394
uuagagagcaaccugguca

SEQ ID NO: 1109396 - RNA, 19 nt, Artificial Sequence
  Description of Artificial Sequence: Synthetic oligonucleotide
  Sense strand starting at position 2863 of SEQ ID NO: 915830
agggaauuguugcuucugu

SEQ ID NO: 1109397 - RNA, 19 nt, Artificial Sequence
  Description of Artificial Sequence: Synthetic oligonucleotide
  Antisense strand to SEQ ID NO: 1109396
acagaagcaacaauucccu

SEQ ID NO: 1109398 - RNA, 19 nt, Artificial Sequence
  Description of Artificial Sequence: Synthetic oligonucleotide
  Sense strand starting at position 2872 of SEQ ID NO: 915830
uugcuucugucaucaucau

SEQ ID NO: 1109399 - RNA, 19 nt, Artificial Sequence
  Description of Artificial Sequence: Synthetic oligonucleotide
  Antisense strand to SEQ ID NO: 1109398
augaugaugacagaagcaa

SEQ ID NO: 1109400 - RNA, 19 nt, Artificial Sequence
  Description of Artificial Sequence: Synthetic oligonucleotide
  Sense strand starting at position 3060 of SEQ ID NO: 915830
agggcuuacaaguguguau

SEQ ID NO: 1109401 - RNA, 19 nt, Artificial Sequence
  Description of Artificial Sequence: Synthetic oligonucleotide
  Antisense strand to SEQ ID NO: 1109400
auacacacuuguaagcccu

SEQ ID NO: 1109402 - RNA, 19 nt, Artificial Sequence
  Description of Artificial Sequence: Synthetic oligonucleotide
  Sense strand starting at position 3063 of SEQ ID NO: 915830
gcuuacaaguguguauuga

SEQ ID NO: 1109403 - RNA, 19 nt, Artificial Sequence
  Description of Artificial Sequence: Synthetic oligonucleotide
  Antisense strand to SEQ ID NO: 1109402
ucaauacacacuuguaagc

SEQ ID NO: 1109404 - RNA, 19 nt, Artificial Sequence
  Description of Artificial Sequence: Synthetic oligonucleotide
  Sense strand starting at position 3064 of SEQ ID NO: 915830
cuuacaaguguguauugaa

SEQ ID NO: 1109405 - RNA, 19 nt, Artificial Sequence
  Description of Artificial Sequence: Synthetic oligonucleotide
  Antisense strand to SEQ ID NO: 1109404
uucaauacacacuuguaag

SEQ ID NO: 1109406 - RNA, 19 nt, Artificial Sequence
  Description of Artificial Sequence: Synthetic oligonucleotide
  Sense strand starting at position 3148 of SEQ ID NO: 915830
uaaugaguagaucauuguu

SEQ ID NO: 1109407 - RNA, 19 nt, Artificial Sequence
  Description of Artificial Sequence: Synthetic oligonucleotide
  Antisense strand to SEQ ID NO: 1109406
aacaaugaucuacucauua

SEQ ID NO: 1109408 - RNA, 19 nt, Artificial Sequence
  Description of Artificial Sequence: Synthetic oligonucleotide
  Sense strand starting at position 3150 of SEQ ID NO: 915830
augaguagaucauuguuau

SEQ ID NO: 1109409 - RNA, 19 nt, Artificial Sequence
  Description of Artificial Sequence: Synthetic oligonucleotide
  Antisense strand to SEQ ID NO: 1109408
auaacaaugaucuacucau

SEQ ID NO: 1109410 - RNA, 19 nt, Artificial Sequence
  Description of Artificial Sequence: Synthetic oligonucleotide
  Sense strand starting at position 3151 of SEQ ID NO: 915830
ugaguagaucauuguuauu

SEQ ID NO: 1109411 - RNA, 19 nt, Artificial Sequence
  Description of Artificial Sequence: Synthetic oligonucleotide
  Antisense strand to SEQ ID NO: 1109410
aauaacaaugaucuacuca

SEQ ID NO: 1109412 - RNA, 19 nt, Artificial Sequence
  Description of Artificial Sequence: Synthetic oligonucleotide
  Sense strand starting at position 3154 of SEQ ID NO: 915830
guagaucauuguuauuuga

SEQ ID NO: 1109413 - RNA, 19 nt, Artificial Sequence
  Description of Artificial Sequence: Synthetic oligonucleotide
  Antisense strand to SEQ ID NO: 1109412
ucaaauaacaaugaucuac

SEQ ID NO: 1109414 - RNA, 19 nt, Artificial Sequence
  Description of Artificial Sequence: Synthetic oligonucleotide
  Sense strand starting at position 3701 of SEQ ID NO: 915830
aggucaauuugguaucuaa

SEQ ID NO: 1109415 - RNA, 19 nt, Artificial Sequence
  Description of Artificial Sequence: Synthetic oligonucleotide
  Antisense strand to SEQ ID NO: 1109414
uuagauaccaaauugaccu

SEQ ID NO: 1109416 - RNA, 19 nt, Artificial Sequence
  Description of Artificial Sequence: Synthetic oligonucleotide
  Sense strand starting at position 185 of SEQ ID NO: 915831
aagguuuguuugguaaaga

SEQ ID NO: 1109417 - RNA, 19 nt, Artificial Sequence
  Description of Artificial Sequence: Synthetic oligonucleotide
  Antisense strand to SEQ ID NO: 1109416
ucuuuaccaaacaaaccuu

SEQ ID NO: 1109418 - RNA, 19 nt, Artificial Sequence
  Description of Artificial Sequence: Synthetic oligonucleotide
  Sense strand starting at position 207 of SEQ ID NO: 915831
aaagaauguucguucugga

SEQ ID NO: 1109419 - RNA, 19 nt, Artificial Sequence
  Description of Artificial Sequence: Synthetic oligonucleotide
  Antisense strand to SEQ ID NO: 1109418
uccagaacgaacauucuuu

SEQ ID NO: 1109420 - RNA, 19 nt, Artificial Sequence
  Description of Artificial Sequence: Synthetic oligonucleotide
  Sense strand starting at position 307 of SEQ ID NO: 915831
agguuacuccucuguagaa

SEQ ID NO: 1109421 - RNA, 19 nt, Artificial Sequence
  Description of Artificial Sequence: Synthetic oligonucleotide
  Antisense strand to SEQ ID NO: 1109420
uucuacagaggaguaaccu

SEQ ID NO: 1109422 - RNA, 19 nt, Artificial Sequence
  Description of Artificial Sequence: Synthetic oligonucleotide
  Sense strand starting at position 309 of SEQ ID NO: 915831
guuacuccucuguagaaca

SEQ ID NO: 1109423 - RNA, 19 nt, Artificial Sequence
  Description of Artificial Sequence: Synthetic oligonucleotide
  Antisense strand to SEQ ID NO: 1109422
uguucuacagaggaguaac

SEQ ID NO: 1109424 - RNA, 19 nt, Artificial Sequence
  Description of Artificial Sequence: Synthetic oligonucleotide
  Sense strand starting at position 358 of SEQ ID NO: 915831
gugaccauugcaugacaca

SEQ ID NO: 1109425 - RNA, 19 nt, Artificial Sequence
  Description of Artificial Sequence: Synthetic oligonucleotide
  Antisense strand to SEQ ID NO: 1109424
ugugucaugcaauggucac

SEQ ID NO: 1109426 - RNA, 19 nt, Artificial Sequence
  Description of Artificial Sequence: Synthetic oligonucleotide
  Sense strand starting at position 767 of SEQ ID NO: 915831
ggaaacguauuucauagga

SEQ ID NO: 1109427 - RNA, 19 nt, Artificial Sequence
  Description of Artificial Sequence: Synthetic oligonucleotide
  Antisense strand to SEQ ID NO: 1109426
uccuaugaaauacguuucc

SEQ ID NO: 1109428 - RNA, 19 nt, Artificial Sequence
  Description of Artificial Sequence: Synthetic oligonucleotide
  Sense strand starting at position 826 of SEQ ID NO: 915831
ugucauaguccagauacac

SEQ ID NO: 1109429 - RNA, 19 nt, Artificial Sequence
  Description of Artificial Sequence: Synthetic oligonucleotide
  Antisense strand to SEQ ID NO: 1109428
guguaucuggacuaugaca

SEQ ID NO: 1109430 - RNA, 19 nt, Artificial Sequence
  Description of Artificial Sequence: Synthetic oligonucleotide
  Sense strand starting at position 889 of SEQ ID NO: 915831
uguacuauguacuuacaua

SEQ ID NO: 1109431 - RNA, 19 nt, Artificial Sequence
  Description of Artificial Sequence: Synthetic oligonucleotide
  Antisense strand to SEQ ID NO: 1109430
uauguaaguacauaguaca

SEQ ID NO: 1109432 - RNA, 19 nt, Artificial Sequence
  Description of Artificial Sequence: Synthetic oligonucleotide
  Sense strand starting at position 1110 of SEQ ID NO: 915831
augcaaugacuauacuagu

SEQ ID NO: 1109433 - RNA, 19 nt, Artificial Sequence
  Description of Artificial Sequence: Synthetic oligonucleotide
  Antisense strand to SEQ ID NO: 1109432
acuaguauagucauugcau

SEQ ID NO: 1109434 - RNA, 19 nt, Artificial Sequence
  Description of Artificial Sequence: Synthetic oligonucleotide
  Sense strand starting at position 1151 of SEQ ID NO: 915831
guaggucaaccucauagua

SEQ ID NO: 1109435 - RNA, 19 nt, Artificial Sequence
  Description of Artificial Sequence: Synthetic oligonucleotide
  Antisense strand to SEQ ID NO: 1109434
uacuaugagguugaccuac

SEQ ID NO: 1109436 - RNA, 19 nt, Artificial Sequence
  Description of Artificial Sequence: Synthetic oligonucleotide
  Sense strand starting at position 1175 of SEQ ID NO: 915831
aggaacuguguuuaucuua

SEQ ID NO: 1109437 - RNA, 19 nt, Artificial Sequence
  Description of Artificial Sequence: Synthetic oligonucleotide
  Antisense strand to SEQ ID NO: 1109436
uaagauaaacacaguuccu

SEQ ID NO: 1109438 - RNA, 19 nt, Artificial Sequence
  Description of Artificial Sequence: Synthetic oligonucleotide
  Sense strand starting at position 1494 of SEQ ID NO: 915831
guauguucaguagagacga

SEQ ID NO: 1109439 - RNA, 19 nt, Artificial Sequence
  Description of Artificial Sequence: Synthetic oligonucleotide
  Antisense strand to SEQ ID NO: 1109438
ucgucucuacugaacauac

SEQ ID NO: 1109440 - RNA, 19 nt, Artificial Sequence
  Description of Artificial Sequence: Synthetic oligonucleotide
  Sense strand starting at position 1775 of SEQ ID NO: 915831
caaaguucugcauagcaga

SEQ ID NO: 1109441 - RNA, 19 nt, Artificial Sequence
  Description of Artificial Sequence: Synthetic oligonucleotide
  Antisense strand to SEQ ID NO: 1109440
ucugcuaugcagaacuuug

SEQ ID NO: 1109442 - RNA, 19 nt, Artificial Sequence
  Description of Artificial Sequence: Synthetic oligonucleotide
  Sense strand starting at position 2504 of SEQ ID NO: 915831
aggccuucccguuuguuau

SEQ ID NO: 1109443 - RNA, 19 nt, Artificial Sequence
  Description of Artificial Sequence: Synthetic oligonucleotide
  Antisense strand to SEQ ID NO: 1109442
auaacaaacgggaaggccu

SEQ ID NO: 1109444 - RNA, 19 nt, Artificial Sequence
  Description of Artificial Sequence: Synthetic oligonucleotide
  Sense strand starting at position 2587 of SEQ ID NO: 915831
gcgcgucucccucucgaga

SEQ ID NO: 1109445 - RNA, 19 nt, Artificial Sequence
  Description of Artificial Sequence: Synthetic oligonucleotide
  Antisense strand to SEQ ID NO: 1109444
ucucgagagggagacgcgc

SEQ ID NO: 1109446 - RNA, 19 nt, Artificial Sequence
  Description of Artificial Sequence: Synthetic oligonucleotide
  Sense strand starting at position 2588 of SEQ ID NO: 915831
cgcgucucccucucgagau

SEQ ID NO: 1109447 - RNA, 19 nt, Artificial Sequence
  Description of Artificial Sequence: Synthetic oligonucleotide
  Antisense strand to SEQ ID NO: 1109446
aucucgagagggagacgcg

SEQ ID NO: 1109448 - RNA, 19 nt, Artificial Sequence
  Description of Artificial Sequence: Synthetic oligonucleotide
  Sense strand starting at position 2685 of SEQ ID NO: 915831
cggucccuggguuaauuaa

SEQ ID NO: 1109449 - RNA, 19 nt, Artificial Sequence
  Description of Artificial Sequence: Synthetic oligonucleotide
  Antisense strand to SEQ ID NO: 1109448
uuaauuaacccagggaccg

SEQ ID NO: 1109450 - RNA, 19 nt, Artificial Sequence
  Description of Artificial Sequence: Synthetic oligonucleotide
  Sense strand starting at position 2719 of SEQ ID NO: 915831
aacgauauccauugaagug

SEQ ID NO: 1109451 - RNA, 19 nt, Artificial Sequence
  Description of Artificial Sequence: Synthetic oligonucleotide
  Antisense strand to SEQ ID NO: 1109450
cacuucaauggauaucguu

SEQ ID NO: 1109452 - RNA, 19 nt, Artificial Sequence
  Description of Artificial Sequence: Synthetic oligonucleotide
  Sense strand starting at position 2848 of SEQ ID NO: 915831
ggcagauggaugugacaug

SEQ ID NO: 1109453 - RNA, 19 nt, Artificial Sequence
  Description of Artificial Sequence: Synthetic oligonucleotide
  Antisense strand to SEQ ID NO: 1109452
caugucacauccaucugcc

SEQ ID NO: 1109454 - RNA, 19 nt, Artificial Sequence
  Description of Artificial Sequence: Synthetic oligonucleotide
  Sense strand starting at position 2869 of SEQ ID NO: 915831
ccucuuacacauugggaaa

SEQ ID NO: 1109455 - RNA, 19 nt, Artificial Sequence
  Description of Artificial Sequence: Synthetic oligonucleotide
  Antisense strand to SEQ ID NO: 1109454
uuucccaauguguaagagg

SEQ ID NO: 1109456 - RNA, 19 nt, Artificial Sequence
  Description of Artificial Sequence: Synthetic oligonucleotide
  Sense strand starting at position 2886 of SEQ ID NO: 915831
aacugaagcuuagugauua

SEQ ID NO: 1109457 - RNA, 19 nt, Artificial Sequence
  Description of Artificial Sequence: Synthetic oligonucleotide
  Antisense strand to SEQ ID NO: 1109456
uaaucacuaagcuucaguu

SEQ ID NO: 1109458 - RNA, 19 nt, Artificial Sequence
  Description of Artificial Sequence: Synthetic oligonucleotide
  Sense strand starting at position 2890 of SEQ ID NO: 915831
gaagcuuagugauuaauug

SEQ ID NO: 1109459 - RNA, 19 nt, Artificial Sequence
  Description of Artificial Sequence: Synthetic oligonucleotide
  Antisense strand to SEQ ID NO: 1109458
caauuaaucacuaagcuuc

SEQ ID NO: 1109460 - RNA, 19 nt, Artificial Sequence
  Description of Artificial Sequence: Synthetic oligonucleotide
  Sense strand starting at position 2891 of SEQ ID NO: 915831
aagcuuagugauuaauuga

SEQ ID NO: 1109461 - RNA, 19 nt, Artificial Sequence
  Description of Artificial Sequence: Synthetic oligonucleotide
  Antisense strand to SEQ ID NO: 1109460
ucaauuaaucacuaagcuu

SEQ ID NO: 1109462 - RNA, 19 nt, Artificial Sequence
  Description of Artificial Sequence: Synthetic oligonucleotide
  Sense strand starting at position 2921 of SEQ ID NO: 915831
uuaucuguaaugggugaaa

SEQ ID NO: 1109463 - RNA, 19 nt, Artificial Sequence
  Description of Artificial Sequence: Synthetic oligonucleotide
  Antisense strand to SEQ ID NO: 1109462
uuucacccauuacagauaa

SEQ ID NO: 1109464 - RNA, 19 nt, Artificial Sequence
  Description of Artificial Sequence: Synthetic oligonucleotide
  Sense strand starting at position 2923 of SEQ ID NO: 915831
aucuguaaugggugaaacu

SEQ ID NO: 1109465 - RNA, 19 nt, Artificial Sequence
  Description of Artificial Sequence: Synthetic oligonucleotide
  Antisense strand to SEQ ID NO: 1109464
aguuucacccauuacagau

SEQ ID NO: 1109466 - RNA, 19 nt, Artificial Sequence
  Description of Artificial Sequence: Synthetic oligonucleotide
  Sense strand starting at position 3483 of SEQ ID NO: 915831
ugaauuaaauaagugcaga

SEQ ID NO: 1109467 - RNA, 19 nt, Artificial Sequence
  Description of Artificial Sequence: Synthetic oligonucleotide
  Antisense strand to SEQ ID NO: 1109466
ucugcacuuauuuaauuca

SEQ ID NO: 1109468 - RNA, 19 nt, Artificial Sequence
  Description of Artificial Sequence: Synthetic oligonucleotide
  Sense strand starting at position 3496 of SEQ ID NO: 915831
ugcagaauauguguagaau

SEQ ID NO: 1109469 - RNA, 19 nt, Artificial Sequence
  Description of Artificial Sequence: Synthetic oligonucleotide
  Antisense strand to SEQ ID NO: 1109468
auucuacacauauucugca

SEQ ID NO: 1109470 - RNA, 19 nt, Artificial Sequence
  Description of Artificial Sequence: Synthetic oligonucleotide
  Sense strand starting at position 3497 of SEQ ID NO: 915831
gcagaauauguguagaauu

SEQ ID NO: 1109471 - RNA, 19 nt, Artificial Sequence
  Description of Artificial Sequence: Synthetic oligonucleotide
  Antisense strand to SEQ ID NO: 1109470
aauucuacacauauucugc

SEQ ID NO: 1109472 - RNA, 19 nt, Artificial Sequence
  Description of Artificial Sequence: Synthetic oligonucleotide
  Sense strand starting at position 3511 of SEQ ID NO: 915831
gaauuacaacugugguaag

SEQ ID NO: 1109473 - RNA, 19 nt, Artificial Sequence
  Description of Artificial Sequence: Synthetic oligonucleotide
  Antisense strand to SEQ ID NO: 1109472
cuuaccacaguuguaauuc

SEQ ID NO: 1109474 - RNA, 19 nt, Artificial Sequence
  Description of Artificial Sequence: Synthetic oligonucleotide
  Sense strand starting at position 3614 of SEQ ID NO: 915831
gauggugucauugggaacu

SEQ ID NO: 1109475 - RNA, 19 nt, Artificial Sequence
  Description of Artificial Sequence: Synthetic oligonucleotide
  Antisense strand to SEQ ID NO: 1109474
aguucccaaugacaccauc

SEQ ID NO: 1109476 - RNA, 19 nt, Artificial Sequence
  Description of Artificial Sequence: Synthetic oligonucleotide
  Sense strand starting at position 3671 of SEQ ID NO: 915831
ugaauaugacuuuauagcu

SEQ ID NO: 1109477 - RNA, 19 nt, Artificial Sequence
  Description of Artificial Sequence: Synthetic oligonucleotide
  Antisense strand to SEQ ID NO: 1109476
agcuauaaagucauauuca

SEQ ID NO: 1109478 - RNA, 19 nt, Artificial Sequence
  Description of Artificial Sequence: Synthetic oligonucleotide
  Sense strand starting at position 3676 of SEQ ID NO: 915831
augacuuuauagcuuauga

SEQ ID NO: 1109479 - RNA, 19 nt, Artificial Sequence
  Description of Artificial Sequence: Synthetic oligonucleotide
  Antisense strand to SEQ ID NO: 1109478
ucauaagcuauaaagucau

SEQ ID NO: 1109480 - RNA, 19 nt, Artificial Sequence
  Description of Artificial Sequence: Synthetic oligonucleotide
  Sense strand starting at position 3726 of SEQ ID NO: 915831
aguucugagagucagcuaa

SEQ ID NO: 1109481 - RNA, 19 nt, Artificial Sequence
  Description of Artificial Sequence: Synthetic oligonucleotide
  Antisense strand to SEQ ID NO: 1109480
uuagcugacucucagaacu

SEQ ID NO: 1109482 - RNA, 19 nt, Artificial Sequence
  Description of Artificial Sequence: Synthetic oligonucleotide
  Sense strand starting at position 3728 of SEQ ID NO: 915831
uucugagagucagcuaaau

SEQ ID NO: 1109483 - RNA, 19 nt, Artificial Sequence
  Description of Artificial Sequence: Synthetic oligonucleotide
  Antisense strand to SEQ ID NO: 1109482
auuuagcugacucucagaa

SEQ ID NO: 1109484 - RNA, 19 nt, Artificial Sequence
  Description of Artificial Sequence: Synthetic oligonucleotide
  Sense strand starting at position 3730 of SEQ ID NO: 915831
cugagagucagcuaaauug

SEQ ID NO: 1109485 - RNA, 19 nt, Artificial Sequence
  Description of Artificial Sequence: Synthetic oligonucleotide
  Antisense strand to SEQ ID NO: 1109484
caauuuagcugacucucag

SEQ ID NO: 1109486 - RNA, 19 nt, Artificial Sequence
  Description of Artificial Sequence: Synthetic oligonucleotide
  Sense strand starting at position 3747 of SEQ ID NO: 915831
ugauauuagccgcauauag

SEQ ID NO: 1109487 - RNA, 19 nt, Artificial Sequence
  Description of Artificial Sequence: Synthetic oligonucleotide
  Antisense strand to SEQ ID NO: 1109486
cuauaugcggcuaauauca

SEQ ID NO: 1109488 - RNA, 19 nt, Artificial Sequence
  Description of Artificial Sequence: Synthetic oligonucleotide
  Sense strand starting at position 3779 of SEQ ID NO: 915831
ucagucauguagucauuua

SEQ ID NO: 1109489 - RNA, 19 nt, Artificial Sequence
  Description of Artificial Sequence: Synthetic oligonucleotide
  Antisense strand to SEQ ID NO: 1109488
uaaaugacuacaugacuga

SEQ ID NO: 1109490 - RNA, 19 nt, Artificial Sequence
  Description of Artificial Sequence: Synthetic oligonucleotide
  Sense strand starting at position 3841 of SEQ ID NO: 915831
ugguauaagggcugggaau

SEQ ID NO: 1109491 - RNA, 19 nt, Artificial Sequence
  Description of Artificial Sequence: Synthetic oligonucleotide
  Antisense strand to SEQ ID NO: 1109490
auucccagcccuuauacca

SEQ ID NO: 1109492 - RNA, 19 nt, Artificial Sequence
  Description of Artificial Sequence: Synthetic oligonucleotide
  Sense strand starting at position 3842 of SEQ ID NO: 915831
gguauaagggcugggaaua

SEQ ID NO: 1109493 - RNA, 19 nt, Artificial Sequence
  Description of Artificial Sequence: Synthetic oligonucleotide
  Antisense strand to SEQ ID NO: 1109492
uauucccagcccuuauacc

SEQ ID NO: 1109494 - RNA, 19 nt, Artificial Sequence
  Description of Artificial Sequence: Synthetic oligonucleotide
  Sense strand starting at position 3892 of SEQ ID NO: 915831
ccugacagagcauguauua

SEQ ID NO: 1109495 - RNA, 19 nt, Artificial Sequence
  Description of Artificial Sequence: Synthetic oligonucleotide
  Antisense strand to SEQ ID NO: 1109494
uaauacaugcucugucagg

SEQ ID NO: 1109496 - RNA, 19 nt, Artificial Sequence
  Description of Artificial Sequence: Synthetic oligonucleotide
  Sense strand starting at position 222 of SEQ ID NO: 915832
gaccguugugaggaacaga

SEQ ID NO: 1109497 - RNA, 19 nt, Artificial Sequence
  Description of Artificial Sequence: Synthetic oligonucleotide
  Antisense strand to SEQ ID NO: 1109496
ucuguuccucacaacgguc

SEQ ID NO: 1109498 - RNA, 19 nt, Artificial Sequence
  Description of Artificial Sequence: Synthetic oligonucleotide
  Sense strand starting at position 349 of SEQ ID NO: 915832
auauuacuguugucccaga

SEQ ID NO: 1109499 - RNA, 19 nt, Artificial Sequence
  Description of Artificial Sequence: Synthetic oligonucleotide
  Antisense strand to SEQ ID NO: 1109498
ucugggacaacaguaauau

SEQ ID NO: 1109500 - RNA, 19 nt, Artificial Sequence
  Description of Artificial Sequence: Synthetic oligonucleotide
  Sense strand starting at position 354 of SEQ ID NO: 915832
acuguugucccagaaguua

SEQ ID NO: 1109501 - RNA, 19 nt, Artificial Sequence
  Description of Artificial Sequence: Synthetic oligonucleotide
  Antisense strand to SEQ ID NO: 1109500
uaacuucugggacaacagu

SEQ ID NO: 1109502 - RNA, 19 nt, Artificial Sequence
  Description of Artificial Sequence: Synthetic oligonucleotide
  Sense strand starting at position 367 of SEQ ID NO: 915832
aaguuaaguccuggcuacu

SEQ ID NO: 1109503 - RNA, 19 nt, Artificial Sequence
  Description of Artificial Sequence: Synthetic oligonucleotide
  Antisense strand to SEQ ID NO: 1109502
aguagccaggacuuaacuu

SEQ ID NO: 1109504 - RNA, 19 nt, Artificial Sequence
  Description of Artificial Sequence: Synthetic oligonucleotide
  Sense strand starting at position 995 of SEQ ID NO: 915832
acugaaugcuuaguacacu

SEQ ID NO: 1109505 - RNA, 19 nt, Artificial Sequence
  Description of Artificial Sequence: Synthetic oligonucleotide
  Antisense strand to SEQ ID NO: 1109504
aguguacuaagcauucagu

SEQ ID NO: 1109506 - RNA, 19 nt, Artificial Sequence
  Description of Artificial Sequence: Synthetic oligonucleotide
  Sense strand starting at position 1066 of SEQ ID NO: 915832
guaauaagaccucagcucu

SEQ ID NO: 1109507 - RNA, 19 nt, Artificial Sequence
  Description of Artificial Sequence: Synthetic oligonucleotide
  Antisense strand to SEQ ID NO: 1109506
agagcugaggucuuauuac

SEQ ID NO: 1109508 - RNA, 19 nt, Artificial Sequence
  Description of Artificial Sequence: Synthetic oligonucleotide
  Sense strand starting at position 1136 of SEQ ID NO: 915832
aguggaggcgaauaguauu

SEQ ID NO: 1109509 - RNA, 19 nt, Artificial Sequence
  Description of Artificial Sequence: Synthetic oligonucleotide
  Antisense strand to SEQ ID NO: 1109508
aauacuauucgccuccacu

SEQ ID NO: 1109510 - RNA, 19 nt, Artificial Sequence
  Description of Artificial Sequence: Synthetic oligonucleotide
  Sense strand starting at position 1181 of SEQ ID NO: 915832
cuaacuagcgcuuaacaca

SEQ ID NO: 1109511 - RNA, 19 nt, Artificial Sequence
  Description of Artificial Sequence: Synthetic oligonucleotide
  Antisense strand to SEQ ID NO: 1109510
uguguuaagcgcuaguuag

SEQ ID NO: 1109512 - RNA, 19 nt, Artificial Sequence
  Description of Artificial Sequence: Synthetic oligonucleotide
  Sense strand starting at position 1237 of SEQ ID NO: 915832
aaaggaagccguggcuaua

SEQ ID NO: 1109513 - RNA, 19 nt, Artificial Sequence
  Description of Artificial Sequence: Synthetic oligonucleotide
  Antisense strand to SEQ ID NO: 1109512
uauagccacggcuuccuuu

SEQ ID NO: 1109514 - RNA, 19 nt, Artificial Sequence
  Description of Artificial Sequence: Synthetic oligonucleotide
  Sense strand starting at position 1253 of SEQ ID NO: 915832
auaugugucacggcugcua

SEQ ID NO: 1109515 - RNA, 19 nt, Artificial Sequence
  Description of Artificial Sequence: Synthetic oligonucleotide
  Antisense strand to SEQ ID NO: 1109514
uagcagccgugacacauau

SEQ ID NO: 1109516 - RNA, 19 nt, Artificial Sequence
  Description of Artificial Sequence: Synthetic oligonucleotide
  Sense strand starting at position 1303 of SEQ ID NO: 915832
uguauuaaccagcaagaac

SEQ ID NO: 1109517 - RNA, 19 nt, Artificial Sequence
  Description of Artificial Sequence: Synthetic oligonucleotide
  Antisense strand to SEQ ID NO: 1109516
guucuugcugguuaauaca

SEQ ID NO: 1109518 - RNA, 19 nt, Artificial Sequence
  Description of Artificial Sequence: Synthetic oligonucleotide
  Sense strand starting at position 1354 of SEQ ID NO: 915832
cacgaagugcuuuacauac

SEQ ID NO: 1109519 - RNA, 19 nt, Artificial Sequence
  Description of Artificial Sequence: Synthetic oligonucleotide
  Antisense strand to SEQ ID NO: 1109518
guauguaaagcacuucgug

SEQ ID NO: 1109520 - RNA, 19 nt, Artificial Sequence
  Description of Artificial Sequence: Synthetic oligonucleotide
  Sense strand starting at position 2070 of SEQ ID NO: 915832
ugcccacauucguuaauca

SEQ ID NO: 1109521 - RNA, 19 nt, Artificial Sequence
  Description of Artificial Sequence: Synthetic oligonucleotide
  Antisense strand to SEQ ID NO: 1109520
ugauuaacgaaugugggca

SEQ ID NO: 1109522 - RNA, 19 nt, Artificial Sequence
  Description of Artificial Sequence: Synthetic oligonucleotide
  Sense strand starting at position 2071 of SEQ ID NO: 915832
gcccacauucguuaaucaa

SEQ ID NO: 1109523 - RNA, 19 nt, Artificial Sequence
  Description of Artificial Sequence: Synthetic oligonucleotide
  Antisense strand to SEQ ID NO: 1109522
uugauuaacgaaugugggc

SEQ ID NO: 1109524 - RNA, 19 nt, Artificial Sequence
  Description of Artificial Sequence: Synthetic oligonucleotide
  Sense strand starting at position 2100 of SEQ ID NO: 915832
agagaaagcuaaggauaga

SEQ ID NO: 1109525 - RNA, 19 nt, Artificial Sequence
  Description of Artificial Sequence: Synthetic oligonucleotide
  Antisense strand to SEQ ID NO: 1109524
ucuauccuuagcuuucucu

SEQ ID NO: 1109526 - RNA, 19 nt, Artificial Sequence
  Description of Artificial Sequence: Synthetic oligonucleotide
  Sense strand starting at position 2111 of SEQ ID NO: 915832
aggauagagcuucgcagaa

SEQ ID NO: 1109527 - RNA, 19 nt, Artificial Sequence
  Description of Artificial Sequence: Synthetic oligonucleotide
  Antisense strand to SEQ ID NO: 1109526
uucugcgaagcucuauccu

SEQ ID NO: 1109528 - RNA, 19 nt, Artificial Sequence
  Description of Artificial Sequence: Synthetic oligonucleotide
  Sense strand starting at position 2545 of SEQ ID NO: 915832
uguguuggugcucaauauu

SEQ ID NO: 1109529 - RNA, 19 nt, Artificial Sequence
  Description of Artificial Sequence: Synthetic oligonucleotide
  Antisense strand to SEQ ID NO: 1109528
aauauugagcaccaacaca

SEQ ID NO: 1109530 - RNA, 19 nt, Artificial Sequence
  Description of Artificial Sequence: Synthetic oligonucleotide
  Sense strand starting at position 2735 of SEQ ID NO: 915832
ccaagaaacuaugcugauu

SEQ ID NO: 1109531 - RNA, 19 nt, Artificial Sequence
  Description of Artificial Sequence: Synthetic oligonucleotide
  Antisense strand to SEQ ID NO: 1109530
aaucagcauaguuucuugg

SEQ ID NO: 1109532 - RNA, 19 nt, Artificial Sequence
  Description of Artificial Sequence: Synthetic oligonucleotide
  Sense strand starting at position 2754 of SEQ ID NO: 915832
uuacuugucccauaagggu

SEQ ID NO: 1109533 - RNA, 19 nt, Artificial Sequence
  Description of Artificial Sequence: Synthetic oligonucleotide
  Antisense strand to SEQ ID NO: 1109532
acccuuaugggacaaguaa

SEQ ID NO: 1109534 - RNA, 19 nt, Artificial Sequence
  Description of Artificial Sequence: Synthetic oligonucleotide
  Sense strand starting at position 2781 of SEQ ID NO: 915832
gugcaagugugauucugau

SEQ ID NO: 1109535 - RNA, 19 nt, Artificial Sequence
  Description of Artificial Sequence: Synthetic oligonucleotide
  Antisense strand to SEQ ID NO: 1109534
aucagaaucacacuugcac

SEQ ID NO: 1109536 - RNA, 19 nt, Artificial Sequence
  Description of Artificial Sequence: Synthetic oligonucleotide
  Sense strand starting at position 2787 of SEQ ID NO: 915832
gugugauucugauucccau

SEQ ID NO: 1109537 - RNA, 19 nt, Artificial Sequence
  Description of Artificial Sequence: Synthetic oligonucleotide
  Antisense strand to SEQ ID NO: 1109536
augggaaucagaaucacac

SEQ ID NO: 1109538 - RNA, 19 nt, Artificial Sequence
  Description of Artificial Sequence: Synthetic oligonucleotide
  Sense strand starting at position 2929 of SEQ ID NO: 915832
ucucuuccucuuggaggaa

SEQ ID NO: 1109539 - RNA, 19 nt, Artificial Sequence
  Description of Artificial Sequence: Synthetic oligonucleotide
  Antisense strand to SEQ ID NO: 1109538
uuccuccaagaggaagaga

SEQ ID NO: 1109540 - RNA, 19 nt, Artificial Sequence
  Description of Artificial Sequence: Synthetic oligonucleotide
  Sense strand starting at position 2948 of SEQ ID NO: 915832
aguggaaaccucggucacu

SEQ ID NO: 1109541 - RNA, 19 nt, Artificial Sequence
  Description of Artificial Sequence: Synthetic oligonucleotide
  Antisense strand to SEQ ID NO: 1109540
agugaccgagguuuccacu

SEQ ID NO: 1109542 - RNA, 19 nt, Artificial Sequence
  Description of Artificial Sequence: Synthetic oligonucleotide
  Sense strand starting at position 2949 of SEQ ID NO: 915832
guggaaaccucggucacua

SEQ ID NO: 1109543 - RNA, 19 nt, Artificial Sequence
  Description of Artificial Sequence: Synthetic oligonucleotide
  Antisense strand to SEQ ID NO: 1109542
uagugaccgagguuuccac

SEQ ID NO: 1109544 - RNA, 19 nt, Artificial Sequence
  Description of Artificial Sequence: Synthetic oligonucleotide
  Sense strand starting at position 2960 of SEQ ID NO: 915832
ggucacuacuuccuagaag

SEQ ID NO: 1109545 - RNA, 19 nt, Artificial Sequence
  Description of Artificial Sequence: Synthetic oligonucleotide
  Antisense strand to SEQ ID NO: 1109544
cuucuaggaaguagugacc

SEQ ID NO: 1109546 - RNA, 19 nt, Artificial Sequence
  Description of Artificial Sequence: Synthetic oligonucleotide
  Sense strand starting at position 2996 of SEQ ID NO: 915832
gcagcaaaguccuuaaugu

SEQ ID NO: 1109547 - RNA, 19 nt, Artificial Sequence
  Description of Artificial Sequence: Synthetic oligonucleotide
  Antisense strand to SEQ ID NO: 1109546
acauuaaggacuuugcugc

SEQ ID NO: 1109548 - RNA, 19 nt, Artificial Sequence
  Description of Artificial Sequence: Synthetic oligonucleotide
  Sense strand starting at position 2997 of SEQ ID NO: 915832
cagcaaaguccuuaaugug

SEQ ID NO: 1109549 - RNA, 19 nt, Artificial Sequence
  Description of Artificial Sequence: Synthetic oligonucleotide
  Antisense strand to SEQ ID NO: 1109548
cacauuaaggacuuugcug

SEQ ID NO: 1109550 - RNA, 19 nt, Artificial Sequence
  Description of Artificial Sequence: Synthetic oligonucleotide
  Sense strand starting at position 3190 of SEQ ID NO: 915832
agaaauaagugaguugugu

SEQ ID NO: 1109551 - RNA, 19 nt, Artificial Sequence
  Description of Artificial Sequence: Synthetic oligonucleotide
  Antisense strand to SEQ ID NO: 1109550
acacaacucacuuauuucu

SEQ ID NO: 1109552 - RNA, 19 nt, Artificial Sequence
  Description of Artificial Sequence: Synthetic oligonucleotide
  Sense strand starting at position 3265 of SEQ ID NO: 915832
uugagaauuugugacugua

SEQ ID NO: 1109553 - RNA, 19 nt, Artificial Sequence
  Description of Artificial Sequence: Synthetic oligonucleotide
  Antisense strand to SEQ ID NO: 1109552
uacagucacaaauucucaa

SEQ ID NO: 1109554 - RNA, 19 nt, Artificial Sequence
  Description of Artificial Sequence: Synthetic oligonucleotide
  Sense strand starting at position 3338 of SEQ ID NO: 915832
gaaucagauagugguugca

SEQ ID NO: 1109555 - RNA, 19 nt, Artificial Sequence
  Description of Artificial Sequence: Synthetic oligonucleotide
  Antisense strand to SEQ ID NO: 1109554
ugcaaccacuaucugauuc

SEQ ID NO: 1109556 - RNA, 19 nt, Artificial Sequence
  Description of Artificial Sequence: Synthetic oligonucleotide
  Sense strand starting at position 3340 of SEQ ID NO: 915832
aucagauagugguugcaag

SEQ ID NO: 1109557 - RNA, 19 nt, Artificial Sequence
  Description of Artificial Sequence: Synthetic oligonucleotide
  Antisense strand to SEQ ID NO: 1109556
cuugcaaccacuaucugau

SEQ ID NO: 1109558 - RNA, 19 nt, Artificial Sequence
  Description of Artificial Sequence: Synthetic oligonucleotide
  Sense strand starting at position 3341 of SEQ ID NO: 915832
ucagauagugguugcaaga

SEQ ID NO: 1109559 - RNA, 19 nt, Artificial Sequence
  Description of Artificial Sequence: Synthetic oligonucleotide
  Antisense strand to SEQ ID NO: 1109558
ucuugcaaccacuaucuga

SEQ ID NO: 1109560 - RNA, 19 nt, Artificial Sequence
  Description of Artificial Sequence: Synthetic oligonucleotide
  Sense strand starting at position 3404 of SEQ ID NO: 915832
ggaacuuucugagugggua

SEQ ID NO: 1109561 - RNA, 19 nt, Artificial Sequence
  Description of Artificial Sequence: Synthetic oligonucleotide
  Antisense strand to SEQ ID NO: 1109560
uacccacucagaaaguucc

SEQ ID NO: 1109562 - RNA, 19 nt, Artificial Sequence
  Description of Artificial Sequence: Synthetic oligonucleotide
  Sense strand starting at position 3405 of SEQ ID NO: 915832
gaacuuucugaguggguac

SEQ ID NO: 1109563 - RNA, 19 nt, Artificial Sequence
  Description of Artificial Sequence: Synthetic oligonucleotide
  Antisense strand to SEQ ID NO: 1109562
guacccacucagaaaguuc

SEQ ID NO: 1109564 - RNA, 19 nt, Artificial Sequence
  Description of Artificial Sequence: Synthetic oligonucleotide
  Sense strand starting at position 3420 of SEQ ID NO: 915832
guacgauggaaauguccua

SEQ ID NO: 1109565 - RNA, 19 nt, Artificial Sequence
  Description of Artificial Sequence: Synthetic oligonucleotide
  Antisense strand to SEQ ID NO: 1109564
uaggacauuuccaucguac

SEQ ID NO: 1109566 - RNA, 19 nt, Artificial Sequence
  Description of Artificial Sequence: Synthetic oligonucleotide
  Sense strand starting at position 3433 of SEQ ID NO: 915832
guccuauaucaugauugug

SEQ ID NO: 1109567 - RNA, 19 nt, Artificial Sequence
  Description of Artificial Sequence: Synthetic oligonucleotide
  Antisense strand to SEQ ID NO: 1109566
cacaaucaugauauaggac

SEQ ID NO: 1109568 - RNA, 19 nt, Artificial Sequence
  Description of Artificial Sequence: Synthetic oligonucleotide
  Sense strand starting at position 3435 of SEQ ID NO: 915832
ccuauaucaugauugugau

SEQ ID NO: 1109569 - RNA, 19 nt, Artificial Sequence
  Description of Artificial Sequence: Synthetic oligonucleotide
  Antisense strand to SEQ ID NO: 1109568
aucacaaucaugauauagg

SEQ ID NO: 1109570 - RNA, 19 nt, Artificial Sequence
  Description of Artificial Sequence: Synthetic oligonucleotide
  Sense strand starting at position 3442 of SEQ ID NO: 915832
caugauugugauggguaau

SEQ ID NO: 1109571 - RNA, 19 nt, Artificial Sequence
  Description of Artificial Sequence: Synthetic oligonucleotide
  Antisense strand to SEQ ID NO: 1109570
auuacccaucacaaucaug

SEQ ID NO: 1109572 - RNA, 19 nt, Artificial Sequence
  Description of Artificial Sequence: Synthetic oligonucleotide
  Sense strand starting at position 3443 of SEQ ID NO: 915832
augauugugauggguaaua

SEQ ID NO: 1109573 - RNA, 19 nt, Artificial Sequence
  Description of Artificial Sequence: Synthetic oligonucleotide
  Antisense strand to SEQ ID NO: 1109572
uauuacccaucacaaucau

SEQ ID NO: 1109574 - RNA, 19 nt, Artificial Sequence
  Description of Artificial Sequence: Synthetic oligonucleotide
  Sense strand starting at position 3924 of SEQ ID NO: 915832
ccuaaaguccaguacaauu

SEQ ID NO: 1109575 - RNA, 19 nt, Artificial Sequence
  Description of Artificial Sequence: Synthetic oligonucleotide
  Antisense strand to SEQ ID NO: 1109574
aauuguacuggacuuuagg

SEQ ID NO: 1109576 - RNA, 19 nt, Artificial Sequence
  Description of Artificial Sequence: Synthetic oligonucleotide
  Sense strand starting at position 8 of SEQ ID NO: 915833
ugucuuaucucucaguuuc

SEQ ID NO: 1109577 - RNA, 19 nt, Artificial Sequence
  Description of Artificial Sequence: Synthetic oligonucleotide
  Antisense strand to SEQ ID NO: 1109576
gaaacugagagauaagaca

SEQ ID NO: 1109578 - RNA, 19 nt, Artificial Sequence
  Description of Artificial Sequence: Synthetic oligonucleotide
  Sense strand starting at position 19 of SEQ ID NO: 915833
ucaguuucuaggcagggau

SEQ ID NO: 1109579 - RNA, 19 nt, Artificial Sequence
  Description of Artificial Sequence: Synthetic oligonucleotide
  Antisense strand to SEQ ID NO: 1109578
aucccugccuagaaacuga

SEQ ID NO: 1109580 - RNA, 19 nt, Artificial Sequence
  Description of Artificial Sequence: Synthetic oligonucleotide
  Sense strand starting at position 21 of SEQ ID NO: 915833
aguuucuaggcagggauaa

SEQ ID NO: 1109581 - RNA, 19 nt, Artificial Sequence
  Description of Artificial Sequence: Synthetic oligonucleotide
  Antisense strand to SEQ ID NO: 1109580
uuaucccugccuagaaacu

SEQ ID NO: 1109582 - RNA, 19 nt, Artificial Sequence
  Description of Artificial Sequence: Synthetic oligonucleotide
  Sense strand starting at position 22 of SEQ ID NO: 915833
guuucuaggcagggauaaa

SEQ ID NO: 1109583 - RNA, 19 nt, Artificial Sequence
  Description of Artificial Sequence: Synthetic oligonucleotide
  Antisense strand to SEQ ID NO: 1109582
uuuaucccugccuagaaac

SEQ ID NO: 1109584 - RNA, 19 nt, Artificial Sequence
  Description of Artificial Sequence: Synthetic oligonucleotide
  Sense strand starting at position 93 of SEQ ID NO: 915833
agaugaaucucuguuuguc

SEQ ID NO: 1109585 - RNA, 19 nt, Artificial Sequence
  Description of Artificial Sequence: Synthetic oligonucleotide
  Antisense strand to SEQ ID NO: 1109584
gacaaacagagauucaucu

SEQ ID NO: 1109586 - RNA, 19 nt, Artificial Sequence
  Description of Artificial Sequence: Synthetic oligonucleotide
  Sense strand starting at position 103 of SEQ ID NO: 915833
cuguuugucugggccacau

SEQ ID NO: 1109587 - RNA, 19 nt, Artificial Sequence
  Description of Artificial Sequence: Synthetic oligonucleotide
  Antisense strand to SEQ ID NO: 1109586
auguggcccagacaaacag

SEQ ID NO: 1109588 - RNA, 19 nt, Artificial Sequence
  Description of Artificial Sequence: Synthetic oligonucleotide
  Sense strand starting at position 154 of SEQ ID NO: 915833
cacugaccuguucgaagaa

SEQ ID NO: 1109589 - RNA, 19 nt, Artificial Sequence
  Description of Artificial Sequence: Synthetic oligonucleotide
  Antisense strand to SEQ ID NO: 1109588
uucuucgaacaggucagug

SEQ ID NO: 1109590 - RNA, 19 nt, Artificial Sequence
  Description of Artificial Sequence: Synthetic oligonucleotide
  Sense strand starting at position 155 of SEQ ID NO: 915833
acugaccuguucgaagaaa

SEQ ID NO: 1109591 - RNA, 19 nt, Artificial Sequence
  Description of Artificial Sequence: Synthetic oligonucleotide
  Antisense strand to SEQ ID NO: 1109590
uuucuucgaacaggucagu

SEQ ID NO: 1109592 - RNA, 19 nt, Artificial Sequence
  Description of Artificial Sequence: Synthetic oligonucleotide
  Sense strand starting at position 167 of SEQ ID NO: 915833
gaagaaacguaagggcuua

SEQ ID NO: 1109593 - RNA, 19 nt, Artificial Sequence
  Description of Artificial Sequence: Synthetic oligonucleotide
  Antisense strand to SEQ ID NO: 1109592
uaagcccuuacguuucuuc

SEQ ID NO: 1109594 - RNA, 19 nt, Artificial Sequence
  Description of Artificial Sequence: Synthetic oligonucleotide
  Sense strand starting at position 933 of SEQ ID NO: 915833
uggguaaaugacuggcaaa

SEQ ID NO: 1109595 - RNA, 19 nt, Artificial Sequence
  Description of Artificial Sequence: Synthetic oligonucleotide
  Antisense strand to SEQ ID NO: 1109594
uuugccagucauuuaccca

SEQ ID NO: 1109596 - RNA, 19 nt, Artificial Sequence
  Description of Artificial Sequence: Synthetic oligonucleotide
  Sense strand starting at position 1153 of SEQ ID NO: 915833
gcagacagcaccugagaaa

SEQ ID NO: 1109597 - RNA, 19 nt, Artificial Sequence
  Description of Artificial Sequence: Synthetic oligonucleotide
  Antisense strand to SEQ ID NO: 1109596
uuucucaggugcugucugc

SEQ ID NO: 1109598 - RNA, 19 nt, Artificial Sequence
  Description of Artificial Sequence: Synthetic oligonucleotide
  Sense strand starting at position 1324 of SEQ ID NO: 915833
ugagguuugggugaacacu

SEQ ID NO: 1109599 - RNA, 19 nt, Artificial Sequence
  Description of Artificial Sequence: Synthetic oligonucleotide
  Antisense strand to SEQ ID NO: 1109598
aguguucacccaaaccuca

SEQ ID NO: 1109600 - RNA, 19 nt, Artificial Sequence
  Description of Artificial Sequence: Synthetic oligonucleotide
  Sense strand starting at position 1497 of SEQ ID NO: 915833
gugcgaagaagcguucgua

SEQ ID NO: 1109601 - RNA, 19 nt, Artificial Sequence
  Description of Artificial Sequence: Synthetic oligonucleotide
  Antisense strand to SEQ ID NO: 1109600
uacgaacgcuucuucgcac

SEQ ID NO: 1109602 - RNA, 19 nt, Artificial Sequence
  Description of Artificial Sequence: Synthetic oligonucleotide
  Sense strand starting at position 1498 of SEQ ID NO: 915833
ugcgaagaagcguucguau

SEQ ID NO: 1109603 - RNA, 19 nt, Artificial Sequence
  Description of Artificial Sequence: Synthetic oligonucleotide
  Antisense strand to SEQ ID NO: 1109602
auacgaacgcuucuucgca

SEQ ID NO: 1109604 - RNA, 19 nt, Artificial Sequence
  Description of Artificial Sequence: Synthetic oligonucleotide
  Sense strand starting at position 1499 of SEQ ID NO: 915833
gcgaagaagcguucguauu

SEQ ID NO: 1109605 - RNA, 19 nt, Artificial Sequence
  Description of Artificial Sequence: Synthetic oligonucleotide
  Antisense strand to SEQ ID NO: 1109604
aauacgaacgcuucuucgc

SEQ ID NO: 1109606 - RNA, 19 nt, Artificial Sequence
  Description of Artificial Sequence: Synthetic oligonucleotide
  Sense strand starting at position 1500 of SEQ ID NO: 915833
cgaagaagcguucguauuc

SEQ ID NO: 1109607 - RNA, 19 nt, Artificial Sequence
  Description of Artificial Sequence: Synthetic oligonucleotide
  Antisense strand to SEQ ID NO: 1109606
gaauacgaacgcuucuucg

SEQ ID NO: 1109608 - RNA, 19 nt, Artificial Sequence
  Description of Artificial Sequence: Synthetic oligonucleotide
  Sense strand starting at position 1509 of SEQ ID NO: 915833
guucguauucgguaggaga

SEQ ID NO: 1109609 - RNA, 19 nt, Artificial Sequence
  Description of Artificial Sequence: Synthetic oligonucleotide
  Antisense strand to SEQ ID NO: 1109608
ucuccuaccgaauacgaac

SEQ ID NO: 1109610 - RNA, 19 nt, Artificial Sequence
  Description of Artificial Sequence: Synthetic oligonucleotide
  Sense strand starting at position 1511 of SEQ ID NO: 915833
ucguauucgguaggagaga

SEQ ID NO: 1109611 - RNA, 19 nt, Artificial Sequence
  Description of Artificial Sequence: Synthetic oligonucleotide
  Antisense strand to SEQ ID NO: 1109610
ucucuccuaccgaauacga

SEQ ID NO: 1109612 - RNA, 19 nt, Artificial Sequence
  Description of Artificial Sequence: Synthetic oligonucleotide
  Sense strand starting at position 1696 of SEQ ID NO: 915833
gaggguuaucccugcugac

SEQ ID NO: 1109613 - RNA, 19 nt, Artificial Sequence
  Description of Artificial Sequence: Synthetic oligonucleotide
  Antisense strand to SEQ ID NO: 1109612
gucagcagggauaacccuc

SEQ ID NO: 1109614 - RNA, 19 nt, Artificial Sequence
  Description of Artificial Sequence: Synthetic oligonucleotide
  Sense strand starting at position 1772 of SEQ ID NO: 915833
gggaguaucccaggaccua

SEQ ID NO: 1109615 - RNA, 19 nt, Artificial Sequence
  Description of Artificial Sequence: Synthetic oligonucleotide
  Antisense strand to SEQ ID NO: 1109614
uagguccugggauacuccc

SEQ ID NO: 1109616 - RNA, 19 nt, Artificial Sequence
  Description of Artificial Sequence: Synthetic oligonucleotide
  Sense strand starting at position 1875 of SEQ ID NO: 915833
gggagagucuguuggagca

SEQ ID NO: 1109617 - RNA, 19 nt, Artificial Sequence
  Description of Artificial Sequence: Synthetic oligonucleotide
  Antisense strand to SEQ ID NO: 1109616
ugcuccaacagacucuccc

SEQ ID NO: 1109618 - RNA, 19 nt, Artificial Sequence
  Description of Artificial Sequence: Synthetic oligonucleotide
  Sense strand starting at position 1895 of SEQ ID NO: 915833
guguaaaccucucacccuu

SEQ ID NO: 1109619 - RNA, 19 nt, Artificial Sequence
  Description of Artificial Sequence: Synthetic oligonucleotide
  Antisense strand to SEQ ID NO: 1109618
aagggugagagguuuacac

SEQ ID NO: 1109620 - RNA, 19 nt, Artificial Sequence
  Description of Artificial Sequence: Synthetic oligonucleotide
  Sense strand starting at position 1946 of SEQ ID NO: 915833
uccucauggccggagaaga

SEQ ID NO: 1109621 - RNA, 19 nt, Artificial Sequence
  Description of Artificial Sequence: Synthetic oligonucleotide
  Antisense strand to SEQ ID NO: 1109620
ucuucuccggccaugagga

SEQ ID NO: 1109622 - RNA, 19 nt, Artificial Sequence
  Description of Artificial Sequence: Synthetic oligonucleotide
  Sense strand starting at position 2622 of SEQ ID NO: 915833
ugcacuaccuuacguaauu

SEQ ID NO: 1109623 - RNA, 19 nt, Artificial Sequence
  Description of Artificial Sequence: Synthetic oligonucleotide
  Antisense strand to SEQ ID NO: 1109622
aauuacguaagguagugca

SEQ ID NO: 1109624 - RNA, 19 nt, Artificial Sequence
  Description of Artificial Sequence: Synthetic oligonucleotide
  Sense strand starting at position 2631 of SEQ ID NO: 915833
uuacguaauugccauagga

SEQ ID NO: 1109625 - RNA, 19 nt, Artificial Sequence
  Description of Artificial Sequence: Synthetic oligonucleotide
  Antisense strand to SEQ ID NO: 1109624
uccuauggcaauuacguaa

SEQ ID NO: 1109626 - RNA, 19 nt, Artificial Sequence
  Description of Artificial Sequence: Synthetic oligonucleotide
  Sense strand starting at position 2633 of SEQ ID NO: 915833
acguaauugccauaggaau

SEQ ID NO: 1109627 - RNA, 19 nt, Artificial Sequence
  Description of Artificial Sequence: Synthetic oligonucleotide
  Antisense strand to SEQ ID NO: 1109626
auuccuauggcaauuacgu

SEQ ID NO: 1109628 - RNA, 19 nt, Artificial Sequence
  Description of Artificial Sequence: Synthetic oligonucleotide
  Sense strand starting at position 2731 of SEQ ID NO: 915833
ucgugaggucuagagcuaa

SEQ ID NO: 1109629 - RNA, 19 nt, Artificial Sequence
  Description of Artificial Sequence: Synthetic oligonucleotide
  Antisense strand to SEQ ID NO: 1109628
uuagcucuagaccucacga

SEQ ID NO: 1109630 - RNA, 19 nt, Artificial Sequence
  Description of Artificial Sequence: Synthetic oligonucleotide
  Sense strand starting at position 2785 of SEQ ID NO: 915833
aggccuaucuggguaggaa

SEQ ID NO: 1109631 - RNA, 19 nt, Artificial Sequence
  Description of Artificial Sequence: Synthetic oligonucleotide
  Antisense strand to SEQ ID NO: 1109630
uuccuacccagauaggccu

SEQ ID NO: 1109632 - RNA, 19 nt, Artificial Sequence
  Description of Artificial Sequence: Synthetic oligonucleotide
  Sense strand starting at position 2857 of SEQ ID NO: 915833
ggcucaguggucuacgaaa

SEQ ID NO: 1109633 - RNA, 19 nt, Artificial Sequence
  Description of Artificial Sequence: Synthetic oligonucleotide
  Antisense strand to SEQ ID NO: 1109632
uuucguagaccacugagcc

SEQ ID NO: 1109634 - RNA, 19 nt, Artificial Sequence
  Description of Artificial Sequence: Synthetic oligonucleotide
  Sense strand starting at position 2859 of SEQ ID NO: 915833
cucaguggucuacgaaagu

SEQ ID NO: 1109635 - RNA, 19 nt, Artificial Sequence
  Description of Artificial Sequence: Synthetic oligonucleotide
  Antisense strand to SEQ ID NO: 1109634
acuuucguagaccacugag

SEQ ID NO: 1109636 - RNA, 19 nt, Artificial Sequence
  Description of Artificial Sequence: Synthetic oligonucleotide
  Sense strand starting at position 2863 of SEQ ID NO: 915833
guggucuacgaaagugguu

SEQ ID NO: 1109637 - RNA, 19 nt, Artificial Sequence
  Description of Artificial Sequence: Synthetic oligonucleotide
  Antisense strand to SEQ ID NO: 1109636
aaccacuuucguagaccac

SEQ ID NO: 1109638 - RNA, 19 nt, Artificial Sequence
  Description of Artificial Sequence: Synthetic oligonucleotide
  Sense strand starting at position 2868 of SEQ ID NO: 915833
cuacgaaagugguuuccaa

SEQ ID NO: 1109639 - RNA, 19 nt, Artificial Sequence
  Description of Artificial Sequence: Synthetic oligonucleotide
  Antisense strand to SEQ ID NO: 1109638
uuggaaaccacuuucguag

SEQ ID NO: 1109640 - RNA, 19 nt, Artificial Sequence
  Description of Artificial Sequence: Synthetic oligonucleotide
  Sense strand starting at position 2872 of SEQ ID NO: 915833
gaaagugguuuccaaggga

SEQ ID NO: 1109641 - RNA, 19 nt, Artificial Sequence
  Description of Artificial Sequence: Synthetic oligonucleotide
  Antisense strand to SEQ ID NO: 1109640
ucccuuggaaaccacuuuc

SEQ ID NO: 1109642 - RNA, 19 nt, Artificial Sequence
  Description of Artificial Sequence: Synthetic oligonucleotide
  Sense strand starting at position 2876 of SEQ ID NO: 915833
gugguuuccaagggagaau

SEQ ID NO: 1109643 - RNA, 19 nt, Artificial Sequence
  Description of Artificial Sequence: Synthetic oligonucleotide
  Antisense strand to SEQ ID NO: 1109642
auucucccuuggaaaccac

SEQ ID NO: 1109644 - RNA, 19 nt, Artificial Sequence
  Description of Artificial Sequence: Synthetic oligonucleotide
  Sense strand starting at position 2900 of SEQ ID NO: 915833
aagacaguccacugaggua

SEQ ID NO: 1109645 - RNA, 19 nt, Artificial Sequence
  Description of Artificial Sequence: Synthetic oligonucleotide
  Antisense strand to SEQ ID NO: 1109644
uaccucaguggacugucuu

SEQ ID NO: 1109646 - RNA, 19 nt, Artificial Sequence
  Description of Artificial Sequence: Synthetic oligonucleotide
  Sense strand starting at position 3207 of SEQ ID NO: 915833
gaaauugucuugggccaga

SEQ ID NO: 1109647 - RNA, 19 nt, Artificial Sequence
  Description of Artificial Sequence: Synthetic oligonucleotide
  Antisense strand to SEQ ID NO: 1109646
ucuggcccaagacaauuuc

SEQ ID NO: 1109648 - RNA, 19 nt, Artificial Sequence
  Description of Artificial Sequence: Synthetic oligonucleotide
  Sense strand starting at position 3248 of SEQ ID NO: 915833
cccagcauuugggaaguca

SEQ ID NO: 1109649 - RNA, 19 nt, Artificial Sequence
  Description of Artificial Sequence: Synthetic oligonucleotide
  Antisense strand to SEQ ID NO: 1109648
ugacuucccaaaugcuggg

SEQ ID NO: 1109650 - RNA, 19 nt, Artificial Sequence
  Description of Artificial Sequence: Synthetic oligonucleotide
  Sense strand starting at position 3370 of SEQ ID NO: 915833
gcgccuguugucccacuua

SEQ ID NO: 1109651 - RNA, 19 nt, Artificial Sequence
  Description of Artificial Sequence: Synthetic oligonucleotide
  Antisense strand to SEQ ID NO: 1109650
uaagugggacaacaggcgc

SEQ ID NO: 1109652 - RNA, 19 nt, Artificial Sequence
  Description of Artificial Sequence: Synthetic oligonucleotide
  Sense strand starting at position 3553 of SEQ ID NO: 915833
uggcucauuccuggaauuc

SEQ ID NO: 1109653 - RNA, 19 nt, Artificial Sequence
  Description of Artificial Sequence: Synthetic oligonucleotide
  Antisense strand to SEQ ID NO: 1109652
gaauuccaggaaugagcca

SEQ ID NO: 1109654 - RNA, 19 nt, Artificial Sequence
  Description of Artificial Sequence: Synthetic oligonucleotide
  Sense strand starting at position 130 of SEQ ID NO: 915834
gugcuuacgcaugcucaga

SEQ ID NO: 1109655 - RNA, 19 nt, Artificial Sequence
  Description of Artificial Sequence: Synthetic oligonucleotide
  Antisense strand to SEQ ID NO: 1109654
ucugagcaugcguaagcac

SEQ ID NO: 1109656 - RNA, 19 nt, Artificial Sequence
  Description of Artificial Sequence: Synthetic oligonucleotide
  Sense strand starting at position 147 of SEQ ID NO: 915834
gagagcuguccugauuccu

SEQ ID NO: 1109657 - RNA, 19 nt, Artificial Sequence
  Description of Artificial Sequence: Synthetic oligonucleotide
  Antisense strand to SEQ ID NO: 1109656
aggaaucaggacagcucuc

SEQ ID NO: 1109658 - RNA, 19 nt, Artificial Sequence
  Description of Artificial Sequence: Synthetic oligonucleotide
  Sense strand starting at position 288 of SEQ ID NO: 915834
ugcuaaguuugacugggaa

SEQ ID NO: 1109659 - RNA, 19 nt, Artificial Sequence
  Description of Artificial Sequence: Synthetic oligonucleotide
  Antisense strand to SEQ ID NO: 1109658
uucccagucaaacuuagca

SEQ ID NO: 1109660 - RNA, 19 nt, Artificial Sequence
  Description of Artificial Sequence: Synthetic oligonucleotide
  Sense strand starting at position 291 of SEQ ID NO: 915834
uaaguuugacugggaagca

SEQ ID NO: 1109661 - RNA, 19 nt, Artificial Sequence
  Description of Artificial Sequence: Synthetic oligonucleotide
  Antisense strand to SEQ ID NO: 1109660
ugcuucccagucaaacuua

SEQ ID NO: 1109662 - RNA, 19 nt, Artificial Sequence
  Description of Artificial Sequence: Synthetic oligonucleotide
  Sense strand starting at position 366 of SEQ ID NO: 915834
ggucgagggaggcaucaau

SEQ ID NO: 1109663 - RNA, 19 nt, Artificial Sequence
  Description of Artificial Sequence: Synthetic oligonucleotide
  Antisense strand to SEQ ID NO: 1109662
auugaugccucccucgacc

SEQ ID NO: 1109664 - RNA, 19 nt, Artificial Sequence
  Description of Artificial Sequence: Synthetic oligonucleotide
  Sense strand starting at position 420 of SEQ ID NO: 915834
ucuauaaagugagucaucu

SEQ ID NO: 1109665 - RNA, 19 nt, Artificial Sequence
  Description of Artificial Sequence: Synthetic oligonucleotide
  Antisense strand to SEQ ID NO: 1109664
agaugacucacuuuauaga

SEQ ID NO: 1109666 - RNA, 19 nt, Artificial Sequence
  Description of Artificial Sequence: Synthetic oligonucleotide
  Sense strand starting at position 458 of SEQ ID NO: 915834
ccuuauguauuaccuggaa

SEQ ID NO: 1109667 - RNA, 19 nt, Artificial Sequence
  Description of Artificial Sequence: Synthetic oligonucleotide
  Antisense strand to SEQ ID NO: 1109666
uuccagguaauacauaagg

SEQ ID NO: 1109668 - RNA, 19 nt, Artificial Sequence
  Description of Artificial Sequence: Synthetic oligonucleotide
  Sense strand starting at position 635 of SEQ ID NO: 915834
gugcucauacuccagauga

SEQ ID NO: 1109669 - RNA, 19 nt, Artificial Sequence
  Description of Artificial Sequence: Synthetic oligonucleotide
  Antisense strand to SEQ ID NO: 1109668
ucaucuggaguaugagcac

SEQ ID NO: 1109670 - RNA, 19 nt, Artificial Sequence
  Description of Artificial Sequence: Synthetic oligonucleotide
  Sense strand starting at position 637 of SEQ ID NO: 915834
gcucauacuccagaugacu

SEQ ID NO: 1109671 - RNA, 19 nt, Artificial Sequence
  Description of Artificial Sequence: Synthetic oligonucleotide
  Antisense strand to SEQ ID NO: 1109670
agucaucuggaguaugagc

SEQ ID NO: 1109672 - RNA, 19 nt, Artificial Sequence
  Description of Artificial Sequence: Synthetic oligonucleotide
  Sense strand starting at position 692 of SEQ ID NO: 915834
ggauguaaccucuguaaag

SEQ ID NO: 1109673 - RNA, 19 nt, Artificial Sequence
  Description of Artificial Sequence: Synthetic oligonucleotide
  Antisense strand to SEQ ID NO: 1109672
cuuuacagagguuacaucc

SEQ ID NO: 1109674 - RNA, 19 nt, Artificial Sequence
  Description of Artificial Sequence: Synthetic oligonucleotide
  Sense strand starting at position 693 of SEQ ID NO: 915834
gauguaaccucuguaaaga

SEQ ID NO: 1109675 - RNA, 19 nt, Artificial Sequence
  Description of Artificial Sequence: Synthetic oligonucleotide
  Antisense strand to SEQ ID NO: 1109674
ucuuuacagagguuacauc

SEQ ID NO: 1109676 - RNA, 19 nt, Artificial Sequence
  Description of Artificial Sequence: Synthetic oligonucleotide
  Sense strand starting at position 694 of SEQ ID NO: 915834
auguaaccucuguaaagau

SEQ ID NO: 1109677 - RNA, 19 nt, Artificial Sequence
  Description of Artificial Sequence: Synthetic oligonucleotide
  Antisense strand to SEQ ID NO: 1109676
aucuuuacagagguuacau

SEQ ID NO: 1109678 - RNA, 19 nt, Artificial Sequence
  Description of Artificial Sequence: Synthetic oligonucleotide
  Sense strand starting at position 1091 of SEQ ID NO: 915834
uagagaugauuagcuucua

SEQ ID NO: 1109679 - RNA, 19 nt, Artificial Sequence
  Description of Artificial Sequence: Synthetic oligonucleotide
  Antisense strand to SEQ ID NO: 1109678
uagaagcuaaucaucucua

SEQ ID NO: 1109680 - RNA, 19 nt, Artificial Sequence
  Description of Artificial Sequence: Synthetic oligonucleotide
  Sense strand starting at position 1124 of SEQ ID NO: 915834
ucaagagaguguuuagcaa

SEQ ID NO: 1109681 - RNA, 19 nt, Artificial Sequence
  Description of Artificial Sequence: Synthetic oligonucleotide
  Antisense strand to SEQ ID NO: 1109680
uugcuaaacacucucuuga

SEQ ID NO: 1109682 - RNA, 19 nt, Artificial Sequence
  Description of Artificial Sequence: Synthetic oligonucleotide
  Sense strand starting at position 1138 of SEQ ID NO: 915834
agcaaaugauaggugcuaa

SEQ ID NO: 1109683 - RNA, 19 nt, Artificial Sequence
  Description of Artificial Sequence: Synthetic oligonucleotide
  Antisense strand to SEQ ID NO: 1109682
uuagcaccuaucauuugcu

SEQ ID NO: 1109684 - RNA, 19 nt, Artificial Sequence
  Description of Artificial Sequence: Synthetic oligonucleotide
  Sense strand starting at position 1330 of SEQ ID NO: 915834
gggugaggaucaguacaca

SEQ ID NO: 1109685 - RNA, 19 nt, Artificial Sequence
  Description of Artificial Sequence: Synthetic oligonucleotide
  Antisense strand to SEQ ID NO: 1109684
uguguacugauccucaccc

SEQ ID NO: 1109686 - RNA, 19 nt, Artificial Sequence
  Description of Artificial Sequence: Synthetic oligonucleotide
  Sense strand starting at position 1362 of SEQ ID NO: 915834
gaggcugcacuguaaacau

SEQ ID NO: 1109687 - RNA, 19 nt, Artificial Sequence
  Description of Artificial Sequence: Synthetic oligonucleotide
  Antisense strand to SEQ ID NO: 1109686
auguuuacagugcagccuc

SEQ ID NO: 1109688 - RNA, 19 nt, Artificial Sequence
  Description of Artificial Sequence: Synthetic oligonucleotide
  Sense strand starting at position 1554 of SEQ ID NO: 915834
ggcagaacucugugaggaa

SEQ ID NO: 1109689 - RNA, 19 nt, Artificial Sequence
  Description of Artificial Sequence: Synthetic oligonucleotide
  Antisense strand to SEQ ID NO: 1109688
uuccucacagaguucugcc

SEQ ID NO: 1109690 - RNA, 19 nt, Artificial Sequence
  Description of Artificial Sequence: Synthetic oligonucleotide
  Sense strand starting at position 1615 of SEQ ID NO: 915834
agccauuuguggcugagga

SEQ ID NO: 1109691 - RNA, 19 nt, Artificial Sequence
  Description of Artificial Sequence: Synthetic oligonucleotide
  Antisense strand to SEQ ID NO: 1109690
uccucagccacaaauggcu

SEQ ID NO: 1109692 - RNA, 19 nt, Artificial Sequence
  Description of Artificial Sequence: Synthetic oligonucleotide
  Sense strand starting at position 1616 of SEQ ID NO: 915834
gccauuuguggcugaggau

SEQ ID NO: 1109693 - RNA, 19 nt, Artificial Sequence
  Description of Artificial Sequence: Synthetic oligonucleotide
  Antisense strand to SEQ ID NO: 1109692
auccucagccacaaauggc

SEQ ID NO: 1109694 - RNA, 19 nt, Artificial Sequence
  Description of Artificial Sequence: Synthetic oligonucleotide
  Sense strand starting at position 1698 of SEQ ID NO: 915834
gagagagugcauuggaauu

SEQ ID NO: 1109695 - RNA, 19 nt, Artificial Sequence
  Description of Artificial Sequence: Synthetic oligonucleotide
  Antisense strand to SEQ ID NO: 1109694
aauuccaaugcacucucuc

SEQ ID NO: 1109696 - RNA, 19 nt, Artificial Sequence
  Description of Artificial Sequence: Synthetic oligonucleotide
  Sense strand starting at position 1708 of SEQ ID NO: 915834
auuggaauuaagugguaga

SEQ ID NO: 1109697 - RNA, 19 nt, Artificial Sequence
  Description of Artificial Sequence: Synthetic oligonucleotide
  Antisense strand to SEQ ID NO: 1109696
ucuaccacuuaauuccaau

SEQ ID NO: 1109698 - RNA, 19 nt, Artificial Sequence
  Description of Artificial Sequence: Synthetic oligonucleotide
  Sense strand starting at position 1742 of SEQ ID NO: 915834
auggaagacugagagauaa

SEQ ID NO: 1109699 - RNA, 19 nt, Artificial Sequence
  Description of Artificial Sequence: Synthetic oligonucleotide
  Antisense strand to SEQ ID NO: 1109698
uuaucucucagucuuccau

SEQ ID NO: 1109700 - RNA, 19 nt, Artificial Sequence
  Description of Artificial Sequence: Synthetic oligonucleotide
  Sense strand starting at position 2024 of SEQ ID NO: 915834
cugcuauggacacagaagu

SEQ ID NO: 1109701 - RNA, 19 nt, Artificial Sequence
  Description of Artificial Sequence: Synthetic oligonucleotide
  Antisense strand to SEQ ID NO: 1109700
acuucuguguccauagcag

SEQ ID NO: 1109702 - RNA, 19 nt, Artificial Sequence
  Description of Artificial Sequence: Synthetic oligonucleotide
  Sense strand starting at position 2068 of SEQ ID NO: 915834
uagagaguaucaguuucuu

SEQ ID NO: 1109703 - RNA, 19 nt, Artificial Sequence
  Description of Artificial Sequence: Synthetic oligonucleotide
  Antisense strand to SEQ ID NO: 1109702
aagaaacugauacucucua

SEQ ID NO: 1109704 - RNA, 19 nt, Artificial Sequence
  Description of Artificial Sequence: Synthetic oligonucleotide
  Sense strand starting at position 2240 of SEQ ID NO: 915834
gugaccagaugagucuaaa

SEQ ID NO: 1109705 - RNA, 19 nt, Artificial Sequence
  Description of Artificial Sequence: Synthetic oligonucleotide
  Antisense strand to SEQ ID NO: 1109704
uuuagacucaucuggucac

SEQ ID NO: 1109706 - RNA, 19 nt, Artificial Sequence
  Description of Artificial Sequence: Synthetic oligonucleotide
  Sense strand starting at position 2270 of SEQ ID NO: 915834
acuacagaauugucagacu

SEQ ID NO: 1109707 - RNA, 19 nt, Artificial Sequence
  Description of Artificial Sequence: Synthetic oligonucleotide
  Antisense strand to SEQ ID NO: 1109706
agucugacaauucuguagu

SEQ ID NO: 1109708 - RNA, 19 nt, Artificial Sequence
  Description of Artificial Sequence: Synthetic oligonucleotide
  Sense strand starting at position 2369 of SEQ ID NO: 915834
uccuuucgccugcuuuaua

SEQ ID NO: 1109709 - RNA, 19 nt, Artificial Sequence
  Description of Artificial Sequence: Synthetic oligonucleotide
  Antisense strand to SEQ ID NO: 1109708
uauaaagcaggcgaaagga

SEQ ID NO: 1109710 - RNA, 19 nt, Artificial Sequence
  Description of Artificial Sequence: Synthetic oligonucleotide
  Sense strand starting at position 2388 of SEQ ID NO: 915834
cacuguucugugucugcua

SEQ ID NO: 1109711 - RNA, 19 nt, Artificial Sequence
  Description of Artificial Sequence: Synthetic oligonucleotide
  Antisense strand to SEQ ID NO: 1109710
uagcagacacagaacagug

SEQ ID NO: 1109712 - RNA, 19 nt, Artificial Sequence
  Description of Artificial Sequence: Synthetic oligonucleotide
  Sense strand starting at position 2423 of SEQ ID NO: 915834
uuccucuuccaguaaagga

SEQ ID NO: 1109713 - RNA, 19 nt, Artificial Sequence
  Description of Artificial Sequence: Synthetic oligonucleotide
  Antisense strand to SEQ ID NO: 1109712
uccuuuacuggaagaggaa

SEQ ID NO: 1109714 - RNA, 19 nt, Artificial Sequence
  Description of Artificial Sequence: Synthetic oligonucleotide
  Sense strand starting at position 2546 of SEQ ID NO: 915834
cuuggaaaccuggguuuaa

SEQ ID NO: 1109715 - RNA, 19 nt, Artificial Sequence
  Description of Artificial Sequence: Synthetic oligonucleotide
  Antisense strand to SEQ ID NO: 1109714
uuaaacccagguuuccaag

SEQ ID NO: 1109716 - RNA, 19 nt, Artificial Sequence
  Description of Artificial Sequence: Synthetic oligonucleotide
  Sense strand starting at position 2547 of SEQ ID NO: 915834
uuggaaaccuggguuuaag

SEQ ID NO: 1109717 - RNA, 19 nt, Artificial Sequence
  Description of Artificial Sequence: Synthetic oligonucleotide
  Antisense strand to SEQ ID NO: 1109716
cuuaaacccagguuuccaa

SEQ ID NO: 1109718 - RNA, 19 nt, Artificial Sequence
  Description of Artificial Sequence: Synthetic oligonucleotide
  Sense strand starting at position 3226 of SEQ ID NO: 915834
ggacuaccaucuguaaucu

SEQ ID NO: 1109719 - RNA, 19 nt, Artificial Sequence
  Description of Artificial Sequence: Synthetic oligonucleotide
  Antisense strand to SEQ ID NO: 1109718
agauuacagaugguagucc

SEQ ID NO: 1109720 - RNA, 19 nt, Artificial Sequence
  Description of Artificial Sequence: Synthetic oligonucleotide
  Sense strand starting at position 3271 of SEQ ID NO: 915834
uuauuucuucccuggguuu

SEQ ID NO: 1109721 - RNA, 19 nt, Artificial Sequence
  Description of Artificial Sequence: Synthetic oligonucleotide
  Antisense strand to SEQ ID NO: 1109720
aaacccagggaagaaauaa

SEQ ID NO: 1109722 - RNA, 19 nt, Artificial Sequence
  Description of Artificial Sequence: Synthetic oligonucleotide
  Sense strand starting at position 3389 of SEQ ID NO: 915834
auggguugaggcuauguaa

SEQ ID NO: 1109723 - RNA, 19 nt, Artificial Sequence
  Description of Artificial Sequence: Synthetic oligonucleotide
  Antisense strand to SEQ ID NO: 1109722
uuacauagccucaacccau

SEQ ID NO: 1109724 - RNA, 19 nt, Artificial Sequence
  Description of Artificial Sequence: Synthetic oligonucleotide
  Sense strand starting at position 3591 of SEQ ID NO: 915834
uaaggaucuuauccaaggu

SEQ ID NO: 1109725 - RNA, 19 nt, Artificial Sequence
  Description of Artificial Sequence: Synthetic oligonucleotide
  Antisense strand to SEQ ID NO: 1109724
accuuggauaagauccuua

SEQ ID NO: 1109726 - RNA, 19 nt, Artificial Sequence
  Description of Artificial Sequence: Synthetic oligonucleotide
  Sense strand starting at position 3759 of SEQ ID NO: 915834
gauaaagguuucuuguuga

SEQ ID NO: 1109727 - RNA, 19 nt, Artificial Sequence
  Description of Artificial Sequence: Synthetic oligonucleotide
  Antisense strand to SEQ ID NO: 1109726
ucaacaagaaaccuuuauc

SEQ ID NO: 1109728 - RNA, 19 nt, Artificial Sequence
  Description of Artificial Sequence: Synthetic oligonucleotide
  Sense strand starting at position 3833 of SEQ ID NO: 915834
aguggaagaaucugcaaau

SEQ ID NO: 1109729 - RNA, 19 nt, Artificial Sequence
  Description of Artificial Sequence: Synthetic oligonucleotide
  Antisense strand to SEQ ID NO: 1109728
auuugcagauucuuccacu

SEQ ID NO: 1109730 - RNA, 19 nt, Artificial Sequence
  Description of Artificial Sequence: Synthetic oligonucleotide
  Sense strand starting at position 3834 of SEQ ID NO: 915834
guggaagaaucugcaaaug

SEQ ID NO: 1109731 - RNA, 19 nt, Artificial Sequence
  Description of Artificial Sequence: Synthetic oligonucleotide
  Antisense strand to SEQ ID NO: 1109730
cauuugcagauucuuccac

SEQ ID NO: 1109732 - RNA, 19 nt, Artificial Sequence
  Description of Artificial Sequence: Synthetic oligonucleotide
  Sense strand starting at position 3956 of SEQ ID NO: 915834
gagugacuucuggauaagu

SEQ ID NO: 1109733 - RNA, 19 nt, Artificial Sequence
  Description of Artificial Sequence: Synthetic oligonucleotide
  Antisense strand to SEQ ID NO: 1109732
acuuauccagaagucacuc

SEQ ID NO: 1109734 - RNA, 19 nt, Artificial Sequence
  Description of Artificial Sequence: Synthetic oligonucleotide
  Sense strand starting at position 59 of SEQ ID NO: 915835
agaguuuccugcuccuaag

SEQ ID NO: 1109735 - RNA, 19 nt, Artificial Sequence
  Description of Artificial Sequence: Synthetic oligonucleotide
  Antisense strand to SEQ ID NO: 1109734
cuuaggagcaggaaacucu

SEQ ID NO: 1109736 - RNA, 19 nt, Artificial Sequence
  Description of Artificial Sequence: Synthetic oligonucleotide
  Sense strand starting at position 78 of SEQ ID NO: 915835
auaauuauggucugagaau

SEQ ID NO: 1109737 - RNA, 19 nt, Artificial Sequence
  Description of Artificial Sequence: Synthetic oligonucleotide
  Antisense strand to SEQ ID NO: 1109736
auucucagaccauaauuau

SEQ ID NO: 1109738 - RNA, 19 nt, Artificial Sequence
  Description of Artificial Sequence: Synthetic oligonucleotide
  Sense strand starting at position 123 of SEQ ID NO: 915835
auguauagggucuagugua

SEQ ID NO: 1109739 - RNA, 19 nt, Artificial Sequence
  Description of Artificial Sequence: Synthetic oligonucleotide
  Antisense strand to SEQ ID NO: 1109738
uacacuagacccuauacau

SEQ ID NO: 1109740 - RNA, 19 nt, Artificial Sequence
  Description of Artificial Sequence: Synthetic oligonucleotide
  Sense strand starting at position 130 of SEQ ID NO: 915835
gggucuaguguauaaagac

SEQ ID NO: 1109741 - RNA, 19 nt, Artificial Sequence
  Description of Artificial Sequence: Synthetic oligonucleotide
  Antisense strand to SEQ ID NO: 1109740
gucuuuauacacuagaccc

SEQ ID NO: 1109742 - RNA, 19 nt, Artificial Sequence
  Description of Artificial Sequence: Synthetic oligonucleotide
  Sense strand starting at position 222 of SEQ ID NO: 915835
gagauuaagucacuugacu

SEQ ID NO: 1109743 - RNA, 19 nt, Artificial Sequence
  Description of Artificial Sequence: Synthetic oligonucleotide
  Antisense strand to SEQ ID NO: 1109742
agucaagugacuuaaucuc

SEQ ID NO: 1109744 - RNA, 19 nt, Artificial Sequence
  Description of Artificial Sequence: Synthetic oligonucleotide
  Sense strand starting at position 227 of SEQ ID NO: 915835
uaagucacuugacugugaa

SEQ ID NO: 1109745 - RNA, 19 nt, Artificial Sequence
  Description of Artificial Sequence: Synthetic oligonucleotide
  Antisense strand to SEQ ID NO: 1109744
uucacagucaagugacuua

SEQ ID NO: 1109746 - RNA, 19 nt, Artificial Sequence
  Description of Artificial Sequence: Synthetic oligonucleotide
  Sense strand starting at position 228 of SEQ ID NO: 915835
aagucacuugacugugaac

SEQ ID NO: 1109747 - RNA, 19 nt, Artificial Sequence
  Description of Artificial Sequence: Synthetic oligonucleotide
  Antisense strand to SEQ ID NO: 1109746
guucacagucaagugacuu

SEQ ID NO: 1109748 - RNA, 19 nt, Artificial Sequence
  Description of Artificial Sequence: Synthetic oligonucleotide
  Sense strand starting at position 230 of SEQ ID NO: 915835
gucacuugacugugaacac

SEQ ID NO: 1109749 - RNA, 19 nt, Artificial Sequence
  Description of Artificial Sequence: Synthetic oligonucleotide
  Antisense strand to SEQ ID NO: 1109748
guguucacagucaagugac

SEQ ID NO: 1109750 - RNA, 19 nt, Artificial Sequence
  Description of Artificial Sequence: Synthetic oligonucleotide
  Sense strand starting at position 249 of SEQ ID NO: 915835
acagucaguaacugugaga

SEQ ID NO: 1109751 - RNA, 19 nt, Artificial Sequence
  Description of Artificial Sequence: Synthetic oligonucleotide
  Antisense strand to SEQ ID NO: 1109750
ucucacaguuacugacugu

SEQ ID NO: 1109752 - RNA, 19 nt, Artificial Sequence
  Description of Artificial Sequence: Synthetic oligonucleotide
  Sense strand starting at position 709 of SEQ ID NO: 915835
ggagccacacucuaagagu

SEQ ID NO: 1109753 - RNA, 19 nt, Artificial Sequence
  Description of Artificial Sequence: Synthetic oligonucleotide
  Antisense strand to SEQ ID NO: 1109752
acucuuagaguguggcucc

SEQ ID NO: 1109754 - RNA, 19 nt, Artificial Sequence
  Description of Artificial Sequence: Synthetic oligonucleotide
  Sense strand starting at position 949 of SEQ ID NO: 915835
ggccuauggaucugaucca

SEQ ID NO: 1109755 - RNA, 19 nt, Artificial Sequence
  Description of Artificial Sequence: Synthetic oligonucleotide
  Antisense strand to SEQ ID NO: 1109754
uggaucagauccauaggcc

SEQ ID NO: 1109756 - RNA, 19 nt, Artificial Sequence
  Description of Artificial Sequence: Synthetic oligonucleotide
  Sense strand starting at position 1122 of SEQ ID NO: 915835
ugucgacuucgagaagaca

SEQ ID NO: 1109757 - RNA, 19 nt, Artificial Sequence
  Description of Artificial Sequence: Synthetic oligonucleotide
  Antisense strand to SEQ ID NO: 1109756
ugucuucucgaagucgaca

SEQ ID NO: 1109758 - RNA, 19 nt, Artificial Sequence
  Description of Artificial Sequence: Synthetic oligonucleotide
  Sense strand starting at position 1210 of SEQ ID NO: 915835
guaggaggauacuuaguua

SEQ ID NO: 1109759 - RNA, 19 nt, Artificial Sequence
  Description of Artificial Sequence: Synthetic oligonucleotide
  Antisense strand to SEQ ID NO: 1109758
uaacuaaguauccuccuac

SEQ ID NO: 1109760 - RNA, 19 nt, Artificial Sequence
  Description of Artificial Sequence: Synthetic oligonucleotide
  Sense strand starting at position 1214 of SEQ ID NO: 915835
gaggauacuuaguuauaau

SEQ ID NO: 1109761 - RNA, 19 nt, Artificial Sequence
  Description of Artificial Sequence: Synthetic oligonucleotide
  Antisense strand to SEQ ID NO: 1109760
auuauaacuaaguauccuc

SEQ ID NO: 1109762 - RNA, 19 nt, Artificial Sequence
  Description of Artificial Sequence: Synthetic oligonucleotide
  Sense strand starting at position 1402 of SEQ ID NO: 915835
guaacagggucucucaaga

SEQ ID NO: 1109763 - RNA, 19 nt, Artificial Sequence
  Description of Artificial Sequence: Synthetic oligonucleotide
  Antisense strand to SEQ ID NO: 1109762
ucuugagagacccuguuac

SEQ ID NO: 1109764 - RNA, 19 nt, Artificial Sequence
  Description of Artificial Sequence: Synthetic oligonucleotide
  Sense strand starting at position 2317 of SEQ ID NO: 915835
cugguuuaaucuuuggaag

SEQ ID NO: 1109765 - RNA, 19 nt, Artificial Sequence
  Description of Artificial Sequence: Synthetic oligonucleotide
  Antisense strand to SEQ ID NO: 1109764
cuuccaaagauuaaaccag

SEQ ID NO: 1109766 - RNA, 19 nt, Artificial Sequence
  Description of Artificial Sequence: Synthetic oligonucleotide
  Sense strand starting at position 2318 of SEQ ID NO: 915835
ugguuuaaucuuuggaagg

SEQ ID NO: 1109767 - RNA, 19 nt, Artificial Sequence
  Description of Artificial Sequence: Synthetic oligonucleotide
  Antisense strand to SEQ ID NO: 1109766
ccuuccaaagauuaaacca

SEQ ID NO: 1109768 - RNA, 19 nt, Artificial Sequence
  Description of Artificial Sequence: Synthetic oligonucleotide
  Sense strand starting at position 2402 of SEQ ID NO: 915835
gcucuuugauuguuauuua

SEQ ID NO: 1109769 - RNA, 19 nt, Artificial Sequence
  Description of Artificial Sequence: Synthetic oligonucleotide
  Antisense strand to SEQ ID NO: 1109768
uaaauaacaaucaaagagc

SEQ ID NO: 1109770 - RNA, 19 nt, Artificial Sequence
  Description of Artificial Sequence: Synthetic oligonucleotide
  Sense strand starting at position 2447 of SEQ ID NO: 915835
cucagucccugguuacuaa

SEQ ID NO: 1109771 - RNA, 19 nt, Artificial Sequence
  Description of Artificial Sequence: Synthetic oligonucleotide
  Antisense strand to SEQ ID NO: 1109770
uuaguaaccagggacugag

SEQ ID NO: 1109772 - RNA, 19 nt, Artificial Sequence
  Description of Artificial Sequence: Synthetic oligonucleotide
  Sense strand starting at position 2486 of SEQ ID NO: 915835
caaggacugcuccgggauu

SEQ ID NO: 1109773 - RNA, 19 nt, Artificial Sequence
  Description of Artificial Sequence: Synthetic oligonucleotide
  Antisense strand to SEQ ID NO: 1109772
aaucccggagcaguccuug

SEQ ID NO: 1109774 - RNA, 19 nt, Artificial Sequence
  Description of Artificial Sequence: Synthetic oligonucleotide
  Sense strand starting at position 2538 of SEQ ID NO: 915835
gagguugugccagacaaau

SEQ ID NO: 1109775 - RNA, 19 nt, Artificial Sequence
  Description of Artificial Sequence: Synthetic oligonucleotide
  Antisense strand to SEQ ID NO: 1109774
auuugucuggcacaaccuc

SEQ ID NO: 1109776 - RNA, 19 nt, Artificial Sequence
  Description of Artificial Sequence: Synthetic oligonucleotide
  Sense strand starting at position 2540 of SEQ ID NO: 915835
gguugugccagacaaauug

SEQ ID NO: 1109777 - RNA, 19 nt, Artificial Sequence
  Description of Artificial Sequence: Synthetic oligonucleotide
  Antisense strand to SEQ ID NO: 1109776
caauuugucuggcacaacc

SEQ ID NO: 1109778 - RNA, 19 nt, Artificial Sequence
  Description of Artificial Sequence: Synthetic oligonucleotide
  Sense strand starting at position 2573 of SEQ ID NO: 915835
gggugauugacaggucaca

SEQ ID NO: 1109779 - RNA, 19 nt, Artificial Sequence
  Description of Artificial Sequence: Synthetic oligonucleotide
  Antisense strand to SEQ ID NO: 1109778
ugugaccugucaaucaccc

SEQ ID NO: 1109780 - RNA, 19 nt, Artificial Sequence
  Description of Artificial Sequence: Synthetic oligonucleotide
  Sense strand starting at position 2638 of SEQ ID NO: 915835
ccgcaugugaucuagacag

SEQ ID NO: 1109781 - RNA, 19 nt, Artificial Sequence
  Description of Artificial Sequence: Synthetic oligonucleotide
  Antisense strand to SEQ ID NO: 1109780
cugucuagaucacaugcgg

SEQ ID NO: 1109782 - RNA, 19 nt, Artificial Sequence
  Description of Artificial Sequence: Synthetic oligonucleotide
  Sense strand starting at position 2660 of SEQ ID NO: 915835
acagauaggacuuguugca

SEQ ID NO: 1109783 - RNA, 19 nt, Artificial Sequence
  Description of Artificial Sequence: Synthetic oligonucleotide
  Antisense strand to SEQ ID NO: 1109782
ugcaacaaguccuaucugu

SEQ ID NO: 1109784 - RNA, 19 nt, Artificial Sequence
  Description of Artificial Sequence: Synthetic oligonucleotide
  Sense strand starting at position 2827 of SEQ ID NO: 915835
uauaguacugucuagguuu

SEQ ID NO: 1109785 - RNA, 19 nt, Artificial Sequence
  Description of Artificial Sequence: Synthetic oligonucleotide
  Antisense strand to SEQ ID NO: 1109784
aaaccuagacaguacuaua

SEQ ID NO: 1109786 - RNA, 19 nt, Artificial Sequence
  Description of Artificial Sequence: Synthetic oligonucleotide
  Sense strand starting at position 2833 of SEQ ID NO: 915835
acugucuagguuuaacauu

SEQ ID NO: 1109787 - RNA, 19 nt, Artificial Sequence
  Description of Artificial Sequence: Synthetic oligonucleotide
  Antisense strand to SEQ ID NO: 1109786
aauguuaaaccuagacagu

SEQ ID NO: 1109788 - RNA, 19 nt, Artificial Sequence
  Description of Artificial Sequence: Synthetic oligonucleotide
  Sense strand starting at position 2840 of SEQ ID NO: 915835
agguuuaacauucgucaag

SEQ ID NO: 1109789 - RNA, 19 nt, Artificial Sequence
  Description of Artificial Sequence: Synthetic oligonucleotide
  Antisense strand to SEQ ID NO: 1109788
cuugacgaauguuaaaccu

SEQ ID NO: 1109790 - RNA, 19 nt, Artificial Sequence
  Description of Artificial Sequence: Synthetic oligonucleotide
  Sense strand starting at position 2852 of SEQ ID NO: 915835
cgucaagcuccgcuauuau

SEQ ID NO: 1109791 - RNA, 19 nt, Artificial Sequence
  Description of Artificial Sequence: Synthetic oligonucleotide
  Antisense strand to SEQ ID NO: 1109790
auaauagcggagcuugacg

SEQ ID NO: 1109792 - RNA, 19 nt, Artificial Sequence
  Description of Artificial Sequence: Synthetic oligonucleotide
  Sense strand starting at position 2937 of SEQ ID NO: 915835
gugugacaguauuugcagu

SEQ ID NO: 1109793 - RNA, 19 nt, Artificial Sequence
  Description of Artificial Sequence: Synthetic oligonucleotide
  Antisense strand to SEQ ID NO: 1109792
acugcaaauacugucacac

SEQ ID NO: 1109794 - RNA, 19 nt, Artificial Sequence
  Description of Artificial Sequence: Synthetic oligonucleotide
  Sense strand starting at position 2939 of SEQ ID NO: 915835
gugacaguauuugcaguuu

SEQ ID NO: 1109795 - RNA, 19 nt, Artificial Sequence
  Description of Artificial Sequence: Synthetic oligonucleotide
  Antisense strand to SEQ ID NO: 1109794
aaacugcaaauacugucac

SEQ ID NO: 1109796 - RNA, 19 nt, Artificial Sequence
  Description of Artificial Sequence: Synthetic oligonucleotide
  Sense strand starting at position 3032 of SEQ ID NO: 915835
acuugagaauccguaaaca

SEQ ID NO: 1109797 - RNA, 19 nt, Artificial Sequence
  Description of Artificial Sequence: Synthetic oligonucleotide
  Antisense strand to SEQ ID NO: 1109796
uguuuacggauucucaagu

SEQ ID NO: 1109798 - RNA, 19 nt, Artificial Sequence
  Description of Artificial Sequence: Synthetic oligonucleotide
  Sense strand starting at position 3183 of SEQ ID NO: 915835
cccugacaucugcagucua

SEQ ID NO: 1109799 - RNA, 19 nt, Artificial Sequence
  Description of Artificial Sequence: Synthetic oligonucleotide
  Antisense strand to SEQ ID NO: 1109798
uagacugcagaugucaggg

SEQ ID NO: 1109800 - RNA, 19 nt, Artificial Sequence
  Description of Artificial Sequence: Synthetic oligonucleotide
  Sense strand starting at position 3230 of SEQ ID NO: 915835
aauaaugucgaauggccaa

SEQ ID NO: 1109801 - RNA, 19 nt, Artificial Sequence
  Description of Artificial Sequence: Synthetic oligonucleotide
  Antisense strand to SEQ ID NO: 1109800
uuggccauucgacauuauu

SEQ ID NO: 1109802 - RNA, 19 nt, Artificial Sequence
  Description of Artificial Sequence: Synthetic oligonucleotide
  Sense strand starting at position 3385 of SEQ ID NO: 915835
uguaauucucaugaaagua

SEQ ID NO: 1109803 - RNA, 19 nt, Artificial Sequence
  Description of Artificial Sequence: Synthetic oligonucleotide
  Antisense strand to SEQ ID NO: 1109802
uacuuucaugagaauuaca

SEQ ID NO: 1109804 - RNA, 19 nt, Artificial Sequence
  Description of Artificial Sequence: Synthetic oligonucleotide
  Sense strand starting at position 3554 of SEQ ID NO: 915835
acagauaugccgugauaca

SEQ ID NO: 1109805 - RNA, 19 nt, Artificial Sequence
  Description of Artificial Sequence: Synthetic oligonucleotide
  Antisense strand to SEQ ID NO: 1109804
uguaucacggcauaucugu

SEQ ID NO: 1109806 - RNA, 19 nt, Artificial Sequence
  Description of Artificial Sequence: Synthetic oligonucleotide
  Sense strand starting at position 3555 of SEQ ID NO: 915835
cagauaugccgugauacaa

SEQ ID NO: 1109807 - RNA, 19 nt, Artificial Sequence
  Description of Artificial Sequence: Synthetic oligonucleotide
  Antisense strand to SEQ ID NO: 1109806
uuguaucacggcauaucug

SEQ ID NO: 1109808 - RNA, 19 nt, Artificial Sequence
  Description of Artificial Sequence: Synthetic oligonucleotide
  Sense strand starting at position 3634 of SEQ ID NO: 915835
ccaggauacugugcaaaua

SEQ ID NO: 1109809 - RNA, 19 nt, Artificial Sequence
  Description of Artificial Sequence: Synthetic oligonucleotide
  Antisense strand to SEQ ID NO: 1109808
uauuugcacaguauccugg

SEQ ID NO: 1109810 - RNA, 19 nt, Artificial Sequence
  Description of Artificial Sequence: Synthetic oligonucleotide
  Sense strand starting at position 3718 of SEQ ID NO: 915835
uuaauuccaggcugaguau

SEQ ID NO: 1109811 - RNA, 19 nt, Artificial Sequence
  Description of Artificial Sequence: Synthetic oligonucleotide
  Antisense strand to SEQ ID NO: 1109810
auacucagccuggaauuaa

SEQ ID NO: 1109812 - RNA, 19 nt, Artificial Sequence
  Description of Artificial Sequence: Synthetic oligonucleotide
  Sense strand starting at position 3965 of SEQ ID NO: 915835
ggagcuuguggaggagaaa

SEQ ID NO: 1109813 - RNA, 19 nt, Artificial Sequence
  Description of Artificial Sequence: Synthetic oligonucleotide
  Antisense strand to SEQ ID NO: 1109812
uuucuccuccacaagcucc

SEQ ID NO: 1109814 - RNA, 19 nt, Artificial Sequence
  Description of Artificial Sequence: Synthetic oligonucleotide
  Sense strand starting at position 415 of SEQ ID NO: 915836
cggugacaaugauaaugau

SEQ ID NO: 1109815 - RNA, 19 nt, Artificial Sequence
  Description of Artificial Sequence: Synthetic oligonucleotide
  Antisense strand to SEQ ID NO: 1109814
aucauuaucauugucaccg

SEQ ID NO: 1109816 - RNA, 19 nt, Artificial Sequence
  Description of Artificial Sequence: Synthetic oligonucleotide
  Sense strand starting at position 418 of SEQ ID NO: 915836
ugacaaugauaaugauaca

SEQ ID NO: 1109817 - RNA, 19 nt, Artificial Sequence
  Description of Artificial Sequence: Synthetic oligonucleotide
  Antisense strand to SEQ ID NO: 1109816
uguaucauuaucauuguca

SEQ ID NO: 1109818 - RNA, 19 nt, Artificial Sequence
  Description of Artificial Sequence: Synthetic oligonucleotide
  Sense strand starting at position 571 of SEQ ID NO: 915836
cucuguuaauuugauaaag

SEQ ID NO: 1109819 - RNA, 19 nt, Artificial Sequence
  Description of Artificial Sequence: Synthetic oligonucleotide
  Antisense strand to SEQ ID NO: 1109818
cuuuaucaaauuaacagag

SEQ ID NO: 1109820 - RNA, 19 nt, Artificial Sequence
  Description of Artificial Sequence: Synthetic oligonucleotide
  Sense strand starting at position 573 of SEQ ID NO: 915836
cuguuaauuugauaaagga

SEQ ID NO: 1109821 - RNA, 19 nt, Artificial Sequence
  Description of Artificial Sequence: Synthetic oligonucleotide
  Antisense strand to SEQ ID NO: 1109820
uccuuuaucaaauuaacag

SEQ ID NO: 1109822 - RNA, 19 nt, Artificial Sequence
  Description of Artificial Sequence: Synthetic oligonucleotide
  Sense strand starting at position 586 of SEQ ID NO: 915836
aaaggaaaggcgugucuuu

SEQ ID NO: 1109823 - RNA, 19 nt, Artificial Sequence
  Description of Artificial Sequence: Synthetic oligonucleotide
  Antisense strand to SEQ ID NO: 1109822
aaagacacgccuuuccuuu

SEQ ID NO: 1109824 - RNA, 19 nt, Artificial Sequence
  Description of Artificial Sequence: Synthetic oligonucleotide
  Sense strand starting at position 591 of SEQ ID NO: 915836
aaaggcgugucuuuagguu

SEQ ID NO: 1109825 - RNA, 19 nt, Artificial Sequence
  Description of Artificial Sequence: Synthetic oligonucleotide
  Antisense strand to SEQ ID NO: 1109824
aaccuaaagacacgccuuu

SEQ ID NO: 1109826 - RNA, 19 nt, Artificial Sequence
  Description of Artificial Sequence: Synthetic oligonucleotide
  Sense strand starting at position 598 of SEQ ID NO: 915836
ugucuuuagguuugcuuau

SEQ ID NO: 1109827 - RNA, 19 nt, Artificial Sequence
  Description of Artificial Sequence: Synthetic oligonucleotide
  Antisense strand to SEQ ID NO: 1109826
auaagcaaaccuaaagaca

SEQ ID NO: 1109828 - RNA, 19 nt, Artificial Sequence
  Description of Artificial Sequence: Synthetic oligonucleotide
  Sense strand starting at position 599 of SEQ ID NO: 915836
gucuuuagguuugcuuauu

SEQ ID NO: 1109829 - RNA, 19 nt, Artificial Sequence
  Description of Artificial Sequence: Synthetic oligonucleotide
  Antisense strand to SEQ ID NO: 1109828
aauaagcaaaccuaaagac

SEQ ID NO: 1109830 - RNA, 19 nt, Artificial Sequence
  Description of Artificial Sequence: Synthetic oligonucleotide
  Sense strand starting at position 600 of SEQ ID NO: 915836
ucuuuagguuugcuuauuu

SEQ ID NO: 1109831 - RNA, 19 nt, Artificial Sequence
  Description of Artificial Sequence: Synthetic oligonucleotide
  Antisense strand to SEQ ID NO: 1109830
aaauaagcaaaccuaaaga

SEQ ID NO: 1109832 - RNA, 19 nt, Artificial Sequence
  Description of Artificial Sequence: Synthetic oligonucleotide
  Sense strand starting at position 644 of SEQ ID NO: 915836
acauguuaugaaugccauu

SEQ ID NO: 1109833 - RNA, 19 nt, Artificial Sequence
  Description of Artificial Sequence: Synthetic oligonucleotide
  Antisense strand to SEQ ID NO: 1109832
aauggcauucauaacaugu

SEQ ID NO: 1109834 - RNA, 19 nt, Artificial Sequence
  Description of Artificial Sequence: Synthetic oligonucleotide
  Sense strand starting at position 647 of SEQ ID NO: 915836
uguuaugaaugccauugua

SEQ ID NO: 1109835 - RNA, 19 nt, Artificial Sequence
  Description of Artificial Sequence: Synthetic oligonucleotide
  Antisense strand to SEQ ID NO: 1109834
uacaauggcauucauaaca

SEQ ID NO: 1109836 - RNA, 19 nt, Artificial Sequence
  Description of Artificial Sequence: Synthetic oligonucleotide
  Sense strand starting at position 655 of SEQ ID NO: 915836
augccauuguauuaacagu

SEQ ID NO: 1109837 - RNA, 19 nt, Artificial Sequence
  Description of Artificial Sequence: Synthetic oligonucleotide
  Antisense strand to SEQ ID NO: 1109836
acuguuaauacaauggcau

SEQ ID NO: 1109838 - RNA, 19 nt, Artificial Sequence
  Description of Artificial Sequence: Synthetic oligonucleotide
  Sense strand starting at position 671 of SEQ ID NO: 915836
aguacuucuguuuaauuga

SEQ ID NO: 1109839 - RNA, 19 nt, Artificial Sequence
  Description of Artificial Sequence: Synthetic oligonucleotide
  Antisense strand to SEQ ID NO: 1109838
ucaauuaaacagaaguacu

SEQ ID NO: 1109840 - RNA, 19 nt, Artificial Sequence
  Description of Artificial Sequence: Synthetic oligonucleotide
  Sense strand starting at position 804 of SEQ ID NO: 915836
auaaucuuguacccaggaa

SEQ ID NO: 1109841 - RNA, 19 nt, Artificial Sequence
  Description of Artificial Sequence: Synthetic oligonucleotide
  Antisense strand to SEQ ID NO: 1109840
uuccuggguacaagauuau

SEQ ID NO: 1109842 - RNA, 19 nt, Artificial Sequence
  Description of Artificial Sequence: Synthetic oligonucleotide
  Sense strand starting at position 924 of SEQ ID NO: 915836
gcuauuuccuguuacgaaa

SEQ ID NO: 1109843 - RNA, 19 nt, Artificial Sequence
  Description of Artificial Sequence: Synthetic oligonucleotide
  Antisense strand to SEQ ID NO: 1109842
uuucguaacaggaaauagc

SEQ ID NO: 1109844 - RNA, 19 nt, Artificial Sequence
  Description of Artificial Sequence: Synthetic oligonucleotide
  Sense strand starting at position 927 of SEQ ID NO: 915836
auuuccuguuacgaaauaa

SEQ ID NO: 1109845 - RNA, 19 nt, Artificial Sequence
  Description of Artificial Sequence: Synthetic oligonucleotide
  Antisense strand to SEQ ID NO: 1109844
uuauuucguaacaggaaau

SEQ ID NO: 1109846 - RNA, 19 nt, Artificial Sequence
  Description of Artificial Sequence: Synthetic oligonucleotide
  Sense strand starting at position 2996 of SEQ ID NO: 915836
augagauagcaguaguauc

SEQ ID NO: 1109847 - RNA, 19 nt, Artificial Sequence
  Description of Artificial Sequence: Synthetic oligonucleotide
  Antisense strand to SEQ ID NO: 1109846
gauacuacugcuaucucau

SEQ ID NO: 1109848 - RNA, 19 nt, Artificial Sequence
  Description of Artificial Sequence: Synthetic oligonucleotide
  Sense strand starting at position 3051 of SEQ ID NO: 915836
cuaaacugcucaguaaaug

SEQ ID NO: 1109849 - RNA, 19 nt, Artificial Sequence
  Description of Artificial Sequence: Synthetic oligonucleotide
  Antisense strand to SEQ ID NO: 1109848
cauuuacugagcaguuuag

SEQ ID NO: 1109850 - RNA, 19 nt, Artificial Sequence
  Description of Artificial Sequence: Synthetic oligonucleotide
  Sense strand starting at position 3059 of SEQ ID NO: 915836
cucaguaaauguuaguaca

SEQ ID NO: 1109851 - RNA, 19 nt, Artificial Sequence
  Description of Artificial Sequence: Synthetic oligonucleotide
  Antisense strand to SEQ ID NO: 1109850
uguacuaacauuuacugag

SEQ ID NO: 1109852 - RNA, 19 nt, Artificial Sequence
  Description of Artificial Sequence: Synthetic oligonucleotide
  Sense strand starting at position 3491 of SEQ ID NO: 915836
uacauuuccuccgagagug

SEQ ID NO: 1109853 - RNA, 19 nt, Artificial Sequence
  Description of Artificial Sequence: Synthetic oligonucleotide
  Antisense strand to SEQ ID NO: 1109852
cacucucggaggaaaugua

SEQ ID NO: 1109854 - RNA, 19 nt, Artificial Sequence
  Description of Artificial Sequence: Synthetic oligonucleotide
  Sense strand starting at position 3736 of SEQ ID NO: 915836
gaguccuuagcgggcuaga

SEQ ID NO: 1109855 - RNA, 19 nt, Artificial Sequence
  Description of Artificial Sequence: Synthetic oligonucleotide
  Antisense strand to SEQ ID NO: 1109854
ucuagcccgcuaaggacuc

SEQ ID NO: 1109856 - RNA, 19 nt, Artificial Sequence
  Description of Artificial Sequence: Synthetic oligonucleotide
  Sense strand starting at position 284 of SEQ ID NO: 915837
gcauuagcccgugaacaaa

SEQ ID NO: 1109857 - RNA, 19 nt, Artificial Sequence
  Description of Artificial Sequence: Synthetic oligonucleotide
  Antisense strand to SEQ ID NO: 1109856
uuuguucacgggcuaaugc

SEQ ID NO: 1109858 - RNA, 19 nt, Artificial Sequence
  Description of Artificial Sequence: Synthetic oligonucleotide
  Sense strand starting at position 336 of SEQ ID NO: 915837
aauaucaaagccggagaua

SEQ ID NO: 1109859 - RNA, 19 nt, Artificial Sequence
  Description of Artificial Sequence: Synthetic oligonucleotide
  Antisense strand to SEQ ID NO: 1109858
uaucuccggcuuugauauu

SEQ ID NO: 1109860 - RNA, 19 nt, Artificial Sequence
  Description of Artificial Sequence: Synthetic oligonucleotide
  Sense strand starting at position 400 of SEQ ID NO: 915837
gacugucugguuuauuaaa

SEQ ID NO: 1109861 - RNA, 19 nt, Artificial Sequence
  Description of Artificial Sequence: Synthetic oligonucleotide
  Antisense strand to SEQ ID NO: 1109860
uuuaauaaaccagacaguc

SEQ ID NO: 1109862 - RNA, 19 nt, Artificial Sequence
  Description of Artificial Sequence: Synthetic oligonucleotide
  Sense strand starting at position 409 of SEQ ID NO: 915837
guuuauuaaagacgacuga

SEQ ID NO: 1109863 - RNA, 19 nt, Artificial Sequence
  Description of Artificial Sequence: Synthetic oligonucleotide
  Antisense strand to SEQ ID NO: 1109862
ucagucgucuuuaauaaac

SEQ ID NO: 1109864 - RNA, 19 nt, Artificial Sequence
  Description of Artificial Sequence: Synthetic oligonucleotide
  Sense strand starting at position 487 of SEQ ID NO: 915837
cucccauugcuggaagguu

SEQ ID NO: 1109865 - RNA, 19 nt, Artificial Sequence
  Description of Artificial Sequence: Synthetic oligonucleotide
  Antisense strand to SEQ ID NO: 1109864
aaccuuccagcaaugggag

SEQ ID NO: 1109866 - RNA, 19 nt, Artificial Sequence
  Description of Artificial Sequence: Synthetic oligonucleotide
  Sense strand starting at position 578 of SEQ ID NO: 915837
gauccaucugugggucaau

SEQ ID NO: 1109867 - RNA, 19 nt, Artificial Sequence
  Description of Artificial Sequence: Synthetic oligonucleotide
  Antisense strand to SEQ ID NO: 1109866
auugacccacagauggauc

SEQ ID NO: 1109868 - RNA, 19 nt, Artificial Sequence
  Description of Artificial Sequence: Synthetic oligonucleotide
  Sense strand starting at position 579 of SEQ ID NO: 915837
auccaucugugggucaaua

SEQ ID NO: 1109869 - RNA, 19 nt, Artificial Sequence
  Description of Artificial Sequence: Synthetic oligonucleotide
  Antisense strand to SEQ ID NO: 1109868
uauugacccacagauggau

SEQ ID NO: 1109870 - RNA, 19 nt, Artificial Sequence
  Description of Artificial Sequence: Synthetic oligonucleotide
  Sense strand starting at position 581 of SEQ ID NO: 915837
ccaucugugggucaauaau

SEQ ID NO: 1109871 - RNA, 19 nt, Artificial Sequence
  Description of Artificial Sequence: Synthetic oligonucleotide
  Antisense strand to SEQ ID NO: 1109870
auuauugacccacagaugg

SEQ ID NO: 1109872 - RNA, 19 nt, Artificial Sequence
  Description of Artificial Sequence: Synthetic oligonucleotide
  Sense strand starting at position 659 of SEQ ID NO: 915837
cgccaagacucucuuaaau

SEQ ID NO: 1109873 - RNA, 19 nt, Artificial Sequence
  Description of Artificial Sequence: Synthetic oligonucleotide
  Antisense strand to SEQ ID NO: 1109872
auuuaagagagucuuggcg

SEQ ID NO: 1109874 - RNA, 19 nt, Artificial Sequence
  Description of Artificial Sequence: Synthetic oligonucleotide
  Sense strand starting at position 738 of SEQ ID NO: 915837
cagcgaagugucccgcaaa

SEQ ID NO: 1109875 - RNA, 19 nt, Artificial Sequence
  Description of Artificial Sequence: Synthetic oligonucleotide
  Antisense strand to SEQ ID NO: 1109874
uuugcgggacacuucgcug

SEQ ID NO: 1109876 - RNA, 19 nt, Artificial Sequence
  Description of Artificial Sequence: Synthetic oligonucleotide
  Sense strand starting at position 870 of SEQ ID NO: 915837
cguguaggaagguaaauaa

SEQ ID NO: 1109877 - RNA, 19 nt, Artificial Sequence
  Description of Artificial Sequence: Synthetic oligonucleotide
  Antisense strand to SEQ ID NO: 1109876
uuauuuaccuuccuacacg

SEQ ID NO: 1109878 - RNA, 19 nt, Artificial Sequence
  Description of Artificial Sequence: Synthetic oligonucleotide
  Sense strand starting at position 1084 of SEQ ID NO: 915837
guuccauaggguuagggau

SEQ ID NO: 1109879 - RNA, 19 nt, Artificial Sequence
  Description of Artificial Sequence: Synthetic oligonucleotide
  Antisense strand to SEQ ID NO: 1109878
aucccuaacccuauggaac

SEQ ID NO: 1109880 - RNA, 19 nt, Artificial Sequence
  Description of Artificial Sequence: Synthetic oligonucleotide
  Sense strand starting at position 1406 of SEQ ID NO: 915837
cacagucuuggcgggagaa

SEQ ID NO: 1109881 - RNA, 19 nt, Artificial Sequence
  Description of Artificial Sequence: Synthetic oligonucleotide
  Antisense strand to SEQ ID NO: 1109880
uucucccgccaagacugug

SEQ ID NO: 1109882 - RNA, 19 nt, Artificial Sequence
  Description of Artificial Sequence: Synthetic oligonucleotide
  Sense strand starting at position 1407 of SEQ ID NO: 915837
acagucuuggcgggagaaa

SEQ ID NO: 1109883 - RNA, 19 nt, Artificial Sequence
  Description of Artificial Sequence: Synthetic oligonucleotide
  Antisense strand to SEQ ID NO: 1109882
uuucucccgccaagacugu

SEQ ID NO: 1109884 - RNA, 19 nt, Artificial Sequence
  Description of Artificial Sequence: Synthetic oligonucleotide
  Sense strand starting at position 1408 of SEQ ID NO: 915837
cagucuuggcgggagaaag

SEQ ID NO: 1109885 - RNA, 19 nt, Artificial Sequence
  Description of Artificial Sequence: Synthetic oligonucleotide
  Antisense strand to SEQ ID NO: 1109884
cuuucucccgccaagacug

SEQ ID NO: 1109886 - RNA, 19 nt, Artificial Sequence
  Description of Artificial Sequence: Synthetic oligonucleotide
  Sense strand starting at position 2267 of SEQ ID NO: 915837
agugcagaauuaucuuauc

SEQ ID NO: 1109887 - RNA, 19 nt, Artificial Sequence
  Description of Artificial Sequence: Synthetic oligonucleotide
  Antisense strand to SEQ ID NO: 1109886
gauaagauaauucugcacu

SEQ ID NO: 1109888 - RNA, 19 nt, Artificial Sequence
  Description of Artificial Sequence: Synthetic oligonucleotide
  Sense strand starting at position 2272 of SEQ ID NO: 915837
agaauuaucuuaucagagu

SEQ ID NO: 1109889 - RNA, 19 nt, Artificial Sequence
  Description of Artificial Sequence: Synthetic oligonucleotide
  Antisense strand to SEQ ID NO: 1109888
acucugauaagauaauucu

SEQ ID NO: 1109890 - RNA, 19 nt, Artificial Sequence
  Description of Artificial Sequence: Synthetic oligonucleotide
  Sense strand starting at position 2329 of SEQ ID NO: 915837
gcguguuccaguuccucca

SEQ ID NO: 1109891 - RNA, 19 nt, Artificial Sequence
  Description of Artificial Sequence: Synthetic oligonucleotide
  Antisense strand to SEQ ID NO: 1109890
uggaggaacuggaacacgc

SEQ ID NO: 1109892 - RNA, 19 nt, Artificial Sequence
  Description of Artificial Sequence: Synthetic oligonucleotide
  Sense strand starting at position 2498 of SEQ ID NO: 915837
agcaaagcucuuuauugau

SEQ ID NO: 1109893 - RNA, 19 nt, Artificial Sequence
  Description of Artificial Sequence: Synthetic oligonucleotide
  Antisense strand to SEQ ID NO: 1109892
aucaauaaagagcuuugcu

SEQ ID NO: 1109894 - RNA, 19 nt, Artificial Sequence
  Description of Artificial Sequence: Synthetic oligonucleotide
  Sense strand starting at position 2505 of SEQ ID NO: 915837
cucuuuauugaugacagua

SEQ ID NO: 1109895 - RNA, 19 nt, Artificial Sequence
  Description of Artificial Sequence: Synthetic oligonucleotide
  Antisense strand to SEQ ID NO: 1109894
uacugucaucaauaaagag

SEQ ID NO: 1109896 - RNA, 19 nt, Artificial Sequence
  Description of Artificial Sequence: Synthetic oligonucleotide
  Sense strand starting at position 2579 of SEQ ID NO: 915837
gguaaacaauuggcauuau

SEQ ID NO: 1109897 - RNA, 19 nt, Artificial Sequence
  Description of Artificial Sequence: Synthetic oligonucleotide
  Antisense strand to SEQ ID NO: 1109896
auaaugccaauuguuuacc

SEQ ID NO: 1109898 - RNA, 19 nt, Artificial Sequence
  Description of Artificial Sequence: Synthetic oligonucleotide
  Sense strand starting at position 2759 of SEQ ID NO: 915837
ggcccauccauaugaugga

SEQ ID NO: 1109899 - RNA, 19 nt, Artificial Sequence
  Description of Artificial Sequence: Synthetic oligonucleotide
  Antisense strand to SEQ ID NO: 1109898
uccaucauauggaugggcc

SEQ ID NO: 1109900 - RNA, 19 nt, Artificial Sequence
  Description of Artificial Sequence: Synthetic oligonucleotide
  Sense strand starting at position 2901 of SEQ ID NO: 915837
gauaauauguguuuauagg

SEQ ID NO: 1109901 - RNA, 19 nt, Artificial Sequence
  Description of Artificial Sequence: Synthetic oligonucleotide
  Antisense strand to SEQ ID NO: 1109900
ccuauaaacacauauuauc

SEQ ID NO: 1109902 - RNA, 19 nt, Artificial Sequence
  Description of Artificial Sequence: Synthetic oligonucleotide
  Sense strand starting at position 3093 of SEQ ID NO: 915837
caguuucuuuagcuugaga

SEQ ID NO: 1109903 - RNA, 19 nt, Artificial Sequence
  Description of Artificial Sequence: Synthetic oligonucleotide
  Antisense strand to SEQ ID NO: 1109902
ucucaagcuaaagaaacug

SEQ ID NO: 1109904 - RNA, 19 nt, Artificial Sequence
  Description of Artificial Sequence: Synthetic oligonucleotide
  Sense strand starting at position 3095 of SEQ ID NO: 915837
guuucuuuagcuugagaaa

SEQ ID NO: 1109905 - RNA, 19 nt, Artificial Sequence
  Description of Artificial Sequence: Synthetic oligonucleotide
  Antisense strand to SEQ ID NO: 1109904
uuucucaagcuaaagaaac

SEQ ID NO: 1109906 - RNA, 19 nt, Artificial Sequence
  Description of Artificial Sequence: Synthetic oligonucleotide
  Sense strand starting at position 3096 of SEQ ID NO: 915837
uuucuuuagcuugagaaag

SEQ ID NO: 1109907 - RNA, 19 nt, Artificial Sequence
  Description of Artificial Sequence: Synthetic oligonucleotide
  Antisense strand to SEQ ID NO: 1109906
cuuucucaagcuaaagaaa

SEQ ID NO: 1109908 - RNA, 19 nt, Artificial Sequence
  Description of Artificial Sequence: Synthetic oligonucleotide
  Sense strand starting at position 3179 of SEQ ID NO: 915837
ccuacuaacuagcugugaa

SEQ ID NO: 1109909 - RNA, 19 nt, Artificial Sequence
  Description of Artificial Sequence: Synthetic oligonucleotide
  Antisense strand to SEQ ID NO: 1109908
uucacagcuaguuaguagg

SEQ ID NO: 1109910 - RNA, 19 nt, Artificial Sequence
  Description of Artificial Sequence: Synthetic oligonucleotide
  Sense strand starting at position 3210 of SEQ ID NO: 915837
guuugaaccucucuaagca

SEQ ID NO: 1109911 - RNA, 19 nt, Artificial Sequence
  Description of Artificial Sequence: Synthetic oligonucleotide
  Antisense strand to SEQ ID NO: 1109910
ugcuuagagagguucaaac

SEQ ID NO: 1109912 - RNA, 19 nt, Artificial Sequence
  Description of Artificial Sequence: Synthetic oligonucleotide
  Sense strand starting at position 3278 of SEQ ID NO: 915837
ggagaacaguugcuuaaau

SEQ ID NO: 1109913 - RNA, 19 nt, Artificial Sequence
  Description of Artificial Sequence: Synthetic oligonucleotide
  Antisense strand to SEQ ID NO: 1109912
auuuaagcaacuguucucc

SEQ ID NO: 1109914 - RNA, 19 nt, Artificial Sequence
  Description of Artificial Sequence: Synthetic oligonucleotide
  Sense strand starting at position 3279 of SEQ ID NO: 915837
gagaacaguugcuuaaaug

SEQ ID NO: 1109915 - RNA, 19 nt, Artificial Sequence
  Description of Artificial Sequence: Synthetic oligonucleotide
  Antisense strand to SEQ ID NO: 1109914
cauuuaagcaacuguucuc

SEQ ID NO: 1109916 - RNA, 19 nt, Artificial Sequence
  Description of Artificial Sequence: Synthetic oligonucleotide
  Sense strand starting at position 3416 of SEQ ID NO: 915837
ggaggcauugucuacaagu

SEQ ID NO: 1109917 - RNA, 19 nt, Artificial Sequence
  Description of Artificial Sequence: Synthetic oligonucleotide
  Antisense strand to SEQ ID NO: 1109916
acuuguagacaaugccucc

SEQ ID NO: 1109918 - RNA, 19 nt, Artificial Sequence
  Description of Artificial Sequence: Synthetic oligonucleotide
  Sense strand starting at position 3427 of SEQ ID NO: 915837
cuacaaguuggucagugua

SEQ ID NO: 1109919 - RNA, 19 nt, Artificial Sequence
  Description of Artificial Sequence: Synthetic oligonucleotide
  Antisense strand to SEQ ID NO: 1109918
uacacugaccaacuuguag

SEQ ID NO: 1109920 - RNA, 19 nt, Artificial Sequence
  Description of Artificial Sequence: Synthetic oligonucleotide
  Sense strand starting at position 3443 of SEQ ID NO: 915837
guagcuggaugaguaaaua

SEQ ID NO: 1109921 - RNA, 19 nt, Artificial Sequence
  Description of Artificial Sequence: Synthetic oligonucleotide
  Antisense strand to SEQ ID NO: 1109920
uauuuacucauccagcuac

SEQ ID NO: 1109922 - RNA, 19 nt, Artificial Sequence
  Description of Artificial Sequence: Synthetic oligonucleotide
  Sense strand starting at position 3752 of SEQ ID NO: 915837
guguuguuugguuugcgga

SEQ ID NO: 1109923 - RNA, 19 nt, Artificial Sequence
  Description of Artificial Sequence: Synthetic oligonucleotide
  Antisense strand to SEQ ID NO: 1109922
uccgcaaaccaaacaacac

SEQ ID NO: 1109924 - RNA, 19 nt, Artificial Sequence
  Description of Artificial Sequence: Synthetic oligonucleotide
  Sense strand starting at position 3878 of SEQ ID NO: 915837
aauccaguaugagugcaaa

SEQ ID NO: 1109925 - RNA, 19 nt, Artificial Sequence
  Description of Artificial Sequence: Synthetic oligonucleotide
  Antisense strand to SEQ ID NO: 1109924
uuugcacucauacuggauu

SEQ ID NO: 1109926 - RNA, 19 nt, Artificial Sequence
  Description of Artificial Sequence: Synthetic oligonucleotide
  Sense strand starting at position 3881 of SEQ ID NO: 915837
ccaguaugagugcaaauga

SEQ ID NO: 1109927 - RNA, 19 nt, Artificial Sequence
  Description of Artificial Sequence: Synthetic oligonucleotide
  Antisense strand to SEQ ID NO: 1109926
ucauuugcacucauacugg

SEQ ID NO: 1109928 - RNA, 19 nt, Artificial Sequence
  Description of Artificial Sequence: Synthetic oligonucleotide
  Sense strand starting at position 3888 of SEQ ID NO: 915837
gagugcaaaugaucuuaau

SEQ ID NO: 1109929 - RNA, 19 nt, Artificial Sequence
  Description of Artificial Sequence: Synthetic oligonucleotide
  Antisense strand to SEQ ID NO: 1109928
auuaagaucauuugcacuc

SEQ ID NO: 1109930 - RNA, 19 nt, Artificial Sequence
  Description of Artificial Sequence: Synthetic oligonucleotide
  Sense strand starting at position 3897 of SEQ ID NO: 915837
ugaucuuaauugguuacau

SEQ ID NO: 1109931 - RNA, 19 nt, Artificial Sequence
  Description of Artificial Sequence: Synthetic oligonucleotide
  Antisense strand to SEQ ID NO: 1109930
auguaaccaauuaagauca

SEQ ID NO: 1109932 - RNA, 19 nt, Artificial Sequence
  Description of Artificial Sequence: Synthetic oligonucleotide
  Sense strand starting at position 3922 of SEQ ID NO: 915837
cuaagauccucguuccaag

SEQ ID NO: 1109933 - RNA, 19 nt, Artificial Sequence
  Description of Artificial Sequence: Synthetic oligonucleotide
  Antisense strand to SEQ ID NO: 1109932
cuuggaacgaggaucuuag

SEQ ID NO: 1109934 - RNA, 19 nt, Artificial Sequence
  Description of Artificial Sequence: Synthetic oligonucleotide
  Sense strand starting at position 3942 of SEQ ID NO: 915837
aagauuacauucgcagguu

SEQ ID NO: 1109935 - RNA, 19 nt, Artificial Sequence
  Description of Artificial Sequence: Synthetic oligonucleotide
  Antisense strand to SEQ ID NO: 1109934
aaccugcgaauguaaucuu

SEQ ID NO: 1109936 - RNA, 19 nt, Artificial Sequence
  Description of Artificial Sequence: Synthetic oligonucleotide
  Sense strand starting at position 117 of SEQ ID NO: 915838
agguucuuccuguacugau

SEQ ID NO: 1109937 - RNA, 19 nt, Artificial Sequence
  Description of Artificial Sequence: Synthetic oligonucleotide
  Antisense strand to SEQ ID NO: 1109936
aucaguacaggaagaaccu

SEQ ID NO: 1109938 - RNA, 19 nt, Artificial Sequence
  Description of Artificial Sequence: Synthetic oligonucleotide
  Sense strand starting at position 157 of SEQ ID NO: 915838
uggauaaaguccucagucu

SEQ ID NO: 1109939 - RNA, 19 nt, Artificial Sequence
  Description of Artificial Sequence: Synthetic oligonucleotide
  Antisense strand to SEQ ID NO: 1109938
agacugaggacuuuaucca

SEQ ID NO: 1109940 - RNA, 19 nt, Artificial Sequence
  Description of Artificial Sequence: Synthetic oligonucleotide
  Sense strand starting at position 158 of SEQ ID NO: 915838
ggauaaaguccucagucua

SEQ ID NO: 1109941 - RNA, 19 nt, Artificial Sequence
  Description of Artificial Sequence: Synthetic oligonucleotide
  Antisense strand to SEQ ID NO: 1109940
uagacugaggacuuuaucc

SEQ ID NO: 1109942 - RNA, 19 nt, Artificial Sequence
  Description of Artificial Sequence: Synthetic oligonucleotide
  Sense strand starting at position 261 of SEQ ID NO: 915838
cccagaguugcguaagaau

SEQ ID NO: 1109943 - RNA, 19 nt, Artificial Sequence
  Description of Artificial Sequence: Synthetic oligonucleotide
  Antisense strand to SEQ ID NO: 1109942
auucuuacgcaacucuggg

SEQ ID NO: 1109944 - RNA, 19 nt, Artificial Sequence
  Description of Artificial Sequence: Synthetic oligonucleotide
  Sense strand starting at position 321 of SEQ ID NO: 915838
ccuccagacugucuuugau

SEQ ID NO: 1109945 - RNA, 19 nt, Artificial Sequence
  Description of Artificial Sequence: Synthetic oligonucleotide
  Antisense strand to SEQ ID NO: 1109944
aucaaagacagucuggagg

SEQ ID NO: 1109946 - RNA, 19 nt, Artificial Sequence
  Description of Artificial Sequence: Synthetic oligonucleotide
  Sense strand starting at position 324 of SEQ ID NO: 915838
ccagacugucuuugauuag

SEQ ID NO: 1109947 - RNA, 19 nt, Artificial Sequence
  Description of Artificial Sequence: Synthetic oligonucleotide
  Antisense strand to SEQ ID NO: 1109946
cuaaucaaagacagucugg

SEQ ID NO: 1109948 - RNA, 19 nt, Artificial Sequence
  Description of Artificial Sequence: Synthetic oligonucleotide
  Sense strand starting at position 328 of SEQ ID NO: 915838
acugucuuugauuagcaca

SEQ ID NO: 1109949 - RNA, 19 nt, Artificial Sequence
  Description of Artificial Sequence: Synthetic oligonucleotide
  Antisense strand to SEQ ID NO: 1109948
ugugcuaaucaaagacagu

SEQ ID NO: 1109950 - RNA, 19 nt, Artificial Sequence
  Description of Artificial Sequence: Synthetic oligonucleotide
  Sense strand starting at position 333 of SEQ ID NO: 915838
cuuugauuagcacagguau

SEQ ID NO: 1109951 - RNA, 19 nt, Artificial Sequence
  Description of Artificial Sequence: Synthetic oligonucleotide
  Antisense strand to SEQ ID NO: 1109950
auaccugugcuaaucaaag

SEQ ID NO: 1109952 - RNA, 19 nt, Artificial Sequence
  Description of Artificial Sequence: Synthetic oligonucleotide
  Sense strand starting at position 469 of SEQ ID NO: 915838
ucaaucacagaguauguuu

SEQ ID NO: 1109953 - RNA, 19 nt, Artificial Sequence
  Description of Artificial Sequence: Synthetic oligonucleotide
  Antisense strand to SEQ ID NO: 1109952
aaacauacucugugauuga

SEQ ID NO: 1109954 - RNA, 19 nt, Artificial Sequence
  Description of Artificial Sequence: Synthetic oligonucleotide
  Sense strand starting at position 537 of SEQ ID NO: 915838
gucagaaacugugucuaaa

SEQ ID NO: 1109955 - RNA, 19 nt, Artificial Sequence
  Description of Artificial Sequence: Synthetic oligonucleotide
  Antisense strand to SEQ ID NO: 1109954
uuuagacacaguuucugac

SEQ ID NO: 1109956 - RNA, 19 nt, Artificial Sequence
  Description of Artificial Sequence: Synthetic oligonucleotide
  Sense strand starting at position 571 of SEQ ID NO: 915838
acuggcuaucaguaaguca

SEQ ID NO: 1109957 - RNA, 19 nt, Artificial Sequence
  Description of Artificial Sequence: Synthetic oligonucleotide
  Antisense strand to SEQ ID NO: 1109956
ugacuuacugauagccagu

SEQ ID NO: 1109958 - RNA, 19 nt, Artificial Sequence
  Description of Artificial Sequence: Synthetic oligonucleotide
  Sense strand starting at position 799 of SEQ ID NO: 915838
ccaggagcuguuuaaacaa

SEQ ID NO: 1109959 - RNA, 19 nt, Artificial Sequence
  Description of Artificial Sequence: Synthetic oligonucleotide
  Antisense strand to SEQ ID NO: 1109958
uuguuuaaacagcuccugg

SEQ ID NO: 1109960 - RNA, 19 nt, Artificial Sequence
  Description of Artificial Sequence: Synthetic oligonucleotide
  Sense strand starting at position 888 of SEQ ID NO: 915838
caaggcuuggcuugaaauu

SEQ ID NO: 1109961 - RNA, 19 nt, Artificial Sequence
  Description of Artificial Sequence: Synthetic oligonucleotide
  Antisense strand to SEQ ID NO: 1109960
aauuucaagccaagccuug

SEQ ID NO: 1109962 - RNA, 19 nt, Artificial Sequence
  Description of Artificial Sequence: Synthetic oligonucleotide
  Sense strand starting at position 889 of SEQ ID NO: 915838
aaggcuuggcuugaaauua

SEQ ID NO: 1109963 - RNA, 19 nt, Artificial Sequence
  Description of Artificial Sequence: Synthetic oligonucleotide
  Antisense strand to SEQ ID NO: 1109962
uaauuucaagccaagccuu

SEQ ID NO: 1109964 - RNA, 19 nt, Artificial Sequence
  Description of Artificial Sequence: Synthetic oligonucleotide
  Sense strand starting at position 940 of SEQ ID NO: 915838
uuccuaugagaaugucaaa

SEQ ID NO: 1109965 - RNA, 19 nt, Artificial Sequence
  Description of Artificial Sequence: Synthetic oligonucleotide
  Antisense strand to SEQ ID NO: 1109964
uuugacauucucauaggaa

SEQ ID NO: 1109966 - RNA, 19 nt, Artificial Sequence
  Description of Artificial Sequence: Synthetic oligonucleotide
  Sense strand starting at position 977 of SEQ ID NO: 915838
ugucuugagaaaugaaugu

SEQ ID NO: 1109967 - RNA, 19 nt, Artificial Sequence
  Description of Artificial Sequence: Synthetic oligonucleotide
  Antisense strand to SEQ ID NO: 1109966
acauucauuucucaagaca

SEQ ID NO: 1109968 - RNA, 19 nt, Artificial Sequence
  Description of Artificial Sequence: Synthetic oligonucleotide
  Sense strand starting at position 1073 of SEQ ID NO: 915838
cuaucaaacggaugcuauu

SEQ ID NO: 1109969 - RNA, 19 nt, Artificial Sequence
  Description of Artificial Sequence: Synthetic oligonucleotide
  Antisense strand to SEQ ID NO: 1109968
aauagcauccguuugauag

SEQ ID NO: 1109970 - RNA, 19 nt, Artificial Sequence
  Description of Artificial Sequence: Synthetic oligonucleotide
  Sense strand starting at position 1082 of SEQ ID NO: 915838
ggaugcuauuucuaacuga

SEQ ID NO: 1109971 - RNA, 19 nt, Artificial Sequence
  Description of Artificial Sequence: Synthetic oligonucleotide
  Antisense strand to SEQ ID NO: 1109970
ucaguuagaaauagcaucc

SEQ ID NO: 1109972 - RNA, 19 nt, Artificial Sequence
  Description of Artificial Sequence: Synthetic oligonucleotide
  Sense strand starting at position 1426 of SEQ ID NO: 915838
guuuaaaggcccuggagaa

SEQ ID NO: 1109973 - RNA, 19 nt, Artificial Sequence
  Description of Artificial Sequence: Synthetic oligonucleotide
  Antisense strand to SEQ ID NO: 1109972
uucuccagggccuuuaaac

SEQ ID NO: 1109974 - RNA, 19 nt, Artificial Sequence
  Description of Artificial Sequence: Synthetic oligonucleotide
  Sense strand starting at position 1427 of SEQ ID NO: 915838
uuuaaaggcccuggagaau

SEQ ID NO: 1109975 - RNA, 19 nt, Artificial Sequence
  Description of Artificial Sequence: Synthetic oligonucleotide
  Antisense strand to SEQ ID NO: 1109974
auucuccagggccuuuaaa

SEQ ID NO: 1109976 - RNA, 19 nt, Artificial Sequence
  Description of Artificial Sequence: Synthetic oligonucleotide
  Sense strand starting at position 1439 of SEQ ID NO: 915838
ggagaauguuugcuggaca

SEQ ID NO: 1109977 - RNA, 19 nt, Artificial Sequence
  Description of Artificial Sequence: Synthetic oligonucleotide
  Antisense strand to SEQ ID NO: 1109976
uguccagcaaacauucucc

SEQ ID NO: 1109978 - RNA, 19 nt, Artificial Sequence
  Description of Artificial Sequence: Synthetic oligonucleotide
  Sense strand starting at position 1442 of SEQ ID NO: 915838
gaauguuugcuggacacac

SEQ ID NO: 1109979 - RNA, 19 nt, Artificial Sequence
  Description of Artificial Sequence: Synthetic oligonucleotide
  Antisense strand to SEQ ID NO: 1109978
guguguccagcaaacauuc

SEQ ID NO: 1109980 - RNA, 19 nt, Artificial Sequence
  Description of Artificial Sequence: Synthetic oligonucleotide
  Sense strand starting at position 1575 of SEQ ID NO: 915838
ucagaaccacuuggauuau

SEQ ID NO: 1109981 - RNA, 19 nt, Artificial Sequence
  Description of Artificial Sequence: Synthetic oligonucleotide
  Antisense strand to SEQ ID NO: 1109980
auaauccaagugguucuga

SEQ ID NO: 1109982 - RNA, 19 nt, Artificial Sequence
  Description of Artificial Sequence: Synthetic oligonucleotide
  Sense strand starting at position 1702 of SEQ ID NO: 915838
auuccuauaugaggauuua

SEQ ID NO: 1109983 - RNA, 19 nt, Artificial Sequence
  Description of Artificial Sequence: Synthetic oligonucleotide
  Antisense strand to SEQ ID NO: 1109982
uaaauccucauauaggaau

SEQ ID NO: 1109984 - RNA, 19 nt, Artificial Sequence
  Description of Artificial Sequence: Synthetic oligonucleotide
  Sense strand starting at position 1997 of SEQ ID NO: 915838
gcauuagcccgugaacaaa

SEQ ID NO: 1109985 - RNA, 19 nt, Artificial Sequence
  Description of Artificial Sequence: Synthetic oligonucleotide
  Antisense strand to SEQ ID NO: 1109984
uuuguucacgggcuaaugc

SEQ ID NO: 1109986 - RNA, 19 nt, Artificial Sequence
  Description of Artificial Sequence: Synthetic oligonucleotide
  Sense strand starting at position 2049 of SEQ ID NO: 915838
aauaucaaagccggagaua

SEQ ID NO: 1109987 - RNA, 19 nt, Artificial Sequence
  Description of Artificial Sequence: Synthetic oligonucleotide
  Antisense strand to SEQ ID NO: 1109986
uaucuccggcuuugauauu

SEQ ID NO: 1109988 - RNA, 19 nt, Artificial Sequence
  Description of Artificial Sequence: Synthetic oligonucleotide
  Sense strand starting at position 2113 of SEQ ID NO: 915838
gacugucugguuuauuaaa

SEQ ID NO: 1109989 - RNA, 19 nt, Artificial Sequence
  Description of Artificial Sequence: Synthetic oligonucleotide
  Antisense strand to SEQ ID NO: 1109988
uuuaauaaaccagacaguc

SEQ ID NO: 1109990 - RNA, 19 nt, Artificial Sequence
  Description of Artificial Sequence: Synthetic oligonucleotide
  Sense strand starting at position 2122 of SEQ ID NO: 915838
guuuauuaaagacgacuga

SEQ ID NO: 1109991 - RNA, 19 nt, Artificial Sequence
  Description of Artificial Sequence: Synthetic oligonucleotide
  Antisense strand to SEQ ID NO: 1109990
ucagucgucuuuaauaaac

SEQ ID NO: 1109992 - RNA, 19 nt, Artificial Sequence
  Description of Artificial Sequence: Synthetic oligonucleotide
  Sense strand starting at position 2200 of SEQ ID NO: 915838
cucccauugcuggaagguu

SEQ ID NO: 1109993 - RNA, 19 nt, Artificial Sequence
  Description of Artificial Sequence: Synthetic oligonucleotide
  Antisense strand to SEQ ID NO: 1109992
aaccuuccagcaaugggag

SEQ ID NO: 1109994 - RNA, 19 nt, Artificial Sequence
  Description of Artificial Sequence: Synthetic oligonucleotide
  Sense strand starting at position 2291 of SEQ ID NO: 915838
gauccaucugugggucaau

SEQ ID NO: 1109995 - RNA, 19 nt, Artificial Sequence
  Description of Artificial Sequence: Synthetic oligonucleotide
  Antisense strand to SEQ ID NO: 1109994
auugacccacagauggauc

SEQ ID NO: 1109996 - RNA, 19 nt, Artificial Sequence
  Description of Artificial Sequence: Synthetic oligonucleotide
  Sense strand starting at position 2292 of SEQ ID NO: 915838
auccaucugugggucaaua

SEQ ID NO: 1109997 - RNA, 19 nt, Artificial Sequence
  Description of Artificial Sequence: Synthetic oligonucleotide
  Antisense strand to SEQ ID NO: 1109996
uauugacccacagauggau

SEQ ID NO: 1109998 - RNA, 19 nt, Artificial Sequence
  Description of Artificial Sequence: Synthetic oligonucleotide
  Sense strand starting at position 2294 of SEQ ID NO: 915838
ccaucugugggucaauaau

SEQ ID NO: 1109999 - RNA, 19 nt, Artificial Sequence
  Description of Artificial Sequence: Synthetic oligonucleotide
  Antisense strand to SEQ ID NO: 1109998
auuauugacccacagaugg

SEQ ID NO: 1110000 - RNA, 19 nt, Artificial Sequence
  Description of Artificial Sequence: Synthetic oligonucleotide
  Sense strand starting at position 2372 of SEQ ID NO: 915838
cgccaagacucucuuaaau

SEQ ID NO: 1110001 - RNA, 19 nt, Artificial Sequence
  Description of Artificial Sequence: Synthetic oligonucleotide
  Antisense strand to SEQ ID NO: 1110000
auuuaagagagucuuggcg

SEQ ID NO: 1110002 - RNA, 19 nt, Artificial Sequence
  Description of Artificial Sequence: Synthetic oligonucleotide
  Sense strand starting at position 2451 of SEQ ID NO: 915838
cagcgaagugucccgcaaa

SEQ ID NO: 1110003 - RNA, 19 nt, Artificial Sequence
  Description of Artificial Sequence: Synthetic oligonucleotide
  Antisense strand to SEQ ID NO: 1110002
uuugcgggacacuucgcug

SEQ ID NO: 1110004 - RNA, 19 nt, Artificial Sequence
  Description of Artificial Sequence: Synthetic oligonucleotide
  Sense strand starting at position 2583 of SEQ ID NO: 915838
cguguaggaagguaaauaa

SEQ ID NO: 1110005 - RNA, 19 nt, Artificial Sequence
  Description of Artificial Sequence: Synthetic oligonucleotide
  Antisense strand to SEQ ID NO: 1110004
uuauuuaccuuccuacacg

SEQ ID NO: 1110006 - RNA, 19 nt, Artificial Sequence
  Description of Artificial Sequence: Synthetic oligonucleotide
  Sense strand starting at position 2797 of SEQ ID NO: 915838
guuccauaggguuagggau

SEQ ID NO: 1110007 - RNA, 19 nt, Artificial Sequence
  Description of Artificial Sequence: Synthetic oligonucleotide
  Antisense strand to SEQ ID NO: 1110006
aucccuaacccuauggaac

SEQ ID NO: 1110008 - RNA, 19 nt, Artificial Sequence
  Description of Artificial Sequence: Synthetic oligonucleotide
  Sense strand starting at position 3119 of SEQ ID NO: 915838
cacagucuuggcgggagaa

SEQ ID NO: 1110009 - RNA, 19 nt, Artificial Sequence
  Description of Artificial Sequence: Synthetic oligonucleotide
  Antisense strand to SEQ ID NO: 1110008
uucucccgccaagacugug

SEQ ID NO: 1110010 - RNA, 19 nt, Artificial Sequence
  Description of Artificial Sequence: Synthetic oligonucleotide
  Sense strand starting at position 3120 of SEQ ID NO: 915838
acagucuuggcgggagaaa

SEQ ID NO: 1110011 - RNA, 19 nt, Artificial Sequence
  Description of Artificial Sequence: Synthetic oligonucleotide
  Antisense strand to SEQ ID NO: 1110010
uuucucccgccaagacugu

SEQ ID NO: 1110012 - RNA, 19 nt, Artificial Sequence
  Description of Artificial Sequence: Synthetic oligonucleotide
  Sense strand starting at position 3121 of SEQ ID NO: 915838
cagucuuggcgggagaaag

SEQ ID NO: 1110013 - RNA, 19 nt, Artificial Sequence
  Description of Artificial Sequence: Synthetic oligonucleotide
  Antisense strand to SEQ ID NO: 1110012
cuuucucccgccaagacug

SEQ ID NO: 1110014 - RNA, 19 nt, Artificial Sequence
  Description of Artificial Sequence: Synthetic oligonucleotide
  Sense strand starting at position 3980 of SEQ ID NO: 915838
agugcagaauuaucuuauc

SEQ ID NO: 1110015 - RNA, 19 nt, Artificial Sequence
  Description of Artificial Sequence: Synthetic oligonucleotide
  Antisense strand to SEQ ID NO: 1110014
gauaagauaauucugcacu

SEQ ID NO: 1110016 - RNA, 19 nt, Artificial Sequence
  Description of Artificial Sequence: Synthetic oligonucleotide
  Sense strand starting at position 127 of SEQ ID NO: 915839
uguugcugcccagaaauca

SEQ ID NO: 1110017 - RNA, 19 nt, Artificial Sequence
  Description of Artificial Sequence: Synthetic oligonucleotide
  Antisense strand to SEQ ID NO: 1110016
ugauuucugggcagcaaca

SEQ ID NO: 1110018 - RNA, 19 nt, Artificial Sequence
  Description of Artificial Sequence: Synthetic oligonucleotide
  Sense strand starting at position 151 of SEQ ID NO: 915839
uugccauaggcuuagucaa

SEQ ID NO: 1110019 - RNA, 19 nt, Artificial Sequence
  Description of Artificial Sequence: Synthetic oligonucleotide
  Antisense strand to SEQ ID NO: 1110018
uugacuaagccuauggcaa

SEQ ID NO: 1110020 - RNA, 19 nt, Artificial Sequence
  Description of Artificial Sequence: Synthetic oligonucleotide
  Sense strand starting at position 153 of SEQ ID NO: 915839
gccauaggcuuagucaaag

SEQ ID NO: 1110021 - RNA, 19 nt, Artificial Sequence
  Description of Artificial Sequence: Synthetic oligonucleotide
  Antisense strand to SEQ ID NO: 1110020
cuuugacuaagccuauggc

SEQ ID NO: 1110022 - RNA, 19 nt, Artificial Sequence
  Description of Artificial Sequence: Synthetic oligonucleotide
  Sense strand starting at position 201 of SEQ ID NO: 915839
agugguaugcccgaaaggu

SEQ ID NO: 1110023 - RNA, 19 nt, Artificial Sequence
  Description of Artificial Sequence: Synthetic oligonucleotide
  Antisense strand to SEQ ID NO: 1110022
accuuucgggcauaccacu

SEQ ID NO: 1110024 - RNA, 19 nt, Artificial Sequence
  Description of Artificial Sequence: Synthetic oligonucleotide
  Sense strand starting at position 210 of SEQ ID NO: 915839
cccgaaaggugcuuaucaa

SEQ ID NO: 1110025 - RNA, 19 nt, Artificial Sequence
  Description of Artificial Sequence: Synthetic oligonucleotide
  Antisense strand to SEQ ID NO: 1110024
uugauaagcaccuuucggg

SEQ ID NO: 1110026 - RNA, 19 nt, Artificial Sequence
  Description of Artificial Sequence: Synthetic oligonucleotide
  Sense strand starting at position 211 of SEQ ID NO: 915839
ccgaaaggugcuuaucaau

SEQ ID NO: 1110027 - RNA, 19 nt, Artificial Sequence
  Description of Artificial Sequence: Synthetic oligonucleotide
  Antisense strand to SEQ ID NO: 1110026
auugauaagcaccuuucgg

SEQ ID NO: 1110028 - RNA, 19 nt, Artificial Sequence
  Description of Artificial Sequence: Synthetic oligonucleotide
  Sense strand starting at position 318 of SEQ ID NO: 915839
ggagaagcgccauaucaag

SEQ ID NO: 1110029 - RNA, 19 nt, Artificial Sequence
  Description of Artificial Sequence: Synthetic oligonucleotide
  Antisense strand to SEQ ID NO: 1110028
cuugauauggcgcuucucc

SEQ ID NO: 1110030 - RNA, 19 nt, Artificial Sequence
  Description of Artificial Sequence: Synthetic oligonucleotide
  Sense strand starting at position 472 of SEQ ID NO: 915839
guggaacauccaggugaug

SEQ ID NO: 1110031 - RNA, 19 nt, Artificial Sequence
  Description of Artificial Sequence: Synthetic oligonucleotide
  Antisense strand to SEQ ID NO: 1110030
caucaccuggauguuccac

SEQ ID NO: 1110032 - RNA, 19 nt, Artificial Sequence
  Description of Artificial Sequence: Synthetic oligonucleotide
  Sense strand starting at position 530 of SEQ ID NO: 915839
caguguagcacagagguua

SEQ ID NO: 1110033 - RNA, 19 nt, Artificial Sequence
  Description of Artificial Sequence: Synthetic oligonucleotide
  Antisense strand to SEQ ID NO: 1110032
uaaccucugugcuacacug

SEQ ID NO: 1110034 - RNA, 19 nt, Artificial Sequence
  Description of Artificial Sequence: Synthetic oligonucleotide
  Sense strand starting at position 594 of SEQ ID NO: 915839
uugccacuuagagguauga

SEQ ID NO: 1110035 - RNA, 19 nt, Artificial Sequence
  Description of Artificial Sequence: Synthetic oligonucleotide
  Antisense strand to SEQ ID NO: 1110034
ucauaccucuaaguggcaa

SEQ ID NO: 1110036 - RNA, 19 nt, Artificial Sequence
  Description of Artificial Sequence: Synthetic oligonucleotide
  Sense strand starting at position 598 of SEQ ID NO: 915839
cacuuagagguaugaaauu

SEQ ID NO: 1110037 - RNA, 19 nt, Artificial Sequence
  Description of Artificial Sequence: Synthetic oligonucleotide
  Antisense strand to SEQ ID NO: 1110036
aauuucauaccucuaagug

SEQ ID NO: 1110038 - RNA, 19 nt, Artificial Sequence
  Description of Artificial Sequence: Synthetic oligonucleotide
  Sense strand starting at position 608 of SEQ ID NO: 915839
uaugaaauuugagacguua

SEQ ID NO: 1110039 - RNA, 19 nt, Artificial Sequence
  Description of Artificial Sequence: Synthetic oligonucleotide
  Antisense strand to SEQ ID NO: 1110038
uaacgucucaaauuucaua

SEQ ID NO: 1110040 - RNA, 19 nt, Artificial Sequence
  Description of Artificial Sequence: Synthetic oligonucleotide
  Sense strand starting at position 616 of SEQ ID NO: 915839
uugagacguuacuuaaacu

SEQ ID NO: 1110041 - RNA, 19 nt, Artificial Sequence
  Description of Artificial Sequence: Synthetic oligonucleotide
  Antisense strand to SEQ ID NO: 1110040
aguuuaaguaacgucucaa

SEQ ID NO: 1110042 - RNA, 19 nt, Artificial Sequence
  Description of Artificial Sequence: Synthetic oligonucleotide
  Sense strand starting at position 650 of SEQ ID NO: 915839
uucccaucauauguaaagu

SEQ ID NO: 1110043 - RNA, 19 nt, Artificial Sequence
  Description of Artificial Sequence: Synthetic oligonucleotide
  Antisense strand to SEQ ID NO: 1110042
acuuuacauaugaugggaa

SEQ ID NO: 1110044 - RNA, 19 nt, Artificial Sequence
  Description of Artificial Sequence: Synthetic oligonucleotide
  Sense strand starting at position 708 of SEQ ID NO: 915839
acaauuauuuagcagagua

SEQ ID NO: 1110045 - RNA, 19 nt, Artificial Sequence
  Description of Artificial Sequence: Synthetic oligonucleotide
  Antisense strand to SEQ ID NO: 1110044
uacucugcuaaauaauugu

SEQ ID NO: 1110046 - RNA, 19 nt, Artificial Sequence
  Description of Artificial Sequence: Synthetic oligonucleotide
  Sense strand starting at position 724 of SEQ ID NO: 915839
guauaaguaguacacagua

SEQ ID NO: 1110047 - RNA, 19 nt, Artificial Sequence
  Description of Artificial Sequence: Synthetic oligonucleotide
  Antisense strand to SEQ ID NO: 1110046
uacuguguacuacuuauac

SEQ ID NO: 1110048 - RNA, 19 nt, Artificial Sequence
  Description of Artificial Sequence: Synthetic oligonucleotide
  Sense strand starting at position 904 of SEQ ID NO: 915839
auaucuaagugucuacaua

SEQ ID NO: 1110049 - RNA, 19 nt, Artificial Sequence
  Description of Artificial Sequence: Synthetic oligonucleotide
  Antisense strand to SEQ ID NO: 1110048
uauguagacacuuagauau

SEQ ID NO: 1110050 - RNA, 19 nt, Artificial Sequence
  Description of Artificial Sequence: Synthetic oligonucleotide
  Sense strand starting at position 940 of SEQ ID NO: 915839
gguagcuauuucuaacaaa

SEQ ID NO: 1110051 - RNA, 19 nt, Artificial Sequence
  Description of Artificial Sequence: Synthetic oligonucleotide
  Antisense strand to SEQ ID NO: 1110050
uuuguuagaaauagcuacc

SEQ ID NO: 1110052 - RNA, 19 nt, Artificial Sequence
  Description of Artificial Sequence: Synthetic oligonucleotide
  Sense strand starting at position 1043 of SEQ ID NO: 915839
gagagcaacuguccauuau

SEQ ID NO: 1110053 - RNA, 19 nt, Artificial Sequence
  Description of Artificial Sequence: Synthetic oligonucleotide
  Antisense strand to SEQ ID NO: 1110052
auaauggacaguugcucuc

SEQ ID NO: 1110054 - RNA, 19 nt, Artificial Sequence
  Description of Artificial Sequence: Synthetic oligonucleotide
  Sense strand starting at position 1240 of SEQ ID NO: 915839
gugagacuccuagguugga

SEQ ID NO: 1110055 - RNA, 19 nt, Artificial Sequence
  Description of Artificial Sequence: Synthetic oligonucleotide
  Antisense strand to SEQ ID NO: 1110054
uccaaccuaggagucucac

SEQ ID NO: 1110056 - RNA, 19 nt, Artificial Sequence
  Description of Artificial Sequence: Synthetic oligonucleotide
  Sense strand starting at position 1389 of SEQ ID NO: 915839
gaucccuucuaugugagua

SEQ ID NO: 1110057 - RNA, 19 nt, Artificial Sequence
  Description of Artificial Sequence: Synthetic oligonucleotide
  Antisense strand to SEQ ID NO: 1110056
uacucacauagaagggauc

SEQ ID NO: 1110058 - RNA, 19 nt, Artificial Sequence
  Description of Artificial Sequence: Synthetic oligonucleotide
  Sense strand starting at position 1394 of SEQ ID NO: 915839
cuucuaugugaguagagca

SEQ ID NO: 1110059 - RNA, 19 nt, Artificial Sequence
  Description of Artificial Sequence: Synthetic oligonucleotide
  Antisense strand to SEQ ID NO: 1110058
ugcucuacucacauagaag

SEQ ID NO: 1110060 - RNA, 19 nt, Artificial Sequence
  Description of Artificial Sequence: Synthetic oligonucleotide
  Sense strand starting at position 1593 of SEQ ID NO: 915839
uuucuaaugagcugggacu

SEQ ID NO: 1110061 - RNA, 19 nt, Artificial Sequence
  Description of Artificial Sequence: Synthetic oligonucleotide
  Antisense strand to SEQ ID NO: 1110060
agucccagcucauuagaaa

SEQ ID NO: 1110062 - RNA, 19 nt, Artificial Sequence
  Description of Artificial Sequence: Synthetic oligonucleotide
  Sense strand starting at position 2659 of SEQ ID NO: 915839
uuggguuagcccugaggau

SEQ ID NO: 1110063 - RNA, 19 nt, Artificial Sequence
  Description of Artificial Sequence: Synthetic oligonucleotide
  Antisense strand to SEQ ID NO: 1110062
auccucagggcuaacccaa

SEQ ID NO: 1110064 - RNA, 19 nt, Artificial Sequence
  Description of Artificial Sequence: Synthetic oligonucleotide
  Sense strand starting at position 2815 of SEQ ID NO: 915839
uggagcuuuagauagaggu

SEQ ID NO: 1110065 - RNA, 19 nt, Artificial Sequence
  Description of Artificial Sequence: Synthetic oligonucleotide
  Antisense strand to SEQ ID NO: 1110064
accucuaucuaaagcucca

SEQ ID NO: 1110066 - RNA, 19 nt, Artificial Sequence
  Description of Artificial Sequence: Synthetic oligonucleotide
  Sense strand starting at position 3081 of SEQ ID NO: 915839
gguuguguuaccguaggcu

SEQ ID NO: 1110067 - RNA, 19 nt, Artificial Sequence
  Description of Artificial Sequence: Synthetic oligonucleotide
  Antisense strand to SEQ ID NO: 1110066
agccuacgguaacacaacc

SEQ ID NO: 1110068 - RNA, 19 nt, Artificial Sequence
  Description of Artificial Sequence: Synthetic oligonucleotide
  Sense strand starting at position 3133 of SEQ ID NO: 915839
gcuaaauaggcauaguaaa

SEQ ID NO: 1110069 - RNA, 19 nt, Artificial Sequence
  Description of Artificial Sequence: Synthetic oligonucleotide
  Antisense strand to SEQ ID NO: 1110068
uuuacuaugccuauuuagc

SEQ ID NO: 1110070 - RNA, 19 nt, Artificial Sequence
  Description of Artificial Sequence: Synthetic oligonucleotide
  Sense strand starting at position 3187 of SEQ ID NO: 915839
cggaaaugaugcuuaucuc

SEQ ID NO: 1110071 - RNA, 19 nt, Artificial Sequence
  Description of Artificial Sequence: Synthetic oligonucleotide
  Antisense strand to SEQ ID NO: 1110070
gagauaagcaucauuuccg

SEQ ID NO: 1110072 - RNA, 19 nt, Artificial Sequence
  Description of Artificial Sequence: Synthetic oligonucleotide
  Sense strand starting at position 3322 of SEQ ID NO: 915839
cuuggaaagacguggguau

SEQ ID NO: 1110073 - RNA, 19 nt, Artificial Sequence
  Description of Artificial Sequence: Synthetic oligonucleotide
  Antisense strand to SEQ ID NO: 1110072
auacccacgucuuuccaag

SEQ ID NO: 1110074 - RNA, 19 nt, Artificial Sequence
  Description of Artificial Sequence: Synthetic oligonucleotide
  Sense strand starting at position 3323 of SEQ ID NO: 915839
uuggaaagacguggguauu

SEQ ID NO: 1110075 - RNA, 19 nt, Artificial Sequence
  Description of Artificial Sequence: Synthetic oligonucleotide
  Antisense strand to SEQ ID NO: 1110074
aauacccacgucuuuccaa

SEQ ID NO: 1110076 - RNA, 19 nt, Artificial Sequence
  Description of Artificial Sequence: Synthetic oligonucleotide
  Sense strand starting at position 3324 of SEQ ID NO: 915839
uggaaagacguggguauua

SEQ ID NO: 1110077 - RNA, 19 nt, Artificial Sequence
  Description of Artificial Sequence: Synthetic oligonucleotide
  Antisense strand to SEQ ID NO: 1110076
uaauacccacgucuuucca

SEQ ID NO: 1110078 - RNA, 19 nt, Artificial Sequence
  Description of Artificial Sequence: Synthetic oligonucleotide
  Sense strand starting at position 3335 of SEQ ID NO: 915839
ggguauuagaagcaggagu

SEQ ID NO: 1110079 - RNA, 19 nt, Artificial Sequence
  Description of Artificial Sequence: Synthetic oligonucleotide
  Antisense strand to SEQ ID NO: 1110078
acuccugcuucuaauaccc

SEQ ID NO: 1110080 - RNA, 19 nt, Artificial Sequence
  Description of Artificial Sequence: Synthetic oligonucleotide
  Sense strand starting at position 3364 of SEQ ID NO: 915839
ggugucuuacucuaauaug

SEQ ID NO: 1110081 - RNA, 19 nt, Artificial Sequence
  Description of Artificial Sequence: Synthetic oligonucleotide
  Antisense strand to SEQ ID NO: 1110080
cauauuagaguaagacacc

SEQ ID NO: 1110082 - RNA, 19 nt, Artificial Sequence
  Description of Artificial Sequence: Synthetic oligonucleotide
  Sense strand starting at position 3552 of SEQ ID NO: 915839
caaguugugagcguuguga

SEQ ID NO: 1110083 - RNA, 19 nt, Artificial Sequence
  Description of Artificial Sequence: Synthetic oligonucleotide
  Antisense strand to SEQ ID NO: 1110082
ucacaacgcucacaacuug

SEQ ID NO: 1110084 - RNA, 19 nt, Artificial Sequence
  Description of Artificial Sequence: Synthetic oligonucleotide
  Sense strand starting at position 3563 of SEQ ID NO: 915839
cguugugaauucccagaac

SEQ ID NO: 1110085 - RNA, 19 nt, Artificial Sequence
  Description of Artificial Sequence: Synthetic oligonucleotide
  Antisense strand to SEQ ID NO: 1110084
guucugggaauucacaacg

SEQ ID NO: 1110086 - RNA, 19 nt, Artificial Sequence
  Description of Artificial Sequence: Synthetic oligonucleotide
  Sense strand starting at position 3566 of SEQ ID NO: 915839
ugugaauucccagaacccu

SEQ ID NO: 1110087 - RNA, 19 nt, Artificial Sequence
  Description of Artificial Sequence: Synthetic oligonucleotide
  Antisense strand to SEQ ID NO: 1110086
aggguucugggaauucaca

SEQ ID NO: 1110088 - RNA, 19 nt, Artificial Sequence
  Description of Artificial Sequence: Synthetic oligonucleotide
  Sense strand starting at position 3795 of SEQ ID NO: 915839
cuggaucucuguccugaga

SEQ ID NO: 1110089 - RNA, 19 nt, Artificial Sequence
  Description of Artificial Sequence: Synthetic oligonucleotide
  Antisense strand to SEQ ID NO: 1110088
ucucaggacagagauccag

SEQ ID NO: 1110090 - RNA, 19 nt, Artificial Sequence
  Description of Artificial Sequence: Synthetic oligonucleotide
  Sense strand starting at position 3837 of SEQ ID NO: 915839
ggaagccuuuagucugaga

SEQ ID NO: 1110091 - RNA, 19 nt, Artificial Sequence
  Description of Artificial Sequence: Synthetic oligonucleotide
  Antisense strand to SEQ ID NO: 1110090
ucucagacuaaaggcuucc

SEQ ID NO: 1110092 - RNA, 19 nt, Artificial Sequence
  Description of Artificial Sequence: Synthetic oligonucleotide
  Sense strand starting at position 3891 of SEQ ID NO: 915839
agcugagagucacuucuaa

SEQ ID NO: 1110093 - RNA, 19 nt, Artificial Sequence
  Description of Artificial Sequence: Synthetic oligonucleotide
  Antisense strand to SEQ ID NO: 1110092
uuagaagugacucucagcu

SEQ ID NO: 1110094 - RNA, 19 nt, Artificial Sequence
  Description of Artificial Sequence: Synthetic oligonucleotide
  Sense strand starting at position 3943 of SEQ ID NO: 915839
gcguucgugaaacagauaa

SEQ ID NO: 1110095 - RNA, 19 nt, Artificial Sequence
  Description of Artificial Sequence: Synthetic oligonucleotide
  Antisense strand to SEQ ID NO: 1110094
uuaucuguuucacgaacgc

SEQ ID NO: 1110096 - RNA, 19 nt, Artificial Sequence
  Description of Artificial Sequence: Synthetic oligonucleotide
  Sense strand starting at position 13 of SEQ ID NO: 915840
gguuuaacuuaauccagac

SEQ ID NO: 1110097 - RNA, 19 nt, Artificial Sequence
  Description of Artificial Sequence: Synthetic oligonucleotide
  Antisense strand to SEQ ID NO: 1110096
gucuggauuaaguuaaacc

SEQ ID NO: 1110098 - RNA, 19 nt, Artificial Sequence
  Description of Artificial Sequence: Synthetic oligonucleotide
  Sense strand starting at position 169 of SEQ ID NO: 915840
cugugauuccaguagccaa

SEQ ID NO: 1110099 - RNA, 19 nt, Artificial Sequence
  Description of Artificial Sequence: Synthetic oligonucleotide
  Antisense strand to SEQ ID NO: 1110098
uuggcuacuggaaucacag

SEQ ID NO: 1110100 - RNA, 19 nt, Artificial Sequence
  Description of Artificial Sequence: Synthetic oligonucleotide
  Sense strand starting at position 474 of SEQ ID NO: 915840
ggcucuaaucucuggguga

SEQ ID NO: 1110101 - RNA, 19 nt, Artificial Sequence
  Description of Artificial Sequence: Synthetic oligonucleotide
  Antisense strand to SEQ ID NO: 1110100
ucacccagagauuagagcc

SEQ ID NO: 1110102 - RNA, 19 nt, Artificial Sequence
  Description of Artificial Sequence: Synthetic oligonucleotide
  Sense strand starting at position 889 of SEQ ID NO: 915840
cccuuuauuggccagagca

SEQ ID NO: 1110103 - RNA, 19 nt, Artificial Sequence
  Description of Artificial Sequence: Synthetic oligonucleotide
  Antisense strand to SEQ ID NO: 1110102
ugcucuggccaauaaaggg

SEQ ID NO: 1110104 - RNA, 19 nt, Artificial Sequence
  Description of Artificial Sequence: Synthetic oligonucleotide
  Sense strand starting at position 1757 of SEQ ID NO: 915840
ccagguuccuguuuccuaa

SEQ ID NO: 1110105 - RNA, 19 nt, Artificial Sequence
  Description of Artificial Sequence: Synthetic oligonucleotide
  Antisense strand to SEQ ID NO: 1110104
uuaggaaacaggaaccugg

SEQ ID NO: 1110106 - RNA, 19 nt, Artificial Sequence
  Description of Artificial Sequence: Synthetic oligonucleotide
  Sense strand starting at position 2048 of SEQ ID NO: 915840
uggaaaccauccuguuaga

SEQ ID NO: 1110107 - RNA, 19 nt, Artificial Sequence
  Description of Artificial Sequence: Synthetic oligonucleotide
  Antisense strand to SEQ ID NO: 1110106
ucuaacaggaugguuucca

SEQ ID NO: 1110108 - RNA, 19 nt, Artificial Sequence
  Description of Artificial Sequence: Synthetic oligonucleotide
  Sense strand starting at position 2051 of SEQ ID NO: 915840
aaaccauccuguuagaggu

SEQ ID NO: 1110109 - RNA, 19 nt, Artificial Sequence
  Description of Artificial Sequence: Synthetic oligonucleotide
  Antisense strand to SEQ ID NO: 1110108
accucuaacaggaugguuu

SEQ ID NO: 1110110 - RNA, 19 nt, Artificial Sequence
  Description of Artificial Sequence: Synthetic oligonucleotide
  Sense strand starting at position 2074 of SEQ ID NO: 915840
gguggagagcaauguuuaa

SEQ ID NO: 1110111 - RNA, 19 nt, Artificial Sequence
  Description of Artificial Sequence: Synthetic oligonucleotide
  Antisense strand to SEQ ID NO: 1110110
uuaaacauugcucuccacc

SEQ ID NO: 1110112 - RNA, 19 nt, Artificial Sequence
  Description of Artificial Sequence: Synthetic oligonucleotide
  Sense strand starting at position 2078 of SEQ ID NO: 915840
gagagcaauguuuaaguga

SEQ ID NO: 1110113 - RNA, 19 nt, Artificial Sequence
  Description of Artificial Sequence: Synthetic oligonucleotide
  Antisense strand to SEQ ID NO: 1110112
ucacuuaaacauugcucuc

SEQ ID NO: 1110114 - RNA, 19 nt, Artificial Sequence
  Description of Artificial Sequence: Synthetic oligonucleotide
  Sense strand starting at position 2087 of SEQ ID NO: 915840
guuuaagugacugagagcu

SEQ ID NO: 1110115 - RNA, 19 nt, Artificial Sequence
  Description of Artificial Sequence: Synthetic oligonucleotide
  Antisense strand to SEQ ID NO: 1110114
agcucucagucacuuaaac

SEQ ID NO: 1110116 - RNA, 19 nt, Artificial Sequence
  Description of Artificial Sequence: Synthetic oligonucleotide
  Sense strand starting at position 2366 of SEQ ID NO: 915840
gaaucaagauuguuuagau

SEQ ID NO: 1110117 - RNA, 19 nt, Artificial Sequence
  Description of Artificial Sequence: Synthetic oligonucleotide
  Antisense strand to SEQ ID NO: 1110116
aucuaaacaaucuugauuc

SEQ ID NO: 1110118 - RNA, 19 nt, Artificial Sequence
  Description of Artificial Sequence: Synthetic oligonucleotide
  Sense strand starting at position 2515 of SEQ ID NO: 915840
guuccuugugccugggaca

SEQ ID NO: 1110119 - RNA, 19 nt, Artificial Sequence
  Description of Artificial Sequence: Synthetic oligonucleotide
  Antisense strand to SEQ ID NO: 1110118
ugucccaggcacaaggaac

SEQ ID NO: 1110120 - RNA, 19 nt, Artificial Sequence
  Description of Artificial Sequence: Synthetic oligonucleotide
  Sense strand starting at position 2554 of SEQ ID NO: 915840
guggacauccugugaauca

SEQ ID NO: 1110121 - RNA, 19 nt, Artificial Sequence
  Description of Artificial Sequence: Synthetic oligonucleotide
  Antisense strand to SEQ ID NO: 1110120
ugauucacaggauguccac

SEQ ID NO: 1110122 - RNA, 19 nt, Artificial Sequence
  Description of Artificial Sequence: Synthetic oligonucleotide
  Sense strand starting at position 2628 of SEQ ID NO: 915840
agacuugucccgggucaga

SEQ ID NO: 1110123 - RNA, 19 nt, Artificial Sequence
  Description of Artificial Sequence: Synthetic oligonucleotide
  Antisense strand to SEQ ID NO: 1110122
ucugacccgggacaagucu

SEQ ID NO: 1110124 - RNA, 19 nt, Artificial Sequence
  Description of Artificial Sequence: Synthetic oligonucleotide
  Sense strand starting at position 2808 of SEQ ID NO: 915840
agagaaaccucucugcaag

SEQ ID NO: 1110125 - RNA, 19 nt, Artificial Sequence
  Description of Artificial Sequence: Synthetic oligonucleotide
  Antisense strand to SEQ ID NO: 1110124
cuugcagagagguuucucu

SEQ ID NO: 1110126 - RNA, 19 nt, Artificial Sequence
  Description of Artificial Sequence: Synthetic oligonucleotide
  Sense strand starting at position 2822 of SEQ ID NO: 915840
gcaagcucaccagaguaua

SEQ ID NO: 1110127 - RNA, 19 nt, Artificial Sequence
  Description of Artificial Sequence: Synthetic oligonucleotide
  Antisense strand to SEQ ID NO: 1110126
uauacucuggugagcuugc

SEQ ID NO: 1110128 - RNA, 19 nt, Artificial Sequence
  Description of Artificial Sequence: Synthetic oligonucleotide
  Sense strand starting at position 2939 of SEQ ID NO: 915840
acacuuagacacugaaugu

SEQ ID NO: 1110129 - RNA, 19 nt, Artificial Sequence
  Description of Artificial Sequence: Synthetic oligonucleotide
  Antisense strand to SEQ ID NO: 1110128
acauucagugucuaagugu

SEQ ID NO: 1110130 - RNA, 19 nt, Artificial Sequence
  Description of Artificial Sequence: Synthetic oligonucleotide
  Sense strand starting at position 2991 of SEQ ID NO: 915840
uccagaaguuuguuggaga

SEQ ID NO: 1110131 - RNA, 19 nt, Artificial Sequence
  Description of Artificial Sequence: Synthetic oligonucleotide
  Antisense strand to SEQ ID NO: 1110130
ucuccaacaaacuucugga

SEQ ID NO: 1110132 - RNA, 19 nt, Artificial Sequence
  Description of Artificial Sequence: Synthetic oligonucleotide
  Sense strand starting at position 2994 of SEQ ID NO: 915840
agaaguuuguuggagagug

SEQ ID NO: 1110133 - RNA, 19 nt, Artificial Sequence
  Description of Artificial Sequence: Synthetic oligonucleotide
  Antisense strand to SEQ ID NO: 1110132
cacucuccaacaaacuucu

SEQ ID NO: 1110134 - RNA, 19 nt, Artificial Sequence
  Description of Artificial Sequence: Synthetic oligonucleotide
  Sense strand starting at position 2996 of SEQ ID NO: 915840
aaguuuguuggagaguguu

SEQ ID NO: 1110135 - RNA, 19 nt, Artificial Sequence
  Description of Artificial Sequence: Synthetic oligonucleotide
  Antisense strand to SEQ ID NO: 1110134
aacacucuccaacaaacuu

SEQ ID NO: 1110136 - RNA, 19 nt, Artificial Sequence
  Description of Artificial Sequence: Synthetic oligonucleotide
  Sense strand starting at position 3020 of SEQ ID NO: 915840
gaguaauucuggucuauga

SEQ ID NO: 1110137 - RNA, 19 nt, Artificial Sequence
  Description of Artificial Sequence: Synthetic oligonucleotide
  Antisense strand to SEQ ID NO: 1110136
ucauagaccagaauuacuc

SEQ ID NO: 1110138 - RNA, 19 nt, Artificial Sequence
  Description of Artificial Sequence: Synthetic oligonucleotide
  Sense strand starting at position 3022 of SEQ ID NO: 915840
guaauucuggucuaugaua

SEQ ID NO: 1110139 - RNA, 19 nt, Artificial Sequence
  Description of Artificial Sequence: Synthetic oligonucleotide
  Antisense strand to SEQ ID NO: 1110138
uaucauagaccagaauuac

SEQ ID NO: 1110140 - RNA, 19 nt, Artificial Sequence
  Description of Artificial Sequence: Synthetic oligonucleotide
  Sense strand starting at position 3024 of SEQ ID NO: 915840
aauucuggucuaugauagu

SEQ ID NO: 1110141 - RNA, 19 nt, Artificial Sequence
  Description of Artificial Sequence: Synthetic oligonucleotide
  Antisense strand to SEQ ID NO: 1110140
acuaucauagaccagaauu

SEQ ID NO: 1110142 - RNA, 19 nt, Artificial Sequence
  Description of Artificial Sequence: Synthetic oligonucleotide
  Sense strand starting at position 3061 of SEQ ID NO: 915840
accaacuagugcuucugaa

SEQ ID NO: 1110143 - RNA, 19 nt, Artificial Sequence
  Description of Artificial Sequence: Synthetic oligonucleotide
  Antisense strand to SEQ ID NO: 1110142
uucagaagcacuaguuggu

SEQ ID NO: 1110144 - RNA, 19 nt, Artificial Sequence
  Description of Artificial Sequence: Synthetic oligonucleotide
  Sense strand starting at position 3112 of SEQ ID NO: 915840
accagaagauauuggcuaa

SEQ ID NO: 1110145 - RNA, 19 nt, Artificial Sequence
  Description of Artificial Sequence: Synthetic oligonucleotide
  Antisense strand to SEQ ID NO: 1110144
uuagccaauaucuucuggu

SEQ ID NO: 1110146 - RNA, 19 nt, Artificial Sequence
  Description of Artificial Sequence: Synthetic oligonucleotide
  Sense strand starting at position 3116 of SEQ ID NO: 915840
gaagauauuggcuaaagcu

SEQ ID NO: 1110147 - RNA, 19 nt, Artificial Sequence
  Description of Artificial Sequence: Synthetic oligonucleotide
  Antisense strand to SEQ ID NO: 1110146
agcuuuagccaauaucuuc

SEQ ID NO: 1110148 - RNA, 19 nt, Artificial Sequence
  Description of Artificial Sequence: Synthetic oligonucleotide
  Sense strand starting at position 3164 of SEQ ID NO: 915840
acaggacuuucugaauggu

SEQ ID NO: 1110149 - RNA, 19 nt, Artificial Sequence
  Description of Artificial Sequence: Synthetic oligonucleotide
  Antisense strand to SEQ ID NO: 1110148
accauucagaaaguccugu

SEQ ID NO: 1110150 - RNA, 19 nt, Artificial Sequence
  Description of Artificial Sequence: Synthetic oligonucleotide
  Sense strand starting at position 3167 of SEQ ID NO: 915840
ggacuuucugaauggugga

SEQ ID NO: 1110151 - RNA, 19 nt, Artificial Sequence
  Description of Artificial Sequence: Synthetic oligonucleotide
  Antisense strand to SEQ ID NO: 1110150
uccaccauucagaaagucc

SEQ ID NO: 1110152 - RNA, 19 nt, Artificial Sequence
  Description of Artificial Sequence: Synthetic oligonucleotide
  Sense strand starting at position 3238 of SEQ ID NO: 915840
gggagacuguccuuuggca

SEQ ID NO: 1110153 - RNA, 19 nt, Artificial Sequence
  Description of Artificial Sequence: Synthetic oligonucleotide
  Antisense strand to SEQ ID NO: 1110152
ugccaaaggacagucuccc

SEQ ID NO: 1110154 - RNA, 19 nt, Artificial Sequence
  Description of Artificial Sequence: Synthetic oligonucleotide
  Sense strand starting at position 3245 of SEQ ID NO: 915840
uguccuuuggcaugacaug

SEQ ID NO: 1110155 - RNA, 19 nt, Artificial Sequence
  Description of Artificial Sequence: Synthetic oligonucleotide
  Antisense strand to SEQ ID NO: 1110154
caugucaugccaaaggaca

SEQ ID NO: 1110156 - RNA, 19 nt, Artificial Sequence
  Description of Artificial Sequence: Synthetic oligonucleotide
  Sense strand starting at position 3302 of SEQ ID NO: 915840
ucagaaagcccauagucua

SEQ ID NO: 1110157 - RNA, 19 nt, Artificial Sequence
  Description of Artificial Sequence: Synthetic oligonucleotide
  Antisense strand to SEQ ID NO: 1110156
uagacuaugggcuuucuga

SEQ ID NO: 1110158 - RNA, 19 nt, Artificial Sequence
  Description of Artificial Sequence: Synthetic oligonucleotide
  Sense strand starting at position 3305 of SEQ ID NO: 915840
gaaagcccauagucuaaga

SEQ ID NO: 1110159 - RNA, 19 nt, Artificial Sequence
  Description of Artificial Sequence: Synthetic oligonucleotide
  Antisense strand to SEQ ID NO: 1110158
ucuuagacuaugggcuuuc

SEQ ID NO: 1110160 - RNA, 19 nt, Artificial Sequence
  Description of Artificial Sequence: Synthetic oligonucleotide
  Sense strand starting at position 3310 of SEQ ID NO: 915840
cccauagucuaagaauggu

SEQ ID NO: 1110161 - RNA, 19 nt, Artificial Sequence
  Description of Artificial Sequence: Synthetic oligonucleotide
  Antisense strand to SEQ ID NO: 1110160
accauucuuagacuauggg

SEQ ID NO: 1110162 - RNA, 19 nt, Artificial Sequence
  Description of Artificial Sequence: Synthetic oligonucleotide
  Sense strand starting at position 3319 of SEQ ID NO: 915840
uaagaauggugccaaauga

SEQ ID NO: 1110163 - RNA, 19 nt, Artificial Sequence
  Description of Artificial Sequence: Synthetic oligonucleotide
  Antisense strand to SEQ ID NO: 1110162
ucauuuggcaccauucuua

SEQ ID NO: 1110164 - RNA, 19 nt, Artificial Sequence
  Description of Artificial Sequence: Synthetic oligonucleotide
  Sense strand starting at position 3665 of SEQ ID NO: 915840
agccuuugcuagcccagaa

SEQ ID NO: 1110165 - RNA, 19 nt, Artificial Sequence
  Description of Artificial Sequence: Synthetic oligonucleotide
  Antisense strand to SEQ ID NO: 1110164
uucugggcuagcaaaggcu

SEQ ID NO: 1110166 - RNA, 19 nt, Artificial Sequence
  Description of Artificial Sequence: Synthetic oligonucleotide
  Sense strand starting at position 3696 of SEQ ID NO: 915840
gaggguuugagguggaaag

SEQ ID NO: 1110167 - RNA, 19 nt, Artificial Sequence
  Description of Artificial Sequence: Synthetic oligonucleotide
  Antisense strand to SEQ ID NO: 1110166
cuuuccaccucaaacccuc

SEQ ID NO: 1110168 - RNA, 19 nt, Artificial Sequence
  Description of Artificial Sequence: Synthetic oligonucleotide
  Sense strand starting at position 3744 of SEQ ID NO: 915840
ccggcauuccucuaggauc

SEQ ID NO: 1110169 - RNA, 19 nt, Artificial Sequence
  Description of Artificial Sequence: Synthetic oligonucleotide
  Antisense strand to SEQ ID NO: 1110168
gauccuagaggaaugccgg

SEQ ID NO: 1110170 - RNA, 19 nt, Artificial Sequence
  Description of Artificial Sequence: Synthetic oligonucleotide
  Sense strand starting at position 3838 of SEQ ID NO: 915840
ugaagugcucacugagaaa

SEQ ID NO: 1110171 - RNA, 19 nt, Artificial Sequence
  Description of Artificial Sequence: Synthetic oligonucleotide
  Antisense strand to SEQ ID NO: 1110170
uuucucagugagcacuuca

SEQ ID NO: 1110172 - RNA, 19 nt, Artificial Sequence
  Description of Artificial Sequence: Synthetic oligonucleotide
  Sense strand starting at position 3943 of SEQ ID NO: 915840
gggaguucugaucaguuug

SEQ ID NO: 1110173 - RNA, 19 nt, Artificial Sequence
  Description of Artificial Sequence: Synthetic oligonucleotide
  Antisense strand to SEQ ID NO: 1110172
caaacugaucagaacuccc

SEQ ID NO: 1110174 - RNA, 19 nt, Artificial Sequence
  Description of Artificial Sequence: Synthetic oligonucleotide
  Sense strand starting at position 3954 of SEQ ID NO: 915840
ucaguuugugugggcacaa

SEQ ID NO: 1110175 - RNA, 19 nt, Artificial Sequence
  Description of Artificial Sequence: Synthetic oligonucleotide
  Antisense strand to SEQ ID NO: 1110174
uugugcccacacaaacuga

SEQ ID NO: 1110176 - RNA, 19 nt, Artificial Sequence
  Description of Artificial Sequence: Synthetic oligonucleotide
  Sense strand starting at position 85 of SEQ ID NO: 915841
uguagaauccuguaaccaa

SEQ ID NO: 1110177 - RNA, 19 nt, Artificial Sequence
  Description of Artificial Sequence: Synthetic oligonucleotide
  Antisense strand to SEQ ID NO: 1110176
uugguuacaggauucuaca

SEQ ID NO: 1110178 - RNA, 19 nt, Artificial Sequence
  Description of Artificial Sequence: Synthetic oligonucleotide
  Sense strand starting at position 100 of SEQ ID NO: 915841
ccaaauuccuaguucuugu

SEQ ID NO: 1110179 - RNA, 19 nt, Artificial Sequence
  Description of Artificial Sequence: Synthetic oligonucleotide
  Antisense strand to SEQ ID NO: 1110178
acaagaacuaggaauuugg

SEQ ID NO: 1110180 - RNA, 19 nt, Artificial Sequence
  Description of Artificial Sequence: Synthetic oligonucleotide
  Sense strand starting at position 129 of SEQ ID NO: 915841
auauguauuugucagagga

SEQ ID NO: 1110181 - RNA, 19 nt, Artificial Sequence
  Description of Artificial Sequence: Synthetic oligonucleotide
  Antisense strand to SEQ ID NO: 1110180
uccucugacaaauacauau

SEQ ID NO: 1110182 - RNA, 19 nt, Artificial Sequence
  Description of Artificial Sequence: Synthetic oligonucleotide
  Sense strand starting at position 131 of SEQ ID NO: 915841
auguauuugucagaggagu

SEQ ID NO: 1110183 - RNA, 19 nt, Artificial Sequence
  Description of Artificial Sequence: Synthetic oligonucleotide
  Antisense strand to SEQ ID NO: 1110182
acuccucugacaaauacau

SEQ ID NO: 1110184 - RNA, 19 nt, Artificial Sequence
  Description of Artificial Sequence: Synthetic oligonucleotide
  Sense strand starting at position 304 of SEQ ID NO: 915841
guggcuuuaucaccaauaa

SEQ ID NO: 1110185 - RNA, 19 nt, Artificial Sequence
  Description of Artificial Sequence: Synthetic oligonucleotide
  Antisense strand to SEQ ID NO: 1110184
uuauuggugauaaagccac

SEQ ID NO: 1110186 - RNA, 19 nt, Artificial Sequence
  Description of Artificial Sequence: Synthetic oligonucleotide
  Sense strand starting at position 338 of SEQ ID NO: 915841
ucacauuaugguuggugua

SEQ ID NO: 1110187 - RNA, 19 nt, Artificial Sequence
  Description of Artificial Sequence: Synthetic oligonucleotide
  Antisense strand to SEQ ID NO: 1110186
uacaccaaccauaauguga

SEQ ID NO: 1110188 - RNA, 19 nt, Artificial Sequence
  Description of Artificial Sequence: Synthetic oligonucleotide
  Sense strand starting at position 402 of SEQ ID NO: 915841
ccaauagaucucuguaggu

SEQ ID NO: 1110189 - RNA, 19 nt, Artificial Sequence
  Description of Artificial Sequence: Synthetic oligonucleotide
  Antisense strand to SEQ ID NO: 1110188
accuacagagaucuauugg

SEQ ID NO: 1110190 - RNA, 19 nt, Artificial Sequence
  Description of Artificial Sequence: Synthetic oligonucleotide
  Sense strand starting at position 646 of SEQ ID NO: 915841
ggguacaucugagucaaac

SEQ ID NO: 1110191 - RNA, 19 nt, Artificial Sequence
  Description of Artificial Sequence: Synthetic oligonucleotide
  Antisense strand to SEQ ID NO: 1110190
guuugacucagauguaccc

SEQ ID NO: 1110192 - RNA, 19 nt, Artificial Sequence
  Description of Artificial Sequence: Synthetic oligonucleotide
  Sense strand starting at position 728 of SEQ ID NO: 915841
ucaccacuccagggaugau

SEQ ID NO: 1110193 - RNA, 19 nt, Artificial Sequence
  Description of Artificial Sequence: Synthetic oligonucleotide
  Antisense strand to SEQ ID NO: 1110192
aucaucccuggagugguga

SEQ ID NO: 1110194 - RNA, 19 nt, Artificial Sequence
  Description of Artificial Sequence: Synthetic oligonucleotide
  Sense strand starting at position 852 of SEQ ID NO: 915841
ugguguuaauccuucuugu

SEQ ID NO: 1110195 - RNA, 19 nt, Artificial Sequence
  Description of Artificial Sequence: Synthetic oligonucleotide
  Antisense strand to SEQ ID NO: 1110194
acaagaaggauuaacacca

SEQ ID NO: 1110196 - RNA, 19 nt, Artificial Sequence
  Description of Artificial Sequence: Synthetic oligonucleotide
  Sense strand starting at position 877 of SEQ ID NO: 915841
accugaacuccagggucau

SEQ ID NO: 1110197 - RNA, 19 nt, Artificial Sequence
  Description of Artificial Sequence: Synthetic oligonucleotide
  Antisense strand to SEQ ID NO: 1110196
augacccuggaguucaggu

SEQ ID NO: 1110198 - RNA, 19 nt, Artificial Sequence
  Description of Artificial Sequence: Synthetic oligonucleotide
  Sense strand starting at position 1018 of SEQ ID NO: 915841
guaauccuccugugaguug

SEQ ID NO: 1110199 - RNA, 19 nt, Artificial Sequence
  Description of Artificial Sequence: Synthetic oligonucleotide
  Antisense strand to SEQ ID NO: 1110198
caacucacaggaggauuac

SEQ ID NO: 1110200 - RNA, 19 nt, Artificial Sequence
  Description of Artificial Sequence: Synthetic oligonucleotide
  Sense strand starting at position 1308 of SEQ ID NO: 915841
ggaucacuacuucguagga

SEQ ID NO: 1110201 - RNA, 19 nt, Artificial Sequence
  Description of Artificial Sequence: Synthetic oligonucleotide
  Antisense strand to SEQ ID NO: 1110200
uccuacgaaguagugaucc

SEQ ID NO: 1110202 - RNA, 19 nt, Artificial Sequence
  Description of Artificial Sequence: Synthetic oligonucleotide
  Sense strand starting at position 1518 of SEQ ID NO: 915841
acgguuagugcucugcuuu

SEQ ID NO: 1110203 - RNA, 19 nt, Artificial Sequence
  Description of Artificial Sequence: Synthetic oligonucleotide
  Antisense strand to SEQ ID NO: 1110202
aaagcagagcacuaaccgu

SEQ ID NO: 1110204 - RNA, 19 nt, Artificial Sequence
  Description of Artificial Sequence: Synthetic oligonucleotide
  Sense strand starting at position 2245 of SEQ ID NO: 915841
gaaacucucugcucagguu

SEQ ID NO: 1110205 - RNA, 19 nt, Artificial Sequence
  Description of Artificial Sequence: Synthetic oligonucleotide
  Antisense strand to SEQ ID NO: 1110204
aaccugagcagagaguuuc

SEQ ID NO: 1110206 - RNA, 19 nt, Artificial Sequence
  Description of Artificial Sequence: Synthetic oligonucleotide
  Sense strand starting at position 2511 of SEQ ID NO: 915841
gcaccaauuccggaccuau

SEQ ID NO: 1110207 - RNA, 19 nt, Artificial Sequence
  Description of Artificial Sequence: Synthetic oligonucleotide
  Antisense strand to SEQ ID NO: 1110206
auagguccggaauuggugc

SEQ ID NO: 1110208 - RNA, 19 nt, Artificial Sequence
  Description of Artificial Sequence: Synthetic oligonucleotide
  Sense strand starting at position 2561 of SEQ ID NO: 915841
gugaaaggugccuaggguu

SEQ ID NO: 1110209 - RNA, 19 nt, Artificial Sequence
  Description of Artificial Sequence: Synthetic oligonucleotide
  Antisense strand to SEQ ID NO: 1110208
aacccuaggcaccuuucac

SEQ ID NO: 1110210 - RNA, 19 nt, Artificial Sequence
  Description of Artificial Sequence: Synthetic oligonucleotide
  Sense strand starting at position 2598 of SEQ ID NO: 915841
ugacaagcaucagauagaa

SEQ ID NO: 1110211 - RNA, 19 nt, Artificial Sequence
  Description of Artificial Sequence: Synthetic oligonucleotide
  Antisense strand to SEQ ID NO: 1110210
uucuaucugaugcuuguca

SEQ ID NO: 1110212 - RNA, 19 nt, Artificial Sequence
  Description of Artificial Sequence: Synthetic oligonucleotide
  Sense strand starting at position 2701 of SEQ ID NO: 915841
ggaugcuaccaaugaagcu

SEQ ID NO: 1110213 - RNA, 19 nt, Artificial Sequence
  Description of Artificial Sequence: Synthetic oligonucleotide
  Antisense strand to SEQ ID NO: 1110212
agcuucauugguagcaucc

SEQ ID NO: 1110214 - RNA, 19 nt, Artificial Sequence
  Description of Artificial Sequence: Synthetic oligonucleotide
  Sense strand starting at position 2760 of SEQ ID NO: 915841
gggaguugccgggaguuga

SEQ ID NO: 1110215 - RNA, 19 nt, Artificial Sequence
  Description of Artificial Sequence: Synthetic oligonucleotide
  Antisense strand to SEQ ID NO: 1110214
ucaacucccggcaacuccc

SEQ ID NO: 1110216 - RNA, 19 nt, Artificial Sequence
  Description of Artificial Sequence: Synthetic oligonucleotide
  Sense strand starting at position 2768 of SEQ ID NO: 915841
ccgggaguugagugccaua

SEQ ID NO: 1110217 - RNA, 19 nt, Artificial Sequence
  Description of Artificial Sequence: Synthetic oligonucleotide
  Antisense strand to SEQ ID NO: 1110216
uauggcacucaacucccgg

SEQ ID NO: 1110218 - RNA, 19 nt, Artificial Sequence
  Description of Artificial Sequence: Synthetic oligonucleotide
  Sense strand starting at position 2822 of SEQ ID NO: 915841
uucugacaauugccgaaau

SEQ ID NO: 1110219 - RNA, 19 nt, Artificial Sequence
  Description of Artificial Sequence: Synthetic oligonucleotide
  Antisense strand to SEQ ID NO: 1110218
auuucggcaauugucagaa

SEQ ID NO: 1110220 - RNA, 19 nt, Artificial Sequence
  Description of Artificial Sequence: Synthetic oligonucleotide
  Sense strand starting at position 2824 of SEQ ID NO: 915841
cugacaauugccgaaauaa

SEQ ID NO: 1110221 - RNA, 19 nt, Artificial Sequence
  Description of Artificial Sequence: Synthetic oligonucleotide
  Antisense strand to SEQ ID NO: 1110220
uuauuucggcaauugucag

SEQ ID NO: 1110222 - RNA, 19 nt, Artificial Sequence
  Description of Artificial Sequence: Synthetic oligonucleotide
  Sense strand starting at position 2853 of SEQ ID NO: 915841
ggaucugagucuccaaagu

SEQ ID NO: 1110223 - RNA, 19 nt, Artificial Sequence
  Description of Artificial Sequence: Synthetic oligonucleotide
  Antisense strand to SEQ ID NO: 1110222
acuuuggagacucagaucc

SEQ ID NO: 1110224 - RNA, 19 nt, Artificial Sequence
  Description of Artificial Sequence: Synthetic oligonucleotide
  Sense strand starting at position 2875 of SEQ ID NO: 915841
aguaacuuacugugguuua

SEQ ID NO: 1110225 - RNA, 19 nt, Artificial Sequence
  Description of Artificial Sequence: Synthetic oligonucleotide
  Antisense strand to SEQ ID NO: 1110224
uaaaccacaguaaguuacu

SEQ ID NO: 1110226 - RNA, 19 nt, Artificial Sequence
  Description of Artificial Sequence: Synthetic oligonucleotide
  Sense strand starting at position 3009 of SEQ ID NO: 915841
ccguuaguuccacaguauu

SEQ ID NO: 1110227 - RNA, 19 nt, Artificial Sequence
  Description of Artificial Sequence: Synthetic oligonucleotide
  Antisense strand to SEQ ID NO: 1110226
aauacuguggaacuaacgg

SEQ ID NO: 1110228 - RNA, 19 nt, Artificial Sequence
  Description of Artificial Sequence: Synthetic oligonucleotide
  Sense strand starting at position 3088 of SEQ ID NO: 915841
caauuacuguggcucugaa

SEQ ID NO: 1110229 - RNA, 19 nt, Artificial Sequence
  Description of Artificial Sequence: Synthetic oligonucleotide
  Antisense strand to SEQ ID NO: 1110228
uucagagccacaguaauug

SEQ ID NO: 1110230 - RNA, 19 nt, Artificial Sequence
  Description of Artificial Sequence: Synthetic oligonucleotide
  Sense strand starting at position 3114 of SEQ ID NO: 915841
gucuccaggugucuguuaa

SEQ ID NO: 1110231 - RNA, 19 nt, Artificial Sequence
  Description of Artificial Sequence: Synthetic oligonucleotide
  Antisense strand to SEQ ID NO: 1110230
uuaacagacaccuggagac

SEQ ID NO: 1110232 - RNA, 19 nt, Artificial Sequence
  Description of Artificial Sequence: Synthetic oligonucleotide
  Sense strand starting at position 3115 of SEQ ID NO: 915841
ucuccaggugucuguuaaa

SEQ ID NO: 1110233 - RNA, 19 nt, Artificial Sequence
  Description of Artificial Sequence: Synthetic oligonucleotide
  Antisense strand to SEQ ID NO: 1110232
uuuaacagacaccuggaga

SEQ ID NO: 1110234 - RNA, 19 nt, Artificial Sequence
  Description of Artificial Sequence: Synthetic oligonucleotide
  Sense strand starting at position 3202 of SEQ ID NO: 915841
guuugauuugcagguuaca

SEQ ID NO: 1110235 - RNA, 19 nt, Artificial Sequence
  Description of Artificial Sequence: Synthetic oligonucleotide
  Antisense strand to SEQ ID NO: 1110234
uguaaccugcaaaucaaac

SEQ ID NO: 1110236 - RNA, 19 nt, Artificial Sequence
  Description of Artificial Sequence: Synthetic oligonucleotide
  Sense strand starting at position 3258 of SEQ ID NO: 915841
gggugggaguagucagauu

SEQ ID NO: 1110237 - RNA, 19 nt, Artificial Sequence
  Description of Artificial Sequence: Synthetic oligonucleotide
  Antisense strand to SEQ ID NO: 1110236
aaucugacuacucccaccc

SEQ ID NO: 1110238 - RNA, 19 nt, Artificial Sequence
  Description of Artificial Sequence: Synthetic oligonucleotide
  Sense strand starting at position 3266 of SEQ ID NO: 915841
guagucagauugucuugaa

SEQ ID NO: 1110239 - RNA, 19 nt, Artificial Sequence
  Description of Artificial Sequence: Synthetic oligonucleotide
  Antisense strand to SEQ ID NO: 1110238
uucaagacaaucugacuac

SEQ ID NO: 1110240 - RNA, 19 nt, Artificial Sequence
  Description of Artificial Sequence: Synthetic oligonucleotide
  Sense strand starting at position 3267 of SEQ ID NO: 915841
uagucagauugucuugaaa

SEQ ID NO: 1110241 - RNA, 19 nt, Artificial Sequence
  Description of Artificial Sequence: Synthetic oligonucleotide
  Antisense strand to SEQ ID NO: 1110240
uuucaagacaaucugacua

SEQ ID NO: 1110242 - RNA, 19 nt, Artificial Sequence
  Description of Artificial Sequence: Synthetic oligonucleotide
  Sense strand starting at position 3323 of SEQ ID NO: 915841
aaaggaguauaugaguaaa

SEQ ID NO: 1110243 - RNA, 19 nt, Artificial Sequence
  Description of Artificial Sequence: Synthetic oligonucleotide
  Antisense strand to SEQ ID NO: 1110242
uuuacucauauacuccuuu

SEQ ID NO: 1110244 - RNA, 19 nt, Artificial Sequence
  Description of Artificial Sequence: Synthetic oligonucleotide
  Sense strand starting at position 3325 of SEQ ID NO: 915841
aggaguauaugaguaaauc

SEQ ID NO: 1110245 - RNA, 19 nt, Artificial Sequence
  Description of Artificial Sequence: Synthetic oligonucleotide
  Antisense strand to SEQ ID NO: 1110244
gauuuacucauauacuccu

SEQ ID NO: 1110246 - RNA, 19 nt, Artificial Sequence
  Description of Artificial Sequence: Synthetic oligonucleotide
  Sense strand starting at position 3402 of SEQ ID NO: 915841
agcucucaacaauggaaau

SEQ ID NO: 1110247 - RNA, 19 nt, Artificial Sequence
  Description of Artificial Sequence: Synthetic oligonucleotide
  Antisense strand to SEQ ID NO: 1110246
auuuccauuguugagagcu

SEQ ID NO: 1110248 - RNA, 19 nt, Artificial Sequence
  Description of Artificial Sequence: Synthetic oligonucleotide
  Sense strand starting at position 3768 of SEQ ID NO: 915841
ccugucuauuuagugguua

SEQ ID NO: 1110249 - RNA, 19 nt, Artificial Sequence
  Description of Artificial Sequence: Synthetic oligonucleotide
  Antisense strand to SEQ ID NO: 1110248
uaaccacuaaauagacagg

SEQ ID NO: 1110250 - RNA, 19 nt, Artificial Sequence
  Description of Artificial Sequence: Synthetic oligonucleotide
  Sense strand starting at position 3772 of SEQ ID NO: 915841
ucuauuuagugguuaccuu

SEQ ID NO: 1110251 - RNA, 19 nt, Artificial Sequence
  Description of Artificial Sequence: Synthetic oligonucleotide
  Antisense strand to SEQ ID NO: 1110250
aagguaaccacuaaauaga

SEQ ID NO: 1110252 - RNA, 19 nt, Artificial Sequence
  Description of Artificial Sequence: Synthetic oligonucleotide
  Sense strand starting at position 3898 of SEQ ID NO: 915841
uguuuaauuggcgaucuca

SEQ ID NO: 1110253 - RNA, 19 nt, Artificial Sequence
  Description of Artificial Sequence: Synthetic oligonucleotide
  Antisense strand to SEQ ID NO: 1110252
ugagaucgccaauuaaaca

SEQ ID NO: 1110254 - RNA, 19 nt, Artificial Sequence
  Description of Artificial Sequence: Synthetic oligonucleotide
  Sense strand starting at position 3908 of SEQ ID NO: 915841
gcgaucucauugcugacua

SEQ ID NO: 1110255 - RNA, 19 nt, Artificial Sequence
  Description of Artificial Sequence: Synthetic oligonucleotide
  Antisense strand to SEQ ID NO: 1110254
uagucagcaaugagaucgc

SEQ ID NO: 1110256 - RNA, 19 nt, Artificial Sequence
  Description of Artificial Sequence: Synthetic oligonucleotide
  Sense strand starting at position 58 of SEQ ID NO: 915842
caacuugccugcugagaug

SEQ ID NO: 1110257 - RNA, 19 nt, Artificial Sequence
  Description of Artificial Sequence: Synthetic oligonucleotide
  Antisense strand to SEQ ID NO: 1110256
caucucagcaggcaaguug

SEQ ID NO: 1110258 - RNA, 19 nt, Artificial Sequence
  Description of Artificial Sequence: Synthetic oligonucleotide
  Sense strand starting at position 412 of SEQ ID NO: 915842
accugcuuaugaggugaga

SEQ ID NO: 1110259 - RNA, 19 nt, Artificial Sequence
  Description of Artificial Sequence: Synthetic oligonucleotide
  Antisense strand to SEQ ID NO: 1110258
ucucaccucauaagcaggu

SEQ ID NO: 1110260 - RNA, 19 nt, Artificial Sequence
  Description of Artificial Sequence: Synthetic oligonucleotide
  Sense strand starting at position 414 of SEQ ID NO: 915842
cugcuuaugaggugagaaa

SEQ ID NO: 1110261 - RNA, 19 nt, Artificial Sequence
  Description of Artificial Sequence: Synthetic oligonucleotide
  Antisense strand to SEQ ID NO: 1110260
uuucucaccucauaagcag

SEQ ID NO: 1110262 - RNA, 19 nt, Artificial Sequence
  Description of Artificial Sequence: Synthetic oligonucleotide
  Sense strand starting at position 490 of SEQ ID NO: 915842
aaggcaucaccacgguuaa

SEQ ID NO: 1110263 - RNA, 19 nt, Artificial Sequence
  Description of Artificial Sequence: Synthetic oligonucleotide
  Antisense strand to SEQ ID NO: 1110262
uuaaccguggugaugccuu

SEQ ID NO: 1110264 - RNA, 19 nt, Artificial Sequence
  Description of Artificial Sequence: Synthetic oligonucleotide
  Sense strand starting at position 731 of SEQ ID NO: 915842
ggaagcuaugccgguuaca

SEQ ID NO: 1110265 - RNA, 19 nt, Artificial Sequence
  Description of Artificial Sequence: Synthetic oligonucleotide
  Antisense strand to SEQ ID NO: 1110264
uguaaccggcauagcuucc

SEQ ID NO: 1110266 - RNA, 19 nt, Artificial Sequence
  Description of Artificial Sequence: Synthetic oligonucleotide
  Sense strand starting at position 949 of SEQ ID NO: 915842
aacugcuucgacuggaaca

SEQ ID NO: 1110267 - RNA, 19 nt, Artificial Sequence
  Description of Artificial Sequence: Synthetic oligonucleotide
  Antisense strand to SEQ ID NO: 1110266
uguuccagucgaagcaguu

SEQ ID NO: 1110268 - RNA, 19 nt, Artificial Sequence
  Description of Artificial Sequence: Synthetic oligonucleotide
  Sense strand starting at position 1044 of SEQ ID NO: 915842
ugucguugucaccucggua

SEQ ID NO: 1110269 - RNA, 19 nt, Artificial Sequence
  Description of Artificial Sequence: Synthetic oligonucleotide
  Antisense strand to SEQ ID NO: 1110268
uaccgaggugacaacgaca

SEQ ID NO: 1110270 - RNA, 19 nt, Artificial Sequence
  Description of Artificial Sequence: Synthetic oligonucleotide
  Sense strand starting at position 1045 of SEQ ID NO: 915842
gucguugucaccucgguau

SEQ ID NO: 1110271 - RNA, 19 nt, Artificial Sequence
  Description of Artificial Sequence: Synthetic oligonucleotide
  Antisense strand to SEQ ID NO: 1110270
auaccgaggugacaacgac

SEQ ID NO: 1110272 - RNA, 19 nt, Artificial Sequence
  Description of Artificial Sequence: Synthetic oligonucleotide
  Sense strand starting at position 1337 of SEQ ID NO: 915842
acauguugcugguagggaa

SEQ ID NO: 1110273 - RNA, 19 nt, Artificial Sequence
  Description of Artificial Sequence: Synthetic oligonucleotide
  Antisense strand to SEQ ID NO: 1110272
uucccuaccagcaacaugu

SEQ ID NO: 1110274 - RNA, 19 nt, Artificial Sequence
  Description of Artificial Sequence: Synthetic oligonucleotide
  Sense strand starting at position 1359 of SEQ ID NO: 915842
aggagauaguauuagagac

SEQ ID NO: 1110275 - RNA, 19 nt, Artificial Sequence
  Description of Artificial Sequence: Synthetic oligonucleotide
  Antisense strand to SEQ ID NO: 1110274
gucucuaauacuaucuccu

SEQ ID NO: 1110276 - RNA, 19 nt, Artificial Sequence
  Description of Artificial Sequence: Synthetic oligonucleotide
  Sense strand starting at position 1380 of SEQ ID NO: 915842
uccaguaggagugguauua

SEQ ID NO: 1110277 - RNA, 19 nt, Artificial Sequence
  Description of Artificial Sequence: Synthetic oligonucleotide
  Antisense strand to SEQ ID NO: 1110276
uaauaccacuccuacugga

SEQ ID NO: 1110278 - RNA, 19 nt, Artificial Sequence
  Description of Artificial Sequence: Synthetic oligonucleotide
  Sense strand starting at position 1425 of SEQ ID NO: 915842
acuaguagcucauuaccua

SEQ ID NO: 1110279 - RNA, 19 nt, Artificial Sequence
  Description of Artificial Sequence: Synthetic oligonucleotide
  Antisense strand to SEQ ID NO: 1110278
uagguaaugagcuacuagu

SEQ ID NO: 1110280 - RNA, 19 nt, Artificial Sequence
  Description of Artificial Sequence: Synthetic oligonucleotide
  Sense strand starting at position 1454 of SEQ ID NO: 915842
acugacaagcuaugaguuu

SEQ ID NO: 1110281 - RNA, 19 nt, Artificial Sequence
  Description of Artificial Sequence: Synthetic oligonucleotide
  Antisense strand to SEQ ID NO: 1110280
aaacucauagcuugucagu

SEQ ID NO: 1110282 - RNA, 19 nt, Artificial Sequence
  Description of Artificial Sequence: Synthetic oligonucleotide
  Sense strand starting at position 1628 of SEQ ID NO: 915842
ggcuuaaggcuaggaaugu

SEQ ID NO: 1110283 - RNA, 19 nt, Artificial Sequence
  Description of Artificial Sequence: Synthetic oligonucleotide
  Antisense strand to SEQ ID NO: 1110282
acauuccuagccuuaagcc

SEQ ID NO: 1110284 - RNA, 19 nt, Artificial Sequence
  Description of Artificial Sequence: Synthetic oligonucleotide
  Sense strand starting at position 2099 of SEQ ID NO: 915842
aggauugugcaccacugaa

SEQ ID NO: 1110285 - RNA, 19 nt, Artificial Sequence
  Description of Artificial Sequence: Synthetic oligonucleotide
  Antisense strand to SEQ ID NO: 1110284
uucaguggugcacaauccu

SEQ ID NO: 1110286 - RNA, 19 nt, Artificial Sequence
  Description of Artificial Sequence: Synthetic oligonucleotide
  Sense strand starting at position 2265 of SEQ ID NO: 915842
agaagaaagaguugcccaa

SEQ ID NO: 1110287 - RNA, 19 nt, Artificial Sequence
  Description of Artificial Sequence: Synthetic oligonucleotide
  Antisense strand to SEQ ID NO: 1110286
uugggcaacucuuucuucu

SEQ ID NO: 1110288 - RNA, 19 nt, Artificial Sequence
  Description of Artificial Sequence: Synthetic oligonucleotide
  Sense strand starting at position 2303 of SEQ ID NO: 915842
gugagagaaccacgauucu

SEQ ID NO: 1110289 - RNA, 19 nt, Artificial Sequence
  Description of Artificial Sequence: Synthetic oligonucleotide
  Antisense strand to SEQ ID NO: 1110288
agaaucgugguucucucac

SEQ ID NO: 1110290 - RNA, 19 nt, Artificial Sequence
  Description of Artificial Sequence: Synthetic oligonucleotide
  Sense strand starting at position 2378 of SEQ ID NO: 915842
cuguuuguugguggucaca

SEQ ID NO: 1110291 - RNA, 19 nt, Artificial Sequence
  Description of Artificial Sequence: Synthetic oligonucleotide
  Antisense strand to SEQ ID NO: 1110290
ugugaccaccaacaaacag

SEQ ID NO: 1110292 - RNA, 19 nt, Artificial Sequence
  Description of Artificial Sequence: Synthetic oligonucleotide
  Sense strand starting at position 2380 of SEQ ID NO: 915842
guuuguugguggucacaaa

SEQ ID NO: 1110293 - RNA, 19 nt, Artificial Sequence
  Description of Artificial Sequence: Synthetic oligonucleotide
  Antisense strand to SEQ ID NO: 1110292
uuugugaccaccaacaaac

SEQ ID NO: 1110294 - RNA, 19 nt, Artificial Sequence
  Description of Artificial Sequence: Synthetic oligonucleotide
  Sense strand starting at position 2405 of SEQ ID NO: 915842
ugcccaagucaaugaguga

SEQ ID NO: 1110295 - RNA, 19 nt, Artificial Sequence
  Description of Artificial Sequence: Synthetic oligonucleotide
  Antisense strand to SEQ ID NO: 1110294
ucacucauugacuugggca

SEQ ID NO: 1110296 - RNA, 19 nt, Artificial Sequence
  Description of Artificial Sequence: Synthetic oligonucleotide
  Sense strand starting at position 2406 of SEQ ID NO: 915842
gcccaagucaaugagugaa

SEQ ID NO: 1110297 - RNA, 19 nt, Artificial Sequence
  Description of Artificial Sequence: Synthetic oligonucleotide
  Antisense strand to SEQ ID NO: 1110296
uucacucauugacuugggc

SEQ ID NO: 1110298 - RNA, 19 nt, Artificial Sequence
  Description of Artificial Sequence: Synthetic oligonucleotide
  Sense strand starting at position 2720 of SEQ ID NO: 915842
ccaccaugcccagggaaau

SEQ ID NO: 1110299 - RNA, 19 nt, Artificial Sequence
  Description of Artificial Sequence: Synthetic oligonucleotide
  Antisense strand to SEQ ID NO: 1110298
auuucccugggcauggugg

SEQ ID NO: 1110300 - RNA, 19 nt, Artificial Sequence
  Description of Artificial Sequence: Synthetic oligonucleotide
  Sense strand starting at position 2817 of SEQ ID NO: 915842
accagcuaacagugauaau

SEQ ID NO: 1110301 - RNA, 19 nt, Artificial Sequence
  Description of Artificial Sequence: Synthetic oligonucleotide
  Antisense strand to SEQ ID NO: 1110300
auuaucacuguuagcuggu

SEQ ID NO: 1110302 - RNA, 19 nt, Artificial Sequence
  Description of Artificial Sequence: Synthetic oligonucleotide
  Sense strand starting at position 2826 of SEQ ID NO: 915842
cagugauaauccuaaggcu

SEQ ID NO: 1110303 - RNA, 19 nt, Artificial Sequence
  Description of Artificial Sequence: Synthetic oligonucleotide
  Antisense strand to SEQ ID NO: 1110302
agccuuaggauuaucacug

SEQ ID NO: 1110304 - RNA, 19 nt, Artificial Sequence
  Description of Artificial Sequence: Synthetic oligonucleotide
  Sense strand starting at position 2829 of SEQ ID NO: 915842
ugauaauccuaaggcucuu

SEQ ID NO: 1110305 - RNA, 19 nt, Artificial Sequence
  Description of Artificial Sequence: Synthetic oligonucleotide
  Antisense strand to SEQ ID NO: 1110304
aagagccuuaggauuauca

SEQ ID NO: 1110306 - RNA, 19 nt, Artificial Sequence
  Description of Artificial Sequence: Synthetic oligonucleotide
  Sense strand starting at position 2872 of SEQ ID NO: 915842
acaagaaccucuuugcugu

SEQ ID NO: 1110307 - RNA, 19 nt, Artificial Sequence
  Description of Artificial Sequence: Synthetic oligonucleotide
  Antisense strand to SEQ ID NO: 1110306
acagcaaagagguucuugu

SEQ ID NO: 1110308 - RNA, 19 nt, Artificial Sequence
  Description of Artificial Sequence: Synthetic oligonucleotide
  Sense strand starting at position 3040 of SEQ ID NO: 915842
ccuggagcucucuaucuuu

SEQ ID NO: 1110309 - RNA, 19 nt, Artificial Sequence
  Description of Artificial Sequence: Synthetic oligonucleotide
  Antisense strand to SEQ ID NO: 1110308
aaagauagagagcuccagg

SEQ ID NO: 1110310 - RNA, 19 nt, Artificial Sequence
  Description of Artificial Sequence: Synthetic oligonucleotide
  Sense strand starting at position 3137 of SEQ ID NO: 915842
ugucucuccugacuggaau

SEQ ID NO: 1110311 - RNA, 19 nt, Artificial Sequence
  Description of Artificial Sequence: Synthetic oligonucleotide
  Antisense strand to SEQ ID NO: 1110310
auuccagucaggagagaca

SEQ ID NO: 1110312 - RNA, 19 nt, Artificial Sequence
  Description of Artificial Sequence: Synthetic oligonucleotide
  Sense strand starting at position 3148 of SEQ ID NO: 915842
acuggaaugucagccuuau

SEQ ID NO: 1110313 - RNA, 19 nt, Artificial Sequence
  Description of Artificial Sequence: Synthetic oligonucleotide
  Antisense strand to SEQ ID NO: 1110312
auaaggcugacauuccagu

SEQ ID NO: 1110314 - RNA, 19 nt, Artificial Sequence
  Description of Artificial Sequence: Synthetic oligonucleotide
  Sense strand starting at position 3160 of SEQ ID NO: 915842
gccuuaugaaggcaaggau

SEQ ID NO: 1110315 - RNA, 19 nt, Artificial Sequence
  Description of Artificial Sequence: Synthetic oligonucleotide
  Antisense strand to SEQ ID NO: 1110314
auccuugccuucauaaggc

SEQ ID NO: 1110316 - RNA, 19 nt, Artificial Sequence
  Description of Artificial Sequence: Synthetic oligonucleotide
  Sense strand starting at position 3235 of SEQ ID NO: 915842
guucauugaggccagguau

SEQ ID NO: 1110317 - RNA, 19 nt, Artificial Sequence
  Description of Artificial Sequence: Synthetic oligonucleotide
  Antisense strand to SEQ ID NO: 1110316
auaccuggccucaaugaac

SEQ ID NO: 1110318 - RNA, 19 nt, Artificial Sequence
  Description of Artificial Sequence: Synthetic oligonucleotide
  Sense strand starting at position 3672 of SEQ ID NO: 915842
cugagaaacugguccuguu

SEQ ID NO: 1110319 - RNA, 19 nt, Artificial Sequence
  Description of Artificial Sequence: Synthetic oligonucleotide
  Antisense strand to SEQ ID NO: 1110318
aacaggaccaguuucucag

SEQ ID NO: 1110320 - RNA, 19 nt, Artificial Sequence
  Description of Artificial Sequence: Synthetic oligonucleotide
  Sense strand starting at position 3770 of SEQ ID NO: 915842
uggcccaaguuauagagau

SEQ ID NO: 1110321 - RNA, 19 nt, Artificial Sequence
  Description of Artificial Sequence: Synthetic oligonucleotide
  Antisense strand to SEQ ID NO: 1110320
aucucuauaacuugggcca

SEQ ID NO: 1110322 - RNA, 19 nt, Artificial Sequence
  Description of Artificial Sequence: Synthetic oligonucleotide
  Sense strand starting at position 3813 of SEQ ID NO: 915842
ucccacauuuccuggagga

SEQ ID NO: 1110323 - RNA, 19 nt, Artificial Sequence
  Description of Artificial Sequence: Synthetic oligonucleotide
  Antisense strand to SEQ ID NO: 1110322
uccuccaggaaauguggga

SEQ ID NO: 1110324 - RNA, 19 nt, Artificial Sequence
  Description of Artificial Sequence: Synthetic oligonucleotide
  Sense strand starting at position 3827 of SEQ ID NO: 915842
gaggaaaugucaugaacug

SEQ ID NO: 1110325 - RNA, 19 nt, Artificial Sequence
  Description of Artificial Sequence: Synthetic oligonucleotide
  Antisense strand to SEQ ID NO: 1110324
caguucaugacauuuccuc

SEQ ID NO: 1110326 - RNA, 19 nt, Artificial Sequence
  Description of Artificial Sequence: Synthetic oligonucleotide
  Sense strand starting at position 3874 of SEQ ID NO: 915842
uaaugugacuccuggcuga

SEQ ID NO: 1110327 - RNA, 19 nt, Artificial Sequence
  Description of Artificial Sequence: Synthetic oligonucleotide
  Antisense strand to SEQ ID NO: 1110326
ucagccaggagucacauua

SEQ ID NO: 1110328 - RNA, 19 nt, Artificial Sequence
  Description of Artificial Sequence: Synthetic oligonucleotide
  Sense strand starting at position 3966 of SEQ ID NO: 915842
ccucuaugcucacagagua

SEQ ID NO: 1110329 - RNA, 19 nt, Artificial Sequence
  Description of Artificial Sequence: Synthetic oligonucleotide
  Antisense strand to SEQ ID NO: 1110328
uacucugugagcauagagg

SEQ ID NO: 1110330 - RNA, 19 nt, Artificial Sequence
  Description of Artificial Sequence: Synthetic oligonucleotide
  Sense strand starting at position 28 of SEQ ID NO: 915843
acgucuuucuagccaguca

SEQ ID NO: 1110331 - RNA, 19 nt, Artificial Sequence
  Description of Artificial Sequence: Synthetic oligonucleotide
  Antisense strand to SEQ ID NO: 1110330
ugacuggcuagaaagacgu

SEQ ID NO: 1110332 - RNA, 19 nt, Artificial Sequence
  Description of Artificial Sequence: Synthetic oligonucleotide
  Sense strand starting at position 47 of SEQ ID NO: 915843
gaugccugguucuaucagu

SEQ ID NO: 1110333 - RNA, 19 nt, Artificial Sequence
  Description of Artificial Sequence: Synthetic oligonucleotide
  Antisense strand to SEQ ID NO: 1110332
acugauagaaccaggcauc

SEQ ID NO: 1110334 - RNA, 19 nt, Artificial Sequence
  Description of Artificial Sequence: Synthetic oligonucleotide
  Sense strand starting at position 236 of SEQ ID NO: 915843
cggaccuguucccaaagga

SEQ ID NO: 1110335 - RNA, 19 nt, Artificial Sequence
  Description of Artificial Sequence: Synthetic oligonucleotide
  Antisense strand to SEQ ID NO: 1110334
uccuuugggaacagguccg

SEQ ID NO: 1110336 - RNA, 19 nt, Artificial Sequence
  Description of Artificial Sequence: Synthetic oligonucleotide
  Sense strand starting at position 251 of SEQ ID NO: 915843
aggacuaguuucuggccau

SEQ ID NO: 1110337 - RNA, 19 nt, Artificial Sequence
  Description of Artificial Sequence: Synthetic oligonucleotide
  Antisense strand to SEQ ID NO: 1110336
auggccagaaacuaguccu

SEQ ID NO: 1110338 - RNA, 19 nt, Artificial Sequence
  Description of Artificial Sequence: Synthetic oligonucleotide
  Sense strand starting at position 252 of SEQ ID NO: 915843
ggacuaguuucuggccaug

SEQ ID NO: 1110339 - RNA, 19 nt, Artificial Sequence
  Description of Artificial Sequence: Synthetic oligonucleotide
  Antisense strand to SEQ ID NO: 1110338
cauggccagaaacuagucc

SEQ ID NO: 1110340 - RNA, 19 nt, Artificial Sequence
  Description of Artificial Sequence: Synthetic oligonucleotide
  Sense strand starting at position 254 of SEQ ID NO: 915843
acuaguuucuggccauguu

SEQ ID NO: 1110341 - RNA, 19 nt, Artificial Sequence
  Description of Artificial Sequence: Synthetic oligonucleotide
  Antisense strand to SEQ ID NO: 1110340
aacauggccagaaacuagu

SEQ ID NO: 1110342 - RNA, 19 nt, Artificial Sequence
  Description of Artificial Sequence: Synthetic oligonucleotide
  Sense strand starting at position 304 of SEQ ID NO: 915843
ggcucauacucacagagaa

SEQ ID NO: 1110343 - RNA, 19 nt, Artificial Sequence
  Description of Artificial Sequence: Synthetic oligonucleotide
  Antisense strand to SEQ ID NO: 1110342
uucucugugaguaugagcc

SEQ ID NO: 1110344 - RNA, 19 nt, Artificial Sequence
  Description of Artificial Sequence: Synthetic oligonucleotide
  Sense strand starting at position 327 of SEQ ID NO: 915843
gcaaaugcuauccaggaga

SEQ ID NO: 1110345 - RNA, 19 nt, Artificial Sequence
  Description of Artificial Sequence: Synthetic oligonucleotide
  Antisense strand to SEQ ID NO: 1110344
ucuccuggauagcauuugc

SEQ ID NO: 1110346 - RNA, 19 nt, Artificial Sequence
  Description of Artificial Sequence: Synthetic oligonucleotide
  Sense strand starting at position 396 of SEQ ID NO: 915843
agagcuauguaauugucca

SEQ ID NO: 1110347 - RNA, 19 nt, Artificial Sequence
  Description of Artificial Sequence: Synthetic oligonucleotide
  Antisense strand to SEQ ID NO: 1110346
uggacaauuacauagcucu

SEQ ID NO: 1110348 - RNA, 19 nt, Artificial Sequence
  Description of Artificial Sequence: Synthetic oligonucleotide
  Sense strand starting at position 400 of SEQ ID NO: 915843
cuauguaauuguccaacca

SEQ ID NO: 1110349 - RNA, 19 nt, Artificial Sequence
  Description of Artificial Sequence: Synthetic oligonucleotide
  Antisense strand to SEQ ID NO: 1110348
ugguuggacaauuacauag

SEQ ID NO: 1110350 - RNA, 19 nt, Artificial Sequence
  Description of Artificial Sequence: Synthetic oligonucleotide
  Sense strand starting at position 510 of SEQ ID NO: 915843
acugguauggcaggaaaca

SEQ ID NO: 1110351 - RNA, 19 nt, Artificial Sequence
  Description of Artificial Sequence: Synthetic oligonucleotide
  Antisense strand to SEQ ID NO: 1110350
uguuuccugccauaccagu

SEQ ID NO: 1110352 - RNA, 19 nt, Artificial Sequence
  Description of Artificial Sequence: Synthetic oligonucleotide
  Sense strand starting at position 681 of SEQ ID NO: 915843
cccugaguguugguccauu

SEQ ID NO: 1110353 - RNA, 19 nt, Artificial Sequence
  Description of Artificial Sequence: Synthetic oligonucleotide
  Antisense strand to SEQ ID NO: 1110352
aauggaccaacacucaggg

SEQ ID NO: 1110354 - RNA, 19 nt, Artificial Sequence
  Description of Artificial Sequence: Synthetic oligonucleotide
  Sense strand starting at position 1091 of SEQ ID NO: 915843
ggccuuuccagauguagag

SEQ ID NO: 1110355 - RNA, 19 nt, Artificial Sequence
  Description of Artificial Sequence: Synthetic oligonucleotide
  Antisense strand to SEQ ID NO: 1110354
cucuacaucuggaaaggcc

SEQ ID NO: 1110356 - RNA, 19 nt, Artificial Sequence
  Description of Artificial Sequence: Synthetic oligonucleotide
  Sense strand starting at position 1123 of SEQ ID NO: 915843
gccuguaucugucggucca

SEQ ID NO: 1110357 - RNA, 19 nt, Artificial Sequence
  Description of Artificial Sequence: Synthetic oligonucleotide
  Antisense strand to SEQ ID NO: 1110356
uggaccgacagauacaggc

SEQ ID NO: 1110358 - RNA, 19 nt, Artificial Sequence
  Description of Artificial Sequence: Synthetic oligonucleotide
  Sense strand starting at position 1329 of SEQ ID NO: 915843
cccagagucugcuuugaau

SEQ ID NO: 1110359 - RNA, 19 nt, Artificial Sequence
  Description of Artificial Sequence: Synthetic oligonucleotide
  Antisense strand to SEQ ID NO: 1110358
auucaaagcagacucuggg

SEQ ID NO: 1110360 - RNA, 19 nt, Artificial Sequence
  Description of Artificial Sequence: Synthetic oligonucleotide
  Sense strand starting at position 1331 of SEQ ID NO: 915843
cagagucugcuuugaauaa

SEQ ID NO: 1110361 - RNA, 19 nt, Artificial Sequence
  Description of Artificial Sequence: Synthetic oligonucleotide
  Antisense strand to SEQ ID NO: 1110360
uuauucaaagcagacucug

SEQ ID NO: 1110362 - RNA, 19 nt, Artificial Sequence
  Description of Artificial Sequence: Synthetic oligonucleotide
  Sense strand starting at position 1332 of SEQ ID NO: 915843
agagucugcuuugaauaaa

SEQ ID NO: 1110363 - RNA, 19 nt, Artificial Sequence
  Description of Artificial Sequence: Synthetic oligonucleotide
  Antisense strand to SEQ ID NO: 1110362
uuuauucaaagcagacucu

SEQ ID NO: 1110364 - RNA, 19 nt, Artificial Sequence
  Description of Artificial Sequence: Synthetic oligonucleotide
  Sense strand starting at position 1671 of SEQ ID NO: 915843
cuaggaguccucgauccca

SEQ ID NO: 1110365 - RNA, 19 nt, Artificial Sequence
  Description of Artificial Sequence: Synthetic oligonucleotide
  Antisense strand to SEQ ID NO: 1110364
ugggaucgaggacuccuag

SEQ ID NO: 1110366 - RNA, 19 nt, Artificial Sequence
  Description of Artificial Sequence: Synthetic oligonucleotide
  Sense strand starting at position 2287 of SEQ ID NO: 915843
gcuacuguucugggaucaa

SEQ ID NO: 1110367 - RNA, 19 nt, Artificial Sequence
  Description of Artificial Sequence: Synthetic oligonucleotide
  Antisense strand to SEQ ID NO: 1110366
uugaucccagaacaguagc

SEQ ID NO: 1110368 - RNA, 19 nt, Artificial Sequence
  Description of Artificial Sequence: Synthetic oligonucleotide
  Sense strand starting at position 2928 of SEQ ID NO: 915843
cugagaaacugggucuuua

SEQ ID NO: 1110369 - RNA, 19 nt, Artificial Sequence
  Description of Artificial Sequence: Synthetic oligonucleotide
  Antisense strand to SEQ ID NO: 1110368
uaaagacccaguuucucag

SEQ ID NO: 1110370 - RNA, 19 nt, Artificial Sequence
  Description of Artificial Sequence: Synthetic oligonucleotide
  Sense strand starting at position 2932 of SEQ ID NO: 915843
gaaacugggucuuuaguua

SEQ ID NO: 1110371 - RNA, 19 nt, Artificial Sequence
  Description of Artificial Sequence: Synthetic oligonucleotide
  Antisense strand to SEQ ID NO: 1110370
uaacuaaagacccaguuuc

SEQ ID NO: 1110372 - RNA, 19 nt, Artificial Sequence
  Description of Artificial Sequence: Synthetic oligonucleotide
  Sense strand starting at position 3079 of SEQ ID NO: 915843
guaggugagugugacuuua

SEQ ID NO: 1110373 - RNA, 19 nt, Artificial Sequence
  Description of Artificial Sequence: Synthetic oligonucleotide
  Antisense strand to SEQ ID NO: 1110372
uaaagucacacucaccuac

SEQ ID NO: 1110374 - RNA, 19 nt, Artificial Sequence
  Description of Artificial Sequence: Synthetic oligonucleotide
  Sense strand starting at position 3081 of SEQ ID NO: 915843
aggugagugugacuuuaga

SEQ ID NO: 1110375 - RNA, 19 nt, Artificial Sequence
  Description of Artificial Sequence: Synthetic oligonucleotide
  Antisense strand to SEQ ID NO: 1110374
ucuaaagucacacucaccu

SEQ ID NO: 1110376 - RNA, 19 nt, Artificial Sequence
  Description of Artificial Sequence: Synthetic oligonucleotide
  Sense strand starting at position 3256 of SEQ ID NO: 915843
ugaagaugcuuccuccuca

SEQ ID NO: 1110377 - RNA, 19 nt, Artificial Sequence
  Description of Artificial Sequence: Synthetic oligonucleotide
  Antisense strand to SEQ ID NO: 1110376
ugaggaggaagcaucuuca

SEQ ID NO: 1110378 - RNA, 19 nt, Artificial Sequence
  Description of Artificial Sequence: Synthetic oligonucleotide
  Sense strand starting at position 3555 of SEQ ID NO: 915843
gugguacuuucucauuucu

SEQ ID NO: 1110379 - RNA, 19 nt, Artificial Sequence
  Description of Artificial Sequence: Synthetic oligonucleotide
  Antisense strand to SEQ ID NO: 1110378
agaaaugagaaaguaccac

SEQ ID NO: 1110380 - RNA, 19 nt, Artificial Sequence
  Description of Artificial Sequence: Synthetic oligonucleotide
  Sense strand starting at position 3981 of SEQ ID NO: 915843
ccugaaucagguuaucuac

SEQ ID NO: 1110381 - RNA, 19 nt, Artificial Sequence
  Description of Artificial Sequence: Synthetic oligonucleotide
  Antisense strand to SEQ ID NO: 1110380
guagauaaccugauucagg

SEQ ID NO: 1110382 - RNA, 19 nt, Artificial Sequence
  Description of Artificial Sequence: Synthetic oligonucleotide
  Sense strand starting at position 3983 of SEQ ID NO: 915843
ugaaucagguuaucuacca

SEQ ID NO: 1110383 - RNA, 19 nt, Artificial Sequence
  Description of Artificial Sequence: Synthetic oligonucleotide
  Antisense strand to SEQ ID NO: 1110382
ugguagauaaccugauuca

SEQ ID NO: 1110384 - RNA, 19 nt, Artificial Sequence
  Description of Artificial Sequence: Synthetic oligonucleotide
  Sense strand starting at position 634 of SEQ ID NO: 915844
cugccacauguguggaaau

SEQ ID NO: 1110385 - RNA, 19 nt, Artificial Sequence
  Description of Artificial Sequence: Synthetic oligonucleotide
  Antisense strand to SEQ ID NO: 1110384
auuuccacacauguggcag

SEQ ID NO: 1110386 - RNA, 19 nt, Artificial Sequence
  Description of Artificial Sequence: Synthetic oligonucleotide
  Sense strand starting at position 636 of SEQ ID NO: 915844
gccacauguguggaaaucu

SEQ ID NO: 1110387 - RNA, 19 nt, Artificial Sequence
  Description of Artificial Sequence: Synthetic oligonucleotide
  Antisense strand to SEQ ID NO: 1110386
agauuuccacacauguggc

SEQ ID NO: 1110388 - RNA, 19 nt, Artificial Sequence
  Description of Artificial Sequence: Synthetic oligonucleotide
  Sense strand starting at position 674 of SEQ ID NO: 915844
aguugcagaucaucacaau

SEQ ID NO: 1110389 - RNA, 19 nt, Artificial Sequence
  Description of Artificial Sequence: Synthetic oligonucleotide
  Antisense strand to SEQ ID NO: 1110388
auugugaugaucugcaacu

SEQ ID NO: 1110390 - RNA, 19 nt, Artificial Sequence
  Description of Artificial Sequence: Synthetic oligonucleotide
  Sense strand starting at position 706 of SEQ ID NO: 915844
acaaauuuaucagaacgga

SEQ ID NO: 1110391 - RNA, 19 nt, Artificial Sequence
  Description of Artificial Sequence: Synthetic oligonucleotide
  Antisense strand to SEQ ID NO: 1110390
uccguucugauaaauuugu

SEQ ID NO: 1110392 - RNA, 19 nt, Artificial Sequence
  Description of Artificial Sequence: Synthetic oligonucleotide
  Sense strand starting at position 743 of SEQ ID NO: 915844
accuaagagucguuuaagg

SEQ ID NO: 1110393 - RNA, 19 nt, Artificial Sequence
  Description of Artificial Sequence: Synthetic oligonucleotide
  Antisense strand to SEQ ID NO: 1110392
ccuuaaacgacucuuaggu

SEQ ID NO: 1110394 - RNA, 19 nt, Artificial Sequence
  Description of Artificial Sequence: Synthetic oligonucleotide
  Sense strand starting at position 745 of SEQ ID NO: 915844
cuaagagucguuuaaggag

SEQ ID NO: 1110395 - RNA, 19 nt, Artificial Sequence
  Description of Artificial Sequence: Synthetic oligonucleotide
  Antisense strand to SEQ ID NO: 1110394
cuccuuaaacgacucuuag

SEQ ID NO: 1110396 - RNA, 19 nt, Artificial Sequence
  Description of Artificial Sequence: Synthetic oligonucleotide
  Sense strand starting at position 751 of SEQ ID NO: 915844
gucguuuaaggagacauaa

SEQ ID NO: 1110397 - RNA, 19 nt, Artificial Sequence
  Description of Artificial Sequence: Synthetic oligonucleotide
  Antisense strand to SEQ ID NO: 1110396
uuaugucuccuuaaacgac

SEQ ID NO: 1110398 - RNA, 19 nt, Artificial Sequence
  Description of Artificial Sequence: Synthetic oligonucleotide
  Sense strand starting at position 768 of SEQ ID NO: 915844
aaggguggccuuugauaag

SEQ ID NO: 1110399 - RNA, 19 nt, Artificial Sequence
  Description of Artificial Sequence: Synthetic oligonucleotide
  Antisense strand to SEQ ID NO: 1110398
cuuaucaaaggccacccuu

SEQ ID NO: 1110400 - RNA, 19 nt, Artificial Sequence
  Description of Artificial Sequence: Synthetic oligonucleotide
  Sense strand starting at position 1198 of SEQ ID NO: 915844
gaggcaaacgcuuaaauca

SEQ ID NO: 1110401 - RNA, 19 nt, Artificial Sequence
  Description of Artificial Sequence: Synthetic oligonucleotide
  Antisense strand to SEQ ID NO: 1110400
ugauuuaagcguuugccuc

SEQ ID NO: 1110402 - RNA, 19 nt, Artificial Sequence
  Description of Artificial Sequence: Synthetic oligonucleotide
  Sense strand starting at position 1294 of SEQ ID NO: 915844
uaacccugucaucgguaau

SEQ ID NO: 1110403 - RNA, 19 nt, Artificial Sequence
  Description of Artificial Sequence: Synthetic oligonucleotide
  Antisense strand to SEQ ID NO: 1110402
auuaccgaugacaggguua

SEQ ID NO: 1110404 - RNA, 19 nt, Artificial Sequence
  Description of Artificial Sequence: Synthetic oligonucleotide
  Sense strand starting at position 1715 of SEQ ID NO: 915844
gcaggucagaguuaggaau

SEQ ID NO: 1110405 - RNA, 19 nt, Artificial Sequence
  Description of Artificial Sequence: Synthetic oligonucleotide
  Antisense strand to SEQ ID NO: 1110404
auuccuaacucugaccugc

SEQ ID NO: 1110406 - RNA, 19 nt, Artificial Sequence
  Description of Artificial Sequence: Synthetic oligonucleotide
  Sense strand starting at position 2231 of SEQ ID NO: 915844
aaacuauacuggguguuga

SEQ ID NO: 1110407 - RNA, 19 nt, Artificial Sequence
  Description of Artificial Sequence: Synthetic oligonucleotide
  Antisense strand to SEQ ID NO: 1110406
ucaacacccaguauaguuu

SEQ ID NO: 1110408 - RNA, 19 nt, Artificial Sequence
  Description of Artificial Sequence: Synthetic oligonucleotide
  Sense strand starting at position 2281 of SEQ ID NO: 915844
cacacaacuccucggaguu

SEQ ID NO: 1110409 - RNA, 19 nt, Artificial Sequence
  Description of Artificial Sequence: Synthetic oligonucleotide
  Antisense strand to SEQ ID NO: 1110408
aacuccgaggaguugugug

SEQ ID NO: 1110410 - RNA, 19 nt, Artificial Sequence
  Description of Artificial Sequence: Synthetic oligonucleotide
  Sense strand starting at position 2282 of SEQ ID NO: 915844
acacaacuccucggaguuu

SEQ ID NO: 1110411 - RNA, 19 nt, Artificial Sequence
  Description of Artificial Sequence: Synthetic oligonucleotide
  Antisense strand to SEQ ID NO: 1110410
aaacuccgaggaguugugu

SEQ ID NO: 1110412 - RNA, 19 nt, Artificial Sequence
  Description of Artificial Sequence: Synthetic oligonucleotide
  Sense strand starting at position 2369 of SEQ ID NO: 915844
uuucgcagucucuauggau

SEQ ID NO: 1110413 - RNA, 19 nt, Artificial Sequence
  Description of Artificial Sequence: Synthetic oligonucleotide
  Antisense strand to SEQ ID NO: 1110412
auccauagagacugcgaaa

SEQ ID NO: 1110414 - RNA, 19 nt, Artificial Sequence
  Description of Artificial Sequence: Synthetic oligonucleotide
  Sense strand starting at position 2410 of SEQ ID NO: 915844
gagccagaauuugaggauu

SEQ ID NO: 1110415 - RNA, 19 nt, Artificial Sequence
  Description of Artificial Sequence: Synthetic oligonucleotide
  Antisense strand to SEQ ID NO: 1110414
aauccucaaauucuggcuc

SEQ ID NO: 1110416 - RNA, 19 nt, Artificial Sequence
  Description of Artificial Sequence: Synthetic oligonucleotide
  Sense strand starting at position 2688 of SEQ ID NO: 915844
acuaaauaccugcguccau

SEQ ID NO: 1110417 - RNA, 19 nt, Artificial Sequence
  Description of Artificial Sequence: Synthetic oligonucleotide
  Antisense strand to SEQ ID NO: 1110416
auggacgcagguauuuagu

SEQ ID NO: 1110418 - RNA, 19 nt, Artificial Sequence
  Description of Artificial Sequence: Synthetic oligonucleotide
  Sense strand starting at position 2689 of SEQ ID NO: 915844
cuaaauaccugcguccauu

SEQ ID NO: 1110419 - RNA, 19 nt, Artificial Sequence
  Description of Artificial Sequence: Synthetic oligonucleotide
  Antisense strand to SEQ ID NO: 1110418
aauggacgcagguauuuag

SEQ ID NO: 1110420 - RNA, 19 nt, Artificial Sequence
  Description of Artificial Sequence: Synthetic oligonucleotide
  Sense strand starting at position 2699 of SEQ ID NO: 915844
gcguccauuuacccagaau

SEQ ID NO: 1110421 - RNA, 19 nt, Artificial Sequence
  Description of Artificial Sequence: Synthetic oligonucleotide
  Antisense strand to SEQ ID NO: 1110420
auucuggguaaauggacgc

SEQ ID NO: 1110422 - RNA, 19 nt, Artificial Sequence
  Description of Artificial Sequence: Synthetic oligonucleotide
  Sense strand starting at position 2737 of SEQ ID NO: 915844
agucaucuuuacguugagu

SEQ ID NO: 1110423 - RNA, 19 nt, Artificial Sequence
  Description of Artificial Sequence: Synthetic oligonucleotide
  Antisense strand to SEQ ID NO: 1110422
acucaacguaaagaugacu

SEQ ID NO: 1110424 - RNA, 19 nt, Artificial Sequence
  Description of Artificial Sequence: Synthetic oligonucleotide
  Sense strand starting at position 2742 of SEQ ID NO: 915844
ucuuuacguugaguucuaa

SEQ ID NO: 1110425 - RNA, 19 nt, Artificial Sequence
  Description of Artificial Sequence: Synthetic oligonucleotide
  Antisense strand to SEQ ID NO: 1110424
uuagaacucaacguaaaga

SEQ ID NO: 1110426 - RNA, 19 nt, Artificial Sequence
  Description of Artificial Sequence: Synthetic oligonucleotide
  Sense strand starting at position 2753 of SEQ ID NO: 915844
aguucuaacuucuuagaag

SEQ ID NO: 1110427 - RNA, 19 nt, Artificial Sequence
  Description of Artificial Sequence: Synthetic oligonucleotide
  Antisense strand to SEQ ID NO: 1110426
cuucuaagaaguuagaacu

SEQ ID NO: 1110428 - RNA, 19 nt, Artificial Sequence
  Description of Artificial Sequence: Synthetic oligonucleotide
  Sense strand starting at position 2821 of SEQ ID NO: 915844
agaguuagucugcguagaa

SEQ ID NO: 1110429 - RNA, 19 nt, Artificial Sequence
  Description of Artificial Sequence: Synthetic oligonucleotide
  Antisense strand to SEQ ID NO: 1110428
uucuacgcagacuaacucu

SEQ ID NO: 1110430 - RNA, 19 nt, Artificial Sequence
  Description of Artificial Sequence: Synthetic oligonucleotide
  Sense strand starting at position 2822 of SEQ ID NO: 915844
gaguuagucugcguagaaa

SEQ ID NO: 1110431 - RNA, 19 nt, Artificial Sequence
  Description of Artificial Sequence: Synthetic oligonucleotide
  Antisense strand to SEQ ID NO: 1110430
uuucuacgcagacuaacuc

SEQ ID NO: 1110432 - RNA, 19 nt, Artificial Sequence
  Description of Artificial Sequence: Synthetic oligonucleotide
  Sense strand starting at position 2867 of SEQ ID NO: 915844
gggaauuuaucacauucuu

SEQ ID NO: 1110433 - RNA, 19 nt, Artificial Sequence
  Description of Artificial Sequence: Synthetic oligonucleotide
  Antisense strand to SEQ ID NO: 1110432
aagaaugugauaaauuccc

SEQ ID NO: 1110434 - RNA, 19 nt, Artificial Sequence
  Description of Artificial Sequence: Synthetic oligonucleotide
  Sense strand starting at position 2887 of SEQ ID NO: 915844
aggcguaaaugccuuaacu

SEQ ID NO: 1110435 - RNA, 19 nt, Artificial Sequence
  Description of Artificial Sequence: Synthetic oligonucleotide
  Antisense strand to SEQ ID NO: 1110434
aguuaaggcauuuacgccu

SEQ ID NO: 1110436 - RNA, 19 nt, Artificial Sequence
  Description of Artificial Sequence: Synthetic oligonucleotide
  Sense strand starting at position 2889 of SEQ ID NO: 915844
gcguaaaugccuuaacuau

SEQ ID NO: 1110437 - RNA, 19 nt, Artificial Sequence
  Description of Artificial Sequence: Synthetic oligonucleotide
  Antisense strand to SEQ ID NO: 1110436
auaguuaaggcauuuacgc

SEQ ID NO: 1110438 - RNA, 19 nt, Artificial Sequence
  Description of Artificial Sequence: Synthetic oligonucleotide
  Sense strand starting at position 2967 of SEQ ID NO: 915844
ggcuuacuguccuuaccuu

SEQ ID NO: 1110439 - RNA, 19 nt, Artificial Sequence
  Description of Artificial Sequence: Synthetic oligonucleotide
  Antisense strand to SEQ ID NO: 1110438
aagguaaggacaguaagcc

SEQ ID NO: 1110440 - RNA, 19 nt, Artificial Sequence
  Description of Artificial Sequence: Synthetic oligonucleotide
  Sense strand starting at position 3040 of SEQ ID NO: 915844
ggagcuggagucggauaua

SEQ ID NO: 1110441 - RNA, 19 nt, Artificial Sequence
  Description of Artificial Sequence: Synthetic oligonucleotide
  Antisense strand to SEQ ID NO: 1110440
uauauccgacuccagcucc

SEQ ID NO: 1110442 - RNA, 19 nt, Artificial Sequence
  Description of Artificial Sequence: Synthetic oligonucleotide
  Sense strand starting at position 3043 of SEQ ID NO: 915844
gcuggagucggauauauga

SEQ ID NO: 1110443 - RNA, 19 nt, Artificial Sequence
  Description of Artificial Sequence: Synthetic oligonucleotide
  Antisense strand to SEQ ID NO: 1110442
ucauauauccgacuccagc

SEQ ID NO: 1110444 - RNA, 19 nt, Artificial Sequence
  Description of Artificial Sequence: Synthetic oligonucleotide
  Sense strand starting at position 3142 of SEQ ID NO: 915844
ugauuaagauggcaauaau

SEQ ID NO: 1110445 - RNA, 19 nt, Artificial Sequence
  Description of Artificial Sequence: Synthetic oligonucleotide
  Antisense strand to SEQ ID NO: 1110444
auuauugccaucuuaauca

SEQ ID NO: 1110446 - RNA, 19 nt, Artificial Sequence
  Description of Artificial Sequence: Synthetic oligonucleotide
  Sense strand starting at position 3222 of SEQ ID NO: 915844
ggaaauaaauguuaaagga

SEQ ID NO: 1110447 - RNA, 19 nt, Artificial Sequence
  Description of Artificial Sequence: Synthetic oligonucleotide
  Antisense strand to SEQ ID NO: 1110446
uccuuuaacauuuauuucc

SEQ ID NO: 1110448 - RNA, 19 nt, Artificial Sequence
  Description of Artificial Sequence: Synthetic oligonucleotide
  Sense strand starting at position 3253 of SEQ ID NO: 915844
caaggagugguuuacauug

SEQ ID NO: 1110449 - RNA, 19 nt, Artificial Sequence
  Description of Artificial Sequence: Synthetic oligonucleotide
  Antisense strand to SEQ ID NO: 1110448
caauguaaaccacuccuug

SEQ ID NO: 1110450 - RNA, 19 nt, Artificial Sequence
  Description of Artificial Sequence: Synthetic oligonucleotide
  Sense strand starting at position 3324 of SEQ ID NO: 915844
acuucuauguucccaggua

SEQ ID NO: 1110451 - RNA, 19 nt, Artificial Sequence
  Description of Artificial Sequence: Synthetic oligonucleotide
  Antisense strand to SEQ ID NO: 1110450
uaccugggaacauagaagu

SEQ ID NO: 1110452 - RNA, 19 nt, Artificial Sequence
  Description of Artificial Sequence: Synthetic oligonucleotide
  Sense strand starting at position 3419 of SEQ ID NO: 915844
auuucuggauugugaauuu

SEQ ID NO: 1110453 - RNA, 19 nt, Artificial Sequence
  Description of Artificial Sequence: Synthetic oligonucleotide
  Antisense strand to SEQ ID NO: 1110452
aaauucacaauccagaaau

SEQ ID NO: 1110454 - RNA, 19 nt, Artificial Sequence
  Description of Artificial Sequence: Synthetic oligonucleotide
  Sense strand starting at position 3428 of SEQ ID NO: 915844
uugugaauuugacccguua

SEQ ID NO: 1110455 - RNA, 19 nt, Artificial Sequence
  Description of Artificial Sequence: Synthetic oligonucleotide
  Antisense strand to SEQ ID NO: 1110454
uaacgggucaaauucacaa

SEQ ID NO: 1110456 - RNA, 19 nt, Artificial Sequence
  Description of Artificial Sequence: Synthetic oligonucleotide
  Sense strand starting at position 3475 of SEQ ID NO: 915844
aguauaagauucuuaggcu

SEQ ID NO: 1110457 - RNA, 19 nt, Artificial Sequence
  Description of Artificial Sequence: Synthetic oligonucleotide
  Antisense strand to SEQ ID NO: 1110456
agccuaagaaucuuauacu

SEQ ID NO: 1110458 - RNA, 19 nt, Artificial Sequence
  Description of Artificial Sequence: Synthetic oligonucleotide
  Sense strand starting at position 3503 of SEQ ID NO: 915844
gucuacuaaaggugacaga

SEQ ID NO: 1110459 - RNA, 19 nt, Artificial Sequence
  Description of Artificial Sequence: Synthetic oligonucleotide
  Antisense strand to SEQ ID NO: 1110458
ucugucaccuuuaguagac

SEQ ID NO: 1110460 - RNA, 19 nt, Artificial Sequence
  Description of Artificial Sequence: Synthetic oligonucleotide
  Sense strand starting at position 3911 of SEQ ID NO: 915844
aagauucugguuugacaaa

SEQ ID NO: 1110461 - RNA, 19 nt, Artificial Sequence
  Description of Artificial Sequence: Synthetic oligonucleotide
  Antisense strand to SEQ ID NO: 1110460
uuugucaaaccagaaucuu

SEQ ID NO: 1110462 - RNA, 19 nt, Artificial Sequence
  Description of Artificial Sequence: Synthetic oligonucleotide
  Sense strand starting at position 3943 of SEQ ID NO: 915844
agaagcuaccucuggaaca

SEQ ID NO: 1110463 - RNA, 19 nt, Artificial Sequence
  Description of Artificial Sequence: Synthetic oligonucleotide
  Antisense strand to SEQ ID NO: 1110462
uguuccagagguagcuucu

SEQ ID NO: 1110464 - RNA, 19 nt, Artificial Sequence
  Description of Artificial Sequence: Synthetic oligonucleotide
  Sense strand starting at position 34 of SEQ ID NO: 915845
agaaucuaaugccagauuu

SEQ ID NO: 1110465 - RNA, 19 nt, Artificial Sequence
  Description of Artificial Sequence: Synthetic oligonucleotide
  Antisense strand to SEQ ID NO: 1110464
aaaucuggcauuagauucu

SEQ ID NO: 1110466 - RNA, 19 nt, Artificial Sequence
  Description of Artificial Sequence: Synthetic oligonucleotide
  Sense strand starting at position 260 of SEQ ID NO: 915845
gcuaauacacuuuagaagu

SEQ ID NO: 1110467 - RNA, 19 nt, Artificial Sequence
  Description of Artificial Sequence: Synthetic oligonucleotide
  Antisense strand to SEQ ID NO: 1110466
acuucuaaaguguauuagc

SEQ ID NO: 1110468 - RNA, 19 nt, Artificial Sequence
  Description of Artificial Sequence: Synthetic oligonucleotide
  Sense strand starting at position 278 of SEQ ID NO: 915845
uggcauaauaugcauguga

SEQ ID NO: 1110469 - RNA, 19 nt, Artificial Sequence
  Description of Artificial Sequence: Synthetic oligonucleotide
  Antisense strand to SEQ ID NO: 1110468
ucacaugcauauuaugcca

SEQ ID NO: 1110470 - RNA, 19 nt, Artificial Sequence
  Description of Artificial Sequence: Synthetic oligonucleotide
  Sense strand starting at position 280 of SEQ ID NO: 915845
gcauaauaugcaugugauu

SEQ ID NO: 1110471 - RNA, 19 nt, Artificial Sequence
  Description of Artificial Sequence: Synthetic oligonucleotide
  Antisense strand to SEQ ID NO: 1110470
aaucacaugcauauuaugc

SEQ ID NO: 1110472 - RNA, 19 nt, Artificial Sequence
  Description of Artificial Sequence: Synthetic oligonucleotide
  Sense strand starting at position 474 of SEQ ID NO: 915845
ccgagaccucuccaaugca

SEQ ID NO: 1110473 - RNA, 19 nt, Artificial Sequence
  Description of Artificial Sequence: Synthetic oligonucleotide
  Antisense strand to SEQ ID NO: 1110472
ugcauuggagaggucucgg

SEQ ID NO: 1110474 - RNA, 19 nt, Artificial Sequence
  Description of Artificial Sequence: Synthetic oligonucleotide
  Sense strand starting at position 477 of SEQ ID NO: 915845
agaccucuccaaugcauga

SEQ ID NO: 1110475 - RNA, 19 nt, Artificial Sequence
  Description of Artificial Sequence: Synthetic oligonucleotide
  Antisense strand to SEQ ID NO: 1110474
ucaugcauuggagaggucu

SEQ ID NO: 1110476 - RNA, 19 nt, Artificial Sequence
  Description of Artificial Sequence: Synthetic oligonucleotide
  Sense strand starting at position 599 of SEQ ID NO: 915845
cucucugauuccgcaaagu

SEQ ID NO: 1110477 - RNA, 19 nt, Artificial Sequence
  Description of Artificial Sequence: Synthetic oligonucleotide
  Antisense strand to SEQ ID NO: 1110476
acuuugcggaaucagagag

SEQ ID NO: 1110478 - RNA, 19 nt, Artificial Sequence
  Description of Artificial Sequence: Synthetic oligonucleotide
  Sense strand starting at position 608 of SEQ ID NO: 915845
uccgcaaaguuaucuuaaa

SEQ ID NO: 1110479 - RNA, 19 nt, Artificial Sequence
  Description of Artificial Sequence: Synthetic oligonucleotide
  Antisense strand to SEQ ID NO: 1110478
uuuaagauaacuuugcgga

SEQ ID NO: 1110480 - RNA, 19 nt, Artificial Sequence
  Description of Artificial Sequence: Synthetic oligonucleotide
  Sense strand starting at position 831 of SEQ ID NO: 915845
gggucucucccauggacaa

SEQ ID NO: 1110481 - RNA, 19 nt, Artificial Sequence
  Description of Artificial Sequence: Synthetic oligonucleotide
  Antisense strand to SEQ ID NO: 1110480
uuguccaugggagagaccc

SEQ ID NO: 1110482 - RNA, 19 nt, Artificial Sequence
  Description of Artificial Sequence: Synthetic oligonucleotide
  Sense strand starting at position 847 of SEQ ID NO: 915845
caaggaaguucuguuaaau

SEQ ID NO: 1110483 - RNA, 19 nt, Artificial Sequence
  Description of Artificial Sequence: Synthetic oligonucleotide
  Antisense strand to SEQ ID NO: 1110482
auuuaacagaacuuccuug

SEQ ID NO: 1110484 - RNA, 19 nt, Artificial Sequence
  Description of Artificial Sequence: Synthetic oligonucleotide
  Sense strand starting at position 857 of SEQ ID NO: 915845
cuguuaaauccaggcgaga

SEQ ID NO: 1110485 - RNA, 19 nt, Artificial Sequence
  Description of Artificial Sequence: Synthetic oligonucleotide
  Antisense strand to SEQ ID NO: 1110484
ucucgccuggauuuaacag

SEQ ID NO: 1110486 - RNA, 19 nt, Artificial Sequence
  Description of Artificial Sequence: Synthetic oligonucleotide
  Sense strand starting at position 886 of SEQ ID NO: 915845
uggaaacacuugucaauug

SEQ ID NO: 1110487 - RNA, 19 nt, Artificial Sequence
  Description of Artificial Sequence: Synthetic oligonucleotide
  Antisense strand to SEQ ID NO: 1110486
caauugacaaguguuucca

SEQ ID NO: 1110488 - RNA, 19 nt, Artificial Sequence
  Description of Artificial Sequence: Synthetic oligonucleotide
  Sense strand starting at position 909 of SEQ ID NO: 915845
ucugacaaguguucccgaa

SEQ ID NO: 1110489 - RNA, 19 nt, Artificial Sequence
  Description of Artificial Sequence: Synthetic oligonucleotide
  Antisense strand to SEQ ID NO: 1110488
uucgggaacacuugucaga

SEQ ID NO: 1110490 - RNA, 19 nt, Artificial Sequence
  Description of Artificial Sequence: Synthetic oligonucleotide
  Sense strand starting at position 911 of SEQ ID NO: 915845
ugacaaguguucccgaaca

SEQ ID NO: 1110491 - RNA, 19 nt, Artificial Sequence
  Description of Artificial Sequence: Synthetic oligonucleotide
  Antisense strand to SEQ ID NO: 1110490
uguucgggaacacuuguca

SEQ ID NO: 1110492 - RNA, 19 nt, Artificial Sequence
  Description of Artificial Sequence: Synthetic oligonucleotide
  Sense strand starting at position 2405 of SEQ ID NO: 915845
gcagccuuccgaguucuca

SEQ ID NO: 1110493 - RNA, 19 nt, Artificial Sequence
  Description of Artificial Sequence: Synthetic oligonucleotide
  Antisense strand to SEQ ID NO: 1110492
ugagaacucggaaggcugc

SEQ ID NO: 1110494 - RNA, 19 nt, Artificial Sequence
  Description of Artificial Sequence: Synthetic oligonucleotide
  Sense strand starting at position 2413 of SEQ ID NO: 915845
ccgaguucucacgauaaac

SEQ ID NO: 1110495 - RNA, 19 nt, Artificial Sequence
  Description of Artificial Sequence: Synthetic oligonucleotide
  Antisense strand to SEQ ID NO: 1110494
guuuaucgugagaacucgg

SEQ ID NO: 1110496 - RNA, 19 nt, Artificial Sequence
  Description of Artificial Sequence: Synthetic oligonucleotide
  Sense strand starting at position 2415 of SEQ ID NO: 915845
gaguucucacgauaaacuc

SEQ ID NO: 1110497 - RNA, 19 nt, Artificial Sequence
  Description of Artificial Sequence: Synthetic oligonucleotide
  Antisense strand to SEQ ID NO: 1110496
gaguuuaucgugagaacuc

SEQ ID NO: 1110498 - RNA, 19 nt, Artificial Sequence
  Description of Artificial Sequence: Synthetic oligonucleotide
  Sense strand starting at position 2508 of SEQ ID NO: 915845
uacgaagagagcgguuuaa

SEQ ID NO: 1110499 - RNA, 19 nt, Artificial Sequence
  Description of Artificial Sequence: Synthetic oligonucleotide
  Antisense strand to SEQ ID NO: 1110498
uuaaaccgcucucuucgua

SEQ ID NO: 1110500 - RNA, 19 nt, Artificial Sequence
  Description of Artificial Sequence: Synthetic oligonucleotide
  Sense strand starting at position 2548 of SEQ ID NO: 915845
uacgguguaagguacuaaa

SEQ ID NO: 1110501 - RNA, 19 nt, Artificial Sequence
  Description of Artificial Sequence: Synthetic oligonucleotide
  Antisense strand to SEQ ID NO: 1110500
uuuaguaccuuacaccgua

SEQ ID NO: 1110502 - RNA, 19 nt, Artificial Sequence
  Description of Artificial Sequence: Synthetic oligonucleotide
  Sense strand starting at position 2551 of SEQ ID NO: 915845
gguguaagguacuaaauuu

SEQ ID NO: 1110503 - RNA, 19 nt, Artificial Sequence
  Description of Artificial Sequence: Synthetic oligonucleotide
  Antisense strand to SEQ ID NO: 1110502
aaauuuaguaccuuacacc

SEQ ID NO: 1110504 - RNA, 19 nt, Artificial Sequence
  Description of Artificial Sequence: Synthetic oligonucleotide
  Sense strand starting at position 2717 of SEQ ID NO: 915845
cuguguauguucuuauaca

SEQ ID NO: 1110505 - RNA, 19 nt, Artificial Sequence
  Description of Artificial Sequence: Synthetic oligonucleotide
  Antisense strand to SEQ ID NO: 1110504
uguauaagaacauacacag

SEQ ID NO: 1110506 - RNA, 19 nt, Artificial Sequence
  Description of Artificial Sequence: Synthetic oligonucleotide
  Sense strand starting at position 2908 of SEQ ID NO: 915845
ucauauugacguugcauau

SEQ ID NO: 1110507 - RNA, 19 nt, Artificial Sequence
  Description of Artificial Sequence: Synthetic oligonucleotide
  Antisense strand to SEQ ID NO: 1110506
auaugcaacgucaauauga

SEQ ID NO: 1110508 - RNA, 19 nt, Artificial Sequence
  Description of Artificial Sequence: Synthetic oligonucleotide
  Sense strand starting at position 2974 of SEQ ID NO: 915845
uugaucgucuuacuuguaa

SEQ ID NO: 1110509 - RNA, 19 nt, Artificial Sequence
  Description of Artificial Sequence: Synthetic oligonucleotide
  Antisense strand to SEQ ID NO: 1110508
uuacaaguaagacgaucaa

SEQ ID NO: 1110510 - RNA, 19 nt, Artificial Sequence
  Description of Artificial Sequence: Synthetic oligonucleotide
  Sense strand starting at position 3012 of SEQ ID NO: 915845
ugaaguaucuggguuguuu

SEQ ID NO: 1110511 - RNA, 19 nt, Artificial Sequence
  Description of Artificial Sequence: Synthetic oligonucleotide
  Antisense strand to SEQ ID NO: 1110510
aaacaacccagauacuuca

SEQ ID NO: 1110512 - RNA, 19 nt, Artificial Sequence
  Description of Artificial Sequence: Synthetic oligonucleotide
  Sense strand starting at position 3133 of SEQ ID NO: 915845
augcaucuugcagaaauga

SEQ ID NO: 1110513 - RNA, 19 nt, Artificial Sequence
  Description of Artificial Sequence: Synthetic oligonucleotide
  Antisense strand to SEQ ID NO: 1110512
ucauuucugcaagaugcau

SEQ ID NO: 1110514 - RNA, 19 nt, Artificial Sequence
  Description of Artificial Sequence: Synthetic oligonucleotide
  Sense strand starting at position 3250 of SEQ ID NO: 915845
cauggauauaaguguugag

SEQ ID NO: 1110515 - RNA, 19 nt, Artificial Sequence
  Description of Artificial Sequence: Synthetic oligonucleotide
  Antisense strand to SEQ ID NO: 1110514
cucaacacuuauauccaug

SEQ ID NO: 1110516 - RNA, 19 nt, Artificial Sequence
  Description of Artificial Sequence: Synthetic oligonucleotide
  Sense strand starting at position 3349 of SEQ ID NO: 915845
uucgcauuauaugcccaaa

SEQ ID NO: 1110517 - RNA, 19 nt, Artificial Sequence
  Description of Artificial Sequence: Synthetic oligonucleotide
  Antisense strand to SEQ ID NO: 1110516
uuugggcauauaaugcgaa

SEQ ID NO: 1110518 - RNA, 19 nt, Artificial Sequence
  Description of Artificial Sequence: Synthetic oligonucleotide
  Sense strand starting at position 3415 of SEQ ID NO: 915845
agcugacaacucugauuag

SEQ ID NO: 1110519 - RNA, 19 nt, Artificial Sequence
  Description of Artificial Sequence: Synthetic oligonucleotide
  Antisense strand to SEQ ID NO: 1110518
cuaaucagaguugucagcu

SEQ ID NO: 1110520 - RNA, 19 nt, Artificial Sequence
  Description of Artificial Sequence: Synthetic oligonucleotide
  Sense strand starting at position 3418 of SEQ ID NO: 915845
ugacaacucugauuagguu

SEQ ID NO: 1110521 - RNA, 19 nt, Artificial Sequence
  Description of Artificial Sequence: Synthetic oligonucleotide
  Antisense strand to SEQ ID NO: 1110520
aaccuaaucagaguuguca

SEQ ID NO: 1110522 - RNA, 19 nt, Artificial Sequence
  Description of Artificial Sequence: Synthetic oligonucleotide
  Sense strand starting at position 3562 of SEQ ID NO: 915845
gguauugcaccuuacuaag

SEQ ID NO: 1110523 - RNA, 19 nt, Artificial Sequence
  Description of Artificial Sequence: Synthetic oligonucleotide
  Antisense strand to SEQ ID NO: 1110522
cuuaguaaggugcaauacc

SEQ ID NO: 1110524 - RNA, 19 nt, Artificial Sequence
  Description of Artificial Sequence: Synthetic oligonucleotide
  Sense strand starting at position 3568 of SEQ ID NO: 915845
gcaccuuacuaagauuuag

SEQ ID NO: 1110525 - RNA, 19 nt, Artificial Sequence
  Description of Artificial Sequence: Synthetic oligonucleotide
  Antisense strand to SEQ ID NO: 1110524
cuaaaucuuaguaaggugc

SEQ ID NO: 1110526 - RNA, 19 nt, Artificial Sequence
  Description of Artificial Sequence: Synthetic oligonucleotide
  Sense strand starting at position 3580 of SEQ ID NO: 915845
gauuuagcaugaggaagaa

SEQ ID NO: 1110527 - RNA, 19 nt, Artificial Sequence
  Description of Artificial Sequence: Synthetic oligonucleotide
  Antisense strand to SEQ ID NO: 1110526
uucuuccucaugcuaaauc

SEQ ID NO: 1110528 - RNA, 19 nt, Artificial Sequence
  Description of Artificial Sequence: Synthetic oligonucleotide
  Sense strand starting at position 3707 of SEQ ID NO: 915845
ggaugcuucuacucaagga

SEQ ID NO: 1110529 - RNA, 19 nt, Artificial Sequence
  Description of Artificial Sequence: Synthetic oligonucleotide
  Antisense strand to SEQ ID NO: 1110528
uccuugaguagaagcaucc

SEQ ID NO: 1110530 - RNA, 19 nt, Artificial Sequence
  Description of Artificial Sequence: Synthetic oligonucleotide
  Sense strand starting at position 3733 of SEQ ID NO: 915845
gauagaacugacugccuga

SEQ ID NO: 1110531 - RNA, 19 nt, Artificial Sequence
  Description of Artificial Sequence: Synthetic oligonucleotide
  Antisense strand to SEQ ID NO: 1110530
ucaggcagucaguucuauc

SEQ ID NO: 1110532 - RNA, 19 nt, Artificial Sequence
  Description of Artificial Sequence: Synthetic oligonucleotide
  Sense strand starting at position 3780 of SEQ ID NO: 915845
uugggaaagucgucauaua

SEQ ID NO: 1110533 - RNA, 19 nt, Artificial Sequence
  Description of Artificial Sequence: Synthetic oligonucleotide
  Antisense strand to SEQ ID NO: 1110532
uauaugacgacuuucccaa

SEQ ID NO: 1110534 - RNA, 19 nt, Artificial Sequence
  Description of Artificial Sequence: Synthetic oligonucleotide
  Sense strand starting at position 3781 of SEQ ID NO: 915845
ugggaaagucgucauauac

SEQ ID NO: 1110535 - RNA, 19 nt, Artificial Sequence
  Description of Artificial Sequence: Synthetic oligonucleotide
  Antisense strand to SEQ ID NO: 1110534
guauaugacgacuuuccca

SEQ ID NO: 1110536 - RNA, 19 nt, Artificial Sequence
  Description of Artificial Sequence: Synthetic oligonucleotide
  Sense strand starting at position 3801 of SEQ ID NO: 915845
gugaguacccaguauuaca

SEQ ID NO: 1110537 - RNA, 19 nt, Artificial Sequence
  Description of Artificial Sequence: Synthetic oligonucleotide
  Antisense strand to SEQ ID NO: 1110536
uguaauacuggguacucac

SEQ ID NO: 1110538 - RNA, 19 nt, Artificial Sequence
  Description of Artificial Sequence: Synthetic oligonucleotide
  Sense strand starting at position 3826 of SEQ ID NO: 915845
gccuuaggccuuuggacaa

SEQ ID NO: 1110539 - RNA, 19 nt, Artificial Sequence
  Description of Artificial Sequence: Synthetic oligonucleotide
  Antisense strand to SEQ ID NO: 1110538
uuguccaaaggccuaaggc

SEQ ID NO: 1110540 - RNA, 19 nt, Artificial Sequence
  Description of Artificial Sequence: Synthetic oligonucleotide
  Sense strand starting at position 3855 of SEQ ID NO: 915845
aaauguugccucuaaggga

SEQ ID NO: 1110541 - RNA, 19 nt, Artificial Sequence
  Description of Artificial Sequence: Synthetic oligonucleotide
  Antisense strand to SEQ ID NO: 1110540
ucccuuagaggcaacauuu

SEQ ID NO: 1110542 - RNA, 19 nt, Artificial Sequence
  Description of Artificial Sequence: Synthetic oligonucleotide
  Sense strand starting at position 3893 of SEQ ID NO: 915845
ggacaucauuuacagauac

SEQ ID NO: 1110543 - RNA, 19 nt, Artificial Sequence
  Description of Artificial Sequence: Synthetic oligonucleotide
  Antisense strand to SEQ ID NO: 1110542
guaucuguaaaugaugucc

SEQ ID NO: 1110544 - RNA, 19 nt, Artificial Sequence
  Description of Artificial Sequence: Synthetic oligonucleotide
  Sense strand starting at position 105 of SEQ ID NO: 915846
ccugaagugauguaguaaa

SEQ ID NO: 1110545 - RNA, 19 nt, Artificial Sequence
  Description of Artificial Sequence: Synthetic oligonucleotide
  Antisense strand to SEQ ID NO: 1110544
uuuacuacaucacuucagg

SEQ ID NO: 1110546 - RNA, 19 nt, Artificial Sequence
  Description of Artificial Sequence: Synthetic oligonucleotide
  Sense strand starting at position 510 of SEQ ID NO: 915846
uugagaaccuuugcucaua

SEQ ID NO: 1110547 - RNA, 19 nt, Artificial Sequence
  Description of Artificial Sequence: Synthetic oligonucleotide
  Antisense strand to SEQ ID NO: 1110546
uaugagcaaagguucucaa

SEQ ID NO: 1110548 - RNA, 19 nt, Artificial Sequence
  Description of Artificial Sequence: Synthetic oligonucleotide
  Sense strand starting at position 511 of SEQ ID NO: 915846
ugagaaccuuugcucauau

SEQ ID NO: 1110549 - RNA, 19 nt, Artificial Sequence
  Description of Artificial Sequence: Synthetic oligonucleotide
  Antisense strand to SEQ ID NO: 1110548
auaugagcaaagguucuca

SEQ ID NO: 1110550 - RNA, 19 nt, Artificial Sequence
  Description of Artificial Sequence: Synthetic oligonucleotide
  Sense strand starting at position 535 of SEQ ID NO: 915846
ccaccauuuccaugcugua

SEQ ID NO: 1110551 - RNA, 19 nt, Artificial Sequence
  Description of Artificial Sequence: Synthetic oligonucleotide
  Antisense strand to SEQ ID NO: 1110550
uacagcauggaaauggugg

SEQ ID NO: 1110552 - RNA, 19 nt, Artificial Sequence
  Description of Artificial Sequence: Synthetic oligonucleotide
  Sense strand starting at position 538 of SEQ ID NO: 915846
ccauuuccaugcuguauuu

SEQ ID NO: 1110553 - RNA, 19 nt, Artificial Sequence
  Description of Artificial Sequence: Synthetic oligonucleotide
  Antisense strand to SEQ ID NO: 1110552
aaauacagcauggaaaugg

SEQ ID NO: 1110554 - RNA, 19 nt, Artificial Sequence
  Description of Artificial Sequence: Synthetic oligonucleotide
  Sense strand starting at position 550 of SEQ ID NO: 915846
uguauuuacuguccugagu

SEQ ID NO: 1110555 - RNA, 19 nt, Artificial Sequence
  Description of Artificial Sequence: Synthetic oligonucleotide
  Antisense strand to SEQ ID NO: 1110554
acucaggacaguaaauaca

SEQ ID NO: 1110556 - RNA, 19 nt, Artificial Sequence
  Description of Artificial Sequence: Synthetic oligonucleotide
  Sense strand starting at position 556 of SEQ ID NO: 915846
uacuguccugaguaagaua

SEQ ID NO: 1110557 - RNA, 19 nt, Artificial Sequence
  Description of Artificial Sequence: Synthetic oligonucleotide
  Antisense strand to SEQ ID NO: 1110556
uaucuuacucaggacagua

SEQ ID NO: 1110558 - RNA, 19 nt, Artificial Sequence
  Description of Artificial Sequence: Synthetic oligonucleotide
  Sense strand starting at position 564 of SEQ ID NO: 915846
ugaguaagauacucaacuu

SEQ ID NO: 1110559 - RNA, 19 nt, Artificial Sequence
  Description of Artificial Sequence: Synthetic oligonucleotide
  Antisense strand to SEQ ID NO: 1110558
aaguugaguaucuuacuca

SEQ ID NO: 1110560 - RNA, 19 nt, Artificial Sequence
  Description of Artificial Sequence: Synthetic oligonucleotide
  Sense strand starting at position 618 of SEQ ID NO: 915846
ccuaucuugcaccauaguu

SEQ ID NO: 1110561 - RNA, 19 nt, Artificial Sequence
  Description of Artificial Sequence: Synthetic oligonucleotide
  Antisense strand to SEQ ID NO: 1110560
aacuauggugcaagauagg

SEQ ID NO: 1110562 - RNA, 19 nt, Artificial Sequence
  Description of Artificial Sequence: Synthetic oligonucleotide
  Sense strand starting at position 628 of SEQ ID NO: 915846
accauaguugugggaauga

SEQ ID NO: 1110563 - RNA, 19 nt, Artificial Sequence
  Description of Artificial Sequence: Synthetic oligonucleotide
  Antisense strand to SEQ ID NO: 1110562
ucauucccacaacuauggu

SEQ ID NO: 1110564 - RNA, 19 nt, Artificial Sequence
  Description of Artificial Sequence: Synthetic oligonucleotide
  Sense strand starting at position 671 of SEQ ID NO: 915846
gugguaggcaagcauaaua

SEQ ID NO: 1110565 - RNA, 19 nt, Artificial Sequence
  Description of Artificial Sequence: Synthetic oligonucleotide
  Antisense strand to SEQ ID NO: 1110564
uauuaugcuugccuaccac

SEQ ID NO: 1110566 - RNA, 19 nt, Artificial Sequence
  Description of Artificial Sequence: Synthetic oligonucleotide
  Sense strand starting at position 679 of SEQ ID NO: 915846
caagcauaauacguguaua

SEQ ID NO: 1110567 - RNA, 19 nt, Artificial Sequence
  Description of Artificial Sequence: Synthetic oligonucleotide
  Antisense strand to SEQ ID NO: 1110566
uauacacguauuaugcuug

SEQ ID NO: 1110568 - RNA, 19 nt, Artificial Sequence
  Description of Artificial Sequence: Synthetic oligonucleotide
  Sense strand starting at position 682 of SEQ ID NO: 915846
gcauaauacguguauacug

SEQ ID NO: 1110569 - RNA, 19 nt, Artificial Sequence
  Description of Artificial Sequence: Synthetic oligonucleotide
  Antisense strand to SEQ ID NO: 1110568
caguauacacguauuaugc

SEQ ID NO: 1110570 - RNA, 19 nt, Artificial Sequence
  Description of Artificial Sequence: Synthetic oligonucleotide
  Sense strand starting at position 690 of SEQ ID NO: 915846
cguguauacugaguaaaug

SEQ ID NO: 1110571 - RNA, 19 nt, Artificial Sequence
  Description of Artificial Sequence: Synthetic oligonucleotide
  Antisense strand to SEQ ID NO: 1110570
cauuuacucaguauacacg

SEQ ID NO: 1110572 - RNA, 19 nt, Artificial Sequence
  Description of Artificial Sequence: Synthetic oligonucleotide
  Sense strand starting at position 691 of SEQ ID NO: 915846
guguauacugaguaaauga

SEQ ID NO: 1110573 - RNA, 19 nt, Artificial Sequence
  Description of Artificial Sequence: Synthetic oligonucleotide
  Antisense strand to SEQ ID NO: 1110572
ucauuuacucaguauacac

SEQ ID NO: 1110574 - RNA, 19 nt, Artificial Sequence
  Description of Artificial Sequence: Synthetic oligonucleotide
  Sense strand starting at position 884 of SEQ ID NO: 915846
guuuauacagucuacuuua

SEQ ID NO: 1110575 - RNA, 19 nt, Artificial Sequence
  Description of Artificial Sequence: Synthetic oligonucleotide
  Antisense strand to SEQ ID NO: 1110574
uaaaguagacuguauaaac

SEQ ID NO: 1110576 - RNA, 19 nt, Artificial Sequence
  Description of Artificial Sequence: Synthetic oligonucleotide
  Sense strand starting at position 892 of SEQ ID NO: 915846
agucuacuuuacccgaaga

SEQ ID NO: 1110577 - RNA, 19 nt, Artificial Sequence
  Description of Artificial Sequence: Synthetic oligonucleotide
  Antisense strand to SEQ ID NO: 1110576
ucuucggguaaaguagacu

SEQ ID NO: 1110578 - RNA, 19 nt, Artificial Sequence
  Description of Artificial Sequence: Synthetic oligonucleotide
  Sense strand starting at position 941 of SEQ ID NO: 915846
agaaucuaaugccagauuu

SEQ ID NO: 1110579 - RNA, 19 nt, Artificial Sequence
  Description of Artificial Sequence: Synthetic oligonucleotide
  Antisense strand to SEQ ID NO: 1110578
aaaucuggcauuagauucu

SEQ ID NO: 1110580 - RNA, 19 nt, Artificial Sequence
  Description of Artificial Sequence: Synthetic oligonucleotide
  Sense strand starting at position 1167 of SEQ ID NO: 915846
gcuaauacacuuuagaagu

SEQ ID NO: 1110581 - RNA, 19 nt, Artificial Sequence
  Description of Artificial Sequence: Synthetic oligonucleotide
  Antisense strand to SEQ ID NO: 1110580
acuucuaaaguguauuagc

SEQ ID NO: 1110582 - RNA, 19 nt, Artificial Sequence
  Description of Artificial Sequence: Synthetic oligonucleotide
  Sense strand starting at position 1185 of SEQ ID NO: 915846
uggcauaauaugcauguga

SEQ ID NO: 1110583 - RNA, 19 nt, Artificial Sequence
  Description of Artificial Sequence: Synthetic oligonucleotide
  Antisense strand to SEQ ID NO: 1110582
ucacaugcauauuaugcca

SEQ ID NO: 1110584 - RNA, 19 nt, Artificial Sequence
  Description of Artificial Sequence: Synthetic oligonucleotide
  Sense strand starting at position 1187 of SEQ ID NO: 915846
gcauaauaugcaugugauu

SEQ ID NO: 1110585 - RNA, 19 nt, Artificial Sequence
  Description of Artificial Sequence: Synthetic oligonucleotide
  Antisense strand to SEQ ID NO: 1110584
aaucacaugcauauuaugc

SEQ ID NO: 1110586 - RNA, 19 nt, Artificial Sequence
  Description of Artificial Sequence: Synthetic oligonucleotide
  Sense strand starting at position 1381 of SEQ ID NO: 915846
ccgagaccucuccaaugca

SEQ ID NO: 1110587 - RNA, 19 nt, Artificial Sequence
  Description of Artificial Sequence: Synthetic oligonucleotide
  Antisense strand to SEQ ID NO: 1110586
ugcauuggagaggucucgg

SEQ ID NO: 1110588 - RNA, 19 nt, Artificial Sequence
  Description of Artificial Sequence: Synthetic oligonucleotide
  Sense strand starting at position 1384 of SEQ ID NO: 915846
agaccucuccaaugcauga

SEQ ID NO: 1110589 - RNA, 19 nt, Artificial Sequence
  Description of Artificial Sequence: Synthetic oligonucleotide
  Antisense strand to SEQ ID NO: 1110588
ucaugcauuggagaggucu

SEQ ID NO: 1110590 - RNA, 19 nt, Artificial Sequence
  Description of Artificial Sequence: Synthetic oligonucleotide
  Sense strand starting at position 1515 of SEQ ID NO: 915846
uccgcaaaguuaucuuaaa

SEQ ID NO: 1110591 - RNA, 19 nt, Artificial Sequence
  Description of Artificial Sequence: Synthetic oligonucleotide
  Antisense strand to SEQ ID NO: 1110590
uuuaagauaacuuugcgga

SEQ ID NO: 1110592 - RNA, 19 nt, Artificial Sequence
  Description of Artificial Sequence: Synthetic oligonucleotide
  Sense strand starting at position 1738 of SEQ ID NO: 915846
gggucucucccauggacaa

SEQ ID NO: 1110593 - RNA, 19 nt, Artificial Sequence
  Description of Artificial Sequence: Synthetic oligonucleotide
  Antisense strand to SEQ ID NO: 1110592
uuguccaugggagagaccc

SEQ ID NO: 1110594 - RNA, 19 nt, Artificial Sequence
  Description of Artificial Sequence: Synthetic oligonucleotide
  Sense strand starting at position 1754 of SEQ ID NO: 915846
caaggaaguucuguuaaau

SEQ ID NO: 1110595 - RNA, 19 nt, Artificial Sequence
  Description of Artificial Sequence: Synthetic oligonucleotide
  Antisense strand to SEQ ID NO: 1110594
auuuaacagaacuuccuug

SEQ ID NO: 1110596 - RNA, 19 nt, Artificial Sequence
  Description of Artificial Sequence: Synthetic oligonucleotide
  Sense strand starting at position 1764 of SEQ ID NO: 915846
cuguuaaauccaggcgaga

SEQ ID NO: 1110597 - RNA, 19 nt, Artificial Sequence
  Description of Artificial Sequence: Synthetic oligonucleotide
  Antisense strand to SEQ ID NO: 1110596
ucucgccuggauuuaacag

SEQ ID NO: 1110598 - RNA, 19 nt, Artificial Sequence
  Description of Artificial Sequence: Synthetic oligonucleotide
  Sense strand starting at position 1793 of SEQ ID NO: 915846
uggaaacacuugucaauug

SEQ ID NO: 1110599 - RNA, 19 nt, Artificial Sequence
  Description of Artificial Sequence: Synthetic oligonucleotide
  Antisense strand to SEQ ID NO: 1110598
caauugacaaguguuucca

SEQ ID NO: 1110600 - RNA, 19 nt, Artificial Sequence
  Description of Artificial Sequence: Synthetic oligonucleotide
  Sense strand starting at position 1816 of SEQ ID NO: 915846
ucugacaaguguucccgaa

SEQ ID NO: 1110601 - RNA, 19 nt, Artificial Sequence
  Description of Artificial Sequence: Synthetic oligonucleotide
  Antisense strand to SEQ ID NO: 1110600
uucgggaacacuugucaga

SEQ ID NO: 1110602 - RNA, 19 nt, Artificial Sequence
  Description of Artificial Sequence: Synthetic oligonucleotide
  Sense strand starting at position 1818 of SEQ ID NO: 915846
ugacaaguguucccgaaca

SEQ ID NO: 1110603 - RNA, 19 nt, Artificial Sequence
  Description of Artificial Sequence: Synthetic oligonucleotide
  Antisense strand to SEQ ID NO: 1110602
uguucgggaacacuuguca

SEQ ID NO: 1110604 - RNA, 19 nt, Artificial Sequence
  Description of Artificial Sequence: Synthetic oligonucleotide
  Sense strand starting at position 3312 of SEQ ID NO: 915846
gcagccuuccgaguucuca

SEQ ID NO: 1110605 - RNA, 19 nt, Artificial Sequence
  Description of Artificial Sequence: Synthetic oligonucleotide
  Antisense strand to SEQ ID NO: 1110604
ugagaacucggaaggcugc

SEQ ID NO: 1110606 - RNA, 19 nt, Artificial Sequence
  Description of Artificial Sequence: Synthetic oligonucleotide
  Sense strand starting at position 3320 of SEQ ID NO: 915846
ccgaguucucacgauaaac

SEQ ID NO: 1110607 - RNA, 19 nt, Artificial Sequence
  Description of Artificial Sequence: Synthetic oligonucleotide
  Antisense strand to SEQ ID NO: 1110606
guuuaucgugagaacucgg

SEQ ID NO: 1110608 - RNA, 19 nt, Artificial Sequence
  Description of Artificial Sequence: Synthetic oligonucleotide
  Sense strand starting at position 3322 of SEQ ID NO: 915846
gaguucucacgauaaacuc

SEQ ID NO: 1110609 - RNA, 19 nt, Artificial Sequence
  Description of Artificial Sequence: Synthetic oligonucleotide
  Antisense strand to SEQ ID NO: 1110608
gaguuuaucgugagaacuc

SEQ ID NO: 1110610 - RNA, 19 nt, Artificial Sequence
  Description of Artificial Sequence: Synthetic oligonucleotide
  Sense strand starting at position 3415 of SEQ ID NO: 915846
uacgaagagagcgguuuaa

SEQ ID NO: 1110611 - RNA, 19 nt, Artificial Sequence
  Description of Artificial Sequence: Synthetic oligonucleotide
  Antisense strand to SEQ ID NO: 1110610
uuaaaccgcucucuucgua

SEQ ID NO: 1110612 - RNA, 19 nt, Artificial Sequence
  Description of Artificial Sequence: Synthetic oligonucleotide
  Sense strand starting at position 3455 of SEQ ID NO: 915846
uacgguguaagguacuaaa

SEQ ID NO: 1110613 - RNA, 19 nt, Artificial Sequence
  Description of Artificial Sequence: Synthetic oligonucleotide
  Antisense strand to SEQ ID NO: 1110612
uuuaguaccuuacaccgua

SEQ ID NO: 1110614 - RNA, 19 nt, Artificial Sequence
  Description of Artificial Sequence: Synthetic oligonucleotide
  Sense strand starting at position 3458 of SEQ ID NO: 915846
gguguaagguacuaaauuu

SEQ ID NO: 1110615 - RNA, 19 nt, Artificial Sequence
  Description of Artificial Sequence: Synthetic oligonucleotide
  Antisense strand to SEQ ID NO: 1110614
aaauuuaguaccuuacacc

SEQ ID NO: 1110616 - RNA, 19 nt, Artificial Sequence
  Description of Artificial Sequence: Synthetic oligonucleotide
  Sense strand starting at position 3624 of SEQ ID NO: 915846
cuguguauguucuuauaca

SEQ ID NO: 1110617 - RNA, 19 nt, Artificial Sequence
  Description of Artificial Sequence: Synthetic oligonucleotide
  Antisense strand to SEQ ID NO: 1110616
uguauaagaacauacacag

SEQ ID NO: 1110618 - RNA, 19 nt, Artificial Sequence
  Description of Artificial Sequence: Synthetic oligonucleotide
  Sense strand starting at position 3815 of SEQ ID NO: 915846
ucauauugacguugcauau

SEQ ID NO: 1110619 - RNA, 19 nt, Artificial Sequence
  Description of Artificial Sequence: Synthetic oligonucleotide
  Antisense strand to SEQ ID NO: 1110618
auaugcaacgucaauauga

SEQ ID NO: 1110620 - RNA, 19 nt, Artificial Sequence
  Description of Artificial Sequence: Synthetic oligonucleotide
  Sense strand starting at position 3881 of SEQ ID NO: 915846
uugaucgucuuacuuguaa

SEQ ID NO: 1110621 - RNA, 19 nt, Artificial Sequence
  Description of Artificial Sequence: Synthetic oligonucleotide
  Antisense strand to SEQ ID NO: 1110620
uuacaaguaagacgaucaa

SEQ ID NO: 1110622 - RNA, 19 nt, Artificial Sequence
  Description of Artificial Sequence: Synthetic oligonucleotide
  Sense strand starting at position 3919 of SEQ ID NO: 915846
ugaaguaucuggguuguuu

SEQ ID NO: 1110623 - RNA, 19 nt, Artificial Sequence
  Description of Artificial Sequence: Synthetic oligonucleotide
  Antisense strand to SEQ ID NO: 1110622
aaacaacccagauacuuca

SEQ ID NO: 1110624 - RNA, 19 nt, Artificial Sequence
  Description of Artificial Sequence: Synthetic oligonucleotide
  Sense strand starting at position 20 of SEQ ID NO: 915847
ccaagagucuccugccuau

SEQ ID NO: 1110625 - RNA, 19 nt, Artificial Sequence
  Description of Artificial Sequence: Synthetic oligonucleotide
  Antisense strand to SEQ ID NO: 1110624
auaggcaggagacucuugg

SEQ ID NO: 1110626 - RNA, 19 nt, Artificial Sequence
  Description of Artificial Sequence: Synthetic oligonucleotide
  Sense strand starting at position 31 of SEQ ID NO: 915847
cugccuaucuccuccagua

SEQ ID NO: 1110627 - RNA, 19 nt, Artificial Sequence
  Description of Artificial Sequence: Synthetic oligonucleotide
  Antisense strand to SEQ ID NO: 1110626
uacuggaggagauaggcag

SEQ ID NO: 1110628 - RNA, 19 nt, Artificial Sequence
  Description of Artificial Sequence: Synthetic oligonucleotide
  Sense strand starting at position 267 of SEQ ID NO: 915847
uuuaaauauucugcacguu

SEQ ID NO: 1110629 - RNA, 19 nt, Artificial Sequence
  Description of Artificial Sequence: Synthetic oligonucleotide
  Antisense strand to SEQ ID NO: 1110628
aacgugcagaauauuuaaa

SEQ ID NO: 1110630 - RNA, 19 nt, Artificial Sequence
  Description of Artificial Sequence: Synthetic oligonucleotide
  Sense strand starting at position 367 of SEQ ID NO: 915847
cgacuagucccuggcgaga

SEQ ID NO: 1110631 - RNA, 19 nt, Artificial Sequence
  Description of Artificial Sequence: Synthetic oligonucleotide
  Antisense strand to SEQ ID NO: 1110630
ucucgccagggacuagucg

SEQ ID NO: 1110632 - RNA, 19 nt, Artificial Sequence
  Description of Artificial Sequence: Synthetic oligonucleotide
  Sense strand starting at position 495 of SEQ ID NO: 915847
uuuccaugcucccagaguu

SEQ ID NO: 1110633 - RNA, 19 nt, Artificial Sequence
  Description of Artificial Sequence: Synthetic oligonucleotide
  Antisense strand to SEQ ID NO: 1110632
aacucugggagcauggaaa

SEQ ID NO: 1110634 - RNA, 19 nt, Artificial Sequence
  Description of Artificial Sequence: Synthetic oligonucleotide
  Sense strand starting at position 538 of SEQ ID NO: 915847
ugggcuucucugggagcaa

SEQ ID NO: 1110635 - RNA, 19 nt, Artificial Sequence
  Description of Artificial Sequence: Synthetic oligonucleotide
  Antisense strand to SEQ ID NO: 1110634
uugcucccagagaagccca

SEQ ID NO: 1110636 - RNA, 19 nt, Artificial Sequence
  Description of Artificial Sequence: Synthetic oligonucleotide
  Sense strand starting at position 539 of SEQ ID NO: 915847
gggcuucucugggagcaau

SEQ ID NO: 1110637 - RNA, 19 nt, Artificial Sequence
  Description of Artificial Sequence: Synthetic oligonucleotide
  Antisense strand to SEQ ID NO: 1110636
auugcucccagagaagccc

SEQ ID NO: 1110638 - RNA, 19 nt, Artificial Sequence
  Description of Artificial Sequence: Synthetic oligonucleotide
  Sense strand starting at position 560 of SEQ ID NO: 915847
ucuagucacucugaucaag

SEQ ID NO: 1110639 - RNA, 19 nt, Artificial Sequence
  Description of Artificial Sequence: Synthetic oligonucleotide
  Antisense strand to SEQ ID NO: 1110638
cuugaucagagugacuaga

SEQ ID NO: 1110640 - RNA, 19 nt, Artificial Sequence
  Description of Artificial Sequence: Synthetic oligonucleotide
  Sense strand starting at position 562 of SEQ ID NO: 915847
uagucacucugaucaagga

SEQ ID NO: 1110641 - RNA, 19 nt, Artificial Sequence
  Description of Artificial Sequence: Synthetic oligonucleotide
  Antisense strand to SEQ ID NO: 1110640
uccuugaucagagugacua

SEQ ID NO: 1110642 - RNA, 19 nt, Artificial Sequence
  Description of Artificial Sequence: Synthetic oligonucleotide
  Sense strand starting at position 578 of SEQ ID NO: 915847
ggacguuacuuucccagaa

SEQ ID NO: 1110643 - RNA, 19 nt, Artificial Sequence
  Description of Artificial Sequence: Synthetic oligonucleotide
  Antisense strand to SEQ ID NO: 1110642
uucugggaaaguaacgucc

SEQ ID NO: 1110644 - RNA, 19 nt, Artificial Sequence
  Description of Artificial Sequence: Synthetic oligonucleotide
  Sense strand starting at position 579 of SEQ ID NO: 915847
gacguuacuuucccagaaa

SEQ ID NO: 1110645 - RNA, 19 nt, Artificial Sequence
  Description of Artificial Sequence: Synthetic oligonucleotide
  Antisense strand to SEQ ID NO: 1110644
uuucugggaaaguaacguc

SEQ ID NO: 1110646 - RNA, 19 nt, Artificial Sequence
  Description of Artificial Sequence: Synthetic oligonucleotide
  Sense strand starting at position 580 of SEQ ID NO: 915847
acguuacuuucccagaaag

SEQ ID NO: 1110647 - RNA, 19 nt, Artificial Sequence
  Description of Artificial Sequence: Synthetic oligonucleotide
  Antisense strand to SEQ ID NO: 1110646
cuuucugggaaaguaacgu

SEQ ID NO: 1110648 - RNA, 19 nt, Artificial Sequence
  Description of Artificial Sequence: Synthetic oligonucleotide
  Sense strand starting at position 582 of SEQ ID NO: 915847
guuacuuucccagaaagcu

SEQ ID NO: 1110649 - RNA, 19 nt, Artificial Sequence
  Description of Artificial Sequence: Synthetic oligonucleotide
  Antisense strand to SEQ ID NO: 1110648
agcuuucugggaaaguaac

SEQ ID NO: 1110650 - RNA, 19 nt, Artificial Sequence
  Description of Artificial Sequence: Synthetic oligonucleotide
  Sense strand starting at position 590 of SEQ ID NO: 915847
cccagaaagcucugaggcu

SEQ ID NO: 1110651 - RNA, 19 nt, Artificial Sequence
  Description of Artificial Sequence: Synthetic oligonucleotide
  Antisense strand to SEQ ID NO: 1110650
agccucagagcuuucuggg

SEQ ID NO: 1110652 - RNA, 19 nt, Artificial Sequence
  Description of Artificial Sequence: Synthetic oligonucleotide
  Sense strand starting at position 603 of SEQ ID NO: 915847
gaggcugagucccucugaa

SEQ ID NO: 1110653 - RNA, 19 nt, Artificial Sequence
  Description of Artificial Sequence: Synthetic oligonucleotide
  Antisense strand to SEQ ID NO: 1110652
uucagagggacucagccuc

SEQ ID NO: 1110654 - RNA, 19 nt, Artificial Sequence
  Description of Artificial Sequence: Synthetic oligonucleotide
  Sense strand starting at position 607 of SEQ ID NO: 915847
cugagucccucugaaauca

SEQ ID NO: 1110655 - RNA, 19 nt, Artificial Sequence
  Description of Artificial Sequence: Synthetic oligonucleotide
  Antisense strand to SEQ ID NO: 1110654
ugauuucagagggacucag

SEQ ID NO: 1110656 - RNA, 19 nt, Artificial Sequence
  Description of Artificial Sequence: Synthetic oligonucleotide
  Sense strand starting at position 932 of SEQ ID NO: 915847
cugugcucuuggugaagau

SEQ ID NO: 1110657 - RNA, 19 nt, Artificial Sequence
  Description of Artificial Sequence: Synthetic oligonucleotide
  Antisense strand to SEQ ID NO: 1110656
aucuucaccaagagcacag

SEQ ID NO: 1110658 - RNA, 19 nt, Artificial Sequence
  Description of Artificial Sequence: Synthetic oligonucleotide
  Sense strand starting at position 944 of SEQ ID NO: 915847
ugaagaugccgcugauaaa

SEQ ID NO: 1110659 - RNA, 19 nt, Artificial Sequence
  Description of Artificial Sequence: Synthetic oligonucleotide
  Antisense strand to SEQ ID NO: 1110658
uuuaucagcggcaucuuca

SEQ ID NO: 1110660 - RNA, 19 nt, Artificial Sequence
  Description of Artificial Sequence: Synthetic oligonucleotide
  Sense strand starting at position 945 of SEQ ID NO: 915847
gaagaugccgcugauaaac

SEQ ID NO: 1110661 - RNA, 19 nt, Artificial Sequence
  Description of Artificial Sequence: Synthetic oligonucleotide
  Antisense strand to SEQ ID NO: 1110660
guuuaucagcggcaucuuc

SEQ ID NO: 1110662 - RNA, 19 nt, Artificial Sequence
  Description of Artificial Sequence: Synthetic oligonucleotide
  Sense strand starting at position 953 of SEQ ID NO: 915847
cgcugauaaacuugagcau

SEQ ID NO: 1110663 - RNA, 19 nt, Artificial Sequence
  Description of Artificial Sequence: Synthetic oligonucleotide
  Antisense strand to SEQ ID NO: 1110662
augcucaaguuuaucagcg

SEQ ID NO: 1110664 - RNA, 19 nt, Artificial Sequence
  Description of Artificial Sequence: Synthetic oligonucleotide
  Sense strand starting at position 968 of SEQ ID NO: 915847
gcaucuugcggucacgagu

SEQ ID NO: 1110665 - RNA, 19 nt, Artificial Sequence
  Description of Artificial Sequence: Synthetic oligonucleotide
  Antisense strand to SEQ ID NO: 1110664
acucgugaccgcaagaugc

SEQ ID NO: 1110666 - RNA, 19 nt, Artificial Sequence
  Description of Artificial Sequence: Synthetic oligonucleotide
  Sense strand starting at position 1157 of SEQ ID NO: 915847
gcaagucacuguuguccaa

SEQ ID NO: 1110667 - RNA, 19 nt, Artificial Sequence
  Description of Artificial Sequence: Synthetic oligonucleotide
  Antisense strand to SEQ ID NO: 1110666
uuggacaacagugacuugc

SEQ ID NO: 1110668 - RNA, 19 nt, Artificial Sequence
  Description of Artificial Sequence: Synthetic oligonucleotide
  Sense strand starting at position 1164 of SEQ ID NO: 915847
acuguuguccaaggucuua

SEQ ID NO: 1110669 - RNA, 19 nt, Artificial Sequence
  Description of Artificial Sequence: Synthetic oligonucleotide
  Antisense strand to SEQ ID NO: 1110668
uaagaccuuggacaacagu

SEQ ID NO: 1110670 - RNA, 19 nt, Artificial Sequence
  Description of Artificial Sequence: Synthetic oligonucleotide
  Sense strand starting at position 1354 of SEQ ID NO: 915847
ucgcuuucgggccaugaca

SEQ ID NO: 1110671 - RNA, 19 nt, Artificial Sequence
  Description of Artificial Sequence: Synthetic oligonucleotide
  Antisense strand to SEQ ID NO: 1110670
ugucauggcccgaaagcga

SEQ ID NO: 1110672 - RNA, 19 nt, Artificial Sequence
  Description of Artificial Sequence: Synthetic oligonucleotide
  Sense strand starting at position 1777 of SEQ ID NO: 915847
gcauccugccgguggaaga

SEQ ID NO: 1110673 - RNA, 19 nt, Artificial Sequence
  Description of Artificial Sequence: Synthetic oligonucleotide
  Antisense strand to SEQ ID NO: 1110672
ucuuccaccggcaggaugc

SEQ ID NO: 1110674 - RNA, 19 nt, Artificial Sequence
  Description of Artificial Sequence: Synthetic oligonucleotide
  Sense strand starting at position 1960 of SEQ ID NO: 915847
gucguuguccggcgcugaa

SEQ ID NO: 1110675 - RNA, 19 nt, Artificial Sequence
  Description of Artificial Sequence: Synthetic oligonucleotide
  Antisense strand to SEQ ID NO: 1110674
uucagcgccggacaacgac

SEQ ID NO: 1110676 - RNA, 19 nt, Artificial Sequence
  Description of Artificial Sequence: Synthetic oligonucleotide
  Sense strand starting at position 2914 of SEQ ID NO: 915847
gcgauugugagguauggca

SEQ ID NO: 1110677 - RNA, 19 nt, Artificial Sequence
  Description of Artificial Sequence: Synthetic oligonucleotide
  Antisense strand to SEQ ID NO: 1110676
ugccauaccucacaaucgc

SEQ ID NO: 1110678 - RNA, 19 nt, Artificial Sequence
  Description of Artificial Sequence: Synthetic oligonucleotide
  Sense strand starting at position 2916 of SEQ ID NO: 915847
gauugugagguauggcauu

SEQ ID NO: 1110679 - RNA, 19 nt, Artificial Sequence
  Description of Artificial Sequence: Synthetic oligonucleotide
  Antisense strand to SEQ ID NO: 1110678
aaugccauaccucacaauc

SEQ ID NO: 1110680 - RNA, 19 nt, Artificial Sequence
  Description of Artificial Sequence: Synthetic oligonucleotide
  Sense strand starting at position 2953 of SEQ ID NO: 915847
ucgaucuauuggguggaca

SEQ ID NO: 1110681 - RNA, 19 nt, Artificial Sequence
  Description of Artificial Sequence: Synthetic oligonucleotide
  Antisense strand to SEQ ID NO: 1110680
uguccacccaauagaucga

SEQ ID NO: 1110682 - RNA, 19 nt, Artificial Sequence
  Description of Artificial Sequence: Synthetic oligonucleotide
  Sense strand starting at position 3252 of SEQ ID NO: 915847
gagagaucugagugcugga

SEQ ID NO: 1110683 - RNA, 19 nt, Artificial Sequence
  Description of Artificial Sequence: Synthetic oligonucleotide
  Antisense strand to SEQ ID NO: 1110682
uccagcacucagaucucuc

SEQ ID NO: 1110684 - RNA, 19 nt, Artificial Sequence
  Description of Artificial Sequence: Synthetic oligonucleotide
  Sense strand starting at position 3317 of SEQ ID NO: 915847
gggagaaggaugugucuua

SEQ ID NO: 1110685 - RNA, 19 nt, Artificial Sequence
  Description of Artificial Sequence: Synthetic oligonucleotide
  Antisense strand to SEQ ID NO: 1110684
uaagacacauccuucuccc

SEQ ID NO: 1110686 - RNA, 19 nt, Artificial Sequence
  Description of Artificial Sequence: Synthetic oligonucleotide
  Sense strand starting at position 3322 of SEQ ID NO: 915847
aaggaugugucuuagacug

SEQ ID NO: 1110687 - RNA, 19 nt, Artificial Sequence
  Description of Artificial Sequence: Synthetic oligonucleotide
  Antisense strand to SEQ ID NO: 1110686
cagucuaagacacauccuu

SEQ ID NO: 1110688 - RNA, 19 nt, Artificial Sequence
  Description of Artificial Sequence: Synthetic oligonucleotide
  Sense strand starting at position 3324 of SEQ ID NO: 915847
ggaugugucuuagacugau

SEQ ID NO: 1110689 - RNA, 19 nt, Artificial Sequence
  Description of Artificial Sequence: Synthetic oligonucleotide
  Antisense strand to SEQ ID NO: 1110688
aucagucuaagacacaucc

SEQ ID NO: 1110690 - RNA, 19 nt, Artificial Sequence
  Description of Artificial Sequence: Synthetic oligonucleotide
  Sense strand starting at position 3424 of SEQ ID NO: 915847
gaggaauccguguguaugg

SEQ ID NO: 1110691 - RNA, 19 nt, Artificial Sequence
  Description of Artificial Sequence: Synthetic oligonucleotide
  Antisense strand to SEQ ID NO: 1110690
ccauacacacggauuccuc

SEQ ID NO: 1110692 - RNA, 19 nt, Artificial Sequence
  Description of Artificial Sequence: Synthetic oligonucleotide
  Sense strand starting at position 3596 of SEQ ID NO: 915847
gagguuugcugagugggau

SEQ ID NO: 1110693 - RNA, 19 nt, Artificial Sequence
  Description of Artificial Sequence: Synthetic oligonucleotide
  Antisense strand to SEQ ID NO: 1110692
aucccacucagcaaaccuc

SEQ ID NO: 1110694 - RNA, 19 nt, Artificial Sequence
  Description of Artificial Sequence: Synthetic oligonucleotide
  Sense strand starting at position 3597 of SEQ ID NO: 915847
agguuugcugagugggauu

SEQ ID NO: 1110695 - RNA, 19 nt, Artificial Sequence
  Description of Artificial Sequence: Synthetic oligonucleotide
  Antisense strand to SEQ ID NO: 1110694
aaucccacucagcaaaccu

SEQ ID NO: 1110696 - RNA, 19 nt, Artificial Sequence
  Description of Artificial Sequence: Synthetic oligonucleotide
  Sense strand starting at position 3608 of SEQ ID NO: 915847
gugggauucuuucagaaga

SEQ ID NO: 1110697 - RNA, 19 nt, Artificial Sequence
  Description of Artificial Sequence: Synthetic oligonucleotide
  Antisense strand to SEQ ID NO: 1110696
ucuucugaaagaaucccac

SEQ ID NO: 1110698 - RNA, 19 nt, Artificial Sequence
  Description of Artificial Sequence: Synthetic oligonucleotide
  Sense strand starting at position 3714 of SEQ ID NO: 915847
ccuccagccaggugagaau

SEQ ID NO: 1110699 - RNA, 19 nt, Artificial Sequence
  Description of Artificial Sequence: Synthetic oligonucleotide
  Antisense strand to SEQ ID NO: 1110698
auucucaccuggcuggagg

SEQ ID NO: 1110700 - RNA, 19 nt, Artificial Sequence
  Description of Artificial Sequence: Synthetic oligonucleotide
  Sense strand starting at position 3723 of SEQ ID NO: 915847
aggugagaauccugaagug

SEQ ID NO: 1110701 - RNA, 19 nt, Artificial Sequence
  Description of Artificial Sequence: Synthetic oligonucleotide
  Antisense strand to SEQ ID NO: 1110700
cacuucaggauucucaccu

SEQ ID NO: 1110702 - RNA, 19 nt, Artificial Sequence
  Description of Artificial Sequence: Synthetic oligonucleotide
  Sense strand starting at position 3886 of SEQ ID NO: 915847
cgcagcugagacuauaaua

SEQ ID NO: 1110703 - RNA, 19 nt, Artificial Sequence
  Description of Artificial Sequence: Synthetic oligonucleotide
  Antisense strand to SEQ ID NO: 1110702
uauuauagucucagcugcg

SEQ ID NO: 1110704 - RNA, 19 nt, Artificial Sequence
  Description of Artificial Sequence: Synthetic oligonucleotide
  Sense strand starting at position 97 of SEQ ID NO: 915848
cccagaggccuguauccaa

SEQ ID NO: 1110705 - RNA, 19 nt, Artificial Sequence
  Description of Artificial Sequence: Synthetic oligonucleotide
  Antisense strand to SEQ ID NO: 1110704
uuggauacaggccucuggg

SEQ ID NO: 1110706 - RNA, 19 nt, Artificial Sequence
  Description of Artificial Sequence: Synthetic oligonucleotide
  Sense strand starting at position 244 of SEQ ID NO: 915848
uuggcucuggcuuaaacuu

SEQ ID NO: 1110707 - RNA, 19 nt, Artificial Sequence
  Description of Artificial Sequence: Synthetic oligonucleotide
  Antisense strand to SEQ ID NO: 1110706
aaguuuaagccagagccaa

SEQ ID NO: 1110708 - RNA, 19 nt, Artificial Sequence
  Description of Artificial Sequence: Synthetic oligonucleotide
  Sense strand starting at position 353 of SEQ ID NO: 915848
agugaagccuucucaggga

SEQ ID NO: 1110709 - RNA, 19 nt, Artificial Sequence
  Description of Artificial Sequence: Synthetic oligonucleotide
  Antisense strand to SEQ ID NO: 1110708
ucccugagaaggcuucacu

SEQ ID NO: 1110710 - RNA, 19 nt, Artificial Sequence
  Description of Artificial Sequence: Synthetic oligonucleotide
  Sense strand starting at position 496 of SEQ ID NO: 915848
uagaguuucucccuaggag

SEQ ID NO: 1110711 - RNA, 19 nt, Artificial Sequence
  Description of Artificial Sequence: Synthetic oligonucleotide
  Antisense strand to SEQ ID NO: 1110710
cuccuagggagaaacucua

SEQ ID NO: 1110712 - RNA, 19 nt, Artificial Sequence
  Description of Artificial Sequence: Synthetic oligonucleotide
  Sense strand starting at position 621 of SEQ ID NO: 915848
ggcacuagccuccgaagaa

SEQ ID NO: 1110713 - RNA, 19 nt, Artificial Sequence
  Description of Artificial Sequence: Synthetic oligonucleotide
  Antisense strand to SEQ ID NO: 1110712
uucuucggaggcuagugcc

SEQ ID NO: 1110714 - RNA, 19 nt, Artificial Sequence
  Description of Artificial Sequence: Synthetic oligonucleotide
  Sense strand starting at position 625 of SEQ ID NO: 915848
cuagccuccgaagaacaau

SEQ ID NO: 1110715 - RNA, 19 nt, Artificial Sequence
  Description of Artificial Sequence: Synthetic oligonucleotide
  Antisense strand to SEQ ID NO: 1110714
auuguucuucggaggcuag

SEQ ID NO: 1110716 - RNA, 19 nt, Artificial Sequence
  Description of Artificial Sequence: Synthetic oligonucleotide
  Sense strand starting at position 700 of SEQ ID NO: 915848
caaguuauacucuggugua

SEQ ID NO: 1110717 - RNA, 19 nt, Artificial Sequence
  Description of Artificial Sequence: Synthetic oligonucleotide
  Antisense strand to SEQ ID NO: 1110716
uacaccagaguauaacuug

SEQ ID NO: 1110718 - RNA, 19 nt, Artificial Sequence
  Description of Artificial Sequence: Synthetic oligonucleotide
  Sense strand starting at position 737 of SEQ ID NO: 915848
aggagguguccuugaggga

SEQ ID NO: 1110719 - RNA, 19 nt, Artificial Sequence
  Description of Artificial Sequence: Synthetic oligonucleotide
  Antisense strand to SEQ ID NO: 1110718
ucccucaaggacaccuccu

SEQ ID NO: 1110720 - RNA, 19 nt, Artificial Sequence
  Description of Artificial Sequence: Synthetic oligonucleotide
  Sense strand starting at position 741 of SEQ ID NO: 915848
gguguccuugagggaaaga

SEQ ID NO: 1110721 - RNA, 19 nt, Artificial Sequence
  Description of Artificial Sequence: Synthetic oligonucleotide
  Antisense strand to SEQ ID NO: 1110720
ucuuucccucaaggacacc

SEQ ID NO: 1110722 - RNA, 19 nt, Artificial Sequence
  Description of Artificial Sequence: Synthetic oligonucleotide
  Sense strand starting at position 839 of SEQ ID NO: 915848
gaagaaguguuuccaccag

SEQ ID NO: 1110723 - RNA, 19 nt, Artificial Sequence
  Description of Artificial Sequence: Synthetic oligonucleotide
  Antisense strand to SEQ ID NO: 1110722
cugguggaaacacuucuuc

SEQ ID NO: 1110724 - RNA, 19 nt, Artificial Sequence
  Description of Artificial Sequence: Synthetic oligonucleotide
  Sense strand starting at position 1225 of SEQ ID NO: 915848
gugugugagaguuaguaug

SEQ ID NO: 1110725 - RNA, 19 nt, Artificial Sequence
  Description of Artificial Sequence: Synthetic oligonucleotide
  Antisense strand to SEQ ID NO: 1110724
cauacuaacucucacacac

SEQ ID NO: 1110726 - RNA, 19 nt, Artificial Sequence
  Description of Artificial Sequence: Synthetic oligonucleotide
  Sense strand starting at position 1255 of SEQ ID NO: 915848
cugagauucucugcauggu

SEQ ID NO: 1110727 - RNA, 19 nt, Artificial Sequence
  Description of Artificial Sequence: Synthetic oligonucleotide
  Antisense strand to SEQ ID NO: 1110726
accaugcagagaaucucag

SEQ ID NO: 1110728 - RNA, 19 nt, Artificial Sequence
  Description of Artificial Sequence: Synthetic oligonucleotide
  Sense strand starting at position 1343 of SEQ ID NO: 915848
acaagaggucacugauccu

SEQ ID NO: 1110729 - RNA, 19 nt, Artificial Sequence
  Description of Artificial Sequence: Synthetic oligonucleotide
  Antisense strand to SEQ ID NO: 1110728
aggaucagugaccucuugu

SEQ ID NO: 1110730 - RNA, 19 nt, Artificial Sequence
  Description of Artificial Sequence: Synthetic oligonucleotide
  Sense strand starting at position 1448 of SEQ ID NO: 915848
acaagucuaccaugagucu

SEQ ID NO: 1110731 - RNA, 19 nt, Artificial Sequence
  Description of Artificial Sequence: Synthetic oligonucleotide
  Antisense strand to SEQ ID NO: 1110730
agacucaugguagacuugu

SEQ ID NO: 1110732 - RNA, 19 nt, Artificial Sequence
  Description of Artificial Sequence: Synthetic oligonucleotide
  Sense strand starting at position 1454 of SEQ ID NO: 915848
cuaccaugagucugucaca

SEQ ID NO: 1110733 - RNA, 19 nt, Artificial Sequence
  Description of Artificial Sequence: Synthetic oligonucleotide
  Antisense strand to SEQ ID NO: 1110732
ugugacagacucaugguag

SEQ ID NO: 1110734 - RNA, 19 nt, Artificial Sequence
  Description of Artificial Sequence: Synthetic oligonucleotide
  Sense strand starting at position 1583 of SEQ ID NO: 915848
ugauaccucccaugucuuu

SEQ ID NO: 1110735 - RNA, 19 nt, Artificial Sequence
  Description of Artificial Sequence: Synthetic oligonucleotide
  Antisense strand to SEQ ID NO: 1110734
aaagacaugggagguauca

SEQ ID NO: 1110736 - RNA, 19 nt, Artificial Sequence
  Description of Artificial Sequence: Synthetic oligonucleotide
  Sense strand starting at position 1617 of SEQ ID NO: 915848
auguauucuuucccagagu

SEQ ID NO: 1110737 - RNA, 19 nt, Artificial Sequence
  Description of Artificial Sequence: Synthetic oligonucleotide
  Antisense strand to SEQ ID NO: 1110736
acucugggaaagaauacau

SEQ ID NO: 1110738 - RNA, 19 nt, Artificial Sequence
  Description of Artificial Sequence: Synthetic oligonucleotide
  Sense strand starting at position 1653 of SEQ ID NO: 915848
gaaguagcugacugggaau

SEQ ID NO: 1110739 - RNA, 19 nt, Artificial Sequence
  Description of Artificial Sequence: Synthetic oligonucleotide
  Antisense strand to SEQ ID NO: 1110738
auucccagucagcuacuuc

SEQ ID NO: 1110740 - RNA, 19 nt, Artificial Sequence
  Description of Artificial Sequence: Synthetic oligonucleotide
  Sense strand starting at position 1704 of SEQ ID NO: 915848
cugcuagucccugauacac

SEQ ID NO: 1110741 - RNA, 19 nt, Artificial Sequence
  Description of Artificial Sequence: Synthetic oligonucleotide
  Antisense strand to SEQ ID NO: 1110740
guguaucagggacuagcag

SEQ ID NO: 1110742 - RNA, 19 nt, Artificial Sequence
  Description of Artificial Sequence: Synthetic oligonucleotide
  Sense strand starting at position 1742 of SEQ ID NO: 915848
uucucuuaccucgaaugcu

SEQ ID NO: 1110743 - RNA, 19 nt, Artificial Sequence
  Description of Artificial Sequence: Synthetic oligonucleotide
  Antisense strand to SEQ ID NO: 1110742
agcauucgagguaagagaa

SEQ ID NO: 1110744 - RNA, 19 nt, Artificial Sequence
  Description of Artificial Sequence: Synthetic oligonucleotide
  Sense strand starting at position 2154 of SEQ ID NO: 915848
ugcuaugauuucccagcca

SEQ ID NO: 1110745 - RNA, 19 nt, Artificial Sequence
  Description of Artificial Sequence: Synthetic oligonucleotide
  Antisense strand to SEQ ID NO: 1110744
uggcugggaaaucauagca

SEQ ID NO: 1110746 - RNA, 19 nt, Artificial Sequence
  Description of Artificial Sequence: Synthetic oligonucleotide
  Sense strand starting at position 2212 of SEQ ID NO: 915848
gugggagguggcuaauuaa

SEQ ID NO: 1110747 - RNA, 19 nt, Artificial Sequence
  Description of Artificial Sequence: Synthetic oligonucleotide
  Antisense strand to SEQ ID NO: 1110746
uuaauuagccaccucccac

SEQ ID NO: 1110748 - RNA, 19 nt, Artificial Sequence
  Description of Artificial Sequence: Synthetic oligonucleotide
  Sense strand starting at position 2215 of SEQ ID NO: 915848
ggagguggcuaauuaagau

SEQ ID NO: 1110749 - RNA, 19 nt, Artificial Sequence
  Description of Artificial Sequence: Synthetic oligonucleotide
  Antisense strand to SEQ ID NO: 1110748
aucuuaauuagccaccucc

SEQ ID NO: 1110750 - RNA, 19 nt, Artificial Sequence
  Description of Artificial Sequence: Synthetic oligonucleotide
  Sense strand starting at position 2221 of SEQ ID NO: 915848
ggcuaauuaagaugggugu

SEQ ID NO: 1110751 - RNA, 19 nt, Artificial Sequence
  Description of Artificial Sequence: Synthetic oligonucleotide
  Antisense strand to SEQ ID NO: 1110750
acacccaucuuaauuagcc

SEQ ID NO: 1110752 - RNA, 19 nt, Artificial Sequence
  Description of Artificial Sequence: Synthetic oligonucleotide
  Sense strand starting at position 2222 of SEQ ID NO: 915848
gcuaauuaagauggguguu

SEQ ID NO: 1110753 - RNA, 19 nt, Artificial Sequence
  Description of Artificial Sequence: Synthetic oligonucleotide
  Antisense strand to SEQ ID NO: 1110752
aacacccaucuuaauuagc

SEQ ID NO: 1110754 - RNA, 19 nt, Artificial Sequence
  Description of Artificial Sequence: Synthetic oligonucleotide
  Sense strand starting at position 2327 of SEQ ID NO: 915848
augcacauuuggucuguua

SEQ ID NO: 1110755 - RNA, 19 nt, Artificial Sequence
  Description of Artificial Sequence: Synthetic oligonucleotide
  Antisense strand to SEQ ID NO: 1110754
uaacagaccaaaugugcau

SEQ ID NO: 1110756 - RNA, 19 nt, Artificial Sequence
  Description of Artificial Sequence: Synthetic oligonucleotide
  Sense strand starting at position 2826 of SEQ ID NO: 915848
agcccugaggaguaggauu

SEQ ID NO: 1110757 - RNA, 19 nt, Artificial Sequence
  Description of Artificial Sequence: Synthetic oligonucleotide
  Antisense strand to SEQ ID NO: 1110756
aauccuacuccucagggcu

SEQ ID NO: 1110758 - RNA, 19 nt, Artificial Sequence
  Description of Artificial Sequence: Synthetic oligonucleotide
  Sense strand starting at position 2828 of SEQ ID NO: 915848
cccugaggaguaggauuau

SEQ ID NO: 1110759 - RNA, 19 nt, Artificial Sequence
  Description of Artificial Sequence: Synthetic oligonucleotide
  Antisense strand to SEQ ID NO: 1110758
auaauccuacuccucaggg

SEQ ID NO: 1110760 - RNA, 19 nt, Artificial Sequence
  Description of Artificial Sequence: Synthetic oligonucleotide
  Sense strand starting at position 2887 of SEQ ID NO: 915848
gccauuaagaggugaaaca

SEQ ID NO: 1110761 - RNA, 19 nt, Artificial Sequence
  Description of Artificial Sequence: Synthetic oligonucleotide
  Antisense strand to SEQ ID NO: 1110760
uguuucaccucuuaauggc

SEQ ID NO: 1110762 - RNA, 19 nt, Artificial Sequence
  Description of Artificial Sequence: Synthetic oligonucleotide
  Sense strand starting at position 2973 of SEQ ID NO: 915848
aagcccagauugguuauaa

SEQ ID NO: 1110763 - RNA, 19 nt, Artificial Sequence
  Description of Artificial Sequence: Synthetic oligonucleotide
  Antisense strand to SEQ ID NO: 1110762
uuauaaccaaucugggcuu

SEQ ID NO: 1110764 - RNA, 19 nt, Artificial Sequence
  Description of Artificial Sequence: Synthetic oligonucleotide
  Sense strand starting at position 2974 of SEQ ID NO: 915848
agcccagauugguuauaau

SEQ ID NO: 1110765 - RNA, 19 nt, Artificial Sequence
  Description of Artificial Sequence: Synthetic oligonucleotide
  Antisense strand to SEQ ID NO: 1110764
auuauaaccaaucugggcu

SEQ ID NO: 1110766 - RNA, 19 nt, Artificial Sequence
  Description of Artificial Sequence: Synthetic oligonucleotide
  Sense strand starting at position 3059 of SEQ ID NO: 915848
uugucuugcccuugauuua

SEQ ID NO: 1110767 - RNA, 19 nt, Artificial Sequence
  Description of Artificial Sequence: Synthetic oligonucleotide
  Antisense strand to SEQ ID NO: 1110766
uaaaucaagggcaagacaa

SEQ ID NO: 1110768 - RNA, 19 nt, Artificial Sequence
  Description of Artificial Sequence: Synthetic oligonucleotide
  Sense strand starting at position 3616 of SEQ ID NO: 915848
aauacuguguaguuaaaga

SEQ ID NO: 1110769 - RNA, 19 nt, Artificial Sequence
  Description of Artificial Sequence: Synthetic oligonucleotide
  Antisense strand to SEQ ID NO: 1110768
ucuuuaacuacacaguauu

SEQ ID NO: 1110770 - RNA, 19 nt, Artificial Sequence
  Description of Artificial Sequence: Synthetic oligonucleotide
  Sense strand starting at position 3648 of SEQ ID NO: 915848
guuggaauugcccacagga

SEQ ID NO: 1110771 - RNA, 19 nt, Artificial Sequence
  Description of Artificial Sequence: Synthetic oligonucleotide
  Antisense strand to SEQ ID NO: 1110770
uccugugggcaauuccaac

SEQ ID NO: 1110772 - RNA, 19 nt, Artificial Sequence
  Description of Artificial Sequence: Synthetic oligonucleotide
  Sense strand starting at position 3727 of SEQ ID NO: 915848
uguucuaaguauucuacau

SEQ ID NO: 1110773 - RNA, 19 nt, Artificial Sequence
  Description of Artificial Sequence: Synthetic oligonucleotide
  Antisense strand to SEQ ID NO: 1110772
auguagaauacuuagaaca

SEQ ID NO: 1110774 - RNA, 19 nt, Artificial Sequence
  Description of Artificial Sequence: Synthetic oligonucleotide
  Sense strand starting at position 3780 of SEQ ID NO: 915848
uaggguguguuguuauuua

SEQ ID NO: 1110775 - RNA, 19 nt, Artificial Sequence
  Description of Artificial Sequence: Synthetic oligonucleotide
  Antisense strand to SEQ ID NO: 1110774
uaaauaacaacacacccua

SEQ ID NO: 1110776 - RNA, 19 nt, Artificial Sequence
  Description of Artificial Sequence: Synthetic oligonucleotide
  Sense strand starting at position 3889 of SEQ ID NO: 915848
gcaguaagucuauagaauc

SEQ ID NO: 1110777 - RNA, 19 nt, Artificial Sequence
  Description of Artificial Sequence: Synthetic oligonucleotide
  Antisense strand to SEQ ID NO: 1110776
gauucuauagacuuacugc

SEQ ID NO: 1110778 - RNA, 19 nt, Artificial Sequence
  Description of Artificial Sequence: Synthetic oligonucleotide
  Sense strand starting at position 3923 of SEQ ID NO: 915848
uuaaaucauucuguugagu

SEQ ID NO: 1110779 - RNA, 19 nt, Artificial Sequence
  Description of Artificial Sequence: Synthetic oligonucleotide
  Antisense strand to SEQ ID NO: 1110778
acucaacagaaugauuuaa

SEQ ID NO: 1110780 - RNA, 19 nt, Artificial Sequence
  Description of Artificial Sequence: Synthetic oligonucleotide
  Sense strand starting at position 3926 of SEQ ID NO: 915848
aaucauucuguugaguuga

SEQ ID NO: 1110781 - RNA, 19 nt, Artificial Sequence
  Description of Artificial Sequence: Synthetic oligonucleotide
  Antisense strand to SEQ ID NO: 1110780
ucaacucaacagaaugauu

SEQ ID NO: 1110782 - RNA, 19 nt, Artificial Sequence
  Description of Artificial Sequence: Synthetic oligonucleotide
  Sense strand starting at position 3928 of SEQ ID NO: 915848
ucauucuguugaguugauu

SEQ ID NO: 1110783 - RNA, 19 nt, Artificial Sequence
  Description of Artificial Sequence: Synthetic oligonucleotide
  Antisense strand to SEQ ID NO: 1110782
aaucaacucaacagaauga

SEQ ID NO: 1110784 - RNA, 19 nt, Artificial Sequence
  Description of Artificial Sequence: Synthetic oligonucleotide
  Sense strand starting at position 14 of SEQ ID NO: 915849
uguuaaacagauuaagcau

SEQ ID NO: 1110785 - RNA, 19 nt, Artificial Sequence
  Description of Artificial Sequence: Synthetic oligonucleotide
  Antisense strand to SEQ ID NO: 1110784
augcuuaaucuguuuaaca

SEQ ID NO: 1110786 - RNA, 19 nt, Artificial Sequence
  Description of Artificial Sequence: Synthetic oligonucleotide
  Sense strand starting at position 200 of SEQ ID NO: 915849
gagagagccuuaucauaag

SEQ ID NO: 1110787 - RNA, 19 nt, Artificial Sequence
  Description of Artificial Sequence: Synthetic oligonucleotide
  Antisense strand to SEQ ID NO: 1110786
cuuaugauaaggcucucuc

SEQ ID NO: 1110788 - RNA, 19 nt, Artificial Sequence
  Description of Artificial Sequence: Synthetic oligonucleotide
  Sense strand starting at position 228 of SEQ ID NO: 915849
guguccuggaaguauagau

SEQ ID NO: 1110789 - RNA, 19 nt, Artificial Sequence
  Description of Artificial Sequence: Synthetic oligonucleotide
  Antisense strand to SEQ ID NO: 1110788
aucuauacuuccaggacac

SEQ ID NO: 1110790 - RNA, 19 nt, Artificial Sequence
  Description of Artificial Sequence: Synthetic oligonucleotide
  Sense strand starting at position 245 of SEQ ID NO: 915849
auaagaaggauguggcaua

SEQ ID NO: 1110791 - RNA, 19 nt, Artificial Sequence
  Description of Artificial Sequence: Synthetic oligonucleotide
  Antisense strand to SEQ ID NO: 1110790
uaugccacauccuucuuau

SEQ ID NO: 1110792 - RNA, 19 nt, Artificial Sequence
  Description of Artificial Sequence: Synthetic oligonucleotide
  Sense strand starting at position 347 of SEQ ID NO: 915849
gucagagugaaaugaauug

SEQ ID NO: 1110793 - RNA, 19 nt, Artificial Sequence
  Description of Artificial Sequence: Synthetic oligonucleotide
  Antisense strand to SEQ ID NO: 1110792
caauucauuucacucugac

SEQ ID NO: 1110794 - RNA, 19 nt, Artificial Sequence
  Description of Artificial Sequence: Synthetic oligonucleotide
  Sense strand starting at position 352 of SEQ ID NO: 915849
agugaaaugaauugcguga

SEQ ID NO: 1110795 - RNA, 19 nt, Artificial Sequence
  Description of Artificial Sequence: Synthetic oligonucleotide
  Antisense strand to SEQ ID NO: 1110794
ucacgcaauucauuucacu

SEQ ID NO: 1110796 - RNA, 19 nt, Artificial Sequence
  Description of Artificial Sequence: Synthetic oligonucleotide
  Sense strand starting at position 381 of SEQ ID NO: 915849
cuaguuaacuuuguugauc

SEQ ID NO: 1110797 - RNA, 19 nt, Artificial Sequence
  Description of Artificial Sequence: Synthetic oligonucleotide
  Antisense strand to SEQ ID NO: 1110796
gaucaacaaaguuaacuag

SEQ ID NO: 1110798 - RNA, 19 nt, Artificial Sequence
  Description of Artificial Sequence: Synthetic oligonucleotide
  Sense strand starting at position 384 of SEQ ID NO: 915849
guuaacuuuguugauccau

SEQ ID NO: 1110799 - RNA, 19 nt, Artificial Sequence
  Description of Artificial Sequence: Synthetic oligonucleotide
  Antisense strand to SEQ ID NO: 1110798
auggaucaacaaaguuaac

SEQ ID NO: 1110800 - RNA, 19 nt, Artificial Sequence
  Description of Artificial Sequence: Synthetic oligonucleotide
  Sense strand starting at position 472 of SEQ ID NO: 915849
ggacuuuaccgagggagug

SEQ ID NO: 1110801 - RNA, 19 nt, Artificial Sequence
  Description of Artificial Sequence: Synthetic oligonucleotide
  Antisense strand to SEQ ID NO: 1110800
cacucccucgguaaagucc

SEQ ID NO: 1110802 - RNA, 19 nt, Artificial Sequence
  Description of Artificial Sequence: Synthetic oligonucleotide
  Sense strand starting at position 574 of SEQ ID NO: 915849
cagaaacaagcggguuaaa

SEQ ID NO: 1110803 - RNA, 19 nt, Artificial Sequence
  Description of Artificial Sequence: Synthetic oligonucleotide
  Antisense strand to SEQ ID NO: 1110802
uuuaacccgcuuguuucug

SEQ ID NO: 1110804 - RNA, 19 nt, Artificial Sequence
  Description of Artificial Sequence: Synthetic oligonucleotide
  Sense strand starting at position 790 of SEQ ID NO: 915849
ggaccuauagcucagacuu

SEQ ID NO: 1110805 - RNA, 19 nt, Artificial Sequence
  Description of Artificial Sequence: Synthetic oligonucleotide
  Antisense strand to SEQ ID NO: 1110804
aagucugagcuauaggucc

SEQ ID NO: 1110806 - RNA, 19 nt, Artificial Sequence
  Description of Artificial Sequence: Synthetic oligonucleotide
  Sense strand starting at position 845 of SEQ ID NO: 915849
gacauugucugaccucaag

SEQ ID NO: 1110807 - RNA, 19 nt, Artificial Sequence
  Description of Artificial Sequence: Synthetic oligonucleotide
  Antisense strand to SEQ ID NO: 1110806
cuugaggucagacaauguc

SEQ ID NO: 1110808 - RNA, 19 nt, Artificial Sequence
  Description of Artificial Sequence: Synthetic oligonucleotide
  Sense strand starting at position 902 of SEQ ID NO: 915849
cuuuauucuguauauugga

SEQ ID NO: 1110809 - RNA, 19 nt, Artificial Sequence
  Description of Artificial Sequence: Synthetic oligonucleotide
  Antisense strand to SEQ ID NO: 1110808
uccaauauacagaauaaag

SEQ ID NO: 1110810 - RNA, 19 nt, Artificial Sequence
  Description of Artificial Sequence: Synthetic oligonucleotide
  Sense strand starting at position 909 of SEQ ID NO: 915849
cuguauauuggaugugaug

SEQ ID NO: 1110811 - RNA, 19 nt, Artificial Sequence
  Description of Artificial Sequence: Synthetic oligonucleotide
  Antisense strand to SEQ ID NO: 1110810
caucacauccaauauacag

SEQ ID NO: 1110812 - RNA, 19 nt, Artificial Sequence
  Description of Artificial Sequence: Synthetic oligonucleotide
  Sense strand starting at position 1244 of SEQ ID NO: 915849
uuaagcuacgucugaacaa

SEQ ID NO: 1110813 - RNA, 19 nt, Artificial Sequence
  Description of Artificial Sequence: Synthetic oligonucleotide
  Antisense strand to SEQ ID NO: 1110812
uuguucagacguagcuuaa

SEQ ID NO: 1110814 - RNA, 19 nt, Artificial Sequence
  Description of Artificial Sequence: Synthetic oligonucleotide
  Sense strand starting at position 1393 of SEQ ID NO: 915849
uuuagaaugcuuggcauuu

SEQ ID NO: 1110815 - RNA, 19 nt, Artificial Sequence
  Description of Artificial Sequence: Synthetic oligonucleotide
  Antisense strand to SEQ ID NO: 1110814
aaaugccaagcauucuaaa

SEQ ID NO: 1110816 - RNA, 19 nt, Artificial Sequence
  Description of Artificial Sequence: Synthetic oligonucleotide
  Sense strand starting at position 1465 of SEQ ID NO: 915849
aggaaagugugucuucaag

SEQ ID NO: 1110817 - RNA, 19 nt, Artificial Sequence
  Description of Artificial Sequence: Synthetic oligonucleotide
  Antisense strand to SEQ ID NO: 1110816
cuugaagacacacuuuccu

SEQ ID NO: 1110818 - RNA, 19 nt, Artificial Sequence
  Description of Artificial Sequence: Synthetic oligonucleotide
  Sense strand starting at position 1471 of SEQ ID NO: 915849
gugugucuucaaguuguuu

SEQ ID NO: 1110819 - RNA, 19 nt, Artificial Sequence
  Description of Artificial Sequence: Synthetic oligonucleotide
  Antisense strand to SEQ ID NO: 1110818
aaacaacuugaagacacac

SEQ ID NO: 1110820 - RNA, 19 nt, Artificial Sequence
  Description of Artificial Sequence: Synthetic oligonucleotide
  Sense strand starting at position 1641 of SEQ ID NO: 915849
gacgaaucaguacauugua

SEQ ID NO: 1110821 - RNA, 19 nt, Artificial Sequence
  Description of Artificial Sequence: Synthetic oligonucleotide
  Antisense strand to SEQ ID NO: 1110820
uacaauguacugauucguc

SEQ ID NO: 1110822 - RNA, 19 nt, Artificial Sequence
  Description of Artificial Sequence: Synthetic oligonucleotide
  Sense strand starting at position 1733 of SEQ ID NO: 915849
gcguauaagaucugaauag

SEQ ID NO: 1110823 - RNA, 19 nt, Artificial Sequence
  Description of Artificial Sequence: Synthetic oligonucleotide
  Antisense strand to SEQ ID NO: 1110822
cuauucagaucuuauacgc

SEQ ID NO: 1110824 - RNA, 19 nt, Artificial Sequence
  Description of Artificial Sequence: Synthetic oligonucleotide
  Sense strand starting at position 1787 of SEQ ID NO: 915849
auugaucaagcugaucuua

SEQ ID NO: 1110825 - RNA, 19 nt, Artificial Sequence
  Description of Artificial Sequence: Synthetic oligonucleotide
  Antisense strand to SEQ ID NO: 1110824
uaagaucagcuugaucaau

SEQ ID NO: 1110826 - RNA, 19 nt, Artificial Sequence
  Description of Artificial Sequence: Synthetic oligonucleotide
  Sense strand starting at position 1789 of SEQ ID NO: 915849
ugaucaagcugaucuuauc

SEQ ID NO: 1110827 - RNA, 19 nt, Artificial Sequence
  Description of Artificial Sequence: Synthetic oligonucleotide
  Antisense strand to SEQ ID NO: 1110826
gauaagaucagcuugauca

SEQ ID NO: 1110828 - RNA, 19 nt, Artificial Sequence
  Description of Artificial Sequence: Synthetic oligonucleotide
  Sense strand starting at position 1797 of SEQ ID NO: 915849
cugaucuuaucagucagac

SEQ ID NO: 1110829 - RNA, 19 nt, Artificial Sequence
  Description of Artificial Sequence: Synthetic oligonucleotide
  Antisense strand to SEQ ID NO: 1110828
gucugacugauaagaucag

SEQ ID NO: 1110830 - RNA, 19 nt, Artificial Sequence
  Description of Artificial Sequence: Synthetic oligonucleotide
  Sense strand starting at position 1842 of SEQ ID NO: 915849
ccagucucauuacucagau

SEQ ID NO: 1110831 - RNA, 19 nt, Artificial Sequence
  Description of Artificial Sequence: Synthetic oligonucleotide
  Antisense strand to SEQ ID NO: 1110830
aucugaguaaugagacugg

SEQ ID NO: 1110832 - RNA, 19 nt, Artificial Sequence
  Description of Artificial Sequence: Synthetic oligonucleotide
  Sense strand starting at position 1856 of SEQ ID NO: 915849
cagauuugcucugagagga

SEQ ID NO: 1110833 - RNA, 19 nt, Artificial Sequence
  Description of Artificial Sequence: Synthetic oligonucleotide
  Antisense strand to SEQ ID NO: 1110832
uccucucagagcaaaucug

SEQ ID NO: 1110834 - RNA, 19 nt, Artificial Sequence
  Description of Artificial Sequence: Synthetic oligonucleotide
  Sense strand starting at position 1880 of SEQ ID NO: 915849
agugcaaucacccacgaga

SEQ ID NO: 1110835 - RNA, 19 nt, Artificial Sequence
  Description of Artificial Sequence: Synthetic oligonucleotide
  Antisense strand to SEQ ID NO: 1110834
ucucgugggugauugcacu

SEQ ID NO: 1110836 - RNA, 19 nt, Artificial Sequence
  Description of Artificial Sequence: Synthetic oligonucleotide
  Sense strand starting at position 1894 of SEQ ID NO: 915849
cgagaagacugccucuuua

SEQ ID NO: 1110837 - RNA, 19 nt, Artificial Sequence
  Description of Artificial Sequence: Synthetic oligonucleotide
  Antisense strand to SEQ ID NO: 1110836
uaaagaggcagucuucucg

SEQ ID NO: 1110838 - RNA, 19 nt, Artificial Sequence
  Description of Artificial Sequence: Synthetic oligonucleotide
  Sense strand starting at position 1922 of SEQ ID NO: 915849
agugguguccagagugucu

SEQ ID NO: 1110839 - RNA, 19 nt, Artificial Sequence
  Description of Artificial Sequence: Synthetic oligonucleotide
  Antisense strand to SEQ ID NO: 1110838
agacacucuggacaccacu

SEQ ID NO: 1110840 - RNA, 19 nt, Artificial Sequence
  Description of Artificial Sequence: Synthetic oligonucleotide
  Sense strand starting at position 2151 of SEQ ID NO: 915849
ggcagagucacacagguua

SEQ ID NO: 1110841 - RNA, 19 nt, Artificial Sequence
  Description of Artificial Sequence: Synthetic oligonucleotide
  Antisense strand to SEQ ID NO: 1110840
uaaccugugugacucugcc

SEQ ID NO: 1110842 - RNA, 19 nt, Artificial Sequence
  Description of Artificial Sequence: Synthetic oligonucleotide
  Sense strand starting at position 2180 of SEQ ID NO: 915849
ggcagcucugcuuuaaugu

SEQ ID NO: 1110843 - RNA, 19 nt, Artificial Sequence
  Description of Artificial Sequence: Synthetic oligonucleotide
  Antisense strand to SEQ ID NO: 1110842
acauuaaagcagagcugcc

SEQ ID NO: 1110844 - RNA, 19 nt, Artificial Sequence
  Description of Artificial Sequence: Synthetic oligonucleotide
  Sense strand starting at position 2432 of SEQ ID NO: 915849
cucugaaccucaguacaga

SEQ ID NO: 1110845 - RNA, 19 nt, Artificial Sequence
  Description of Artificial Sequence: Synthetic oligonucleotide
  Antisense strand to SEQ ID NO: 1110844
ucuguacugagguucagag

SEQ ID NO: 1110846 - RNA, 19 nt, Artificial Sequence
  Description of Artificial Sequence: Synthetic oligonucleotide
  Sense strand starting at position 2551 of SEQ ID NO: 915849
uucugauugcauuacaaga

SEQ ID NO: 1110847 - RNA, 19 nt, Artificial Sequence
  Description of Artificial Sequence: Synthetic oligonucleotide
  Antisense strand to SEQ ID NO: 1110846
ucuuguaaugcaaucagaa

SEQ ID NO: 1110848 - RNA, 19 nt, Artificial Sequence
  Description of Artificial Sequence: Synthetic oligonucleotide
  Sense strand starting at position 2562 of SEQ ID NO: 915849
uuacaagaauugcuugaag

SEQ ID NO: 1110849 - RNA, 19 nt, Artificial Sequence
  Description of Artificial Sequence: Synthetic oligonucleotide
  Antisense strand to SEQ ID NO: 1110848
cuucaagcaauucuuguaa

SEQ ID NO: 1110850 - RNA, 19 nt, Artificial Sequence
  Description of Artificial Sequence: Synthetic oligonucleotide
  Sense strand starting at position 2564 of SEQ ID NO: 915849
acaagaauugcuugaagac

SEQ ID NO: 1110851 - RNA, 19 nt, Artificial Sequence
  Description of Artificial Sequence: Synthetic oligonucleotide
  Antisense strand to SEQ ID NO: 1110850
gucuucaagcaauucuugu

SEQ ID NO: 1110852 - RNA, 19 nt, Artificial Sequence
  Description of Artificial Sequence: Synthetic oligonucleotide
  Sense strand starting at position 2786 of SEQ ID NO: 915849
cucauagaacuuggucuau

SEQ ID NO: 1110853 - RNA, 19 nt, Artificial Sequence
  Description of Artificial Sequence: Synthetic oligonucleotide
  Antisense strand to SEQ ID NO: 1110852
auagaccaaguucuaugag

SEQ ID NO: 1110854 - RNA, 19 nt, Artificial Sequence
  Description of Artificial Sequence: Synthetic oligonucleotide
  Sense strand starting at position 3016 of SEQ ID NO: 915849
ccauguauucgucuguucu

SEQ ID NO: 1110855 - RNA, 19 nt, Artificial Sequence
  Description of Artificial Sequence: Synthetic oligonucleotide
  Antisense strand to SEQ ID NO: 1110854
agaacagacgaauacaugg

SEQ ID NO: 1110856 - RNA, 19 nt, Artificial Sequence
  Description of Artificial Sequence: Synthetic oligonucleotide
  Sense strand starting at position 3675 of SEQ ID NO: 915849
ccaagcaaccuggauuauu

SEQ ID NO: 1110857 - RNA, 19 nt, Artificial Sequence
  Description of Artificial Sequence: Synthetic oligonucleotide
  Antisense strand to SEQ ID NO: 1110856
aauaauccagguugcuugg

SEQ ID NO: 1110858 - RNA, 19 nt, Artificial Sequence
  Description of Artificial Sequence: Synthetic oligonucleotide
  Sense strand starting at position 3768 of SEQ ID NO: 915849
guauuccuucuggaauauu

SEQ ID NO: 1110859 - RNA, 19 nt, Artificial Sequence
  Description of Artificial Sequence: Synthetic oligonucleotide
  Antisense strand to SEQ ID NO: 1110858
aauauuccagaaggaauac

SEQ ID NO: 1110860 - RNA, 19 nt, Artificial Sequence
  Description of Artificial Sequence: Synthetic oligonucleotide
  Sense strand starting at position 3967 of SEQ ID NO: 915849
ugaggucccucugcugaaa

SEQ ID NO: 1110861 - RNA, 19 nt, Artificial Sequence
  Description of Artificial Sequence: Synthetic oligonucleotide
  Antisense strand to SEQ ID NO: 1110860
uuucagcagagggaccuca

SEQ ID NO: 1110862 - RNA, 19 nt, Artificial Sequence
  Description of Artificial Sequence: Synthetic oligonucleotide
  Sense strand starting at position 3970 of SEQ ID NO: 915849
ggucccucugcugaaaugu

SEQ ID NO: 1110863 - RNA, 19 nt, Artificial Sequence
  Description of Artificial Sequence: Synthetic oligonucleotide
  Antisense strand to SEQ ID NO: 1110862
acauuucagcagagggacc

SEQ ID NO: 1110864 - RNA, 19 nt, Artificial Sequence
  Description of Artificial Sequence: Synthetic oligonucleotide
  Sense strand starting at position 258 of SEQ ID NO: 915850
uagaaacuuguccagguca

SEQ ID NO: 1110865 - RNA, 19 nt, Artificial Sequence
  Description of Artificial Sequence: Synthetic oligonucleotide
  Antisense strand to SEQ ID NO: 1110864
ugaccuggacaaguuucua

SEQ ID NO: 1110866 - RNA, 19 nt, Artificial Sequence
  Description of Artificial Sequence: Synthetic oligonucleotide
  Sense strand starting at position 260 of SEQ ID NO: 915850
gaaacuuguccaggucaca

SEQ ID NO: 1110867 - RNA, 19 nt, Artificial Sequence
  Description of Artificial Sequence: Synthetic oligonucleotide
  Antisense strand to SEQ ID NO: 1110866
ugugaccuggacaaguuuc

SEQ ID NO: 1110868 - RNA, 19 nt, Artificial Sequence
  Description of Artificial Sequence: Synthetic oligonucleotide
  Sense strand starting at position 276 of SEQ ID NO: 915850
acagcuaacgaaugacaaa

SEQ ID NO: 1110869 - RNA, 19 nt, Artificial Sequence
  Description of Artificial Sequence: Synthetic oligonucleotide
  Antisense strand to SEQ ID NO: 1110868
uuugucauucguuagcugu

SEQ ID NO: 1110870 - RNA, 19 nt, Artificial Sequence
  Description of Artificial Sequence: Synthetic oligonucleotide
  Sense strand starting at position 403 of SEQ ID NO: 915850
aggucuugagcccaggaau

SEQ ID NO: 1110871 - RNA, 19 nt, Artificial Sequence
  Description of Artificial Sequence: Synthetic oligonucleotide
  Antisense strand to SEQ ID NO: 1110870
auuccugggcucaagaccu

SEQ ID NO: 1110872 - RNA, 19 nt, Artificial Sequence
  Description of Artificial Sequence: Synthetic oligonucleotide
  Sense strand starting at position 569 of SEQ ID NO: 915850
aguguuauacaggaguaag

SEQ ID NO: 1110873 - RNA, 19 nt, Artificial Sequence
  Description of Artificial Sequence: Synthetic oligonucleotide
  Antisense strand to SEQ ID NO: 1110872
cuuacuccuguauaacacu

SEQ ID NO: 1110874 - RNA, 19 nt, Artificial Sequence
  Description of Artificial Sequence: Synthetic oligonucleotide
  Sense strand starting at position 625 of SEQ ID NO: 915850
caaggaaaguauguuagua

SEQ ID NO: 1110875 - RNA, 19 nt, Artificial Sequence
  Description of Artificial Sequence: Synthetic oligonucleotide
  Antisense strand to SEQ ID NO: 1110874
uacuaacauacuuuccuug

SEQ ID NO: 1110876 - RNA, 19 nt, Artificial Sequence
  Description of Artificial Sequence: Synthetic oligonucleotide
  Sense strand starting at position 679 of SEQ ID NO: 915850
guguuaagugaacauagga

SEQ ID NO: 1110877 - RNA, 19 nt, Artificial Sequence
  Description of Artificial Sequence: Synthetic oligonucleotide
  Antisense strand to SEQ ID NO: 1110876
uccuauguucacuuaacac

SEQ ID NO: 1110878 - RNA, 19 nt, Artificial Sequence
  Description of Artificial Sequence: Synthetic oligonucleotide
  Sense strand starting at position 701 of SEQ ID NO: 915850
ggccaagaaauaugacagu

SEQ ID NO: 1110879 - RNA, 19 nt, Artificial Sequence
  Description of Artificial Sequence: Synthetic oligonucleotide
  Antisense strand to SEQ ID NO: 1110878
acugucauauuucuuggcc

SEQ ID NO: 1110880 - RNA, 19 nt, Artificial Sequence
  Description of Artificial Sequence: Synthetic oligonucleotide
  Sense strand starting at position 735 of SEQ ID NO: 915850
agcuucuccgaugaaauuc

SEQ ID NO: 1110881 - RNA, 19 nt, Artificial Sequence
  Description of Artificial Sequence: Synthetic oligonucleotide
  Antisense strand to SEQ ID NO: 1110880
gaauuucaucggagaagcu

SEQ ID NO: 1110882 - RNA, 19 nt, Artificial Sequence
  Description of Artificial Sequence: Synthetic oligonucleotide
  Sense strand starting at position 988 of SEQ ID NO: 915850
uucugauaagccuaaggua

SEQ ID NO: 1110883 - RNA, 19 nt, Artificial Sequence
  Description of Artificial Sequence: Synthetic oligonucleotide
  Antisense strand to SEQ ID NO: 1110882
uaccuuaggcuuaucagaa

SEQ ID NO: 1110884 - RNA, 19 nt, Artificial Sequence
  Description of Artificial Sequence: Synthetic oligonucleotide
  Sense strand starting at position 1124 of SEQ ID NO: 915850
uggcucuuuguagaacaau

SEQ ID NO: 1110885 - RNA, 19 nt, Artificial Sequence
  Description of Artificial Sequence: Synthetic oligonucleotide
  Antisense strand to SEQ ID NO: 1110884
auuguucuacaaagagcca

SEQ ID NO: 1110886 - RNA, 19 nt, Artificial Sequence
  Description of Artificial Sequence: Synthetic oligonucleotide
  Sense strand starting at position 1130 of SEQ ID NO: 915850
uuuguagaacaaugcagau

SEQ ID NO: 1110887 - RNA, 19 nt, Artificial Sequence
  Description of Artificial Sequence: Synthetic oligonucleotide
  Antisense strand to SEQ ID NO: 1110886
aucugcauuguucuacaaa

SEQ ID NO: 1110888 - RNA, 19 nt, Artificial Sequence
  Description of Artificial Sequence: Synthetic oligonucleotide
  Sense strand starting at position 1210 of SEQ ID NO: 915850
gcaguuucuccuuagacag

SEQ ID NO: 1110889 - RNA, 19 nt, Artificial Sequence
  Description of Artificial Sequence: Synthetic oligonucleotide
  Antisense strand to SEQ ID NO: 1110888
cugucuaaggagaaacugc

SEQ ID NO: 1110890 - RNA, 19 nt, Artificial Sequence
  Description of Artificial Sequence: Synthetic oligonucleotide
  Sense strand starting at position 1309 of SEQ ID NO: 915850
ucacacuucugguuaagaa

SEQ ID NO: 1110891 - RNA, 19 nt, Artificial Sequence
  Description of Artificial Sequence: Synthetic oligonucleotide
  Antisense strand to SEQ ID NO: 1110890
uucuuaaccagaaguguga

SEQ ID NO: 1110892 - RNA, 19 nt, Artificial Sequence
  Description of Artificial Sequence: Synthetic oligonucleotide
  Sense strand starting at position 1357 of SEQ ID NO: 915850
agugcuuugguauauaaac

SEQ ID NO: 1110893 - RNA, 19 nt, Artificial Sequence
  Description of Artificial Sequence: Synthetic oligonucleotide
  Antisense strand to SEQ ID NO: 1110892
guuuauauaccaaagcacu

SEQ ID NO: 1110894 - RNA, 19 nt, Artificial Sequence
  Description of Artificial Sequence: Synthetic oligonucleotide
  Sense strand starting at position 1705 of SEQ ID NO: 915850
gccagcuuagcuuacauuu

SEQ ID NO: 1110895 - RNA, 19 nt, Artificial Sequence
  Description of Artificial Sequence: Synthetic oligonucleotide
  Antisense strand to SEQ ID NO: 1110894
aaauguaagcuaagcuggc

SEQ ID NO: 1110896 - RNA, 19 nt, Artificial Sequence
  Description of Artificial Sequence: Synthetic oligonucleotide
  Sense strand starting at position 1805 of SEQ ID NO: 915850
acugguuaacucugaacuu

SEQ ID NO: 1110897 - RNA, 19 nt, Artificial Sequence
  Description of Artificial Sequence: Synthetic oligonucleotide
  Antisense strand to SEQ ID NO: 1110896
aaguucagaguuaaccagu

SEQ ID NO: 1110898 - RNA, 19 nt, Artificial Sequence
  Description of Artificial Sequence: Synthetic oligonucleotide
  Sense strand starting at position 1832 of SEQ ID NO: 915850
ucggcaauuagagauuaua

SEQ ID NO: 1110899 - RNA, 19 nt, Artificial Sequence
  Description of Artificial Sequence: Synthetic oligonucleotide
  Antisense strand to SEQ ID NO: 1110898
uauaaucucuaauugccga

SEQ ID NO: 1110900 - RNA, 19 nt, Artificial Sequence
  Description of Artificial Sequence: Synthetic oligonucleotide
  Sense strand starting at position 2001 of SEQ ID NO: 915850
aggcgagaaagguaaguuu

SEQ ID NO: 1110901 - RNA, 19 nt, Artificial Sequence
  Description of Artificial Sequence: Synthetic oligonucleotide
  Antisense strand to SEQ ID NO: 1110900
aaacuuaccuuucucgccu

SEQ ID NO: 1110902 - RNA, 19 nt, Artificial Sequence
  Description of Artificial Sequence: Synthetic oligonucleotide
  Sense strand starting at position 2382 of SEQ ID NO: 915850
cacguuagggaucgagaga

SEQ ID NO: 1110903 - RNA, 19 nt, Artificial Sequence
  Description of Artificial Sequence: Synthetic oligonucleotide
  Antisense strand to SEQ ID NO: 1110902
ucucucgaucccuaacgug

SEQ ID NO: 1110904 - RNA, 19 nt, Artificial Sequence
  Description of Artificial Sequence: Synthetic oligonucleotide
  Sense strand starting at position 2489 of SEQ ID NO: 915850
aggcuaguggcgagagguu

SEQ ID NO: 1110905 - RNA, 19 nt, Artificial Sequence
  Description of Artificial Sequence: Synthetic oligonucleotide
  Antisense strand to SEQ ID NO: 1110904
aaccucucgccacuagccu

SEQ ID NO: 1110906 - RNA, 19 nt, Artificial Sequence
  Description of Artificial Sequence: Synthetic oligonucleotide
  Sense strand starting at position 2708 of SEQ ID NO: 915850
gagagugauguuugaggag

SEQ ID NO: 1110907 - RNA, 19 nt, Artificial Sequence
  Description of Artificial Sequence: Synthetic oligonucleotide
  Antisense strand to SEQ ID NO: 1110906
cuccucaaacaucacucuc

SEQ ID NO: 1110908 - RNA, 19 nt, Artificial Sequence
  Description of Artificial Sequence: Synthetic oligonucleotide
  Sense strand starting at position 2737 of SEQ ID NO: 915850
ggagcuugguggaaaggaa

SEQ ID NO: 1110909 - RNA, 19 nt, Artificial Sequence
  Description of Artificial Sequence: Synthetic oligonucleotide
  Antisense strand to SEQ ID NO: 1110908
uuccuuuccaccaagcucc

SEQ ID NO: 1110910 - RNA, 19 nt, Artificial Sequence
  Description of Artificial Sequence: Synthetic oligonucleotide
  Sense strand starting at position 2762 of SEQ ID NO: 915850
gaaugaaggcuauguuaga

SEQ ID NO: 1110911 - RNA, 19 nt, Artificial Sequence
  Description of Artificial Sequence: Synthetic oligonucleotide
  Antisense strand to SEQ ID NO: 1110910
ucuaacauagccuucauuc

SEQ ID NO: 1110912 - RNA, 19 nt, Artificial Sequence
  Description of Artificial Sequence: Synthetic oligonucleotide
  Sense strand starting at position 2763 of SEQ ID NO: 915850
aaugaaggcuauguuagaa

SEQ ID NO: 1110913 - RNA, 19 nt, Artificial Sequence
  Description of Artificial Sequence: Synthetic oligonucleotide
  Antisense strand to SEQ ID NO: 1110912
uucuaacauagccuucauu

SEQ ID NO: 1110914 - RNA, 19 nt, Artificial Sequence
  Description of Artificial Sequence: Synthetic oligonucleotide
  Sense strand starting at position 2887 of SEQ ID NO: 915850
uagaaauacgguuacacuu

SEQ ID NO: 1110915 - RNA, 19 nt, Artificial Sequence
  Description of Artificial Sequence: Synthetic oligonucleotide
  Antisense strand to SEQ ID NO: 1110914
aaguguaaccguauuucua

SEQ ID NO: 1110916 - RNA, 19 nt, Artificial Sequence
  Description of Artificial Sequence: Synthetic oligonucleotide
  Sense strand starting at position 2989 of SEQ ID NO: 915850
gucguuacagaauaucauu

SEQ ID NO: 1110917 - RNA, 19 nt, Artificial Sequence
  Description of Artificial Sequence: Synthetic oligonucleotide
  Antisense strand to SEQ ID NO: 1110916
aaugauauucuguaacgac

SEQ ID NO: 1110918 - RNA, 19 nt, Artificial Sequence
  Description of Artificial Sequence: Synthetic oligonucleotide
  Sense strand starting at position 3078 of SEQ ID NO: 915850
uagagcuauugagucagaa

SEQ ID NO: 1110919 - RNA, 19 nt, Artificial Sequence
  Description of Artificial Sequence: Synthetic oligonucleotide
  Antisense strand to SEQ ID NO: 1110918
uucugacucaauagcucua

SEQ ID NO: 1110920 - RNA, 19 nt, Artificial Sequence
  Description of Artificial Sequence: Synthetic oligonucleotide
  Sense strand starting at position 3169 of SEQ ID NO: 915850
aagaauuaggaguguuuag

SEQ ID NO: 1110921 - RNA, 19 nt, Artificial Sequence
  Description of Artificial Sequence: Synthetic oligonucleotide
  Antisense strand to SEQ ID NO: 1110920
cuaaacacuccuaauucuu

SEQ ID NO: 1110922 - RNA, 19 nt, Artificial Sequence
  Description of Artificial Sequence: Synthetic oligonucleotide
  Sense strand starting at position 3178 of SEQ ID NO: 915850
gaguguuuagaggauccuu

SEQ ID NO: 1110923 - RNA, 19 nt, Artificial Sequence
  Description of Artificial Sequence: Synthetic oligonucleotide
  Antisense strand to SEQ ID NO: 1110922
aaggauccucuaaacacuc

SEQ ID NO: 1110924 - RNA, 19 nt, Artificial Sequence
  Description of Artificial Sequence: Synthetic oligonucleotide
  Sense strand starting at position 3208 of SEQ ID NO: 915850
uuccaucuuggguagaacu

SEQ ID NO: 1110925 - RNA, 19 nt, Artificial Sequence
  Description of Artificial Sequence: Synthetic oligonucleotide
  Antisense strand to SEQ ID NO: 1110924
aguucuacccaagauggaa

SEQ ID NO: 1110926 - RNA, 19 nt, Artificial Sequence
  Description of Artificial Sequence: Synthetic oligonucleotide
  Sense strand starting at position 3219 of SEQ ID NO: 915850
guagaacuccugcauacca

SEQ ID NO: 1110927 - RNA, 19 nt, Artificial Sequence
  Description of Artificial Sequence: Synthetic oligonucleotide
  Antisense strand to SEQ ID NO: 1110926
ugguaugcaggaguucuac

SEQ ID NO: 1110928 - RNA, 19 nt, Artificial Sequence
  Description of Artificial Sequence: Synthetic oligonucleotide
  Sense strand starting at position 3305 of SEQ ID NO: 915850
auuugcugguucuuguuaa

SEQ ID NO: 1110929 - RNA, 19 nt, Artificial Sequence
  Description of Artificial Sequence: Synthetic oligonucleotide
  Antisense strand to SEQ ID NO: 1110928
uuaacaagaaccagcaaau

SEQ ID NO: 1110930 - RNA, 19 nt, Artificial Sequence
  Description of Artificial Sequence: Synthetic oligonucleotide
  Sense strand starting at position 3354 of SEQ ID NO: 915850
ugugaaugguaaucacuau

SEQ ID NO: 1110931 - RNA, 19 nt, Artificial Sequence
  Description of Artificial Sequence: Synthetic oligonucleotide
  Antisense strand to SEQ ID NO: 1110930
auagugauuaccauucaca

SEQ ID NO: 1110932 - RNA, 19 nt, Artificial Sequence
  Description of Artificial Sequence: Synthetic oligonucleotide
  Sense strand starting at position 3397 of SEQ ID NO: 915850
ucuccaguucuagguauuu

SEQ ID NO: 1110933 - RNA, 19 nt, Artificial Sequence
  Description of Artificial Sequence: Synthetic oligonucleotide
  Antisense strand to SEQ ID NO: 1110932
aaauaccuagaacuggaga

SEQ ID NO: 1110934 - RNA, 19 nt, Artificial Sequence
  Description of Artificial Sequence: Synthetic oligonucleotide
  Sense strand starting at position 3561 of SEQ ID NO: 915850
auaggacagaacuguguaa

SEQ ID NO: 1110935 - RNA, 19 nt, Artificial Sequence
  Description of Artificial Sequence: Synthetic oligonucleotide
  Antisense strand to SEQ ID NO: 1110934
uuacacaguucuguccuau

SEQ ID NO: 1110936 - RNA, 19 nt, Artificial Sequence
  Description of Artificial Sequence: Synthetic oligonucleotide
  Sense strand starting at position 3724 of SEQ ID NO: 915850
uguuaugaucuggaaaguc

SEQ ID NO: 1110937 - RNA, 19 nt, Artificial Sequence
  Description of Artificial Sequence: Synthetic oligonucleotide
  Antisense strand to SEQ ID NO: 1110936
gacuuuccagaucauaaca

SEQ ID NO: 1110938 - RNA, 19 nt, Artificial Sequence
  Description of Artificial Sequence: Synthetic oligonucleotide
  Sense strand starting at position 3734 of SEQ ID NO: 915850
uggaaaguccucuggcaaa

SEQ ID NO: 1110939 - RNA, 19 nt, Artificial Sequence
  Description of Artificial Sequence: Synthetic oligonucleotide
  Antisense strand to SEQ ID NO: 1110938
uuugccagaggacuuucca

SEQ ID NO: 1110940 - RNA, 19 nt, Artificial Sequence
  Description of Artificial Sequence: Synthetic oligonucleotide
  Sense strand starting at position 3807 of SEQ ID NO: 915850
ccugaauaucugggauagu

SEQ ID NO: 1110941 - RNA, 19 nt, Artificial Sequence
  Description of Artificial Sequence: Synthetic oligonucleotide
  Antisense strand to SEQ ID NO: 1110940
acuaucccagauauucagg

SEQ ID NO: 1110942 - RNA, 19 nt, Artificial Sequence
  Description of Artificial Sequence: Synthetic oligonucleotide
  Sense strand starting at position 3839 of SEQ ID NO: 915850
gaauguguuagaugggauc

SEQ ID NO: 1110943 - RNA, 19 nt, Artificial Sequence
  Description of Artificial Sequence: Synthetic oligonucleotide
  Antisense strand to SEQ ID NO: 1110942
gaucccaucuaacacauuc

SEQ ID NO: 1110944 - RNA, 19 nt, Artificial Sequence
  Description of Artificial Sequence: Synthetic oligonucleotide
  Sense strand starting at position 110 of SEQ ID NO: 915851
uuucuaugcgggcaaauaa

SEQ ID NO: 1110945 - RNA, 19 nt, Artificial Sequence
  Description of Artificial Sequence: Synthetic oligonucleotide
  Antisense strand to SEQ ID NO: 1110944
uuauuugcccgcauagaaa

SEQ ID NO: 1110946 - RNA, 19 nt, Artificial Sequence
  Description of Artificial Sequence: Synthetic oligonucleotide
  Sense strand starting at position 258 of SEQ ID NO: 915851
ccauguaucuguuugauuu

SEQ ID NO: 1110947 - RNA, 19 nt, Artificial Sequence
  Description of Artificial Sequence: Synthetic oligonucleotide
  Antisense strand to SEQ ID NO: 1110946
aaaucaaacagauacaugg

SEQ ID NO: 1110948 - RNA, 19 nt, Artificial Sequence
  Description of Artificial Sequence: Synthetic oligonucleotide
  Sense strand starting at position 433 of SEQ ID NO: 915851
acaguuagacccugaucac

SEQ ID NO: 1110949 - RNA, 19 nt, Artificial Sequence
  Description of Artificial Sequence: Synthetic oligonucleotide
  Antisense strand to SEQ ID NO: 1110948
gugaucagggucuaacugu

SEQ ID NO: 1110950 - RNA, 19 nt, Artificial Sequence
  Description of Artificial Sequence: Synthetic oligonucleotide
  Sense strand starting at position 496 of SEQ ID NO: 915851
accugagauguuuaccuuu

SEQ ID NO: 1110951 - RNA, 19 nt, Artificial Sequence
  Description of Artificial Sequence: Synthetic oligonucleotide
  Antisense strand to SEQ ID NO: 1110950
aaagguaaacaucucaggu

SEQ ID NO: 1110952 - RNA, 19 nt, Artificial Sequence
  Description of Artificial Sequence: Synthetic oligonucleotide
  Sense strand starting at position 667 of SEQ ID NO: 915851
gugcuauccaucugggauc

SEQ ID NO: 1110953 - RNA, 19 nt, Artificial Sequence
  Description of Artificial Sequence: Synthetic oligonucleotide
  Antisense strand to SEQ ID NO: 1110952
gaucccagauggauagcac

SEQ ID NO: 1110954 - RNA, 19 nt, Artificial Sequence
  Description of Artificial Sequence: Synthetic oligonucleotide
  Sense strand starting at position 789 of SEQ ID NO: 915851
gugacuauaccucaaagua

SEQ ID NO: 1110955 - RNA, 19 nt, Artificial Sequence
  Description of Artificial Sequence: Synthetic oligonucleotide
  Antisense strand to SEQ ID NO: 1110954
uacuuugagguauagucac

SEQ ID NO: 1110956 - RNA, 19 nt, Artificial Sequence
  Description of Artificial Sequence: Synthetic oligonucleotide
  Sense strand starting at position 814 of SEQ ID NO: 915851
acugguugcaaagaguaaa

SEQ ID NO: 1110957 - RNA, 19 nt, Artificial Sequence
  Description of Artificial Sequence: Synthetic oligonucleotide
  Antisense strand to SEQ ID NO: 1110956
uuuacucuuugcaaccagu

SEQ ID NO: 1110958 - RNA, 19 nt, Artificial Sequence
  Description of Artificial Sequence: Synthetic oligonucleotide
  Sense strand starting at position 1196 of SEQ ID NO: 915851
gccagagcucgguucuugu

SEQ ID NO: 1110959 - RNA, 19 nt, Artificial Sequence
  Description of Artificial Sequence: Synthetic oligonucleotide
  Antisense strand to SEQ ID NO: 1110958
acaagaaccgagcucuggc

SEQ ID NO: 1110960 - RNA, 19 nt, Artificial Sequence
  Description of Artificial Sequence: Synthetic oligonucleotide
  Sense strand starting at position 1395 of SEQ ID NO: 915851
ggacccuauugacuugaua

SEQ ID NO: 1110961 - RNA, 19 nt, Artificial Sequence
  Description of Artificial Sequence: Synthetic oligonucleotide
  Antisense strand to SEQ ID NO: 1110960
uaucaagucaauagggucc

SEQ ID NO: 1110962 - RNA, 19 nt, Artificial Sequence
  Description of Artificial Sequence: Synthetic oligonucleotide
  Sense strand starting at position 1428 of SEQ ID NO: 915851
gagacagucucgguuccau

SEQ ID NO: 1110963 - RNA, 19 nt, Artificial Sequence
  Description of Artificial Sequence: Synthetic oligonucleotide
  Antisense strand to SEQ ID NO: 1110962
auggaaccgagacugucuc

SEQ ID NO: 1110964 - RNA, 19 nt, Artificial Sequence
  Description of Artificial Sequence: Synthetic oligonucleotide
  Sense strand starting at position 1467 of SEQ ID NO: 915851
gggaucucaugauugaagu

SEQ ID NO: 1110965 - RNA, 19 nt, Artificial Sequence
  Description of Artificial Sequence: Synthetic oligonucleotide
  Antisense strand to SEQ ID NO: 1110964
acuucaaucaugagauccc

SEQ ID NO: 1110966 - RNA, 19 nt, Artificial Sequence
  Description of Artificial Sequence: Synthetic oligonucleotide
  Sense strand starting at position 1468 of SEQ ID NO: 915851
ggaucucaugauugaagug

SEQ ID NO: 1110967 - RNA, 19 nt, Artificial Sequence
  Description of Artificial Sequence: Synthetic oligonucleotide
  Antisense strand to SEQ ID NO: 1110966
cacuucaaucaugagaucc

SEQ ID NO: 1110968 - RNA, 19 nt, Artificial Sequence
  Description of Artificial Sequence: Synthetic oligonucleotide
  Sense strand starting at position 1696 of SEQ ID NO: 915851
gcugucuugguguuuagca

SEQ ID NO: 1110969 - RNA, 19 nt, Artificial Sequence
  Description of Artificial Sequence: Synthetic oligonucleotide
  Antisense strand to SEQ ID NO: 1110968
ugcuaaacaccaagacagc

SEQ ID NO: 1110970 - RNA, 19 nt, Artificial Sequence
  Description of Artificial Sequence: Synthetic oligonucleotide
  Sense strand starting at position 2342 of SEQ ID NO: 915851
acggaucuaccuuauuagu

SEQ ID NO: 1110971 - RNA, 19 nt, Artificial Sequence
  Description of Artificial Sequence: Synthetic oligonucleotide
  Antisense strand to SEQ ID NO: 1110970
acuaauaagguagauccgu

SEQ ID NO: 1110972 - RNA, 19 nt, Artificial Sequence
  Description of Artificial Sequence: Synthetic oligonucleotide
  Sense strand starting at position 2378 of SEQ ID NO: 915851
aagugcuguccauagcaca

SEQ ID NO: 1110973 - RNA, 19 nt, Artificial Sequence
  Description of Artificial Sequence: Synthetic oligonucleotide
  Antisense strand to SEQ ID NO: 1110972
ugugcuauggacagcacuu

SEQ ID NO: 1110974 - RNA, 19 nt, Artificial Sequence
  Description of Artificial Sequence: Synthetic oligonucleotide
  Sense strand starting at position 3025 of SEQ ID NO: 915851
auguaauucugcuugacug

SEQ ID NO: 1110975 - RNA, 19 nt, Artificial Sequence
  Description of Artificial Sequence: Synthetic oligonucleotide
  Antisense strand to SEQ ID NO: 1110974
cagucaagcagaauuacau

SEQ ID NO: 1110976 - RNA, 19 nt, Artificial Sequence
  Description of Artificial Sequence: Synthetic oligonucleotide
  Sense strand starting at position 3027 of SEQ ID NO: 915851
guaauucugcuugacugca

SEQ ID NO: 1110977 - RNA, 19 nt, Artificial Sequence
  Description of Artificial Sequence: Synthetic oligonucleotide
  Antisense strand to SEQ ID NO: 1110976
ugcagucaagcagaauuac

SEQ ID NO: 1110978 - RNA, 19 nt, Artificial Sequence
  Description of Artificial Sequence: Synthetic oligonucleotide
  Sense strand starting at position 3052 of SEQ ID NO: 915851
gccuauuccuucuuggaca

SEQ ID NO: 1110979 - RNA, 19 nt, Artificial Sequence
  Description of Artificial Sequence: Synthetic oligonucleotide
  Antisense strand to SEQ ID NO: 1110978
uguccaagaaggaauaggc

SEQ ID NO: 1110980 - RNA, 19 nt, Artificial Sequence
  Description of Artificial Sequence: Synthetic oligonucleotide
  Sense strand starting at position 3065 of SEQ ID NO: 915851
uggacaauguuucccagaa

SEQ ID NO: 1110981 - RNA, 19 nt, Artificial Sequence
  Description of Artificial Sequence: Synthetic oligonucleotide
  Antisense strand to SEQ ID NO: 1110980
uucugggaaacauugucca

SEQ ID NO: 1110982 - RNA, 19 nt, Artificial Sequence
  Description of Artificial Sequence: Synthetic oligonucleotide
  Sense strand starting at position 3066 of SEQ ID NO: 915851
ggacaauguuucccagaaa

SEQ ID NO: 1110983 - RNA, 19 nt, Artificial Sequence
  Description of Artificial Sequence: Synthetic oligonucleotide
  Antisense strand to SEQ ID NO: 1110982
uuucugggaaacauugucc

SEQ ID NO: 1110984 - RNA, 19 nt, Artificial Sequence
  Description of Artificial Sequence: Synthetic oligonucleotide
  Sense strand starting at position 3100 of SEQ ID NO: 915851
acuuguaauuaucuuggca

SEQ ID NO: 1110985 - RNA, 19 nt, Artificial Sequence
  Description of Artificial Sequence: Synthetic oligonucleotide
  Antisense strand to SEQ ID NO: 1110984
ugccaagauaauuacaagu

SEQ ID NO: 1110986 - RNA, 19 nt, Artificial Sequence
  Description of Artificial Sequence: Synthetic oligonucleotide
  Sense strand starting at position 3237 of SEQ ID NO: 915851
aggaaauaaucuuugucua

SEQ ID NO: 1110987 - RNA, 19 nt, Artificial Sequence
  Description of Artificial Sequence: Synthetic oligonucleotide
  Antisense strand to SEQ ID NO: 1110986
uagacaaagauuauuuccu

SEQ ID NO: 1110988 - RNA, 19 nt, Artificial Sequence
  Description of Artificial Sequence: Synthetic oligonucleotide
  Sense strand starting at position 3238 of SEQ ID NO: 915851
ggaaauaaucuuugucuau

SEQ ID NO: 1110989 - RNA, 19 nt, Artificial Sequence
  Description of Artificial Sequence: Synthetic oligonucleotide
  Antisense strand to SEQ ID NO: 1110988
auagacaaagauuauuucc

SEQ ID NO: 1110990 - RNA, 19 nt, Artificial Sequence
  Description of Artificial Sequence: Synthetic oligonucleotide
  Sense strand starting at position 3281 of SEQ ID NO: 915851
ugcuacugguauuuguaua

SEQ ID NO: 1110991 - RNA, 19 nt, Artificial Sequence
  Description of Artificial Sequence: Synthetic oligonucleotide
  Antisense strand to SEQ ID NO: 1110990
uauacaaauaccaguagca

SEQ ID NO: 1110992 - RNA, 19 nt, Artificial Sequence
  Description of Artificial Sequence: Synthetic oligonucleotide
  Sense strand starting at position 3303 of SEQ ID NO: 915851
auuaacgucucuguuggaa

SEQ ID NO: 1110993 - RNA, 19 nt, Artificial Sequence
  Description of Artificial Sequence: Synthetic oligonucleotide
  Antisense strand to SEQ ID NO: 1110992
uuccaacagagacguuaau

SEQ ID NO: 1110994 - RNA, 19 nt, Artificial Sequence
  Description of Artificial Sequence: Synthetic oligonucleotide
  Sense strand starting at position 3331 of SEQ ID NO: 915851
aagcuaaguccaugucuga

SEQ ID NO: 1110995 - RNA, 19 nt, Artificial Sequence
  Description of Artificial Sequence: Synthetic oligonucleotide
  Antisense strand to SEQ ID NO: 1110994
ucagacauggacuuagcuu

SEQ ID NO: 1110996 - RNA, 19 nt, Artificial Sequence
  Description of Artificial Sequence: Synthetic oligonucleotide
  Sense strand starting at position 3334 of SEQ ID NO: 915851
cuaaguccaugucugauua

SEQ ID NO: 1110997 - RNA, 19 nt, Artificial Sequence
  Description of Artificial Sequence: Synthetic oligonucleotide
  Antisense strand to SEQ ID NO: 1110996
uaaucagacauggacuuag

SEQ ID NO: 1110998 - RNA, 19 nt, Artificial Sequence
  Description of Artificial Sequence: Synthetic oligonucleotide
  Sense strand starting at position 3338 of SEQ ID NO: 915851
guccaugucugauuaauca

SEQ ID NO: 1110999 - RNA, 19 nt, Artificial Sequence
  Description of Artificial Sequence: Synthetic oligonucleotide
  Antisense strand to SEQ ID NO: 1110998
ugauuaaucagacauggac

SEQ ID NO: 1111000 - RNA, 19 nt, Artificial Sequence
  Description of Artificial Sequence: Synthetic oligonucleotide
  Sense strand starting at position 3342 of SEQ ID NO: 915851
augucugauuaaucaggau

SEQ ID NO: 1111001 - RNA, 19 nt, Artificial Sequence
  Description of Artificial Sequence: Synthetic oligonucleotide
  Antisense strand to SEQ ID NO: 1111000
auccugauuaaucagacau

SEQ ID NO: 1111002 - RNA, 19 nt, Artificial Sequence
  Description of Artificial Sequence: Synthetic oligonucleotide
  Sense strand starting at position 3345 of SEQ ID NO: 915851
ucugauuaaucaggauuua

SEQ ID NO: 1111003 - RNA, 19 nt, Artificial Sequence
  Description of Artificial Sequence: Synthetic oligonucleotide
  Antisense strand to SEQ ID NO: 1111002
uaaauccugauuaaucaga

SEQ ID NO: 1111004 - RNA, 19 nt, Artificial Sequence
  Description of Artificial Sequence: Synthetic oligonucleotide
  Sense strand starting at position 3432 of SEQ ID NO: 915851
acuuguugaaacggaugaa

SEQ ID NO: 1111005 - RNA, 19 nt, Artificial Sequence
  Description of Artificial Sequence: Synthetic oligonucleotide
  Antisense strand to SEQ ID NO: 1111004
uucauccguuucaacaagu

SEQ ID NO: 1111006 - RNA, 19 nt, Artificial Sequence
  Description of Artificial Sequence: Synthetic oligonucleotide
  Sense strand starting at position 3435 of SEQ ID NO: 915851
uguugaaacggaugaaugu

SEQ ID NO: 1111007 - RNA, 19 nt, Artificial Sequence
  Description of Artificial Sequence: Synthetic oligonucleotide
  Antisense strand to SEQ ID NO: 1111006
acauucauccguuucaaca

SEQ ID NO: 1111008 - RNA, 19 nt, Artificial Sequence
  Description of Artificial Sequence: Synthetic oligonucleotide
  Sense strand starting at position 3444 of SEQ ID NO: 915851
ggaugaauguguuuaagag

SEQ ID NO: 1111009 - RNA, 19 nt, Artificial Sequence
  Description of Artificial Sequence: Synthetic oligonucleotide
  Antisense strand to SEQ ID NO: 1111008
cucuuaaacacauucaucc

SEQ ID NO: 1111010 - RNA, 19 nt, Artificial Sequence
  Description of Artificial Sequence: Synthetic oligonucleotide
  Sense strand starting at position 3450 of SEQ ID NO: 915851
auguguuuaagagaguaag

SEQ ID NO: 1111011 - RNA, 19 nt, Artificial Sequence
  Description of Artificial Sequence: Synthetic oligonucleotide
  Antisense strand to SEQ ID NO: 1111010
cuuacucucuuaaacacau

SEQ ID NO: 1111012 - RNA, 19 nt, Artificial Sequence
  Description of Artificial Sequence: Synthetic oligonucleotide
  Sense strand starting at position 3832 of SEQ ID NO: 915851
ugcuuugagcccuacaucu

SEQ ID NO: 1111013 - RNA, 19 nt, Artificial Sequence
  Description of Artificial Sequence: Synthetic oligonucleotide
  Antisense strand to SEQ ID NO: 1111012
agauguagggcucaaagca

SEQ ID NO: 1111014 - RNA, 19 nt, Artificial Sequence
  Description of Artificial Sequence: Synthetic oligonucleotide
  Sense strand starting at position 3931 of SEQ ID NO: 915851
uuauucugaucuguguaua

SEQ ID NO: 1111015 - RNA, 19 nt, Artificial Sequence
  Description of Artificial Sequence: Synthetic oligonucleotide
  Antisense strand to SEQ ID NO: 1111014
uauacacagaucagaauaa

SEQ ID NO: 1111016 - RNA, 19 nt, Artificial Sequence
  Description of Artificial Sequence: Synthetic oligonucleotide
  Sense strand starting at position 3934 of SEQ ID NO: 915851
uucugaucuguguauacua

SEQ ID NO: 1111017 - RNA, 19 nt, Artificial Sequence
  Description of Artificial Sequence: Synthetic oligonucleotide
  Antisense strand to SEQ ID NO: 1111016
uaguauacacagaucagaa

SEQ ID NO: 1111018 - RNA, 19 nt, Artificial Sequence
  Description of Artificial Sequence: Synthetic oligonucleotide
  Sense strand starting at position 3936 of SEQ ID NO: 915851
cugaucuguguauacuaga

SEQ ID NO: 1111019 - RNA, 19 nt, Artificial Sequence
  Description of Artificial Sequence: Synthetic oligonucleotide
  Antisense strand to SEQ ID NO: 1111018
ucuaguauacacagaucag

SEQ ID NO: 1111020 - RNA, 19 nt, Artificial Sequence
  Description of Artificial Sequence: Synthetic oligonucleotide
  Sense strand starting at position 3941 of SEQ ID NO: 915851
cuguguauacuagaagggu

SEQ ID NO: 1111021 - RNA, 19 nt, Artificial Sequence
  Description of Artificial Sequence: Synthetic oligonucleotide
  Antisense strand to SEQ ID NO: 1111020
acccuucuaguauacacag

SEQ ID NO: 1111022 - RNA, 19 nt, Artificial Sequence
  Description of Artificial Sequence: Synthetic oligonucleotide
  Sense strand starting at position 3947 of SEQ ID NO: 915851
auacuagaagggugcauaa

SEQ ID NO: 1111023 - RNA, 19 nt, Artificial Sequence
  Description of Artificial Sequence: Synthetic oligonucleotide
  Antisense strand to SEQ ID NO: 1111022
uuaugcacccuucuaguau

SEQ ID NO: 1111024 - RNA, 19 nt, Artificial Sequence
  Description of Artificial Sequence: Synthetic oligonucleotide
  Sense strand starting at position 250 of SEQ ID NO: 915852
ucgaaauccuaggcucaac

SEQ ID NO: 1111025 - RNA, 19 nt, Artificial Sequence
  Description of Artificial Sequence: Synthetic oligonucleotide
  Antisense strand to SEQ ID NO: 1111024
guugagccuaggauuucga

SEQ ID NO: 1111026 - RNA, 19 nt, Artificial Sequence
  Description of Artificial Sequence: Synthetic oligonucleotide
  Sense strand starting at position 328 of SEQ ID NO: 915852
uggccucugcuagaucuuu

SEQ ID NO: 1111027 - RNA, 19 nt, Artificial Sequence
  Description of Artificial Sequence: Synthetic oligonucleotide
  Antisense strand to SEQ ID NO: 1111026
aaagaucuagcagaggcca

SEQ ID NO: 1111028 - RNA, 19 nt, Artificial Sequence
  Description of Artificial Sequence: Synthetic oligonucleotide
  Sense strand starting at position 463 of SEQ ID NO: 915852
gcaaaugaccuuuguaaca

SEQ ID NO: 1111029 - RNA, 19 nt, Artificial Sequence
  Description of Artificial Sequence: Synthetic oligonucleotide
  Antisense strand to SEQ ID NO: 1111028
uguuacaaaggucauuugc

SEQ ID NO: 1111030 - RNA, 19 nt, Artificial Sequence
  Description of Artificial Sequence: Synthetic oligonucleotide
  Sense strand starting at position 614 of SEQ ID NO: 915852
gcaauagucccagaggauc

SEQ ID NO: 1111031 - RNA, 19 nt, Artificial Sequence
  Description of Artificial Sequence: Synthetic oligonucleotide
  Antisense strand to SEQ ID NO: 1111030
gauccucugggacuauugc

SEQ ID NO: 1111032 - RNA, 19 nt, Artificial Sequence
  Description of Artificial Sequence: Synthetic oligonucleotide
  Sense strand starting at position 689 of SEQ ID NO: 915852
gggcuuacuccuggaaguu

SEQ ID NO: 1111033 - RNA, 19 nt, Artificial Sequence
  Description of Artificial Sequence: Synthetic oligonucleotide
  Antisense strand to SEQ ID NO: 1111032
aacuuccaggaguaagccc

SEQ ID NO: 1111034 - RNA, 19 nt, Artificial Sequence
  Description of Artificial Sequence: Synthetic oligonucleotide
  Sense strand starting at position 690 of SEQ ID NO: 915852
ggcuuacuccuggaaguuc

SEQ ID NO: 1111035 - RNA, 19 nt, Artificial Sequence
  Description of Artificial Sequence: Synthetic oligonucleotide
  Antisense strand to SEQ ID NO: 1111034
gaacuuccaggaguaagcc

SEQ ID NO: 1111036 - RNA, 19 nt, Artificial Sequence
  Description of Artificial Sequence: Synthetic oligonucleotide
  Sense strand starting at position 698 of SEQ ID NO: 915852
ccuggaaguucagcuguga

SEQ ID NO: 1111037 - RNA, 19 nt, Artificial Sequence
  Description of Artificial Sequence: Synthetic oligonucleotide
  Antisense strand to SEQ ID NO: 1111036
ucacagcugaacuuccagg

SEQ ID NO: 1111038 - RNA, 19 nt, Artificial Sequence
  Description of Artificial Sequence: Synthetic oligonucleotide
  Sense strand starting at position 734 of SEQ ID NO: 915852
gacuuuggucuuuagguga

SEQ ID NO: 1111039 - RNA, 19 nt, Artificial Sequence
  Description of Artificial Sequence: Synthetic oligonucleotide
  Antisense strand to SEQ ID NO: 1111038
ucaccuaaagaccaaaguc

SEQ ID NO: 1111040 - RNA, 19 nt, Artificial Sequence
  Description of Artificial Sequence: Synthetic oligonucleotide
  Sense strand starting at position 738 of SEQ ID NO: 915852
uuggucuuuaggugaguca

SEQ ID NO: 1111041 - RNA, 19 nt, Artificial Sequence
  Description of Artificial Sequence: Synthetic oligonucleotide
  Antisense strand to SEQ ID NO: 1111040
ugacucaccuaaagaccaa

SEQ ID NO: 1111042 - RNA, 19 nt, Artificial Sequence
  Description of Artificial Sequence: Synthetic oligonucleotide
  Sense strand starting at position 741 of SEQ ID NO: 915852
gucuuuaggugagucacua

SEQ ID NO: 1111043 - RNA, 19 nt, Artificial Sequence
  Description of Artificial Sequence: Synthetic oligonucleotide
  Antisense strand to SEQ ID NO: 1111042
uagugacucaccuaaagac

SEQ ID NO: 1111044 - RNA, 19 nt, Artificial Sequence
  Description of Artificial Sequence: Synthetic oligonucleotide
  Sense strand starting at position 854 of SEQ ID NO: 915852
cagguagacgcuuagaaca

SEQ ID NO: 1111045 - RNA, 19 nt, Artificial Sequence
  Description of Artificial Sequence: Synthetic oligonucleotide
  Antisense strand to SEQ ID NO: 1111044
uguucuaagcgucuaccug

SEQ ID NO: 1111046 - RNA, 19 nt, Artificial Sequence
  Description of Artificial Sequence: Synthetic oligonucleotide
  Sense strand starting at position 896 of SEQ ID NO: 915852
caggacaggagcugugauu

SEQ ID NO: 1111047 - RNA, 19 nt, Artificial Sequence
  Description of Artificial Sequence: Synthetic oligonucleotide
  Antisense strand to SEQ ID NO: 1111046
aaucacagcuccuguccug

SEQ ID NO: 1111048 - RNA, 19 nt, Artificial Sequence
  Description of Artificial Sequence: Synthetic oligonucleotide
  Sense strand starting at position 902 of SEQ ID NO: 915852
aggagcugugauuaacuau

SEQ ID NO: 1111049 - RNA, 19 nt, Artificial Sequence
  Description of Artificial Sequence: Synthetic oligonucleotide
  Antisense strand to SEQ ID NO: 1111048
auaguuaaucacagcuccu

SEQ ID NO: 1111050 - RNA, 19 nt, Artificial Sequence
  Description of Artificial Sequence: Synthetic oligonucleotide
  Sense strand starting at position 905 of SEQ ID NO: 915852
agcugugauuaacuaugaa

SEQ ID NO: 1111051 - RNA, 19 nt, Artificial Sequence
  Description of Artificial Sequence: Synthetic oligonucleotide
  Antisense strand to SEQ ID NO: 1111050
uucauaguuaaucacagcu

SEQ ID NO: 1111052 - RNA, 19 nt, Artificial Sequence
  Description of Artificial Sequence: Synthetic oligonucleotide
  Sense strand starting at position 908 of SEQ ID NO: 915852
ugugauuaacuaugaagug

SEQ ID NO: 1111053 - RNA, 19 nt, Artificial Sequence
  Description of Artificial Sequence: Synthetic oligonucleotide
  Antisense strand to SEQ ID NO: 1111052
cacuucauaguuaaucaca

SEQ ID NO: 1111054 - RNA, 19 nt, Artificial Sequence
  Description of Artificial Sequence: Synthetic oligonucleotide
  Sense strand starting at position 917 of SEQ ID NO: 915852
cuaugaagugacugguuga

SEQ ID NO: 1111055 - RNA, 19 nt, Artificial Sequence
  Description of Artificial Sequence: Synthetic oligonucleotide
  Antisense strand to SEQ ID NO: 1111054
ucaaccagucacuucauag

SEQ ID NO: 1111056 - RNA, 19 nt, Artificial Sequence
  Description of Artificial Sequence: Synthetic oligonucleotide
  Sense strand starting at position 918 of SEQ ID NO: 915852
uaugaagugacugguugau

SEQ ID NO: 1111057 - RNA, 19 nt, Artificial Sequence
  Description of Artificial Sequence: Synthetic oligonucleotide
  Antisense strand to SEQ ID NO: 1111056
aucaaccagucacuucaua

SEQ ID NO: 1111058 - RNA, 19 nt, Artificial Sequence
  Description of Artificial Sequence: Synthetic oligonucleotide
  Sense strand starting at position 920 of SEQ ID NO: 915852
ugaagugacugguugauga

SEQ ID NO: 1111059 - RNA, 19 nt, Artificial Sequence
  Description of Artificial Sequence: Synthetic oligonucleotide
  Antisense strand to SEQ ID NO: 1111058
ucaucaaccagucacuuca

SEQ ID NO: 1111060 - RNA, 19 nt, Artificial Sequence
  Description of Artificial Sequence: Synthetic oligonucleotide
  Sense strand starting at position 968 of SEQ ID NO: 915852
ccuuuccauuuauaggaga

SEQ ID NO: 1111061 - RNA, 19 nt, Artificial Sequence
  Description of Artificial Sequence: Synthetic oligonucleotide
  Antisense strand to SEQ ID NO: 1111060
ucuccuauaaauggaaagg

SEQ ID NO: 1111062 - RNA, 19 nt, Artificial Sequence
  Description of Artificial Sequence: Synthetic oligonucleotide
  Sense strand starting at position 991 of SEQ ID NO: 915852
gcuuaagucagagaaggca

SEQ ID NO: 1111063 - RNA, 19 nt, Artificial Sequence
  Description of Artificial Sequence: Synthetic oligonucleotide
  Antisense strand to SEQ ID NO: 1111062
ugccuucucugacuuaagc

SEQ ID NO: 1111064 - RNA, 19 nt, Artificial Sequence
  Description of Artificial Sequence: Synthetic oligonucleotide
  Sense strand starting at position 1062 of SEQ ID NO: 915852
cucugugaagucuagaacu

SEQ ID NO: 1111065 - RNA, 19 nt, Artificial Sequence
  Description of Artificial Sequence: Synthetic oligonucleotide
  Antisense strand to SEQ ID NO: 1111064
aguucuagacuucacagag

SEQ ID NO: 1111066 - RNA, 19 nt, Artificial Sequence
  Description of Artificial Sequence: Synthetic oligonucleotide
  Sense strand starting at position 1064 of SEQ ID NO: 915852
cugugaagucuagaacuuu

SEQ ID NO: 1111067 - RNA, 19 nt, Artificial Sequence
  Description of Artificial Sequence: Synthetic oligonucleotide
  Antisense strand to SEQ ID NO: 1111066
aaaguucuagacuucacag

SEQ ID NO: 1111068 - RNA, 19 nt, Artificial Sequence
  Description of Artificial Sequence: Synthetic oligonucleotide
  Sense strand starting at position 1118 of SEQ ID NO: 915852
aaguauuacugauugagca

SEQ ID NO: 1111069 - RNA, 19 nt, Artificial Sequence
  Description of Artificial Sequence: Synthetic oligonucleotide
  Antisense strand to SEQ ID NO: 1111068
ugcucaaucaguaauacuu

SEQ ID NO: 1111070 - RNA, 19 nt, Artificial Sequence
  Description of Artificial Sequence: Synthetic oligonucleotide
  Sense strand starting at position 1119 of SEQ ID NO: 915852
aguauuacugauugagcaa

SEQ ID NO: 1111071 - RNA, 19 nt, Artificial Sequence
  Description of Artificial Sequence: Synthetic oligonucleotide
  Antisense strand to SEQ ID NO: 1111070
uugcucaaucaguaauacu

SEQ ID NO: 1111072 - RNA, 19 nt, Artificial Sequence
  Description of Artificial Sequence: Synthetic oligonucleotide
  Sense strand starting at position 1122 of SEQ ID NO: 915852
auuacugauugagcaauca

SEQ ID NO: 1111073 - RNA, 19 nt, Artificial Sequence
  Description of Artificial Sequence: Synthetic oligonucleotide
  Antisense strand to SEQ ID NO: 1111072
ugauugcucaaucaguaau

SEQ ID NO: 1111074 - RNA, 19 nt, Artificial Sequence
  Description of Artificial Sequence: Synthetic oligonucleotide
  Sense strand starting at position 1173 of SEQ ID NO: 915852
gaaagcuccuccuugguuu

SEQ ID NO: 1111075 - RNA, 19 nt, Artificial Sequence
  Description of Artificial Sequence: Synthetic oligonucleotide
  Antisense strand to SEQ ID NO: 1111074
aaaccaaggaggagcuuuc

SEQ ID NO: 1111076 - RNA, 19 nt, Artificial Sequence
  Description of Artificial Sequence: Synthetic oligonucleotide
  Sense strand starting at position 1317 of SEQ ID NO: 915852
ggagaacguggcugcaaau

SEQ ID NO: 1111077 - RNA, 19 nt, Artificial Sequence
  Description of Artificial Sequence: Synthetic oligonucleotide
  Antisense strand to SEQ ID NO: 1111076
auuugcagccacguucucc

SEQ ID NO: 1111078 - RNA, 19 nt, Artificial Sequence
  Description of Artificial Sequence: Synthetic oligonucleotide
  Sense strand starting at position 1416 of SEQ ID NO: 915852
acaggaaaguuccugcaaa

SEQ ID NO: 1111079 - RNA, 19 nt, Artificial Sequence
  Description of Artificial Sequence: Synthetic oligonucleotide
  Antisense strand to SEQ ID NO: 1111078
uuugcaggaacuuuccugu

SEQ ID NO: 1111080 - RNA, 19 nt, Artificial Sequence
  Description of Artificial Sequence: Synthetic oligonucleotide
  Sense strand starting at position 2312 of SEQ ID NO: 915852
gagaucauuucggagguga

SEQ ID NO: 1111081 - RNA, 19 nt, Artificial Sequence
  Description of Artificial Sequence: Synthetic oligonucleotide
  Antisense strand to SEQ ID NO: 1111080
ucaccuccgaaaugaucuc

SEQ ID NO: 1111082 - RNA, 19 nt, Artificial Sequence
  Description of Artificial Sequence: Synthetic oligonucleotide
  Sense strand starting at position 2410 of SEQ ID NO: 915852
ccugaaugaugacagggaa

SEQ ID NO: 1111083 - RNA, 19 nt, Artificial Sequence
  Description of Artificial Sequence: Synthetic oligonucleotide
  Antisense strand to SEQ ID NO: 1111082
uucccugucaucauucagg

SEQ ID NO: 1111084 - RNA, 19 nt, Artificial Sequence
  Description of Artificial Sequence: Synthetic oligonucleotide
  Sense strand starting at position 2555 of SEQ ID NO: 915852
cgguucagaguuuagaaca

SEQ ID NO: 1111085 - RNA, 19 nt, Artificial Sequence
  Description of Artificial Sequence: Synthetic oligonucleotide
  Antisense strand to SEQ ID NO: 1111084
uguucuaaacucugaaccg

SEQ ID NO: 1111086 - RNA, 19 nt, Artificial Sequence
  Description of Artificial Sequence: Synthetic oligonucleotide
  Sense strand starting at position 2572 of SEQ ID NO: 915852
caggaugauuugcaugauu

SEQ ID NO: 1111087 - RNA, 19 nt, Artificial Sequence
  Description of Artificial Sequence: Synthetic oligonucleotide
  Antisense strand to SEQ ID NO: 1111086
aaucaugcaaaucauccug

SEQ ID NO: 1111088 - RNA, 19 nt, Artificial Sequence
  Description of Artificial Sequence: Synthetic oligonucleotide
  Sense strand starting at position 2580 of SEQ ID NO: 915852
uuugcaugauuugcuuauu

SEQ ID NO: 1111089 - RNA, 19 nt, Artificial Sequence
  Description of Artificial Sequence: Synthetic oligonucleotide
  Antisense strand to SEQ ID NO: 1111088
aauaagcaaaucaugcaaa

SEQ ID NO: 1111090 - RNA, 19 nt, Artificial Sequence
  Description of Artificial Sequence: Synthetic oligonucleotide
  Sense strand starting at position 3123 of SEQ ID NO: 915852
ggagaucagcugcagagau

SEQ ID NO: 1111091 - RNA, 19 nt, Artificial Sequence
  Description of Artificial Sequence: Synthetic oligonucleotide
  Antisense strand to SEQ ID NO: 1111090
aucucugcagcugaucucc

SEQ ID NO: 1111092 - RNA, 19 nt, Artificial Sequence
  Description of Artificial Sequence: Synthetic oligonucleotide
  Sense strand starting at position 3585 of SEQ ID NO: 915852
augguauuccucuggauac

SEQ ID NO: 1111093 - RNA, 19 nt, Artificial Sequence
  Description of Artificial Sequence: Synthetic oligonucleotide
  Antisense strand to SEQ ID NO: 1111092
guauccagaggaauaccau

SEQ ID NO: 1111094 - RNA, 19 nt, Artificial Sequence
  Description of Artificial Sequence: Synthetic oligonucleotide
  Sense strand starting at position 3587 of SEQ ID NO: 915852
gguauuccucuggauacau

SEQ ID NO: 1111095 - RNA, 19 nt, Artificial Sequence
  Description of Artificial Sequence: Synthetic oligonucleotide
  Antisense strand to SEQ ID NO: 1111094
auguauccagaggaauacc

SEQ ID NO: 1111096 - RNA, 19 nt, Artificial Sequence
  Description of Artificial Sequence: Synthetic oligonucleotide
  Sense strand starting at position 3620 of SEQ ID NO: 915852
ucaugaauuuccuaugaug

SEQ ID NO: 1111097 - RNA, 19 nt, Artificial Sequence
  Description of Artificial Sequence: Synthetic oligonucleotide
  Antisense strand to SEQ ID NO: 1111096
caucauaggaaauucauga

SEQ ID NO: 1111098 - RNA, 19 nt, Artificial Sequence
  Description of Artificial Sequence: Synthetic oligonucleotide
  Sense strand starting at position 3623 of SEQ ID NO: 915852
ugaauuuccuaugauggac

SEQ ID NO: 1111099 - RNA, 19 nt, Artificial Sequence
  Description of Artificial Sequence: Synthetic oligonucleotide
  Antisense strand to SEQ ID NO: 1111098
guccaucauaggaaauuca

SEQ ID NO: 1111100 - RNA, 19 nt, Artificial Sequence
  Description of Artificial Sequence: Synthetic oligonucleotide
  Sense strand starting at position 3688 of SEQ ID NO: 915852
guaugcucuugauuugcuu

SEQ ID NO: 1111101 - RNA, 19 nt, Artificial Sequence
  Description of Artificial Sequence: Synthetic oligonucleotide
  Antisense strand to SEQ ID NO: 1111100
aagcaaaucaagagcauac

SEQ ID NO: 1111102 - RNA, 19 nt, Artificial Sequence
  Description of Artificial Sequence: Synthetic oligonucleotide
  Sense strand starting at position 3692 of SEQ ID NO: 915852
gcucuugauuugcuuaaga

SEQ ID NO: 1111103 - RNA, 19 nt, Artificial Sequence
  Description of Artificial Sequence: Synthetic oligonucleotide
  Antisense strand to SEQ ID NO: 1111102
ucuuaagcaaaucaagagc

SEQ ID NO: 1111104 - RNA, 19 nt, Artificial Sequence
  Description of Artificial Sequence: Synthetic oligonucleotide
  Sense strand starting at position 423 of SEQ ID NO: 915853
uugagaaguuauucuauga

SEQ ID NO: 1111105 - RNA, 19 nt, Artificial Sequence
  Description of Artificial Sequence: Synthetic oligonucleotide
  Antisense strand to SEQ ID NO: 1111104
ucauagaauaacuucucaa

SEQ ID NO: 1111106 - RNA, 19 nt, Artificial Sequence
  Description of Artificial Sequence: Synthetic oligonucleotide
  Sense strand starting at position 427 of SEQ ID NO: 915853
gaaguuauucuaugacaag

SEQ ID NO: 1111107 - RNA, 19 nt, Artificial Sequence
  Description of Artificial Sequence: Synthetic oligonucleotide
  Antisense strand to SEQ ID NO: 1111106
cuugucauagaauaacuuc

SEQ ID NO: 1111108 - RNA, 19 nt, Artificial Sequence
  Description of Artificial Sequence: Synthetic oligonucleotide
  Sense strand starting at position 430 of SEQ ID NO: 915853
guuauucuaugacaagauu

SEQ ID NO: 1111109 - RNA, 19 nt, Artificial Sequence
  Description of Artificial Sequence: Synthetic oligonucleotide
  Antisense strand to SEQ ID NO: 1111108
aaucuugucauagaauaac

SEQ ID NO: 1111110 - RNA, 19 nt, Artificial Sequence
  Description of Artificial Sequence: Synthetic oligonucleotide
  Sense strand starting at position 739 of SEQ ID NO: 915853
cuguauuaacguuacaaua

SEQ ID NO: 1111111 - RNA, 19 nt, Artificial Sequence
  Description of Artificial Sequence: Synthetic oligonucleotide
  Antisense strand to SEQ ID NO: 1111110
uauuguaacguuaauacag

SEQ ID NO: 1111112 - RNA, 19 nt, Artificial Sequence
  Description of Artificial Sequence: Synthetic oligonucleotide
  Sense strand starting at position 914 of SEQ ID NO: 915853
uauauugugucaccagaga

SEQ ID NO: 1111113 - RNA, 19 nt, Artificial Sequence
  Description of Artificial Sequence: Synthetic oligonucleotide
  Antisense strand to SEQ ID NO: 1111112
ucucuggugacacaauaua

SEQ ID NO: 1111114 - RNA, 19 nt, Artificial Sequence
  Description of Artificial Sequence: Synthetic oligonucleotide
  Sense strand starting at position 1015 of SEQ ID NO: 915853
uugccaguuuauccaguua

SEQ ID NO: 1111115 - RNA, 19 nt, Artificial Sequence
  Description of Artificial Sequence: Synthetic oligonucleotide
  Antisense strand to SEQ ID NO: 1111114
uaacuggauaaacuggcaa

SEQ ID NO: 1111116 - RNA, 19 nt, Artificial Sequence
  Description of Artificial Sequence: Synthetic oligonucleotide
  Sense strand starting at position 1145 of SEQ ID NO: 915853
gugcuugacaggugagcua

SEQ ID NO: 1111117 - RNA, 19 nt, Artificial Sequence
  Description of Artificial Sequence: Synthetic oligonucleotide
  Antisense strand to SEQ ID NO: 1111116
uagcucaccugucaagcac

SEQ ID NO: 1111118 - RNA, 19 nt, Artificial Sequence
  Description of Artificial Sequence: Synthetic oligonucleotide
  Sense strand starting at position 1276 of SEQ ID NO: 915853
cguugaguauucucccaga

SEQ ID NO: 1111119 - RNA, 19 nt, Artificial Sequence
  Description of Artificial Sequence: Synthetic oligonucleotide
  Antisense strand to SEQ ID NO: 1111118
ucugggagaauacucaacg

SEQ ID NO: 1111120 - RNA, 19 nt, Artificial Sequence
  Description of Artificial Sequence: Synthetic oligonucleotide
  Sense strand starting at position 1307 of SEQ ID NO: 915853
ggaggacagaucugcuguu

SEQ ID NO: 1111121 - RNA, 19 nt, Artificial Sequence
  Description of Artificial Sequence: Synthetic oligonucleotide
  Antisense strand to SEQ ID NO: 1111120
aacagcagaucuguccucc

SEQ ID NO: 1111122 - RNA, 19 nt, Artificial Sequence
  Description of Artificial Sequence: Synthetic oligonucleotide
  Sense strand starting at position 1426 of SEQ ID NO: 915853
acgagugaagucuaaggau

SEQ ID NO: 1111123 - RNA, 19 nt, Artificial Sequence
  Description of Artificial Sequence: Synthetic oligonucleotide
  Antisense strand to SEQ ID NO: 1111122
auccuuagacuucacucgu

SEQ ID NO: 1111124 - RNA, 19 nt, Artificial Sequence
  Description of Artificial Sequence: Synthetic oligonucleotide
  Sense strand starting at position 1985 of SEQ ID NO: 915853
cguggcuugcugcuuagaa

SEQ ID NO: 1111125 - RNA, 19 nt, Artificial Sequence
  Description of Artificial Sequence: Synthetic oligonucleotide
  Antisense strand to SEQ ID NO: 1111124
uucuaagcagcaagccacg

SEQ ID NO: 1111126 - RNA, 19 nt, Artificial Sequence
  Description of Artificial Sequence: Synthetic oligonucleotide
  Sense strand starting at position 1986 of SEQ ID NO: 915853
guggcuugcugcuuagaaa

SEQ ID NO: 1111127 - RNA, 19 nt, Artificial Sequence
  Description of Artificial Sequence: Synthetic oligonucleotide
  Antisense strand to SEQ ID NO: 1111126
uuucuaagcagcaagccac

SEQ ID NO: 1111128 - RNA, 19 nt, Artificial Sequence
  Description of Artificial Sequence: Synthetic oligonucleotide
  Sense strand starting at position 2145 of SEQ ID NO: 915853
cguuauuucuguuauuucu

SEQ ID NO: 1111129 - RNA, 19 nt, Artificial Sequence
  Description of Artificial Sequence: Synthetic oligonucleotide
  Antisense strand to SEQ ID NO: 1111128
agaaauaacagaaauaacg

SEQ ID NO: 1111130 - RNA, 19 nt, Artificial Sequence
  Description of Artificial Sequence: Synthetic oligonucleotide
  Sense strand starting at position 2152 of SEQ ID NO: 915853
ucuguuauuucucuccagu

SEQ ID NO: 1111131 - RNA, 19 nt, Artificial Sequence
  Description of Artificial Sequence: Synthetic oligonucleotide
  Antisense strand to SEQ ID NO: 1111130
acuggagagaaauaacaga

SEQ ID NO: 1111132 - RNA, 19 nt, Artificial Sequence
  Description of Artificial Sequence: Synthetic oligonucleotide
  Sense strand starting at position 2154 of SEQ ID NO: 915853
uguuauuucucuccaguga

SEQ ID NO: 1111133 - RNA, 19 nt, Artificial Sequence
  Description of Artificial Sequence: Synthetic oligonucleotide
  Antisense strand to SEQ ID NO: 1111132
ucacuggagagaaauaaca

SEQ ID NO: 1111134 - RNA, 19 nt, Artificial Sequence
  Description of Artificial Sequence: Synthetic oligonucleotide
  Sense strand starting at position 2215 of SEQ ID NO: 915853
ucaacuuuggaguguagga

SEQ ID NO: 1111135 - RNA, 19 nt, Artificial Sequence
  Description of Artificial Sequence: Synthetic oligonucleotide
  Antisense strand to SEQ ID NO: 1111134
uccuacacuccaaaguuga

SEQ ID NO: 1111136 - RNA, 19 nt, Artificial Sequence
  Description of Artificial Sequence: Synthetic oligonucleotide
  Sense strand starting at position 2431 of SEQ ID NO: 915853
gucauauuacccuguagga

SEQ ID NO: 1111137 - RNA, 19 nt, Artificial Sequence
  Description of Artificial Sequence: Synthetic oligonucleotide
  Antisense strand to SEQ ID NO: 1111136
uccuacaggguaauaugac

SEQ ID NO: 1111138 - RNA, 19 nt, Artificial Sequence
  Description of Artificial Sequence: Synthetic oligonucleotide
  Sense strand starting at position 2470 of SEQ ID NO: 915853
uuuagaauucgggauguuu

SEQ ID NO: 1111139 - RNA, 19 nt, Artificial Sequence
  Description of Artificial Sequence: Synthetic oligonucleotide
  Antisense strand to SEQ ID NO: 1111138
aaacaucccgaauucuaaa

SEQ ID NO: 1111140 - RNA, 19 nt, Artificial Sequence
  Description of Artificial Sequence: Synthetic oligonucleotide
  Sense strand starting at position 2497 of SEQ ID NO: 915853
ccuguaaauuugguuguua

SEQ ID NO: 1111141 - RNA, 19 nt, Artificial Sequence
  Description of Artificial Sequence: Synthetic oligonucleotide
  Antisense strand to SEQ ID NO: 1111140
uaacaaccaaauuuacagg

SEQ ID NO: 1111142 - RNA, 19 nt, Artificial Sequence
  Description of Artificial Sequence: Synthetic oligonucleotide
  Sense strand starting at position 2508 of SEQ ID NO: 915853
gguuguuaauaucuguaag

SEQ ID NO: 1111143 - RNA, 19 nt, Artificial Sequence
  Description of Artificial Sequence: Synthetic oligonucleotide
  Antisense strand to SEQ ID NO: 1111142
cuuacagauauuaacaacc

SEQ ID NO: 1111144 - RNA, 19 nt, Artificial Sequence
  Description of Artificial Sequence: Synthetic oligonucleotide
  Sense strand starting at position 2509 of SEQ ID NO: 915853
guuguuaauaucuguaagg

SEQ ID NO: 1111145 - RNA, 19 nt, Artificial Sequence
  Description of Artificial Sequence: Synthetic oligonucleotide
  Antisense strand to SEQ ID NO: 1111144
ccuuacagauauuaacaac

SEQ ID NO: 1111146 - RNA, 19 nt, Artificial Sequence
  Description of Artificial Sequence: Synthetic oligonucleotide
  Sense strand starting at position 2511 of SEQ ID NO: 915853
uguuaauaucuguaaggca

SEQ ID NO: 1111147 - RNA, 19 nt, Artificial Sequence
  Description of Artificial Sequence: Synthetic oligonucleotide
  Antisense strand to SEQ ID NO: 1111146
ugccuuacagauauuaaca

SEQ ID NO: 1111148 - RNA, 19 nt, Artificial Sequence
  Description of Artificial Sequence: Synthetic oligonucleotide
  Sense strand starting at position 2826 of SEQ ID NO: 915853
uugccuuuggcaggaauau

SEQ ID NO: 1111149 - RNA, 19 nt, Artificial Sequence
  Description of Artificial Sequence: Synthetic oligonucleotide
  Antisense strand to SEQ ID NO: 1111148
auauuccugccaaaggcaa

SEQ ID NO: 1111150 - RNA, 19 nt, Artificial Sequence
  Description of Artificial Sequence: Synthetic oligonucleotide
  Sense strand starting at position 2827 of SEQ ID NO: 915853
ugccuuuggcaggaauaua

SEQ ID NO: 1111151 - RNA, 19 nt, Artificial Sequence
  Description of Artificial Sequence: Synthetic oligonucleotide
  Antisense strand to SEQ ID NO: 1111150
uauauuccugccaaaggca

SEQ ID NO: 1111152 - RNA, 19 nt, Artificial Sequence
  Description of Artificial Sequence: Synthetic oligonucleotide
  Sense strand starting at position 2835 of SEQ ID NO: 915853
gcaggaauauaucagaauu

SEQ ID NO: 1111153 - RNA, 19 nt, Artificial Sequence
  Description of Artificial Sequence: Synthetic oligonucleotide
  Antisense strand to SEQ ID NO: 1111152
aauucugauauauuccugc

SEQ ID NO: 1111154 - RNA, 19 nt, Artificial Sequence
  Description of Artificial Sequence: Synthetic oligonucleotide
  Sense strand starting at position 3003 of SEQ ID NO: 915853
agaggaaguaguggugaau

SEQ ID NO: 1111155 - RNA, 19 nt, Artificial Sequence
  Description of Artificial Sequence: Synthetic oligonucleotide
  Antisense strand to SEQ ID NO: 1111154
auucaccacuacuuccucu

SEQ ID NO: 1111156 - RNA, 19 nt, Artificial Sequence
  Description of Artificial Sequence: Synthetic oligonucleotide
  Sense strand starting at position 3033 of SEQ ID NO: 915853
ugggaacauuuacauuacu

SEQ ID NO: 1111157 - RNA, 19 nt, Artificial Sequence
  Description of Artificial Sequence: Synthetic oligonucleotide
  Antisense strand to SEQ ID NO: 1111156
aguaauguaaauguuccca

SEQ ID NO: 1111158 - RNA, 19 nt, Artificial Sequence
  Description of Artificial Sequence: Synthetic oligonucleotide
  Sense strand starting at position 3066 of SEQ ID NO: 915853
ugaggauccuacucugaug

SEQ ID NO: 1111159 - RNA, 19 nt, Artificial Sequence
  Description of Artificial Sequence: Synthetic oligonucleotide
  Antisense strand to SEQ ID NO: 1111158
caucagaguaggauccuca

SEQ ID NO: 1111160 - RNA, 19 nt, Artificial Sequence
  Description of Artificial Sequence: Synthetic oligonucleotide
  Sense strand starting at position 3082 of SEQ ID NO: 915853
augugaugcuuagcuuugu

SEQ ID NO: 1111161 - RNA, 19 nt, Artificial Sequence
  Description of Artificial Sequence: Synthetic oligonucleotide
  Antisense strand to SEQ ID NO: 1111160
acaaagcuaagcaucacau

SEQ ID NO: 1111162 - RNA, 19 nt, Artificial Sequence
  Description of Artificial Sequence: Synthetic oligonucleotide
  Sense strand starting at position 3129 of SEQ ID NO: 915853
gaguccaugcuguacuuau

SEQ ID NO: 1111163 - RNA, 19 nt, Artificial Sequence
  Description of Artificial Sequence: Synthetic oligonucleotide
  Antisense strand to SEQ ID NO: 1111162
auaaguacagcauggacuc

SEQ ID NO: 1111164 - RNA, 19 nt, Artificial Sequence
  Description of Artificial Sequence: Synthetic oligonucleotide
  Sense strand starting at position 3197 of SEQ ID NO: 915853
guugaugugaucuacaagu

SEQ ID NO: 1111165 - RNA, 19 nt, Artificial Sequence
  Description of Artificial Sequence: Synthetic oligonucleotide
  Antisense strand to SEQ ID NO: 1111164
acuuguagaucacaucaac

SEQ ID NO: 1111166 - RNA, 19 nt, Artificial Sequence
  Description of Artificial Sequence: Synthetic oligonucleotide
  Sense strand starting at position 3210 of SEQ ID NO: 915853
acaaguaauuagcuccuga

SEQ ID NO: 1111167 - RNA, 19 nt, Artificial Sequence
  Description of Artificial Sequence: Synthetic oligonucleotide
  Antisense strand to SEQ ID NO: 1111166
ucaggagcuaauuacuugu

SEQ ID NO: 1111168 - RNA, 19 nt, Artificial Sequence
  Description of Artificial Sequence: Synthetic oligonucleotide
  Sense strand starting at position 3282 of SEQ ID NO: 915853
cuagaaauagugggucguu

SEQ ID NO: 1111169 - RNA, 19 nt, Artificial Sequence
  Description of Artificial Sequence: Synthetic oligonucleotide
  Antisense strand to SEQ ID NO: 1111168
aacgacccacuauuucuag

SEQ ID NO: 1111170 - RNA, 19 nt, Artificial Sequence
  Description of Artificial Sequence: Synthetic oligonucleotide
  Sense strand starting at position 3283 of SEQ ID NO: 915853
uagaaauagugggucguuu

SEQ ID NO: 1111171 - RNA, 19 nt, Artificial Sequence
  Description of Artificial Sequence: Synthetic oligonucleotide
  Antisense strand to SEQ ID NO: 1111170
aaacgacccacuauuucua

SEQ ID NO: 1111172 - RNA, 19 nt, Artificial Sequence
  Description of Artificial Sequence: Synthetic oligonucleotide
  Sense strand starting at position 3807 of SEQ ID NO: 915853
cuagauuguagagagccau

SEQ ID NO: 1111173 - RNA, 19 nt, Artificial Sequence
  Description of Artificial Sequence: Synthetic oligonucleotide
  Antisense strand to SEQ ID NO: 1111172
auggcucucuacaaucuag

SEQ ID NO: 1111174 - RNA, 19 nt, Artificial Sequence
  Description of Artificial Sequence: Synthetic oligonucleotide
  Sense strand starting at position 3882 of SEQ ID NO: 915853
accugagaaugcuaagaag

SEQ ID NO: 1111175 - RNA, 19 nt, Artificial Sequence
  Description of Artificial Sequence: Synthetic oligonucleotide
  Antisense strand to SEQ ID NO: 1111174
cuucuuagcauucucaggu

SEQ ID NO: 1111176 - RNA, 19 nt, Artificial Sequence
  Description of Artificial Sequence: Synthetic oligonucleotide
  Sense strand starting at position 3911 of SEQ ID NO: 915853
ccaguagaguucuuuguag

SEQ ID NO: 1111177 - RNA, 19 nt, Artificial Sequence
  Description of Artificial Sequence: Synthetic oligonucleotide
  Antisense strand to SEQ ID NO: 1111176
cuacaaagaacucuacugg

SEQ ID NO: 1111178 - RNA, 19 nt, Artificial Sequence
  Description of Artificial Sequence: Synthetic oligonucleotide
  Sense strand starting at position 3913 of SEQ ID NO: 915853
aguagaguucuuuguagag

SEQ ID NO: 1111179 - RNA, 19 nt, Artificial Sequence
  Description of Artificial Sequence: Synthetic oligonucleotide
  Antisense strand to SEQ ID NO: 1111178
cucuacaaagaacucuacu

SEQ ID NO: 1111180 - RNA, 19 nt, Artificial Sequence
  Description of Artificial Sequence: Synthetic oligonucleotide
  Sense strand starting at position 3917 of SEQ ID NO: 915853
gaguucuuuguagaguacu

SEQ ID NO: 1111181 - RNA, 19 nt, Artificial Sequence
  Description of Artificial Sequence: Synthetic oligonucleotide
  Antisense strand to SEQ ID NO: 1111180
aguacucuacaaagaacuc

SEQ ID NO: 1111182 - RNA, 19 nt, Artificial Sequence
  Description of Artificial Sequence: Synthetic oligonucleotide
  Sense strand starting at position 3938 of SEQ ID NO: 915853
acucguuuguuaguuauuu

SEQ ID NO: 1111183 - RNA, 19 nt, Artificial Sequence
  Description of Artificial Sequence: Synthetic oligonucleotide
  Antisense strand to SEQ ID NO: 1111182
aaauaacuaacaaacgagu

SEQ ID NO: 1111184 - RNA, 19 nt, Artificial Sequence
  Description of Artificial Sequence: Synthetic oligonucleotide
  Sense strand starting at position 30 of SEQ ID NO: 915854
ggaauaagcucaguaagua

SEQ ID NO: 1111185 - RNA, 19 nt, Artificial Sequence
  Description of Artificial Sequence: Synthetic oligonucleotide
  Antisense strand to SEQ ID NO: 1111184
uacuuacugagcuuauucc

SEQ ID NO: 1111186 - RNA, 19 nt, Artificial Sequence
  Description of Artificial Sequence: Synthetic oligonucleotide
  Sense strand starting at position 31 of SEQ ID NO: 915854
gaauaagcucaguaaguau

SEQ ID NO: 1111187 - RNA, 19 nt, Artificial Sequence
  Description of Artificial Sequence: Synthetic oligonucleotide
  Antisense strand to SEQ ID NO: 1111186
auacuuacugagcuuauuc

SEQ ID NO: 1111188 - RNA, 19 nt, Artificial Sequence
  Description of Artificial Sequence: Synthetic oligonucleotide
  Sense strand starting at position 598 of SEQ ID NO: 915854
uugagaaguuagucuauga

SEQ ID NO: 1111189 - RNA, 19 nt, Artificial Sequence
  Description of Artificial Sequence: Synthetic oligonucleotide
  Antisense strand to SEQ ID NO: 1111188
ucauagacuaacuucucaa

SEQ ID NO: 1111190 - RNA, 19 nt, Artificial Sequence
  Description of Artificial Sequence: Synthetic oligonucleotide
  Sense strand starting at position 602 of SEQ ID NO: 915854
gaaguuagucuaugacaag

SEQ ID NO: 1111191 - RNA, 19 nt, Artificial Sequence
  Description of Artificial Sequence: Synthetic oligonucleotide
  Antisense strand to SEQ ID NO: 1111190
cuugucauagacuaacuuc

SEQ ID NO: 1111192 - RNA, 19 nt, Artificial Sequence
  Description of Artificial Sequence: Synthetic oligonucleotide
  Sense strand starting at position 603 of SEQ ID NO: 915854
aaguuagucuaugacaaga

SEQ ID NO: 1111193 - RNA, 19 nt, Artificial Sequence
  Description of Artificial Sequence: Synthetic oligonucleotide
  Antisense strand to SEQ ID NO: 1111192
ucuugucauagacuaacuu

SEQ ID NO: 1111194 - RNA, 19 nt, Artificial Sequence
  Description of Artificial Sequence: Synthetic oligonucleotide
  Sense strand starting at position 605 of SEQ ID NO: 915854
guuagucuaugacaagauu

SEQ ID NO: 1111195 - RNA, 19 nt, Artificial Sequence
  Description of Artificial Sequence: Synthetic oligonucleotide
  Antisense strand to SEQ ID NO: 1111194
aaucuugucauagacuaac

SEQ ID NO: 1111196 - RNA, 19 nt, Artificial Sequence
  Description of Artificial Sequence: Synthetic oligonucleotide
  Sense strand starting at position 813 of SEQ ID NO: 915854
aacauuguuugggacucua

SEQ ID NO: 1111197 - RNA, 19 nt, Artificial Sequence
  Description of Artificial Sequence: Synthetic oligonucleotide
  Antisense strand to SEQ ID NO: 1111196
uagagucccaaacaauguu

SEQ ID NO: 1111198 - RNA, 19 nt, Artificial Sequence
  Description of Artificial Sequence: Synthetic oligonucleotide
  Sense strand starting at position 887 of SEQ ID NO: 915854
gacagaaauugugccaaac

SEQ ID NO: 1111199 - RNA, 19 nt, Artificial Sequence
  Description of Artificial Sequence: Synthetic oligonucleotide
  Antisense strand to SEQ ID NO: 1111198
guuuggcacaauuucuguc

SEQ ID NO: 1111200 - RNA, 19 nt, Artificial Sequence
  Description of Artificial Sequence: Synthetic oligonucleotide
  Sense strand starting at position 898 of SEQ ID NO: 915854
ugccaaacccucuguauug

SEQ ID NO: 1111201 - RNA, 19 nt, Artificial Sequence
  Description of Artificial Sequence: Synthetic oligonucleotide
  Antisense strand to SEQ ID NO: 1111200
caauacagaggguuuggca

SEQ ID NO: 1111202 - RNA, 19 nt, Artificial Sequence
  Description of Artificial Sequence: Synthetic oligonucleotide
  Sense strand starting at position 1321 of SEQ ID NO: 915854
gugcuuaacaggugagcua

SEQ ID NO: 1111203 - RNA, 19 nt, Artificial Sequence
  Description of Artificial Sequence: Synthetic oligonucleotide
  Antisense strand to SEQ ID NO: 1111202
uagcucaccuguuaagcac

SEQ ID NO: 1111204 - RNA, 19 nt, Artificial Sequence
  Description of Artificial Sequence: Synthetic oligonucleotide
  Sense strand starting at position 1378 of SEQ ID NO: 915854
gccuuuaauccugagacaa

SEQ ID NO: 1111205 - RNA, 19 nt, Artificial Sequence
  Description of Artificial Sequence: Synthetic oligonucleotide
  Antisense strand to SEQ ID NO: 1111204
uugucucaggauuaaaggc

SEQ ID NO: 1111206 - RNA, 19 nt, Artificial Sequence
  Description of Artificial Sequence: Synthetic oligonucleotide
  Sense strand starting at position 1414 of SEQ ID NO: 915854
ucgauauugucagcugcca

SEQ ID NO: 1111207 - RNA, 19 nt, Artificial Sequence
  Description of Artificial Sequence: Synthetic oligonucleotide
  Antisense strand to SEQ ID NO: 1111206
uggcagcugacaauaucga

SEQ ID NO: 1111208 - RNA, 19 nt, Artificial Sequence
  Description of Artificial Sequence: Synthetic oligonucleotide
  Sense strand starting at position 1484 of SEQ ID NO: 915854
gggaucagaucugcuguuu

SEQ ID NO: 1111209 - RNA, 19 nt, Artificial Sequence
  Description of Artificial Sequence: Synthetic oligonucleotide
  Antisense strand to SEQ ID NO: 1111208
aaacagcagaucugauccc

SEQ ID NO: 1111210 - RNA, 19 nt, Artificial Sequence
  Description of Artificial Sequence: Synthetic oligonucleotide
  Sense strand starting at position 1592 of SEQ ID NO: 915854
gguggaaagggacgaguua

SEQ ID NO: 1111211 - RNA, 19 nt, Artificial Sequence
  Description of Artificial Sequence: Synthetic oligonucleotide
  Antisense strand to SEQ ID NO: 1111210
uaacucgucccuuuccacc

SEQ ID NO: 1111212 - RNA, 19 nt, Artificial Sequence
  Description of Artificial Sequence: Synthetic oligonucleotide
  Sense strand starting at position 1603 of SEQ ID NO: 915854
acgaguuaagucuaaagau

SEQ ID NO: 1111213 - RNA, 19 nt, Artificial Sequence
  Description of Artificial Sequence: Synthetic oligonucleotide
  Antisense strand to SEQ ID NO: 1111212
aucuuuagacuuaacucgu

SEQ ID NO: 1111214 - RNA, 19 nt, Artificial Sequence
  Description of Artificial Sequence: Synthetic oligonucleotide
  Sense strand starting at position 2165 of SEQ ID NO: 915854
guggcuugcugcuuuggaa

SEQ ID NO: 1111215 - RNA, 19 nt, Artificial Sequence
  Description of Artificial Sequence: Synthetic oligonucleotide
  Antisense strand to SEQ ID NO: 1111214
uuccaaagcagcaagccac

SEQ ID NO: 1111216 - RNA, 19 nt, Artificial Sequence
  Description of Artificial Sequence: Synthetic oligonucleotide
  Sense strand starting at position 2318 of SEQ ID NO: 915854
uuucuuucucuccagugau

SEQ ID NO: 1111217 - RNA, 19 nt, Artificial Sequence
  Description of Artificial Sequence: Synthetic oligonucleotide
  Antisense strand to SEQ ID NO: 1111216
aucacuggagagaaagaaa

SEQ ID NO: 1111218 - RNA, 19 nt, Artificial Sequence
  Description of Artificial Sequence: Synthetic oligonucleotide
  Sense strand starting at position 2509 of SEQ ID NO: 915854
uuguuuguuuagguuaaga

SEQ ID NO: 1111219 - RNA, 19 nt, Artificial Sequence
  Description of Artificial Sequence: Synthetic oligonucleotide
  Antisense strand to SEQ ID NO: 1111218
ucuuaaccuaaacaaacaa

SEQ ID NO: 1111220 - RNA, 19 nt, Artificial Sequence
  Description of Artificial Sequence: Synthetic oligonucleotide
  Sense strand starting at position 2511 of SEQ ID NO: 915854
guuuguuuagguuaagaga

SEQ ID NO: 1111221 - RNA, 19 nt, Artificial Sequence
  Description of Artificial Sequence: Synthetic oligonucleotide
  Antisense strand to SEQ ID NO: 1111220
ucucuuaaccuaaacaaac

SEQ ID NO: 1111222 - RNA, 19 nt, Artificial Sequence
  Description of Artificial Sequence: Synthetic oligonucleotide
  Sense strand starting at position 2514 of SEQ ID NO: 915854
uguuuagguuaagagagaa

SEQ ID NO: 1111223 - RNA, 19 nt, Artificial Sequence
  Description of Artificial Sequence: Synthetic oligonucleotide
  Antisense strand to SEQ ID NO: 1111222
uucucucuuaaccuaaaca

SEQ ID NO: 1111224 - RNA, 19 nt, Artificial Sequence
  Description of Artificial Sequence: Synthetic oligonucleotide
  Sense strand starting at position 2598 of SEQ ID NO: 915854
gccauauuacccuguagga

SEQ ID NO: 1111225 - RNA, 19 nt, Artificial Sequence
  Description of Artificial Sequence: Synthetic oligonucleotide
  Antisense strand to SEQ ID NO: 1111224
uccuacaggguaauauggc

SEQ ID NO: 1111226 - RNA, 19 nt, Artificial Sequence
  Description of Artificial Sequence: Synthetic oligonucleotide
  Sense strand starting at position 2608 of SEQ ID NO: 915854
ccuguaggauuuggaagaa

SEQ ID NO: 1111227 - RNA, 19 nt, Artificial Sequence
  Description of Artificial Sequence: Synthetic oligonucleotide
  Antisense strand to SEQ ID NO: 1111226
uucuuccaaauccuacagg

SEQ ID NO: 1111228 - RNA, 19 nt, Artificial Sequence
  Description of Artificial Sequence: Synthetic oligonucleotide
  Sense strand starting at position 2663 of SEQ ID NO: 915854
ccuguaaauuagguuguua

SEQ ID NO: 1111229 - RNA, 19 nt, Artificial Sequence
  Description of Artificial Sequence: Synthetic oligonucleotide
  Antisense strand to SEQ ID NO: 1111228
uaacaaccuaauuuacagg

SEQ ID NO: 1111230 - RNA, 19 nt, Artificial Sequence
  Description of Artificial Sequence: Synthetic oligonucleotide
  Sense strand starting at position 2907 of SEQ ID NO: 915854
agauaaauuauguguugga

SEQ ID NO: 1111231 - RNA, 19 nt, Artificial Sequence
  Description of Artificial Sequence: Synthetic oligonucleotide
  Antisense strand to SEQ ID NO: 1111230
uccaacacauaauuuaucu

SEQ ID NO: 1111232 - RNA, 19 nt, Artificial Sequence
  Description of Artificial Sequence: Synthetic oligonucleotide
  Sense strand starting at position 2908 of SEQ ID NO: 915854
gauaaauuauguguuggaa

SEQ ID NO: 1111233 - RNA, 19 nt, Artificial Sequence
  Description of Artificial Sequence: Synthetic oligonucleotide
  Antisense strand to SEQ ID NO: 1111232
uuccaacacauaauuuauc

SEQ ID NO: 1111234 - RNA, 19 nt, Artificial Sequence
  Description of Artificial Sequence: Synthetic oligonucleotide
  Sense strand starting at position 2992 of SEQ ID NO: 915854
uugccuuuggcaggcauau

SEQ ID NO: 1111235 - RNA, 19 nt, Artificial Sequence
  Description of Artificial Sequence: Synthetic oligonucleotide
  Antisense strand to SEQ ID NO: 1111234
auaugccugccaaaggcaa

SEQ ID NO: 1111236 - RNA, 19 nt, Artificial Sequence
  Description of Artificial Sequence: Synthetic oligonucleotide
  Sense strand starting at position 2994 of SEQ ID NO: 915854
gccuuuggcaggcauauau

SEQ ID NO: 1111237 - RNA, 19 nt, Artificial Sequence
  Description of Artificial Sequence: Synthetic oligonucleotide
  Antisense strand to SEQ ID NO: 1111236
auauaugccugccaaaggc

SEQ ID NO: 1111238 - RNA, 19 nt, Artificial Sequence
  Description of Artificial Sequence: Synthetic oligonucleotide
  Sense strand starting at position 3003 of SEQ ID NO: 915854
aggcauauaucagauugag

SEQ ID NO: 1111239 - RNA, 19 nt, Artificial Sequence
  Description of Artificial Sequence: Synthetic oligonucleotide
  Antisense strand to SEQ ID NO: 1111238
cucaaucugauauaugccu

SEQ ID NO: 1111240 - RNA, 19 nt, Artificial Sequence
  Description of Artificial Sequence: Synthetic oligonucleotide
  Sense strand starting at position 3011 of SEQ ID NO: 915854
aucagauugagucgggauu

SEQ ID NO: 1111241 - RNA, 19 nt, Artificial Sequence
  Description of Artificial Sequence: Synthetic oligonucleotide
  Antisense strand to SEQ ID NO: 1111240
aaucccgacucaaucugau

SEQ ID NO: 1111242 - RNA, 19 nt, Artificial Sequence
  Description of Artificial Sequence: Synthetic oligonucleotide
  Sense strand starting at position 3013 of SEQ ID NO: 915854
cagauugagucgggauuua

SEQ ID NO: 1111243 - RNA, 19 nt, Artificial Sequence
  Description of Artificial Sequence: Synthetic oligonucleotide
  Antisense strand to SEQ ID NO: 1111242
uaaaucccgacucaaucug

SEQ ID NO: 1111244 - RNA, 19 nt, Artificial Sequence
  Description of Artificial Sequence: Synthetic oligonucleotide
  Sense strand starting at position 3093 of SEQ ID NO: 915854
uucugaacuuaagaaaguu

SEQ ID NO: 1111245 - RNA, 19 nt, Artificial Sequence
  Description of Artificial Sequence: Synthetic oligonucleotide
  Antisense strand to SEQ ID NO: 1111244
aacuuucuuaaguucagaa

SEQ ID NO: 1111246 - RNA, 19 nt, Artificial Sequence
  Description of Artificial Sequence: Synthetic oligonucleotide
  Sense strand starting at position 3168 of SEQ ID NO: 915854
agaggagguaguggugaau

SEQ ID NO: 1111247 - RNA, 19 nt, Artificial Sequence
  Description of Artificial Sequence: Synthetic oligonucleotide
  Antisense strand to SEQ ID NO: 1111246
auucaccacuaccuccucu

SEQ ID NO: 1111248 - RNA, 19 nt, Artificial Sequence
  Description of Artificial Sequence: Synthetic oligonucleotide
  Sense strand starting at position 3198 of SEQ ID NO: 915854
cgggaauauuuacauuacu

SEQ ID NO: 1111249 - RNA, 19 nt, Artificial Sequence
  Description of Artificial Sequence: Synthetic oligonucleotide
  Antisense strand to SEQ ID NO: 1111248
aguaauguaaauauucccg

SEQ ID NO: 1111250 - RNA, 19 nt, Artificial Sequence
  Description of Artificial Sequence: Synthetic oligonucleotide
  Sense strand starting at position 3231 of SEQ ID NO: 915854
ucaggauucuacucugaug

SEQ ID NO: 1111251 - RNA, 19 nt, Artificial Sequence
  Description of Artificial Sequence: Synthetic oligonucleotide
  Antisense strand to SEQ ID NO: 1111250
caucagaguagaauccuga

SEQ ID NO: 1111252 - RNA, 19 nt, Artificial Sequence
  Description of Artificial Sequence: Synthetic oligonucleotide
  Sense strand starting at position 3234 of SEQ ID NO: 915854
ggauucuacucugauguga

SEQ ID NO: 1111253 - RNA, 19 nt, Artificial Sequence
  Description of Artificial Sequence: Synthetic oligonucleotide
  Antisense strand to SEQ ID NO: 1111252
ucacaucagaguagaaucc

SEQ ID NO: 1111254 - RNA, 19 nt, Artificial Sequence
  Description of Artificial Sequence: Synthetic oligonucleotide
  Sense strand starting at position 3251 of SEQ ID NO: 915854
gaugcuuagcuuugcuuua

SEQ ID NO: 1111255 - RNA, 19 nt, Artificial Sequence
  Description of Artificial Sequence: Synthetic oligonucleotide
  Antisense strand to SEQ ID NO: 1111254
uaaagcaaagcuaagcauc

SEQ ID NO: 1111256 - RNA, 19 nt, Artificial Sequence
  Description of Artificial Sequence: Synthetic oligonucleotide
  Sense strand starting at position 3362 of SEQ ID NO: 915854
guugaugugaucuacgagu

SEQ ID NO: 1111257 - RNA, 19 nt, Artificial Sequence
  Description of Artificial Sequence: Synthetic oligonucleotide
  Antisense strand to SEQ ID NO: 1111256
acucguagaucacaucaac

SEQ ID NO: 1111258 - RNA, 19 nt, Artificial Sequence
  Description of Artificial Sequence: Synthetic oligonucleotide
  Sense strand starting at position 3364 of SEQ ID NO: 915854
ugaugugaucuacgaguaa

SEQ ID NO: 1111259 - RNA, 19 nt, Artificial Sequence
  Description of Artificial Sequence: Synthetic oligonucleotide
  Antisense strand to SEQ ID NO: 1111258
uuacucguagaucacauca

SEQ ID NO: 1111260 - RNA, 19 nt, Artificial Sequence
  Description of Artificial Sequence: Synthetic oligonucleotide
  Sense strand starting at position 3368 of SEQ ID NO: 915854
gugaucuacgaguaauuag

SEQ ID NO: 1111261 - RNA, 19 nt, Artificial Sequence
  Description of Artificial Sequence: Synthetic oligonucleotide
  Antisense strand to SEQ ID NO: 1111260
cuaauuacucguagaucac

SEQ ID NO: 1111262 - RNA, 19 nt, Artificial Sequence
  Description of Artificial Sequence: Synthetic oligonucleotide
  Sense strand starting at position 3448 of SEQ ID NO: 915854
uagaaauagugggccguuu

SEQ ID NO: 1111263 - RNA, 19 nt, Artificial Sequence
  Description of Artificial Sequence: Synthetic oligonucleotide
  Antisense strand to SEQ ID NO: 1111262
aaacggcccacuauuucua

SEQ ID NO: 1111264 - RNA, 19 nt, Artificial Sequence
  Description of Artificial Sequence: Synthetic oligonucleotide
  Sense strand starting at position 391 of SEQ ID NO: 915855
agauccuuguguccucauu

SEQ ID NO: 1111265 - RNA, 19 nt, Artificial Sequence
  Description of Artificial Sequence: Synthetic oligonucleotide
  Antisense strand to SEQ ID NO: 1111264
aaugaggacacaaggaucu

SEQ ID NO: 1111266 - RNA, 19 nt, Artificial Sequence
  Description of Artificial Sequence: Synthetic oligonucleotide
  Sense strand starting at position 397 of SEQ ID NO: 915855
uuguguccucauuacagga

SEQ ID NO: 1111267 - RNA, 19 nt, Artificial Sequence
  Description of Artificial Sequence: Synthetic oligonucleotide
  Antisense strand to SEQ ID NO: 1111266
uccuguaaugaggacacaa

SEQ ID NO: 1111268 - RNA, 19 nt, Artificial Sequence
  Description of Artificial Sequence: Synthetic oligonucleotide
  Sense strand starting at position 410 of SEQ ID NO: 915855
acaggauagaggugugguu

SEQ ID NO: 1111269 - RNA, 19 nt, Artificial Sequence
  Description of Artificial Sequence: Synthetic oligonucleotide
  Antisense strand to SEQ ID NO: 1111268
aaccacaccucuauccugu

SEQ ID NO: 1111270 - RNA, 19 nt, Artificial Sequence
  Description of Artificial Sequence: Synthetic oligonucleotide
  Sense strand starting at position 458 of SEQ ID NO: 915855
ccuggacucuccuuagaaa

SEQ ID NO: 1111271 - RNA, 19 nt, Artificial Sequence
  Description of Artificial Sequence: Synthetic oligonucleotide
  Antisense strand to SEQ ID NO: 1111270
uuucuaaggagaguccagg

SEQ ID NO: 1111272 - RNA, 19 nt, Artificial Sequence
  Description of Artificial Sequence: Synthetic oligonucleotide
  Sense strand starting at position 561 of SEQ ID NO: 915855
uggagaaauuaccugguua

SEQ ID NO: 1111273 - RNA, 19 nt, Artificial Sequence
  Description of Artificial Sequence: Synthetic oligonucleotide
  Antisense strand to SEQ ID NO: 1111272
uaaccagguaauuucucca

SEQ ID NO: 1111274 - RNA, 19 nt, Artificial Sequence
  Description of Artificial Sequence: Synthetic oligonucleotide
  Sense strand starting at position 562 of SEQ ID NO: 915855
ggagaaauuaccugguuau

SEQ ID NO: 1111275 - RNA, 19 nt, Artificial Sequence
  Description of Artificial Sequence: Synthetic oligonucleotide
  Antisense strand to SEQ ID NO: 1111274
auaaccagguaauuucucc

SEQ ID NO: 1111276 - RNA, 19 nt, Artificial Sequence
  Description of Artificial Sequence: Synthetic oligonucleotide
  Sense strand starting at position 563 of SEQ ID NO: 915855
gagaaauuaccugguuauu

SEQ ID NO: 1111277 - RNA, 19 nt, Artificial Sequence
  Description of Artificial Sequence: Synthetic oligonucleotide
  Antisense strand to SEQ ID NO: 1111276
aauaaccagguaauuucuc

SEQ ID NO: 1111278 - RNA, 19 nt, Artificial Sequence
  Description of Artificial Sequence: Synthetic oligonucleotide
  Sense strand starting at position 593 of SEQ ID NO: 915855
cuaugagaccagugauucu

SEQ ID NO: 1111279 - RNA, 19 nt, Artificial Sequence
  Description of Artificial Sequence: Synthetic oligonucleotide
  Antisense strand to SEQ ID NO: 1111278
agaaucacuggucucauag

SEQ ID NO: 1111280 - RNA, 19 nt, Artificial Sequence
  Description of Artificial Sequence: Synthetic oligonucleotide
  Sense strand starting at position 596 of SEQ ID NO: 915855
ugagaccagugauucucaa

SEQ ID NO: 1111281 - RNA, 19 nt, Artificial Sequence
  Description of Artificial Sequence: Synthetic oligonucleotide
  Antisense strand to SEQ ID NO: 1111280
uugagaaucacuggucuca

SEQ ID NO: 1111282 - RNA, 19 nt, Artificial Sequence
  Description of Artificial Sequence: Synthetic oligonucleotide
  Sense strand starting at position 617 of SEQ ID NO: 915855
ccugacugcccaugagaau

SEQ ID NO: 1111283 - RNA, 19 nt, Artificial Sequence
  Description of Artificial Sequence: Synthetic oligonucleotide
  Antisense strand to SEQ ID NO: 1111282
auucucaugggcagucagg

SEQ ID NO: 1111284 - RNA, 19 nt, Artificial Sequence
  Description of Artificial Sequence: Synthetic oligonucleotide
  Sense strand starting at position 680 of SEQ ID NO: 915855
gagcgauucugauugaagu

SEQ ID NO: 1111285 - RNA, 19 nt, Artificial Sequence
  Description of Artificial Sequence: Synthetic oligonucleotide
  Antisense strand to SEQ ID NO: 1111284
acuucaaucagaaucgcuc

SEQ ID NO: 1111286 - RNA, 19 nt, Artificial Sequence
  Description of Artificial Sequence: Synthetic oligonucleotide
  Sense strand starting at position 681 of SEQ ID NO: 915855
agcgauucugauugaagug

SEQ ID NO: 1111287 - RNA, 19 nt, Artificial Sequence
  Description of Artificial Sequence: Synthetic oligonucleotide
  Antisense strand to SEQ ID NO: 1111286
cacuucaaucagaaucgcu

SEQ ID NO: 1111288 - RNA, 19 nt, Artificial Sequence
  Description of Artificial Sequence: Synthetic oligonucleotide
  Sense strand starting at position 693 of SEQ ID NO: 915855
ugaagugcucugcaguaga

SEQ ID NO: 1111289 - RNA, 19 nt, Artificial Sequence
  Description of Artificial Sequence: Synthetic oligonucleotide
  Antisense strand to SEQ ID NO: 1111288
ucuacugcagagcacuuca

SEQ ID NO: 1111290 - RNA, 19 nt, Artificial Sequence
  Description of Artificial Sequence: Synthetic oligonucleotide
  Sense strand starting at position 737 of SEQ ID NO: 915855
uuguaaacuuucccagaag

SEQ ID NO: 1111291 - RNA, 19 nt, Artificial Sequence
  Description of Artificial Sequence: Synthetic oligonucleotide
  Antisense strand to SEQ ID NO: 1111290
cuucugggaaaguuuacaa

SEQ ID NO: 1111292 - RNA, 19 nt, Artificial Sequence
  Description of Artificial Sequence: Synthetic oligonucleotide
  Sense strand starting at position 773 of SEQ ID NO: 915855
aggagagauucacucgagu

SEQ ID NO: 1111293 - RNA, 19 nt, Artificial Sequence
  Description of Artificial Sequence: Synthetic oligonucleotide
  Antisense strand to SEQ ID NO: 1111292
acucgagugaaucucuccu

SEQ ID NO: 1111294 - RNA, 19 nt, Artificial Sequence
  Description of Artificial Sequence: Synthetic oligonucleotide
  Sense strand starting at position 877 of SEQ ID NO: 915855
cagagaauauuggaugaau

SEQ ID NO: 1111295 - RNA, 19 nt, Artificial Sequence
  Description of Artificial Sequence: Synthetic oligonucleotide
  Antisense strand to SEQ ID NO: 1111294
auucauccaauauucucug

SEQ ID NO: 1111296 - RNA, 19 nt, Artificial Sequence
  Description of Artificial Sequence: Synthetic oligonucleotide
  Sense strand starting at position 902 of SEQ ID NO: 915855
gugaacccaucaguaaaua

SEQ ID NO: 1111297 - RNA, 19 nt, Artificial Sequence
  Description of Artificial Sequence: Synthetic oligonucleotide
  Antisense strand to SEQ ID NO: 1111296
uauuuacugauggguucac

SEQ ID NO: 1111298 - RNA, 19 nt, Artificial Sequence
  Description of Artificial Sequence: Synthetic oligonucleotide
  Sense strand starting at position 1283 of SEQ ID NO: 915855
ccaggaaucuguccauccu

SEQ ID NO: 1111299 - RNA, 19 nt, Artificial Sequence
  Description of Artificial Sequence: Synthetic oligonucleotide
  Antisense strand to SEQ ID NO: 1111298
aggauggacagauuccugg

SEQ ID NO: 1111300 - RNA, 19 nt, Artificial Sequence
  Description of Artificial Sequence: Synthetic oligonucleotide
  Sense strand starting at position 1677 of SEQ ID NO: 915855
ggaaacuguugcccacaga

SEQ ID NO: 1111301 - RNA, 19 nt, Artificial Sequence
  Description of Artificial Sequence: Synthetic oligonucleotide
  Antisense strand to SEQ ID NO: 1111300
ucugugggcaacaguuucc

SEQ ID NO: 1111302 - RNA, 19 nt, Artificial Sequence
  Description of Artificial Sequence: Synthetic oligonucleotide
  Sense strand starting at position 1801 of SEQ ID NO: 915855
ugcucaaguggauacgauu

SEQ ID NO: 1111303 - RNA, 19 nt, Artificial Sequence
  Description of Artificial Sequence: Synthetic oligonucleotide
  Antisense strand to SEQ ID NO: 1111302
aaucguauccacuugagca

SEQ ID NO: 1111304 - RNA, 19 nt, Artificial Sequence
  Description of Artificial Sequence: Synthetic oligonucleotide
  Sense strand starting at position 1836 of SEQ ID NO: 915855
agagguuaaacacggguaa

SEQ ID NO: 1111305 - RNA, 19 nt, Artificial Sequence
  Description of Artificial Sequence: Synthetic oligonucleotide
  Antisense strand to SEQ ID NO: 1111304
uuacccguguuuaaccucu

SEQ ID NO: 1111306 - RNA, 19 nt, Artificial Sequence
  Description of Artificial Sequence: Synthetic oligonucleotide
  Sense strand starting at position 1837 of SEQ ID NO: 915855
gagguuaaacacggguaaa

SEQ ID NO: 1111307 - RNA, 19 nt, Artificial Sequence
  Description of Artificial Sequence: Synthetic oligonucleotide
  Antisense strand to SEQ ID NO: 1111306
uuuacccguguuuaaccuc

SEQ ID NO: 1111308 - RNA, 19 nt, Artificial Sequence
  Description of Artificial Sequence: Synthetic oligonucleotide
  Sense strand starting at position 1906 of SEQ ID NO: 915855
gcaagagugcucuagcauc

SEQ ID NO: 1111309 - RNA, 19 nt, Artificial Sequence
  Description of Artificial Sequence: Synthetic oligonucleotide
  Antisense strand to SEQ ID NO: 1111308
gaugcuagagcacucuugc

SEQ ID NO: 1111310 - RNA, 19 nt, Artificial Sequence
  Description of Artificial Sequence: Synthetic oligonucleotide
  Sense strand starting at position 2111 of SEQ ID NO: 915855
gccgcuuucccguugauca

SEQ ID NO: 1111311 - RNA, 19 nt, Artificial Sequence
  Description of Artificial Sequence: Synthetic oligonucleotide
  Antisense strand to SEQ ID NO: 1111310
ugaucaacgggaaagcggc

SEQ ID NO: 1111312 - RNA, 19 nt, Artificial Sequence
  Description of Artificial Sequence: Synthetic oligonucleotide
  Sense strand starting at position 2183 of SEQ ID NO: 915855
ucacuucucagugaggguu

SEQ ID NO: 1111313 - RNA, 19 nt, Artificial Sequence
  Description of Artificial Sequence: Synthetic oligonucleotide
  Antisense strand to SEQ ID NO: 1111312
aacccucacugagaaguga

SEQ ID NO: 1111314 - RNA, 19 nt, Artificial Sequence
  Description of Artificial Sequence: Synthetic oligonucleotide
  Sense strand starting at position 2200 of SEQ ID NO: 915855
uuacuuugguguccggaaa

SEQ ID NO: 1111315 - RNA, 19 nt, Artificial Sequence
  Description of Artificial Sequence: Synthetic oligonucleotide
  Antisense strand to SEQ ID NO: 1111314
uuuccggacaccaaaguaa

SEQ ID NO: 1111316 - RNA, 19 nt, Artificial Sequence
  Description of Artificial Sequence: Synthetic oligonucleotide
  Sense strand starting at position 2271 of SEQ ID NO: 915855
cggauaucguggauucugu

SEQ ID NO: 1111317 - RNA, 19 nt, Artificial Sequence
  Description of Artificial Sequence: Synthetic oligonucleotide
  Antisense strand to SEQ ID NO: 1111316
acagaauccacgauauccg

SEQ ID NO: 1111318 - RNA, 19 nt, Artificial Sequence
  Description of Artificial Sequence: Synthetic oligonucleotide
  Sense strand starting at position 2423 of SEQ ID NO: 915855
ugagaaaugcucuguccuc

SEQ ID NO: 1111319 - RNA, 19 nt, Artificial Sequence
  Description of Artificial Sequence: Synthetic oligonucleotide
  Antisense strand to SEQ ID NO: 1111318
gaggacagagcauuucuca

SEQ ID NO: 1111320 - RNA, 19 nt, Artificial Sequence
  Description of Artificial Sequence: Synthetic oligonucleotide
  Sense strand starting at position 2424 of SEQ ID NO: 915855
gagaaaugcucuguccucu

SEQ ID NO: 1111321 - RNA, 19 nt, Artificial Sequence
  Description of Artificial Sequence: Synthetic oligonucleotide
  Antisense strand to SEQ ID NO: 1111320
agaggacagagcauuucuc

SEQ ID NO: 1111322 - RNA, 19 nt, Artificial Sequence
  Description of Artificial Sequence: Synthetic oligonucleotide
  Sense strand starting at position 2845 of SEQ ID NO: 915855
acgaaagcuccaugagauc

SEQ ID NO: 1111323 - RNA, 19 nt, Artificial Sequence
  Description of Artificial Sequence: Synthetic oligonucleotide
  Antisense strand to SEQ ID NO: 1111322
gaucucauggagcuuucgu

SEQ ID NO: 1111324 - RNA, 19 nt, Artificial Sequence
  Description of Artificial Sequence: Synthetic oligonucleotide
  Sense strand starting at position 3014 of SEQ ID NO: 915855
gucuucucucccuauaguu

SEQ ID NO: 1111325 - RNA, 19 nt, Artificial Sequence
  Description of Artificial Sequence: Synthetic oligonucleotide
  Antisense strand to SEQ ID NO: 1111324
aacuauagggagagaagac

SEQ ID NO: 1111326 - RNA, 19 nt, Artificial Sequence
  Description of Artificial Sequence: Synthetic oligonucleotide
  Sense strand starting at position 3162 of SEQ ID NO: 915855
acaugagagcucugucaua

SEQ ID NO: 1111327 - RNA, 19 nt, Artificial Sequence
  Description of Artificial Sequence: Synthetic oligonucleotide
  Antisense strand to SEQ ID NO: 1111326
uaugacagagcucucaugu

SEQ ID NO: 1111328 - RNA, 19 nt, Artificial Sequence
  Description of Artificial Sequence: Synthetic oligonucleotide
  Sense strand starting at position 3173 of SEQ ID NO: 915855
cugucauaauguccucaua

SEQ ID NO: 1111329 - RNA, 19 nt, Artificial Sequence
  Description of Artificial Sequence: Synthetic oligonucleotide
  Antisense strand to SEQ ID NO: 1111328
uaugaggacauuaugacag

SEQ ID NO: 1111330 - RNA, 19 nt, Artificial Sequence
  Description of Artificial Sequence: Synthetic oligonucleotide
  Sense strand starting at position 3175 of SEQ ID NO: 915855
gucauaauguccucauaaa

SEQ ID NO: 1111331 - RNA, 19 nt, Artificial Sequence
  Description of Artificial Sequence: Synthetic oligonucleotide
  Antisense strand to SEQ ID NO: 1111330
uuuaugaggacauuaugac

SEQ ID NO: 1111332 - RNA, 19 nt, Artificial Sequence
  Description of Artificial Sequence: Synthetic oligonucleotide
  Sense strand starting at position 3399 of SEQ ID NO: 915855
ccucucagccucuaugaga

SEQ ID NO: 1111333 - RNA, 19 nt, Artificial Sequence
  Description of Artificial Sequence: Synthetic oligonucleotide
  Antisense strand to SEQ ID NO: 1111332
ucucauagaggcugagagg

SEQ ID NO: 1111334 - RNA, 19 nt, Artificial Sequence
  Description of Artificial Sequence: Synthetic oligonucleotide
  Sense strand starting at position 3414 of SEQ ID NO: 915855
gagaaaugccuuuguggga

SEQ ID NO: 1111335 - RNA, 19 nt, Artificial Sequence
  Description of Artificial Sequence: Synthetic oligonucleotide
  Antisense strand to SEQ ID NO: 1111334
ucccacaaaggcauuucuc

SEQ ID NO: 1111336 - RNA, 19 nt, Artificial Sequence
  Description of Artificial Sequence: Synthetic oligonucleotide
  Sense strand starting at position 3774 of SEQ ID NO: 915855
cgcugugcccagucguaua

SEQ ID NO: 1111337 - RNA, 19 nt, Artificial Sequence
  Description of Artificial Sequence: Synthetic oligonucleotide
  Antisense strand to SEQ ID NO: 1111336
uauacgacugggcacagcg

SEQ ID NO: 1111338 - RNA, 19 nt, Artificial Sequence
  Description of Artificial Sequence: Synthetic oligonucleotide
  Sense strand starting at position 3868 of SEQ ID NO: 915855
uaggguuguuucucugauu

SEQ ID NO: 1111339 - RNA, 19 nt, Artificial Sequence
  Description of Artificial Sequence: Synthetic oligonucleotide
  Antisense strand to SEQ ID NO: 1111338
aaucagagaaacaacccua

SEQ ID NO: 1111340 - RNA, 19 nt, Artificial Sequence
  Description of Artificial Sequence: Synthetic oligonucleotide
  Sense strand starting at position 3922 of SEQ ID NO: 915855
acauacaagcuuugugaau

SEQ ID NO: 1111341 - RNA, 19 nt, Artificial Sequence
  Description of Artificial Sequence: Synthetic oligonucleotide
  Antisense strand to SEQ ID NO: 1111340
auucacaaagcuuguaugu

SEQ ID NO: 1111342 - RNA, 19 nt, Artificial Sequence
  Description of Artificial Sequence: Synthetic oligonucleotide
  Sense strand starting at position 3928 of SEQ ID NO: 915855
aagcuuugugaauauaguu

SEQ ID NO: 1111343 - RNA, 19 nt, Artificial Sequence
  Description of Artificial Sequence: Synthetic oligonucleotide
  Antisense strand to SEQ ID NO: 1111342
aacuauauucacaaagcuu

SEQ ID NO: 1111344 - RNA, 19 nt, Artificial Sequence
  Description of Artificial Sequence: Synthetic oligonucleotide
  Sense strand starting at position 80 of SEQ ID NO: 915856
agccaugacugauuaacaa

SEQ ID NO: 1111345 - RNA, 19 nt, Artificial Sequence
  Description of Artificial Sequence: Synthetic oligonucleotide
  Antisense strand to SEQ ID NO: 1111344
uuguuaaucagucauggcu

SEQ ID NO: 1111346 - RNA, 19 nt, Artificial Sequence
  Description of Artificial Sequence: Synthetic oligonucleotide
  Sense strand starting at position 103 of SEQ ID NO: 915856
uucuaucuccuugggcaaa

SEQ ID NO: 1111347 - RNA, 19 nt, Artificial Sequence
  Description of Artificial Sequence: Synthetic oligonucleotide
  Antisense strand to SEQ ID NO: 1111346
uuugcccaaggagauagaa

SEQ ID NO: 1111348 - RNA, 19 nt, Artificial Sequence
  Description of Artificial Sequence: Synthetic oligonucleotide
  Sense strand starting at position 210 of SEQ ID NO: 915856
cuaaauuaagcggaugacu

SEQ ID NO: 1111349 - RNA, 19 nt, Artificial Sequence
  Description of Artificial Sequence: Synthetic oligonucleotide
  Antisense strand to SEQ ID NO: 1111348
agucauccgcuuaauuuag

SEQ ID NO: 1111350 - RNA, 19 nt, Artificial Sequence
  Description of Artificial Sequence: Synthetic oligonucleotide
  Sense strand starting at position 298 of SEQ ID NO: 915856
uugauaacgcaucaauuau

SEQ ID NO: 1111351 - RNA, 19 nt, Artificial Sequence
  Description of Artificial Sequence: Synthetic oligonucleotide
  Antisense strand to SEQ ID NO: 1111350
auaauugaugcguuaucaa

SEQ ID NO: 1111352 - RNA, 19 nt, Artificial Sequence
  Description of Artificial Sequence: Synthetic oligonucleotide
  Sense strand starting at position 493 of SEQ ID NO: 915856
ccaacaacucaguguaaga

SEQ ID NO: 1111353 - RNA, 19 nt, Artificial Sequence
  Description of Artificial Sequence: Synthetic oligonucleotide
  Antisense strand to SEQ ID NO: 1111352
ucuuacacugaguuguugg

SEQ ID NO: 1111354 - RNA, 19 nt, Artificial Sequence
  Description of Artificial Sequence: Synthetic oligonucleotide
  Sense strand starting at position 528 of SEQ ID NO: 915856
gcucgaaucuuucuaaaua

SEQ ID NO: 1111355 - RNA, 19 nt, Artificial Sequence
  Description of Artificial Sequence: Synthetic oligonucleotide
  Antisense strand to SEQ ID NO: 1111354
uauuuagaaagauucgagc

SEQ ID NO: 1111356 - RNA, 19 nt, Artificial Sequence
  Description of Artificial Sequence: Synthetic oligonucleotide
  Sense strand starting at position 553 of SEQ ID NO: 915856
ugaaacgacuuagcugauu

SEQ ID NO: 1111357 - RNA, 19 nt, Artificial Sequence
  Description of Artificial Sequence: Synthetic oligonucleotide
  Antisense strand to SEQ ID NO: 1111356
aaucagcuaagucguuuca

SEQ ID NO: 1111358 - RNA, 19 nt, Artificial Sequence
  Description of Artificial Sequence: Synthetic oligonucleotide
  Sense strand starting at position 820 of SEQ ID NO: 915856
auagcuuaacuguggaaua

SEQ ID NO: 1111359 - RNA, 19 nt, Artificial Sequence
  Description of Artificial Sequence: Synthetic oligonucleotide
  Antisense strand to SEQ ID NO: 1111358
uauuccacaguuaagcuau

SEQ ID NO: 1111360 - RNA, 19 nt, Artificial Sequence
  Description of Artificial Sequence: Synthetic oligonucleotide
  Sense strand starting at position 822 of SEQ ID NO: 915856
agcuuaacuguggaauaua

SEQ ID NO: 1111361 - RNA, 19 nt, Artificial Sequence
  Description of Artificial Sequence: Synthetic oligonucleotide
  Antisense strand to SEQ ID NO: 1111360
uauauuccacaguuaagcu

SEQ ID NO: 1111362 - RNA, 19 nt, Artificial Sequence
  Description of Artificial Sequence: Synthetic oligonucleotide
  Sense strand starting at position 854 of SEQ ID NO: 915856
agaaguucucuuggaauug

SEQ ID NO: 1111363 - RNA, 19 nt, Artificial Sequence
  Description of Artificial Sequence: Synthetic oligonucleotide
  Antisense strand to SEQ ID NO: 1111362
caauuccaagagaacuucu

SEQ ID NO: 1111364 - RNA, 19 nt, Artificial Sequence
  Description of Artificial Sequence: Synthetic oligonucleotide
  Sense strand starting at position 897 of SEQ ID NO: 915856
cugaaauaauagguuagua

SEQ ID NO: 1111365 - RNA, 19 nt, Artificial Sequence
  Description of Artificial Sequence: Synthetic oligonucleotide
  Antisense strand to SEQ ID NO: 1111364
uacuaaccuauuauuucag

SEQ ID NO: 1111366 - RNA, 19 nt, Artificial Sequence
  Description of Artificial Sequence: Synthetic oligonucleotide
  Sense strand starting at position 933 of SEQ ID NO: 915856
aaagauagaugguuuguuu

SEQ ID NO: 1111367 - RNA, 19 nt, Artificial Sequence
  Description of Artificial Sequence: Synthetic oligonucleotide
  Antisense strand to SEQ ID NO: 1111366
aaacaaaccaucuaucuuu

SEQ ID NO: 1111368 - RNA, 19 nt, Artificial Sequence
  Description of Artificial Sequence: Synthetic oligonucleotide
  Sense strand starting at position 966 of SEQ ID NO: 915856
cuuggagauacuugggcau

SEQ ID NO: 1111369 - RNA, 19 nt, Artificial Sequence
  Description of Artificial Sequence: Synthetic oligonucleotide
  Antisense strand to SEQ ID NO: 1111368
augcccaaguaucuccaag

SEQ ID NO: 1111370 - RNA, 19 nt, Artificial Sequence
  Description of Artificial Sequence: Synthetic oligonucleotide
  Sense strand starting at position 1104 of SEQ ID NO: 915856
gcccgaagcuauuuagugu

SEQ ID NO: 1111371 - RNA, 19 nt, Artificial Sequence
  Description of Artificial Sequence: Synthetic oligonucleotide
  Antisense strand to SEQ ID NO: 1111370
acacuaaauagcuucgggc

SEQ ID NO: 1111372 - RNA, 19 nt, Artificial Sequence
  Description of Artificial Sequence: Synthetic oligonucleotide
  Sense strand starting at position 1110 of SEQ ID NO: 915856
agcuauuuagugugcuuua

SEQ ID NO: 1111373 - RNA, 19 nt, Artificial Sequence
  Description of Artificial Sequence: Synthetic oligonucleotide
  Antisense strand to SEQ ID NO: 1111372
uaaagcacacuaaauagcu

SEQ ID NO: 1111374 - RNA, 19 nt, Artificial Sequence
  Description of Artificial Sequence: Synthetic oligonucleotide
  Sense strand starting at position 1111 of SEQ ID NO: 915856
gcuauuuagugugcuuuag

SEQ ID NO: 1111375 - RNA, 19 nt, Artificial Sequence
  Description of Artificial Sequence: Synthetic oligonucleotide
  Antisense strand to SEQ ID NO: 1111374
cuaaagcacacuaaauagc

SEQ ID NO: 1111376 - RNA, 19 nt, Artificial Sequence
  Description of Artificial Sequence: Synthetic oligonucleotide
  Sense strand starting at position 1113 of SEQ ID NO: 915856
uauuuagugugcuuuagug

SEQ ID NO: 1111377 - RNA, 19 nt, Artificial Sequence
  Description of Artificial Sequence: Synthetic oligonucleotide
  Antisense strand to SEQ ID NO: 1111376
cacuaaagcacacuaaaua

SEQ ID NO: 1111378 - RNA, 19 nt, Artificial Sequence
  Description of Artificial Sequence: Synthetic oligonucleotide
  Sense strand starting at position 1119 of SEQ ID NO: 915856
gugugcuuuaguguuuaac

SEQ ID NO: 1111379 - RNA, 19 nt, Artificial Sequence
  Description of Artificial Sequence: Synthetic oligonucleotide
  Antisense strand to SEQ ID NO: 1111378
guuaaacacuaaagcacac

SEQ ID NO: 1111380 - RNA, 19 nt, Artificial Sequence
  Description of Artificial Sequence: Synthetic oligonucleotide
  Sense strand starting at position 1142 of SEQ ID NO: 915856
auucaacgcguguuguauu

SEQ ID NO: 1111381 - RNA, 19 nt, Artificial Sequence
  Description of Artificial Sequence: Synthetic oligonucleotide
  Antisense strand to SEQ ID NO: 1111380
aauacaacacgcguugaau

SEQ ID NO: 1111382 - RNA, 19 nt, Artificial Sequence
  Description of Artificial Sequence: Synthetic oligonucleotide
  Sense strand starting at position 1147 of SEQ ID NO: 915856
acgcguguuguauugcaaa

SEQ ID NO: 1111383 - RNA, 19 nt, Artificial Sequence
  Description of Artificial Sequence: Synthetic oligonucleotide
  Antisense strand to SEQ ID NO: 1111382
uuugcaauacaacacgcgu

SEQ ID NO: 1111384 - RNA, 19 nt, Artificial Sequence
  Description of Artificial Sequence: Synthetic oligonucleotide
  Sense strand starting at position 1447 of SEQ ID NO: 915856
uauuuagcgcccuaucagu

SEQ ID NO: 1111385 - RNA, 19 nt, Artificial Sequence
  Description of Artificial Sequence: Synthetic oligonucleotide
  Antisense strand to SEQ ID NO: 1111384
acugauagggcgcuaaaua

SEQ ID NO: 1111386 - RNA, 19 nt, Artificial Sequence
  Description of Artificial Sequence: Synthetic oligonucleotide
  Sense strand starting at position 1458 of SEQ ID NO: 915856
cuaucaguuuacuccagga

SEQ ID NO: 1111387 - RNA, 19 nt, Artificial Sequence
  Description of Artificial Sequence: Synthetic oligonucleotide
  Antisense strand to SEQ ID NO: 1111386
uccuggaguaaacugauag

SEQ ID NO: 1111388 - RNA, 19 nt, Artificial Sequence
  Description of Artificial Sequence: Synthetic oligonucleotide
  Sense strand starting at position 1992 of SEQ ID NO: 915856
cuccauaauccuggaagac

SEQ ID NO: 1111389 - RNA, 19 nt, Artificial Sequence
  Description of Artificial Sequence: Synthetic oligonucleotide
  Antisense strand to SEQ ID NO: 1111388
gucuuccaggauuauggag

SEQ ID NO: 1111390 - RNA, 19 nt, Artificial Sequence
  Description of Artificial Sequence: Synthetic oligonucleotide
  Sense strand starting at position 2436 of SEQ ID NO: 915856
ucggaagaucuuggugaga

SEQ ID NO: 1111391 - RNA, 19 nt, Artificial Sequence
  Description of Artificial Sequence: Synthetic oligonucleotide
  Antisense strand to SEQ ID NO: 1111390
ucucaccaagaucuuccga

SEQ ID NO: 1111392 - RNA, 19 nt, Artificial Sequence
  Description of Artificial Sequence: Synthetic oligonucleotide
  Sense strand starting at position 2611 of SEQ ID NO: 915856
cguaaaucguuuacgugga

SEQ ID NO: 1111393 - RNA, 19 nt, Artificial Sequence
  Description of Artificial Sequence: Synthetic oligonucleotide
  Antisense strand to SEQ ID NO: 1111392
uccacguaaacgauuuacg

SEQ ID NO: 1111394 - RNA, 19 nt, Artificial Sequence
  Description of Artificial Sequence: Synthetic oligonucleotide
  Sense strand starting at position 2616 of SEQ ID NO: 915856
aucguuuacguggaagauu

SEQ ID NO: 1111395 - RNA, 19 nt, Artificial Sequence
  Description of Artificial Sequence: Synthetic oligonucleotide
  Antisense strand to SEQ ID NO: 1111394
aaucuuccacguaaacgau

SEQ ID NO: 1111396 - RNA, 19 nt, Artificial Sequence
  Description of Artificial Sequence: Synthetic oligonucleotide
  Sense strand starting at position 2901 of SEQ ID NO: 915856
uucccuuugguccacgauu

SEQ ID NO: 1111397 - RNA, 19 nt, Artificial Sequence
  Description of Artificial Sequence: Synthetic oligonucleotide
  Antisense strand to SEQ ID NO: 1111396
aaucguggaccaaagggaa

SEQ ID NO: 1111398 - RNA, 19 nt, Artificial Sequence
  Description of Artificial Sequence: Synthetic oligonucleotide
  Sense strand starting at position 2956 of SEQ ID NO: 915856
uaggaucagugccuuugaa

SEQ ID NO: 1111399 - RNA, 19 nt, Artificial Sequence
  Description of Artificial Sequence: Synthetic oligonucleotide
  Antisense strand to SEQ ID NO: 1111398
uucaaaggcacugauccua

SEQ ID NO: 1111400 - RNA, 19 nt, Artificial Sequence
  Description of Artificial Sequence: Synthetic oligonucleotide
  Sense strand starting at position 2990 of SEQ ID NO: 915856
ugccaaagugaggauuguu

SEQ ID NO: 1111401 - RNA, 19 nt, Artificial Sequence
  Description of Artificial Sequence: Synthetic oligonucleotide
  Antisense strand to SEQ ID NO: 1111400
aacaauccucacuuuggca

SEQ ID NO: 1111402 - RNA, 19 nt, Artificial Sequence
  Description of Artificial Sequence: Synthetic oligonucleotide
  Sense strand starting at position 2993 of SEQ ID NO: 915856
caaagugaggauuguuaca

SEQ ID NO: 1111403 - RNA, 19 nt, Artificial Sequence
  Description of Artificial Sequence: Synthetic oligonucleotide
  Antisense strand to SEQ ID NO: 1111402
uguaacaauccucacuuug

SEQ ID NO: 1111404 - RNA, 19 nt, Artificial Sequence
  Description of Artificial Sequence: Synthetic oligonucleotide
  Sense strand starting at position 2995 of SEQ ID NO: 915856
aagugaggauuguuacaaa

SEQ ID NO: 1111405 - RNA, 19 nt, Artificial Sequence
  Description of Artificial Sequence: Synthetic oligonucleotide
  Antisense strand to SEQ ID NO: 1111404
uuuguaacaauccucacuu

SEQ ID NO: 1111406 - RNA, 19 nt, Artificial Sequence
  Description of Artificial Sequence: Synthetic oligonucleotide
  Sense strand starting at position 3030 of SEQ ID NO: 915856
agaggaaugucugcauauu

SEQ ID NO: 1111407 - RNA, 19 nt, Artificial Sequence
  Description of Artificial Sequence: Synthetic oligonucleotide
  Antisense strand to SEQ ID NO: 1111406
aauaugcagacauuccucu

SEQ ID NO: 1111408 - RNA, 19 nt, Artificial Sequence
  Description of Artificial Sequence: Synthetic oligonucleotide
  Sense strand starting at position 3220 of SEQ ID NO: 915856
cagcacugcuagguugaaa

SEQ ID NO: 1111409 - RNA, 19 nt, Artificial Sequence
  Description of Artificial Sequence: Synthetic oligonucleotide
  Antisense strand to SEQ ID NO: 1111408
uuucaaccuagcagugcug

SEQ ID NO: 1111410 - RNA, 19 nt, Artificial Sequence
  Description of Artificial Sequence: Synthetic oligonucleotide
  Sense strand starting at position 3466 of SEQ ID NO: 915856
cccagacaagucuggcaau

SEQ ID NO: 1111411 - RNA, 19 nt, Artificial Sequence
  Description of Artificial Sequence: Synthetic oligonucleotide
  Antisense strand to SEQ ID NO: 1111410
auugccagacuugucuggg

SEQ ID NO: 1111412 - RNA, 19 nt, Artificial Sequence
  Description of Artificial Sequence: Synthetic oligonucleotide
  Sense strand starting at position 3620 of SEQ ID NO: 915856
gugagaccuucuucgagac

SEQ ID NO: 1111413 - RNA, 19 nt, Artificial Sequence
  Description of Artificial Sequence: Synthetic oligonucleotide
  Antisense strand to SEQ ID NO: 1111412
gucucgaagaaggucucac

SEQ ID NO: 1111414 - RNA, 19 nt, Artificial Sequence
  Description of Artificial Sequence: Synthetic oligonucleotide
  Sense strand starting at position 3624 of SEQ ID NO: 915856
gaccuucuucgagaccuga

SEQ ID NO: 1111415 - RNA, 19 nt, Artificial Sequence
  Description of Artificial Sequence: Synthetic oligonucleotide
  Antisense strand to SEQ ID NO: 1111414
ucaggucucgaagaagguc

SEQ ID NO: 1111416 - RNA, 19 nt, Artificial Sequence
  Description of Artificial Sequence: Synthetic oligonucleotide
  Sense strand starting at position 3645 of SEQ ID NO: 915856
aggccucagccagagagua

SEQ ID NO: 1111417 - RNA, 19 nt, Artificial Sequence
  Description of Artificial Sequence: Synthetic oligonucleotide
  Antisense strand to SEQ ID NO: 1111416
uacucucuggcugaggccu

SEQ ID NO: 1111418 - RNA, 19 nt, Artificial Sequence
  Description of Artificial Sequence: Synthetic oligonucleotide
  Sense strand starting at position 3901 of SEQ ID NO: 915856
gacacuauuccugggacua

SEQ ID NO: 1111419 - RNA, 19 nt, Artificial Sequence
  Description of Artificial Sequence: Synthetic oligonucleotide
  Antisense strand to SEQ ID NO: 1111418
uagucccaggaauaguguc

SEQ ID NO: 1111420 - RNA, 19 nt, Artificial Sequence
  Description of Artificial Sequence: Synthetic oligonucleotide
  Sense strand starting at position 3902 of SEQ ID NO: 915856
acacuauuccugggacuaa

SEQ ID NO: 1111421 - RNA, 19 nt, Artificial Sequence
  Description of Artificial Sequence: Synthetic oligonucleotide
  Antisense strand to SEQ ID NO: 1111420
uuagucccaggaauagugu

SEQ ID NO: 1111422 - RNA, 19 nt, Artificial Sequence
  Description of Artificial Sequence: Synthetic oligonucleotide
  Sense strand starting at position 3971 of SEQ ID NO: 915856
ccaacugcagauuguuaaa

SEQ ID NO: 1111423 - RNA, 19 nt, Artificial Sequence
  Description of Artificial Sequence: Synthetic oligonucleotide
  Antisense strand to SEQ ID NO: 1111422
uuuaacaaucugcaguugg

SEQ ID NO: 1111424 - RNA, 19 nt, Artificial Sequence
  Description of Artificial Sequence: Synthetic oligonucleotide
  Sense strand starting at position 81 of SEQ ID NO: 915857
cauagaacaugucuuggaa

SEQ ID NO: 1111425 - RNA, 19 nt, Artificial Sequence
  Description of Artificial Sequence: Synthetic oligonucleotide
  Antisense strand to SEQ ID NO: 1111424
uuccaagacauguucuaug

SEQ ID NO: 1111426 - RNA, 19 nt, Artificial Sequence
  Description of Artificial Sequence: Synthetic oligonucleotide
  Sense strand starting at position 436 of SEQ ID NO: 915857
ccuggucgcauugauauaa

SEQ ID NO: 1111427 - RNA, 19 nt, Artificial Sequence
  Description of Artificial Sequence: Synthetic oligonucleotide
  Antisense strand to SEQ ID NO: 1111426
uuauaucaaugcgaccagg

SEQ ID NO: 1111428 - RNA, 19 nt, Artificial Sequence
  Description of Artificial Sequence: Synthetic oligonucleotide
  Sense strand starting at position 902 of SEQ ID NO: 915857
guggcucaugcgucucaaa

SEQ ID NO: 1111429 - RNA, 19 nt, Artificial Sequence
  Description of Artificial Sequence: Synthetic oligonucleotide
  Antisense strand to SEQ ID NO: 1111428
uuugagacgcaugagccac

SEQ ID NO: 1111430 - RNA, 19 nt, Artificial Sequence
  Description of Artificial Sequence: Synthetic oligonucleotide
  Sense strand starting at position 1030 of SEQ ID NO: 915857
agccguggucaguuuguga

SEQ ID NO: 1111431 - RNA, 19 nt, Artificial Sequence
  Description of Artificial Sequence: Synthetic oligonucleotide
  Antisense strand to SEQ ID NO: 1111430
ucacaaacugaccacggcu

SEQ ID NO: 1111432 - RNA, 19 nt, Artificial Sequence
  Description of Artificial Sequence: Synthetic oligonucleotide
  Sense strand starting at position 1041 of SEQ ID NO: 915857
guuugugagacucauugau

SEQ ID NO: 1111433 - RNA, 19 nt, Artificial Sequence
  Description of Artificial Sequence: Synthetic oligonucleotide
  Antisense strand to SEQ ID NO: 1111432
aucaaugagucucacaaac

SEQ ID NO: 1111434 - RNA, 19 nt, Artificial Sequence
  Description of Artificial Sequence: Synthetic oligonucleotide
  Sense strand starting at position 1045 of SEQ ID NO: 915857
gugagacucauugaucgug

SEQ ID NO: 1111435 - RNA, 19 nt, Artificial Sequence
  Description of Artificial Sequence: Synthetic oligonucleotide
  Antisense strand to SEQ ID NO: 1111434
cacgaucaaugagucucac

SEQ ID NO: 1111436 - RNA, 19 nt, Artificial Sequence
  Description of Artificial Sequence: Synthetic oligonucleotide
  Sense strand starting at position 1173 of SEQ ID NO: 915857
ucagaugaguaagagaaau

SEQ ID NO: 1111437 - RNA, 19 nt, Artificial Sequence
  Description of Artificial Sequence: Synthetic oligonucleotide
  Antisense strand to SEQ ID NO: 1111436
auuucucuuacucaucuga

SEQ ID NO: 1111438 - RNA, 19 nt, Artificial Sequence
  Description of Artificial Sequence: Synthetic oligonucleotide
  Sense strand starting at position 1263 of SEQ ID NO: 915857
guucuaaagcuuuagugua

SEQ ID NO: 1111439 - RNA, 19 nt, Artificial Sequence
  Description of Artificial Sequence: Synthetic oligonucleotide
  Antisense strand to SEQ ID NO: 1111438
uacacuaaagcuuuagaac

SEQ ID NO: 1111440 - RNA, 19 nt, Artificial Sequence
  Description of Artificial Sequence: Synthetic oligonucleotide
  Sense strand starting at position 1268 of SEQ ID NO: 915857
aaagcuuuaguguacgaga

SEQ ID NO: 1111441 - RNA, 19 nt, Artificial Sequence
  Description of Artificial Sequence: Synthetic oligonucleotide
  Antisense strand to SEQ ID NO: 1111440
ucucguacacuaaagcuuu

SEQ ID NO: 1111442 - RNA, 19 nt, Artificial Sequence
  Description of Artificial Sequence: Synthetic oligonucleotide
  Sense strand starting at position 1291 of SEQ ID NO: 915857
gaggaugugaaagguacuu

SEQ ID NO: 1111443 - RNA, 19 nt, Artificial Sequence
  Description of Artificial Sequence: Synthetic oligonucleotide
  Antisense strand to SEQ ID NO: 1111442
aaguaccuuucacauccuc

SEQ ID NO: 1111444 - RNA, 19 nt, Artificial Sequence
  Description of Artificial Sequence: Synthetic oligonucleotide
  Sense strand starting at position 1339 of SEQ ID NO: 915857
cccagugaugcugauucua

SEQ ID NO: 1111445 - RNA, 19 nt, Artificial Sequence
  Description of Artificial Sequence: Synthetic oligonucleotide
  Antisense strand to SEQ ID NO: 1111444
uagaaucagcaucacuggg

SEQ ID NO: 1111446 - RNA, 19 nt, Artificial Sequence
  Description of Artificial Sequence: Synthetic oligonucleotide
  Sense strand starting at position 1341 of SEQ ID NO: 915857
cagugaugcugauucuaaa

SEQ ID NO: 1111447 - RNA, 19 nt, Artificial Sequence
  Description of Artificial Sequence: Synthetic oligonucleotide
  Antisense strand to SEQ ID NO: 1111446
uuuagaaucagcaucacug

SEQ ID NO: 1111448 - RNA, 19 nt, Artificial Sequence
  Description of Artificial Sequence: Synthetic oligonucleotide
  Sense strand starting at position 1397 of SEQ ID NO: 915857
agaaaucugccguaagaau

SEQ ID NO: 1111449 - RNA, 19 nt, Artificial Sequence
  Description of Artificial Sequence: Synthetic oligonucleotide
  Antisense strand to SEQ ID NO: 1111448
auucuuacggcagauuucu

SEQ ID NO: 1111450 - RNA, 19 nt, Artificial Sequence
  Description of Artificial Sequence: Synthetic oligonucleotide
  Sense strand starting at position 1498 of SEQ ID NO: 915857
augguuggacagugauauu

SEQ ID NO: 1111451 - RNA, 19 nt, Artificial Sequence
  Description of Artificial Sequence: Synthetic oligonucleotide
  Antisense strand to SEQ ID NO: 1111450
aauaucacuguccaaccau

SEQ ID NO: 1111452 - RNA, 19 nt, Artificial Sequence
  Description of Artificial Sequence: Synthetic oligonucleotide
  Sense strand starting at position 1568 of SEQ ID NO: 915857
agcucuuuggacggaauga

SEQ ID NO: 1111453 - RNA, 19 nt, Artificial Sequence
  Description of Artificial Sequence: Synthetic oligonucleotide
  Antisense strand to SEQ ID NO: 1111452
ucauuccguccaaagagcu

SEQ ID NO: 1111454 - RNA, 19 nt, Artificial Sequence
  Description of Artificial Sequence: Synthetic oligonucleotide
  Sense strand starting at position 2079 of SEQ ID NO: 915857
caagaauggcaacgaguaa

SEQ ID NO: 1111455 - RNA, 19 nt, Artificial Sequence
  Description of Artificial Sequence: Synthetic oligonucleotide
  Antisense strand to SEQ ID NO: 1111454
uuacucguugccauucuug

SEQ ID NO: 1111456 - RNA, 19 nt, Artificial Sequence
  Description of Artificial Sequence: Synthetic oligonucleotide
  Sense strand starting at position 2134 of SEQ ID NO: 915857
uugucccaucccgaguaaa

SEQ ID NO: 1111457 - RNA, 19 nt, Artificial Sequence
  Description of Artificial Sequence: Synthetic oligonucleotide
  Antisense strand to SEQ ID NO: 1111456
uuuacucgggaugggacaa

SEQ ID NO: 1111458 - RNA, 19 nt, Artificial Sequence
  Description of Artificial Sequence: Synthetic oligonucleotide
  Sense strand starting at position 2161 of SEQ ID NO: 915857
agacuagugucccuacuuu

SEQ ID NO: 1111459 - RNA, 19 nt, Artificial Sequence
  Description of Artificial Sequence: Synthetic oligonucleotide
  Antisense strand to SEQ ID NO: 1111458
aaaguagggacacuagucu

SEQ ID NO: 1111460 - RNA, 19 nt, Artificial Sequence
  Description of Artificial Sequence: Synthetic oligonucleotide
  Sense strand starting at position 2368 of SEQ ID NO: 915857
gggugggagccuggagaua

SEQ ID NO: 1111461 - RNA, 19 nt, Artificial Sequence
  Description of Artificial Sequence: Synthetic oligonucleotide
  Antisense strand to SEQ ID NO: 1111460
uaucuccaggcucccaccc

SEQ ID NO: 1111462 - RNA, 19 nt, Artificial Sequence
  Description of Artificial Sequence: Synthetic oligonucleotide
  Sense strand starting at position 2546 of SEQ ID NO: 915857
gaaacaucugcccacaggu

SEQ ID NO: 1111463 - RNA, 19 nt, Artificial Sequence
  Description of Artificial Sequence: Synthetic oligonucleotide
  Antisense strand to SEQ ID NO: 1111462
accugugggcagauguuuc

SEQ ID NO: 1111464 - RNA, 19 nt, Artificial Sequence
  Description of Artificial Sequence: Synthetic oligonucleotide
  Sense strand starting at position 2679 of SEQ ID NO: 915857
cgcacuuauccguuggcca

SEQ ID NO: 1111465 - RNA, 19 nt, Artificial Sequence
  Description of Artificial Sequence: Synthetic oligonucleotide
  Antisense strand to SEQ ID NO: 1111464
uggccaacggauaagugcg

SEQ ID NO: 1111466 - RNA, 19 nt, Artificial Sequence
  Description of Artificial Sequence: Synthetic oligonucleotide
  Sense strand starting at position 2848 of SEQ ID NO: 915857
auccaaacucgcugaggua

SEQ ID NO: 1111467 - RNA, 19 nt, Artificial Sequence
  Description of Artificial Sequence: Synthetic oligonucleotide
  Antisense strand to SEQ ID NO: 1111466
uaccucagcgaguuuggau

SEQ ID NO: 1111468 - RNA, 19 nt, Artificial Sequence
  Description of Artificial Sequence: Synthetic oligonucleotide
  Sense strand starting at position 2849 of SEQ ID NO: 915857
uccaaacucgcugagguaa

SEQ ID NO: 1111469 - RNA, 19 nt, Artificial Sequence
  Description of Artificial Sequence: Synthetic oligonucleotide
  Antisense strand to SEQ ID NO: 1111468
uuaccucagcgaguuugga

SEQ ID NO: 1111470 - RNA, 19 nt, Artificial Sequence
  Description of Artificial Sequence: Synthetic oligonucleotide
  Sense strand starting at position 2978 of SEQ ID NO: 915857
uauggaagauggucuguga

SEQ ID NO: 1111471 - RNA, 19 nt, Artificial Sequence
  Description of Artificial Sequence: Synthetic oligonucleotide
  Antisense strand to SEQ ID NO: 1111470
ucacagaccaucuuccaua

SEQ ID NO: 1111472 - RNA, 19 nt, Artificial Sequence
  Description of Artificial Sequence: Synthetic oligonucleotide
  Sense strand starting at position 2981 of SEQ ID NO: 915857
ggaagauggucugugauuc

SEQ ID NO: 1111473 - RNA, 19 nt, Artificial Sequence
  Description of Artificial Sequence: Synthetic oligonucleotide
  Antisense strand to SEQ ID NO: 1111472
gaaucacagaccaucuucc

SEQ ID NO: 1111474 - RNA, 19 nt, Artificial Sequence
  Description of Artificial Sequence: Synthetic oligonucleotide
  Sense strand starting at position 2982 of SEQ ID NO: 915857
gaagauggucugugauucu

SEQ ID NO: 1111475 - RNA, 19 nt, Artificial Sequence
  Description of Artificial Sequence: Synthetic oligonucleotide
  Antisense strand to SEQ ID NO: 1111474
agaaucacagaccaucuuc

SEQ ID NO: 1111476 - RNA, 19 nt, Artificial Sequence
  Description of Artificial Sequence: Synthetic oligonucleotide
  Sense strand starting at position 3095 of SEQ ID NO: 915857
aucacaagcucuguguuaa

SEQ ID NO: 1111477 - RNA, 19 nt, Artificial Sequence
  Description of Artificial Sequence: Synthetic oligonucleotide
  Antisense strand to SEQ ID NO: 1111476
uuaacacagagcuugugau

SEQ ID NO: 1111478 - RNA, 19 nt, Artificial Sequence
  Description of Artificial Sequence: Synthetic oligonucleotide
  Sense strand starting at position 3110 of SEQ ID NO: 915857
uuaagucuuguggaacaua

SEQ ID NO: 1111479 - RNA, 19 nt, Artificial Sequence
  Description of Artificial Sequence: Synthetic oligonucleotide
  Antisense strand to SEQ ID NO: 1111478
uauguuccacaagacuuaa

SEQ ID NO: 1111480 - RNA, 19 nt, Artificial Sequence
  Description of Artificial Sequence: Synthetic oligonucleotide
  Sense strand starting at position 3392 of SEQ ID NO: 915857
auauauagacaaugugagu

SEQ ID NO: 1111481 - RNA, 19 nt, Artificial Sequence
  Description of Artificial Sequence: Synthetic oligonucleotide
  Antisense strand to SEQ ID NO: 1111480
acucacauugucuauauau

SEQ ID NO: 1111482 - RNA, 19 nt, Artificial Sequence
  Description of Artificial Sequence: Synthetic oligonucleotide
  Sense strand starting at position 3641 of SEQ ID NO: 915857
ugaagacuuuaaucaguua

SEQ ID NO: 1111483 - RNA, 19 nt, Artificial Sequence
  Description of Artificial Sequence: Synthetic oligonucleotide
  Antisense strand to SEQ ID NO: 1111482
uaacugauuaaagucuuca

SEQ ID NO: 1111484 - RNA, 19 nt, Artificial Sequence
  Description of Artificial Sequence: Synthetic oligonucleotide
  Sense strand starting at position 3681 of SEQ ID NO: 915857
uuugcagaacuaugcaauu

SEQ ID NO: 1111485 - RNA, 19 nt, Artificial Sequence
  Description of Artificial Sequence: Synthetic oligonucleotide
  Antisense strand to SEQ ID NO: 1111484
aauugcauaguucugcaaa

SEQ ID NO: 1111486 - RNA, 19 nt, Artificial Sequence
  Description of Artificial Sequence: Synthetic oligonucleotide
  Sense strand starting at position 3702 of SEQ ID NO: 915857
auguauaaaggauggguua

SEQ ID NO: 1111487 - RNA, 19 nt, Artificial Sequence
  Description of Artificial Sequence: Synthetic oligonucleotide
  Antisense strand to SEQ ID NO: 1111486
uaacccauccuuuauacau

SEQ ID NO: 1111488 - RNA, 19 nt, Artificial Sequence
  Description of Artificial Sequence: Synthetic oligonucleotide
  Sense strand starting at position 3703 of SEQ ID NO: 915857
uguauaaaggauggguuaa

SEQ ID NO: 1111489 - RNA, 19 nt, Artificial Sequence
  Description of Artificial Sequence: Synthetic oligonucleotide
  Antisense strand to SEQ ID NO: 1111488
uuaacccauccuuuauaca

SEQ ID NO: 1111490 - RNA, 19 nt, Artificial Sequence
  Description of Artificial Sequence: Synthetic oligonucleotide
  Sense strand starting at position 3741 of SEQ ID NO: 915857
ucaauaaacuugucuuagu

SEQ ID NO: 1111491 - RNA, 19 nt, Artificial Sequence
  Description of Artificial Sequence: Synthetic oligonucleotide
  Antisense strand to SEQ ID NO: 1111490
acuaagacaaguuuauuga

SEQ ID NO: 1111492 - RNA, 19 nt, Artificial Sequence
  Description of Artificial Sequence: Synthetic oligonucleotide
  Sense strand starting at position 3761 of SEQ ID NO: 915857
ugaguucuguuuccuauaa

SEQ ID NO: 1111493 - RNA, 19 nt, Artificial Sequence
  Description of Artificial Sequence: Synthetic oligonucleotide
  Antisense strand to SEQ ID NO: 1111492
uuauaggaaacagaacuca

SEQ ID NO: 1111494 - RNA, 19 nt, Artificial Sequence
  Description of Artificial Sequence: Synthetic oligonucleotide
  Sense strand starting at position 3762 of SEQ ID NO: 915857
gaguucuguuuccuauaag

SEQ ID NO: 1111495 - RNA, 19 nt, Artificial Sequence
  Description of Artificial Sequence: Synthetic oligonucleotide
  Antisense strand to SEQ ID NO: 1111494
cuuauaggaaacagaacuc

SEQ ID NO: 1111496 - RNA, 19 nt, Artificial Sequence
  Description of Artificial Sequence: Synthetic oligonucleotide
  Sense strand starting at position 3765 of SEQ ID NO: 915857
uucuguuuccuauaagcug

SEQ ID NO: 1111497 - RNA, 19 nt, Artificial Sequence
  Description of Artificial Sequence: Synthetic oligonucleotide
  Antisense strand to SEQ ID NO: 1111496
cagcuuauaggaaacagaa

SEQ ID NO: 1111498 - RNA, 19 nt, Artificial Sequence
  Description of Artificial Sequence: Synthetic oligonucleotide
  Sense strand starting at position 3862 of SEQ ID NO: 915857
acuuuaugggcuugucuga

SEQ ID NO: 1111499 - RNA, 19 nt, Artificial Sequence
  Description of Artificial Sequence: Synthetic oligonucleotide
  Antisense strand to SEQ ID NO: 1111498
ucagacaagcccauaaagu

SEQ ID NO: 1111500 - RNA, 19 nt, Artificial Sequence
  Description of Artificial Sequence: Synthetic oligonucleotide
  Sense strand starting at position 3978 of SEQ ID NO: 915857
auuugucuuccuggccaau

SEQ ID NO: 1111501 - RNA, 19 nt, Artificial Sequence
  Description of Artificial Sequence: Synthetic oligonucleotide
  Antisense strand to SEQ ID NO: 1111500
auuggccaggaagacaaau

SEQ ID NO: 1111502 - RNA, 19 nt, Artificial Sequence
  Description of Artificial Sequence: Synthetic oligonucleotide
  Sense strand starting at position 3981 of SEQ ID NO: 915857
ugucuuccuggccaauuaa

SEQ ID NO: 1111503 - RNA, 19 nt, Artificial Sequence
  Description of Artificial Sequence: Synthetic oligonucleotide
  Antisense strand to SEQ ID NO: 1111502
uuaauuggccaggaagaca

SEQ ID NO: 1111504 - RNA, 19 nt, Artificial Sequence
  Description of Artificial Sequence: Synthetic oligonucleotide
  Sense strand starting at position 191 of SEQ ID NO: 915858
gugggccucugagcuauaa

SEQ ID NO: 1111505 - RNA, 19 nt, Artificial Sequence
  Description of Artificial Sequence: Synthetic oligonucleotide
  Antisense strand to SEQ ID NO: 1111504
uuauagcucagaggcccac

SEQ ID NO: 1111506 - RNA, 19 nt, Artificial Sequence
  Description of Artificial Sequence: Synthetic oligonucleotide
  Sense strand starting at position 193 of SEQ ID NO: 915858
gggccucugagcuauaaca

SEQ ID NO: 1111507 - RNA, 19 nt, Artificial Sequence
  Description of Artificial Sequence: Synthetic oligonucleotide
  Antisense strand to SEQ ID NO: 1111506
uguuauagcucagaggccc

SEQ ID NO: 1111508 - RNA, 19 nt, Artificial Sequence
  Description of Artificial Sequence: Synthetic oligonucleotide
  Sense strand starting at position 456 of SEQ ID NO: 915858
gggacuucguggaaaggga

SEQ ID NO: 1111509 - RNA, 19 nt, Artificial Sequence
  Description of Artificial Sequence: Synthetic oligonucleotide
  Antisense strand to SEQ ID NO: 1111508
ucccuuuccacgaaguccc

SEQ ID NO: 1111510 - RNA, 19 nt, Artificial Sequence
  Description of Artificial Sequence: Synthetic oligonucleotide
  Sense strand starting at position 472 of SEQ ID NO: 915858
ggagcuuugugagagguca

SEQ ID NO: 1111511 - RNA, 19 nt, Artificial Sequence
  Description of Artificial Sequence: Synthetic oligonucleotide
  Antisense strand to SEQ ID NO: 1111510
ugaccucucacaaagcucc

SEQ ID NO: 1111512 - RNA, 19 nt, Artificial Sequence
  Description of Artificial Sequence: Synthetic oligonucleotide
  Sense strand starting at position 479 of SEQ ID NO: 915858
ugugagaggucaugggagu

SEQ ID NO: 1111513 - RNA, 19 nt, Artificial Sequence
  Description of Artificial Sequence: Synthetic oligonucleotide
  Antisense strand to SEQ ID NO: 1111512
acucccaugaccucucaca

SEQ ID NO: 1111514 - RNA, 19 nt, Artificial Sequence
  Description of Artificial Sequence: Synthetic oligonucleotide
  Sense strand starting at position 602 of SEQ ID NO: 915858
guggauuaguacccaagau

SEQ ID NO: 1111515 - RNA, 19 nt, Artificial Sequence
  Description of Artificial Sequence: Synthetic oligonucleotide
  Antisense strand to SEQ ID NO: 1111514
aucuuggguacuaauccac

SEQ ID NO: 1111516 - RNA, 19 nt, Artificial Sequence
  Description of Artificial Sequence: Synthetic oligonucleotide
  Sense strand starting at position 759 of SEQ ID NO: 915858
cugagagcuugcgucucaa

SEQ ID NO: 1111517 - RNA, 19 nt, Artificial Sequence
  Description of Artificial Sequence: Synthetic oligonucleotide
  Antisense strand to SEQ ID NO: 1111516
uugagacgcaagcucucag

SEQ ID NO: 1111518 - RNA, 19 nt, Artificial Sequence
  Description of Artificial Sequence: Synthetic oligonucleotide
  Sense strand starting at position 1221 of SEQ ID NO: 915858
gaggguaaaucccuucucu

SEQ ID NO: 1111519 - RNA, 19 nt, Artificial Sequence
  Description of Artificial Sequence: Synthetic oligonucleotide
  Antisense strand to SEQ ID NO: 1111518
agagaagggauuuacccuc

SEQ ID NO: 1111520 - RNA, 19 nt, Artificial Sequence
  Description of Artificial Sequence: Synthetic oligonucleotide
  Sense strand starting at position 1272 of SEQ ID NO: 915858
uuucuuucccaccagaugu

SEQ ID NO: 1111521 - RNA, 19 nt, Artificial Sequence
  Description of Artificial Sequence: Synthetic oligonucleotide
  Antisense strand to SEQ ID NO: 1111520
acaucuggugggaaagaaa

SEQ ID NO: 1111522 - RNA, 19 nt, Artificial Sequence
  Description of Artificial Sequence: Synthetic oligonucleotide
  Sense strand starting at position 2173 of SEQ ID NO: 915858
ccucuuugcucugcauagu

SEQ ID NO: 1111523 - RNA, 19 nt, Artificial Sequence
  Description of Artificial Sequence: Synthetic oligonucleotide
  Antisense strand to SEQ ID NO: 1111522
acuaugcagagcaaagagg

SEQ ID NO: 1111524 - RNA, 19 nt, Artificial Sequence
  Description of Artificial Sequence: Synthetic oligonucleotide
  Sense strand starting at position 2290 of SEQ ID NO: 915858
ugacucuucucaggaggaa

SEQ ID NO: 1111525 - RNA, 19 nt, Artificial Sequence
  Description of Artificial Sequence: Synthetic oligonucleotide
  Antisense strand to SEQ ID NO: 1111524
uuccuccugagaagaguca

SEQ ID NO: 1111526 - RNA, 19 nt, Artificial Sequence
  Description of Artificial Sequence: Synthetic oligonucleotide
  Sense strand starting at position 2307 of SEQ ID NO: 915858
aaaccaaugugaggucaaa

SEQ ID NO: 1111527 - RNA, 19 nt, Artificial Sequence
  Description of Artificial Sequence: Synthetic oligonucleotide
  Antisense strand to SEQ ID NO: 1111526
uuugaccucacauugguuu

SEQ ID NO: 1111528 - RNA, 19 nt, Artificial Sequence
  Description of Artificial Sequence: Synthetic oligonucleotide
  Sense strand starting at position 2320 of SEQ ID NO: 915858
gucaaaugcuuagagccau

SEQ ID NO: 1111529 - RNA, 19 nt, Artificial Sequence
  Description of Artificial Sequence: Synthetic oligonucleotide
  Antisense strand to SEQ ID NO: 1111528
auggcucuaagcauuugac

SEQ ID NO: 1111530 - RNA, 19 nt, Artificial Sequence
  Description of Artificial Sequence: Synthetic oligonucleotide
  Sense strand starting at position 2434 of SEQ ID NO: 915858
auuagagguuaccuuguuu

SEQ ID NO: 1111531 - RNA, 19 nt, Artificial Sequence
  Description of Artificial Sequence: Synthetic oligonucleotide
  Antisense strand to SEQ ID NO: 1111530
aaacaagguaaccucuaau

SEQ ID NO: 1111532 - RNA, 19 nt, Artificial Sequence
  Description of Artificial Sequence: Synthetic oligonucleotide
  Sense strand starting at position 2457 of SEQ ID NO: 915858
acuuaagaaucagaaagua

SEQ ID NO: 1111533 - RNA, 19 nt, Artificial Sequence
  Description of Artificial Sequence: Synthetic oligonucleotide
  Antisense strand to SEQ ID NO: 1111532
uacuuucugauucuuaagu

SEQ ID NO: 1111534 - RNA, 19 nt, Artificial Sequence
  Description of Artificial Sequence: Synthetic oligonucleotide
  Sense strand starting at position 2898 of SEQ ID NO: 915858
acccauuauuaaggaggua

SEQ ID NO: 1111535 - RNA, 19 nt, Artificial Sequence
  Description of Artificial Sequence: Synthetic oligonucleotide
  Antisense strand to SEQ ID NO: 1111534
uaccuccuuaauaaugggu

SEQ ID NO: 1111536 - RNA, 19 nt, Artificial Sequence
  Description of Artificial Sequence: Synthetic oligonucleotide
  Sense strand starting at position 3362 of SEQ ID NO: 915858
uacguaagucgcccaaagu

SEQ ID NO: 1111537 - RNA, 19 nt, Artificial Sequence
  Description of Artificial Sequence: Synthetic oligonucleotide
  Antisense strand to SEQ ID NO: 1111536
acuuugggcgacuuacgua

SEQ ID NO: 1111538 - RNA, 19 nt, Artificial Sequence
  Description of Artificial Sequence: Synthetic oligonucleotide
  Sense strand starting at position 3915 of SEQ ID NO: 915858
cggcucuauucuuuguauu

SEQ ID NO: 1111539 - RNA, 19 nt, Artificial Sequence
  Description of Artificial Sequence: Synthetic oligonucleotide
  Antisense strand to SEQ ID NO: 1111538
aauacaaagaauagagccg

SEQ ID NO: 1111540 - RNA, 19 nt, Artificial Sequence
  Description of Artificial Sequence: Synthetic oligonucleotide
  Sense strand starting at position 3916 of SEQ ID NO: 915858
ggcucuauucuuuguauua

SEQ ID NO: 1111541 - RNA, 19 nt, Artificial Sequence
  Description of Artificial Sequence: Synthetic oligonucleotide
  Antisense strand to SEQ ID NO: 1111540
uaauacaaagaauagagcc

SEQ ID NO: 1111542 - RNA, 19 nt, Artificial Sequence
  Description of Artificial Sequence: Synthetic oligonucleotide
  Sense strand starting at position 3917 of SEQ ID NO: 915858
gcucuauucuuuguauuac

SEQ ID NO: 1111543 - RNA, 19 nt, Artificial Sequence
  Description of Artificial Sequence: Synthetic oligonucleotide
  Antisense strand to SEQ ID NO: 1111542
guaauacaaagaauagagc

SEQ ID NO: 1111544 - RNA, 19 nt, Artificial Sequence
  Description of Artificial Sequence: Synthetic oligonucleotide
  Sense strand starting at position 3934 of SEQ ID NO: 915858
acacuauacugccugaaag

SEQ ID NO: 1111545 - RNA, 19 nt, Artificial Sequence
  Description of Artificial Sequence: Synthetic oligonucleotide
  Antisense strand to SEQ ID NO: 1111544
cuuucaggcaguauagugu

SEQ ID NO: 1111546 - RNA, 19 nt, Artificial Sequence
  Description of Artificial Sequence: Synthetic oligonucleotide
  Sense strand starting at position 7 of SEQ ID NO: 915859
ccagacuuccauugugaaa

SEQ ID NO: 1111547 - RNA, 19 nt, Artificial Sequence
  Description of Artificial Sequence: Synthetic oligonucleotide
  Antisense strand to SEQ ID NO: 1111546
uuucacaauggaagucugg

SEQ ID NO: 1111548 - RNA, 19 nt, Artificial Sequence
  Description of Artificial Sequence: Synthetic oligonucleotide
  Sense strand starting at position 53 of SEQ ID NO: 915859
cggcucuagcagucuguua

SEQ ID NO: 1111549 - RNA, 19 nt, Artificial Sequence
  Description of Artificial Sequence: Synthetic oligonucleotide
  Antisense strand to SEQ ID NO: 1111548
uaacagacugcuagagccg

SEQ ID NO: 1111550 - RNA, 19 nt, Artificial Sequence
  Description of Artificial Sequence: Synthetic oligonucleotide
  Sense strand starting at position 88 of SEQ ID NO: 915859
ugaaauccguauuugcauu

SEQ ID NO: 1111551 - RNA, 19 nt, Artificial Sequence
  Description of Artificial Sequence: Synthetic oligonucleotide
  Antisense strand to SEQ ID NO: 1111550
aaugcaaauacggauuuca

SEQ ID NO: 1111552 - RNA, 19 nt, Artificial Sequence
  Description of Artificial Sequence: Synthetic oligonucleotide
  Sense strand starting at position 108 of SEQ ID NO: 915859
ccugucuugcugucacagu

SEQ ID NO: 1111553 - RNA, 19 nt, Artificial Sequence
  Description of Artificial Sequence: Synthetic oligonucleotide
  Antisense strand to SEQ ID NO: 1111552
acugugacagcaagacagg

SEQ ID NO: 1111554 - RNA, 19 nt, Artificial Sequence
  Description of Artificial Sequence: Synthetic oligonucleotide
  Sense strand starting at position 145 of SEQ ID NO: 915859
cgaccugagccucaugaau

SEQ ID NO: 1111555 - RNA, 19 nt, Artificial Sequence
  Description of Artificial Sequence: Synthetic oligonucleotide
  Antisense strand to SEQ ID NO: 1111554
auucaugaggcucaggucg

SEQ ID NO: 1111556 - RNA, 19 nt, Artificial Sequence
  Description of Artificial Sequence: Synthetic oligonucleotide
  Sense strand starting at position 215 of SEQ ID NO: 915859
aaagcuauccuggagcaga

SEQ ID NO: 1111557 - RNA, 19 nt, Artificial Sequence
  Description of Artificial Sequence: Synthetic oligonucleotide
  Antisense strand to SEQ ID NO: 1111556
ucugcuccaggauagcuuu

SEQ ID NO: 1111558 - RNA, 19 nt, Artificial Sequence
  Description of Artificial Sequence: Synthetic oligonucleotide
  Sense strand starting at position 304 of SEQ ID NO: 915859
agcuaaagugccuacgaua

SEQ ID NO: 1111559 - RNA, 19 nt, Artificial Sequence
  Description of Artificial Sequence: Synthetic oligonucleotide
  Antisense strand to SEQ ID NO: 1111558
uaucguaggcacuuuagcu

SEQ ID NO: 1111560 - RNA, 19 nt, Artificial Sequence
  Description of Artificial Sequence: Synthetic oligonucleotide
  Sense strand starting at position 360 of SEQ ID NO: 915859
acaaauggguuuccaugaa

SEQ ID NO: 1111561 - RNA, 19 nt, Artificial Sequence
  Description of Artificial Sequence: Synthetic oligonucleotide
  Antisense strand to SEQ ID NO: 1111560
uucauggaaacccauuugu

SEQ ID NO: 1111562 - RNA, 19 nt, Artificial Sequence
  Description of Artificial Sequence: Synthetic oligonucleotide
  Sense strand starting at position 364 of SEQ ID NO: 915859
auggguuuccaugaaggua

SEQ ID NO: 1111563 - RNA, 19 nt, Artificial Sequence
  Description of Artificial Sequence: Synthetic oligonucleotide
  Antisense strand to SEQ ID NO: 1111562
uaccuucauggaaacccau

SEQ ID NO: 1111564 - RNA, 19 nt, Artificial Sequence
  Description of Artificial Sequence: Synthetic oligonucleotide
  Sense strand starting at position 432 of SEQ ID NO: 915859
auggaaggaauucgguuau

SEQ ID NO: 1111565 - RNA, 19 nt, Artificial Sequence
  Description of Artificial Sequence: Synthetic oligonucleotide
  Antisense strand to SEQ ID NO: 1111564
auaaccgaauuccuuccau

SEQ ID NO: 1111566 - RNA, 19 nt, Artificial Sequence
  Description of Artificial Sequence: Synthetic oligonucleotide
  Sense strand starting at position 507 of SEQ ID NO: 915859
aucggaaacugugugagaa

SEQ ID NO: 1111567 - RNA, 19 nt, Artificial Sequence
  Description of Artificial Sequence: Synthetic oligonucleotide
  Antisense strand to SEQ ID NO: 1111566
uucucacacaguuuccgau

SEQ ID NO: 1111568 - RNA, 19 nt, Artificial Sequence
  Description of Artificial Sequence: Synthetic oligonucleotide
  Sense strand starting at position 508 of SEQ ID NO: 915859
ucggaaacugugugagaaa

SEQ ID NO: 1111569 - RNA, 19 nt, Artificial Sequence
  Description of Artificial Sequence: Synthetic oligonucleotide
  Antisense strand to SEQ ID NO: 1111568
uuucucacacaguuuccga

SEQ ID NO: 1111570 - RNA, 19 nt, Artificial Sequence
  Description of Artificial Sequence: Synthetic oligonucleotide
  Sense strand starting at position 583 of SEQ ID NO: 915859
cgagauaggauaugugauu

SEQ ID NO: 1111571 - RNA, 19 nt, Artificial Sequence
  Description of Artificial Sequence: Synthetic oligonucleotide
  Antisense strand to SEQ ID NO: 1111570
aaucacauauccuaucucg

SEQ ID NO: 1111572 - RNA, 19 nt, Artificial Sequence
  Description of Artificial Sequence: Synthetic oligonucleotide
  Sense strand starting at position 589 of SEQ ID NO: 915859
aggauaugugauuguugua

SEQ ID NO: 1111573 - RNA, 19 nt, Artificial Sequence
  Description of Artificial Sequence: Synthetic oligonucleotide
  Antisense strand to SEQ ID NO: 1111572
uacaacaaucacauauccu

SEQ ID NO: 1111574 - RNA, 19 nt, Artificial Sequence
  Description of Artificial Sequence: Synthetic oligonucleotide
  Sense strand starting at position 665 of SEQ ID NO: 915859
cagcuuauuggacgauaag

SEQ ID NO: 1111575 - RNA, 19 nt, Artificial Sequence
  Description of Artificial Sequence: Synthetic oligonucleotide
  Antisense strand to SEQ ID NO: 1111574
cuuaucguccaauaagcug

SEQ ID NO: 1111576 - RNA, 19 nt, Artificial Sequence
  Description of Artificial Sequence: Synthetic oligonucleotide
  Sense strand starting at position 666 of SEQ ID NO: 915859
agcuuauuggacgauaagu

SEQ ID NO: 1111577 - RNA, 19 nt, Artificial Sequence
  Description of Artificial Sequence: Synthetic oligonucleotide
  Antisense strand to SEQ ID NO: 1111576
acuuaucguccaauaagcu

SEQ ID NO: 1111578 - RNA, 19 nt, Artificial Sequence
  Description of Artificial Sequence: Synthetic oligonucleotide
  Sense strand starting at position 668 of SEQ ID NO: 915859
cuuauuggacgauaaguca

SEQ ID NO: 1111579 - RNA, 19 nt, Artificial Sequence
  Description of Artificial Sequence: Synthetic oligonucleotide
  Antisense strand to SEQ ID NO: 1111578
ugacuuaucguccaauaag

SEQ ID NO: 1111580 - RNA, 19 nt, Artificial Sequence
  Description of Artificial Sequence: Synthetic oligonucleotide
  Sense strand starting at position 739 of SEQ ID NO: 915859
uguuguuaugacgaagaau

SEQ ID NO: 1111581 - RNA, 19 nt, Artificial Sequence
  Description of Artificial Sequence: Synthetic oligonucleotide
  Antisense strand to SEQ ID NO: 1111580
auucuucgucauaacaaca

SEQ ID NO: 1111582 - RNA, 19 nt, Artificial Sequence
  Description of Artificial Sequence: Synthetic oligonucleotide
  Sense strand starting at position 835 of SEQ ID NO: 915859
gucucuuaaucagucugaa

SEQ ID NO: 1111583 - RNA, 19 nt, Artificial Sequence
  Description of Artificial Sequence: Synthetic oligonucleotide
  Antisense strand to SEQ ID NO: 1111582
uucagacugauuaagagac

SEQ ID NO: 1111584 - RNA, 19 nt, Artificial Sequence
  Description of Artificial Sequence: Synthetic oligonucleotide
  Sense strand starting at position 1026 of SEQ ID NO: 915859
ggcagaguguguacacgua

SEQ ID NO: 1111585 - RNA, 19 nt, Artificial Sequence
  Description of Artificial Sequence: Synthetic oligonucleotide
  Antisense strand to SEQ ID NO: 1111584
uacguguacacacucugcc

SEQ ID NO: 1111586 - RNA, 19 nt, Artificial Sequence
  Description of Artificial Sequence: Synthetic oligonucleotide
  Sense strand starting at position 1167 of SEQ ID NO: 915859
cuaguuaacccauaagagc

SEQ ID NO: 1111587 - RNA, 19 nt, Artificial Sequence
  Description of Artificial Sequence: Synthetic oligonucleotide
  Antisense strand to SEQ ID NO: 1111586
gcucuuauggguuaacuag

SEQ ID NO: 1111588 - RNA, 19 nt, Artificial Sequence
  Description of Artificial Sequence: Synthetic oligonucleotide
  Sense strand starting at position 1471 of SEQ ID NO: 915859
cggaaauacuuagcaacca

SEQ ID NO: 1111589 - RNA, 19 nt, Artificial Sequence
  Description of Artificial Sequence: Synthetic oligonucleotide
  Antisense strand to SEQ ID NO: 1111588
ugguugcuaaguauuuccg

SEQ ID NO: 1111590 - RNA, 19 nt, Artificial Sequence
  Description of Artificial Sequence: Synthetic oligonucleotide
  Sense strand starting at position 2556 of SEQ ID NO: 915859
gagggaagucgggaacguu

SEQ ID NO: 1111591 - RNA, 19 nt, Artificial Sequence
  Description of Artificial Sequence: Synthetic oligonucleotide
  Antisense strand to SEQ ID NO: 1111590
aacguucccgacuucccuc

SEQ ID NO: 1111592 - RNA, 19 nt, Artificial Sequence
  Description of Artificial Sequence: Synthetic oligonucleotide
  Sense strand starting at position 2572 of SEQ ID NO: 915859
guuuccucuccacagggau

SEQ ID NO: 1111593 - RNA, 19 nt, Artificial Sequence
  Description of Artificial Sequence: Synthetic oligonucleotide
  Antisense strand to SEQ ID NO: 1111592
aucccuguggagaggaaac

SEQ ID NO: 1111594 - RNA, 19 nt, Artificial Sequence
  Description of Artificial Sequence: Synthetic oligonucleotide
  Sense strand starting at position 2586 of SEQ ID NO: 915859
gggauaucugcugggagga

SEQ ID NO: 1111595 - RNA, 19 nt, Artificial Sequence
  Description of Artificial Sequence: Synthetic oligonucleotide
  Antisense strand to SEQ ID NO: 1111594
uccucccagcagauauccc

SEQ ID NO: 1111596 - RNA, 19 nt, Artificial Sequence
  Description of Artificial Sequence: Synthetic oligonucleotide
  Sense strand starting at position 2587 of SEQ ID NO: 915859
ggauaucugcugggaggaa

SEQ ID NO: 1111597 - RNA, 19 nt, Artificial Sequence
  Description of Artificial Sequence: Synthetic oligonucleotide
  Antisense strand to SEQ ID NO: 1111596
uuccucccagcagauaucc

SEQ ID NO: 1111598 - RNA, 19 nt, Artificial Sequence
  Description of Artificial Sequence: Synthetic oligonucleotide
  Sense strand starting at position 2633 of SEQ ID NO: 915859
cccucaccucccugggaaa

SEQ ID NO: 1111599 - RNA, 19 nt, Artificial Sequence
  Description of Artificial Sequence: Synthetic oligonucleotide
  Antisense strand to SEQ ID NO: 1111598
uuucccagggaggugaggg

SEQ ID NO: 1111600 - RNA, 19 nt, Artificial Sequence
  Description of Artificial Sequence: Synthetic oligonucleotide
  Sense strand starting at position 2685 of SEQ ID NO: 915859
cagggaugguguccaauuc

SEQ ID NO: 1111601 - RNA, 19 nt, Artificial Sequence
  Description of Artificial Sequence: Synthetic oligonucleotide
  Antisense strand to SEQ ID NO: 1111600
gaauuggacaccaucccug

SEQ ID NO: 1111602 - RNA, 19 nt, Artificial Sequence
  Description of Artificial Sequence: Synthetic oligonucleotide
  Sense strand starting at position 3102 of SEQ ID NO: 915859
ugaugagcucuacgauuaa

SEQ ID NO: 1111603 - RNA, 19 nt, Artificial Sequence
  Description of Artificial Sequence: Synthetic oligonucleotide
  Antisense strand to SEQ ID NO: 1111602
uuaaucguagagcucauca

SEQ ID NO: 1111604 - RNA, 19 nt, Artificial Sequence
  Description of Artificial Sequence: Synthetic oligonucleotide
  Sense strand starting at position 3133 of SEQ ID NO: 915859
guuuaauuccaagauaagu

SEQ ID NO: 1111605 - RNA, 19 nt, Artificial Sequence
  Description of Artificial Sequence: Synthetic oligonucleotide
  Antisense strand to SEQ ID NO: 1111604
acuuaucuuggaauuaaac

SEQ ID NO: 1111606 - RNA, 19 nt, Artificial Sequence
  Description of Artificial Sequence: Synthetic oligonucleotide
  Sense strand starting at position 3171 of SEQ ID NO: 915859
ugagucagaucgcccauuu

SEQ ID NO: 1111607 - RNA, 19 nt, Artificial Sequence
  Description of Artificial Sequence: Synthetic oligonucleotide
  Antisense strand to SEQ ID NO: 1111606
aaaugggcgaucugacuca

SEQ ID NO: 1111608 - RNA, 19 nt, Artificial Sequence
  Description of Artificial Sequence: Synthetic oligonucleotide
  Sense strand starting at position 3181 of SEQ ID NO: 915859
cgcccauuuggccauuaua

SEQ ID NO: 1111609 - RNA, 19 nt, Artificial Sequence
  Description of Artificial Sequence: Synthetic oligonucleotide
  Antisense strand to SEQ ID NO: 1111608
uauaauggccaaaugggcg

SEQ ID NO: 1111610 - RNA, 19 nt, Artificial Sequence
  Description of Artificial Sequence: Synthetic oligonucleotide
  Sense strand starting at position 3190 of SEQ ID NO: 915859
ggccauuauauccggauua

SEQ ID NO: 1111611 - RNA, 19 nt, Artificial Sequence
  Description of Artificial Sequence: Synthetic oligonucleotide
  Antisense strand to SEQ ID NO: 1111610
uaauccggauauaauggcc

SEQ ID NO: 1111612 - RNA, 19 nt, Artificial Sequence
  Description of Artificial Sequence: Synthetic oligonucleotide
  Sense strand starting at position 3396 of SEQ ID NO: 915859
gaaaguuguuuccuacaug

SEQ ID NO: 1111613 - RNA, 19 nt, Artificial Sequence
  Description of Artificial Sequence: Synthetic oligonucleotide
  Antisense strand to SEQ ID NO: 1111612
cauguaggaaacaacuuuc

SEQ ID NO: 1111614 - RNA, 19 nt, Artificial Sequence
  Description of Artificial Sequence: Synthetic oligonucleotide
  Sense strand starting at position 3493 of SEQ ID NO: 915859
ccgggcuagcacuaauaaa

SEQ ID NO: 1111615 - RNA, 19 nt, Artificial Sequence
  Description of Artificial Sequence: Synthetic oligonucleotide
  Antisense strand to SEQ ID NO: 1111614
uuuauuagugcuagcccgg

SEQ ID NO: 1111616 - RNA, 19 nt, Artificial Sequence
  Description of Artificial Sequence: Synthetic oligonucleotide
  Sense strand starting at position 3613 of SEQ ID NO: 915859
uuucuuacuguguacuuaa

SEQ ID NO: 1111617 - RNA, 19 nt, Artificial Sequence
  Description of Artificial Sequence: Synthetic oligonucleotide
  Antisense strand to SEQ ID NO: 1111616
uuaaguacacaguaagaaa

SEQ ID NO: 1111618 - RNA, 19 nt, Artificial Sequence
  Description of Artificial Sequence: Synthetic oligonucleotide
  Sense strand starting at position 3637 of SEQ ID NO: 915859
agaggcagaaguugagauu

SEQ ID NO: 1111619 - RNA, 19 nt, Artificial Sequence
  Description of Artificial Sequence: Synthetic oligonucleotide
  Antisense strand to SEQ ID NO: 1111618
aaucucaacuucugccucu

SEQ ID NO: 1111620 - RNA, 19 nt, Artificial Sequence
  Description of Artificial Sequence: Synthetic oligonucleotide
  Sense strand starting at position 3658 of SEQ ID NO: 915859
cuaguauuaggccacacuu

SEQ ID NO: 1111621 - RNA, 19 nt, Artificial Sequence
  Description of Artificial Sequence: Synthetic oligonucleotide
  Antisense strand to SEQ ID NO: 1111620
aaguguggccuaauacuag

SEQ ID NO: 1111622 - RNA, 19 nt, Artificial Sequence
  Description of Artificial Sequence: Synthetic oligonucleotide
  Sense strand starting at position 3721 of SEQ ID NO: 915859
gaguuagaauaguuaauac

SEQ ID NO: 1111623 - RNA, 19 nt, Artificial Sequence
  Description of Artificial Sequence: Synthetic oligonucleotide
  Antisense strand to SEQ ID NO: 1111622
guauuaacuauucuaacuc

SEQ ID NO: 1111624 - RNA, 19 nt, Artificial Sequence
  Description of Artificial Sequence: Synthetic oligonucleotide
  Sense strand starting at position 3756 of SEQ ID NO: 915859
aaucgcucagaggaauauu

SEQ ID NO: 1111625 - RNA, 19 nt, Artificial Sequence
  Description of Artificial Sequence: Synthetic oligonucleotide
  Antisense strand to SEQ ID NO: 1111624
aauauuccucugagcgauu

SEQ ID NO: 1111626 - RNA, 19 nt, Artificial Sequence
  Description of Artificial Sequence: Synthetic oligonucleotide
  Sense strand starting at position 239 of SEQ ID NO: 915860
ucauccuggucccuaagau

SEQ ID NO: 1111627 - RNA, 19 nt, Artificial Sequence
  Description of Artificial Sequence: Synthetic oligonucleotide
  Antisense strand to SEQ ID NO: 1111626
aucuuagggaccaggauga

SEQ ID NO: 1111628 - RNA, 19 nt, Artificial Sequence
  Description of Artificial Sequence: Synthetic oligonucleotide
  Sense strand starting at position 263 of SEQ ID NO: 915860
ucccaaugaccuggcuuua

SEQ ID NO: 1111629 - RNA, 19 nt, Artificial Sequence
  Description of Artificial Sequence: Synthetic oligonucleotide
  Antisense strand to SEQ ID NO: 1111628
uaaagccaggucauuggga

SEQ ID NO: 1111630 - RNA, 19 nt, Artificial Sequence
  Description of Artificial Sequence: Synthetic oligonucleotide
  Sense strand starting at position 515 of SEQ ID NO: 915860
guuacucucccgcuuguga

SEQ ID NO: 1111631 - RNA, 19 nt, Artificial Sequence
  Description of Artificial Sequence: Synthetic oligonucleotide
  Antisense strand to SEQ ID NO: 1111630
ucacaagcgggagaguaac

SEQ ID NO: 1111632 - RNA, 19 nt, Artificial Sequence
  Description of Artificial Sequence: Synthetic oligonucleotide
  Sense strand starting at position 999 of SEQ ID NO: 915860
uaaggagauuguucuccuu

SEQ ID NO: 1111633 - RNA, 19 nt, Artificial Sequence
  Description of Artificial Sequence: Synthetic oligonucleotide
  Antisense strand to SEQ ID NO: 1111632
aaggagaacaaucuccuua

SEQ ID NO: 1111634 - RNA, 19 nt, Artificial Sequence
  Description of Artificial Sequence: Synthetic oligonucleotide
  Sense strand starting at position 1001 of SEQ ID NO: 915860
aggagauuguucuccuuau

SEQ ID NO: 1111635 - RNA, 19 nt, Artificial Sequence
  Description of Artificial Sequence: Synthetic oligonucleotide
  Antisense strand to SEQ ID NO: 1111634
auaaggagaacaaucuccu

SEQ ID NO: 1111636 - RNA, 19 nt, Artificial Sequence
  Description of Artificial Sequence: Synthetic oligonucleotide
  Sense strand starting at position 1002 of SEQ ID NO: 915860
ggagauuguucuccuuauc

SEQ ID NO: 1111637 - RNA, 19 nt, Artificial Sequence
  Description of Artificial Sequence: Synthetic oligonucleotide
  Antisense strand to SEQ ID NO: 1111636
gauaaggagaacaaucucc

SEQ ID NO: 1111638 - RNA, 19 nt, Artificial Sequence
  Description of Artificial Sequence: Synthetic oligonucleotide
  Sense strand starting at position 1044 of SEQ ID NO: 915860
ggcaauauuaacggacuga

SEQ ID NO: 1111639 - RNA, 19 nt, Artificial Sequence
  Description of Artificial Sequence: Synthetic oligonucleotide
  Antisense strand to SEQ ID NO: 1111638
ucaguccguuaauauugcc

SEQ ID NO: 1111640 - RNA, 19 nt, Artificial Sequence
  Description of Artificial Sequence: Synthetic oligonucleotide
  Sense strand starting at position 1107 of SEQ ID NO: 915860
uacaauuucugguaggaaa

SEQ ID NO: 1111641 - RNA, 19 nt, Artificial Sequence
  Description of Artificial Sequence: Synthetic oligonucleotide
  Antisense strand to SEQ ID NO: 1111640
uuuccuaccagaaauugua

SEQ ID NO: 1111642 - RNA, 19 nt, Artificial Sequence
  Description of Artificial Sequence: Synthetic oligonucleotide
  Sense strand starting at position 1143 of SEQ ID NO: 915860
cuuagugguguuuauuauu

SEQ ID NO: 1111643 - RNA, 19 nt, Artificial Sequence
  Description of Artificial Sequence: Synthetic oligonucleotide
  Antisense strand to SEQ ID NO: 1111642
aauaauaaacaccacuaag

SEQ ID NO: 1111644 - RNA, 19 nt, Artificial Sequence
  Description of Artificial Sequence: Synthetic oligonucleotide
  Sense strand starting at position 1209 of SEQ ID NO: 915860
aggacaacuccaugugaug

SEQ ID NO: 1111645 - RNA, 19 nt, Artificial Sequence
  Description of Artificial Sequence: Synthetic oligonucleotide
  Antisense strand to SEQ ID NO: 1111644
caucacauggaguuguccu

SEQ ID NO: 1111646 - RNA, 19 nt, Artificial Sequence
  Description of Artificial Sequence: Synthetic oligonucleotide
  Sense strand starting at position 1339 of SEQ ID NO: 915860
agcaaucucagccagggau

SEQ ID NO: 1111647 - RNA, 19 nt, Artificial Sequence
  Description of Artificial Sequence: Synthetic oligonucleotide
  Antisense strand to SEQ ID NO: 1111646
aucccuggcugagauugcu

SEQ ID NO: 1111648 - RNA, 19 nt, Artificial Sequence
  Description of Artificial Sequence: Synthetic oligonucleotide
  Sense strand starting at position 1352 of SEQ ID NO: 915860
agggauccguggucuuaac

SEQ ID NO: 1111649 - RNA, 19 nt, Artificial Sequence
  Description of Artificial Sequence: Synthetic oligonucleotide
  Antisense strand to SEQ ID NO: 1111648
guuaagaccacggaucccu

SEQ ID NO: 1111650 - RNA, 19 nt, Artificial Sequence
  Description of Artificial Sequence: Synthetic oligonucleotide
  Sense strand starting at position 1391 of SEQ ID NO: 915860
agggucugucaauguuuau

SEQ ID NO: 1111651 - RNA, 19 nt, Artificial Sequence
  Description of Artificial Sequence: Synthetic oligonucleotide
  Antisense strand to SEQ ID NO: 1111650
auaaacauugacagacccu

SEQ ID NO: 1111652 - RNA, 19 nt, Artificial Sequence
  Description of Artificial Sequence: Synthetic oligonucleotide
  Sense strand starting at position 1425 of SEQ ID NO: 915860
ggaauucugcuagaagcuu

SEQ ID NO: 1111653 - RNA, 19 nt, Artificial Sequence
  Description of Artificial Sequence: Synthetic oligonucleotide
  Antisense strand to SEQ ID NO: 1111652
aagcuucuagcagaauucc

SEQ ID NO: 1111654 - RNA, 19 nt, Artificial Sequence
  Description of Artificial Sequence: Synthetic oligonucleotide
  Sense strand starting at position 1934 of SEQ ID NO: 915860
ugugacgucacacggauuu

SEQ ID NO: 1111655 - RNA, 19 nt, Artificial Sequence
  Description of Artificial Sequence: Synthetic oligonucleotide
  Antisense strand to SEQ ID NO: 1111654
aaauccgugugacgucaca

SEQ ID NO: 1111656 - RNA, 19 nt, Artificial Sequence
  Description of Artificial Sequence: Synthetic oligonucleotide
  Sense strand starting at position 2042 of SEQ ID NO: 915860
agaggcugggugugauaaa

SEQ ID NO: 1111657 - RNA, 19 nt, Artificial Sequence
  Description of Artificial Sequence: Synthetic oligonucleotide
  Antisense strand to SEQ ID NO: 1111656
uuuaucacacccagccucu

SEQ ID NO: 1111658 - RNA, 19 nt, Artificial Sequence
  Description of Artificial Sequence: Synthetic oligonucleotide
  Sense strand starting at position 2087 of SEQ ID NO: 915860
caacgugacgggaguugua

SEQ ID NO: 1111659 - RNA, 19 nt, Artificial Sequence
  Description of Artificial Sequence: Synthetic oligonucleotide
  Antisense strand to SEQ ID NO: 1111658
uacaacucccgucacguug

SEQ ID NO: 1111660 - RNA, 19 nt, Artificial Sequence
  Description of Artificial Sequence: Synthetic oligonucleotide
  Sense strand starting at position 2228 of SEQ ID NO: 915860
cugagaagucgcuacucuu

SEQ ID NO: 1111661 - RNA, 19 nt, Artificial Sequence
  Description of Artificial Sequence: Synthetic oligonucleotide
  Antisense strand to SEQ ID NO: 1111660
aagaguagcgacuucucag

SEQ ID NO: 1111662 - RNA, 19 nt, Artificial Sequence
  Description of Artificial Sequence: Synthetic oligonucleotide
  Sense strand starting at position 2394 of SEQ ID NO: 915860
gugcuuucuaggccuuagu

SEQ ID NO: 1111663 - RNA, 19 nt, Artificial Sequence
  Description of Artificial Sequence: Synthetic oligonucleotide
  Antisense strand to SEQ ID NO: 1111662
acuaaggccuagaaagcac

SEQ ID NO: 1111664 - RNA, 19 nt, Artificial Sequence
  Description of Artificial Sequence: Synthetic oligonucleotide
  Sense strand starting at position 2432 of SEQ ID NO: 915860
auuauaauccggugaaauc

SEQ ID NO: 1111665 - RNA, 19 nt, Artificial Sequence
  Description of Artificial Sequence: Synthetic oligonucleotide
  Antisense strand to SEQ ID NO: 1111664
gauuucaccggauuauaau

SEQ ID NO: 1111666 - RNA, 19 nt, Artificial Sequence
  Description of Artificial Sequence: Synthetic oligonucleotide
  Sense strand starting at position 2450 of SEQ ID NO: 915860
cguaauuauuuagccuuau

SEQ ID NO: 1111667 - RNA, 19 nt, Artificial Sequence
  Description of Artificial Sequence: Synthetic oligonucleotide
  Antisense strand to SEQ ID NO: 1111666
auaaggcuaaauaauuacg

SEQ ID NO: 1111668 - RNA, 19 nt, Artificial Sequence
  Description of Artificial Sequence: Synthetic oligonucleotide
  Sense strand starting at position 2572 of SEQ ID NO: 915860
ggcaccuuuagguggaauu

SEQ ID NO: 1111669 - RNA, 19 nt, Artificial Sequence
  Description of Artificial Sequence: Synthetic oligonucleotide
  Antisense strand to SEQ ID NO: 1111668
aauuccaccuaaaggugcc

SEQ ID NO: 1111670 - RNA, 19 nt, Artificial Sequence
  Description of Artificial Sequence: Synthetic oligonucleotide
  Sense strand starting at position 2646 of SEQ ID NO: 915860
ccucauucuuccuuguaga

SEQ ID NO: 1111671 - RNA, 19 nt, Artificial Sequence
  Description of Artificial Sequence: Synthetic oligonucleotide
  Antisense strand to SEQ ID NO: 1111670
ucuacaaggaagaaugagg

SEQ ID NO: 1111672 - RNA, 19 nt, Artificial Sequence
  Description of Artificial Sequence: Synthetic oligonucleotide
  Sense strand starting at position 2647 of SEQ ID NO: 915860
cucauucuuccuuguagau

SEQ ID NO: 1111673 - RNA, 19 nt, Artificial Sequence
  Description of Artificial Sequence: Synthetic oligonucleotide
  Antisense strand to SEQ ID NO: 1111672
aucuacaaggaagaaugag

SEQ ID NO: 1111674 - RNA, 19 nt, Artificial Sequence
  Description of Artificial Sequence: Synthetic oligonucleotide
  Sense strand starting at position 2672 of SEQ ID NO: 915860
guuguuuguaugcugaguu

SEQ ID NO: 1111675 - RNA, 19 nt, Artificial Sequence
  Description of Artificial Sequence: Synthetic oligonucleotide
  Antisense strand to SEQ ID NO: 1111674
aacucagcauacaaacaac

SEQ ID NO: 1111676 - RNA, 19 nt, Artificial Sequence
  Description of Artificial Sequence: Synthetic oligonucleotide
  Sense strand starting at position 2763 of SEQ ID NO: 915860
uggauuuauuaagcgcuga

SEQ ID NO: 1111677 - RNA, 19 nt, Artificial Sequence
  Description of Artificial Sequence: Synthetic oligonucleotide
  Antisense strand to SEQ ID NO: 1111676
ucagcgcuuaauaaaucca

SEQ ID NO: 1111678 - RNA, 19 nt, Artificial Sequence
  Description of Artificial Sequence: Synthetic oligonucleotide
  Sense strand starting at position 2863 of SEQ ID NO: 915860
acuguuaaaugcuuagaug

SEQ ID NO: 1111679 - RNA, 19 nt, Artificial Sequence
  Description of Artificial Sequence: Synthetic oligonucleotide
  Antisense strand to SEQ ID NO: 1111678
caucuaagcauuuaacagu

SEQ ID NO: 1111680 - RNA, 19 nt, Artificial Sequence
  Description of Artificial Sequence: Synthetic oligonucleotide
  Sense strand starting at position 2882 of SEQ ID NO: 915860
ggguuaguucuauggaagc

SEQ ID NO: 1111681 - RNA, 19 nt, Artificial Sequence
  Description of Artificial Sequence: Synthetic oligonucleotide
  Antisense strand to SEQ ID NO: 1111680
gcuuccauagaacuaaccc

SEQ ID NO: 1111682 - RNA, 19 nt, Artificial Sequence
  Description of Artificial Sequence: Synthetic oligonucleotide
  Sense strand starting at position 2884 of SEQ ID NO: 915860
guuaguucuauggaagcac

SEQ ID NO: 1111683 - RNA, 19 nt, Artificial Sequence
  Description of Artificial Sequence: Synthetic oligonucleotide
  Antisense strand to SEQ ID NO: 1111682
gugcuuccauagaacuaac

SEQ ID NO: 1111684 - RNA, 19 nt, Artificial Sequence
  Description of Artificial Sequence: Synthetic oligonucleotide
  Sense strand starting at position 2914 of SEQ ID NO: 915860
ggauacagaucagagagaa

SEQ ID NO: 1111685 - RNA, 19 nt, Artificial Sequence
  Description of Artificial Sequence: Synthetic oligonucleotide
  Antisense strand to SEQ ID NO: 1111684
uucucucugaucuguaucc

SEQ ID NO: 1111686 - RNA, 19 nt, Artificial Sequence
  Description of Artificial Sequence: Synthetic oligonucleotide
  Sense strand starting at position 2974 of SEQ ID NO: 915860
gugaucaagagugagugua

SEQ ID NO: 1111687 - RNA, 19 nt, Artificial Sequence
  Description of Artificial Sequence: Synthetic oligonucleotide
  Antisense strand to SEQ ID NO: 1111686
uacacucacucuugaucac

SEQ ID NO: 1111688 - RNA, 19 nt, Artificial Sequence
  Description of Artificial Sequence: Synthetic oligonucleotide
  Sense strand starting at position 3015 of SEQ ID NO: 915860
uccauaaagugcucugaaa

SEQ ID NO: 1111689 - RNA, 19 nt, Artificial Sequence
  Description of Artificial Sequence: Synthetic oligonucleotide
  Antisense strand to SEQ ID NO: 1111688
uuucagagcacuuuaugga

SEQ ID NO: 1111690 - RNA, 19 nt, Artificial Sequence
  Description of Artificial Sequence: Synthetic oligonucleotide
  Sense strand starting at position 3017 of SEQ ID NO: 915860
cauaaagugcucugaaagu

SEQ ID NO: 1111691 - RNA, 19 nt, Artificial Sequence
  Description of Artificial Sequence: Synthetic oligonucleotide
  Antisense strand to SEQ ID NO: 1111690
acuuucagagcacuuuaug

SEQ ID NO: 1111692 - RNA, 19 nt, Artificial Sequence
  Description of Artificial Sequence: Synthetic oligonucleotide
  Sense strand starting at position 3546 of SEQ ID NO: 915860
ugcaaauaugcgcacauuu

SEQ ID NO: 1111693 - RNA, 19 nt, Artificial Sequence
  Description of Artificial Sequence: Synthetic oligonucleotide
  Antisense strand to SEQ ID NO: 1111692
aaaugugcgcauauuugca

SEQ ID NO: 1111694 - RNA, 19 nt, Artificial Sequence
  Description of Artificial Sequence: Synthetic oligonucleotide
  Sense strand starting at position 3557 of SEQ ID NO: 915860
gcacauuucuaugacaaga

SEQ ID NO: 1111695 - RNA, 19 nt, Artificial Sequence
  Description of Artificial Sequence: Synthetic oligonucleotide
  Antisense strand to SEQ ID NO: 1111694
ucuugucauagaaaugugc

SEQ ID NO: 1111696 - RNA, 19 nt, Artificial Sequence
  Description of Artificial Sequence: Synthetic oligonucleotide
  Sense strand starting at position 3708 of SEQ ID NO: 915860
cuuaguuuccaagaguuua

SEQ ID NO: 1111697 - RNA, 19 nt, Artificial Sequence
  Description of Artificial Sequence: Synthetic oligonucleotide
  Antisense strand to SEQ ID NO: 1111696
uaaacucuuggaaacuaag

SEQ ID NO: 1111698 - RNA, 19 nt, Artificial Sequence
  Description of Artificial Sequence: Synthetic oligonucleotide
  Sense strand starting at position 3713 of SEQ ID NO: 915860
uuuccaagaguuuauguga

SEQ ID NO: 1111699 - RNA, 19 nt, Artificial Sequence
  Description of Artificial Sequence: Synthetic oligonucleotide
  Antisense strand to SEQ ID NO: 1111698
ucacauaaacucuuggaaa

SEQ ID NO: 1111700 - RNA, 19 nt, Artificial Sequence
  Description of Artificial Sequence: Synthetic oligonucleotide
  Sense strand starting at position 3716 of SEQ ID NO: 915860
ccaagaguuuaugugaacu

SEQ ID NO: 1111701 - RNA, 19 nt, Artificial Sequence
  Description of Artificial Sequence: Synthetic oligonucleotide
  Antisense strand to SEQ ID NO: 1111700
aguucacauaaacucuugg

SEQ ID NO: 1111702 - RNA, 19 nt, Artificial Sequence
  Description of Artificial Sequence: Synthetic oligonucleotide
  Sense strand starting at position 3799 of SEQ ID NO: 915860
gcuguacaucuuggauuau

SEQ ID NO: 1111703 - RNA, 19 nt, Artificial Sequence
  Description of Artificial Sequence: Synthetic oligonucleotide
  Antisense strand to SEQ ID NO: 1111702
auaauccaagauguacagc

SEQ ID NO: 1111704 - RNA, 19 nt, Artificial Sequence
  Description of Artificial Sequence: Synthetic oligonucleotide
  Sense strand starting at position 3843 of SEQ ID NO: 915860
aacucaguaucuuuggaga

SEQ ID NO: 1111705 - RNA, 19 nt, Artificial Sequence
  Description of Artificial Sequence: Synthetic oligonucleotide
  Antisense strand to SEQ ID NO: 1111704
ucuccaaagauacugaguu

SEQ ID NO: 1111706 - RNA, 19 nt, Artificial Sequence
  Description of Artificial Sequence: Synthetic oligonucleotide
  Sense strand starting at position 85 of SEQ ID NO: 915861
uuggucaucaugggauuga

SEQ ID NO: 1111707 - RNA, 19 nt, Artificial Sequence
  Description of Artificial Sequence: Synthetic oligonucleotide
  Antisense strand to SEQ ID NO: 1111706
ucaaucccaugaugaccaa

SEQ ID NO: 1111708 - RNA, 19 nt, Artificial Sequence
  Description of Artificial Sequence: Synthetic oligonucleotide
  Sense strand starting at position 89 of SEQ ID NO: 915861
ucaucaugggauugaagua

SEQ ID NO: 1111709 - RNA, 19 nt, Artificial Sequence
  Description of Artificial Sequence: Synthetic oligonucleotide
  Antisense strand to SEQ ID NO: 1111708
uacuucaaucccaugauga

SEQ ID NO: 1111710 - RNA, 19 nt, Artificial Sequence
  Description of Artificial Sequence: Synthetic oligonucleotide
  Sense strand starting at position 277 of SEQ ID NO: 915861
aucagagcagucugucaga

SEQ ID NO: 1111711 - RNA, 19 nt, Artificial Sequence
  Description of Artificial Sequence: Synthetic oligonucleotide
  Antisense strand to SEQ ID NO: 1111710
ucugacagacugcucugau

SEQ ID NO: 1111712 - RNA, 19 nt, Artificial Sequence
  Description of Artificial Sequence: Synthetic oligonucleotide
  Sense strand starting at position 538 of SEQ ID NO: 915861
uguuguuugagacgauauc

SEQ ID NO: 1111713 - RNA, 19 nt, Artificial Sequence
  Description of Artificial Sequence: Synthetic oligonucleotide
  Antisense strand to SEQ ID NO: 1111712
gauaucgucucaaacaaca

SEQ ID NO: 1111714 - RNA, 19 nt, Artificial Sequence
  Description of Artificial Sequence: Synthetic oligonucleotide
  Sense strand starting at position 539 of SEQ ID NO: 915861
guuguuugagacgauaucu

SEQ ID NO: 1111715 - RNA, 19 nt, Artificial Sequence
  Description of Artificial Sequence: Synthetic oligonucleotide
  Antisense strand to SEQ ID NO: 1111714
agauaucgucucaaacaac

SEQ ID NO: 1111716 - RNA, 19 nt, Artificial Sequence
  Description of Artificial Sequence: Synthetic oligonucleotide
  Sense strand starting at position 549 of SEQ ID NO: 915861
acgauaucucgcuauguua

SEQ ID NO: 1111717 - RNA, 19 nt, Artificial Sequence
  Description of Artificial Sequence: Synthetic oligonucleotide
  Antisense strand to SEQ ID NO: 1111716
uaacauagcgagauaucgu

SEQ ID NO: 1111718 - RNA, 19 nt, Artificial Sequence
  Description of Artificial Sequence: Synthetic oligonucleotide
  Sense strand starting at position 810 of SEQ ID NO: 915861
uguuuaggaguuuaacucu

SEQ ID NO: 1111719 - RNA, 19 nt, Artificial Sequence
  Description of Artificial Sequence: Synthetic oligonucleotide
  Antisense strand to SEQ ID NO: 1111718
agaguuaaacuccuaaaca

SEQ ID NO: 1111720 - RNA, 19 nt, Artificial Sequence
  Description of Artificial Sequence: Synthetic oligonucleotide
  Sense strand starting at position 816 of SEQ ID NO: 915861
ggaguuuaacucugucuuu

SEQ ID NO: 1111721 - RNA, 19 nt, Artificial Sequence
  Description of Artificial Sequence: Synthetic oligonucleotide
  Antisense strand to SEQ ID NO: 1111720
aaagacagaguuaaacucc

SEQ ID NO: 1111722 - RNA, 19 nt, Artificial Sequence
  Description of Artificial Sequence: Synthetic oligonucleotide
  Sense strand starting at position 915 of SEQ ID NO: 915861
guguauccuuacgugaaau

SEQ ID NO: 1111723 - RNA, 19 nt, Artificial Sequence
  Description of Artificial Sequence: Synthetic oligonucleotide
  Antisense strand to SEQ ID NO: 1111722
auuucacguaaggauacac

SEQ ID NO: 1111724 - RNA, 19 nt, Artificial Sequence
  Description of Artificial Sequence: Synthetic oligonucleotide
  Sense strand starting at position 917 of SEQ ID NO: 915861
guauccuuacgugaaauag

SEQ ID NO: 1111725 - RNA, 19 nt, Artificial Sequence
  Description of Artificial Sequence: Synthetic oligonucleotide
  Antisense strand to SEQ ID NO: 1111724
cuauuucacguaaggauac

SEQ ID NO: 1111726 - RNA, 19 nt, Artificial Sequence
  Description of Artificial Sequence: Synthetic oligonucleotide
  Sense strand starting at position 963 of SEQ ID NO: 915861
ugagucaguuuccuaccua

SEQ ID NO: 1111727 - RNA, 19 nt, Artificial Sequence
  Description of Artificial Sequence: Synthetic oligonucleotide
  Antisense strand to SEQ ID NO: 1111726
uagguaggaaacugacuca

SEQ ID NO: 1111728 - RNA, 19 nt, Artificial Sequence
  Description of Artificial Sequence: Synthetic oligonucleotide
  Sense strand starting at position 1142 of SEQ ID NO: 915861
cccuauuagucuuuauguc

SEQ ID NO: 1111729 - RNA, 19 nt, Artificial Sequence
  Description of Artificial Sequence: Synthetic oligonucleotide
  Antisense strand to SEQ ID NO: 1111728
gacauaaagacuaauaggg

SEQ ID NO: 1111730 - RNA, 19 nt, Artificial Sequence
  Description of Artificial Sequence: Synthetic oligonucleotide
  Sense strand starting at position 1150 of SEQ ID NO: 915861
gucuuuaugucccuugaaa

SEQ ID NO: 1111731 - RNA, 19 nt, Artificial Sequence
  Description of Artificial Sequence: Synthetic oligonucleotide
  Antisense strand to SEQ ID NO: 1111730
uuucaagggacauaaagac

SEQ ID NO: 1111732 - RNA, 19 nt, Artificial Sequence
  Description of Artificial Sequence: Synthetic oligonucleotide
  Sense strand starting at position 1152 of SEQ ID NO: 915861
cuuuaugucccuugaaaga

SEQ ID NO: 1111733 - RNA, 19 nt, Artificial Sequence
  Description of Artificial Sequence: Synthetic oligonucleotide
  Antisense strand to SEQ ID NO: 1111732
ucuuucaagggacauaaag

SEQ ID NO: 1111734 - RNA, 19 nt, Artificial Sequence
  Description of Artificial Sequence: Synthetic oligonucleotide
  Sense strand starting at position 1641 of SEQ ID NO: 915861
ccaguuaaaguagguaauu

SEQ ID NO: 1111735 - RNA, 19 nt, Artificial Sequence
  Description of Artificial Sequence: Synthetic oligonucleotide
  Antisense strand to SEQ ID NO: 1111734
aauuaccuacuuuaacugg

SEQ ID NO: 1111736 - RNA, 19 nt, Artificial Sequence
  Description of Artificial Sequence: Synthetic oligonucleotide
  Sense strand starting at position 1642 of SEQ ID NO: 915861
caguuaaaguagguaauua

SEQ ID NO: 1111737 - RNA, 19 nt, Artificial Sequence
  Description of Artificial Sequence: Synthetic oligonucleotide
  Antisense strand to SEQ ID NO: 1111736
uaauuaccuacuuuaacug

SEQ ID NO: 1111738 - RNA, 19 nt, Artificial Sequence
  Description of Artificial Sequence: Synthetic oligonucleotide
  Sense strand starting at position 1653 of SEQ ID NO: 915861
gguaauuagacaugagcag

SEQ ID NO: 1111739 - RNA, 19 nt, Artificial Sequence
  Description of Artificial Sequence: Synthetic oligonucleotide
  Antisense strand to SEQ ID NO: 1111738
cugcucaugucuaauuacc

SEQ ID NO: 1111740 - RNA, 19 nt, Artificial Sequence
  Description of Artificial Sequence: Synthetic oligonucleotide
  Sense strand starting at position 1692 of SEQ ID NO: 915861
ucaggaaugccaggcucaa

SEQ ID NO: 1111741 - RNA, 19 nt, Artificial Sequence
  Description of Artificial Sequence: Synthetic oligonucleotide
  Antisense strand to SEQ ID NO: 1111740
uugagccuggcauuccuga

SEQ ID NO: 1111742 - RNA, 19 nt, Artificial Sequence
  Description of Artificial Sequence: Synthetic oligonucleotide
  Sense strand starting at position 2189 of SEQ ID NO: 915861
cccaaauugcuacgauuaa

SEQ ID NO: 1111743 - RNA, 19 nt, Artificial Sequence
  Description of Artificial Sequence: Synthetic oligonucleotide
  Antisense strand to SEQ ID NO: 1111742
uuaaucguagcaauuuggg

SEQ ID NO: 1111744 - RNA, 19 nt, Artificial Sequence
  Description of Artificial Sequence: Synthetic oligonucleotide
  Sense strand starting at position 2252 of SEQ ID NO: 915861
cucaaucgcuauuuguuua

SEQ ID NO: 1111745 - RNA, 19 nt, Artificial Sequence
  Description of Artificial Sequence: Synthetic oligonucleotide
  Antisense strand to SEQ ID NO: 1111744
uaaacaaauagcgauugag

SEQ ID NO: 1111746 - RNA, 19 nt, Artificial Sequence
  Description of Artificial Sequence: Synthetic oligonucleotide
  Sense strand starting at position 2320 of SEQ ID NO: 915861
ggcagauauguauaagcua

SEQ ID NO: 1111747 - RNA, 19 nt, Artificial Sequence
  Description of Artificial Sequence: Synthetic oligonucleotide
  Antisense strand to SEQ ID NO: 1111746
uagcuuauacauaucugcc

SEQ ID NO: 1111748 - RNA, 19 nt, Artificial Sequence
  Description of Artificial Sequence: Synthetic oligonucleotide
  Sense strand starting at position 2356 of SEQ ID NO: 915861
agaagacauugauaucuug

SEQ ID NO: 1111749 - RNA, 19 nt, Artificial Sequence
  Description of Artificial Sequence: Synthetic oligonucleotide
  Antisense strand to SEQ ID NO: 1111748
caagauaucaaugucuucu

SEQ ID NO: 1111750 - RNA, 19 nt, Artificial Sequence
  Description of Artificial Sequence: Synthetic oligonucleotide
  Sense strand starting at position 2359 of SEQ ID NO: 915861
agacauugauaucuuguaa

SEQ ID NO: 1111751 - RNA, 19 nt, Artificial Sequence
  Description of Artificial Sequence: Synthetic oligonucleotide
  Antisense strand to SEQ ID NO: 1111750
uuacaagauaucaaugucu

SEQ ID NO: 1111752 - RNA, 19 nt, Artificial Sequence
  Description of Artificial Sequence: Synthetic oligonucleotide
  Sense strand starting at position 2392 of SEQ ID NO: 915861
ucuugagaacucuguaugu

SEQ ID NO: 1111753 - RNA, 19 nt, Artificial Sequence
  Description of Artificial Sequence: Synthetic oligonucleotide
  Antisense strand to SEQ ID NO: 1111752
acauacagaguucucaaga

SEQ ID NO: 1111754 - RNA, 19 nt, Artificial Sequence
  Description of Artificial Sequence: Synthetic oligonucleotide
  Sense strand starting at position 2394 of SEQ ID NO: 915861
uugagaacucuguauguuu

SEQ ID NO: 1111755 - RNA, 19 nt, Artificial Sequence
  Description of Artificial Sequence: Synthetic oligonucleotide
  Antisense strand to SEQ ID NO: 1111754
aaacauacagaguucucaa

SEQ ID NO: 1111756 - RNA, 19 nt, Artificial Sequence
  Description of Artificial Sequence: Synthetic oligonucleotide
  Sense strand starting at position 2566 of SEQ ID NO: 915861
ccagcucuuuaggauauuu

SEQ ID NO: 1111757 - RNA, 19 nt, Artificial Sequence
  Description of Artificial Sequence: Synthetic oligonucleotide
  Antisense strand to SEQ ID NO: 1111756
aaauauccuaaagagcugg

SEQ ID NO: 1111758 - RNA, 19 nt, Artificial Sequence
  Description of Artificial Sequence: Synthetic oligonucleotide
  Sense strand starting at position 2586 of SEQ ID NO: 915861
ugcauauguguauaccaua

SEQ ID NO: 1111759 - RNA, 19 nt, Artificial Sequence
  Description of Artificial Sequence: Synthetic oligonucleotide
  Antisense strand to SEQ ID NO: 1111758
uaugguauacacauaugca

SEQ ID NO: 1111760 - RNA, 19 nt, Artificial Sequence
  Description of Artificial Sequence: Synthetic oligonucleotide
  Sense strand starting at position 2620 of SEQ ID NO: 915861
agggucuguguggaauaaa

SEQ ID NO: 1111761 - RNA, 19 nt, Artificial Sequence
  Description of Artificial Sequence: Synthetic oligonucleotide
  Antisense strand to SEQ ID NO: 1111760
uuuauuccacacagacccu

SEQ ID NO: 1111762 - RNA, 19 nt, Artificial Sequence
  Description of Artificial Sequence: Synthetic oligonucleotide
  Sense strand starting at position 2623 of SEQ ID NO: 915861
gucuguguggaauaaacua

SEQ ID NO: 1111763 - RNA, 19 nt, Artificial Sequence
  Description of Artificial Sequence: Synthetic oligonucleotide
  Antisense strand to SEQ ID NO: 1111762
uaguuuauuccacacagac

SEQ ID NO: 1111764 - RNA, 19 nt, Artificial Sequence
  Description of Artificial Sequence: Synthetic oligonucleotide
  Sense strand starting at position 2767 of SEQ ID NO: 915861
ucaguaacacugugcuaag

SEQ ID NO: 1111765 - RNA, 19 nt, Artificial Sequence
  Description of Artificial Sequence: Synthetic oligonucleotide
  Antisense strand to SEQ ID NO: 1111764
cuuagcacaguguuacuga

SEQ ID NO: 1111766 - RNA, 19 nt, Artificial Sequence
  Description of Artificial Sequence: Synthetic oligonucleotide
  Sense strand starting at position 2879 of SEQ ID NO: 915861
cuaaaugcggcucauuaga

SEQ ID NO: 1111767 - RNA, 19 nt, Artificial Sequence
  Description of Artificial Sequence: Synthetic oligonucleotide
  Antisense strand to SEQ ID NO: 1111766
ucuaaugagccgcauuuag

SEQ ID NO: 1111768 - RNA, 19 nt, Artificial Sequence
  Description of Artificial Sequence: Synthetic oligonucleotide
  Sense strand starting at position 2881 of SEQ ID NO: 915861
aaaugcggcucauuagaua

SEQ ID NO: 1111769 - RNA, 19 nt, Artificial Sequence
  Description of Artificial Sequence: Synthetic oligonucleotide
  Antisense strand to SEQ ID NO: 1111768
uaucuaaugagccgcauuu

SEQ ID NO: 1111770 - RNA, 19 nt, Artificial Sequence
  Description of Artificial Sequence: Synthetic oligonucleotide
  Sense strand starting at position 2919 of SEQ ID NO: 915861
gguguuugccaacacuuaa

SEQ ID NO: 1111771 - RNA, 19 nt, Artificial Sequence
  Description of Artificial Sequence: Synthetic oligonucleotide
  Antisense strand to SEQ ID NO: 1111770
uuaaguguuggcaaacacc

SEQ ID NO: 1111772 - RNA, 19 nt, Artificial Sequence
  Description of Artificial Sequence: Synthetic oligonucleotide
  Sense strand starting at position 2941 of SEQ ID NO: 915861
uuaggauauuucugccaac

SEQ ID NO: 1111773 - RNA, 19 nt, Artificial Sequence
  Description of Artificial Sequence: Synthetic oligonucleotide
  Antisense strand to SEQ ID NO: 1111772
guuggcagaaauauccuaa

SEQ ID NO: 1111774 - RNA, 19 nt, Artificial Sequence
  Description of Artificial Sequence: Synthetic oligonucleotide
  Sense strand starting at position 2944 of SEQ ID NO: 915861
ggauauuucugccaacaaa

SEQ ID NO: 1111775 - RNA, 19 nt, Artificial Sequence
  Description of Artificial Sequence: Synthetic oligonucleotide
  Antisense strand to SEQ ID NO: 1111774
uuuguuggcagaaauaucc

SEQ ID NO: 1111776 - RNA, 19 nt, Artificial Sequence
  Description of Artificial Sequence: Synthetic oligonucleotide
  Sense strand starting at position 3009 of SEQ ID NO: 915861
augauuuauuccuagaugg

SEQ ID NO: 1111777 - RNA, 19 nt, Artificial Sequence
  Description of Artificial Sequence: Synthetic oligonucleotide
  Antisense strand to SEQ ID NO: 1111776
ccaucuaggaauaaaucau

SEQ ID NO: 1111778 - RNA, 19 nt, Artificial Sequence
  Description of Artificial Sequence: Synthetic oligonucleotide
  Sense strand starting at position 3027 of SEQ ID NO: 915861
guaacaacugacuggauau

SEQ ID NO: 1111779 - RNA, 19 nt, Artificial Sequence
  Description of Artificial Sequence: Synthetic oligonucleotide
  Antisense strand to SEQ ID NO: 1111778
auauccagucaguuguuac

SEQ ID NO: 1111780 - RNA, 19 nt, Artificial Sequence
  Description of Artificial Sequence: Synthetic oligonucleotide
  Sense strand starting at position 3037 of SEQ ID NO: 915861
acuggauaugcacagcaua

SEQ ID NO: 1111781 - RNA, 19 nt, Artificial Sequence
  Description of Artificial Sequence: Synthetic oligonucleotide
  Antisense strand to SEQ ID NO: 1111780
uaugcugugcauauccagu

SEQ ID NO: 1111782 - RNA, 19 nt, Artificial Sequence
  Description of Artificial Sequence: Synthetic oligonucleotide
  Sense strand starting at position 3710 of SEQ ID NO: 915861
caucaaucguuauuggguu

SEQ ID NO: 1111783 - RNA, 19 nt, Artificial Sequence
  Description of Artificial Sequence: Synthetic oligonucleotide
  Antisense strand to SEQ ID NO: 1111782
aacccaauaacgauugaug

SEQ ID NO: 1111784 - RNA, 19 nt, Artificial Sequence
  Description of Artificial Sequence: Synthetic oligonucleotide
  Sense strand starting at position 3954 of SEQ ID NO: 915861
ucuguaaguccugggcuca

SEQ ID NO: 1111785 - RNA, 19 nt, Artificial Sequence
  Description of Artificial Sequence: Synthetic oligonucleotide
  Antisense strand to SEQ ID NO: 1111784
ugagcccaggacuuacaga

SEQ ID NO: 1111786 - RNA, 19 nt, Artificial Sequence
  Description of Artificial Sequence: Synthetic oligonucleotide
  Sense strand starting at position 443 of SEQ ID NO: 915862
gaagguauaugccauaugu

SEQ ID NO: 1111787 - RNA, 19 nt, Artificial Sequence
  Description of Artificial Sequence: Synthetic oligonucleotide
  Antisense strand to SEQ ID NO: 1111786
acauauggcauauaccuuc

SEQ ID NO: 1111788 - RNA, 19 nt, Artificial Sequence
  Description of Artificial Sequence: Synthetic oligonucleotide
  Sense strand starting at position 445 of SEQ ID NO: 915862
agguauaugccauauguga

SEQ ID NO: 1111789 - RNA, 19 nt, Artificial Sequence
  Description of Artificial Sequence: Synthetic oligonucleotide
  Antisense strand to SEQ ID NO: 1111788
ucacauauggcauauaccu

SEQ ID NO: 1111790 - RNA, 19 nt, Artificial Sequence
  Description of Artificial Sequence: Synthetic oligonucleotide
  Sense strand starting at position 453 of SEQ ID NO: 915862
gccauaugugaacacacua

SEQ ID NO: 1111791 - RNA, 19 nt, Artificial Sequence
  Description of Artificial Sequence: Synthetic oligonucleotide
  Antisense strand to SEQ ID NO: 1111790
uaguguguucacauauggc

SEQ ID NO: 1111792 - RNA, 19 nt, Artificial Sequence
  Description of Artificial Sequence: Synthetic oligonucleotide
  Sense strand starting at position 502 of SEQ ID NO: 915862
acuacaugcuaguaacagu

SEQ ID NO: 1111793 - RNA, 19 nt, Artificial Sequence
  Description of Artificial Sequence: Synthetic oligonucleotide
  Antisense strand to SEQ ID NO: 1111792
acuguuacuagcauguagu

SEQ ID NO: 1111794 - RNA, 19 nt, Artificial Sequence
  Description of Artificial Sequence: Synthetic oligonucleotide
  Sense strand starting at position 512 of SEQ ID NO: 915862
aguaacaguuucuacuauu

SEQ ID NO: 1111795 - RNA, 19 nt, Artificial Sequence
  Description of Artificial Sequence: Synthetic oligonucleotide
  Antisense strand to SEQ ID NO: 1111794
aauaguagaaacuguuacu

SEQ ID NO: 1111796 - RNA, 19 nt, Artificial Sequence
  Description of Artificial Sequence: Synthetic oligonucleotide
  Sense strand starting at position 1349 of SEQ ID NO: 915862
augacuuaucccugugucu

SEQ ID NO: 1111797 - RNA, 19 nt, Artificial Sequence
  Description of Artificial Sequence: Synthetic oligonucleotide
  Antisense strand to SEQ ID NO: 1111796
agacacagggauaagucau

SEQ ID NO: 1111798 - RNA, 19 nt, Artificial Sequence
  Description of Artificial Sequence: Synthetic oligonucleotide
  Sense strand starting at position 1365 of SEQ ID NO: 915862
ucuccaacgcucuauugua

SEQ ID NO: 1111799 - RNA, 19 nt, Artificial Sequence
  Description of Artificial Sequence: Synthetic oligonucleotide
  Antisense strand to SEQ ID NO: 1111798
uacaauagagcguuggaga

SEQ ID NO: 1111800 - RNA, 19 nt, Artificial Sequence
  Description of Artificial Sequence: Synthetic oligonucleotide
  Sense strand starting at position 1514 of SEQ ID NO: 915862
guguuagcuaccgguagua

SEQ ID NO: 1111801 - RNA, 19 nt, Artificial Sequence
  Description of Artificial Sequence: Synthetic oligonucleotide
  Antisense strand to SEQ ID NO: 1111800
uacuaccgguagcuaacac

SEQ ID NO: 1111802 - RNA, 19 nt, Artificial Sequence
  Description of Artificial Sequence: Synthetic oligonucleotide
  Sense strand starting at position 1526 of SEQ ID NO: 915862
gguaguagcuaucuuuauu

SEQ ID NO: 1111803 - RNA, 19 nt, Artificial Sequence
  Description of Artificial Sequence: Synthetic oligonucleotide
  Antisense strand to SEQ ID NO: 1111802
aauaaagauagcuacuacc

SEQ ID NO: 1111804 - RNA, 19 nt, Artificial Sequence
  Description of Artificial Sequence: Synthetic oligonucleotide
  Sense strand starting at position 1565 of SEQ ID NO: 915862
gggagaguaucugauggac

SEQ ID NO: 1111805 - RNA, 19 nt, Artificial Sequence
  Description of Artificial Sequence: Synthetic oligonucleotide
  Antisense strand to SEQ ID NO: 1111804
guccaucagauacucuccc

SEQ ID NO: 1111806 - RNA, 19 nt, Artificial Sequence
  Description of Artificial Sequence: Synthetic oligonucleotide
  Sense strand starting at position 1567 of SEQ ID NO: 915862
gagaguaucugauggacac

SEQ ID NO: 1111807 - RNA, 19 nt, Artificial Sequence
  Description of Artificial Sequence: Synthetic oligonucleotide
  Antisense strand to SEQ ID NO: 1111806
guguccaucagauacucuc

SEQ ID NO: 1111808 - RNA, 19 nt, Artificial Sequence
  Description of Artificial Sequence: Synthetic oligonucleotide
  Sense strand starting at position 1742 of SEQ ID NO: 915862
cggcucaucucguucagca

SEQ ID NO: 1111809 - RNA, 19 nt, Artificial Sequence
  Description of Artificial Sequence: Synthetic oligonucleotide
  Antisense strand to SEQ ID NO: 1111808
ugcugaacgagaugagccg

SEQ ID NO: 1111810 - RNA, 19 nt, Artificial Sequence
  Description of Artificial Sequence: Synthetic oligonucleotide
  Sense strand starting at position 1832 of SEQ ID NO: 915862
uuggucaucaugggauuga

SEQ ID NO: 1111811 - RNA, 19 nt, Artificial Sequence
  Description of Artificial Sequence: Synthetic oligonucleotide
  Antisense strand to SEQ ID NO: 1111810
ucaaucccaugaugaccaa

SEQ ID NO: 1111812 - RNA, 19 nt, Artificial Sequence
  Description of Artificial Sequence: Synthetic oligonucleotide
  Sense strand starting at position 1833 of SEQ ID NO: 915862
uggucaucaugggauugaa

SEQ ID NO: 1111813 - RNA, 19 nt, Artificial Sequence
  Description of Artificial Sequence: Synthetic oligonucleotide
  Antisense strand to SEQ ID NO: 1111812
uucaaucccaugaugacca

SEQ ID NO: 1111814 - RNA, 19 nt, Artificial Sequence
  Description of Artificial Sequence: Synthetic oligonucleotide
  Sense strand starting at position 1836 of SEQ ID NO: 915862
ucaucaugggauugaagua

SEQ ID NO: 1111815 - RNA, 19 nt, Artificial Sequence
  Description of Artificial Sequence: Synthetic oligonucleotide
  Antisense strand to SEQ ID NO: 1111814
uacuucaaucccaugauga

SEQ ID NO: 1111816 - RNA, 19 nt, Artificial Sequence
  Description of Artificial Sequence: Synthetic oligonucleotide
  Sense strand starting at position 2006 of SEQ ID NO: 915862
cgcggcauuuguuaaccaa

SEQ ID NO: 1111817 - RNA, 19 nt, Artificial Sequence
  Description of Artificial Sequence: Synthetic oligonucleotide
  Antisense strand to SEQ ID NO: 1111816
uugguuaacaaaugccgcg

SEQ ID NO: 1111818 - RNA, 19 nt, Artificial Sequence
  Description of Artificial Sequence: Synthetic oligonucleotide
  Sense strand starting at position 2024 of SEQ ID NO: 915862
aucagagcagucugucaga

SEQ ID NO: 1111819 - RNA, 19 nt, Artificial Sequence
  Description of Artificial Sequence: Synthetic oligonucleotide
  Antisense strand to SEQ ID NO: 1111818
ucugacagacugcucugau

SEQ ID NO: 1111820 - RNA, 19 nt, Artificial Sequence
  Description of Artificial Sequence: Synthetic oligonucleotide
  Sense strand starting at position 2285 of SEQ ID NO: 915862
uguuguuugagacgauauc

SEQ ID NO: 1111821 - RNA, 19 nt, Artificial Sequence
  Description of Artificial Sequence: Synthetic oligonucleotide
  Antisense strand to SEQ ID NO: 1111820
gauaucgucucaaacaaca

SEQ ID NO: 1111822 - RNA, 19 nt, Artificial Sequence
  Description of Artificial Sequence: Synthetic oligonucleotide
  Sense strand starting at position 2286 of SEQ ID NO: 915862
guuguuugagacgauaucu

SEQ ID NO: 1111823 - RNA, 19 nt, Artificial Sequence
  Description of Artificial Sequence: Synthetic oligonucleotide
  Antisense strand to SEQ ID NO: 1111822
agauaucgucucaaacaac

SEQ ID NO: 1111824 - RNA, 19 nt, Artificial Sequence
  Description of Artificial Sequence: Synthetic oligonucleotide
  Sense strand starting at position 2295 of SEQ ID NO: 915862
gacgauaucucgcuauguu

SEQ ID NO: 1111825 - RNA, 19 nt, Artificial Sequence
  Description of Artificial Sequence: Synthetic oligonucleotide
  Antisense strand to SEQ ID NO: 1111824
aacauagcgagauaucguc

SEQ ID NO: 1111826 - RNA, 19 nt, Artificial Sequence
  Description of Artificial Sequence: Synthetic oligonucleotide
  Sense strand starting at position 2296 of SEQ ID NO: 915862
acgauaucucgcuauguua

SEQ ID NO: 1111827 - RNA, 19 nt, Artificial Sequence
  Description of Artificial Sequence: Synthetic oligonucleotide
  Antisense strand to SEQ ID NO: 1111826
uaacauagcgagauaucgu

SEQ ID NO: 1111828 - RNA, 19 nt, Artificial Sequence
  Description of Artificial Sequence: Synthetic oligonucleotide
  Sense strand starting at position 2327 of SEQ ID NO: 915862
ggcagugguuauucguaga

SEQ ID NO: 1111829 - RNA, 19 nt, Artificial Sequence
  Description of Artificial Sequence: Synthetic oligonucleotide
  Antisense strand to SEQ ID NO: 1111828
ucuacgaauaaccacugcc

SEQ ID NO: 1111830 - RNA, 19 nt, Artificial Sequence
  Description of Artificial Sequence: Synthetic oligonucleotide
  Sense strand starting at position 2551 of SEQ ID NO: 915862
cucaaauguuuaggaguuu

SEQ ID NO: 1111831 - RNA, 19 nt, Artificial Sequence
  Description of Artificial Sequence: Synthetic oligonucleotide
  Antisense strand to SEQ ID NO: 1111830
aaacuccuaaacauuugag

SEQ ID NO: 1111832 - RNA, 19 nt, Artificial Sequence
  Description of Artificial Sequence: Synthetic oligonucleotide
  Sense strand starting at position 2552 of SEQ ID NO: 915862
ucaaauguuuaggaguuua

SEQ ID NO: 1111833 - RNA, 19 nt, Artificial Sequence
  Description of Artificial Sequence: Synthetic oligonucleotide
  Antisense strand to SEQ ID NO: 1111832
uaaacuccuaaacauuuga

SEQ ID NO: 1111834 - RNA, 19 nt, Artificial Sequence
  Description of Artificial Sequence: Synthetic oligonucleotide
  Sense strand starting at position 2557 of SEQ ID NO: 915862
uguuuaggaguuuaacucu

SEQ ID NO: 1111835 - RNA, 19 nt, Artificial Sequence
  Description of Artificial Sequence: Synthetic oligonucleotide
  Antisense strand to SEQ ID NO: 1111834
agaguuaaacuccuaaaca

SEQ ID NO: 1111836 - RNA, 19 nt, Artificial Sequence
  Description of Artificial Sequence: Synthetic oligonucleotide
  Sense strand starting at position 2563 of SEQ ID NO: 915862
ggaguuuaacucugucuuu

SEQ ID NO: 1111837 - RNA, 19 nt, Artificial Sequence
  Description of Artificial Sequence: Synthetic oligonucleotide
  Antisense strand to SEQ ID NO: 1111836
aaagacagaguuaaacucc

SEQ ID NO: 1111838 - RNA, 19 nt, Artificial Sequence
  Description of Artificial Sequence: Synthetic oligonucleotide
  Sense strand starting at position 2662 of SEQ ID NO: 915862
guguauccuuacgugaaau

SEQ ID NO: 1111839 - RNA, 19 nt, Artificial Sequence
  Description of Artificial Sequence: Synthetic oligonucleotide
  Antisense strand to SEQ ID NO: 1111838
auuucacguaaggauacac

SEQ ID NO: 1111840 - RNA, 19 nt, Artificial Sequence
  Description of Artificial Sequence: Synthetic oligonucleotide
  Sense strand starting at position 2664 of SEQ ID NO: 915862
guauccuuacgugaaauag

SEQ ID NO: 1111841 - RNA, 19 nt, Artificial Sequence
  Description of Artificial Sequence: Synthetic oligonucleotide
  Antisense strand to SEQ ID NO: 1111840
cuauuucacguaaggauac

SEQ ID NO: 1111842 - RNA, 19 nt, Artificial Sequence
  Description of Artificial Sequence: Synthetic oligonucleotide
  Sense strand starting at position 2710 of SEQ ID NO: 915862
ugagucaguuuccuaccua

SEQ ID NO: 1111843 - RNA, 19 nt, Artificial Sequence
  Description of Artificial Sequence: Synthetic oligonucleotide
  Antisense strand to SEQ ID NO: 1111842
uagguaggaaacugacuca

SEQ ID NO: 1111844 - RNA, 19 nt, Artificial Sequence
  Description of Artificial Sequence: Synthetic oligonucleotide
  Sense strand starting at position 2883 of SEQ ID NO: 915862
ugguaucccuauuagucuu

SEQ ID NO: 1111845 - RNA, 19 nt, Artificial Sequence
  Description of Artificial Sequence: Synthetic oligonucleotide
  Antisense strand to SEQ ID NO: 1111844
aagacuaauagggauacca

SEQ ID NO: 1111846 - RNA, 19 nt, Artificial Sequence
  Description of Artificial Sequence: Synthetic oligonucleotide
  Sense strand starting at position 2889 of SEQ ID NO: 915862
cccuauuagucuuuauguc

SEQ ID NO: 1111847 - RNA, 19 nt, Artificial Sequence
  Description of Artificial Sequence: Synthetic oligonucleotide
  Antisense strand to SEQ ID NO: 1111846
gacauaaagacuaauaggg

SEQ ID NO: 1111848 - RNA, 19 nt, Artificial Sequence
  Description of Artificial Sequence: Synthetic oligonucleotide
  Sense strand starting at position 2897 of SEQ ID NO: 915862
gucuuuaugucccuugaaa

SEQ ID NO: 1111849 - RNA, 19 nt, Artificial Sequence
  Description of Artificial Sequence: Synthetic oligonucleotide
  Antisense strand to SEQ ID NO: 1111848
uuucaagggacauaaagac

SEQ ID NO: 1111850 - RNA, 19 nt, Artificial Sequence
  Description of Artificial Sequence: Synthetic oligonucleotide
  Sense strand starting at position 2899 of SEQ ID NO: 915862
cuuuaugucccuugaaaga

SEQ ID NO: 1111851 - RNA, 19 nt, Artificial Sequence
  Description of Artificial Sequence: Synthetic oligonucleotide
  Antisense strand to SEQ ID NO: 1111850
ucuuucaagggacauaaag

SEQ ID NO: 1111852 - RNA, 19 nt, Artificial Sequence
  Description of Artificial Sequence: Synthetic oligonucleotide
  Sense strand starting at position 3388 of SEQ ID NO: 915862
ccaguuaaaguagguaauu

SEQ ID NO: 1111853 - RNA, 19 nt, Artificial Sequence
  Description of Artificial Sequence: Synthetic oligonucleotide
  Antisense strand to SEQ ID NO: 1111852
aauuaccuacuuuaacugg

SEQ ID NO: 1111854 - RNA, 19 nt, Artificial Sequence
  Description of Artificial Sequence: Synthetic oligonucleotide
  Sense strand starting at position 3389 of SEQ ID NO: 915862
caguuaaaguagguaauua

SEQ ID NO: 1111855 - RNA, 19 nt, Artificial Sequence
  Description of Artificial Sequence: Synthetic oligonucleotide
  Antisense strand to SEQ ID NO: 1111854
uaauuaccuacuuuaacug

SEQ ID NO: 1111856 - RNA, 19 nt, Artificial Sequence
  Description of Artificial Sequence: Synthetic oligonucleotide
  Sense strand starting at position 3400 of SEQ ID NO: 915862
gguaauuagacaugagcag

SEQ ID NO: 1111857 - RNA, 19 nt, Artificial Sequence
  Description of Artificial Sequence: Synthetic oligonucleotide
  Antisense strand to SEQ ID NO: 1111856
cugcucaugucuaauuacc

SEQ ID NO: 1111858 - RNA, 19 nt, Artificial Sequence
  Description of Artificial Sequence: Synthetic oligonucleotide
  Sense strand starting at position 3439 of SEQ ID NO: 915862
ucaggaaugccaggcucaa

SEQ ID NO: 1111859 - RNA, 19 nt, Artificial Sequence
  Description of Artificial Sequence: Synthetic oligonucleotide
  Antisense strand to SEQ ID NO: 1111858
uugagccuggcauuccuga

SEQ ID NO: 1111860 - RNA, 19 nt, Artificial Sequence
  Description of Artificial Sequence: Synthetic oligonucleotide
  Sense strand starting at position 3575 of SEQ ID NO: 915862
ggaguacagucgcucgauu

SEQ ID NO: 1111861 - RNA, 19 nt, Artificial Sequence
  Description of Artificial Sequence: Synthetic oligonucleotide
  Antisense strand to SEQ ID NO: 1111860
aaucgagcgacuguacucc

SEQ ID NO: 1111862 - RNA, 19 nt, Artificial Sequence
  Description of Artificial Sequence: Synthetic oligonucleotide
  Sense strand starting at position 3936 of SEQ ID NO: 915862
cccaaauugcuacgauuaa

SEQ ID NO: 1111863 - RNA, 19 nt, Artificial Sequence
  Description of Artificial Sequence: Synthetic oligonucleotide
  Antisense strand to SEQ ID NO: 1111862
uuaaucguagcaauuuggg

SEQ ID NO: 1111864 - RNA, 19 nt, Artificial Sequence
  Description of Artificial Sequence: Synthetic oligonucleotide
  Sense strand starting at position 3937 of SEQ ID NO: 915862
ccaaauugcuacgauuaaa

SEQ ID NO: 1111865 - RNA, 19 nt, Artificial Sequence
  Description of Artificial Sequence: Synthetic oligonucleotide
  Antisense strand to SEQ ID NO: 1111864
uuuaaucguagcaauuugg

SEQ ID NO: 1111866 - RNA, 19 nt, Artificial Sequence
  Description of Artificial Sequence: Synthetic oligonucleotide
  Sense strand starting at position 1268 of SEQ ID NO: 915863
ucccaaagggcucguauua

SEQ ID NO: 1111867 - RNA, 19 nt, Artificial Sequence
  Description of Artificial Sequence: Synthetic oligonucleotide
  Antisense strand to SEQ ID NO: 1111866
uaauacgagcccuuuggga

SEQ ID NO: 1111868 - RNA, 19 nt, Artificial Sequence
  Description of Artificial Sequence: Synthetic oligonucleotide
  Sense strand starting at position 1789 of SEQ ID NO: 915863
caacucacggguuguuauu

SEQ ID NO: 1111869 - RNA, 19 nt, Artificial Sequence
  Description of Artificial Sequence: Synthetic oligonucleotide
  Antisense strand to SEQ ID NO: 1111868
aauaacaacccgugaguug

SEQ ID NO: 1111870 - RNA, 19 nt, Artificial Sequence
  Description of Artificial Sequence: Synthetic oligonucleotide
  Sense strand starting at position 1798 of SEQ ID NO: 915863
gguuguuauuacucauugu

SEQ ID NO: 1111871 - RNA, 19 nt, Artificial Sequence
  Description of Artificial Sequence: Synthetic oligonucleotide
  Antisense strand to SEQ ID NO: 1111870
acaaugaguaauaacaacc

SEQ ID NO: 1111872 - RNA, 19 nt, Artificial Sequence
  Description of Artificial Sequence: Synthetic oligonucleotide
  Sense strand starting at position 1801 of SEQ ID NO: 915863
uguuauuacucauuguaag

SEQ ID NO: 1111873 - RNA, 19 nt, Artificial Sequence
  Description of Artificial Sequence: Synthetic oligonucleotide
  Antisense strand to SEQ ID NO: 1111872
cuuacaaugaguaauaaca

SEQ ID NO: 1111874 - RNA, 19 nt, Artificial Sequence
  Description of Artificial Sequence: Synthetic oligonucleotide
  Sense strand starting at position 1802 of SEQ ID NO: 915863
guuauuacucauuguaagu

SEQ ID NO: 1111875 - RNA, 19 nt, Artificial Sequence
  Description of Artificial Sequence: Synthetic oligonucleotide
  Antisense strand to SEQ ID NO: 1111874
acuuacaaugaguaauaac

SEQ ID NO: 1111876 - RNA, 19 nt, Artificial Sequence
  Description of Artificial Sequence: Synthetic oligonucleotide
  Sense strand starting at position 1951 of SEQ ID NO: 915863
agaggauccuuagggaaga

SEQ ID NO: 1111877 - RNA, 19 nt, Artificial Sequence
  Description of Artificial Sequence: Synthetic oligonucleotide
  Antisense strand to SEQ ID NO: 1111876
ucuucccuaaggauccucu

SEQ ID NO: 1111878 - RNA, 19 nt, Artificial Sequence
  Description of Artificial Sequence: Synthetic oligonucleotide
  Sense strand starting at position 2039 of SEQ ID NO: 915863
uacugaagugcccgaauaa

SEQ ID NO: 1111879 - RNA, 19 nt, Artificial Sequence
  Description of Artificial Sequence: Synthetic oligonucleotide
  Antisense strand to SEQ ID NO: 1111878
uuauucgggcacuucagua

SEQ ID NO: 1111880 - RNA, 19 nt, Artificial Sequence
  Description of Artificial Sequence: Synthetic oligonucleotide
  Sense strand starting at position 2040 of SEQ ID NO: 915863
acugaagugcccgaauaaa

SEQ ID NO: 1111881 - RNA, 19 nt, Artificial Sequence
  Description of Artificial Sequence: Synthetic oligonucleotide
  Antisense strand to SEQ ID NO: 1111880
uuuauucgggcacuucagu

SEQ ID NO: 1111882 - RNA, 19 nt, Artificial Sequence
  Description of Artificial Sequence: Synthetic oligonucleotide
  Sense strand starting at position 2098 of SEQ ID NO: 915863
ggugaaaugaguuguuauu

SEQ ID NO: 1111883 - RNA, 19 nt, Artificial Sequence
  Description of Artificial Sequence: Synthetic oligonucleotide
  Antisense strand to SEQ ID NO: 1111882
aauaacaacucauuucacc

SEQ ID NO: 1111884 - RNA, 19 nt, Artificial Sequence
  Description of Artificial Sequence: Synthetic oligonucleotide
  Sense strand starting at position 2189 of SEQ ID NO: 915863
uuauaagacuacucgguca

SEQ ID NO: 1111885 - RNA, 19 nt, Artificial Sequence
  Description of Artificial Sequence: Synthetic oligonucleotide
  Antisense strand to SEQ ID NO: 1111884
ugaccgaguagucuuauaa

SEQ ID NO: 1111886 - RNA, 19 nt, Artificial Sequence
  Description of Artificial Sequence: Synthetic oligonucleotide
  Sense strand starting at position 2191 of SEQ ID NO: 915863
auaagacuacucggucaau

SEQ ID NO: 1111887 - RNA, 19 nt, Artificial Sequence
  Description of Artificial Sequence: Synthetic oligonucleotide
  Antisense strand to SEQ ID NO: 1111886
auugaccgaguagucuuau

SEQ ID NO: 1111888 - RNA, 19 nt, Artificial Sequence
  Description of Artificial Sequence: Synthetic oligonucleotide
  Sense strand starting at position 2192 of SEQ ID NO: 915863
uaagacuacucggucaauu

SEQ ID NO: 1111889 - RNA, 19 nt, Artificial Sequence
  Description of Artificial Sequence: Synthetic oligonucleotide
  Antisense strand to SEQ ID NO: 1111888
aauugaccgaguagucuua

SEQ ID NO: 1111890 - RNA, 19 nt, Artificial Sequence
  Description of Artificial Sequence: Synthetic oligonucleotide
  Sense strand starting at position 2210 of SEQ ID NO: 915863
uugaaugagucugagagga

SEQ ID NO: 1111891 - RNA, 19 nt, Artificial Sequence
  Description of Artificial Sequence: Synthetic oligonucleotide
  Antisense strand to SEQ ID NO: 1111890
uccucucagacucauucaa

SEQ ID NO: 1111892 - RNA, 19 nt, Artificial Sequence
  Description of Artificial Sequence: Synthetic oligonucleotide
  Sense strand starting at position 2212 of SEQ ID NO: 915863
gaaugagucugagaggaau

SEQ ID NO: 1111893 - RNA, 19 nt, Artificial Sequence
  Description of Artificial Sequence: Synthetic oligonucleotide
  Antisense strand to SEQ ID NO: 1111892
auuccucucagacucauuc

SEQ ID NO: 1111894 - RNA, 19 nt, Artificial Sequence
  Description of Artificial Sequence: Synthetic oligonucleotide
  Sense strand starting at position 2229 of SEQ ID NO: 915863
auuugugccucucagaaau

SEQ ID NO: 1111895 - RNA, 19 nt, Artificial Sequence
  Description of Artificial Sequence: Synthetic oligonucleotide
  Antisense strand to SEQ ID NO: 1111894
auuucugagaggcacaaau

SEQ ID NO: 1111896 - RNA, 19 nt, Artificial Sequence
  Description of Artificial Sequence: Synthetic oligonucleotide
  Sense strand starting at position 2485 of SEQ ID NO: 915863
uucccuagauccguggaaa

SEQ ID NO: 1111897 - RNA, 19 nt, Artificial Sequence
  Description of Artificial Sequence: Synthetic oligonucleotide
  Antisense strand to SEQ ID NO: 1111896
uuuccacggaucuagggaa

SEQ ID NO: 1111898 - RNA, 19 nt, Artificial Sequence
  Description of Artificial Sequence: Synthetic oligonucleotide
  Sense strand starting at position 2486 of SEQ ID NO: 915863
ucccuagauccguggaaau

SEQ ID NO: 1111899 - RNA, 19 nt, Artificial Sequence
  Description of Artificial Sequence: Synthetic oligonucleotide
  Antisense strand to SEQ ID NO: 1111898
auuuccacggaucuaggga

SEQ ID NO: 1111900 - RNA, 19 nt, Artificial Sequence
  Description of Artificial Sequence: Synthetic oligonucleotide
  Sense strand starting at position 2548 of SEQ ID NO: 915863
augugucuggcacacuuaa

SEQ ID NO: 1111901 - RNA, 19 nt, Artificial Sequence
  Description of Artificial Sequence: Synthetic oligonucleotide
  Antisense strand to SEQ ID NO: 1111900
uuaagugugccagacacau

SEQ ID NO: 1111902 - RNA, 19 nt, Artificial Sequence
  Description of Artificial Sequence: Synthetic oligonucleotide
  Sense strand starting at position 2648 of SEQ ID NO: 915863
ggaagaaacugccugcuua

SEQ ID NO: 1111903 - RNA, 19 nt, Artificial Sequence
  Description of Artificial Sequence: Synthetic oligonucleotide
  Antisense strand to SEQ ID NO: 1111902
uaagcaggcaguuucuucc

SEQ ID NO: 1111904 - RNA, 19 nt, Artificial Sequence
  Description of Artificial Sequence: Synthetic oligonucleotide
  Sense strand starting at position 2678 of SEQ ID NO: 915863
cagguuguuaaaugguuga

SEQ ID NO: 1111905 - RNA, 19 nt, Artificial Sequence
  Description of Artificial Sequence: Synthetic oligonucleotide
  Antisense strand to SEQ ID NO: 1111904
ucaaccauuuaacaaccug

SEQ ID NO: 1111906 - RNA, 19 nt, Artificial Sequence
  Description of Artificial Sequence: Synthetic oligonucleotide
  Sense strand starting at position 2681 of SEQ ID NO: 915863
guuguuaaaugguugacuu

SEQ ID NO: 1111907 - RNA, 19 nt, Artificial Sequence
  Description of Artificial Sequence: Synthetic oligonucleotide
  Antisense strand to SEQ ID NO: 1111906
aagucaaccauuuaacaac

SEQ ID NO: 1111908 - RNA, 19 nt, Artificial Sequence
  Description of Artificial Sequence: Synthetic oligonucleotide
  Sense strand starting at position 2685 of SEQ ID NO: 915863
uuaaaugguugacuuggaa

SEQ ID NO: 1111909 - RNA, 19 nt, Artificial Sequence
  Description of Artificial Sequence: Synthetic oligonucleotide
  Antisense strand to SEQ ID NO: 1111908
uuccaagucaaccauuuaa

SEQ ID NO: 1111910 - RNA, 19 nt, Artificial Sequence
  Description of Artificial Sequence: Synthetic oligonucleotide
  Sense strand starting at position 2688 of SEQ ID NO: 915863
aaugguugacuuggaauca

SEQ ID NO: 1111911 - RNA, 19 nt, Artificial Sequence
  Description of Artificial Sequence: Synthetic oligonucleotide
  Antisense strand to SEQ ID NO: 1111910
ugauuccaagucaaccauu

SEQ ID NO: 1111912 - RNA, 19 nt, Artificial Sequence
  Description of Artificial Sequence: Synthetic oligonucleotide
  Sense strand starting at position 2703 of SEQ ID NO: 915863
aucagaucgacugguuaau

SEQ ID NO: 1111913 - RNA, 19 nt, Artificial Sequence
  Description of Artificial Sequence: Synthetic oligonucleotide
  Antisense strand to SEQ ID NO: 1111912
auuaaccagucgaucugau

SEQ ID NO: 1111914 - RNA, 19 nt, Artificial Sequence
  Description of Artificial Sequence: Synthetic oligonucleotide
  Sense strand starting at position 2705 of SEQ ID NO: 915863
cagaucgacugguuaauua

SEQ ID NO: 1111915 - RNA, 19 nt, Artificial Sequence
  Description of Artificial Sequence: Synthetic oligonucleotide
  Antisense strand to SEQ ID NO: 1111914
uaauuaaccagucgaucug

SEQ ID NO: 1111916 - RNA, 19 nt, Artificial Sequence
  Description of Artificial Sequence: Synthetic oligonucleotide
  Sense strand starting at position 2713 of SEQ ID NO: 915863
cugguuaauuauguuggau

SEQ ID NO: 1111917 - RNA, 19 nt, Artificial Sequence
  Description of Artificial Sequence: Synthetic oligonucleotide
  Antisense strand to SEQ ID NO: 1111916
auccaacauaauuaaccag

SEQ ID NO: 1111918 - RNA, 19 nt, Artificial Sequence
  Description of Artificial Sequence: Synthetic oligonucleotide
  Sense strand starting at position 2781 of SEQ ID NO: 915863
gcaguuuaggucguugagu

SEQ ID NO: 1111919 - RNA, 19 nt, Artificial Sequence
  Description of Artificial Sequence: Synthetic oligonucleotide
  Antisense strand to SEQ ID NO: 1111918
acucaacgaccuaaacugc

SEQ ID NO: 1111920 - RNA, 19 nt, Artificial Sequence
  Description of Artificial Sequence: Synthetic oligonucleotide
  Sense strand starting at position 2795 of SEQ ID NO: 915863
ugagucagaguccgaauau

SEQ ID NO: 1111921 - RNA, 19 nt, Artificial Sequence
  Description of Artificial Sequence: Synthetic oligonucleotide
  Antisense strand to SEQ ID NO: 1111920
auauucggacucugacuca

SEQ ID NO: 1111922 - RNA, 19 nt, Artificial Sequence
  Description of Artificial Sequence: Synthetic oligonucleotide
  Sense strand starting at position 2805 of SEQ ID NO: 915863
uccgaauauucuccacagu

SEQ ID NO: 1111923 - RNA, 19 nt, Artificial Sequence
  Description of Artificial Sequence: Synthetic oligonucleotide
  Antisense strand to SEQ ID NO: 1111922
acuguggagaauauucgga

SEQ ID NO: 1111924 - RNA, 19 nt, Artificial Sequence
  Description of Artificial Sequence: Synthetic oligonucleotide
  Sense strand starting at position 2806 of SEQ ID NO: 915863
ccgaauauucuccacaguc

SEQ ID NO: 1111925 - RNA, 19 nt, Artificial Sequence
  Description of Artificial Sequence: Synthetic oligonucleotide
  Antisense strand to SEQ ID NO: 1111924
gacuguggagaauauucgg

SEQ ID NO: 1111926 - RNA, 19 nt, Artificial Sequence
  Description of Artificial Sequence: Synthetic oligonucleotide
  Sense strand starting at position 3032 of SEQ ID NO: 915863
ucuaguuuccuggaugugu

SEQ ID NO: 1111927 - RNA, 19 nt, Artificial Sequence
  Description of Artificial Sequence: Synthetic oligonucleotide
  Antisense strand to SEQ ID NO: 1111926
acacauccaggaaacuaga

SEQ ID NO: 1111928 - RNA, 19 nt, Artificial Sequence
  Description of Artificial Sequence: Synthetic oligonucleotide
  Sense strand starting at position 3034 of SEQ ID NO: 915863
uaguuuccuggauguguga

SEQ ID NO: 1111929 - RNA, 19 nt, Artificial Sequence
  Description of Artificial Sequence: Synthetic oligonucleotide
  Antisense strand to SEQ ID NO: 1111928
ucacacauccaggaaacua

SEQ ID NO: 1111930 - RNA, 19 nt, Artificial Sequence
  Description of Artificial Sequence: Synthetic oligonucleotide
  Sense strand starting at position 3036 of SEQ ID NO: 915863
guuuccuggaugugugaga

SEQ ID NO: 1111931 - RNA, 19 nt, Artificial Sequence
  Description of Artificial Sequence: Synthetic oligonucleotide
  Antisense strand to SEQ ID NO: 1111930
ucucacacauccaggaaac

SEQ ID NO: 1111932 - RNA, 19 nt, Artificial Sequence
  Description of Artificial Sequence: Synthetic oligonucleotide
  Sense strand starting at position 3073 of SEQ ID NO: 915863
ugggcaucaucacugugaa

SEQ ID NO: 1111933 - RNA, 19 nt, Artificial Sequence
  Description of Artificial Sequence: Synthetic oligonucleotide
  Antisense strand to SEQ ID NO: 1111932
uucacagugaugaugccca

SEQ ID NO: 1111934 - RNA, 19 nt, Artificial Sequence
  Description of Artificial Sequence: Synthetic oligonucleotide
  Sense strand starting at position 3074 of SEQ ID NO: 915863
gggcaucaucacugugaac

SEQ ID NO: 1111935 - RNA, 19 nt, Artificial Sequence
  Description of Artificial Sequence: Synthetic oligonucleotide
  Antisense strand to SEQ ID NO: 1111934
guucacagugaugaugccc

SEQ ID NO: 1111936 - RNA, 19 nt, Artificial Sequence
  Description of Artificial Sequence: Synthetic oligonucleotide
  Sense strand starting at position 3076 of SEQ ID NO: 915863
gcaucaucacugugaacuu

SEQ ID NO: 1111937 - RNA, 19 nt, Artificial Sequence
  Description of Artificial Sequence: Synthetic oligonucleotide
  Antisense strand to SEQ ID NO: 1111936
aaguucacagugaugaugc

SEQ ID NO: 1111938 - RNA, 19 nt, Artificial Sequence
  Description of Artificial Sequence: Synthetic oligonucleotide
  Sense strand starting at position 3388 of SEQ ID NO: 915863
ggaguauauucggcuggga

SEQ ID NO: 1111939 - RNA, 19 nt, Artificial Sequence
  Description of Artificial Sequence: Synthetic oligonucleotide
  Antisense strand to SEQ ID NO: 1111938
ucccagccgaauauacucc

SEQ ID NO: 1111940 - RNA, 19 nt, Artificial Sequence
  Description of Artificial Sequence: Synthetic oligonucleotide
  Sense strand starting at position 3506 of SEQ ID NO: 915863
ucgugaucgauugaguaag

SEQ ID NO: 1111941 - RNA, 19 nt, Artificial Sequence
  Description of Artificial Sequence: Synthetic oligonucleotide
  Antisense strand to SEQ ID NO: 1111940
cuuacucaaucgaucacga

SEQ ID NO: 1111942 - RNA, 19 nt, Artificial Sequence
  Description of Artificial Sequence: Synthetic oligonucleotide
  Sense strand starting at position 3508 of SEQ ID NO: 915863
gugaucgauugaguaagca

SEQ ID NO: 1111943 - RNA, 19 nt, Artificial Sequence
  Description of Artificial Sequence: Synthetic oligonucleotide
  Antisense strand to SEQ ID NO: 1111942
ugcuuacucaaucgaucac

SEQ ID NO: 1111944 - RNA, 19 nt, Artificial Sequence
  Description of Artificial Sequence: Synthetic oligonucleotide
  Sense strand starting at position 3736 of SEQ ID NO: 915863
gucuucuuacguuaacaag

SEQ ID NO: 1111945 - RNA, 19 nt, Artificial Sequence
  Description of Artificial Sequence: Synthetic oligonucleotide
  Antisense strand to SEQ ID NO: 1111944
cuuguuaacguaagaagac

SEQ ID NO: 1111946 - RNA, 19 nt, Artificial Sequence
  Description of Artificial Sequence: Synthetic oligonucleotide
  Sense strand starting at position 66 of SEQ ID NO: 915864
ccaaacuaguuagagcuua

SEQ ID NO: 1111947 - RNA, 19 nt, Artificial Sequence
  Description of Artificial Sequence: Synthetic oligonucleotide
  Antisense strand to SEQ ID NO: 1111946
uaagcucuaacuaguuugg

SEQ ID NO: 1111948 - RNA, 19 nt, Artificial Sequence
  Description of Artificial Sequence: Synthetic oligonucleotide
  Sense strand starting at position 71 of SEQ ID NO: 915864
cuaguuagagcuuaguaau

SEQ ID NO: 1111949 - RNA, 19 nt, Artificial Sequence
  Description of Artificial Sequence: Synthetic oligonucleotide
  Antisense strand to SEQ ID NO: 1111948
auuacuaagcucuaacuag

SEQ ID NO: 1111950 - RNA, 19 nt, Artificial Sequence
  Description of Artificial Sequence: Synthetic oligonucleotide
  Sense strand starting at position 85 of SEQ ID NO: 915864
guaaugugagagcggagua

SEQ ID NO: 1111951 - RNA, 19 nt, Artificial Sequence
  Description of Artificial Sequence: Synthetic oligonucleotide
  Antisense strand to SEQ ID NO: 1111950
uacuccgcucucacauuac

SEQ ID NO: 1111952 - RNA, 19 nt, Artificial Sequence
  Description of Artificial Sequence: Synthetic oligonucleotide
  Sense strand starting at position 86 of SEQ ID NO: 915864
uaaugugagagcggaguaa

SEQ ID NO: 1111953 - RNA, 19 nt, Artificial Sequence
  Description of Artificial Sequence: Synthetic oligonucleotide
  Antisense strand to SEQ ID NO: 1111952
uuacuccgcucucacauua

SEQ ID NO: 1111954 - RNA, 19 nt, Artificial Sequence
  Description of Artificial Sequence: Synthetic oligonucleotide
  Sense strand starting at position 159 of SEQ ID NO: 915864
gccaguggguuccuacuaa

SEQ ID NO: 1111955 - RNA, 19 nt, Artificial Sequence
  Description of Artificial Sequence: Synthetic oligonucleotide
  Antisense strand to SEQ ID NO: 1111954
uuaguaggaacccacuggc

SEQ ID NO: 1111956 - RNA, 19 nt, Artificial Sequence
  Description of Artificial Sequence: Synthetic oligonucleotide
  Sense strand starting at position 171 of SEQ ID NO: 915864
cuacuaacuccuggguacu

SEQ ID NO: 1111957 - RNA, 19 nt, Artificial Sequence
  Description of Artificial Sequence: Synthetic oligonucleotide
  Antisense strand to SEQ ID NO: 1111956
aguacccaggaguuaguag

SEQ ID NO: 1111958 - RNA, 19 nt, Artificial Sequence
  Description of Artificial Sequence: Synthetic oligonucleotide
  Sense strand starting at position 343 of SEQ ID NO: 915864
cugcguuguccaggagaug

SEQ ID NO: 1111959 - RNA, 19 nt, Artificial Sequence
  Description of Artificial Sequence: Synthetic oligonucleotide
  Antisense strand to SEQ ID NO: 1111958
caucuccuggacaacgcag

SEQ ID NO: 1111960 - RNA, 19 nt, Artificial Sequence
  Description of Artificial Sequence: Synthetic oligonucleotide
  Sense strand starting at position 379 of SEQ ID NO: 915864
ccagaauggcugugaccaa

SEQ ID NO: 1111961 - RNA, 19 nt, Artificial Sequence
  Description of Artificial Sequence: Synthetic oligonucleotide
  Antisense strand to SEQ ID NO: 1111960
uuggucacagccauucugg

SEQ ID NO: 1111962 - RNA, 19 nt, Artificial Sequence
  Description of Artificial Sequence: Synthetic oligonucleotide
  Sense strand starting at position 637 of SEQ ID NO: 915864
ggcucuugugccguggaca

SEQ ID NO: 1111963 - RNA, 19 nt, Artificial Sequence
  Description of Artificial Sequence: Synthetic oligonucleotide
  Antisense strand to SEQ ID NO: 1111962
uguccacggcacaagagcc

SEQ ID NO: 1111964 - RNA, 19 nt, Artificial Sequence
  Description of Artificial Sequence: Synthetic oligonucleotide
  Sense strand starting at position 655 of SEQ ID NO: 915864
acuuguagaguaggaauaa

SEQ ID NO: 1111965 - RNA, 19 nt, Artificial Sequence
  Description of Artificial Sequence: Synthetic oligonucleotide
  Antisense strand to SEQ ID NO: 1111964
uuauuccuacucuacaagu

SEQ ID NO: 1111966 - RNA, 19 nt, Artificial Sequence
  Description of Artificial Sequence: Synthetic oligonucleotide
  Sense strand starting at position 744 of SEQ ID NO: 915864
auacuuuaguccuuaacga

SEQ ID NO: 1111967 - RNA, 19 nt, Artificial Sequence
  Description of Artificial Sequence: Synthetic oligonucleotide
  Antisense strand to SEQ ID NO: 1111966
ucguuaaggacuaaaguau

SEQ ID NO: 1111968 - RNA, 19 nt, Artificial Sequence
  Description of Artificial Sequence: Synthetic oligonucleotide
  Sense strand starting at position 788 of SEQ ID NO: 915864
cuggguacugucugcaaca

SEQ ID NO: 1111969 - RNA, 19 nt, Artificial Sequence
  Description of Artificial Sequence: Synthetic oligonucleotide
  Antisense strand to SEQ ID NO: 1111968
uguugcagacaguacccag

SEQ ID NO: 1111970 - RNA, 19 nt, Artificial Sequence
  Description of Artificial Sequence: Synthetic oligonucleotide
  Sense strand starting at position 1093 of SEQ ID NO: 915864
gaucuuacuucugcggaau

SEQ ID NO: 1111971 - RNA, 19 nt, Artificial Sequence
  Description of Artificial Sequence: Synthetic oligonucleotide
  Antisense strand to SEQ ID NO: 1111970
auuccgcagaaguaagauc

SEQ ID NO: 1111972 - RNA, 19 nt, Artificial Sequence
  Description of Artificial Sequence: Synthetic oligonucleotide
  Sense strand starting at position 1094 of SEQ ID NO: 915864
aucuuacuucugcggaaua

SEQ ID NO: 1111973 - RNA, 19 nt, Artificial Sequence
  Description of Artificial Sequence: Synthetic oligonucleotide
  Antisense strand to SEQ ID NO: 1111972
uauuccgcagaaguaagau

SEQ ID NO: 1111974 - RNA, 19 nt, Artificial Sequence
  Description of Artificial Sequence: Synthetic oligonucleotide
  Sense strand starting at position 1096 of SEQ ID NO: 915864
cuuacuucugcggaauaca

SEQ ID NO: 1111975 - RNA, 19 nt, Artificial Sequence
  Description of Artificial Sequence: Synthetic oligonucleotide
  Antisense strand to SEQ ID NO: 1111974
uguauuccgcagaaguaag

SEQ ID NO: 1111976 - RNA, 19 nt, Artificial Sequence
  Description of Artificial Sequence: Synthetic oligonucleotide
  Sense strand starting at position 2702 of SEQ ID NO: 915864
ccucgcagaccuggucaaa

SEQ ID NO: 1111977 - RNA, 19 nt, Artificial Sequence
  Description of Artificial Sequence: Synthetic oligonucleotide
  Antisense strand to SEQ ID NO: 1111976
uuugaccaggucugcgagg

SEQ ID NO: 1111978 - RNA, 19 nt, Artificial Sequence
  Description of Artificial Sequence: Synthetic oligonucleotide
  Sense strand starting at position 2781 of SEQ ID NO: 915864
ccuuguggaguuuauaguu

SEQ ID NO: 1111979 - RNA, 19 nt, Artificial Sequence
  Description of Artificial Sequence: Synthetic oligonucleotide
  Antisense strand to SEQ ID NO: 1111978
aacuauaaacuccacaagg

SEQ ID NO: 1111980 - RNA, 19 nt, Artificial Sequence
  Description of Artificial Sequence: Synthetic oligonucleotide
  Sense strand starting at position 2843 of SEQ ID NO: 915864
uacagugagcucggaaguu

SEQ ID NO: 1111981 - RNA, 19 nt, Artificial Sequence
  Description of Artificial Sequence: Synthetic oligonucleotide
  Antisense strand to SEQ ID NO: 1111980
aacuuccgagcucacugua

SEQ ID NO: 1111982 - RNA, 19 nt, Artificial Sequence
  Description of Artificial Sequence: Synthetic oligonucleotide
  Sense strand starting at position 2855 of SEQ ID NO: 915864
ggaaguuacccggagaccu

SEQ ID NO: 1111983 - RNA, 19 nt, Artificial Sequence
  Description of Artificial Sequence: Synthetic oligonucleotide
  Antisense strand to SEQ ID NO: 1111982
aggucuccggguaacuucc

SEQ ID NO: 1111984 - RNA, 19 nt, Artificial Sequence
  Description of Artificial Sequence: Synthetic oligonucleotide
  Sense strand starting at position 2863 of SEQ ID NO: 915864
cccggagaccuugaauugu

SEQ ID NO: 1111985 - RNA, 19 nt, Artificial Sequence
  Description of Artificial Sequence: Synthetic oligonucleotide
  Antisense strand to SEQ ID NO: 1111984
acaauucaaggucuccggg

SEQ ID NO: 1111986 - RNA, 19 nt, Artificial Sequence
  Description of Artificial Sequence: Synthetic oligonucleotide
  Sense strand starting at position 2869 of SEQ ID NO: 915864
gaccuugaauuguuuguuu

SEQ ID NO: 1111987 - RNA, 19 nt, Artificial Sequence
  Description of Artificial Sequence: Synthetic oligonucleotide
  Antisense strand to SEQ ID NO: 1111986
aaacaaacaauucaagguc

SEQ ID NO: 1111988 - RNA, 19 nt, Artificial Sequence
  Description of Artificial Sequence: Synthetic oligonucleotide
  Sense strand starting at position 2871 of SEQ ID NO: 915864
ccuugaauuguuuguuuag

SEQ ID NO: 1111989 - RNA, 19 nt, Artificial Sequence
  Description of Artificial Sequence: Synthetic oligonucleotide
  Antisense strand to SEQ ID NO: 1111988
cuaaacaaacaauucaagg

SEQ ID NO: 1111990 - RNA, 19 nt, Artificial Sequence
  Description of Artificial Sequence: Synthetic oligonucleotide
  Sense strand starting at position 2872 of SEQ ID NO: 915864
cuugaauuguuuguuuaga

SEQ ID NO: 1111991 - RNA, 19 nt, Artificial Sequence
  Description of Artificial Sequence: Synthetic oligonucleotide
  Antisense strand to SEQ ID NO: 1111990
ucuaaacaaacaauucaag

SEQ ID NO: 1111992 - RNA, 19 nt, Artificial Sequence
  Description of Artificial Sequence: Synthetic oligonucleotide
  Sense strand starting at position 2873 of SEQ ID NO: 915864
uugaauuguuuguuuagag

SEQ ID NO: 1111993 - RNA, 19 nt, Artificial Sequence
  Description of Artificial Sequence: Synthetic oligonucleotide
  Antisense strand to SEQ ID NO: 1111992
cucuaaacaaacaauucaa

SEQ ID NO: 1111994 - RNA, 19 nt, Artificial Sequence
  Description of Artificial Sequence: Synthetic oligonucleotide
  Sense strand starting at position 3041 of SEQ ID NO: 915864
aaagguagugaaggucuaa

SEQ ID NO: 1111995 - RNA, 19 nt, Artificial Sequence
  Description of Artificial Sequence: Synthetic oligonucleotide
  Antisense strand to SEQ ID NO: 1111994
uuagaccuucacuaccuuu

SEQ ID NO: 1111996 - RNA, 19 nt, Artificial Sequence
  Description of Artificial Sequence: Synthetic oligonucleotide
  Sense strand starting at position 3051 of SEQ ID NO: 915864
aaggucuaauuggaaggaa

SEQ ID NO: 1111997 - RNA, 19 nt, Artificial Sequence
  Description of Artificial Sequence: Synthetic oligonucleotide
  Antisense strand to SEQ ID NO: 1111996
uuccuuccaauuagaccuu

SEQ ID NO: 1111998 - RNA, 19 nt, Artificial Sequence
  Description of Artificial Sequence: Synthetic oligonucleotide
  Sense strand starting at position 3112 of SEQ ID NO: 915864
guuuguuccagugaagaug

SEQ ID NO: 1111999 - RNA, 19 nt, Artificial Sequence
  Description of Artificial Sequence: Synthetic oligonucleotide
  Antisense strand to SEQ ID NO: 1111998
caucuucacuggaacaaac

SEQ ID NO: 1112000 - RNA, 19 nt, Artificial Sequence
  Description of Artificial Sequence: Synthetic oligonucleotide
  Sense strand starting at position 3143 of SEQ ID NO: 915864
aagccucugguggaagauu

SEQ ID NO: 1112001 - RNA, 19 nt, Artificial Sequence
  Description of Artificial Sequence: Synthetic oligonucleotide
  Antisense strand to SEQ ID NO: 1112000
aaucuuccaccagaggcuu

SEQ ID NO: 1112002 - RNA, 19 nt, Artificial Sequence
  Description of Artificial Sequence: Synthetic oligonucleotide
  Sense strand starting at position 3151 of SEQ ID NO: 915864
gguggaagauuugagaaau

SEQ ID NO: 1112003 - RNA, 19 nt, Artificial Sequence
  Description of Artificial Sequence: Synthetic oligonucleotide
  Antisense strand to SEQ ID NO: 1112002
auuucucaaaucuuccacc

SEQ ID NO: 1112004 - RNA, 19 nt, Artificial Sequence
  Description of Artificial Sequence: Synthetic oligonucleotide
  Sense strand starting at position 3238 of SEQ ID NO: 915864
ccagcugaugaucgcgaua

SEQ ID NO: 1112005 - RNA, 19 nt, Artificial Sequence
  Description of Artificial Sequence: Synthetic oligonucleotide
  Antisense strand to SEQ ID NO: 1112004
uaucgcgaucaucagcugg

SEQ ID NO: 1112006 - RNA, 19 nt, Artificial Sequence
  Description of Artificial Sequence: Synthetic oligonucleotide
  Sense strand starting at position 3241 of SEQ ID NO: 915864
gcugaugaucgcgauacau

SEQ ID NO: 1112007 - RNA, 19 nt, Artificial Sequence
  Description of Artificial Sequence: Synthetic oligonucleotide
  Antisense strand to SEQ ID NO: 1112006
auguaucgcgaucaucagc

SEQ ID NO: 1112008 - RNA, 19 nt, Artificial Sequence
  Description of Artificial Sequence: Synthetic oligonucleotide
  Sense strand starting at position 3243 of SEQ ID NO: 915864
ugaugaucgcgauacauug

SEQ ID NO: 1112009 - RNA, 19 nt, Artificial Sequence
  Description of Artificial Sequence: Synthetic oligonucleotide
  Antisense strand to SEQ ID NO: 1112008
caauguaucgcgaucauca

SEQ ID NO: 1112010 - RNA, 19 nt, Artificial Sequence
  Description of Artificial Sequence: Synthetic oligonucleotide
  Sense strand starting at position 3266 of SEQ ID NO: 915864
gcagaaggcuggcuucuaa

SEQ ID NO: 1112011 - RNA, 19 nt, Artificial Sequence
  Description of Artificial Sequence: Synthetic oligonucleotide
  Antisense strand to SEQ ID NO: 1112010
uuagaagccagccuucugc

SEQ ID NO: 1112012 - RNA, 19 nt, Artificial Sequence
  Description of Artificial Sequence: Synthetic oligonucleotide
  Sense strand starting at position 3270 of SEQ ID NO: 915864
aaggcuggcuucuaagaca

SEQ ID NO: 1112013 - RNA, 19 nt, Artificial Sequence
  Description of Artificial Sequence: Synthetic oligonucleotide
  Antisense strand to SEQ ID NO: 1112012
ugucuuagaagccagccuu

SEQ ID NO: 1112014 - RNA, 19 nt, Artificial Sequence
  Description of Artificial Sequence: Synthetic oligonucleotide
  Sense strand starting at position 3869 of SEQ ID NO: 915864
gacggagucuauugggacu

SEQ ID NO: 1112015 - RNA, 19 nt, Artificial Sequence
  Description of Artificial Sequence: Synthetic oligonucleotide
  Antisense strand to SEQ ID NO: 1112014
agucccaauagacuccguc

SEQ ID NO: 1112016 - RNA, 19 nt, Artificial Sequence
  Description of Artificial Sequence: Synthetic oligonucleotide
  Sense strand starting at position 3915 of SEQ ID NO: 915864
gacugcagcugucugagau

SEQ ID NO: 1112017 - RNA, 19 nt, Artificial Sequence
  Description of Artificial Sequence: Synthetic oligonucleotide
  Antisense strand to SEQ ID NO: 1112016
aucucagacagcugcaguc

SEQ ID NO: 1112018 - RNA, 19 nt, Artificial Sequence
  Description of Artificial Sequence: Synthetic oligonucleotide
  Sense strand starting at position 3916 of SEQ ID NO: 915864
acugcagcugucugagaua

SEQ ID NO: 1112019 - RNA, 19 nt, Artificial Sequence
  Description of Artificial Sequence: Synthetic oligonucleotide
  Antisense strand to SEQ ID NO: 1112018
uaucucagacagcugcagu

SEQ ID NO: 1112020 - RNA, 19 nt, Artificial Sequence
  Description of Artificial Sequence: Synthetic oligonucleotide
  Sense strand starting at position 3938 of SEQ ID NO: 915864
aacagaauagagcgauagu

SEQ ID NO: 1112021 - RNA, 19 nt, Artificial Sequence
  Description of Artificial Sequence: Synthetic oligonucleotide
  Antisense strand to SEQ ID NO: 1112020
acuaucgcucuauucuguu

SEQ ID NO: 1112022 - RNA, 19 nt, Artificial Sequence
  Description of Artificial Sequence: Synthetic oligonucleotide
  Sense strand starting at position 3947 of SEQ ID NO: 915864
gagcgauaguccucccuuu

SEQ ID NO: 1112023 - RNA, 19 nt, Artificial Sequence
  Description of Artificial Sequence: Synthetic oligonucleotide
  Antisense strand to SEQ ID NO: 1112022
aaagggaggacuaucgcuc

SEQ ID NO: 1112024 - RNA, 19 nt, Artificial Sequence
  Description of Artificial Sequence: Synthetic oligonucleotide
  Sense strand starting at position 3981 of SEQ ID NO: 915864
gacuaaagauugcucgcua

SEQ ID NO: 1112025 - RNA, 19 nt, Artificial Sequence
  Description of Artificial Sequence: Synthetic oligonucleotide
  Antisense strand to SEQ ID NO: 1112024
uagcgagcaaucuuuaguc

SEQ ID NO: 1112026 - RNA, 19 nt, Artificial Sequence
  Description of Artificial Sequence: Synthetic oligonucleotide
  Sense strand starting at position 342 of SEQ ID NO: 915865
ugacuaacagucugacaau

SEQ ID NO: 1112027 - RNA, 19 nt, Artificial Sequence
  Description of Artificial Sequence: Synthetic oligonucleotide
  Antisense strand to SEQ ID NO: 1112026
auugucagacuguuaguca

SEQ ID NO: 1112028 - RNA, 19 nt, Artificial Sequence
  Description of Artificial Sequence: Synthetic oligonucleotide
  Sense strand starting at position 352 of SEQ ID NO: 915865
ucugacaauuuagaguaaa

SEQ ID NO: 1112029 - RNA, 19 nt, Artificial Sequence
  Description of Artificial Sequence: Synthetic oligonucleotide
  Antisense strand to SEQ ID NO: 1112028
uuuacucuaaauugucaga

SEQ ID NO: 1112030 - RNA, 19 nt, Artificial Sequence
  Description of Artificial Sequence: Synthetic oligonucleotide
  Sense strand starting at position 377 of SEQ ID NO: 915865
cucaguuucucccacuagu

SEQ ID NO: 1112031 - RNA, 19 nt, Artificial Sequence
  Description of Artificial Sequence: Synthetic oligonucleotide
  Antisense strand to SEQ ID NO: 1112030
acuagugggagaaacugag

SEQ ID NO: 1112032 - RNA, 19 nt, Artificial Sequence
  Description of Artificial Sequence: Synthetic oligonucleotide
  Sense strand starting at position 388 of SEQ ID NO: 915865
ccacuagucuugcaacaug

SEQ ID NO: 1112033 - RNA, 19 nt, Artificial Sequence
  Description of Artificial Sequence: Synthetic oligonucleotide
  Antisense strand to SEQ ID NO: 1112032
cauguugcaagacuagugg

SEQ ID NO: 1112034 - RNA, 19 nt, Artificial Sequence
  Description of Artificial Sequence: Synthetic oligonucleotide
  Sense strand starting at position 455 of SEQ ID NO: 915865
ucgucaguucugcagugga

SEQ ID NO: 1112035 - RNA, 19 nt, Artificial Sequence
  Description of Artificial Sequence: Synthetic oligonucleotide
  Antisense strand to SEQ ID NO: 1112034
uccacugcagaacugacga

SEQ ID NO: 1112036 - RNA, 19 nt, Artificial Sequence
  Description of Artificial Sequence: Synthetic oligonucleotide
  Sense strand starting at position 482 of SEQ ID NO: 915865
gggugucgucugucauccu

SEQ ID NO: 1112037 - RNA, 19 nt, Artificial Sequence
  Description of Artificial Sequence: Synthetic oligonucleotide
  Antisense strand to SEQ ID NO: 1112036
aggaugacagacgacaccc

SEQ ID NO: 1112038 - RNA, 19 nt, Artificial Sequence
  Description of Artificial Sequence: Synthetic oligonucleotide
  Sense strand starting at position 483 of SEQ ID NO: 915865
ggugucgucugucauccua

SEQ ID NO: 1112039 - RNA, 19 nt, Artificial Sequence
  Description of Artificial Sequence: Synthetic oligonucleotide
  Antisense strand to SEQ ID NO: 1112038
uaggaugacagacgacacc

SEQ ID NO: 1112040 - RNA, 19 nt, Artificial Sequence
  Description of Artificial Sequence: Synthetic oligonucleotide
  Sense strand starting at position 485 of SEQ ID NO: 915865
ugucgucugucauccuaau

SEQ ID NO: 1112041 - RNA, 19 nt, Artificial Sequence
  Description of Artificial Sequence: Synthetic oligonucleotide
  Antisense strand to SEQ ID NO: 1112040
auuaggaugacagacgaca

SEQ ID NO: 1112042 - RNA, 19 nt, Artificial Sequence
  Description of Artificial Sequence: Synthetic oligonucleotide
  Sense strand starting at position 504 of SEQ ID NO: 915865
ucagucaucuauucugaca

SEQ ID NO: 1112043 - RNA, 19 nt, Artificial Sequence
  Description of Artificial Sequence: Synthetic oligonucleotide
  Antisense strand to SEQ ID NO: 1112042
ugucagaauagaugacuga

SEQ ID NO: 1112044 - RNA, 19 nt, Artificial Sequence
  Description of Artificial Sequence: Synthetic oligonucleotide
  Sense strand starting at position 522 of SEQ ID NO: 915865
agcgucuuccuggagauac

SEQ ID NO: 1112045 - RNA, 19 nt, Artificial Sequence
  Description of Artificial Sequence: Synthetic oligonucleotide
  Antisense strand to SEQ ID NO: 1112044
guaucuccaggaagacgcu

SEQ ID NO: 1112046 - RNA, 19 nt, Artificial Sequence
  Description of Artificial Sequence: Synthetic oligonucleotide
  Sense strand starting at position 650 of SEQ ID NO: 915865
uccucagguugcgguaauu

SEQ ID NO: 1112047 - RNA, 19 nt, Artificial Sequence
  Description of Artificial Sequence: Synthetic oligonucleotide
  Antisense strand to SEQ ID NO: 1112046
aauuaccgcaaccugagga

SEQ ID NO: 1112048 - RNA, 19 nt, Artificial Sequence
  Description of Artificial Sequence: Synthetic oligonucleotide
  Sense strand starting at position 659 of SEQ ID NO: 915865
ugcgguaauuugcuagagu

SEQ ID NO: 1112049 - RNA, 19 nt, Artificial Sequence
  Description of Artificial Sequence: Synthetic oligonucleotide
  Antisense strand to SEQ ID NO: 1112048
acucuagcaaauuaccgca

SEQ ID NO: 1112050 - RNA, 19 nt, Artificial Sequence
  Description of Artificial Sequence: Synthetic oligonucleotide
  Sense strand starting at position 660 of SEQ ID NO: 915865
gcgguaauuugcuagagug

SEQ ID NO: 1112051 - RNA, 19 nt, Artificial Sequence
  Description of Artificial Sequence: Synthetic oligonucleotide
  Antisense strand to SEQ ID NO: 1112050
cacucuagcaaauuaccgc

SEQ ID NO: 1112052 - RNA, 19 nt, Artificial Sequence
  Description of Artificial Sequence: Synthetic oligonucleotide
  Sense strand starting at position 749 of SEQ ID NO: 915865
ugaagagaugcgugacgua

SEQ ID NO: 1112053 - RNA, 19 nt, Artificial Sequence
  Description of Artificial Sequence: Synthetic oligonucleotide
  Antisense strand to SEQ ID NO: 1112052
uacgucacgcaucucuuca

SEQ ID NO: 1112054 - RNA, 19 nt, Artificial Sequence
  Description of Artificial Sequence: Synthetic oligonucleotide
  Sense strand starting at position 892 of SEQ ID NO: 915865
aggcgugauucaucagcca

SEQ ID NO: 1112055 - RNA, 19 nt, Artificial Sequence
  Description of Artificial Sequence: Synthetic oligonucleotide
  Antisense strand to SEQ ID NO: 1112054
uggcugaugaaucacgccu

SEQ ID NO: 1112056 - RNA, 19 nt, Artificial Sequence
  Description of Artificial Sequence: Synthetic oligonucleotide
  Sense strand starting at position 912 of SEQ ID NO: 915865
uggugaucaacgcaaccuu

SEQ ID NO: 1112057 - RNA, 19 nt, Artificial Sequence
  Description of Artificial Sequence: Synthetic oligonucleotide
  Antisense strand to SEQ ID NO: 1112056
aagguugcguugaucacca

SEQ ID NO: 1112058 - RNA, 19 nt, Artificial Sequence
  Description of Artificial Sequence: Synthetic oligonucleotide
  Sense strand starting at position 1071 of SEQ ID NO: 915865
agacaucacuuuggagguu

SEQ ID NO: 1112059 - RNA, 19 nt, Artificial Sequence
  Description of Artificial Sequence: Synthetic oligonucleotide
  Antisense strand to SEQ ID NO: 1112058
aaccuccaaagugaugucu

SEQ ID NO: 1112060 - RNA, 19 nt, Artificial Sequence
  Description of Artificial Sequence: Synthetic oligonucleotide
  Sense strand starting at position 1080 of SEQ ID NO: 915865
uuuggagguucccgggauu

SEQ ID NO: 1112061 - RNA, 19 nt, Artificial Sequence
  Description of Artificial Sequence: Synthetic oligonucleotide
  Antisense strand to SEQ ID NO: 1112060
aaucccgggaaccuccaaa

SEQ ID NO: 1112062 - RNA, 19 nt, Artificial Sequence
  Description of Artificial Sequence: Synthetic oligonucleotide
  Sense strand starting at position 1149 of SEQ ID NO: 915865
cuguaucaguuaccucaaa

SEQ ID NO: 1112063 - RNA, 19 nt, Artificial Sequence
  Description of Artificial Sequence: Synthetic oligonucleotide
  Antisense strand to SEQ ID NO: 1112062
uuugagguaacugauacag

SEQ ID NO: 1112064 - RNA, 19 nt, Artificial Sequence
  Description of Artificial Sequence: Synthetic oligonucleotide
  Sense strand starting at position 1424 of SEQ ID NO: 915865
cagcaagagucuccgcuaa

SEQ ID NO: 1112065 - RNA, 19 nt, Artificial Sequence
  Description of Artificial Sequence: Synthetic oligonucleotide
  Antisense strand to SEQ ID NO: 1112064
uuagcggagacucuugcug

SEQ ID NO: 1112066 - RNA, 19 nt, Artificial Sequence
  Description of Artificial Sequence: Synthetic oligonucleotide
  Sense strand starting at position 1426 of SEQ ID NO: 915865
gcaagagucuccgcuaacg

SEQ ID NO: 1112067 - RNA, 19 nt, Artificial Sequence
  Description of Artificial Sequence: Synthetic oligonucleotide
  Antisense strand to SEQ ID NO: 1112066
cguuagcggagacucuugc

SEQ ID NO: 1112068 - RNA, 19 nt, Artificial Sequence
  Description of Artificial Sequence: Synthetic oligonucleotide
  Sense strand starting at position 2307 of SEQ ID NO: 915865
cgcugugcgucuccgagaa

SEQ ID NO: 1112069 - RNA, 19 nt, Artificial Sequence
  Description of Artificial Sequence: Synthetic oligonucleotide
  Antisense strand to SEQ ID NO: 1112068
uucucggagacgcacagcg

SEQ ID NO: 1112070 - RNA, 19 nt, Artificial Sequence
  Description of Artificial Sequence: Synthetic oligonucleotide
  Sense strand starting at position 2311 of SEQ ID NO: 915865
gugcgucuccgagaacgaa

SEQ ID NO: 1112071 - RNA, 19 nt, Artificial Sequence
  Description of Artificial Sequence: Synthetic oligonucleotide
  Antisense strand to SEQ ID NO: 1112070
uucguucucggagacgcac

SEQ ID NO: 1112072 - RNA, 19 nt, Artificial Sequence
  Description of Artificial Sequence: Synthetic oligonucleotide
  Sense strand starting at position 3015 of SEQ ID NO: 915865
ccgccuaauuuagauauua

SEQ ID NO: 1112073 - RNA, 19 nt, Artificial Sequence
  Description of Artificial Sequence: Synthetic oligonucleotide
  Antisense strand to SEQ ID NO: 1112072
uaauaucuaaauuaggcgg

SEQ ID NO: 1112074 - RNA, 19 nt, Artificial Sequence
  Description of Artificial Sequence: Synthetic oligonucleotide
  Sense strand starting at position 3065 of SEQ ID NO: 915865
auugauauccuugguuaaa

SEQ ID NO: 1112075 - RNA, 19 nt, Artificial Sequence
  Description of Artificial Sequence: Synthetic oligonucleotide
  Antisense strand to SEQ ID NO: 1112074
uuuaaccaaggauaucaau

SEQ ID NO: 1112076 - RNA, 19 nt, Artificial Sequence
  Description of Artificial Sequence: Synthetic oligonucleotide
  Sense strand starting at position 3085 of SEQ ID NO: 915865
acauaauugaucugagcga

SEQ ID NO: 1112077 - RNA, 19 nt, Artificial Sequence
  Description of Artificial Sequence: Synthetic oligonucleotide
  Antisense strand to SEQ ID NO: 1112076
ucgcucagaucaauuaugu

SEQ ID NO: 1112078 - RNA, 19 nt, Artificial Sequence
  Description of Artificial Sequence: Synthetic oligonucleotide
  Sense strand starting at position 3089 of SEQ ID NO: 915865
aauugaucugagcgaggug

SEQ ID NO: 1112079 - RNA, 19 nt, Artificial Sequence
  Description of Artificial Sequence: Synthetic oligonucleotide
  Antisense strand to SEQ ID NO: 1112078
caccucgcucagaucaauu

SEQ ID NO: 1112080 - RNA, 19 nt, Artificial Sequence
  Description of Artificial Sequence: Synthetic oligonucleotide
  Sense strand starting at position 3145 of SEQ ID NO: 915865
gggugaugguaguuucagu

SEQ ID NO: 1112081 - RNA, 19 nt, Artificial Sequence
  Description of Artificial Sequence: Synthetic oligonucleotide
  Antisense strand to SEQ ID NO: 1112080
acugaaacuaccaucaccc

SEQ ID NO: 1112082 - RNA, 19 nt, Artificial Sequence
  Description of Artificial Sequence: Synthetic oligonucleotide
  Sense strand starting at position 3153 of SEQ ID NO: 915865
guaguuucaguccgggagu

SEQ ID NO: 1112083 - RNA, 19 nt, Artificial Sequence
  Description of Artificial Sequence: Synthetic oligonucleotide
  Antisense strand to SEQ ID NO: 1112082
acucccggacugaaacuac

SEQ ID NO: 1112084 - RNA, 19 nt, Artificial Sequence
  Description of Artificial Sequence: Synthetic oligonucleotide
  Sense strand starting at position 3154 of SEQ ID NO: 915865
uaguuucaguccgggaguu

SEQ ID NO: 1112085 - RNA, 19 nt, Artificial Sequence
  Description of Artificial Sequence: Synthetic oligonucleotide
  Antisense strand to SEQ ID NO: 1112084
aacucccggacugaaacua

SEQ ID NO: 1112086 - RNA, 19 nt, Artificial Sequence
  Description of Artificial Sequence: Synthetic oligonucleotide
  Sense strand starting at position 3187 of SEQ ID NO: 915865
gcgugaucucgccugugaa

SEQ ID NO: 1112087 - RNA, 19 nt, Artificial Sequence
  Description of Artificial Sequence: Synthetic oligonucleotide
  Antisense strand to SEQ ID NO: 1112086
uucacaggcgagaucacgc

SEQ ID NO: 1112088 - RNA, 19 nt, Artificial Sequence
  Description of Artificial Sequence: Synthetic oligonucleotide
  Sense strand starting at position 3188 of SEQ ID NO: 915865
cgugaucucgccugugaau

SEQ ID NO: 1112089 - RNA, 19 nt, Artificial Sequence
  Description of Artificial Sequence: Synthetic oligonucleotide
  Antisense strand to SEQ ID NO: 1112088
auucacaggcgagaucacg

SEQ ID NO: 1112090 - RNA, 19 nt, Artificial Sequence
  Description of Artificial Sequence: Synthetic oligonucleotide
  Sense strand starting at position 3260 of SEQ ID NO: 915865
aucauuggaugguacuaau

SEQ ID NO: 1112091 - RNA, 19 nt, Artificial Sequence
  Description of Artificial Sequence: Synthetic oligonucleotide
  Antisense strand to SEQ ID NO: 1112090
auuaguaccauccaaugau

SEQ ID NO: 1112092 - RNA, 19 nt, Artificial Sequence
  Description of Artificial Sequence: Synthetic oligonucleotide
  Sense strand starting at position 3418 of SEQ ID NO: 915865
aagagcaaacacugaguua

SEQ ID NO: 1112093 - RNA, 19 nt, Artificial Sequence
  Description of Artificial Sequence: Synthetic oligonucleotide
  Antisense strand to SEQ ID NO: 1112092
uaacucaguguuugcucuu

SEQ ID NO: 1112094 - RNA, 19 nt, Artificial Sequence
  Description of Artificial Sequence: Synthetic oligonucleotide
  Sense strand starting at position 3490 of SEQ ID NO: 915865
gcuguauucugagugucug

SEQ ID NO: 1112095 - RNA, 19 nt, Artificial Sequence
  Description of Artificial Sequence: Synthetic oligonucleotide
  Antisense strand to SEQ ID NO: 1112094
cagacacucagaauacagc

SEQ ID NO: 1112096 - RNA, 19 nt, Artificial Sequence
  Description of Artificial Sequence: Synthetic oligonucleotide
  Sense strand starting at position 3491 of SEQ ID NO: 915865
cuguauucugagugucugu

SEQ ID NO: 1112097 - RNA, 19 nt, Artificial Sequence
  Description of Artificial Sequence: Synthetic oligonucleotide
  Antisense strand to SEQ ID NO: 1112096
acagacacucagaauacag

SEQ ID NO: 1112098 - RNA, 19 nt, Artificial Sequence
  Description of Artificial Sequence: Synthetic oligonucleotide
  Sense strand starting at position 3513 of SEQ ID NO: 915865
cagcguucguauguugaaa

SEQ ID NO: 1112099 - RNA, 19 nt, Artificial Sequence
  Description of Artificial Sequence: Synthetic oligonucleotide
  Antisense strand to SEQ ID NO: 1112098
uuucaacauacgaacgcug

SEQ ID NO: 1112100 - RNA, 19 nt, Artificial Sequence
  Description of Artificial Sequence: Synthetic oligonucleotide
  Sense strand starting at position 3514 of SEQ ID NO: 915865
agcguucguauguugaaac

SEQ ID NO: 1112101 - RNA, 19 nt, Artificial Sequence
  Description of Artificial Sequence: Synthetic oligonucleotide
  Antisense strand to SEQ ID NO: 1112100
guuucaacauacgaacgcu

SEQ ID NO: 1112102 - RNA, 19 nt, Artificial Sequence
  Description of Artificial Sequence: Synthetic oligonucleotide
  Sense strand starting at position 3876 of SEQ ID NO: 915865
gggcuugugggaggugaua

SEQ ID NO: 1112103 - RNA, 19 nt, Artificial Sequence
  Description of Artificial Sequence: Synthetic oligonucleotide
  Antisense strand to SEQ ID NO: 1112102
uaucaccucccacaagccc

SEQ ID NO: 1112104 - RNA, 19 nt, Artificial Sequence
  Description of Artificial Sequence: Synthetic oligonucleotide
  Sense strand starting at position 3888 of SEQ ID NO: 915865
ggugauaggucaugggaca

SEQ ID NO: 1112105 - RNA, 19 nt, Artificial Sequence
  Description of Artificial Sequence: Synthetic oligonucleotide
  Antisense strand to SEQ ID NO: 1112104
ugucccaugaccuaucacc

SEQ ID NO: 1112106 - RNA, 19 nt, Artificial Sequence
  Description of Artificial Sequence: Synthetic oligonucleotide
  Sense strand starting at position 298 of SEQ ID NO: 915866
cuaaguuuguuagcuugaa

SEQ ID NO: 1112107 - RNA, 19 nt, Artificial Sequence
  Description of Artificial Sequence: Synthetic oligonucleotide
  Antisense strand to SEQ ID NO: 1112106
uucaagcuaacaaacuuag

SEQ ID NO: 1112108 - RNA, 19 nt, Artificial Sequence
  Description of Artificial Sequence: Synthetic oligonucleotide
  Sense strand starting at position 299 of SEQ ID NO: 915866
uaaguuuguuagcuugaaa

SEQ ID NO: 1112109 - RNA, 19 nt, Artificial Sequence
  Description of Artificial Sequence: Synthetic oligonucleotide
  Antisense strand to SEQ ID NO: 1112108
uuucaagcuaacaaacuua

SEQ ID NO: 1112110 - RNA, 19 nt, Artificial Sequence
  Description of Artificial Sequence: Synthetic oligonucleotide
  Sense strand starting at position 302 of SEQ ID NO: 915866
guuuguuagcuugaaacuu

SEQ ID NO: 1112111 - RNA, 19 nt, Artificial Sequence
  Description of Artificial Sequence: Synthetic oligonucleotide
  Antisense strand to SEQ ID NO: 1112110
aaguuucaagcuaacaaac

SEQ ID NO: 1112112 - RNA, 19 nt, Artificial Sequence
  Description of Artificial Sequence: Synthetic oligonucleotide
  Sense strand starting at position 771 of SEQ ID NO: 915866
uaggauguugagcagcaua

SEQ ID NO: 1112113 - RNA, 19 nt, Artificial Sequence
  Description of Artificial Sequence: Synthetic oligonucleotide
  Antisense strand to SEQ ID NO: 1112112
uaugcugcucaacauccua

SEQ ID NO: 1112114 - RNA, 19 nt, Artificial Sequence
  Description of Artificial Sequence: Synthetic oligonucleotide
  Sense strand starting at position 907 of SEQ ID NO: 915866
gcacuacugcuuuaaagag

SEQ ID NO: 1112115 - RNA, 19 nt, Artificial Sequence
  Description of Artificial Sequence: Synthetic oligonucleotide
  Antisense strand to SEQ ID NO: 1112114
cucuuuaaagcaguagugc

SEQ ID NO: 1112116 - RNA, 19 nt, Artificial Sequence
  Description of Artificial Sequence: Synthetic oligonucleotide
  Sense strand starting at position 989 of SEQ ID NO: 915866
cugagaacccgugauucuc

SEQ ID NO: 1112117 - RNA, 19 nt, Artificial Sequence
  Description of Artificial Sequence: Synthetic oligonucleotide
  Antisense strand to SEQ ID NO: 1112116
gagaaucacggguucucag

SEQ ID NO: 1112118 - RNA, 19 nt, Artificial Sequence
  Description of Artificial Sequence: Synthetic oligonucleotide
  Sense strand starting at position 991 of SEQ ID NO: 915866
gagaacccgugauucucaa

SEQ ID NO: 1112119 - RNA, 19 nt, Artificial Sequence
  Description of Artificial Sequence: Synthetic oligonucleotide
  Antisense strand to SEQ ID NO: 1112118
uugagaaucacggguucuc

SEQ ID NO: 1112120 - RNA, 19 nt, Artificial Sequence
  Description of Artificial Sequence: Synthetic oligonucleotide
  Sense strand starting at position 1004 of SEQ ID NO: 915866
ucucaaacuuugcuaggua

SEQ ID NO: 1112121 - RNA, 19 nt, Artificial Sequence
  Description of Artificial Sequence: Synthetic oligonucleotide
  Antisense strand to SEQ ID NO: 1112120
uaccuagcaaaguuugaga

SEQ ID NO: 1112122 - RNA, 19 nt, Artificial Sequence
  Description of Artificial Sequence: Synthetic oligonucleotide
  Sense strand starting at position 1237 of SEQ ID NO: 915866
gagugugcuauucuuacgu

SEQ ID NO: 1112123 - RNA, 19 nt, Artificial Sequence
  Description of Artificial Sequence: Synthetic oligonucleotide
  Antisense strand to SEQ ID NO: 1112122
acguaagaauagcacacuc

SEQ ID NO: 1112124 - RNA, 19 nt, Artificial Sequence
  Description of Artificial Sequence: Synthetic oligonucleotide
  Sense strand starting at position 1252 of SEQ ID NO: 915866
acgucuuugaggcagcaga

SEQ ID NO: 1112125 - RNA, 19 nt, Artificial Sequence
  Description of Artificial Sequence: Synthetic oligonucleotide
  Antisense strand to SEQ ID NO: 1112124
ucugcugccucaaagacgu

SEQ ID NO: 1112126 - RNA, 19 nt, Artificial Sequence
  Description of Artificial Sequence: Synthetic oligonucleotide
  Sense strand starting at position 1424 of SEQ ID NO: 915866
ccaccagcguuauuggaaa

SEQ ID NO: 1112127 - RNA, 19 nt, Artificial Sequence
  Description of Artificial Sequence: Synthetic oligonucleotide
  Antisense strand to SEQ ID NO: 1112126
uuuccaauaacgcuggugg

SEQ ID NO: 1112128 - RNA, 19 nt, Artificial Sequence
  Description of Artificial Sequence: Synthetic oligonucleotide
  Sense strand starting at position 1431 of SEQ ID NO: 915866
cguuauuggaaaggugaag

SEQ ID NO: 1112129 - RNA, 19 nt, Artificial Sequence
  Description of Artificial Sequence: Synthetic oligonucleotide
  Antisense strand to SEQ ID NO: 1112128
cuucaccuuuccaauaacg

SEQ ID NO: 1112130 - RNA, 19 nt, Artificial Sequence
  Description of Artificial Sequence: Synthetic oligonucleotide
  Sense strand starting at position 1993 of SEQ ID NO: 915866
cagacuucugcggaccuaa

SEQ ID NO: 1112131 - RNA, 19 nt, Artificial Sequence
  Description of Artificial Sequence: Synthetic oligonucleotide
  Antisense strand to SEQ ID NO: 1112130
uuagguccgcagaagucug

SEQ ID NO: 1112132 - RNA, 19 nt, Artificial Sequence
  Description of Artificial Sequence: Synthetic oligonucleotide
  Sense strand starting at position 2161 of SEQ ID NO: 915866
gcucauucucuuggccaaa

SEQ ID NO: 1112133 - RNA, 19 nt, Artificial Sequence
  Description of Artificial Sequence: Synthetic oligonucleotide
  Antisense strand to SEQ ID NO: 1112132
uuuggccaagagaaugagc

SEQ ID NO: 1112134 - RNA, 19 nt, Artificial Sequence
  Description of Artificial Sequence: Synthetic oligonucleotide
  Sense strand starting at position 2163 of SEQ ID NO: 915866
ucauucucuuggccaaaga

SEQ ID NO: 1112135 - RNA, 19 nt, Artificial Sequence
  Description of Artificial Sequence: Synthetic oligonucleotide
  Antisense strand to SEQ ID NO: 1112134
ucuuuggccaagagaauga

SEQ ID NO: 1112136 - RNA, 19 nt, Artificial Sequence
  Description of Artificial Sequence: Synthetic oligonucleotide
  Sense strand starting at position 2176 of SEQ ID NO: 915866
caaagaucuccacgcggaa

SEQ ID NO: 1112137 - RNA, 19 nt, Artificial Sequence
  Description of Artificial Sequence: Synthetic oligonucleotide
  Antisense strand to SEQ ID NO: 1112136
uuccgcguggagaucuuug

SEQ ID NO: 1112138 - RNA, 19 nt, Artificial Sequence
  Description of Artificial Sequence: Synthetic oligonucleotide
  Sense strand starting at position 2180 of SEQ ID NO: 915866
gaucuccacgcggaaaguu

SEQ ID NO: 1112139 - RNA, 19 nt, Artificial Sequence
  Description of Artificial Sequence: Synthetic oligonucleotide
  Antisense strand to SEQ ID NO: 1112138
aacuuuccgcguggagauc

SEQ ID NO: 1112140 - RNA, 19 nt, Artificial Sequence
  Description of Artificial Sequence: Synthetic oligonucleotide
  Sense strand starting at position 2192 of SEQ ID NO: 915866
gaaaguuccgucuaccugu

SEQ ID NO: 1112141 - RNA, 19 nt, Artificial Sequence
  Description of Artificial Sequence: Synthetic oligonucleotide
  Antisense strand to SEQ ID NO: 1112140
acagguagacggaacuuuc

SEQ ID NO: 1112142 - RNA, 19 nt, Artificial Sequence
  Description of Artificial Sequence: Synthetic oligonucleotide
  Sense strand starting at position 2245 of SEQ ID NO: 915866
ugugguucgguccacaacu

SEQ ID NO: 1112143 - RNA, 19 nt, Artificial Sequence
  Description of Artificial Sequence: Synthetic oligonucleotide
  Antisense strand to SEQ ID NO: 1112142
aguuguggaccgaaccaca

SEQ ID NO: 1112144 - RNA, 19 nt, Artificial Sequence
  Description of Artificial Sequence: Synthetic oligonucleotide
  Sense strand starting at position 2678 of SEQ ID NO: 915866
gagaaccgcuucuauuuga

SEQ ID NO: 1112145 - RNA, 19 nt, Artificial Sequence
  Description of Artificial Sequence: Synthetic oligonucleotide
  Antisense strand to SEQ ID NO: 1112144
ucaaauagaagcgguucuc

SEQ ID NO: 1112146 - RNA, 19 nt, Artificial Sequence
  Description of Artificial Sequence: Synthetic oligonucleotide
  Sense strand starting at position 2699 of SEQ ID NO: 915866
uccgaaccggguuaugauu

SEQ ID NO: 1112147 - RNA, 19 nt, Artificial Sequence
  Description of Artificial Sequence: Synthetic oligonucleotide
  Antisense strand to SEQ ID NO: 1112146
aaucauaacccgguucgga

SEQ ID NO: 1112148 - RNA, 19 nt, Artificial Sequence
  Description of Artificial Sequence: Synthetic oligonucleotide
  Sense strand starting at position 2723 of SEQ ID NO: 915866
gcuaacuaugguggugauu

SEQ ID NO: 1112149 - RNA, 19 nt, Artificial Sequence
  Description of Artificial Sequence: Synthetic oligonucleotide
  Antisense strand to SEQ ID NO: 1112148
aaucaccaccauaguuagc

SEQ ID NO: 1112150 - RNA, 19 nt, Artificial Sequence
  Description of Artificial Sequence: Synthetic oligonucleotide
  Sense strand starting at position 2785 of SEQ ID NO: 915866
ugagguuauggcugaaagg

SEQ ID NO: 1112151 - RNA, 19 nt, Artificial Sequence
  Description of Artificial Sequence: Synthetic oligonucleotide
  Antisense strand to SEQ ID NO: 1112150
ccuuucagccauaaccuca

SEQ ID NO: 1112152 - RNA, 19 nt, Artificial Sequence
  Description of Artificial Sequence: Synthetic oligonucleotide
  Sense strand starting at position 2826 of SEQ ID NO: 915866
ugaccacagucugcgaaua

SEQ ID NO: 1112153 - RNA, 19 nt, Artificial Sequence
  Description of Artificial Sequence: Synthetic oligonucleotide
  Antisense strand to SEQ ID NO: 1112152
uauucgcagacugugguca

SEQ ID NO: 1112154 - RNA, 19 nt, Artificial Sequence
  Description of Artificial Sequence: Synthetic oligonucleotide
  Sense strand starting at position 2827 of SEQ ID NO: 915866
gaccacagucugcgaauau

SEQ ID NO: 1112155 - RNA, 19 nt, Artificial Sequence
  Description of Artificial Sequence: Synthetic oligonucleotide
  Antisense strand to SEQ ID NO: 1112154
auauucgcagacugugguc

SEQ ID NO: 1112156 - RNA, 19 nt, Artificial Sequence
  Description of Artificial Sequence: Synthetic oligonucleotide
  Sense strand starting at position 2845 of SEQ ID NO: 915866
ugaaguuuauucuuugagu

SEQ ID NO: 1112157 - RNA, 19 nt, Artificial Sequence
  Description of Artificial Sequence: Synthetic oligonucleotide
  Antisense strand to SEQ ID NO: 1112156
acucaaagaauaaacuuca

SEQ ID NO: 1112158 - RNA, 19 nt, Artificial Sequence
  Description of Artificial Sequence: Synthetic oligonucleotide
  Sense strand starting at position 2846 of SEQ ID NO: 915866
gaaguuuauucuuugaguu

SEQ ID NO: 1112159 - RNA, 19 nt, Artificial Sequence
  Description of Artificial Sequence: Synthetic oligonucleotide
  Antisense strand to SEQ ID NO: 1112158
aacucaaagaauaaacuuc

SEQ ID NO: 1112160 - RNA, 19 nt, Artificial Sequence
  Description of Artificial Sequence: Synthetic oligonucleotide
  Sense strand starting at position 3093 of SEQ ID NO: 915866
auccauucuccacagaugu

SEQ ID NO: 1112161 - RNA, 19 nt, Artificial Sequence
  Description of Artificial Sequence: Synthetic oligonucleotide
  Antisense strand to SEQ ID NO: 1112160
acaucuguggagaauggau

SEQ ID NO: 1112162 - RNA, 19 nt, Artificial Sequence
  Description of Artificial Sequence: Synthetic oligonucleotide
  Sense strand starting at position 3117 of SEQ ID NO: 915866
ccagaagauuugugaguug

SEQ ID NO: 1112163 - RNA, 19 nt, Artificial Sequence
  Description of Artificial Sequence: Synthetic oligonucleotide
  Antisense strand to SEQ ID NO: 1112162
caacucacaaaucuucugg

SEQ ID NO: 1112164 - RNA, 19 nt, Artificial Sequence
  Description of Artificial Sequence: Synthetic oligonucleotide
  Sense strand starting at position 3188 of SEQ ID NO: 915866
cauggaaugcgugggaauu

SEQ ID NO: 1112165 - RNA, 19 nt, Artificial Sequence
  Description of Artificial Sequence: Synthetic oligonucleotide
  Antisense strand to SEQ ID NO: 1112164
aauucccacgcauuccaug

SEQ ID NO: 1112166 - RNA, 19 nt, Artificial Sequence
  Description of Artificial Sequence: Synthetic oligonucleotide
  Sense strand starting at position 3198 of SEQ ID NO: 915866
gugggaauucugugauuau

SEQ ID NO: 1112167 - RNA, 19 nt, Artificial Sequence
  Description of Artificial Sequence: Synthetic oligonucleotide
  Antisense strand to SEQ ID NO: 1112166
auaaucacagaauucccac

SEQ ID NO: 1112168 - RNA, 19 nt, Artificial Sequence
  Description of Artificial Sequence: Synthetic oligonucleotide
  Sense strand starting at position 3413 of SEQ ID NO: 915866
ugcuuaccagaguaucuaa

SEQ ID NO: 1112169 - RNA, 19 nt, Artificial Sequence
  Description of Artificial Sequence: Synthetic oligonucleotide
  Antisense strand to SEQ ID NO: 1112168
uuagauacucugguaagca

SEQ ID NO: 1112170 - RNA, 19 nt, Artificial Sequence
  Description of Artificial Sequence: Synthetic oligonucleotide
  Sense strand starting at position 3479 of SEQ ID NO: 915866
uggagaucauagcuguguu

SEQ ID NO: 1112171 - RNA, 19 nt, Artificial Sequence
  Description of Artificial Sequence: Synthetic oligonucleotide
  Antisense strand to SEQ ID NO: 1112170
aacacagcuaugaucucca

SEQ ID NO: 1112172 - RNA, 19 nt, Artificial Sequence
  Description of Artificial Sequence: Synthetic oligonucleotide
  Sense strand starting at position 3480 of SEQ ID NO: 915866
ggagaucauagcuguguuu

SEQ ID NO: 1112173 - RNA, 19 nt, Artificial Sequence
  Description of Artificial Sequence: Synthetic oligonucleotide
  Antisense strand to SEQ ID NO: 1112172
aaacacagcuaugaucucc

SEQ ID NO: 1112174 - RNA, 19 nt, Artificial Sequence
  Description of Artificial Sequence: Synthetic oligonucleotide
  Sense strand starting at position 3482 of SEQ ID NO: 915866
agaucauagcuguguuuau

SEQ ID NO: 1112175 - RNA, 19 nt, Artificial Sequence
  Description of Artificial Sequence: Synthetic oligonucleotide
  Antisense strand to SEQ ID NO: 1112174
auaaacacagcuaugaucu

SEQ ID NO: 1112176 - RNA, 19 nt, Artificial Sequence
  Description of Artificial Sequence: Synthetic oligonucleotide
  Sense strand starting at position 3483 of SEQ ID NO: 915866
gaucauagcuguguuuaua

SEQ ID NO: 1112177 - RNA, 19 nt, Artificial Sequence
  Description of Artificial Sequence: Synthetic oligonucleotide
  Antisense strand to SEQ ID NO: 1112176
uauaaacacagcuaugauc

SEQ ID NO: 1112178 - RNA, 19 nt, Artificial Sequence
  Description of Artificial Sequence: Synthetic oligonucleotide
  Sense strand starting at position 3491 of SEQ ID NO: 915866
cuguguuuauauguaagac

SEQ ID NO: 1112179 - RNA, 19 nt, Artificial Sequence
  Description of Artificial Sequence: Synthetic oligonucleotide
  Antisense strand to SEQ ID NO: 1112178
gucuuacauauaaacacag

SEQ ID NO: 1112180 - RNA, 19 nt, Artificial Sequence
  Description of Artificial Sequence: Synthetic oligonucleotide
  Sense strand starting at position 3492 of SEQ ID NO: 915866
uguguuuauauguaagaca

SEQ ID NO: 1112181 - RNA, 19 nt, Artificial Sequence
  Description of Artificial Sequence: Synthetic oligonucleotide
  Antisense strand to SEQ ID NO: 1112180
ugucuuacauauaaacaca

SEQ ID NO: 1112182 - RNA, 19 nt, Artificial Sequence
  Description of Artificial Sequence: Synthetic oligonucleotide
  Sense strand starting at position 3515 of SEQ ID NO: 915866
auaaguagucauugguauu

SEQ ID NO: 1112183 - RNA, 19 nt, Artificial Sequence
  Description of Artificial Sequence: Synthetic oligonucleotide
  Antisense strand to SEQ ID NO: 1112182
aauaccaaugacuacuuau

SEQ ID NO: 1112184 - RNA, 19 nt, Artificial Sequence
  Description of Artificial Sequence: Synthetic oligonucleotide
  Sense strand starting at position 3941 of SEQ ID NO: 915866
agaaguaaacaaugcauua

SEQ ID NO: 1112185 - RNA, 19 nt, Artificial Sequence
  Description of Artificial Sequence: Synthetic oligonucleotide
  Antisense strand to SEQ ID NO: 1112184
uaaugcauuguuuacuucu

SEQ ID NO: 1112186 - RNA, 19 nt, Artificial Sequence
  Description of Artificial Sequence: Synthetic oligonucleotide
  Sense strand starting at position 102 of SEQ ID NO: 915867
ggaagccuggcuugucaga

SEQ ID NO: 1112187 - RNA, 19 nt, Artificial Sequence
  Description of Artificial Sequence: Synthetic oligonucleotide
  Antisense strand to SEQ ID NO: 1112186
ucugacaagccaggcuucc

SEQ ID NO: 1112188 - RNA, 19 nt, Artificial Sequence
  Description of Artificial Sequence: Synthetic oligonucleotide
  Sense strand starting at position 125 of SEQ ID NO: 915867
gagguagucccagggaaag

SEQ ID NO: 1112189 - RNA, 19 nt, Artificial Sequence
  Description of Artificial Sequence: Synthetic oligonucleotide
  Antisense strand to SEQ ID NO: 1112188
cuuucccugggacuaccuc

SEQ ID NO: 1112190 - RNA, 19 nt, Artificial Sequence
  Description of Artificial Sequence: Synthetic oligonucleotide
  Sense strand starting at position 290 of SEQ ID NO: 915867
acacacaaugucugagcua

SEQ ID NO: 1112191 - RNA, 19 nt, Artificial Sequence
  Description of Artificial Sequence: Synthetic oligonucleotide
  Antisense strand to SEQ ID NO: 1112190
uagcucagacauugugugu

SEQ ID NO: 1112192 - RNA, 19 nt, Artificial Sequence
  Description of Artificial Sequence: Synthetic oligonucleotide
  Sense strand starting at position 315 of SEQ ID NO: 915867
gcaggacuugguugauugu

SEQ ID NO: 1112193 - RNA, 19 nt, Artificial Sequence
  Description of Artificial Sequence: Synthetic oligonucleotide
  Antisense strand to SEQ ID NO: 1112192
acaaucaaccaaguccugc

SEQ ID NO: 1112194 - RNA, 19 nt, Artificial Sequence
  Description of Artificial Sequence: Synthetic oligonucleotide
  Sense strand starting at position 717 of SEQ ID NO: 915867
cagagucugguguagaaca

SEQ ID NO: 1112195 - RNA, 19 nt, Artificial Sequence
  Description of Artificial Sequence: Synthetic oligonucleotide
  Antisense strand to SEQ ID NO: 1112194
uguucuacaccagacucug

SEQ ID NO: 1112196 - RNA, 19 nt, Artificial Sequence
  Description of Artificial Sequence: Synthetic oligonucleotide
  Sense strand starting at position 758 of SEQ ID NO: 915867
aggcccugucugcaucaaa

SEQ ID NO: 1112197 - RNA, 19 nt, Artificial Sequence
  Description of Artificial Sequence: Synthetic oligonucleotide
  Antisense strand to SEQ ID NO: 1112196
uuugaugcagacagggccu

SEQ ID NO: 1112198 - RNA, 19 nt, Artificial Sequence
  Description of Artificial Sequence: Synthetic oligonucleotide
  Sense strand starting at position 929 of SEQ ID NO: 915867
gaccaugaggccugucuga

SEQ ID NO: 1112199 - RNA, 19 nt, Artificial Sequence
  Description of Artificial Sequence: Synthetic oligonucleotide
  Antisense strand to SEQ ID NO: 1112198
ucagacaggccucaugguc

SEQ ID NO: 1112200 - RNA, 19 nt, Artificial Sequence
  Description of Artificial Sequence: Synthetic oligonucleotide
  Sense strand starting at position 2155 of SEQ ID NO: 915867
agugaaugcagguaucuca

SEQ ID NO: 1112201 - RNA, 19 nt, Artificial Sequence
  Description of Artificial Sequence: Synthetic oligonucleotide
  Antisense strand to SEQ ID NO: 1112200
ugagauaccugcauucacu

SEQ ID NO: 1112202 - RNA, 19 nt, Artificial Sequence
  Description of Artificial Sequence: Synthetic oligonucleotide
  Sense strand starting at position 2158 of SEQ ID NO: 915867
gaaugcagguaucucauua

SEQ ID NO: 1112203 - RNA, 19 nt, Artificial Sequence
  Description of Artificial Sequence: Synthetic oligonucleotide
  Antisense strand to SEQ ID NO: 1112202
uaaugagauaccugcauuc

SEQ ID NO: 1112204 - RNA, 19 nt, Artificial Sequence
  Description of Artificial Sequence: Synthetic oligonucleotide
  Sense strand starting at position 2162 of SEQ ID NO: 915867
gcagguaucucauuaaaua

SEQ ID NO: 1112205 - RNA, 19 nt, Artificial Sequence
  Description of Artificial Sequence: Synthetic oligonucleotide
  Antisense strand to SEQ ID NO: 1112204
uauuuaaugagauaccugc

SEQ ID NO: 1112206 - RNA, 19 nt, Artificial Sequence
  Description of Artificial Sequence: Synthetic oligonucleotide
  Sense strand starting at position 2173 of SEQ ID NO: 915867
auuaaauaggguugguacu

SEQ ID NO: 1112207 - RNA, 19 nt, Artificial Sequence
  Description of Artificial Sequence: Synthetic oligonucleotide
  Antisense strand to SEQ ID NO: 1112206
aguaccaacccuauuuaau

SEQ ID NO: 1112208 - RNA, 19 nt, Artificial Sequence
  Description of Artificial Sequence: Synthetic oligonucleotide
  Sense strand starting at position 2179 of SEQ ID NO: 915867
uaggguugguacucucaga

SEQ ID NO: 1112209 - RNA, 19 nt, Artificial Sequence
  Description of Artificial Sequence: Synthetic oligonucleotide
  Antisense strand to SEQ ID NO: 1112208
ucugagaguaccaacccua

SEQ ID NO: 1112210 - RNA, 19 nt, Artificial Sequence
  Description of Artificial Sequence: Synthetic oligonucleotide
  Sense strand starting at position 2274 of SEQ ID NO: 915867
gucaaauuaugaguauaga

SEQ ID NO: 1112211 - RNA, 19 nt, Artificial Sequence
  Description of Artificial Sequence: Synthetic oligonucleotide
  Antisense strand to SEQ ID NO: 1112210
ucuauacucauaauuugac

SEQ ID NO: 1112212 - RNA, 19 nt, Artificial Sequence
  Description of Artificial Sequence: Synthetic oligonucleotide
  Sense strand starting at position 2310 of SEQ ID NO: 915867
acgucuguuaucccagcga

SEQ ID NO: 1112213 - RNA, 19 nt, Artificial Sequence
  Description of Artificial Sequence: Synthetic oligonucleotide
  Antisense strand to SEQ ID NO: 1112212
ucgcugggauaacagacgu

SEQ ID NO: 1112214 - RNA, 19 nt, Artificial Sequence
  Description of Artificial Sequence: Synthetic oligonucleotide
  Sense strand starting at position 2490 of SEQ ID NO: 915867
uugagauuccaagacgggu

SEQ ID NO: 1112215 - RNA, 19 nt, Artificial Sequence
  Description of Artificial Sequence: Synthetic oligonucleotide
  Antisense strand to SEQ ID NO: 1112214
acccgucuuggaaucucaa

SEQ ID NO: 1112216 - RNA, 19 nt, Artificial Sequence
  Description of Artificial Sequence: Synthetic oligonucleotide
  Sense strand starting at position 2496 of SEQ ID NO: 915867
uuccaagacggguggauua

SEQ ID NO: 1112217 - RNA, 19 nt, Artificial Sequence
  Description of Artificial Sequence: Synthetic oligonucleotide
  Antisense strand to SEQ ID NO: 1112216
uaauccacccgucuuggaa

SEQ ID NO: 1112218 - RNA, 19 nt, Artificial Sequence
  Description of Artificial Sequence: Synthetic oligonucleotide
  Sense strand starting at position 2757 of SEQ ID NO: 915867
acgaaauugugaguaccga

SEQ ID NO: 1112219 - RNA, 19 nt, Artificial Sequence
  Description of Artificial Sequence: Synthetic oligonucleotide
  Antisense strand to SEQ ID NO: 1112218
ucgguacucacaauuucgu

SEQ ID NO: 1112220 - RNA, 19 nt, Artificial Sequence
  Description of Artificial Sequence: Synthetic oligonucleotide
  Sense strand starting at position 2775 of SEQ ID NO: 915867
acauuaugugucuagugca

SEQ ID NO: 1112221 - RNA, 19 nt, Artificial Sequence
  Description of Artificial Sequence: Synthetic oligonucleotide
  Antisense strand to SEQ ID NO: 1112220
ugcacuagacacauaaugu

SEQ ID NO: 1112222 - RNA, 19 nt, Artificial Sequence
  Description of Artificial Sequence: Synthetic oligonucleotide
  Sense strand starting at position 2976 of SEQ ID NO: 915867
acauauuaagcuugaugga

SEQ ID NO: 1112223 - RNA, 19 nt, Artificial Sequence
  Description of Artificial Sequence: Synthetic oligonucleotide
  Antisense strand to SEQ ID NO: 1112222
uccaucaagcuuaauaugu

SEQ ID NO: 1112224 - RNA, 19 nt, Artificial Sequence
  Description of Artificial Sequence: Synthetic oligonucleotide
  Sense strand starting at position 2995 of SEQ ID NO: 915867
uuggucuugguccacagau

SEQ ID NO: 1112225 - RNA, 19 nt, Artificial Sequence
  Description of Artificial Sequence: Synthetic oligonucleotide
  Antisense strand to SEQ ID NO: 1112224
aucuguggaccaagaccaa

SEQ ID NO: 1112226 - RNA, 19 nt, Artificial Sequence
  Description of Artificial Sequence: Synthetic oligonucleotide
  Sense strand starting at position 2997 of SEQ ID NO: 915867
ggucuugguccacagaugu

SEQ ID NO: 1112227 - RNA, 19 nt, Artificial Sequence
  Description of Artificial Sequence: Synthetic oligonucleotide
  Antisense strand to SEQ ID NO: 1112226
acaucuguggaccaagacc

SEQ ID NO: 1112228 - RNA, 19 nt, Artificial Sequence
  Description of Artificial Sequence: Synthetic oligonucleotide
  Sense strand starting at position 3001 of SEQ ID NO: 915867
uugguccacagauguagaa

SEQ ID NO: 1112229 - RNA, 19 nt, Artificial Sequence
  Description of Artificial Sequence: Synthetic oligonucleotide
  Antisense strand to SEQ ID NO: 1112228
uucuacaucuguggaccaa

SEQ ID NO: 1112230 - RNA, 19 nt, Artificial Sequence
  Description of Artificial Sequence: Synthetic oligonucleotide
  Sense strand starting at position 3165 of SEQ ID NO: 915867
gcacuuguauauccuugaa

SEQ ID NO: 1112231 - RNA, 19 nt, Artificial Sequence
  Description of Artificial Sequence: Synthetic oligonucleotide
  Antisense strand to SEQ ID NO: 1112230
uucaaggauauacaagugc

SEQ ID NO: 1112232 - RNA, 19 nt, Artificial Sequence
  Description of Artificial Sequence: Synthetic oligonucleotide
  Sense strand starting at position 3566 of SEQ ID NO: 915867
ugaauugugcuauagaacu

SEQ ID NO: 1112233 - RNA, 19 nt, Artificial Sequence
  Description of Artificial Sequence: Synthetic oligonucleotide
  Antisense strand to SEQ ID NO: 1112232
aguucuauagcacaauuca

SEQ ID NO: 1112234 - RNA, 19 nt, Artificial Sequence
  Description of Artificial Sequence: Synthetic oligonucleotide
  Sense strand starting at position 3579 of SEQ ID NO: 915867
agaacuuauucuguuaguu

SEQ ID NO: 1112235 - RNA, 19 nt, Artificial Sequence
  Description of Artificial Sequence: Synthetic oligonucleotide
  Antisense strand to SEQ ID NO: 1112234
aacuaacagaauaaguucu

SEQ ID NO: 1112236 - RNA, 19 nt, Artificial Sequence
  Description of Artificial Sequence: Synthetic oligonucleotide
  Sense strand starting at position 3637 of SEQ ID NO: 915867
ugcaguguaucaguuggau

SEQ ID NO: 1112237 - RNA, 19 nt, Artificial Sequence
  Description of Artificial Sequence: Synthetic oligonucleotide
  Antisense strand to SEQ ID NO: 1112236
auccaacugauacacugca

SEQ ID NO: 1112238 - RNA, 19 nt, Artificial Sequence
  Description of Artificial Sequence: Synthetic oligonucleotide
  Sense strand starting at position 3643 of SEQ ID NO: 915867
guaucaguuggaugugcau

SEQ ID NO: 1112239 - RNA, 19 nt, Artificial Sequence
  Description of Artificial Sequence: Synthetic oligonucleotide
  Antisense strand to SEQ ID NO: 1112238
augcacauccaacugauac

SEQ ID NO: 1112240 - RNA, 19 nt, Artificial Sequence
  Description of Artificial Sequence: Synthetic oligonucleotide
  Sense strand starting at position 3687 of SEQ ID NO: 915867
aaugguauguuguccauaa

SEQ ID NO: 1112241 - RNA, 19 nt, Artificial Sequence
  Description of Artificial Sequence: Synthetic oligonucleotide
  Antisense strand to SEQ ID NO: 1112240
uuauggacaacauaccauu

SEQ ID NO: 1112242 - RNA, 19 nt, Artificial Sequence
  Description of Artificial Sequence: Synthetic oligonucleotide
  Sense strand starting at position 3688 of SEQ ID NO: 915867
augguauguuguccauaau

SEQ ID NO: 1112243 - RNA, 19 nt, Artificial Sequence
  Description of Artificial Sequence: Synthetic oligonucleotide
  Antisense strand to SEQ ID NO: 1112242
auuauggacaacauaccau

SEQ ID NO: 1112244 - RNA, 19 nt, Artificial Sequence
  Description of Artificial Sequence: Synthetic oligonucleotide
  Sense strand starting at position 3689 of SEQ ID NO: 915867
ugguauguuguccauaaua

SEQ ID NO: 1112245 - RNA, 19 nt, Artificial Sequence
  Description of Artificial Sequence: Synthetic oligonucleotide
  Antisense strand to SEQ ID NO: 1112244
uauuauggacaacauacca

SEQ ID NO: 1112246 - RNA, 19 nt, Artificial Sequence
  Description of Artificial Sequence: Synthetic oligonucleotide
  Sense strand starting at position 3691 of SEQ ID NO: 915867
guauguuguccauaauaga

SEQ ID NO: 1112247 - RNA, 19 nt, Artificial Sequence
  Description of Artificial Sequence: Synthetic oligonucleotide
  Antisense strand to SEQ ID NO: 1112246
ucuauuauggacaacauac

SEQ ID NO: 1112248 - RNA, 19 nt, Artificial Sequence
  Description of Artificial Sequence: Synthetic oligonucleotide
  Sense strand starting at position 3710 of SEQ ID NO: 915867
cgggcuccucaacauuaau

SEQ ID NO: 1112249 - RNA, 19 nt, Artificial Sequence
  Description of Artificial Sequence: Synthetic oligonucleotide
  Antisense strand to SEQ ID NO: 1112248
auuaauguugaggagcccg

SEQ ID NO: 1112250 - RNA, 19 nt, Artificial Sequence
  Description of Artificial Sequence: Synthetic oligonucleotide
  Sense strand starting at position 3746 of SEQ ID NO: 915867
guuucuucugcgcugcaga

SEQ ID NO: 1112251 - RNA, 19 nt, Artificial Sequence
  Description of Artificial Sequence: Synthetic oligonucleotide
  Antisense strand to SEQ ID NO: 1112250
ucugcagcgcagaagaaac

SEQ ID NO: 1112252 - RNA, 19 nt, Artificial Sequence
  Description of Artificial Sequence: Synthetic oligonucleotide
  Sense strand starting at position 3789 of SEQ ID NO: 915867
cccagauucccuugagcua

SEQ ID NO: 1112253 - RNA, 19 nt, Artificial Sequence
  Description of Artificial Sequence: Synthetic oligonucleotide
  Antisense strand to SEQ ID NO: 1112252
uagcucaagggaaucuggg

SEQ ID NO: 1112254 - RNA, 19 nt, Artificial Sequence
  Description of Artificial Sequence: Synthetic oligonucleotide
  Sense strand starting at position 3790 of SEQ ID NO: 915867
ccagauucccuugagcuau

SEQ ID NO: 1112255 - RNA, 19 nt, Artificial Sequence
  Description of Artificial Sequence: Synthetic oligonucleotide
  Antisense strand to SEQ ID NO: 1112254
auagcucaagggaaucugg

SEQ ID NO: 1112256 - RNA, 19 nt, Artificial Sequence
  Description of Artificial Sequence: Synthetic oligonucleotide
  Sense strand starting at position 3802 of SEQ ID NO: 915867
gagcuaugacucugugguu

SEQ ID NO: 1112257 - RNA, 19 nt, Artificial Sequence
  Description of Artificial Sequence: Synthetic oligonucleotide
  Antisense strand to SEQ ID NO: 1112256
aaccacagagucauagcuc

SEQ ID NO: 1112258 - RNA, 19 nt, Artificial Sequence
  Description of Artificial Sequence: Synthetic oligonucleotide
  Sense strand starting at position 3803 of SEQ ID NO: 915867
agcuaugacucugugguuu

SEQ ID NO: 1112259 - RNA, 19 nt, Artificial Sequence
  Description of Artificial Sequence: Synthetic oligonucleotide
  Antisense strand to SEQ ID NO: 1112258
aaaccacagagucauagcu

SEQ ID NO: 1112260 - RNA, 19 nt, Artificial Sequence
  Description of Artificial Sequence: Synthetic oligonucleotide
  Sense strand starting at position 3826 of SEQ ID NO: 915867
ccugcucuugugcaagaua

SEQ ID NO: 1112261 - RNA, 19 nt, Artificial Sequence
  Description of Artificial Sequence: Synthetic oligonucleotide
  Antisense strand to SEQ ID NO: 1112260
uaucuugcacaagagcagg

SEQ ID NO: 1112262 - RNA, 19 nt, Artificial Sequence
  Description of Artificial Sequence: Synthetic oligonucleotide
  Sense strand starting at position 3829 of SEQ ID NO: 915867
gcucuugugcaagauauaa

SEQ ID NO: 1112263 - RNA, 19 nt, Artificial Sequence
  Description of Artificial Sequence: Synthetic oligonucleotide
  Antisense strand to SEQ ID NO: 1112262
uuauaucuugcacaagagc

SEQ ID NO: 1112264 - RNA, 19 nt, Artificial Sequence
  Description of Artificial Sequence: Synthetic oligonucleotide
  Sense strand starting at position 3941 of SEQ ID NO: 915867
aucagcuuccuguaguagu

SEQ ID NO: 1112265 - RNA, 19 nt, Artificial Sequence
  Description of Artificial Sequence: Synthetic oligonucleotide
  Antisense strand to SEQ ID NO: 1112264
acuacuacaggaagcugau

SEQ ID NO: 1112266 - RNA, 19 nt, Artificial Sequence
  Description of Artificial Sequence: Synthetic oligonucleotide
  Sense strand starting at position 45 of SEQ ID NO: 915868
ucaguaucucaguaagcaa

SEQ ID NO: 1112267 - RNA, 19 nt, Artificial Sequence
  Description of Artificial Sequence: Synthetic oligonucleotide
  Antisense strand to SEQ ID NO: 1112266
uugcuuacugagauacuga

SEQ ID NO: 1112268 - RNA, 19 nt, Artificial Sequence
  Description of Artificial Sequence: Synthetic oligonucleotide
  Sense strand starting at position 48 of SEQ ID NO: 915868
guaucucaguaagcaaaca

SEQ ID NO: 1112269 - RNA, 19 nt, Artificial Sequence
  Description of Artificial Sequence: Synthetic oligonucleotide
  Antisense strand to SEQ ID NO: 1112268
uguuugcuuacugagauac

SEQ ID NO: 1112270 - RNA, 19 nt, Artificial Sequence
  Description of Artificial Sequence: Synthetic oligonucleotide
  Sense strand starting at position 63 of SEQ ID NO: 915868
aacagauacugguucguuu

SEQ ID NO: 1112271 - RNA, 19 nt, Artificial Sequence
  Description of Artificial Sequence: Synthetic oligonucleotide
  Antisense strand to SEQ ID NO: 1112270
aaacgaaccaguaucuguu

SEQ ID NO: 1112272 - RNA, 19 nt, Artificial Sequence
  Description of Artificial Sequence: Synthetic oligonucleotide
  Sense strand starting at position 67 of SEQ ID NO: 915868
gauacugguucguuugcaa

SEQ ID NO: 1112273 - RNA, 19 nt, Artificial Sequence
  Description of Artificial Sequence: Synthetic oligonucleotide
  Antisense strand to SEQ ID NO: 1112272
uugcaaacgaaccaguauc

SEQ ID NO: 1112274 - RNA, 19 nt, Artificial Sequence
  Description of Artificial Sequence: Synthetic oligonucleotide
  Sense strand starting at position 235 of SEQ ID NO: 915868
ggacccaacugaugaaaua

SEQ ID NO: 1112275 - RNA, 19 nt, Artificial Sequence
  Description of Artificial Sequence: Synthetic oligonucleotide
  Antisense strand to SEQ ID NO: 1112274
uauuucaucaguugggucc

SEQ ID NO: 1112276 - RNA, 19 nt, Artificial Sequence
  Description of Artificial Sequence: Synthetic oligonucleotide
  Sense strand starting at position 443 of SEQ ID NO: 915868
guguuaagcucuuccugag

SEQ ID NO: 1112277 - RNA, 19 nt, Artificial Sequence
  Description of Artificial Sequence: Synthetic oligonucleotide
  Antisense strand to SEQ ID NO: 1112276
cucaggaagagcuuaacac

SEQ ID NO: 1112278 - RNA, 19 nt, Artificial Sequence
  Description of Artificial Sequence: Synthetic oligonucleotide
  Sense strand starting at position 446 of SEQ ID NO: 915868
uuaagcucuuccugaguca

SEQ ID NO: 1112279 - RNA, 19 nt, Artificial Sequence
  Description of Artificial Sequence: Synthetic oligonucleotide
  Antisense strand to SEQ ID NO: 1112278
ugacucaggaagagcuuaa

SEQ ID NO: 1112280 - RNA, 19 nt, Artificial Sequence
  Description of Artificial Sequence: Synthetic oligonucleotide
  Sense strand starting at position 449 of SEQ ID NO: 915868
agcucuuccugagucacau

SEQ ID NO: 1112281 - RNA, 19 nt, Artificial Sequence
  Description of Artificial Sequence: Synthetic oligonucleotide
  Antisense strand to SEQ ID NO: 1112280
augugacucaggaagagcu

SEQ ID NO: 1112282 - RNA, 19 nt, Artificial Sequence
  Description of Artificial Sequence: Synthetic oligonucleotide
  Sense strand starting at position 696 of SEQ ID NO: 915868
cacaguguguccuuagcau

SEQ ID NO: 1112283 - RNA, 19 nt, Artificial Sequence
  Description of Artificial Sequence: Synthetic oligonucleotide
  Antisense strand to SEQ ID NO: 1112282
augcuaaggacacacugug

SEQ ID NO: 1112284 - RNA, 19 nt, Artificial Sequence
  Description of Artificial Sequence: Synthetic oligonucleotide
  Sense strand starting at position 703 of SEQ ID NO: 915868
uguccuuagcauugacauu

SEQ ID NO: 1112285 - RNA, 19 nt, Artificial Sequence
  Description of Artificial Sequence: Synthetic oligonucleotide
  Antisense strand to SEQ ID NO: 1112284
aaugucaaugcuaaggaca

SEQ ID NO: 1112286 - RNA, 19 nt, Artificial Sequence
  Description of Artificial Sequence: Synthetic oligonucleotide
  Sense strand starting at position 786 of SEQ ID NO: 915868
guaaucaggccaggaaauc

SEQ ID NO: 1112287 - RNA, 19 nt, Artificial Sequence
  Description of Artificial Sequence: Synthetic oligonucleotide
  Antisense strand to SEQ ID NO: 1112286
gauuuccuggccugauuac

SEQ ID NO: 1112288 - RNA, 19 nt, Artificial Sequence
  Description of Artificial Sequence: Synthetic oligonucleotide
  Sense strand starting at position 1122 of SEQ ID NO: 915868
cguccuaagucccgguauu

SEQ ID NO: 1112289 - RNA, 19 nt, Artificial Sequence
  Description of Artificial Sequence: Synthetic oligonucleotide
  Antisense strand to SEQ ID NO: 1112288
aauaccgggacuuaggacg

SEQ ID NO: 1112290 - RNA, 19 nt, Artificial Sequence
  Description of Artificial Sequence: Synthetic oligonucleotide
  Sense strand starting at position 1253 of SEQ ID NO: 915868
gaacaacguuccugggcau

SEQ ID NO: 1112291 - RNA, 19 nt, Artificial Sequence
  Description of Artificial Sequence: Synthetic oligonucleotide
  Antisense strand to SEQ ID NO: 1112290
augcccaggaacguuguuc

SEQ ID NO: 1112292 - RNA, 19 nt, Artificial Sequence
  Description of Artificial Sequence: Synthetic oligonucleotide
  Sense strand starting at position 1277 of SEQ ID NO: 915868
gcccaagugaucugggcuu

SEQ ID NO: 1112293 - RNA, 19 nt, Artificial Sequence
  Description of Artificial Sequence: Synthetic oligonucleotide
  Antisense strand to SEQ ID NO: 1112292
aagcccagaucacuugggc

SEQ ID NO: 1112294 - RNA, 19 nt, Artificial Sequence
  Description of Artificial Sequence: Synthetic oligonucleotide
  Sense strand starting at position 1479 of SEQ ID NO: 915868
auguucuccuucugcgaga

SEQ ID NO: 1112295 - RNA, 19 nt, Artificial Sequence
  Description of Artificial Sequence: Synthetic oligonucleotide
  Antisense strand to SEQ ID NO: 1112294
ucucgcagaaggagaacau

SEQ ID NO: 1112296 - RNA, 19 nt, Artificial Sequence
  Description of Artificial Sequence: Synthetic oligonucleotide
  Sense strand starting at position 1481 of SEQ ID NO: 915868
guucuccuucugcgagagu

SEQ ID NO: 1112297 - RNA, 19 nt, Artificial Sequence
  Description of Artificial Sequence: Synthetic oligonucleotide
  Antisense strand to SEQ ID NO: 1112296
acucucgcagaaggagaac

SEQ ID NO: 1112298 - RNA, 19 nt, Artificial Sequence
  Description of Artificial Sequence: Synthetic oligonucleotide
  Sense strand starting at position 1482 of SEQ ID NO: 915868
uucuccuucugcgagagua

SEQ ID NO: 1112299 - RNA, 19 nt, Artificial Sequence
  Description of Artificial Sequence: Synthetic oligonucleotide
  Antisense strand to SEQ ID NO: 1112298
uacucucgcagaaggagaa

SEQ ID NO: 1112300 - RNA, 19 nt, Artificial Sequence
  Description of Artificial Sequence: Synthetic oligonucleotide
  Sense strand starting at position 1513 of SEQ ID NO: 915868
ccuccacaucucggcuaaa

SEQ ID NO: 1112301 - RNA, 19 nt, Artificial Sequence
  Description of Artificial Sequence: Synthetic oligonucleotide
  Antisense strand to SEQ ID NO: 1112300
uuuagccgagauguggagg

SEQ ID NO: 1112302 - RNA, 19 nt, Artificial Sequence
  Description of Artificial Sequence: Synthetic oligonucleotide
  Sense strand starting at position 1516 of SEQ ID NO: 915868
ccacaucucggcuaaagau

SEQ ID NO: 1112303 - RNA, 19 nt, Artificial Sequence
  Description of Artificial Sequence: Synthetic oligonucleotide
  Antisense strand to SEQ ID NO: 1112302
aucuuuagccgagaugugg

SEQ ID NO: 1112304 - RNA, 19 nt, Artificial Sequence
  Description of Artificial Sequence: Synthetic oligonucleotide
  Sense strand starting at position 1886 of SEQ ID NO: 915868
gguccgugaugcugaggau

SEQ ID NO: 1112305 - RNA, 19 nt, Artificial Sequence
  Description of Artificial Sequence: Synthetic oligonucleotide
  Antisense strand to SEQ ID NO: 1112304
auccucagcaucacggacc

SEQ ID NO: 1112306 - RNA, 19 nt, Artificial Sequence
  Description of Artificial Sequence: Synthetic oligonucleotide
  Sense strand starting at position 2424 of SEQ ID NO: 915868
cugggaauuauguauggca

SEQ ID NO: 1112307 - RNA, 19 nt, Artificial Sequence
  Description of Artificial Sequence: Synthetic oligonucleotide
  Antisense strand to SEQ ID NO: 1112306
ugccauacauaauucccag

SEQ ID NO: 1112308 - RNA, 19 nt, Artificial Sequence
  Description of Artificial Sequence: Synthetic oligonucleotide
  Sense strand starting at position 2426 of SEQ ID NO: 915868
gggaauuauguauggcaau

SEQ ID NO: 1112309 - RNA, 19 nt, Artificial Sequence
  Description of Artificial Sequence: Synthetic oligonucleotide
  Antisense strand to SEQ ID NO: 1112308
auugccauacauaauuccc

SEQ ID NO: 1112310 - RNA, 19 nt, Artificial Sequence
  Description of Artificial Sequence: Synthetic oligonucleotide
  Sense strand starting at position 2427 of SEQ ID NO: 915868
ggaauuauguauggcaaua

SEQ ID NO: 1112311 - RNA, 19 nt, Artificial Sequence
  Description of Artificial Sequence: Synthetic oligonucleotide
  Antisense strand to SEQ ID NO: 1112310
uauugccauacauaauucc

SEQ ID NO: 1112312 - RNA, 19 nt, Artificial Sequence
  Description of Artificial Sequence: Synthetic oligonucleotide
  Sense strand starting at position 2455 of SEQ ID NO: 915868
ggagggaaagcguguaucu

SEQ ID NO: 1112313 - RNA, 19 nt, Artificial Sequence
  Description of Artificial Sequence: Synthetic oligonucleotide
  Antisense strand to SEQ ID NO: 1112312
agauacacgcuuucccucc

SEQ ID NO: 1112314 - RNA, 19 nt, Artificial Sequence
  Description of Artificial Sequence: Synthetic oligonucleotide
  Sense strand starting at position 2485 of SEQ ID NO: 915868
ggcgugaguucgguagaga

SEQ ID NO: 1112315 - RNA, 19 nt, Artificial Sequence
  Description of Artificial Sequence: Synthetic oligonucleotide
  Antisense strand to SEQ ID NO: 1112314
ucucuaccgaacucacgcc

SEQ ID NO: 1112316 - RNA, 19 nt, Artificial Sequence
  Description of Artificial Sequence: Synthetic oligonucleotide
  Sense strand starting at position 2486 of SEQ ID NO: 915868
gcgugaguucgguagagaa

SEQ ID NO: 1112317 - RNA, 19 nt, Artificial Sequence
  Description of Artificial Sequence: Synthetic oligonucleotide
  Antisense strand to SEQ ID NO: 1112316
uucucuaccgaacucacgc

SEQ ID NO: 1112318 - RNA, 19 nt, Artificial Sequence
  Description of Artificial Sequence: Synthetic oligonucleotide
  Sense strand starting at position 2488 of SEQ ID NO: 915868
gugaguucgguagagaaga

SEQ ID NO: 1112319 - RNA, 19 nt, Artificial Sequence
  Description of Artificial Sequence: Synthetic oligonucleotide
  Antisense strand to SEQ ID NO: 1112318
ucuucucuaccgaacucac

SEQ ID NO: 1112320 - RNA, 19 nt, Artificial Sequence
  Description of Artificial Sequence: Synthetic oligonucleotide
  Sense strand starting at position 2489 of SEQ ID NO: 915868
ugaguucgguagagaagaa

SEQ ID NO: 1112321 - RNA, 19 nt, Artificial Sequence
  Description of Artificial Sequence: Synthetic oligonucleotide
  Antisense strand to SEQ ID NO: 1112320
uucuucucuaccgaacuca

SEQ ID NO: 1112322 - RNA, 19 nt, Artificial Sequence
  Description of Artificial Sequence: Synthetic oligonucleotide
  Sense strand starting at position 2543 of SEQ ID NO: 915868
ggaggauucuacugcagaa

SEQ ID NO: 1112323 - RNA, 19 nt, Artificial Sequence
  Description of Artificial Sequence: Synthetic oligonucleotide
  Antisense strand to SEQ ID NO: 1112322
uucugcaguagaauccucc

SEQ ID NO: 1112324 - RNA, 19 nt, Artificial Sequence
  Description of Artificial Sequence: Synthetic oligonucleotide
  Sense strand starting at position 2646 of SEQ ID NO: 915868
auuccauugcaagguuaaa

SEQ ID NO: 1112325 - RNA, 19 nt, Artificial Sequence
  Description of Artificial Sequence: Synthetic oligonucleotide
  Antisense strand to SEQ ID NO: 1112324
uuuaaccuugcaauggaau

SEQ ID NO: 1112326 - RNA, 19 nt, Artificial Sequence
  Description of Artificial Sequence: Synthetic oligonucleotide
  Sense strand starting at position 2728 of SEQ ID NO: 915868
aggccagagagccgucaau

SEQ ID NO: 1112327 - RNA, 19 nt, Artificial Sequence
  Description of Artificial Sequence: Synthetic oligonucleotide
  Antisense strand to SEQ ID NO: 1112326
auugacggcucucuggccu

SEQ ID NO: 1112328 - RNA, 19 nt, Artificial Sequence
  Description of Artificial Sequence: Synthetic oligonucleotide
  Sense strand starting at position 2735 of SEQ ID NO: 915868
agagccgucaauuagagaa

SEQ ID NO: 1112329 - RNA, 19 nt, Artificial Sequence
  Description of Artificial Sequence: Synthetic oligonucleotide
  Antisense strand to SEQ ID NO: 1112328
uucucuaauugacggcucu

SEQ ID NO: 1112330 - RNA, 19 nt, Artificial Sequence
  Description of Artificial Sequence: Synthetic oligonucleotide
  Sense strand starting at position 2737 of SEQ ID NO: 915868
agccgucaauuagagaaga

SEQ ID NO: 1112331 - RNA, 19 nt, Artificial Sequence
  Description of Artificial Sequence: Synthetic oligonucleotide
  Antisense strand to SEQ ID NO: 1112330
ucuucucuaauugacggcu

SEQ ID NO: 1112332 - RNA, 19 nt, Artificial Sequence
  Description of Artificial Sequence: Synthetic oligonucleotide
  Sense strand starting at position 2922 of SEQ ID NO: 915868
gcguccugucaaggcuuua

SEQ ID NO: 1112333 - RNA, 19 nt, Artificial Sequence
  Description of Artificial Sequence: Synthetic oligonucleotide
  Antisense strand to SEQ ID NO: 1112332
uaaagccuugacaggacgc

SEQ ID NO: 1112334 - RNA, 19 nt, Artificial Sequence
  Description of Artificial Sequence: Synthetic oligonucleotide
  Sense strand starting at position 2927 of SEQ ID NO: 915868
cugucaaggcuuuauauau

SEQ ID NO: 1112335 - RNA, 19 nt, Artificial Sequence
  Description of Artificial Sequence: Synthetic oligonucleotide
  Antisense strand to SEQ ID NO: 1112334
auauauaaagccuugacag

SEQ ID NO: 1112336 - RNA, 19 nt, Artificial Sequence
  Description of Artificial Sequence: Synthetic oligonucleotide
  Sense strand starting at position 3087 of SEQ ID NO: 915868
cggguucagugauuauccu

SEQ ID NO: 1112337 - RNA, 19 nt, Artificial Sequence
  Description of Artificial Sequence: Synthetic oligonucleotide
  Antisense strand to SEQ ID NO: 1112336
aggauaaucacugaacccg

SEQ ID NO: 1112338 - RNA, 19 nt, Artificial Sequence
  Description of Artificial Sequence: Synthetic oligonucleotide
  Sense strand starting at position 3098 of SEQ ID NO: 915868
auuauccugucucagacua

SEQ ID NO: 1112339 - RNA, 19 nt, Artificial Sequence
  Description of Artificial Sequence: Synthetic oligonucleotide
  Antisense strand to SEQ ID NO: 1112338
uagucugagacaggauaau

SEQ ID NO: 1112340 - RNA, 19 nt, Artificial Sequence
  Description of Artificial Sequence: Synthetic oligonucleotide
  Sense strand starting at position 3860 of SEQ ID NO: 915868
uugcuuuccugcuagaaag

SEQ ID NO: 1112341 - RNA, 19 nt, Artificial Sequence
  Description of Artificial Sequence: Synthetic oligonucleotide
  Antisense strand to SEQ ID NO: 1112340
cuuucuagcaggaaagcaa

SEQ ID NO: 1112342 - RNA, 19 nt, Artificial Sequence
  Description of Artificial Sequence: Synthetic oligonucleotide
  Sense strand starting at position 3862 of SEQ ID NO: 915868
gcuuuccugcuagaaagau

SEQ ID NO: 1112343 - RNA, 19 nt, Artificial Sequence
  Description of Artificial Sequence: Synthetic oligonucleotide
  Antisense strand to SEQ ID NO: 1112342
aucuuucuagcaggaaagc

SEQ ID NO: 1112344 - RNA, 19 nt, Artificial Sequence
  Description of Artificial Sequence: Synthetic oligonucleotide
  Sense strand starting at position 3883 of SEQ ID NO: 915868
uuaagacacuaguaacagu

SEQ ID NO: 1112345 - RNA, 19 nt, Artificial Sequence
  Description of Artificial Sequence: Synthetic oligonucleotide
  Antisense strand to SEQ ID NO: 1112344
acuguuacuagugucuuaa

SEQ ID NO: 1112346 - RNA, 19 nt, Artificial Sequence
  Description of Artificial Sequence: Synthetic oligonucleotide
  Sense strand starting at position 89 of SEQ ID NO: 915869
agguuuccauccuugaaca

SEQ ID NO: 1112347 - RNA, 19 nt, Artificial Sequence
  Description of Artificial Sequence: Synthetic oligonucleotide
  Antisense strand to SEQ ID NO: 1112346
uguucaaggauggaaaccu

SEQ ID NO: 1112348 - RNA, 19 nt, Artificial Sequence
  Description of Artificial Sequence: Synthetic oligonucleotide
  Sense strand starting at position 90 of SEQ ID NO: 915869
gguuuccauccuugaacaa

SEQ ID NO: 1112349 - RNA, 19 nt, Artificial Sequence
  Description of Artificial Sequence: Synthetic oligonucleotide
  Antisense strand to SEQ ID NO: 1112348
uuguucaaggauggaaacc

SEQ ID NO: 1112350 - RNA, 19 nt, Artificial Sequence
  Description of Artificial Sequence: Synthetic oligonucleotide
  Sense strand starting at position 289 of SEQ ID NO: 915869
ccaagagaaucacugcuaa

SEQ ID NO: 1112351 - RNA, 19 nt, Artificial Sequence
  Description of Artificial Sequence: Synthetic oligonucleotide
  Antisense strand to SEQ ID NO: 1112350
uuagcagugauucucuugg

SEQ ID NO: 1112352 - RNA, 19 nt, Artificial Sequence
  Description of Artificial Sequence: Synthetic oligonucleotide
  Sense strand starting at position 374 of SEQ ID NO: 915869
gcauaaugccagcacuacu

SEQ ID NO: 1112353 - RNA, 19 nt, Artificial Sequence
  Description of Artificial Sequence: Synthetic oligonucleotide
  Antisense strand to SEQ ID NO: 1112352
aguagugcuggcauuaugc

SEQ ID NO: 1112354 - RNA, 19 nt, Artificial Sequence
  Description of Artificial Sequence: Synthetic oligonucleotide
  Sense strand starting at position 472 of SEQ ID NO: 915869
agcucaucugcggaguaca

SEQ ID NO: 1112355 - RNA, 19 nt, Artificial Sequence
  Description of Artificial Sequence: Synthetic oligonucleotide
  Antisense strand to SEQ ID NO: 1112354
uguacuccgcagaugagcu

SEQ ID NO: 1112356 - RNA, 19 nt, Artificial Sequence
  Description of Artificial Sequence: Synthetic oligonucleotide
  Sense strand starting at position 493 of SEQ ID NO: 915869
gaauacagauuuggaagaa

SEQ ID NO: 1112357 - RNA, 19 nt, Artificial Sequence
  Description of Artificial Sequence: Synthetic oligonucleotide
  Antisense strand to SEQ ID NO: 1112356
uucuuccaaaucuguauuc

SEQ ID NO: 1112358 - RNA, 19 nt, Artificial Sequence
  Description of Artificial Sequence: Synthetic oligonucleotide
  Sense strand starting at position 713 of SEQ ID NO: 915869
gagcaaguauccuuauaag

SEQ ID NO: 1112359 - RNA, 19 nt, Artificial Sequence
  Description of Artificial Sequence: Synthetic oligonucleotide
  Antisense strand to SEQ ID NO: 1112358
cuuauaaggauacuugcuc

SEQ ID NO: 1112360 - RNA, 19 nt, Artificial Sequence
  Description of Artificial Sequence: Synthetic oligonucleotide
  Sense strand starting at position 719 of SEQ ID NO: 915869
guauccuuauaagugucua

SEQ ID NO: 1112361 - RNA, 19 nt, Artificial Sequence
  Description of Artificial Sequence: Synthetic oligonucleotide
  Antisense strand to SEQ ID NO: 1112360
uagacacuuauaaggauac

SEQ ID NO: 1112362 - RNA, 19 nt, Artificial Sequence
  Description of Artificial Sequence: Synthetic oligonucleotide
  Sense strand starting at position 723 of SEQ ID NO: 915869
ccuuauaagugucuaagaa

SEQ ID NO: 1112363 - RNA, 19 nt, Artificial Sequence
  Description of Artificial Sequence: Synthetic oligonucleotide
  Antisense strand to SEQ ID NO: 1112362
uucuuagacacuuauaagg

SEQ ID NO: 1112364 - RNA, 19 nt, Artificial Sequence
  Description of Artificial Sequence: Synthetic oligonucleotide
  Sense strand starting at position 724 of SEQ ID NO: 915869
cuuauaagugucuaagaau

SEQ ID NO: 1112365 - RNA, 19 nt, Artificial Sequence
  Description of Artificial Sequence: Synthetic oligonucleotide
  Antisense strand to SEQ ID NO: 1112364
auucuuagacacuuauaag

SEQ ID NO: 1112366 - RNA, 19 nt, Artificial Sequence
  Description of Artificial Sequence: Synthetic oligonucleotide
  Sense strand starting at position 733 of SEQ ID NO: 915869
gucuaagaaucaucaagca

SEQ ID NO: 1112367 - RNA, 19 nt, Artificial Sequence
  Description of Artificial Sequence: Synthetic oligonucleotide
  Antisense strand to SEQ ID NO: 1112366
ugcuugaugauucuuagac

SEQ ID NO: 1112368 - RNA, 19 nt, Artificial Sequence
  Description of Artificial Sequence: Synthetic oligonucleotide
  Sense strand starting at position 865 of SEQ ID NO: 915869
gagaaaugcagcgaggacu

SEQ ID NO: 1112369 - RNA, 19 nt, Artificial Sequence
  Description of Artificial Sequence: Synthetic oligonucleotide
  Antisense strand to SEQ ID NO: 1112368
aguccucgcugcauuucuc

SEQ ID NO: 1112370 - RNA, 19 nt, Artificial Sequence
  Description of Artificial Sequence: Synthetic oligonucleotide
  Sense strand starting at position 1047 of SEQ ID NO: 915869
aguuguaaccuggaguaaa

SEQ ID NO: 1112371 - RNA, 19 nt, Artificial Sequence
  Description of Artificial Sequence: Synthetic oligonucleotide
  Antisense strand to SEQ ID NO: 1112370
uuuacuccagguuacaacu

SEQ ID NO: 1112372 - RNA, 19 nt, Artificial Sequence
  Description of Artificial Sequence: Synthetic oligonucleotide
  Sense strand starting at position 1174 of SEQ ID NO: 915869
aggcuuaacauuggaaagu

SEQ ID NO: 1112373 - RNA, 19 nt, Artificial Sequence
  Description of Artificial Sequence: Synthetic oligonucleotide
  Antisense strand to SEQ ID NO: 1112372
acuuuccaauguuaagccu

SEQ ID NO: 1112374 - RNA, 19 nt, Artificial Sequence
  Description of Artificial Sequence: Synthetic oligonucleotide
  Sense strand starting at position 1324 of SEQ ID NO: 915869
cuggaaauuacguggacuu

SEQ ID NO: 1112375 - RNA, 19 nt, Artificial Sequence
  Description of Artificial Sequence: Synthetic oligonucleotide
  Antisense strand to SEQ ID NO: 1112374
aaguccacguaauuuccag

SEQ ID NO: 1112376 - RNA, 19 nt, Artificial Sequence
  Description of Artificial Sequence: Synthetic oligonucleotide
  Sense strand starting at position 1802 of SEQ ID NO: 915869
agacauguggcuugaaccu

SEQ ID NO: 1112377 - RNA, 19 nt, Artificial Sequence
  Description of Artificial Sequence: Synthetic oligonucleotide
  Antisense strand to SEQ ID NO: 1112376
agguucaagccacaugucu

SEQ ID NO: 1112378 - RNA, 19 nt, Artificial Sequence
  Description of Artificial Sequence: Synthetic oligonucleotide
  Sense strand starting at position 2772 of SEQ ID NO: 915869
gagggucacgggugagauu

SEQ ID NO: 1112379 - RNA, 19 nt, Artificial Sequence
  Description of Artificial Sequence: Synthetic oligonucleotide
  Antisense strand to SEQ ID NO: 1112378
aaucucacccgugacccuc

SEQ ID NO: 1112380 - RNA, 19 nt, Artificial Sequence
  Description of Artificial Sequence: Synthetic oligonucleotide
  Sense strand starting at position 2823 of SEQ ID NO: 915869
uccgguuuccaccaaaguu

SEQ ID NO: 1112381 - RNA, 19 nt, Artificial Sequence
  Description of Artificial Sequence: Synthetic oligonucleotide
  Antisense strand to SEQ ID NO: 1112380
aacuuugguggaaaccgga

SEQ ID NO: 1112382 - RNA, 19 nt, Artificial Sequence
  Description of Artificial Sequence: Synthetic oligonucleotide
  Sense strand starting at position 2871 of SEQ ID NO: 915869
aauuuacuuuggcaaaggu

SEQ ID NO: 1112383 - RNA, 19 nt, Artificial Sequence
  Description of Artificial Sequence: Synthetic oligonucleotide
  Antisense strand to SEQ ID NO: 1112382
accuuugccaaaguaaauu

SEQ ID NO: 1112384 - RNA, 19 nt, Artificial Sequence
  Description of Artificial Sequence: Synthetic oligonucleotide
  Sense strand starting at position 3151 of SEQ ID NO: 915869
cgcagauucccacagagaa

SEQ ID NO: 1112385 - RNA, 19 nt, Artificial Sequence
  Description of Artificial Sequence: Synthetic oligonucleotide
  Antisense strand to SEQ ID NO: 1112384
uucucugugggaaucugcg

SEQ ID NO: 1112386 - RNA, 19 nt, Artificial Sequence
  Description of Artificial Sequence: Synthetic oligonucleotide
  Sense strand starting at position 3164 of SEQ ID NO: 915869
agagaagaaucagugucuu

SEQ ID NO: 1112387 - RNA, 19 nt, Artificial Sequence
  Description of Artificial Sequence: Synthetic oligonucleotide
  Antisense strand to SEQ ID NO: 1112386
aagacacugauucuucucu

SEQ ID NO: 1112388 - RNA, 19 nt, Artificial Sequence
  Description of Artificial Sequence: Synthetic oligonucleotide
  Sense strand starting at position 3201 of SEQ ID NO: 915869
cccaauggucuaugaauag

SEQ ID NO: 1112389 - RNA, 19 nt, Artificial Sequence
  Description of Artificial Sequence: Synthetic oligonucleotide
  Antisense strand to SEQ ID NO: 1112388
cuauucauagaccauuggg

SEQ ID NO: 1112390 - RNA, 19 nt, Artificial Sequence
  Description of Artificial Sequence: Synthetic oligonucleotide
  Sense strand starting at position 3208 of SEQ ID NO: 915869
gucuaugaauagguuggaa

SEQ ID NO: 1112391 - RNA, 19 nt, Artificial Sequence
  Description of Artificial Sequence: Synthetic oligonucleotide
  Antisense strand to SEQ ID NO: 1112390
uuccaaccuauucauagac

SEQ ID NO: 1112392 - RNA, 19 nt, Artificial Sequence
  Description of Artificial Sequence: Synthetic oligonucleotide
  Sense strand starting at position 3221 of SEQ ID NO: 915869
uuggaauggcgguacuuua

SEQ ID NO: 1112393 - RNA, 19 nt, Artificial Sequence
  Description of Artificial Sequence: Synthetic oligonucleotide
  Antisense strand to SEQ ID NO: 1112392
uaaaguaccgccauuccaa

SEQ ID NO: 1112394 - RNA, 19 nt, Artificial Sequence
  Description of Artificial Sequence: Synthetic oligonucleotide
  Sense strand starting at position 3469 of SEQ ID NO: 915869
caggcaucugugcauuauc

SEQ ID NO: 1112395 - RNA, 19 nt, Artificial Sequence
  Description of Artificial Sequence: Synthetic oligonucleotide
  Antisense strand to SEQ ID NO: 1112394
gauaaugcacagaugccug

SEQ ID NO: 1112396 - RNA, 19 nt, Artificial Sequence
  Description of Artificial Sequence: Synthetic oligonucleotide
  Sense strand starting at position 3498 of SEQ ID NO: 915869
cuuacaacucuaugaaggu

SEQ ID NO: 1112397 - RNA, 19 nt, Artificial Sequence
  Description of Artificial Sequence: Synthetic oligonucleotide
  Antisense strand to SEQ ID NO: 1112396
accuucauagaguuguaag

SEQ ID NO: 1112398 - RNA, 19 nt, Artificial Sequence
  Description of Artificial Sequence: Synthetic oligonucleotide
  Sense strand starting at position 3654 of SEQ ID NO: 915869
uucugugagggucaggaua

SEQ ID NO: 1112399 - RNA, 19 nt, Artificial Sequence
  Description of Artificial Sequence: Synthetic oligonucleotide
  Antisense strand to SEQ ID NO: 1112398
uauccugacccucacagaa

SEQ ID NO: 1112400 - RNA, 19 nt, Artificial Sequence
  Description of Artificial Sequence: Synthetic oligonucleotide
  Sense strand starting at position 3793 of SEQ ID NO: 915869
ugguguacucuuugauaaa

SEQ ID NO: 1112401 - RNA, 19 nt, Artificial Sequence
  Description of Artificial Sequence: Synthetic oligonucleotide
  Antisense strand to SEQ ID NO: 1112400
uuuaucaaagaguacacca

SEQ ID NO: 1112402 - RNA, 19 nt, Artificial Sequence
  Description of Artificial Sequence: Synthetic oligonucleotide
  Sense strand starting at position 3824 of SEQ ID NO: 915869
acuugauggaggcauguuu

SEQ ID NO: 1112403 - RNA, 19 nt, Artificial Sequence
  Description of Artificial Sequence: Synthetic oligonucleotide
  Antisense strand to SEQ ID NO: 1112402
aaacaugccuccaucaagu

SEQ ID NO: 1112404 - RNA, 19 nt, Artificial Sequence
  Description of Artificial Sequence: Synthetic oligonucleotide
  Sense strand starting at position 3833 of SEQ ID NO: 915869
aggcauguuugacuaucuu

SEQ ID NO: 1112405 - RNA, 19 nt, Artificial Sequence
  Description of Artificial Sequence: Synthetic oligonucleotide
  Antisense strand to SEQ ID NO: 1112404
aagauagucaaacaugccu

SEQ ID NO: 1112406 - RNA, 19 nt, Artificial Sequence
  Description of Artificial Sequence: Synthetic oligonucleotide
  Sense strand starting at position 3837 of SEQ ID NO: 915869
auguuugacuaucuuuguu

SEQ ID NO: 1112407 - RNA, 19 nt, Artificial Sequence
  Description of Artificial Sequence: Synthetic oligonucleotide
  Antisense strand to SEQ ID NO: 1112406
aacaaagauagucaaacau

SEQ ID NO: 1112408 - RNA, 19 nt, Artificial Sequence
  Description of Artificial Sequence: Synthetic oligonucleotide
  Sense strand starting at position 3839 of SEQ ID NO: 915869
guuugacuaucuuuguuua

SEQ ID NO: 1112409 - RNA, 19 nt, Artificial Sequence
  Description of Artificial Sequence: Synthetic oligonucleotide
  Antisense strand to SEQ ID NO: 1112408
uaaacaaagauagucaaac

SEQ ID NO: 1112410 - RNA, 19 nt, Artificial Sequence
  Description of Artificial Sequence: Synthetic oligonucleotide
  Sense strand starting at position 3842 of SEQ ID NO: 915869
ugacuaucuuuguuuauga

SEQ ID NO: 1112411 - RNA, 19 nt, Artificial Sequence
  Description of Artificial Sequence: Synthetic oligonucleotide
  Antisense strand to SEQ ID NO: 1112410
ucauaaacaaagauaguca

SEQ ID NO: 1112412 - RNA, 19 nt, Artificial Sequence
  Description of Artificial Sequence: Synthetic oligonucleotide
  Sense strand starting at position 3844 of SEQ ID NO: 915869
acuaucuuuguuuaugaca

SEQ ID NO: 1112413 - RNA, 19 nt, Artificial Sequence
  Description of Artificial Sequence: Synthetic oligonucleotide
  Antisense strand to SEQ ID NO: 1112412
ugucauaaacaaagauagu

SEQ ID NO: 1112414 - RNA, 19 nt, Artificial Sequence
  Description of Artificial Sequence: Synthetic oligonucleotide
  Sense strand starting at position 3852 of SEQ ID NO: 915869
uguuuaugacauuagcaaa

SEQ ID NO: 1112415 - RNA, 19 nt, Artificial Sequence
  Description of Artificial Sequence: Synthetic oligonucleotide
  Antisense strand to SEQ ID NO: 1112414
uuugcuaaugucauaaaca

SEQ ID NO: 1112416 - RNA, 19 nt, Artificial Sequence
  Description of Artificial Sequence: Synthetic oligonucleotide
  Sense strand starting at position 3872 of SEQ ID NO: 915869
uuucaauggguuuggaagu

SEQ ID NO: 1112417 - RNA, 19 nt, Artificial Sequence
  Description of Artificial Sequence: Synthetic oligonucleotide
  Antisense strand to SEQ ID NO: 1112416
acuuccaaacccauugaaa

SEQ ID NO: 1112418 - RNA, 19 nt, Artificial Sequence
  Description of Artificial Sequence: Synthetic oligonucleotide
  Sense strand starting at position 3895 of SEQ ID NO: 915869
cuauuuaguucugugucuu

SEQ ID NO: 1112419 - RNA, 19 nt, Artificial Sequence
  Description of Artificial Sequence: Synthetic oligonucleotide
  Antisense strand to SEQ ID NO: 1112418
aagacacagaacuaaauag

SEQ ID NO: 1112420 - RNA, 19 nt, Artificial Sequence
  Description of Artificial Sequence: Synthetic oligonucleotide
  Sense strand starting at position 3928 of SEQ ID NO: 915869
acaccugugacuugaggua

SEQ ID NO: 1112421 - RNA, 19 nt, Artificial Sequence
  Description of Artificial Sequence: Synthetic oligonucleotide
  Antisense strand to SEQ ID NO: 1112420
uaccucaagucacaggugu

SEQ ID NO: 1112422 - RNA, 19 nt, Artificial Sequence
  Description of Artificial Sequence: Synthetic oligonucleotide
  Sense strand starting at position 3933 of SEQ ID NO: 915869
ugugacuugagguaaagua

SEQ ID NO: 1112423 - RNA, 19 nt, Artificial Sequence
  Description of Artificial Sequence: Synthetic oligonucleotide
  Antisense strand to SEQ ID NO: 1112422
uacuuuaccucaagucaca

SEQ ID NO: 1112424 - RNA, 19 nt, Artificial Sequence
  Description of Artificial Sequence: Synthetic oligonucleotide
  Sense strand starting at position 3970 of SEQ ID NO: 915869
caaucaugagagugaccga

SEQ ID NO: 1112425 - RNA, 19 nt, Artificial Sequence
  Description of Artificial Sequence: Synthetic oligonucleotide
  Antisense strand to SEQ ID NO: 1112424
ucggucacucucaugauug

SEQ ID NO: 1112426 - RNA, 19 nt, Artificial Sequence
  Description of Artificial Sequence: Synthetic oligonucleotide
  Sense strand starting at position 102 of SEQ ID NO: 915870
cuauauaaccagugacagu

SEQ ID NO: 1112427 - RNA, 19 nt, Artificial Sequence
  Description of Artificial Sequence: Synthetic oligonucleotide
  Antisense strand to SEQ ID NO: 1112426
acugucacugguuauauag

SEQ ID NO: 1112428 - RNA, 19 nt, Artificial Sequence
  Description of Artificial Sequence: Synthetic oligonucleotide
  Sense strand starting at position 111 of SEQ ID NO: 915870
cagugacaguacuugauaa

SEQ ID NO: 1112429 - RNA, 19 nt, Artificial Sequence
  Description of Artificial Sequence: Synthetic oligonucleotide
  Antisense strand to SEQ ID NO: 1112428
uuaucaaguacugucacug

SEQ ID NO: 1112430 - RNA, 19 nt, Artificial Sequence
  Description of Artificial Sequence: Synthetic oligonucleotide
  Sense strand starting at position 293 of SEQ ID NO: 915870
gcagaaguugaauaauguu

SEQ ID NO: 1112431 - RNA, 19 nt, Artificial Sequence
  Description of Artificial Sequence: Synthetic oligonucleotide
  Antisense strand to SEQ ID NO: 1112430
aacauuauucaacuucugc

SEQ ID NO: 1112432 - RNA, 19 nt, Artificial Sequence
  Description of Artificial Sequence: Synthetic oligonucleotide
  Sense strand starting at position 401 of SEQ ID NO: 915870
guguuaucauuucugguac

SEQ ID NO: 1112433 - RNA, 19 nt, Artificial Sequence
  Description of Artificial Sequence: Synthetic oligonucleotide
  Antisense strand to SEQ ID NO: 1112432
guaccagaaaugauaacac

SEQ ID NO: 1112434 - RNA, 19 nt, Artificial Sequence
  Description of Artificial Sequence: Synthetic oligonucleotide
  Sense strand starting at position 449 of SEQ ID NO: 915870
uguauuuaggcagggcuau

SEQ ID NO: 1112435 - RNA, 19 nt, Artificial Sequence
  Description of Artificial Sequence: Synthetic oligonucleotide
  Antisense strand to SEQ ID NO: 1112434
auagcccugccuaaauaca

SEQ ID NO: 1112436 - RNA, 19 nt, Artificial Sequence
  Description of Artificial Sequence: Synthetic oligonucleotide
  Sense strand starting at position 450 of SEQ ID NO: 915870
guauuuaggcagggcuauu

SEQ ID NO: 1112437 - RNA, 19 nt, Artificial Sequence
  Description of Artificial Sequence: Synthetic oligonucleotide
  Antisense strand to SEQ ID NO: 1112436
aauagcccugccuaaauac

SEQ ID NO: 1112438 - RNA, 19 nt, Artificial Sequence
  Description of Artificial Sequence: Synthetic oligonucleotide
  Sense strand starting at position 477 of SEQ ID NO: 915870
ccacaagucauuugugugu

SEQ ID NO: 1112439 - RNA, 19 nt, Artificial Sequence
  Description of Artificial Sequence: Synthetic oligonucleotide
  Antisense strand to SEQ ID NO: 1112438
acacacaaaugacuugugg

SEQ ID NO: 1112440 - RNA, 19 nt, Artificial Sequence
  Description of Artificial Sequence: Synthetic oligonucleotide
  Sense strand starting at position 481 of SEQ ID NO: 915870
aagucauuuguguguuaca

SEQ ID NO: 1112441 - RNA, 19 nt, Artificial Sequence
  Description of Artificial Sequence: Synthetic oligonucleotide
  Antisense strand to SEQ ID NO: 1112440
uguaacacacaaaugacuu

SEQ ID NO: 1112442 - RNA, 19 nt, Artificial Sequence
  Description of Artificial Sequence: Synthetic oligonucleotide
  Sense strand starting at position 482 of SEQ ID NO: 915870
agucauuuguguguuacau

SEQ ID NO: 1112443 - RNA, 19 nt, Artificial Sequence
  Description of Artificial Sequence: Synthetic oligonucleotide
  Antisense strand to SEQ ID NO: 1112442
auguaacacacaaaugacu

SEQ ID NO: 1112444 - RNA, 19 nt, Artificial Sequence
  Description of Artificial Sequence: Synthetic oligonucleotide
  Sense strand starting at position 532 of SEQ ID NO: 915870
ggaucagugauauguguga

SEQ ID NO: 1112445 - RNA, 19 nt, Artificial Sequence
  Description of Artificial Sequence: Synthetic oligonucleotide
  Antisense strand to SEQ ID NO: 1112444
ucacacauaucacugaucc

SEQ ID NO: 1112446 - RNA, 19 nt, Artificial Sequence
  Description of Artificial Sequence: Synthetic oligonucleotide
  Sense strand starting at position 543 of SEQ ID NO: 915870
augugugauggguacuuaa

SEQ ID NO: 1112447 - RNA, 19 nt, Artificial Sequence
  Description of Artificial Sequence: Synthetic oligonucleotide
  Antisense strand to SEQ ID NO: 1112446
uuaaguacccaucacacau

SEQ ID NO: 1112448 - RNA, 19 nt, Artificial Sequence
  Description of Artificial Sequence: Synthetic oligonucleotide
  Sense strand starting at position 732 of SEQ ID NO: 915870
uugcauguagaccagaauu

SEQ ID NO: 1112449 - RNA, 19 nt, Artificial Sequence
  Description of Artificial Sequence: Synthetic oligonucleotide
  Antisense strand to SEQ ID NO: 1112448
aauucuggucuacaugcaa

SEQ ID NO: 1112450 - RNA, 19 nt, Artificial Sequence
  Description of Artificial Sequence: Synthetic oligonucleotide
  Sense strand starting at position 880 of SEQ ID NO: 915870
guaaacgcucuccauaauu

SEQ ID NO: 1112451 - RNA, 19 nt, Artificial Sequence
  Description of Artificial Sequence: Synthetic oligonucleotide
  Antisense strand to SEQ ID NO: 1112450
aauuauggagagcguuuac

SEQ ID NO: 1112452 - RNA, 19 nt, Artificial Sequence
  Description of Artificial Sequence: Synthetic oligonucleotide
  Sense strand starting at position 924 of SEQ ID NO: 915870
aacugaagguuguccacau

SEQ ID NO: 1112453 - RNA, 19 nt, Artificial Sequence
  Description of Artificial Sequence: Synthetic oligonucleotide
  Antisense strand to SEQ ID NO: 1112452
auguggacaaccuucaguu

SEQ ID NO: 1112454 - RNA, 19 nt, Artificial Sequence
  Description of Artificial Sequence: Synthetic oligonucleotide
  Sense strand starting at position 928 of SEQ ID NO: 915870
gaagguuguccacaugauu

SEQ ID NO: 1112455 - RNA, 19 nt, Artificial Sequence
  Description of Artificial Sequence: Synthetic oligonucleotide
  Antisense strand to SEQ ID NO: 1112454
aaucauguggacaaccuuc

SEQ ID NO: 1112456 - RNA, 19 nt, Artificial Sequence
  Description of Artificial Sequence: Synthetic oligonucleotide
  Sense strand starting at position 1066 of SEQ ID NO: 915870
uuagcugaagagugauaua

SEQ ID NO: 1112457 - RNA, 19 nt, Artificial Sequence
  Description of Artificial Sequence: Synthetic oligonucleotide
  Antisense strand to SEQ ID NO: 1112456
uauaucacucuucagcuaa

SEQ ID NO: 1112458 - RNA, 19 nt, Artificial Sequence
  Description of Artificial Sequence: Synthetic oligonucleotide
  Sense strand starting at position 1076 of SEQ ID NO: 915870
agugauauaauccgaguau

SEQ ID NO: 1112459 - RNA, 19 nt, Artificial Sequence
  Description of Artificial Sequence: Synthetic oligonucleotide
  Antisense strand to SEQ ID NO: 1112458
auacucggauuauaucacu

SEQ ID NO: 1112460 - RNA, 19 nt, Artificial Sequence
  Description of Artificial Sequence: Synthetic oligonucleotide
  Sense strand starting at position 1080 of SEQ ID NO: 915870
auauaauccgaguauucua

SEQ ID NO: 1112461 - RNA, 19 nt, Artificial Sequence
  Description of Artificial Sequence: Synthetic oligonucleotide
  Antisense strand to SEQ ID NO: 1112460
uagaauacucggauuauau

SEQ ID NO: 1112462 - RNA, 19 nt, Artificial Sequence
  Description of Artificial Sequence: Synthetic oligonucleotide
  Sense strand starting at position 1083 of SEQ ID NO: 915870
uaauccgaguauucuaaga

SEQ ID NO: 1112463 - RNA, 19 nt, Artificial Sequence
  Description of Artificial Sequence: Synthetic oligonucleotide
  Antisense strand to SEQ ID NO: 1112462
ucuuagaauacucggauua

SEQ ID NO: 1112464 - RNA, 19 nt, Artificial Sequence
  Description of Artificial Sequence: Synthetic oligonucleotide
  Sense strand starting at position 1242 of SEQ ID NO: 915870
uuagcaagagucuauaugu

SEQ ID NO: 1112465 - RNA, 19 nt, Artificial Sequence
  Description of Artificial Sequence: Synthetic oligonucleotide
  Antisense strand to SEQ ID NO: 1112464
acauauagacucuugcuaa

SEQ ID NO: 1112466 - RNA, 19 nt, Artificial Sequence
  Description of Artificial Sequence: Synthetic oligonucleotide
  Sense strand starting at position 1525 of SEQ ID NO: 915870
gguccuguaagaggaugaa

SEQ ID NO: 1112467 - RNA, 19 nt, Artificial Sequence
  Description of Artificial Sequence: Synthetic oligonucleotide
  Antisense strand to SEQ ID NO: 1112466
uucauccucuuacaggacc

SEQ ID NO: 1112468 - RNA, 19 nt, Artificial Sequence
  Description of Artificial Sequence: Synthetic oligonucleotide
  Sense strand starting at position 1630 of SEQ ID NO: 915870
cugggaaaguugcuaucaa

SEQ ID NO: 1112469 - RNA, 19 nt, Artificial Sequence
  Description of Artificial Sequence: Synthetic oligonucleotide
  Antisense strand to SEQ ID NO: 1112468
uugauagcaacuuucccag

SEQ ID NO: 1112470 - RNA, 19 nt, Artificial Sequence
  Description of Artificial Sequence: Synthetic oligonucleotide
  Sense strand starting at position 1673 of SEQ ID NO: 915870
aauguucucagcgagagag

SEQ ID NO: 1112471 - RNA, 19 nt, Artificial Sequence
  Description of Artificial Sequence: Synthetic oligonucleotide
  Antisense strand to SEQ ID NO: 1112470
cucucucgcugagaacauu

SEQ ID NO: 1112472 - RNA, 19 nt, Artificial Sequence
  Description of Artificial Sequence: Synthetic oligonucleotide
  Sense strand starting at position 1728 of SEQ ID NO: 915870
uguggaguaugacuugauc

SEQ ID NO: 1112473 - RNA, 19 nt, Artificial Sequence
  Description of Artificial Sequence: Synthetic oligonucleotide
  Antisense strand to SEQ ID NO: 1112472
gaucaagucauacuccaca

SEQ ID NO: 1112474 - RNA, 19 nt, Artificial Sequence
  Description of Artificial Sequence: Synthetic oligonucleotide
  Sense strand starting at position 1730 of SEQ ID NO: 915870
uggaguaugacuugauccu

SEQ ID NO: 1112475 - RNA, 19 nt, Artificial Sequence
  Description of Artificial Sequence: Synthetic oligonucleotide
  Antisense strand to SEQ ID NO: 1112474
aggaucaagucauacucca

SEQ ID NO: 1112476 - RNA, 19 nt, Artificial Sequence
  Description of Artificial Sequence: Synthetic oligonucleotide
  Sense strand starting at position 1873 of SEQ ID NO: 915870
guuggaguacuccacaaug

SEQ ID NO: 1112477 - RNA, 19 nt, Artificial Sequence
  Description of Artificial Sequence: Synthetic oligonucleotide
  Antisense strand to SEQ ID NO: 1112476
cauuguggaguacuccaac

SEQ ID NO: 1112478 - RNA, 19 nt, Artificial Sequence
  Description of Artificial Sequence: Synthetic oligonucleotide
  Sense strand starting at position 2110 of SEQ ID NO: 915870
agcgucaaucuugaaugau

SEQ ID NO: 1112479 - RNA, 19 nt, Artificial Sequence
  Description of Artificial Sequence: Synthetic oligonucleotide
  Antisense strand to SEQ ID NO: 1112478
aucauucaagauugacgcu

SEQ ID NO: 1112480 - RNA, 19 nt, Artificial Sequence
  Description of Artificial Sequence: Synthetic oligonucleotide
  Sense strand starting at position 2113 of SEQ ID NO: 915870
gucaaucuugaaugaugag

SEQ ID NO: 1112481 - RNA, 19 nt, Artificial Sequence
  Description of Artificial Sequence: Synthetic oligonucleotide
  Antisense strand to SEQ ID NO: 1112480
cucaucauucaagauugac

SEQ ID NO: 1112482 - RNA, 19 nt, Artificial Sequence
  Description of Artificial Sequence: Synthetic oligonucleotide
  Sense strand starting at position 2209 of SEQ ID NO: 915870
cugguuauacguuacagag

SEQ ID NO: 1112483 - RNA, 19 nt, Artificial Sequence
  Description of Artificial Sequence: Synthetic oligonucleotide
  Antisense strand to SEQ ID NO: 1112482
cucuguaacguauaaccag

SEQ ID NO: 1112484 - RNA, 19 nt, Artificial Sequence
  Description of Artificial Sequence: Synthetic oligonucleotide
  Sense strand starting at position 2371 of SEQ ID NO: 915870
agauaaacguuucugaucu

SEQ ID NO: 1112485 - RNA, 19 nt, Artificial Sequence
  Description of Artificial Sequence: Synthetic oligonucleotide
  Antisense strand to SEQ ID NO: 1112484
agaucagaaacguuuaucu

SEQ ID NO: 1112486 - RNA, 19 nt, Artificial Sequence
  Description of Artificial Sequence: Synthetic oligonucleotide
  Sense strand starting at position 2375 of SEQ ID NO: 915870
aaacguuucugaucugaag

SEQ ID NO: 1112487 - RNA, 19 nt, Artificial Sequence
  Description of Artificial Sequence: Synthetic oligonucleotide
  Antisense strand to SEQ ID NO: 1112486
cuucagaucagaaacguuu

SEQ ID NO: 1112488 - RNA, 19 nt, Artificial Sequence
  Description of Artificial Sequence: Synthetic oligonucleotide
  Sense strand starting at position 2407 of SEQ ID NO: 915870
ggagaauaauuauucuguu

SEQ ID NO: 1112489 - RNA, 19 nt, Artificial Sequence
  Description of Artificial Sequence: Synthetic oligonucleotide
  Antisense strand to SEQ ID NO: 1112488
aacagaauaauuauucucc

SEQ ID NO: 1112490 - RNA, 19 nt, Artificial Sequence
  Description of Artificial Sequence: Synthetic oligonucleotide
  Sense strand starting at position 2508 of SEQ ID NO: 915870
caucgcaaucuugaaguca

SEQ ID NO: 1112491 - RNA, 19 nt, Artificial Sequence
  Description of Artificial Sequence: Synthetic oligonucleotide
  Antisense strand to SEQ ID NO: 1112490
ugacuucaagauugcgaug

SEQ ID NO: 1112492 - RNA, 19 nt, Artificial Sequence
  Description of Artificial Sequence: Synthetic oligonucleotide
  Sense strand starting at position 2638 of SEQ ID NO: 915870
cuaaauuagcuauaaaggu

SEQ ID NO: 1112493 - RNA, 19 nt, Artificial Sequence
  Description of Artificial Sequence: Synthetic oligonucleotide
  Antisense strand to SEQ ID NO: 1112492
accuuuauagcuaauuuag

SEQ ID NO: 1112494 - RNA, 19 nt, Artificial Sequence
  Description of Artificial Sequence: Synthetic oligonucleotide
  Sense strand starting at position 2868 of SEQ ID NO: 915870
gcagaaagguuagucuaac

SEQ ID NO: 1112495 - RNA, 19 nt, Artificial Sequence
  Description of Artificial Sequence: Synthetic oligonucleotide
  Antisense strand to SEQ ID NO: 1112494
guuagacuaaccuuucugc

SEQ ID NO: 1112496 - RNA, 19 nt, Artificial Sequence
  Description of Artificial Sequence: Synthetic oligonucleotide
  Sense strand starting at position 2992 of SEQ ID NO: 915870
gccucaauuuauuagaaag

SEQ ID NO: 1112497 - RNA, 19 nt, Artificial Sequence
  Description of Artificial Sequence: Synthetic oligonucleotide
  Antisense strand to SEQ ID NO: 1112496
cuuucuaauaaauugaggc

SEQ ID NO: 1112498 - RNA, 19 nt, Artificial Sequence
  Description of Artificial Sequence: Synthetic oligonucleotide
  Sense strand starting at position 3082 of SEQ ID NO: 915870
gugccucuuccacauaaag

SEQ ID NO: 1112499 - RNA, 19 nt, Artificial Sequence
  Description of Artificial Sequence: Synthetic oligonucleotide
  Antisense strand to SEQ ID NO: 1112498
cuuuauguggaagaggcac

SEQ ID NO: 1112500 - RNA, 19 nt, Artificial Sequence
  Description of Artificial Sequence: Synthetic oligonucleotide
  Sense strand starting at position 3155 of SEQ ID NO: 915870
auaguaagugccuaauaca

SEQ ID NO: 1112501 - RNA, 19 nt, Artificial Sequence
  Description of Artificial Sequence: Synthetic oligonucleotide
  Antisense strand to SEQ ID NO: 1112500
uguauuaggcacuuacuau

SEQ ID NO: 1112502 - RNA, 19 nt, Artificial Sequence
  Description of Artificial Sequence: Synthetic oligonucleotide
  Sense strand starting at position 3769 of SEQ ID NO: 915870
guccauuuguuggcuuuga

SEQ ID NO: 1112503 - RNA, 19 nt, Artificial Sequence
  Description of Artificial Sequence: Synthetic oligonucleotide
  Antisense strand to SEQ ID NO: 1112502
ucaaagccaacaaauggac

SEQ ID NO: 1112504 - RNA, 19 nt, Artificial Sequence
  Description of Artificial Sequence: Synthetic oligonucleotide
  Sense strand starting at position 3770 of SEQ ID NO: 915870
uccauuuguuggcuuugaa

SEQ ID NO: 1112505 - RNA, 19 nt, Artificial Sequence
  Description of Artificial Sequence: Synthetic oligonucleotide
  Antisense strand to SEQ ID NO: 1112504
uucaaagccaacaaaugga

SEQ ID NO: 1112506 - RNA, 19 nt, Artificial Sequence
  Description of Artificial Sequence: Synthetic oligonucleotide
  Sense strand starting at position 70 of SEQ ID NO: 915871
gcagaaguugaauaauguu

SEQ ID NO: 1112507 - RNA, 19 nt, Artificial Sequence
  Description of Artificial Sequence: Synthetic oligonucleotide
  Antisense strand to SEQ ID NO: 1112506
aacauuauucaacuucugc

SEQ ID NO: 1112508 - RNA, 19 nt, Artificial Sequence
  Description of Artificial Sequence: Synthetic oligonucleotide
  Sense strand starting at position 178 of SEQ ID NO: 915871
guguuaucauuucugguac

SEQ ID NO: 1112509 - RNA, 19 nt, Artificial Sequence
  Description of Artificial Sequence: Synthetic oligonucleotide
  Antisense strand to SEQ ID NO: 1112508
guaccagaaaugauaacac

SEQ ID NO: 1112510 - RNA, 19 nt, Artificial Sequence
  Description of Artificial Sequence: Synthetic oligonucleotide
  Sense strand starting at position 226 of SEQ ID NO: 915871
uguauuuaggcagggcuau

SEQ ID NO: 1112511 - RNA, 19 nt, Artificial Sequence
  Description of Artificial Sequence: Synthetic oligonucleotide
  Antisense strand to SEQ ID NO: 1112510
auagcccugccuaaauaca

SEQ ID NO: 1112512 - RNA, 19 nt, Artificial Sequence
  Description of Artificial Sequence: Synthetic oligonucleotide
  Sense strand starting at position 227 of SEQ ID NO: 915871
guauuuaggcagggcuauu

SEQ ID NO: 1112513 - RNA, 19 nt, Artificial Sequence
  Description of Artificial Sequence: Synthetic oligonucleotide
  Antisense strand to SEQ ID NO: 1112512
aauagcccugccuaaauac

SEQ ID NO: 1112514 - RNA, 19 nt, Artificial Sequence
  Description of Artificial Sequence: Synthetic oligonucleotide
  Sense strand starting at position 254 of SEQ ID NO: 915871
ccacaagucauuugugugu

SEQ ID NO: 1112515 - RNA, 19 nt, Artificial Sequence
  Description of Artificial Sequence: Synthetic oligonucleotide
  Antisense strand to SEQ ID NO: 1112514
acacacaaaugacuugugg

SEQ ID NO: 1112516 - RNA, 19 nt, Artificial Sequence
  Description of Artificial Sequence: Synthetic oligonucleotide
  Sense strand starting at position 258 of SEQ ID NO: 915871
aagucauuuguguguuaca

SEQ ID NO: 1112517 - RNA, 19 nt, Artificial Sequence
  Description of Artificial Sequence: Synthetic oligonucleotide
  Antisense strand to SEQ ID NO: 1112516
uguaacacacaaaugacuu

SEQ ID NO: 1112518 - RNA, 19 nt, Artificial Sequence
  Description of Artificial Sequence: Synthetic oligonucleotide
  Sense strand starting at position 259 of SEQ ID NO: 915871
agucauuuguguguuacau

SEQ ID NO: 1112519 - RNA, 19 nt, Artificial Sequence
  Description of Artificial Sequence: Synthetic oligonucleotide
  Antisense strand to SEQ ID NO: 1112518
auguaacacacaaaugacu

SEQ ID NO: 1112520 - RNA, 19 nt, Artificial Sequence
  Description of Artificial Sequence: Synthetic oligonucleotide
  Sense strand starting at position 309 of SEQ ID NO: 915871
ggaucagugauauguguga

SEQ ID NO: 1112521 - RNA, 19 nt, Artificial Sequence
  Description of Artificial Sequence: Synthetic oligonucleotide
  Antisense strand to SEQ ID NO: 1112520
ucacacauaucacugaucc

SEQ ID NO: 1112522 - RNA, 19 nt, Artificial Sequence
  Description of Artificial Sequence: Synthetic oligonucleotide
  Sense strand starting at position 320 of SEQ ID NO: 915871
augugugauggguacuuaa

SEQ ID NO: 1112523 - RNA, 19 nt, Artificial Sequence
  Description of Artificial Sequence: Synthetic oligonucleotide
  Antisense strand to SEQ ID NO: 1112522
uuaaguacccaucacacau

SEQ ID NO: 1112524 - RNA, 19 nt, Artificial Sequence
  Description of Artificial Sequence: Synthetic oligonucleotide
  Sense strand starting at position 509 of SEQ ID NO: 915871
uugcauguagaccagaauu

SEQ ID NO: 1112525 - RNA, 19 nt, Artificial Sequence
  Description of Artificial Sequence: Synthetic oligonucleotide
  Antisense strand to SEQ ID NO: 1112524
aauucuggucuacaugcaa

SEQ ID NO: 1112526 - RNA, 19 nt, Artificial Sequence
  Description of Artificial Sequence: Synthetic oligonucleotide
  Sense strand starting at position 657 of SEQ ID NO: 915871
guaaacgcucuccauaauu

SEQ ID NO: 1112527 - RNA, 19 nt, Artificial Sequence
  Description of Artificial Sequence: Synthetic oligonucleotide
  Antisense strand to SEQ ID NO: 1112526
aauuauggagagcguuuac

SEQ ID NO: 1112528 - RNA, 19 nt, Artificial Sequence
  Description of Artificial Sequence: Synthetic oligonucleotide
  Sense strand starting at position 701 of SEQ ID NO: 915871
aacugaagguuguccacau

SEQ ID NO: 1112529 - RNA, 19 nt, Artificial Sequence
  Description of Artificial Sequence: Synthetic oligonucleotide
  Antisense strand to SEQ ID NO: 1112528
auguggacaaccuucaguu

SEQ ID NO: 1112530 - RNA, 19 nt, Artificial Sequence
  Description of Artificial Sequence: Synthetic oligonucleotide
  Sense strand starting at position 705 of SEQ ID NO: 915871
gaagguuguccacaugauu

SEQ ID NO: 1112531 - RNA, 19 nt, Artificial Sequence
  Description of Artificial Sequence: Synthetic oligonucleotide
  Antisense strand to SEQ ID NO: 1112530
aaucauguggacaaccuuc

SEQ ID NO: 1112532 - RNA, 19 nt, Artificial Sequence
  Description of Artificial Sequence: Synthetic oligonucleotide
  Sense strand starting at position 843 of SEQ ID NO: 915871
uuagcugaagagugauaua

SEQ ID NO: 1112533 - RNA, 19 nt, Artificial Sequence
  Description of Artificial Sequence: Synthetic oligonucleotide
  Antisense strand to SEQ ID NO: 1112532
uauaucacucuucagcuaa

SEQ ID NO: 1112534 - RNA, 19 nt, Artificial Sequence
  Description of Artificial Sequence: Synthetic oligonucleotide
  Sense strand starting at position 853 of SEQ ID NO: 915871
agugauauaauccgaguau

SEQ ID NO: 1112535 - RNA, 19 nt, Artificial Sequence
  Description of Artificial Sequence: Synthetic oligonucleotide
  Antisense strand to SEQ ID NO: 1112534
auacucggauuauaucacu

SEQ ID NO: 1112536 - RNA, 19 nt, Artificial Sequence
  Description of Artificial Sequence: Synthetic oligonucleotide
  Sense strand starting at position 857 of SEQ ID NO: 915871
auauaauccgaguauucua

SEQ ID NO: 1112537 - RNA, 19 nt, Artificial Sequence
  Description of Artificial Sequence: Synthetic oligonucleotide
  Antisense strand to SEQ ID NO: 1112536
uagaauacucggauuauau

SEQ ID NO: 1112538 - RNA, 19 nt, Artificial Sequence
  Description of Artificial Sequence: Synthetic oligonucleotide
  Sense strand starting at position 860 of SEQ ID NO: 915871
uaauccgaguauucuaaga

SEQ ID NO: 1112539 - RNA, 19 nt, Artificial Sequence
  Description of Artificial Sequence: Synthetic oligonucleotide
  Antisense strand to SEQ ID NO: 1112538
ucuuagaauacucggauua

SEQ ID NO: 1112540 - RNA, 19 nt, Artificial Sequence
  Description of Artificial Sequence: Synthetic oligonucleotide
  Sense strand starting at position 1019 of SEQ ID NO: 915871
uuagcaagagucuauaugu

SEQ ID NO: 1112541 - RNA, 19 nt, Artificial Sequence
  Description of Artificial Sequence: Synthetic oligonucleotide
  Antisense strand to SEQ ID NO: 1112540
acauauagacucuugcuaa

SEQ ID NO: 1112542 - RNA, 19 nt, Artificial Sequence
  Description of Artificial Sequence: Synthetic oligonucleotide
  Sense strand starting at position 1302 of SEQ ID NO: 915871
gguccuguaagaggaugaa

SEQ ID NO: 1112543 - RNA, 19 nt, Artificial Sequence
  Description of Artificial Sequence: Synthetic oligonucleotide
  Antisense strand to SEQ ID NO: 1112542
uucauccucuuacaggacc

SEQ ID NO: 1112544 - RNA, 19 nt, Artificial Sequence
  Description of Artificial Sequence: Synthetic oligonucleotide
  Sense strand starting at position 1407 of SEQ ID NO: 915871
cugggaaaguugcuaucaa

SEQ ID NO: 1112545 - RNA, 19 nt, Artificial Sequence
  Description of Artificial Sequence: Synthetic oligonucleotide
  Antisense strand to SEQ ID NO: 1112544
uugauagcaacuuucccag

SEQ ID NO: 1112546 - RNA, 19 nt, Artificial Sequence
  Description of Artificial Sequence: Synthetic oligonucleotide
  Sense strand starting at position 1450 of SEQ ID NO: 915871
aauguucucagcgagagag

SEQ ID NO: 1112547 - RNA, 19 nt, Artificial Sequence
  Description of Artificial Sequence: Synthetic oligonucleotide
  Antisense strand to SEQ ID NO: 1112546
cucucucgcugagaacauu

SEQ ID NO: 1112548 - RNA, 19 nt, Artificial Sequence
  Description of Artificial Sequence: Synthetic oligonucleotide
  Sense strand starting at position 1505 of SEQ ID NO: 915871
uguggaguaugacuugauc

SEQ ID NO: 1112549 - RNA, 19 nt, Artificial Sequence
  Description of Artificial Sequence: Synthetic oligonucleotide
  Antisense strand to SEQ ID NO: 1112548
gaucaagucauacuccaca

SEQ ID NO: 1112550 - RNA, 19 nt, Artificial Sequence
  Description of Artificial Sequence: Synthetic oligonucleotide
  Sense strand starting at position 1507 of SEQ ID NO: 915871
uggaguaugacuugauccu

SEQ ID NO: 1112551 - RNA, 19 nt, Artificial Sequence
  Description of Artificial Sequence: Synthetic oligonucleotide
  Antisense strand to SEQ ID NO: 1112550
aggaucaagucauacucca

SEQ ID NO: 1112552 - RNA, 19 nt, Artificial Sequence
  Description of Artificial Sequence: Synthetic oligonucleotide
  Sense strand starting at position 1650 of SEQ ID NO: 915871
guuggaguacuccacaaug

SEQ ID NO: 1112553 - RNA, 19 nt, Artificial Sequence
  Description of Artificial Sequence: Synthetic oligonucleotide
  Antisense strand to SEQ ID NO: 1112552
cauuguggaguacuccaac

SEQ ID NO: 1112554 - RNA, 19 nt, Artificial Sequence
  Description of Artificial Sequence: Synthetic oligonucleotide
  Sense strand starting at position 1887 of SEQ ID NO: 915871
agcgucaaucuugaaugau

SEQ ID NO: 1112555 - RNA, 19 nt, Artificial Sequence
  Description of Artificial Sequence: Synthetic oligonucleotide
  Antisense strand to SEQ ID NO: 1112554
aucauucaagauugacgcu

SEQ ID NO: 1112556 - RNA, 19 nt, Artificial Sequence
  Description of Artificial Sequence: Synthetic oligonucleotide
  Sense strand starting at position 1890 of SEQ ID NO: 915871
gucaaucuugaaugaugag

SEQ ID NO: 1112557 - RNA, 19 nt, Artificial Sequence
  Description of Artificial Sequence: Synthetic oligonucleotide
  Antisense strand to SEQ ID NO: 1112556
cucaucauucaagauugac

SEQ ID NO: 1112558 - RNA, 19 nt, Artificial Sequence
  Description of Artificial Sequence: Synthetic oligonucleotide
  Sense strand starting at position 1986 of SEQ ID NO: 915871
cugguuauacguuacagag

SEQ ID NO: 1112559 - RNA, 19 nt, Artificial Sequence
  Description of Artificial Sequence: Synthetic oligonucleotide
  Antisense strand to SEQ ID NO: 1112558
cucuguaacguauaaccag

SEQ ID NO: 1112560 - RNA, 19 nt, Artificial Sequence
  Description of Artificial Sequence: Synthetic oligonucleotide
  Sense strand starting at position 2148 of SEQ ID NO: 915871
agauaaacguuucugaucu

SEQ ID NO: 1112561 - RNA, 19 nt, Artificial Sequence
  Description of Artificial Sequence: Synthetic oligonucleotide
  Antisense strand to SEQ ID NO: 1112560
agaucagaaacguuuaucu

SEQ ID NO: 1112562 - RNA, 19 nt, Artificial Sequence
  Description of Artificial Sequence: Synthetic oligonucleotide
  Sense strand starting at position 2152 of SEQ ID NO: 915871
aaacguuucugaucugaag

SEQ ID NO: 1112563 - RNA, 19 nt, Artificial Sequence
  Description of Artificial Sequence: Synthetic oligonucleotide
  Antisense strand to SEQ ID NO: 1112562
cuucagaucagaaacguuu

SEQ ID NO: 1112564 - RNA, 19 nt, Artificial Sequence
  Description of Artificial Sequence: Synthetic oligonucleotide
  Sense strand starting at position 2184 of SEQ ID NO: 915871
ggagaauaauuauucuguu

SEQ ID NO: 1112565 - RNA, 19 nt, Artificial Sequence
  Description of Artificial Sequence: Synthetic oligonucleotide
  Antisense strand to SEQ ID NO: 1112564
aacagaauaauuauucucc

SEQ ID NO: 1112566 - RNA, 19 nt, Artificial Sequence
  Description of Artificial Sequence: Synthetic oligonucleotide
  Sense strand starting at position 2285 of SEQ ID NO: 915871
caucgcaaucuugaaguca

SEQ ID NO: 1112567 - RNA, 19 nt, Artificial Sequence
  Description of Artificial Sequence: Synthetic oligonucleotide
  Antisense strand to SEQ ID NO: 1112566
ugacuucaagauugcgaug

SEQ ID NO: 1112568 - RNA, 19 nt, Artificial Sequence
  Description of Artificial Sequence: Synthetic oligonucleotide
  Sense strand starting at position 2415 of SEQ ID NO: 915871
cuaaauuagcuauaaaggu

SEQ ID NO: 1112569 - RNA, 19 nt, Artificial Sequence
  Description of Artificial Sequence: Synthetic oligonucleotide
  Antisense strand to SEQ ID NO: 1112568
accuuuauagcuaauuuag

SEQ ID NO: 1112570 - RNA, 19 nt, Artificial Sequence
  Description of Artificial Sequence: Synthetic oligonucleotide
  Sense strand starting at position 2645 of SEQ ID NO: 915871
gcagaaagguuagucuaac

SEQ ID NO: 1112571 - RNA, 19 nt, Artificial Sequence
  Description of Artificial Sequence: Synthetic oligonucleotide
  Antisense strand to SEQ ID NO: 1112570
guuagacuaaccuuucugc

SEQ ID NO: 1112572 - RNA, 19 nt, Artificial Sequence
  Description of Artificial Sequence: Synthetic oligonucleotide
  Sense strand starting at position 2769 of SEQ ID NO: 915871
gccucaauuuauuagaaag

SEQ ID NO: 1112573 - RNA, 19 nt, Artificial Sequence
  Description of Artificial Sequence: Synthetic oligonucleotide
  Antisense strand to SEQ ID NO: 1112572
cuuucuaauaaauugaggc

SEQ ID NO: 1112574 - RNA, 19 nt, Artificial Sequence
  Description of Artificial Sequence: Synthetic oligonucleotide
  Sense strand starting at position 2859 of SEQ ID NO: 915871
gugccucuuccacauaaag

SEQ ID NO: 1112575 - RNA, 19 nt, Artificial Sequence
  Description of Artificial Sequence: Synthetic oligonucleotide
  Antisense strand to SEQ ID NO: 1112574
cuuuauguggaagaggcac

SEQ ID NO: 1112576 - RNA, 19 nt, Artificial Sequence
  Description of Artificial Sequence: Synthetic oligonucleotide
  Sense strand starting at position 2932 of SEQ ID NO: 915871
auaguaagugccuaauaca

SEQ ID NO: 1112577 - RNA, 19 nt, Artificial Sequence
  Description of Artificial Sequence: Synthetic oligonucleotide
  Antisense strand to SEQ ID NO: 1112576
uguauuaggcacuuacuau

SEQ ID NO: 1112578 - RNA, 19 nt, Artificial Sequence
  Description of Artificial Sequence: Synthetic oligonucleotide
  Sense strand starting at position 3546 of SEQ ID NO: 915871
guccauuuguuggcuuuga

SEQ ID NO: 1112579 - RNA, 19 nt, Artificial Sequence
  Description of Artificial Sequence: Synthetic oligonucleotide
  Antisense strand to SEQ ID NO: 1112578
ucaaagccaacaaauggac

SEQ ID NO: 1112580 - RNA, 19 nt, Artificial Sequence
  Description of Artificial Sequence: Synthetic oligonucleotide
  Sense strand starting at position 3547 of SEQ ID NO: 915871
uccauuuguuggcuuugaa

SEQ ID NO: 1112581 - RNA, 19 nt, Artificial Sequence
  Description of Artificial Sequence: Synthetic oligonucleotide
  Antisense strand to SEQ ID NO: 1112580
uucaaagccaacaaaugga

SEQ ID NO: 1112582 - RNA, 19 nt, Artificial Sequence
  Description of Artificial Sequence: Synthetic oligonucleotide
  Sense strand starting at position 3972 of SEQ ID NO: 915871
acugcauaguacuugauua

SEQ ID NO: 1112583 - RNA, 19 nt, Artificial Sequence
  Description of Artificial Sequence: Synthetic oligonucleotide
  Antisense strand to SEQ ID NO: 1112582
uaaucaaguacuaugcagu

SEQ ID NO: 1112584 - RNA, 19 nt, Artificial Sequence
  Description of Artificial Sequence: Synthetic oligonucleotide
  Sense strand starting at position 3974 of SEQ ID NO: 915871
ugcauaguacuugauuaua

SEQ ID NO: 1112585 - RNA, 19 nt, Artificial Sequence
  Description of Artificial Sequence: Synthetic oligonucleotide
  Antisense strand to SEQ ID NO: 1112584
uauaaucaaguacuaugca

SEQ ID NO: 1112586 - RNA, 19 nt, Artificial Sequence
  Description of Artificial Sequence: Synthetic oligonucleotide
  Sense strand starting at position 170 of SEQ ID NO: 915872
cuauauaaccagugacagu

SEQ ID NO: 1112587 - RNA, 19 nt, Artificial Sequence
  Description of Artificial Sequence: Synthetic oligonucleotide
  Antisense strand to SEQ ID NO: 1112586
acugucacugguuauauag

SEQ ID NO: 1112588 - RNA, 19 nt, Artificial Sequence
  Description of Artificial Sequence: Synthetic oligonucleotide
  Sense strand starting at position 179 of SEQ ID NO: 915872
cagugacaguacuugauaa

SEQ ID NO: 1112589 - RNA, 19 nt, Artificial Sequence
  Description of Artificial Sequence: Synthetic oligonucleotide
  Antisense strand to SEQ ID NO: 1112588
uuaucaaguacugucacug

SEQ ID NO: 1112590 - RNA, 19 nt, Artificial Sequence
  Description of Artificial Sequence: Synthetic oligonucleotide
  Sense strand starting at position 361 of SEQ ID NO: 915872
gcagaaguugaauaauguu

SEQ ID NO: 1112591 - RNA, 19 nt, Artificial Sequence
  Description of Artificial Sequence: Synthetic oligonucleotide
  Antisense strand to SEQ ID NO: 1112590
aacauuauucaacuucugc

SEQ ID NO: 1112592 - RNA, 19 nt, Artificial Sequence
  Description of Artificial Sequence: Synthetic oligonucleotide
  Sense strand starting at position 469 of SEQ ID NO: 915872
guguuaucauuucugguac

SEQ ID NO: 1112593 - RNA, 19 nt, Artificial Sequence
  Description of Artificial Sequence: Synthetic oligonucleotide
  Antisense strand to SEQ ID NO: 1112592
guaccagaaaugauaacac

SEQ ID NO: 1112594 - RNA, 19 nt, Artificial Sequence
  Description of Artificial Sequence: Synthetic oligonucleotide
  Sense strand starting at position 517 of SEQ ID NO: 915872
uguauuuaggcagggcuau

SEQ ID NO: 1112595 - RNA, 19 nt, Artificial Sequence
  Description of Artificial Sequence: Synthetic oligonucleotide
  Antisense strand to SEQ ID NO: 1112594
auagcccugccuaaauaca

SEQ ID NO: 1112596 - RNA, 19 nt, Artificial Sequence
  Description of Artificial Sequence: Synthetic oligonucleotide
  Sense strand starting at position 518 of SEQ ID NO: 915872
guauuuaggcagggcuauu

SEQ ID NO: 1112597 - RNA, 19 nt, Artificial Sequence
  Description of Artificial Sequence: Synthetic oligonucleotide
  Antisense strand to SEQ ID NO: 1112596
aauagcccugccuaaauac

SEQ ID NO: 1112598 - RNA, 19 nt, Artificial Sequence
  Description of Artificial Sequence: Synthetic oligonucleotide
  Sense strand starting at position 545 of SEQ ID NO: 915872
ccacaagucauuugugugu

SEQ ID NO: 1112599 - RNA, 19 nt, Artificial Sequence
  Description of Artificial Sequence: Synthetic oligonucleotide
  Antisense strand to SEQ ID NO: 1112598
acacacaaaugacuugugg

SEQ ID NO: 1112600 - RNA, 19 nt, Artificial Sequence
  Description of Artificial Sequence: Synthetic oligonucleotide
  Sense strand starting at position 549 of SEQ ID NO: 915872
aagucauuuguguguuaca

SEQ ID NO: 1112601 - RNA, 19 nt, Artificial Sequence
  Description of Artificial Sequence: Synthetic oligonucleotide
  Antisense strand to SEQ ID NO: 1112600
uguaacacacaaaugacuu

SEQ ID NO: 1112602 - RNA, 19 nt, Artificial Sequence
  Description of Artificial Sequence: Synthetic oligonucleotide
  Sense strand starting at position 550 of SEQ ID NO: 915872
agucauuuguguguuacau

SEQ ID NO: 1112603 - RNA, 19 nt, Artificial Sequence
  Description of Artificial Sequence: Synthetic oligonucleotide
  Antisense strand to SEQ ID NO: 1112602
auguaacacacaaaugacu

SEQ ID NO: 1112604 - RNA, 19 nt, Artificial Sequence
  Description of Artificial Sequence: Synthetic oligonucleotide
  Sense strand starting at position 600 of SEQ ID NO: 915872
ggaucagugauauguguga

SEQ ID NO: 1112605 - RNA, 19 nt, Artificial Sequence
  Description of Artificial Sequence: Synthetic oligonucleotide
  Antisense strand to SEQ ID NO: 1112604
ucacacauaucacugaucc

SEQ ID NO: 1112606 - RNA, 19 nt, Artificial Sequence
  Description of Artificial Sequence: Synthetic oligonucleotide
  Sense strand starting at position 611 of SEQ ID NO: 915872
augugugauggguacuuaa

SEQ ID NO: 1112607 - RNA, 19 nt, Artificial Sequence
  Description of Artificial Sequence: Synthetic oligonucleotide
  Antisense strand to SEQ ID NO: 1112606
uuaaguacccaucacacau

SEQ ID NO: 1112608 - RNA, 19 nt, Artificial Sequence
  Description of Artificial Sequence: Synthetic oligonucleotide
  Sense strand starting at position 800 of SEQ ID NO: 915872
uugcauguagaccagaauu

SEQ ID NO: 1112609 - RNA, 19 nt, Artificial Sequence
  Description of Artificial Sequence: Synthetic oligonucleotide
  Antisense strand to SEQ ID NO: 1112608
aauucuggucuacaugcaa

SEQ ID NO: 1112610 - RNA, 19 nt, Artificial Sequence
  Description of Artificial Sequence: Synthetic oligonucleotide
  Sense strand starting at position 948 of SEQ ID NO: 915872
guaaacgcucuccauaauu

SEQ ID NO: 1112611 - RNA, 19 nt, Artificial Sequence
  Description of Artificial Sequence: Synthetic oligonucleotide
  Antisense strand to SEQ ID NO: 1112610
aauuauggagagcguuuac

SEQ ID NO: 1112612 - RNA, 19 nt, Artificial Sequence
  Description of Artificial Sequence: Synthetic oligonucleotide
  Sense strand starting at position 992 of SEQ ID NO: 915872
aacugaagguuguccacau

SEQ ID NO: 1112613 - RNA, 19 nt, Artificial Sequence
  Description of Artificial Sequence: Synthetic oligonucleotide
  Antisense strand to SEQ ID NO: 1112612
auguggacaaccuucaguu

SEQ ID NO: 1112614 - RNA, 19 nt, Artificial Sequence
  Description of Artificial Sequence: Synthetic oligonucleotide
  Sense strand starting at position 996 of SEQ ID NO: 915872
gaagguuguccacaugauu

SEQ ID NO: 1112615 - RNA, 19 nt, Artificial Sequence
  Description of Artificial Sequence: Synthetic oligonucleotide
  Antisense strand to SEQ ID NO: 1112614
aaucauguggacaaccuuc

SEQ ID NO: 1112616 - RNA, 19 nt, Artificial Sequence
  Description of Artificial Sequence: Synthetic oligonucleotide
  Sense strand starting at position 1134 of SEQ ID NO: 915872
uuagcugaagagugauaua

SEQ ID NO: 1112617 - RNA, 19 nt, Artificial Sequence
  Description of Artificial Sequence: Synthetic oligonucleotide
  Antisense strand to SEQ ID NO: 1112616
uauaucacucuucagcuaa

SEQ ID NO: 1112618 - RNA, 19 nt, Artificial Sequence
  Description of Artificial Sequence: Synthetic oligonucleotide
  Sense strand starting at position 1144 of SEQ ID NO: 915872
agugauauaauccgaguau

SEQ ID NO: 1112619 - RNA, 19 nt, Artificial Sequence
  Description of Artificial Sequence: Synthetic oligonucleotide
  Antisense strand to SEQ ID NO: 1112618
auacucggauuauaucacu

SEQ ID NO: 1112620 - RNA, 19 nt, Artificial Sequence
  Description of Artificial Sequence: Synthetic oligonucleotide
  Sense strand starting at position 1148 of SEQ ID NO: 915872
auauaauccgaguauucua

SEQ ID NO: 1112621 - RNA, 19 nt, Artificial Sequence
  Description of Artificial Sequence: Synthetic oligonucleotide
  Antisense strand to SEQ ID NO: 1112620
uagaauacucggauuauau

SEQ ID NO: 1112622 - RNA, 19 nt, Artificial Sequence
  Description of Artificial Sequence: Synthetic oligonucleotide
  Sense strand starting at position 1151 of SEQ ID NO: 915872
uaauccgaguauucuaaga

SEQ ID NO: 1112623 - RNA, 19 nt, Artificial Sequence
  Description of Artificial Sequence: Synthetic oligonucleotide
  Antisense strand to SEQ ID NO: 1112622
ucuuagaauacucggauua

SEQ ID NO: 1112624 - RNA, 19 nt, Artificial Sequence
  Description of Artificial Sequence: Synthetic oligonucleotide
  Sense strand starting at position 1310 of SEQ ID NO: 915872
uuagcaagagucuauaugu

SEQ ID NO: 1112625 - RNA, 19 nt, Artificial Sequence
  Description of Artificial Sequence: Synthetic oligonucleotide
  Antisense strand to SEQ ID NO: 1112624
acauauagacucuugcuaa

SEQ ID NO: 1112626 - RNA, 19 nt, Artificial Sequence
  Description of Artificial Sequence: Synthetic oligonucleotide
  Sense strand starting at position 1593 of SEQ ID NO: 915872
gguccuguaagaggaugaa

SEQ ID NO: 1112627 - RNA, 19 nt, Artificial Sequence
  Description of Artificial Sequence: Synthetic oligonucleotide
  Antisense strand to SEQ ID NO: 1112626
uucauccucuuacaggacc

SEQ ID NO: 1112628 - RNA, 19 nt, Artificial Sequence
  Description of Artificial Sequence: Synthetic oligonucleotide
  Sense strand starting at position 1698 of SEQ ID NO: 915872
cugggaaaguugcuaucaa

SEQ ID NO: 1112629 - RNA, 19 nt, Artificial Sequence
  Description of Artificial Sequence: Synthetic oligonucleotide
  Antisense strand to SEQ ID NO: 1112628
uugauagcaacuuucccag

SEQ ID NO: 1112630 - RNA, 19 nt, Artificial Sequence
  Description of Artificial Sequence: Synthetic oligonucleotide
  Sense strand starting at position 1741 of SEQ ID NO: 915872
aauguucucagcgagagag

SEQ ID NO: 1112631 - RNA, 19 nt, Artificial Sequence
  Description of Artificial Sequence: Synthetic oligonucleotide
  Antisense strand to SEQ ID NO: 1112630
cucucucgcugagaacauu

SEQ ID NO: 1112632 - RNA, 19 nt, Artificial Sequence
  Description of Artificial Sequence: Synthetic oligonucleotide
  Sense strand starting at position 1796 of SEQ ID NO: 915872
uguggaguaugacuugauc

SEQ ID NO: 1112633 - RNA, 19 nt, Artificial Sequence
  Description of Artificial Sequence: Synthetic oligonucleotide
  Antisense strand to SEQ ID NO: 1112632
gaucaagucauacuccaca

SEQ ID NO: 1112634 - RNA, 19 nt, Artificial Sequence
  Description of Artificial Sequence: Synthetic oligonucleotide
  Sense strand starting at position 1798 of SEQ ID NO: 915872
uggaguaugacuugauccu

SEQ ID NO: 1112635 - RNA, 19 nt, Artificial Sequence
  Description of Artificial Sequence: Synthetic oligonucleotide
  Antisense strand to SEQ ID NO: 1112634
aggaucaagucauacucca

SEQ ID NO: 1112636 - RNA, 19 nt, Artificial Sequence
  Description of Artificial Sequence: Synthetic oligonucleotide
  Sense strand starting at position 1941 of SEQ ID NO: 915872
guuggaguacuccacaaug

SEQ ID NO: 1112637 - RNA, 19 nt, Artificial Sequence
  Description of Artificial Sequence: Synthetic oligonucleotide
  Antisense strand to SEQ ID NO: 1112636
cauuguggaguacuccaac

SEQ ID NO: 1112638 - RNA, 19 nt, Artificial Sequence
  Description of Artificial Sequence: Synthetic oligonucleotide
  Sense strand starting at position 2178 of SEQ ID NO: 915872
agcgucaaucuugaaugau

SEQ ID NO: 1112639 - RNA, 19 nt, Artificial Sequence
  Description of Artificial Sequence: Synthetic oligonucleotide
  Antisense strand to SEQ ID NO: 1112638
aucauucaagauugacgcu

SEQ ID NO: 1112640 - RNA, 19 nt, Artificial Sequence
  Description of Artificial Sequence: Synthetic oligonucleotide
  Sense strand starting at position 2181 of SEQ ID NO: 915872
gucaaucuugaaugaugag

SEQ ID NO: 1112641 - RNA, 19 nt, Artificial Sequence
  Description of Artificial Sequence: Synthetic oligonucleotide
  Antisense strand to SEQ ID NO: 1112640
cucaucauucaagauugac

SEQ ID NO: 1112642 - RNA, 19 nt, Artificial Sequence
  Description of Artificial Sequence: Synthetic oligonucleotide
  Sense strand starting at position 2277 of SEQ ID NO: 915872
cugguuauacguuacagag

SEQ ID NO: 1112643 - RNA, 19 nt, Artificial Sequence
  Description of Artificial Sequence: Synthetic oligonucleotide
  Antisense strand to SEQ ID NO: 1112642
cucuguaacguauaaccag

SEQ ID NO: 1112644 - RNA, 19 nt, Artificial Sequence
  Description of Artificial Sequence: Synthetic oligonucleotide
  Sense strand starting at position 2439 of SEQ ID NO: 915872
agauaaacguuucugaucu

SEQ ID NO: 1112645 - RNA, 19 nt, Artificial Sequence
  Description of Artificial Sequence: Synthetic oligonucleotide
  Antisense strand to SEQ ID NO: 1112644
agaucagaaacguuuaucu

SEQ ID NO: 1112646 - RNA, 19 nt, Artificial Sequence
  Description of Artificial Sequence: Synthetic oligonucleotide
  Sense strand starting at position 2443 of SEQ ID NO: 915872
aaacguuucugaucugaag

SEQ ID NO: 1112647 - RNA, 19 nt, Artificial Sequence
  Description of Artificial Sequence: Synthetic oligonucleotide
  Antisense strand to SEQ ID NO: 1112646
cuucagaucagaaacguuu

SEQ ID NO: 1112648 - RNA, 19 nt, Artificial Sequence
  Description of Artificial Sequence: Synthetic oligonucleotide
  Sense strand starting at position 2475 of SEQ ID NO: 915872
ggagaauaauuauucuguu

SEQ ID NO: 1112649 - RNA, 19 nt, Artificial Sequence
  Description of Artificial Sequence: Synthetic oligonucleotide
  Antisense strand to SEQ ID NO: 1112648
aacagaauaauuauucucc

SEQ ID NO: 1112650 - RNA, 19 nt, Artificial Sequence
  Description of Artificial Sequence: Synthetic oligonucleotide
  Sense strand starting at position 2576 of SEQ ID NO: 915872
caucgcaaucuugaaguca

SEQ ID NO: 1112651 - RNA, 19 nt, Artificial Sequence
  Description of Artificial Sequence: Synthetic oligonucleotide
  Antisense strand to SEQ ID NO: 1112650
ugacuucaagauugcgaug

SEQ ID NO: 1112652 - RNA, 19 nt, Artificial Sequence
  Description of Artificial Sequence: Synthetic oligonucleotide
  Sense strand starting at position 2706 of SEQ ID NO: 915872
cuaaauuagcuauaaaggu

SEQ ID NO: 1112653 - RNA, 19 nt, Artificial Sequence
  Description of Artificial Sequence: Synthetic oligonucleotide
  Antisense strand to SEQ ID NO: 1112652
accuuuauagcuaauuuag

SEQ ID NO: 1112654 - RNA, 19 nt, Artificial Sequence
  Description of Artificial Sequence: Synthetic oligonucleotide
  Sense strand starting at position 2936 of SEQ ID NO: 915872
gcagaaagguuagucuaac

SEQ ID NO: 1112655 - RNA, 19 nt, Artificial Sequence
  Description of Artificial Sequence: Synthetic oligonucleotide
  Antisense strand to SEQ ID NO: 1112654
guuagacuaaccuuucugc

SEQ ID NO: 1112656 - RNA, 19 nt, Artificial Sequence
  Description of Artificial Sequence: Synthetic oligonucleotide
  Sense strand starting at position 3060 of SEQ ID NO: 915872
gccucaauuuauuagaaag

SEQ ID NO: 1112657 - RNA, 19 nt, Artificial Sequence
  Description of Artificial Sequence: Synthetic oligonucleotide
  Antisense strand to SEQ ID NO: 1112656
cuuucuaauaaauugaggc

SEQ ID NO: 1112658 - RNA, 19 nt, Artificial Sequence
  Description of Artificial Sequence: Synthetic oligonucleotide
  Sense strand starting at position 3150 of SEQ ID NO: 915872
gugccucuuccacauaaag

SEQ ID NO: 1112659 - RNA, 19 nt, Artificial Sequence
  Description of Artificial Sequence: Synthetic oligonucleotide
  Antisense strand to SEQ ID NO: 1112658
cuuuauguggaagaggcac

SEQ ID NO: 1112660 - RNA, 19 nt, Artificial Sequence
  Description of Artificial Sequence: Synthetic oligonucleotide
  Sense strand starting at position 3223 of SEQ ID NO: 915872
auaguaagugccuaauaca

SEQ ID NO: 1112661 - RNA, 19 nt, Artificial Sequence
  Description of Artificial Sequence: Synthetic oligonucleotide
  Antisense strand to SEQ ID NO: 1112660
uguauuaggcacuuacuau

SEQ ID NO: 1112662 - RNA, 19 nt, Artificial Sequence
  Description of Artificial Sequence: Synthetic oligonucleotide
  Sense strand starting at position 3837 of SEQ ID NO: 915872
guccauuuguuggcuuuga

SEQ ID NO: 1112663 - RNA, 19 nt, Artificial Sequence
  Description of Artificial Sequence: Synthetic oligonucleotide
  Antisense strand to SEQ ID NO: 1112662
ucaaagccaacaaauggac

SEQ ID NO: 1112664 - RNA, 19 nt, Artificial Sequence
  Description of Artificial Sequence: Synthetic oligonucleotide
  Sense strand starting at position 3838 of SEQ ID NO: 915872
uccauuuguuggcuuugaa

SEQ ID NO: 1112665 - RNA, 19 nt, Artificial Sequence
  Description of Artificial Sequence: Synthetic oligonucleotide
  Antisense strand to SEQ ID NO: 1112664
uucaaagccaacaaaugga

SEQ ID NO: 1112666 - RNA, 19 nt, Artificial Sequence
  Description of Artificial Sequence: Synthetic oligonucleotide
  Sense strand starting at position 30 of SEQ ID NO: 915873
ucuaccuguguuugaaaga

SEQ ID NO: 1112667 - RNA, 19 nt, Artificial Sequence
  Description of Artificial Sequence: Synthetic oligonucleotide
  Antisense strand to SEQ ID NO: 1112666
ucuuucaaacacagguaga

SEQ ID NO: 1112668 - RNA, 19 nt, Artificial Sequence
  Description of Artificial Sequence: Synthetic oligonucleotide
  Sense strand starting at position 155 of SEQ ID NO: 915873
gucacugucaacgaguaua

SEQ ID NO: 1112669 - RNA, 19 nt, Artificial Sequence
  Description of Artificial Sequence: Synthetic oligonucleotide
  Antisense strand to SEQ ID NO: 1112668
uauacucguugacagugac

SEQ ID NO: 1112670 - RNA, 19 nt, Artificial Sequence
  Description of Artificial Sequence: Synthetic oligonucleotide
  Sense strand starting at position 160 of SEQ ID NO: 915873
ugucaacgaguauauagaa

SEQ ID NO: 1112671 - RNA, 19 nt, Artificial Sequence
  Description of Artificial Sequence: Synthetic oligonucleotide
  Antisense strand to SEQ ID NO: 1112670
uucuauauacucguugaca

SEQ ID NO: 1112672 - RNA, 19 nt, Artificial Sequence
  Description of Artificial Sequence: Synthetic oligonucleotide
  Sense strand starting at position 308 of SEQ ID NO: 915873
augagaacuuguguaaaga

SEQ ID NO: 1112673 - RNA, 19 nt, Artificial Sequence
  Description of Artificial Sequence: Synthetic oligonucleotide
  Antisense strand to SEQ ID NO: 1112672
ucuuuacacaaguucucau

SEQ ID NO: 1112674 - RNA, 19 nt, Artificial Sequence
  Description of Artificial Sequence: Synthetic oligonucleotide
  Sense strand starting at position 327 of SEQ ID NO: 915873
acgcaaugucaucacccaa

SEQ ID NO: 1112675 - RNA, 19 nt, Artificial Sequence
  Description of Artificial Sequence: Synthetic oligonucleotide
  Antisense strand to SEQ ID NO: 1112674
uugggugaugacauugcgu

SEQ ID NO: 1112676 - RNA, 19 nt, Artificial Sequence
  Description of Artificial Sequence: Synthetic oligonucleotide
  Sense strand starting at position 399 of SEQ ID NO: 915873
agggaaaucacuugggcuu

SEQ ID NO: 1112677 - RNA, 19 nt, Artificial Sequence
  Description of Artificial Sequence: Synthetic oligonucleotide
  Antisense strand to SEQ ID NO: 1112676
aagcccaagugauuucccu

SEQ ID NO: 1112678 - RNA, 19 nt, Artificial Sequence
  Description of Artificial Sequence: Synthetic oligonucleotide
  Sense strand starting at position 400 of SEQ ID NO: 915873
gggaaaucacuugggcuuu

SEQ ID NO: 1112679 - RNA, 19 nt, Artificial Sequence
  Description of Artificial Sequence: Synthetic oligonucleotide
  Antisense strand to SEQ ID NO: 1112678
aaagcccaagugauuuccc

SEQ ID NO: 1112680 - RNA, 19 nt, Artificial Sequence
  Description of Artificial Sequence: Synthetic oligonucleotide
  Sense strand starting at position 430 of SEQ ID NO: 915873
acaacuauaguuggguuau

SEQ ID NO: 1112681 - RNA, 19 nt, Artificial Sequence
  Description of Artificial Sequence: Synthetic oligonucleotide
  Antisense strand to SEQ ID NO: 1112680
auaacccaacuauaguugu

SEQ ID NO: 1112682 - RNA, 19 nt, Artificial Sequence
  Description of Artificial Sequence: Synthetic oligonucleotide
  Sense strand starting at position 436 of SEQ ID NO: 915873
auaguuggguuauccaaga

SEQ ID NO: 1112683 - RNA, 19 nt, Artificial Sequence
  Description of Artificial Sequence: Synthetic oligonucleotide
  Antisense strand to SEQ ID NO: 1112682
ucuuggauaacccaacuau

SEQ ID NO: 1112684 - RNA, 19 nt, Artificial Sequence
  Description of Artificial Sequence: Synthetic oligonucleotide
  Sense strand starting at position 441 of SEQ ID NO: 915873
uggguuauccaagagaugu

SEQ ID NO: 1112685 - RNA, 19 nt, Artificial Sequence
  Description of Artificial Sequence: Synthetic oligonucleotide
  Antisense strand to SEQ ID NO: 1112684
acaucucuuggauaaccca

SEQ ID NO: 1112686 - RNA, 19 nt, Artificial Sequence
  Description of Artificial Sequence: Synthetic oligonucleotide
  Sense strand starting at position 443 of SEQ ID NO: 915873
gguuauccaagagauguuu

SEQ ID NO: 1112687 - RNA, 19 nt, Artificial Sequence
  Description of Artificial Sequence: Synthetic oligonucleotide
  Antisense strand to SEQ ID NO: 1112686
aaacaucucuuggauaacc

SEQ ID NO: 1112688 - RNA, 19 nt, Artificial Sequence
  Description of Artificial Sequence: Synthetic oligonucleotide
  Sense strand starting at position 541 of SEQ ID NO: 915873
agagcuucccuugaauugu

SEQ ID NO: 1112689 - RNA, 19 nt, Artificial Sequence
  Description of Artificial Sequence: Synthetic oligonucleotide
  Antisense strand to SEQ ID NO: 1112688
acaauucaagggaagcucu

SEQ ID NO: 1112690 - RNA, 19 nt, Artificial Sequence
  Description of Artificial Sequence: Synthetic oligonucleotide
  Sense strand starting at position 550 of SEQ ID NO: 915873
cuugaauuguaucuaguga

SEQ ID NO: 1112691 - RNA, 19 nt, Artificial Sequence
  Description of Artificial Sequence: Synthetic oligonucleotide
  Antisense strand to SEQ ID NO: 1112690
ucacuagauacaauucaag

SEQ ID NO: 1112692 - RNA, 19 nt, Artificial Sequence
  Description of Artificial Sequence: Synthetic oligonucleotide
  Sense strand starting at position 565 of SEQ ID NO: 915873
gugaauacucuccaggcuu

SEQ ID NO: 1112693 - RNA, 19 nt, Artificial Sequence
  Description of Artificial Sequence: Synthetic oligonucleotide
  Antisense strand to SEQ ID NO: 1112692
aagccuggagaguauucac

SEQ ID NO: 1112694 - RNA, 19 nt, Artificial Sequence
  Description of Artificial Sequence: Synthetic oligonucleotide
  Sense strand starting at position 631 of SEQ ID NO: 915873
guuucucaaguauggaaau

SEQ ID NO: 1112695 - RNA, 19 nt, Artificial Sequence
  Description of Artificial Sequence: Synthetic oligonucleotide
  Antisense strand to SEQ ID NO: 1112694
auuuccauacuugagaaac

SEQ ID NO: 1112696 - RNA, 19 nt, Artificial Sequence
  Description of Artificial Sequence: Synthetic oligonucleotide
  Sense strand starting at position 846 of SEQ ID NO: 915873
cucagcuauguccagguaa

SEQ ID NO: 1112697 - RNA, 19 nt, Artificial Sequence
  Description of Artificial Sequence: Synthetic oligonucleotide
  Antisense strand to SEQ ID NO: 1112696
uuaccuggacauagcugag

SEQ ID NO: 1112698 - RNA, 19 nt, Artificial Sequence
  Description of Artificial Sequence: Synthetic oligonucleotide
  Sense strand starting at position 991 of SEQ ID NO: 915873
aaacgccuucugcaagaga

SEQ ID NO: 1112699 - RNA, 19 nt, Artificial Sequence
  Description of Artificial Sequence: Synthetic oligonucleotide
  Antisense strand to SEQ ID NO: 1112698
ucucuugcagaaggcguuu

SEQ ID NO: 1112700 - RNA, 19 nt, Artificial Sequence
  Description of Artificial Sequence: Synthetic oligonucleotide
  Sense strand starting at position 1059 of SEQ ID NO: 915873
gcaagagauucucugccaa

SEQ ID NO: 1112701 - RNA, 19 nt, Artificial Sequence
  Description of Artificial Sequence: Synthetic oligonucleotide
  Antisense strand to SEQ ID NO: 1112700
uuggcagagaaucucuugc

SEQ ID NO: 1112702 - RNA, 19 nt, Artificial Sequence
  Description of Artificial Sequence: Synthetic oligonucleotide
  Sense strand starting at position 1112 of SEQ ID NO: 915873
agcugcaaauauguaauaa

SEQ ID NO: 1112703 - RNA, 19 nt, Artificial Sequence
  Description of Artificial Sequence: Synthetic oligonucleotide
  Antisense strand to SEQ ID NO: 1112702
uuauuacauauuugcagcu

SEQ ID NO: 1112704 - RNA, 19 nt, Artificial Sequence
  Description of Artificial Sequence: Synthetic oligonucleotide
  Sense strand starting at position 1388 of SEQ ID NO: 915873
acguauauccaucacaaug

SEQ ID NO: 1112705 - RNA, 19 nt, Artificial Sequence
  Description of Artificial Sequence: Synthetic oligonucleotide
  Antisense strand to SEQ ID NO: 1112704
cauugugauggauauacgu

SEQ ID NO: 1112706 - RNA, 19 nt, Artificial Sequence
  Description of Artificial Sequence: Synthetic oligonucleotide
  Sense strand starting at position 1445 of SEQ ID NO: 915873
cuuaccuuagcagauuaga

SEQ ID NO: 1112707 - RNA, 19 nt, Artificial Sequence
  Description of Artificial Sequence: Synthetic oligonucleotide
  Antisense strand to SEQ ID NO: 1112706
ucuaaucugcuaagguaag

SEQ ID NO: 1112708 - RNA, 19 nt, Artificial Sequence
  Description of Artificial Sequence: Synthetic oligonucleotide
  Sense strand starting at position 1782 of SEQ ID NO: 915873
aucagaccaugucuugaaa

SEQ ID NO: 1112709 - RNA, 19 nt, Artificial Sequence
  Description of Artificial Sequence: Synthetic oligonucleotide
  Antisense strand to SEQ ID NO: 1112708
uuucaagacauggucugau

SEQ ID NO: 1112710 - RNA, 19 nt, Artificial Sequence
  Description of Artificial Sequence: Synthetic oligonucleotide
  Sense strand starting at position 2363 of SEQ ID NO: 915873
cuccacucuccuuggaaga

SEQ ID NO: 1112711 - RNA, 19 nt, Artificial Sequence
  Description of Artificial Sequence: Synthetic oligonucleotide
  Antisense strand to SEQ ID NO: 1112710
ucuuccaaggagaguggag

SEQ ID NO: 1112712 - RNA, 19 nt, Artificial Sequence
  Description of Artificial Sequence: Synthetic oligonucleotide
  Sense strand starting at position 2550 of SEQ ID NO: 915873
aucagagucuaggcaacuu

SEQ ID NO: 1112713 - RNA, 19 nt, Artificial Sequence
  Description of Artificial Sequence: Synthetic oligonucleotide
  Antisense strand to SEQ ID NO: 1112712
aaguugccuagacucugau

SEQ ID NO: 1112714 - RNA, 19 nt, Artificial Sequence
  Description of Artificial Sequence: Synthetic oligonucleotide
  Sense strand starting at position 2740 of SEQ ID NO: 915873
uggagaucugcugacuugu

SEQ ID NO: 1112715 - RNA, 19 nt, Artificial Sequence
  Description of Artificial Sequence: Synthetic oligonucleotide
  Antisense strand to SEQ ID NO: 1112714
acaagucagcagaucucca

SEQ ID NO: 1112716 - RNA, 19 nt, Artificial Sequence
  Description of Artificial Sequence: Synthetic oligonucleotide
  Sense strand starting at position 2742 of SEQ ID NO: 915873
gagaucugcugacuuguaa

SEQ ID NO: 1112717 - RNA, 19 nt, Artificial Sequence
  Description of Artificial Sequence: Synthetic oligonucleotide
  Antisense strand to SEQ ID NO: 1112716
uuacaagucagcagaucuc

SEQ ID NO: 1112718 - RNA, 19 nt, Artificial Sequence
  Description of Artificial Sequence: Synthetic oligonucleotide
  Sense strand starting at position 2816 of SEQ ID NO: 915873
uauaaaugggcauggauua

SEQ ID NO: 1112719 - RNA, 19 nt, Artificial Sequence
  Description of Artificial Sequence: Synthetic oligonucleotide
  Antisense strand to SEQ ID NO: 1112718
uaauccaugcccauuuaua

SEQ ID NO: 1112720 - RNA, 19 nt, Artificial Sequence
  Description of Artificial Sequence: Synthetic oligonucleotide
  Sense strand starting at position 2884 of SEQ ID NO: 915873
uggcaugacuuguuagaug

SEQ ID NO: 1112721 - RNA, 19 nt, Artificial Sequence
  Description of Artificial Sequence: Synthetic oligonucleotide
  Antisense strand to SEQ ID NO: 1112720
caucuaacaagucaugcca

SEQ ID NO: 1112722 - RNA, 19 nt, Artificial Sequence
  Description of Artificial Sequence: Synthetic oligonucleotide
  Sense strand starting at position 2919 of SEQ ID NO: 915873
uggagaacgcgcguuuauu

SEQ ID NO: 1112723 - RNA, 19 nt, Artificial Sequence
  Description of Artificial Sequence: Synthetic oligonucleotide
  Antisense strand to SEQ ID NO: 1112722
aauaaacgcgcguucucca

SEQ ID NO: 1112724 - RNA, 19 nt, Artificial Sequence
  Description of Artificial Sequence: Synthetic oligonucleotide
  Sense strand starting at position 3009 of SEQ ID NO: 915873
guugauaauugauugguaa

SEQ ID NO: 1112725 - RNA, 19 nt, Artificial Sequence
  Description of Artificial Sequence: Synthetic oligonucleotide
  Antisense strand to SEQ ID NO: 1112724
uuaccaaucaauuaucaac

SEQ ID NO: 1112726 - RNA, 19 nt, Artificial Sequence
  Description of Artificial Sequence: Synthetic oligonucleotide
  Sense strand starting at position 3010 of SEQ ID NO: 915873
uugauaauugauugguaag

SEQ ID NO: 1112727 - RNA, 19 nt, Artificial Sequence
  Description of Artificial Sequence: Synthetic oligonucleotide
  Antisense strand to SEQ ID NO: 1112726
cuuaccaaucaauuaucaa

SEQ ID NO: 1112728 - RNA, 19 nt, Artificial Sequence
  Description of Artificial Sequence: Synthetic oligonucleotide
  Sense strand starting at position 3042 of SEQ ID NO: 915873
aggcacugugcuuacaaca

SEQ ID NO: 1112729 - RNA, 19 nt, Artificial Sequence
  Description of Artificial Sequence: Synthetic oligonucleotide
  Antisense strand to SEQ ID NO: 1112728
uguuguaagcacagugccu

SEQ ID NO: 1112730 - RNA, 19 nt, Artificial Sequence
  Description of Artificial Sequence: Synthetic oligonucleotide
  Sense strand starting at position 3109 of SEQ ID NO: 915873
gggcucaaaugguuaauua

SEQ ID NO: 1112731 - RNA, 19 nt, Artificial Sequence
  Description of Artificial Sequence: Synthetic oligonucleotide
  Antisense strand to SEQ ID NO: 1112730
uaauuaaccauuugagccc

SEQ ID NO: 1112732 - RNA, 19 nt, Artificial Sequence
  Description of Artificial Sequence: Synthetic oligonucleotide
  Sense strand starting at position 3110 of SEQ ID NO: 915873
ggcucaaaugguuaauuaa

SEQ ID NO: 1112733 - RNA, 19 nt, Artificial Sequence
  Description of Artificial Sequence: Synthetic oligonucleotide
  Antisense strand to SEQ ID NO: 1112732
uuaauuaaccauuugagcc

SEQ ID NO: 1112734 - RNA, 19 nt, Artificial Sequence
  Description of Artificial Sequence: Synthetic oligonucleotide
  Sense strand starting at position 3151 of SEQ ID NO: 915873
guaaguggcugacucagaa

SEQ ID NO: 1112735 - RNA, 19 nt, Artificial Sequence
  Description of Artificial Sequence: Synthetic oligonucleotide
  Antisense strand to SEQ ID NO: 1112734
uucugagucagccacuuac

SEQ ID NO: 1112736 - RNA, 19 nt, Artificial Sequence
  Description of Artificial Sequence: Synthetic oligonucleotide
  Sense strand starting at position 3305 of SEQ ID NO: 915873
ugcuaagugcuuuccaugu

SEQ ID NO: 1112737 - RNA, 19 nt, Artificial Sequence
  Description of Artificial Sequence: Synthetic oligonucleotide
  Antisense strand to SEQ ID NO: 1112736
acauggaaagcacuuagca

SEQ ID NO: 1112738 - RNA, 19 nt, Artificial Sequence
  Description of Artificial Sequence: Synthetic oligonucleotide
  Sense strand starting at position 3391 of SEQ ID NO: 915873
acugauuacccgcaagaua

SEQ ID NO: 1112739 - RNA, 19 nt, Artificial Sequence
  Description of Artificial Sequence: Synthetic oligonucleotide
  Antisense strand to SEQ ID NO: 1112738
uaucuugcggguaaucagu

SEQ ID NO: 1112740 - RNA, 19 nt, Artificial Sequence
  Description of Artificial Sequence: Synthetic oligonucleotide
  Sense strand starting at position 3611 of SEQ ID NO: 915873
auuggagguuuccugaagu

SEQ ID NO: 1112741 - RNA, 19 nt, Artificial Sequence
  Description of Artificial Sequence: Synthetic oligonucleotide
  Antisense strand to SEQ ID NO: 1112740
acuucaggaaaccuccaau

SEQ ID NO: 1112742 - RNA, 19 nt, Artificial Sequence
  Description of Artificial Sequence: Synthetic oligonucleotide
  Sense strand starting at position 3619 of SEQ ID NO: 915873
uuuccugaaguauguagau

SEQ ID NO: 1112743 - RNA, 19 nt, Artificial Sequence
  Description of Artificial Sequence: Synthetic oligonucleotide
  Antisense strand to SEQ ID NO: 1112742
aucuacauacuucaggaaa

SEQ ID NO: 1112744 - RNA, 19 nt, Artificial Sequence
  Description of Artificial Sequence: Synthetic oligonucleotide
  Sense strand starting at position 3806 of SEQ ID NO: 915873
gggaaauccuucuuccuuu

SEQ ID NO: 1112745 - RNA, 19 nt, Artificial Sequence
  Description of Artificial Sequence: Synthetic oligonucleotide
  Antisense strand to SEQ ID NO: 1112744
aaaggaagaaggauuuccc

SEQ ID NO: 1112746 - RNA, 19 nt, Artificial Sequence
  Description of Artificial Sequence: Synthetic oligonucleotide
  Sense strand starting at position 138 of SEQ ID NO: 915874
guaacucaggaauggguaa

SEQ ID NO: 1112747 - RNA, 19 nt, Artificial Sequence
  Description of Artificial Sequence: Synthetic oligonucleotide
  Antisense strand to SEQ ID NO: 1112746
uuacccauuccugaguuac

SEQ ID NO: 1112748 - RNA, 19 nt, Artificial Sequence
  Description of Artificial Sequence: Synthetic oligonucleotide
  Sense strand starting at position 281 of SEQ ID NO: 915874
gauuacauacuggguacaa

SEQ ID NO: 1112749 - RNA, 19 nt, Artificial Sequence
  Description of Artificial Sequence: Synthetic oligonucleotide
  Antisense strand to SEQ ID NO: 1112748
uuguacccaguauguaauc

SEQ ID NO: 1112750 - RNA, 19 nt, Artificial Sequence
  Description of Artificial Sequence: Synthetic oligonucleotide
  Sense strand starting at position 282 of SEQ ID NO: 915874
auuacauacuggguacaau

SEQ ID NO: 1112751 - RNA, 19 nt, Artificial Sequence
  Description of Artificial Sequence: Synthetic oligonucleotide
  Antisense strand to SEQ ID NO: 1112750
auuguacccaguauguaau

SEQ ID NO: 1112752 - RNA, 19 nt, Artificial Sequence
  Description of Artificial Sequence: Synthetic oligonucleotide
  Sense strand starting at position 433 of SEQ ID NO: 915874
uggauuauaccguguacua

SEQ ID NO: 1112753 - RNA, 19 nt, Artificial Sequence
  Description of Artificial Sequence: Synthetic oligonucleotide
  Antisense strand to SEQ ID NO: 1112752
uaguacacgguauaaucca

SEQ ID NO: 1112754 - RNA, 19 nt, Artificial Sequence
  Description of Artificial Sequence: Synthetic oligonucleotide
  Sense strand starting at position 435 of SEQ ID NO: 915874
gauuauaccguguacuaga

SEQ ID NO: 1112755 - RNA, 19 nt, Artificial Sequence
  Description of Artificial Sequence: Synthetic oligonucleotide
  Antisense strand to SEQ ID NO: 1112754
ucuaguacacgguauaauc

SEQ ID NO: 1112756 - RNA, 19 nt, Artificial Sequence
  Description of Artificial Sequence: Synthetic oligonucleotide
  Sense strand starting at position 440 of SEQ ID NO: 915874
uaccguguacuagagacaa

SEQ ID NO: 1112757 - RNA, 19 nt, Artificial Sequence
  Description of Artificial Sequence: Synthetic oligonucleotide
  Antisense strand to SEQ ID NO: 1112756
uugucucuaguacacggua

SEQ ID NO: 1112758 - RNA, 19 nt, Artificial Sequence
  Description of Artificial Sequence: Synthetic oligonucleotide
  Sense strand starting at position 442 of SEQ ID NO: 915874
ccguguacuagagacaaua

SEQ ID NO: 1112759 - RNA, 19 nt, Artificial Sequence
  Description of Artificial Sequence: Synthetic oligonucleotide
  Antisense strand to SEQ ID NO: 1112758
uauugucucuaguacacgg

SEQ ID NO: 1112760 - RNA, 19 nt, Artificial Sequence
  Description of Artificial Sequence: Synthetic oligonucleotide
  Sense strand starting at position 492 of SEQ ID NO: 915874
gcaugugcucuagcaacgu

SEQ ID NO: 1112761 - RNA, 19 nt, Artificial Sequence
  Description of Artificial Sequence: Synthetic oligonucleotide
  Antisense strand to SEQ ID NO: 1112760
acguugcuagagcacaugc

SEQ ID NO: 1112762 - RNA, 19 nt, Artificial Sequence
  Description of Artificial Sequence: Synthetic oligonucleotide
  Sense strand starting at position 549 of SEQ ID NO: 915874
auggguagcuuuccagaaa

SEQ ID NO: 1112763 - RNA, 19 nt, Artificial Sequence
  Description of Artificial Sequence: Synthetic oligonucleotide
  Antisense strand to SEQ ID NO: 1112762
uuucuggaaagcuacccau

SEQ ID NO: 1112764 - RNA, 19 nt, Artificial Sequence
  Description of Artificial Sequence: Synthetic oligonucleotide
  Sense strand starting at position 800 of SEQ ID NO: 915874
gcuggaaaggaucgaauca

SEQ ID NO: 1112765 - RNA, 19 nt, Artificial Sequence
  Description of Artificial Sequence: Synthetic oligonucleotide
  Antisense strand to SEQ ID NO: 1112764
ugauucgauccuuuccagc

SEQ ID NO: 1112766 - RNA, 19 nt, Artificial Sequence
  Description of Artificial Sequence: Synthetic oligonucleotide
  Sense strand starting at position 978 of SEQ ID NO: 915874
ggaccacaguccucuggaa

SEQ ID NO: 1112767 - RNA, 19 nt, Artificial Sequence
  Description of Artificial Sequence: Synthetic oligonucleotide
  Antisense strand to SEQ ID NO: 1112766
uuccagaggacuguggucc

SEQ ID NO: 1112768 - RNA, 19 nt, Artificial Sequence
  Description of Artificial Sequence: Synthetic oligonucleotide
  Sense strand starting at position 1138 of SEQ ID NO: 915874
guaucaggacugugacuga

SEQ ID NO: 1112769 - RNA, 19 nt, Artificial Sequence
  Description of Artificial Sequence: Synthetic oligonucleotide
  Antisense strand to SEQ ID NO: 1112768
ucagucacaguccugauac

SEQ ID NO: 1112770 - RNA, 19 nt, Artificial Sequence
  Description of Artificial Sequence: Synthetic oligonucleotide
  Sense strand starting at position 1395 of SEQ ID NO: 915874
ggguguaaaugccugaucu

SEQ ID NO: 1112771 - RNA, 19 nt, Artificial Sequence
  Description of Artificial Sequence: Synthetic oligonucleotide
  Antisense strand to SEQ ID NO: 1112770
agaucaggcauuuacaccc

SEQ ID NO: 1112772 - RNA, 19 nt, Artificial Sequence
  Description of Artificial Sequence: Synthetic oligonucleotide
  Sense strand starting at position 1396 of SEQ ID NO: 915874
gguguaaaugccugaucuu

SEQ ID NO: 1112773 - RNA, 19 nt, Artificial Sequence
  Description of Artificial Sequence: Synthetic oligonucleotide
  Antisense strand to SEQ ID NO: 1112772
aagaucaggcauuuacacc

SEQ ID NO: 1112774 - RNA, 19 nt, Artificial Sequence
  Description of Artificial Sequence: Synthetic oligonucleotide
  Sense strand starting at position 1397 of SEQ ID NO: 915874
guguaaaugccugaucuug

SEQ ID NO: 1112775 - RNA, 19 nt, Artificial Sequence
  Description of Artificial Sequence: Synthetic oligonucleotide
  Antisense strand to SEQ ID NO: 1112774
caagaucaggcauuuacac

SEQ ID NO: 1112776 - RNA, 19 nt, Artificial Sequence
  Description of Artificial Sequence: Synthetic oligonucleotide
  Sense strand starting at position 1399 of SEQ ID NO: 915874
guaaaugccugaucuugga

SEQ ID NO: 1112777 - RNA, 19 nt, Artificial Sequence
  Description of Artificial Sequence: Synthetic oligonucleotide
  Antisense strand to SEQ ID NO: 1112776
uccaagaucaggcauuuac

SEQ ID NO: 1112778 - RNA, 19 nt, Artificial Sequence
  Description of Artificial Sequence: Synthetic oligonucleotide
  Sense strand starting at position 1692 of SEQ ID NO: 915874
cuucccucuccuugaguua

SEQ ID NO: 1112779 - RNA, 19 nt, Artificial Sequence
  Description of Artificial Sequence: Synthetic oligonucleotide
  Antisense strand to SEQ ID NO: 1112778
uaacucaaggagagggaag

SEQ ID NO: 1112780 - RNA, 19 nt, Artificial Sequence
  Description of Artificial Sequence: Synthetic oligonucleotide
  Sense strand starting at position 1748 of SEQ ID NO: 915874
ucggaaauuacauagacgu

SEQ ID NO: 1112781 - RNA, 19 nt, Artificial Sequence
  Description of Artificial Sequence: Synthetic oligonucleotide
  Antisense strand to SEQ ID NO: 1112780
acgucuauguaauuuccga

SEQ ID NO: 1112782 - RNA, 19 nt, Artificial Sequence
  Description of Artificial Sequence: Synthetic oligonucleotide
  Sense strand starting at position 2333 of SEQ ID NO: 915874
ucaugaacugucuggcuga

SEQ ID NO: 1112783 - RNA, 19 nt, Artificial Sequence
  Description of Artificial Sequence: Synthetic oligonucleotide
  Antisense strand to SEQ ID NO: 1112782
ucagccagacaguucauga

SEQ ID NO: 1112784 - RNA, 19 nt, Artificial Sequence
  Description of Artificial Sequence: Synthetic oligonucleotide
  Sense strand starting at position 2336 of SEQ ID NO: 915874
ugaacugucuggcugauua

SEQ ID NO: 1112785 - RNA, 19 nt, Artificial Sequence
  Description of Artificial Sequence: Synthetic oligonucleotide
  Antisense strand to SEQ ID NO: 1112784
uaaucagccagacaguuca

SEQ ID NO: 1112786 - RNA, 19 nt, Artificial Sequence
  Description of Artificial Sequence: Synthetic oligonucleotide
  Sense strand starting at position 2338 of SEQ ID NO: 915874
aacugucuggcugauuagu

SEQ ID NO: 1112787 - RNA, 19 nt, Artificial Sequence
  Description of Artificial Sequence: Synthetic oligonucleotide
  Antisense strand to SEQ ID NO: 1112786
acuaaucagccagacaguu

SEQ ID NO: 1112788 - RNA, 19 nt, Artificial Sequence
  Description of Artificial Sequence: Synthetic oligonucleotide
  Sense strand starting at position 2344 of SEQ ID NO: 915874
cuggcugauuaguuuccaa

SEQ ID NO: 1112789 - RNA, 19 nt, Artificial Sequence
  Description of Artificial Sequence: Synthetic oligonucleotide
  Antisense strand to SEQ ID NO: 1112788
uuggaaacuaaucagccag

SEQ ID NO: 1112790 - RNA, 19 nt, Artificial Sequence
  Description of Artificial Sequence: Synthetic oligonucleotide
  Sense strand starting at position 2765 of SEQ ID NO: 915874
gcccuucugcacgauggaa

SEQ ID NO: 1112791 - RNA, 19 nt, Artificial Sequence
  Description of Artificial Sequence: Synthetic oligonucleotide
  Antisense strand to SEQ ID NO: 1112790
uuccaucgugcagaagggc

SEQ ID NO: 1112792 - RNA, 19 nt, Artificial Sequence
  Description of Artificial Sequence: Synthetic oligonucleotide
  Sense strand starting at position 2845 of SEQ ID NO: 915874
gaagaaguacuauguuaag

SEQ ID NO: 1112793 - RNA, 19 nt, Artificial Sequence
  Description of Artificial Sequence: Synthetic oligonucleotide
  Antisense strand to SEQ ID NO: 1112792
cuuaacauaguacuucuuc

SEQ ID NO: 1112794 - RNA, 19 nt, Artificial Sequence
  Description of Artificial Sequence: Synthetic oligonucleotide
  Sense strand starting at position 2854 of SEQ ID NO: 915874
cuauguuaaggucaaguau

SEQ ID NO: 1112795 - RNA, 19 nt, Artificial Sequence
  Description of Artificial Sequence: Synthetic oligonucleotide
  Antisense strand to SEQ ID NO: 1112794
auacuugaccuuaacauag

SEQ ID NO: 1112796 - RNA, 19 nt, Artificial Sequence
  Description of Artificial Sequence: Synthetic oligonucleotide
  Sense strand starting at position 2926 of SEQ ID NO: 915874
aagguaggcuggucaugau

SEQ ID NO: 1112797 - RNA, 19 nt, Artificial Sequence
  Description of Artificial Sequence: Synthetic oligonucleotide
  Antisense strand to SEQ ID NO: 1112796
aucaugaccagccuaccuu

SEQ ID NO: 1112798 - RNA, 19 nt, Artificial Sequence
  Description of Artificial Sequence: Synthetic oligonucleotide
  Sense strand starting at position 2930 of SEQ ID NO: 915874
uaggcuggucaugauagau

SEQ ID NO: 1112799 - RNA, 19 nt, Artificial Sequence
  Description of Artificial Sequence: Synthetic oligonucleotide
  Antisense strand to SEQ ID NO: 1112798
aucuaucaugaccagccua

SEQ ID NO: 1112800 - RNA, 19 nt, Artificial Sequence
  Description of Artificial Sequence: Synthetic oligonucleotide
  Sense strand starting at position 3209 of SEQ ID NO: 915874
agagaacugcaguguuaaa

SEQ ID NO: 1112801 - RNA, 19 nt, Artificial Sequence
  Description of Artificial Sequence: Synthetic oligonucleotide
  Antisense strand to SEQ ID NO: 1112800
uuuaacacugcaguucucu

SEQ ID NO: 1112802 - RNA, 19 nt, Artificial Sequence
  Description of Artificial Sequence: Synthetic oligonucleotide
  Sense strand starting at position 3230 of SEQ ID NO: 915874
gcaaguaacuugccucuaa

SEQ ID NO: 1112803 - RNA, 19 nt, Artificial Sequence
  Description of Artificial Sequence: Synthetic oligonucleotide
  Antisense strand to SEQ ID NO: 1112802
uuagaggcaaguuacuugc

SEQ ID NO: 1112804 - RNA, 19 nt, Artificial Sequence
  Description of Artificial Sequence: Synthetic oligonucleotide
  Sense strand starting at position 3234 of SEQ ID NO: 915874
guaacuugccucuaagagg

SEQ ID NO: 1112805 - RNA, 19 nt, Artificial Sequence
  Description of Artificial Sequence: Synthetic oligonucleotide
  Antisense strand to SEQ ID NO: 1112804
ccucuuagaggcaaguuac

SEQ ID NO: 1112806 - RNA, 19 nt, Artificial Sequence
  Description of Artificial Sequence: Synthetic oligonucleotide
  Sense strand starting at position 3248 of SEQ ID NO: 915874
agaggauccuaggauucca

SEQ ID NO: 1112807 - RNA, 19 nt, Artificial Sequence
  Description of Artificial Sequence: Synthetic oligonucleotide
  Antisense strand to SEQ ID NO: 1112806
uggaauccuaggauccucu

SEQ ID NO: 1112808 - RNA, 19 nt, Artificial Sequence
  Description of Artificial Sequence: Synthetic oligonucleotide
  Sense strand starting at position 3286 of SEQ ID NO: 915874
gagucuguggcauaacacu

SEQ ID NO: 1112809 - RNA, 19 nt, Artificial Sequence
  Description of Artificial Sequence: Synthetic oligonucleotide
  Antisense strand to SEQ ID NO: 1112808
aguguuaugccacagacuc

SEQ ID NO: 1112810 - RNA, 19 nt, Artificial Sequence
  Description of Artificial Sequence: Synthetic oligonucleotide
  Sense strand starting at position 3294 of SEQ ID NO: 915874
ggcauaacacucugcuauu

SEQ ID NO: 1112811 - RNA, 19 nt, Artificial Sequence
  Description of Artificial Sequence: Synthetic oligonucleotide
  Antisense strand to SEQ ID NO: 1112810
aauagcagaguguuaugcc

SEQ ID NO: 1112812 - RNA, 19 nt, Artificial Sequence
  Description of Artificial Sequence: Synthetic oligonucleotide
  Sense strand starting at position 3452 of SEQ ID NO: 915874
guuucuuagugucuauaua

SEQ ID NO: 1112813 - RNA, 19 nt, Artificial Sequence
  Description of Artificial Sequence: Synthetic oligonucleotide
  Antisense strand to SEQ ID NO: 1112812
uauauagacacuaagaaac

SEQ ID NO: 1112814 - RNA, 19 nt, Artificial Sequence
  Description of Artificial Sequence: Synthetic oligonucleotide
  Sense strand starting at position 3453 of SEQ ID NO: 915874
uuucuuagugucuauauac

SEQ ID NO: 1112815 - RNA, 19 nt, Artificial Sequence
  Description of Artificial Sequence: Synthetic oligonucleotide
  Antisense strand to SEQ ID NO: 1112814
guauauagacacuaagaaa

SEQ ID NO: 1112816 - RNA, 19 nt, Artificial Sequence
  Description of Artificial Sequence: Synthetic oligonucleotide
  Sense strand starting at position 3524 of SEQ ID NO: 915874
cuggucugagggugaguaa

SEQ ID NO: 1112817 - RNA, 19 nt, Artificial Sequence
  Description of Artificial Sequence: Synthetic oligonucleotide
  Antisense strand to SEQ ID NO: 1112816
uuacucacccucagaccag

SEQ ID NO: 1112818 - RNA, 19 nt, Artificial Sequence
  Description of Artificial Sequence: Synthetic oligonucleotide
  Sense strand starting at position 3525 of SEQ ID NO: 915874
uggucugagggugaguaaa

SEQ ID NO: 1112819 - RNA, 19 nt, Artificial Sequence
  Description of Artificial Sequence: Synthetic oligonucleotide
  Antisense strand to SEQ ID NO: 1112818
uuuacucacccucagacca

SEQ ID NO: 1112820 - RNA, 19 nt, Artificial Sequence
  Description of Artificial Sequence: Synthetic oligonucleotide
  Sense strand starting at position 3566 of SEQ ID NO: 915874
uacagauagugccuuugga

SEQ ID NO: 1112821 - RNA, 19 nt, Artificial Sequence
  Description of Artificial Sequence: Synthetic oligonucleotide
  Antisense strand to SEQ ID NO: 1112820
uccaaaggcacuaucugua

SEQ ID NO: 1112822 - RNA, 19 nt, Artificial Sequence
  Description of Artificial Sequence: Synthetic oligonucleotide
  Sense strand starting at position 3860 of SEQ ID NO: 915874
agcugaugccuccaauaac

SEQ ID NO: 1112823 - RNA, 19 nt, Artificial Sequence
  Description of Artificial Sequence: Synthetic oligonucleotide
  Antisense strand to SEQ ID NO: 1112822
guuauuggaggcaucagcu

SEQ ID NO: 1112824 - RNA, 19 nt, Artificial Sequence
  Description of Artificial Sequence: Synthetic oligonucleotide
  Sense strand starting at position 3943 of SEQ ID NO: 915874
ggaucugguuuccuaccaa

SEQ ID NO: 1112825 - RNA, 19 nt, Artificial Sequence
  Description of Artificial Sequence: Synthetic oligonucleotide
  Antisense strand to SEQ ID NO: 1112824
uugguaggaaaccagaucc

SEQ ID NO: 1112826 - RNA, 19 nt, Artificial Sequence
  Description of Artificial Sequence: Synthetic oligonucleotide
  Sense strand starting at position 5 of SEQ ID NO: 915875
ggaccacaguccucuggaa

SEQ ID NO: 1112827 - RNA, 19 nt, Artificial Sequence
  Description of Artificial Sequence: Synthetic oligonucleotide
  Antisense strand to SEQ ID NO: 1112826
uuccagaggacuguggucc

SEQ ID NO: 1112828 - RNA, 19 nt, Artificial Sequence
  Description of Artificial Sequence: Synthetic oligonucleotide
  Sense strand starting at position 165 of SEQ ID NO: 915875
guaucaggacugugacuga

SEQ ID NO: 1112829 - RNA, 19 nt, Artificial Sequence
  Description of Artificial Sequence: Synthetic oligonucleotide
  Antisense strand to SEQ ID NO: 1112828
ucagucacaguccugauac

SEQ ID NO: 1112830 - RNA, 19 nt, Artificial Sequence
  Description of Artificial Sequence: Synthetic oligonucleotide
  Sense strand starting at position 424 of SEQ ID NO: 915875
guguaaaugccugaucuug

SEQ ID NO: 1112831 - RNA, 19 nt, Artificial Sequence
  Description of Artificial Sequence: Synthetic oligonucleotide
  Antisense strand to SEQ ID NO: 1112830
caagaucaggcauuuacac

SEQ ID NO: 1112832 - RNA, 19 nt, Artificial Sequence
  Description of Artificial Sequence: Synthetic oligonucleotide
  Sense strand starting at position 426 of SEQ ID NO: 915875
guaaaugccugaucuugga

SEQ ID NO: 1112833 - RNA, 19 nt, Artificial Sequence
  Description of Artificial Sequence: Synthetic oligonucleotide
  Antisense strand to SEQ ID NO: 1112832
uccaagaucaggcauuuac

SEQ ID NO: 1112834 - RNA, 19 nt, Artificial Sequence
  Description of Artificial Sequence: Synthetic oligonucleotide
  Sense strand starting at position 775 of SEQ ID NO: 915875
ucggaaauuacauagacgu

SEQ ID NO: 1112835 - RNA, 19 nt, Artificial Sequence
  Description of Artificial Sequence: Synthetic oligonucleotide
  Antisense strand to SEQ ID NO: 1112834
acgucuauguaauuuccga

SEQ ID NO: 1112836 - RNA, 19 nt, Artificial Sequence
  Description of Artificial Sequence: Synthetic oligonucleotide
  Sense strand starting at position 1360 of SEQ ID NO: 915875
ucaugaacugucuggcuga

SEQ ID NO: 1112837 - RNA, 19 nt, Artificial Sequence
  Description of Artificial Sequence: Synthetic oligonucleotide
  Antisense strand to SEQ ID NO: 1112836
ucagccagacaguucauga

SEQ ID NO: 1112838 - RNA, 19 nt, Artificial Sequence
  Description of Artificial Sequence: Synthetic oligonucleotide
  Sense strand starting at position 1363 of SEQ ID NO: 915875
ugaacugucuggcugauua

SEQ ID NO: 1112839 - RNA, 19 nt, Artificial Sequence
  Description of Artificial Sequence: Synthetic oligonucleotide
  Antisense strand to SEQ ID NO: 1112838
uaaucagccagacaguuca

SEQ ID NO: 1112840 - RNA, 19 nt, Artificial Sequence
  Description of Artificial Sequence: Synthetic oligonucleotide
  Sense strand starting at position 1365 of SEQ ID NO: 915875
aacugucuggcugauuagu

SEQ ID NO: 1112841 - RNA, 19 nt, Artificial Sequence
  Description of Artificial Sequence: Synthetic oligonucleotide
  Antisense strand to SEQ ID NO: 1112840
acuaaucagccagacaguu

SEQ ID NO: 1112842 - RNA, 19 nt, Artificial Sequence
  Description of Artificial Sequence: Synthetic oligonucleotide
  Sense strand starting at position 1371 of SEQ ID NO: 915875
cuggcugauuaguuuccaa

SEQ ID NO: 1112843 - RNA, 19 nt, Artificial Sequence
  Description of Artificial Sequence: Synthetic oligonucleotide
  Antisense strand to SEQ ID NO: 1112842
uuggaaacuaaucagccag

SEQ ID NO: 1112844 - RNA, 19 nt, Artificial Sequence
  Description of Artificial Sequence: Synthetic oligonucleotide
  Sense strand starting at position 1792 of SEQ ID NO: 915875
gcccuucugcacgauggaa

SEQ ID NO: 1112845 - RNA, 19 nt, Artificial Sequence
  Description of Artificial Sequence: Synthetic oligonucleotide
  Antisense strand to SEQ ID NO: 1112844
uuccaucgugcagaagggc

SEQ ID NO: 1112846 - RNA, 19 nt, Artificial Sequence
  Description of Artificial Sequence: Synthetic oligonucleotide
  Sense strand starting at position 1872 of SEQ ID NO: 915875
gaagaaguacuauguuaag

SEQ ID NO: 1112847 - RNA, 19 nt, Artificial Sequence
  Description of Artificial Sequence: Synthetic oligonucleotide
  Antisense strand to SEQ ID NO: 1112846
cuuaacauaguacuucuuc

SEQ ID NO: 1112848 - RNA, 19 nt, Artificial Sequence
  Description of Artificial Sequence: Synthetic oligonucleotide
  Sense strand starting at position 1881 of SEQ ID NO: 915875
cuauguuaaggucaaguau

SEQ ID NO: 1112849 - RNA, 19 nt, Artificial Sequence
  Description of Artificial Sequence: Synthetic oligonucleotide
  Antisense strand to SEQ ID NO: 1112848
auacuugaccuuaacauag

SEQ ID NO: 1112850 - RNA, 19 nt, Artificial Sequence
  Description of Artificial Sequence: Synthetic oligonucleotide
  Sense strand starting at position 1953 of SEQ ID NO: 915875
aagguaggcuggucaugau

SEQ ID NO: 1112851 - RNA, 19 nt, Artificial Sequence
  Description of Artificial Sequence: Synthetic oligonucleotide
  Antisense strand to SEQ ID NO: 1112850
aucaugaccagccuaccuu

SEQ ID NO: 1112852 - RNA, 19 nt, Artificial Sequence
  Description of Artificial Sequence: Synthetic oligonucleotide
  Sense strand starting at position 1957 of SEQ ID NO: 915875
uaggcuggucaugauagau

SEQ ID NO: 1112853 - RNA, 19 nt, Artificial Sequence
  Description of Artificial Sequence: Synthetic oligonucleotide
  Antisense strand to SEQ ID NO: 1112852
aucuaucaugaccagccua

SEQ ID NO: 1112854 - RNA, 19 nt, Artificial Sequence
  Description of Artificial Sequence: Synthetic oligonucleotide
  Sense strand starting at position 2236 of SEQ ID NO: 915875
agagaacugcaguguuaaa

SEQ ID NO: 1112855 - RNA, 19 nt, Artificial Sequence
  Description of Artificial Sequence: Synthetic oligonucleotide
  Antisense strand to SEQ ID NO: 1112854
uuuaacacugcaguucucu

SEQ ID NO: 1112856 - RNA, 19 nt, Artificial Sequence
  Description of Artificial Sequence: Synthetic oligonucleotide
  Sense strand starting at position 2261 of SEQ ID NO: 915875
guaacuugccucuaagagg

SEQ ID NO: 1112857 - RNA, 19 nt, Artificial Sequence
  Description of Artificial Sequence: Synthetic oligonucleotide
  Antisense strand to SEQ ID NO: 1112856
ccucuuagaggcaaguuac

SEQ ID NO: 1112858 - RNA, 19 nt, Artificial Sequence
  Description of Artificial Sequence: Synthetic oligonucleotide
  Sense strand starting at position 2313 of SEQ ID NO: 915875
gagucuguggcauaacacu

SEQ ID NO: 1112859 - RNA, 19 nt, Artificial Sequence
  Description of Artificial Sequence: Synthetic oligonucleotide
  Antisense strand to SEQ ID NO: 1112858
aguguuaugccacagacuc

SEQ ID NO: 1112860 - RNA, 19 nt, Artificial Sequence
  Description of Artificial Sequence: Synthetic oligonucleotide
  Sense strand starting at position 2480 of SEQ ID NO: 915875
uuucuuagugucuauauac

SEQ ID NO: 1112861 - RNA, 19 nt, Artificial Sequence
  Description of Artificial Sequence: Synthetic oligonucleotide
  Antisense strand to SEQ ID NO: 1112860
guauauagacacuaagaaa

SEQ ID NO: 1112862 - RNA, 19 nt, Artificial Sequence
  Description of Artificial Sequence: Synthetic oligonucleotide
  Sense strand starting at position 2551 of SEQ ID NO: 915875
cuggucugagggugaguaa

SEQ ID NO: 1112863 - RNA, 19 nt, Artificial Sequence
  Description of Artificial Sequence: Synthetic oligonucleotide
  Antisense strand to SEQ ID NO: 1112862
uuacucacccucagaccag

SEQ ID NO: 1112864 - RNA, 19 nt, Artificial Sequence
  Description of Artificial Sequence: Synthetic oligonucleotide
  Sense strand starting at position 2552 of SEQ ID NO: 915875
uggucugagggugaguaaa

SEQ ID NO: 1112865 - RNA, 19 nt, Artificial Sequence
  Description of Artificial Sequence: Synthetic oligonucleotide
  Antisense strand to SEQ ID NO: 1112864
uuuacucacccucagacca

SEQ ID NO: 1112866 - RNA, 19 nt, Artificial Sequence
  Description of Artificial Sequence: Synthetic oligonucleotide
  Sense strand starting at position 2593 of SEQ ID NO: 915875
uacagauagugccuuugga

SEQ ID NO: 1112867 - RNA, 19 nt, Artificial Sequence
  Description of Artificial Sequence: Synthetic oligonucleotide
  Antisense strand to SEQ ID NO: 1112866
uccaaaggcacuaucugua

SEQ ID NO: 1112868 - RNA, 19 nt, Artificial Sequence
  Description of Artificial Sequence: Synthetic oligonucleotide
  Sense strand starting at position 2887 of SEQ ID NO: 915875
agcugaugccuccaauaac

SEQ ID NO: 1112869 - RNA, 19 nt, Artificial Sequence
  Description of Artificial Sequence: Synthetic oligonucleotide
  Antisense strand to SEQ ID NO: 1112868
guuauuggaggcaucagcu

SEQ ID NO: 1112870 - RNA, 19 nt, Artificial Sequence
  Description of Artificial Sequence: Synthetic oligonucleotide
  Sense strand starting at position 2970 of SEQ ID NO: 915875
ggaucugguuuccuaccaa

SEQ ID NO: 1112871 - RNA, 19 nt, Artificial Sequence
  Description of Artificial Sequence: Synthetic oligonucleotide
  Antisense strand to SEQ ID NO: 1112870
uugguaggaaaccagaucc

SEQ ID NO: 1112872 - RNA, 19 nt, Artificial Sequence
  Description of Artificial Sequence: Synthetic oligonucleotide
  Sense strand starting at position 3046 of SEQ ID NO: 915875
accuuugaauuacugagua

SEQ ID NO: 1112873 - RNA, 19 nt, Artificial Sequence
  Description of Artificial Sequence: Synthetic oligonucleotide
  Antisense strand to SEQ ID NO: 1112872
uacucaguaauucaaaggu

SEQ ID NO: 1112874 - RNA, 19 nt, Artificial Sequence
  Description of Artificial Sequence: Synthetic oligonucleotide
  Sense strand starting at position 3050 of SEQ ID NO: 915875
uugaauuacugaguaguua

SEQ ID NO: 1112875 - RNA, 19 nt, Artificial Sequence
  Description of Artificial Sequence: Synthetic oligonucleotide
  Antisense strand to SEQ ID NO: 1112874
uaacuacucaguaauucaa

SEQ ID NO: 1112876 - RNA, 19 nt, Artificial Sequence
  Description of Artificial Sequence: Synthetic oligonucleotide
  Sense strand starting at position 3051 of SEQ ID NO: 915875
ugaauuacugaguaguuac

SEQ ID NO: 1112877 - RNA, 19 nt, Artificial Sequence
  Description of Artificial Sequence: Synthetic oligonucleotide
  Antisense strand to SEQ ID NO: 1112876
guaacuacucaguaauuca

SEQ ID NO: 1112878 - RNA, 19 nt, Artificial Sequence
  Description of Artificial Sequence: Synthetic oligonucleotide
  Sense strand starting at position 3054 of SEQ ID NO: 915875
auuacugaguaguuacaua

SEQ ID NO: 1112879 - RNA, 19 nt, Artificial Sequence
  Description of Artificial Sequence: Synthetic oligonucleotide
  Antisense strand to SEQ ID NO: 1112878
uauguaacuacucaguaau

SEQ ID NO: 1112880 - RNA, 19 nt, Artificial Sequence
  Description of Artificial Sequence: Synthetic oligonucleotide
  Sense strand starting at position 3191 of SEQ ID NO: 915875
acagaaguggugggaacuu

SEQ ID NO: 1112881 - RNA, 19 nt, Artificial Sequence
  Description of Artificial Sequence: Synthetic oligonucleotide
  Antisense strand to SEQ ID NO: 1112880
aaguucccaccacuucugu

SEQ ID NO: 1112882 - RNA, 19 nt, Artificial Sequence
  Description of Artificial Sequence: Synthetic oligonucleotide
  Sense strand starting at position 3352 of SEQ ID NO: 915875
aguuaugaccuuuggcaag

SEQ ID NO: 1112883 - RNA, 19 nt, Artificial Sequence
  Description of Artificial Sequence: Synthetic oligonucleotide
  Antisense strand to SEQ ID NO: 1112882
cuugccaaaggucauaacu

SEQ ID NO: 1112884 - RNA, 19 nt, Artificial Sequence
  Description of Artificial Sequence: Synthetic oligonucleotide
  Sense strand starting at position 3362 of SEQ ID NO: 915875
uuuggcaagucacuugaau

SEQ ID NO: 1112885 - RNA, 19 nt, Artificial Sequence
  Description of Artificial Sequence: Synthetic oligonucleotide
  Antisense strand to SEQ ID NO: 1112884
auucaagugacuugccaaa

SEQ ID NO: 1112886 - RNA, 19 nt, Artificial Sequence
  Description of Artificial Sequence: Synthetic oligonucleotide
  Sense strand starting at position 3430 of SEQ ID NO: 915875
acuagaugaugucuaaguc

SEQ ID NO: 1112887 - RNA, 19 nt, Artificial Sequence
  Description of Artificial Sequence: Synthetic oligonucleotide
  Antisense strand to SEQ ID NO: 1112886
gacuuagacaucaucuagu

SEQ ID NO: 1112888 - RNA, 19 nt, Artificial Sequence
  Description of Artificial Sequence: Synthetic oligonucleotide
  Sense strand starting at position 3453 of SEQ ID NO: 915875
uugauuccauuauccagua

SEQ ID NO: 1112889 - RNA, 19 nt, Artificial Sequence
  Description of Artificial Sequence: Synthetic oligonucleotide
  Antisense strand to SEQ ID NO: 1112888
uacuggauaauggaaucaa

SEQ ID NO: 1112890 - RNA, 19 nt, Artificial Sequence
  Description of Artificial Sequence: Synthetic oligonucleotide
  Sense strand starting at position 3538 of SEQ ID NO: 915875
ucuuguaauccaggacauc

SEQ ID NO: 1112891 - RNA, 19 nt, Artificial Sequence
  Description of Artificial Sequence: Synthetic oligonucleotide
  Antisense strand to SEQ ID NO: 1112890
gauguccuggauuacaaga

SEQ ID NO: 1112892 - RNA, 19 nt, Artificial Sequence
  Description of Artificial Sequence: Synthetic oligonucleotide
  Sense strand starting at position 3705 of SEQ ID NO: 915875
ugguguuaucuacaccacu

SEQ ID NO: 1112893 - RNA, 19 nt, Artificial Sequence
  Description of Artificial Sequence: Synthetic oligonucleotide
  Antisense strand to SEQ ID NO: 1112892
agugguguagauaacacca

SEQ ID NO: 1112894 - RNA, 19 nt, Artificial Sequence
  Description of Artificial Sequence: Synthetic oligonucleotide
  Sense strand starting at position 3723 of SEQ ID NO: 915875
uuccucuuccacugaagga

SEQ ID NO: 1112895 - RNA, 19 nt, Artificial Sequence
  Description of Artificial Sequence: Synthetic oligonucleotide
  Antisense strand to SEQ ID NO: 1112894
uccuucaguggaagaggaa

SEQ ID NO: 1112896 - RNA, 19 nt, Artificial Sequence
  Description of Artificial Sequence: Synthetic oligonucleotide
  Sense strand starting at position 3739 of SEQ ID NO: 915875
ggaugucuggaguauguag

SEQ ID NO: 1112897 - RNA, 19 nt, Artificial Sequence
  Description of Artificial Sequence: Synthetic oligonucleotide
  Antisense strand to SEQ ID NO: 1112896
cuacauacuccagacaucc

SEQ ID NO: 1112898 - RNA, 19 nt, Artificial Sequence
  Description of Artificial Sequence: Synthetic oligonucleotide
  Sense strand starting at position 3757 of SEQ ID NO: 915875
ggaccuuggcaucaagcau

SEQ ID NO: 1112899 - RNA, 19 nt, Artificial Sequence
  Description of Artificial Sequence: Synthetic oligonucleotide
  Antisense strand to SEQ ID NO: 1112898
augcuugaugccaaggucc

SEQ ID NO: 1112900 - RNA, 19 nt, Artificial Sequence
  Description of Artificial Sequence: Synthetic oligonucleotide
  Sense strand starting at position 3843 of SEQ ID NO: 915875
acauuagagucucuuauuc

SEQ ID NO: 1112901 - RNA, 19 nt, Artificial Sequence
  Description of Artificial Sequence: Synthetic oligonucleotide
  Antisense strand to SEQ ID NO: 1112900
gaauaagagacucuaaugu

SEQ ID NO: 1112902 - RNA, 19 nt, Artificial Sequence
  Description of Artificial Sequence: Synthetic oligonucleotide
  Sense strand starting at position 3976 of SEQ ID NO: 915875
uccuuaccaccuuaugagu

SEQ ID NO: 1112903 - RNA, 19 nt, Artificial Sequence
  Description of Artificial Sequence: Synthetic oligonucleotide
  Antisense strand to SEQ ID NO: 1112902
acucauaaggugguaagga

SEQ ID NO: 1112904 - RNA, 19 nt, Artificial Sequence
  Description of Artificial Sequence: Synthetic oligonucleotide
  Sense strand starting at position 3981 of SEQ ID NO: 915875
accaccuuaugagugagaa

SEQ ID NO: 1112905 - RNA, 19 nt, Artificial Sequence
  Description of Artificial Sequence: Synthetic oligonucleotide
  Antisense strand to SEQ ID NO: 1112904
uucucacucauaagguggu

SEQ ID NO: 1112906 - RNA, 19 nt, Artificial Sequence
  Description of Artificial Sequence: Synthetic oligonucleotide
  Sense strand starting at position 163 of SEQ ID NO: 915876
ugaugucaucaccacuauu

SEQ ID NO: 1112907 - RNA, 19 nt, Artificial Sequence
  Description of Artificial Sequence: Synthetic oligonucleotide
  Antisense strand to SEQ ID NO: 1112906
aauaguggugaugacauca

SEQ ID NO: 1112908 - RNA, 19 nt, Artificial Sequence
  Description of Artificial Sequence: Synthetic oligonucleotide
  Sense strand starting at position 386 of SEQ ID NO: 915876
cccucucuagagugaaaug

SEQ ID NO: 1112909 - RNA, 19 nt, Artificial Sequence
  Description of Artificial Sequence: Synthetic oligonucleotide
  Antisense strand to SEQ ID NO: 1112908
cauuucacucuagagaggg

SEQ ID NO: 1112910 - RNA, 19 nt, Artificial Sequence
  Description of Artificial Sequence: Synthetic oligonucleotide
  Sense strand starting at position 488 of SEQ ID NO: 915876
gaagcuauucuuuggaaug

SEQ ID NO: 1112911 - RNA, 19 nt, Artificial Sequence
  Description of Artificial Sequence: Synthetic oligonucleotide
  Antisense strand to SEQ ID NO: 1112910
cauuccaaagaauagcuuc

SEQ ID NO: 1112912 - RNA, 19 nt, Artificial Sequence
  Description of Artificial Sequence: Synthetic oligonucleotide
  Sense strand starting at position 635 of SEQ ID NO: 915876
agaagcugccaguaauaga

SEQ ID NO: 1112913 - RNA, 19 nt, Artificial Sequence
  Description of Artificial Sequence: Synthetic oligonucleotide
  Antisense strand to SEQ ID NO: 1112912
ucuauuacuggcagcuucu

SEQ ID NO: 1112914 - RNA, 19 nt, Artificial Sequence
  Description of Artificial Sequence: Synthetic oligonucleotide
  Sense strand starting at position 721 of SEQ ID NO: 915876
agaguaaugucccuggaau

SEQ ID NO: 1112915 - RNA, 19 nt, Artificial Sequence
  Description of Artificial Sequence: Synthetic oligonucleotide
  Antisense strand to SEQ ID NO: 1112914
auuccagggacauuacucu

SEQ ID NO: 1112916 - RNA, 19 nt, Artificial Sequence
  Description of Artificial Sequence: Synthetic oligonucleotide
  Sense strand starting at position 722 of SEQ ID NO: 915876
gaguaaugucccuggaaua

SEQ ID NO: 1112917 - RNA, 19 nt, Artificial Sequence
  Description of Artificial Sequence: Synthetic oligonucleotide
  Antisense strand to SEQ ID NO: 1112916
uauuccagggacauuacuc

SEQ ID NO: 1112918 - RNA, 19 nt, Artificial Sequence
  Description of Artificial Sequence: Synthetic oligonucleotide
  Sense strand starting at position 723 of SEQ ID NO: 915876
aguaaugucccuggaauaa

SEQ ID NO: 1112919 - RNA, 19 nt, Artificial Sequence
  Description of Artificial Sequence: Synthetic oligonucleotide
  Antisense strand to SEQ ID NO: 1112918
uuauuccagggacauuacu

SEQ ID NO: 1112920 - RNA, 19 nt, Artificial Sequence
  Description of Artificial Sequence: Synthetic oligonucleotide
  Sense strand starting at position 757 of SEQ ID NO: 915876
cauagucuucgucagaaac

SEQ ID NO: 1112921 - RNA, 19 nt, Artificial Sequence
  Description of Artificial Sequence: Synthetic oligonucleotide
  Antisense strand to SEQ ID NO: 1112920
guuucugacgaagacuaug

SEQ ID NO: 1112922 - RNA, 19 nt, Artificial Sequence
  Description of Artificial Sequence: Synthetic oligonucleotide
  Sense strand starting at position 1049 of SEQ ID NO: 915876
gauauagggucaucccaga

SEQ ID NO: 1112923 - RNA, 19 nt, Artificial Sequence
  Description of Artificial Sequence: Synthetic oligonucleotide
  Antisense strand to SEQ ID NO: 1112922
ucugggaugacccuauauc

SEQ ID NO: 1112924 - RNA, 19 nt, Artificial Sequence
  Description of Artificial Sequence: Synthetic oligonucleotide
  Sense strand starting at position 1127 of SEQ ID NO: 915876
gugugugcucaucuuuauc

SEQ ID NO: 1112925 - RNA, 19 nt, Artificial Sequence
  Description of Artificial Sequence: Synthetic oligonucleotide
  Antisense strand to SEQ ID NO: 1112924
gauaaagaugagcacacac

SEQ ID NO: 1112926 - RNA, 19 nt, Artificial Sequence
  Description of Artificial Sequence: Synthetic oligonucleotide
  Sense strand starting at position 1152 of SEQ ID NO: 915876
gauggaagaguuugcuaug

SEQ ID NO: 1112927 - RNA, 19 nt, Artificial Sequence
  Description of Artificial Sequence: Synthetic oligonucleotide
  Antisense strand to SEQ ID NO: 1112926
cauagcaaacucuuccauc

SEQ ID NO: 1112928 - RNA, 19 nt, Artificial Sequence
  Description of Artificial Sequence: Synthetic oligonucleotide
  Sense strand starting at position 1236 of SEQ ID NO: 915876
ugcccaaauuugucaguca

SEQ ID NO: 1112929 - RNA, 19 nt, Artificial Sequence
  Description of Artificial Sequence: Synthetic oligonucleotide
  Antisense strand to SEQ ID NO: 1112928
ugacugacaaauuugggca

SEQ ID NO: 1112930 - RNA, 19 nt, Artificial Sequence
  Description of Artificial Sequence: Synthetic oligonucleotide
  Sense strand starting at position 1248 of SEQ ID NO: 915876
ucagucauccuccacagau

SEQ ID NO: 1112931 - RNA, 19 nt, Artificial Sequence
  Description of Artificial Sequence: Synthetic oligonucleotide
  Antisense strand to SEQ ID NO: 1112930
aucuguggaggaugacuga

SEQ ID NO: 1112932 - RNA, 19 nt, Artificial Sequence
  Description of Artificial Sequence: Synthetic oligonucleotide
  Sense strand starting at position 1285 of SEQ ID NO: 915876
guuuaccaucgugaacaca

SEQ ID NO: 1112933 - RNA, 19 nt, Artificial Sequence
  Description of Artificial Sequence: Synthetic oligonucleotide
  Antisense strand to SEQ ID NO: 1112932
uguguucacgaugguaaac

SEQ ID NO: 1112934 - RNA, 19 nt, Artificial Sequence
  Description of Artificial Sequence: Synthetic oligonucleotide
  Sense strand starting at position 1347 of SEQ ID NO: 915876
uucguaucacagcagaaga

SEQ ID NO: 1112935 - RNA, 19 nt, Artificial Sequence
  Description of Artificial Sequence: Synthetic oligonucleotide
  Antisense strand to SEQ ID NO: 1112934
ucuucugcugugauacgaa

SEQ ID NO: 1112936 - RNA, 19 nt, Artificial Sequence
  Description of Artificial Sequence: Synthetic oligonucleotide
  Sense strand starting at position 1363 of SEQ ID NO: 915876
agagcucacguuuauggaa

SEQ ID NO: 1112937 - RNA, 19 nt, Artificial Sequence
  Description of Artificial Sequence: Synthetic oligonucleotide
  Antisense strand to SEQ ID NO: 1112936
uuccauaaacgugagcucu

SEQ ID NO: 1112938 - RNA, 19 nt, Artificial Sequence
  Description of Artificial Sequence: Synthetic oligonucleotide
  Sense strand starting at position 1996 of SEQ ID NO: 915876
aucaguauuccauaucagu

SEQ ID NO: 1112939 - RNA, 19 nt, Artificial Sequence
  Description of Artificial Sequence: Synthetic oligonucleotide
  Antisense strand to SEQ ID NO: 1112938
acugauauggaauacugau

SEQ ID NO: 1112940 - RNA, 19 nt, Artificial Sequence
  Description of Artificial Sequence: Synthetic oligonucleotide
  Sense strand starting at position 2046 of SEQ ID NO: 915876
ggccgugucagugugacaa

SEQ ID NO: 1112941 - RNA, 19 nt, Artificial Sequence
  Description of Artificial Sequence: Synthetic oligonucleotide
  Antisense strand to SEQ ID NO: 1112940
uugucacacugacacggcc

SEQ ID NO: 1112942 - RNA, 19 nt, Artificial Sequence
  Description of Artificial Sequence: Synthetic oligonucleotide
  Sense strand starting at position 2171 of SEQ ID NO: 915876
guuugcuuguauuuaacaa

SEQ ID NO: 1112943 - RNA, 19 nt, Artificial Sequence
  Description of Artificial Sequence: Synthetic oligonucleotide
  Antisense strand to SEQ ID NO: 1112942
uuguuaaauacaagcaaac

SEQ ID NO: 1112944 - RNA, 19 nt, Artificial Sequence
  Description of Artificial Sequence: Synthetic oligonucleotide
  Sense strand starting at position 2244 of SEQ ID NO: 915876
acagcaucucugcaagaag

SEQ ID NO: 1112945 - RNA, 19 nt, Artificial Sequence
  Description of Artificial Sequence: Synthetic oligonucleotide
  Antisense strand to SEQ ID NO: 1112944
cuucuugcagagaugcugu

SEQ ID NO: 1112946 - RNA, 19 nt, Artificial Sequence
  Description of Artificial Sequence: Synthetic oligonucleotide
  Sense strand starting at position 2338 of SEQ ID NO: 915876
ggucaucaugaguacagua

SEQ ID NO: 1112947 - RNA, 19 nt, Artificial Sequence
  Description of Artificial Sequence: Synthetic oligonucleotide
  Antisense strand to SEQ ID NO: 1112946
uacuguacucaugaugacc

SEQ ID NO: 1112948 - RNA, 19 nt, Artificial Sequence
  Description of Artificial Sequence: Synthetic oligonucleotide
  Sense strand starting at position 2340 of SEQ ID NO: 915876
ucaucaugaguacaguaau

SEQ ID NO: 1112949 - RNA, 19 nt, Artificial Sequence
  Description of Artificial Sequence: Synthetic oligonucleotide
  Antisense strand to SEQ ID NO: 1112948
auuacuguacucaugauga

SEQ ID NO: 1112950 - RNA, 19 nt, Artificial Sequence
  Description of Artificial Sequence: Synthetic oligonucleotide
  Sense strand starting at position 2545 of SEQ ID NO: 915876
uucugaagauaguuaacau

SEQ ID NO: 1112951 - RNA, 19 nt, Artificial Sequence
  Description of Artificial Sequence: Synthetic oligonucleotide
  Antisense strand to SEQ ID NO: 1112950
auguuaacuaucuucagaa

SEQ ID NO: 1112952 - RNA, 19 nt, Artificial Sequence
  Description of Artificial Sequence: Synthetic oligonucleotide
  Sense strand starting at position 2719 of SEQ ID NO: 915876
cguggaggacucuaaacuu

SEQ ID NO: 1112953 - RNA, 19 nt, Artificial Sequence
  Description of Artificial Sequence: Synthetic oligonucleotide
  Antisense strand to SEQ ID NO: 1112952
aaguuuagaguccuccacg

SEQ ID NO: 1112954 - RNA, 19 nt, Artificial Sequence
  Description of Artificial Sequence: Synthetic oligonucleotide
  Sense strand starting at position 2804 of SEQ ID NO: 915876
uuuguauuugguugugaug

SEQ ID NO: 1112955 - RNA, 19 nt, Artificial Sequence
  Description of Artificial Sequence: Synthetic oligonucleotide
  Antisense strand to SEQ ID NO: 1112954
caucacaaccaaauacaaa

SEQ ID NO: 1112956 - RNA, 19 nt, Artificial Sequence
  Description of Artificial Sequence: Synthetic oligonucleotide
  Sense strand starting at position 2810 of SEQ ID NO: 915876
uuugguugugaugauuaca

SEQ ID NO: 1112957 - RNA, 19 nt, Artificial Sequence
  Description of Artificial Sequence: Synthetic oligonucleotide
  Antisense strand to SEQ ID NO: 1112956
uguaaucaucacaaccaaa

SEQ ID NO: 1112958 - RNA, 19 nt, Artificial Sequence
  Description of Artificial Sequence: Synthetic oligonucleotide
  Sense strand starting at position 2813 of SEQ ID NO: 915876
gguugugaugauuacauua

SEQ ID NO: 1112959 - RNA, 19 nt, Artificial Sequence
  Description of Artificial Sequence: Synthetic oligonucleotide
  Antisense strand to SEQ ID NO: 1112958
uaauguaaucaucacaacc

SEQ ID NO: 1112960 - RNA, 19 nt, Artificial Sequence
  Description of Artificial Sequence: Synthetic oligonucleotide
  Sense strand starting at position 2828 of SEQ ID NO: 915876
auuauauagggauguaguu

SEQ ID NO: 1112961 - RNA, 19 nt, Artificial Sequence
  Description of Artificial Sequence: Synthetic oligonucleotide
  Antisense strand to SEQ ID NO: 1112960
aacuacaucccuauauaau

SEQ ID NO: 1112962 - RNA, 19 nt, Artificial Sequence
  Description of Artificial Sequence: Synthetic oligonucleotide
  Sense strand starting at position 2961 of SEQ ID NO: 915876
uuagucagucaagaguuaa

SEQ ID NO: 1112963 - RNA, 19 nt, Artificial Sequence
  Description of Artificial Sequence: Synthetic oligonucleotide
  Antisense strand to SEQ ID NO: 1112962
uuaacucuugacugacuaa

SEQ ID NO: 1112964 - RNA, 19 nt, Artificial Sequence
  Description of Artificial Sequence: Synthetic oligonucleotide
  Sense strand starting at position 3028 of SEQ ID NO: 915876
aggugacuuacaugaugua

SEQ ID NO: 1112965 - RNA, 19 nt, Artificial Sequence
  Description of Artificial Sequence: Synthetic oligonucleotide
  Antisense strand to SEQ ID NO: 1112964
uacaucauguaagucaccu

SEQ ID NO: 1112966 - RNA, 19 nt, Artificial Sequence
  Description of Artificial Sequence: Synthetic oligonucleotide
  Sense strand starting at position 3145 of SEQ ID NO: 915876
gccugaauaccacagcuua

SEQ ID NO: 1112967 - RNA, 19 nt, Artificial Sequence
  Description of Artificial Sequence: Synthetic oligonucleotide
  Antisense strand to SEQ ID NO: 1112966
uaagcugugguauucaggc

SEQ ID NO: 1112968 - RNA, 19 nt, Artificial Sequence
  Description of Artificial Sequence: Synthetic oligonucleotide
  Sense strand starting at position 3290 of SEQ ID NO: 915876
aaggauaguuugccaggga

SEQ ID NO: 1112969 - RNA, 19 nt, Artificial Sequence
  Description of Artificial Sequence: Synthetic oligonucleotide
  Antisense strand to SEQ ID NO: 1112968
ucccuggcaaacuauccuu

SEQ ID NO: 1112970 - RNA, 19 nt, Artificial Sequence
  Description of Artificial Sequence: Synthetic oligonucleotide
  Sense strand starting at position 3303 of SEQ ID NO: 915876
cagggaaguccuuguaaau

SEQ ID NO: 1112971 - RNA, 19 nt, Artificial Sequence
  Description of Artificial Sequence: Synthetic oligonucleotide
  Antisense strand to SEQ ID NO: 1112970
auuuacaaggacuucccug

SEQ ID NO: 1112972 - RNA, 19 nt, Artificial Sequence
  Description of Artificial Sequence: Synthetic oligonucleotide
  Sense strand starting at position 3421 of SEQ ID NO: 915876
gcaucagggcuacagagau

SEQ ID NO: 1112973 - RNA, 19 nt, Artificial Sequence
  Description of Artificial Sequence: Synthetic oligonucleotide
  Antisense strand to SEQ ID NO: 1112972
aucucuguagcccugaugc

SEQ ID NO: 1112974 - RNA, 19 nt, Artificial Sequence
  Description of Artificial Sequence: Synthetic oligonucleotide
  Sense strand starting at position 3580 of SEQ ID NO: 915876
ggacuuuagccucaaagcu

SEQ ID NO: 1112975 - RNA, 19 nt, Artificial Sequence
  Description of Artificial Sequence: Synthetic oligonucleotide
  Antisense strand to SEQ ID NO: 1112974
agcuuugaggcuaaagucc

SEQ ID NO: 1112976 - RNA, 19 nt, Artificial Sequence
  Description of Artificial Sequence: Synthetic oligonucleotide
  Sense strand starting at position 3598 of SEQ ID NO: 915876
ucugaauuagccuaguuag

SEQ ID NO: 1112977 - RNA, 19 nt, Artificial Sequence
  Description of Artificial Sequence: Synthetic oligonucleotide
  Antisense strand to SEQ ID NO: 1112976
cuaacuaggcuaauucaga

SEQ ID NO: 1112978 - RNA, 19 nt, Artificial Sequence
  Description of Artificial Sequence: Synthetic oligonucleotide
  Sense strand starting at position 3601 of SEQ ID NO: 915876
gaauuagccuaguuagaug

SEQ ID NO: 1112979 - RNA, 19 nt, Artificial Sequence
  Description of Artificial Sequence: Synthetic oligonucleotide
  Antisense strand to SEQ ID NO: 1112978
caucuaacuaggcuaauuc

SEQ ID NO: 1112980 - RNA, 19 nt, Artificial Sequence
  Description of Artificial Sequence: Synthetic oligonucleotide
  Sense strand starting at position 3681 of SEQ ID NO: 915876
aauauaugagaagguucuu

SEQ ID NO: 1112981 - RNA, 19 nt, Artificial Sequence
  Description of Artificial Sequence: Synthetic oligonucleotide
  Antisense strand to SEQ ID NO: 1112980
aagaaccuucucauauauu

SEQ ID NO: 1112982 - RNA, 19 nt, Artificial Sequence
  Description of Artificial Sequence: Synthetic oligonucleotide
  Sense strand starting at position 3686 of SEQ ID NO: 915876
augagaagguucuuuaacu

SEQ ID NO: 1112983 - RNA, 19 nt, Artificial Sequence
  Description of Artificial Sequence: Synthetic oligonucleotide
  Antisense strand to SEQ ID NO: 1112982
aguuaaagaaccuucucau

SEQ ID NO: 1112984 - RNA, 19 nt, Artificial Sequence
  Description of Artificial Sequence: Synthetic oligonucleotide
  Sense strand starting at position 3687 of SEQ ID NO: 915876
ugagaagguucuuuaacug

SEQ ID NO: 1112985 - RNA, 19 nt, Artificial Sequence
  Description of Artificial Sequence: Synthetic oligonucleotide
  Antisense strand to SEQ ID NO: 1112984
caguuaaagaaccuucuca

SEQ ID NO: 1112986 - RNA, 19 nt, Artificial Sequence
  Description of Artificial Sequence: Synthetic oligonucleotide
  Sense strand starting at position 26 of SEQ ID NO: 915877
guaauuagucucuaguaca

SEQ ID NO: 1112987 - RNA, 19 nt, Artificial Sequence
  Description of Artificial Sequence: Synthetic oligonucleotide
  Antisense strand to SEQ ID NO: 1112986
uguacuagagacuaauuac

SEQ ID NO: 1112988 - RNA, 19 nt, Artificial Sequence
  Description of Artificial Sequence: Synthetic oligonucleotide
  Sense strand starting at position 82 of SEQ ID NO: 915877
auugaugcacuauaguaau

SEQ ID NO: 1112989 - RNA, 19 nt, Artificial Sequence
  Description of Artificial Sequence: Synthetic oligonucleotide
  Antisense strand to SEQ ID NO: 1112988
auuacuauagugcaucaau

SEQ ID NO: 1112990 - RNA, 19 nt, Artificial Sequence
  Description of Artificial Sequence: Synthetic oligonucleotide
  Sense strand starting at position 193 of SEQ ID NO: 915877
ugaacuggacccuguaauu

SEQ ID NO: 1112991 - RNA, 19 nt, Artificial Sequence
  Description of Artificial Sequence: Synthetic oligonucleotide
  Antisense strand to SEQ ID NO: 1112990
aauuacaggguccaguuca

SEQ ID NO: 1112992 - RNA, 19 nt, Artificial Sequence
  Description of Artificial Sequence: Synthetic oligonucleotide
  Sense strand starting at position 199 of SEQ ID NO: 915877
ggacccuguaauugguaga

SEQ ID NO: 1112993 - RNA, 19 nt, Artificial Sequence
  Description of Artificial Sequence: Synthetic oligonucleotide
  Antisense strand to SEQ ID NO: 1112992
ucuaccaauuacagggucc

SEQ ID NO: 1112994 - RNA, 19 nt, Artificial Sequence
  Description of Artificial Sequence: Synthetic oligonucleotide
  Sense strand starting at position 322 of SEQ ID NO: 915877
aggaaaguuacaugcgaga

SEQ ID NO: 1112995 - RNA, 19 nt, Artificial Sequence
  Description of Artificial Sequence: Synthetic oligonucleotide
  Antisense strand to SEQ ID NO: 1112994
ucucgcauguaacuuuccu

SEQ ID NO: 1112996 - RNA, 19 nt, Artificial Sequence
  Description of Artificial Sequence: Synthetic oligonucleotide
  Sense strand starting at position 324 of SEQ ID NO: 915877
gaaaguuacaugcgagaga

SEQ ID NO: 1112997 - RNA, 19 nt, Artificial Sequence
  Description of Artificial Sequence: Synthetic oligonucleotide
  Antisense strand to SEQ ID NO: 1112996
ucucucgcauguaacuuuc

SEQ ID NO: 1112998 - RNA, 19 nt, Artificial Sequence
  Description of Artificial Sequence: Synthetic oligonucleotide
  Sense strand starting at position 327 of SEQ ID NO: 915877
aguuacaugcgagagaaau

SEQ ID NO: 1112999 - RNA, 19 nt, Artificial Sequence
  Description of Artificial Sequence: Synthetic oligonucleotide
  Antisense strand to SEQ ID NO: 1112998
auuucucucgcauguaacu

SEQ ID NO: 1113000 - RNA, 19 nt, Artificial Sequence
  Description of Artificial Sequence: Synthetic oligonucleotide
  Sense strand starting at position 355 of SEQ ID NO: 915877
acccuaagauugucaugga

SEQ ID NO: 1113001 - RNA, 19 nt, Artificial Sequence
  Description of Artificial Sequence: Synthetic oligonucleotide
  Antisense strand to SEQ ID NO: 1113000
uccaugacaaucuuagggu

SEQ ID NO: 1113002 - RNA, 19 nt, Artificial Sequence
  Description of Artificial Sequence: Synthetic oligonucleotide
  Sense strand starting at position 379 of SEQ ID NO: 915877
agggaacaguguuugggaa

SEQ ID NO: 1113003 - RNA, 19 nt, Artificial Sequence
  Description of Artificial Sequence: Synthetic oligonucleotide
  Antisense strand to SEQ ID NO: 1113002
uucccaaacacuguucccu

SEQ ID NO: 1113004 - RNA, 19 nt, Artificial Sequence
  Description of Artificial Sequence: Synthetic oligonucleotide
  Sense strand starting at position 380 of SEQ ID NO: 915877
gggaacaguguuugggaaa

SEQ ID NO: 1113005 - RNA, 19 nt, Artificial Sequence
  Description of Artificial Sequence: Synthetic oligonucleotide
  Antisense strand to SEQ ID NO: 1113004
uuucccaaacacuguuccc

SEQ ID NO: 1113006 - RNA, 19 nt, Artificial Sequence
  Description of Artificial Sequence: Synthetic oligonucleotide
  Sense strand starting at position 532 of SEQ ID NO: 915877
uugguuacucucgacagaa

SEQ ID NO: 1113007 - RNA, 19 nt, Artificial Sequence
  Description of Artificial Sequence: Synthetic oligonucleotide
  Antisense strand to SEQ ID NO: 1113006
uucugucgagaguaaccaa

SEQ ID NO: 1113008 - RNA, 19 nt, Artificial Sequence
  Description of Artificial Sequence: Synthetic oligonucleotide
  Sense strand starting at position 534 of SEQ ID NO: 915877
gguuacucucgacagaaca

SEQ ID NO: 1113009 - RNA, 19 nt, Artificial Sequence
  Description of Artificial Sequence: Synthetic oligonucleotide
  Antisense strand to SEQ ID NO: 1113008
uguucugucgagaguaacc

SEQ ID NO: 1113010 - RNA, 19 nt, Artificial Sequence
  Description of Artificial Sequence: Synthetic oligonucleotide
  Sense strand starting at position 579 of SEQ ID NO: 915877
ucagaaguuuggcuuggaa

SEQ ID NO: 1113011 - RNA, 19 nt, Artificial Sequence
  Description of Artificial Sequence: Synthetic oligonucleotide
  Antisense strand to SEQ ID NO: 1113010
uuccaagccaaacuucuga

SEQ ID NO: 1113012 - RNA, 19 nt, Artificial Sequence
  Description of Artificial Sequence: Synthetic oligonucleotide
  Sense strand starting at position 636 of SEQ ID NO: 915877
aguguuaaaugaucagaau

SEQ ID NO: 1113013 - RNA, 19 nt, Artificial Sequence
  Description of Artificial Sequence: Synthetic oligonucleotide
  Antisense strand to SEQ ID NO: 1113012
auucugaucauuuaacacu

SEQ ID NO: 1113014 - RNA, 19 nt, Artificial Sequence
  Description of Artificial Sequence: Synthetic oligonucleotide
  Sense strand starting at position 767 of SEQ ID NO: 915877
aaaggugaccauggcuaaa

SEQ ID NO: 1113015 - RNA, 19 nt, Artificial Sequence
  Description of Artificial Sequence: Synthetic oligonucleotide
  Antisense strand to SEQ ID NO: 1113014
uuuagccauggucaccuuu

SEQ ID NO: 1113016 - RNA, 19 nt, Artificial Sequence
  Description of Artificial Sequence: Synthetic oligonucleotide
  Sense strand starting at position 779 of SEQ ID NO: 915877
ggcuaaaggacauggguaa

SEQ ID NO: 1113017 - RNA, 19 nt, Artificial Sequence
  Description of Artificial Sequence: Synthetic oligonucleotide
  Antisense strand to SEQ ID NO: 1113016
uuacccauguccuuuagcc

SEQ ID NO: 1113018 - RNA, 19 nt, Artificial Sequence
  Description of Artificial Sequence: Synthetic oligonucleotide
  Sense strand starting at position 871 of SEQ ID NO: 915877
agcaauacauuugaagaga

SEQ ID NO: 1113019 - RNA, 19 nt, Artificial Sequence
  Description of Artificial Sequence: Synthetic oligonucleotide
  Antisense strand to SEQ ID NO: 1113018
ucucuucaaauguauugcu

SEQ ID NO: 1113020 - RNA, 19 nt, Artificial Sequence
  Description of Artificial Sequence: Synthetic oligonucleotide
  Sense strand starting at position 933 of SEQ ID NO: 915877
guuucuugauggguuagga

SEQ ID NO: 1113021 - RNA, 19 nt, Artificial Sequence
  Description of Artificial Sequence: Synthetic oligonucleotide
  Antisense strand to SEQ ID NO: 1113020
uccuaacccaucaagaaac

SEQ ID NO: 1113022 - RNA, 19 nt, Artificial Sequence
  Description of Artificial Sequence: Synthetic oligonucleotide
  Sense strand starting at position 983 of SEQ ID NO: 915877
gugugacaugaguagagau

SEQ ID NO: 1113023 - RNA, 19 nt, Artificial Sequence
  Description of Artificial Sequence: Synthetic oligonucleotide
  Antisense strand to SEQ ID NO: 1113022
aucucuacucaugucacac

SEQ ID NO: 1113024 - RNA, 19 nt, Artificial Sequence
  Description of Artificial Sequence: Synthetic oligonucleotide
  Sense strand starting at position 1027 of SEQ ID NO: 915877
guggucauccacuaggaca

SEQ ID NO: 1113025 - RNA, 19 nt, Artificial Sequence
  Description of Artificial Sequence: Synthetic oligonucleotide
  Antisense strand to SEQ ID NO: 1113024
uguccuaguggaugaccac

SEQ ID NO: 1113026 - RNA, 19 nt, Artificial Sequence
  Description of Artificial Sequence: Synthetic oligonucleotide
  Sense strand starting at position 1029 of SEQ ID NO: 915877
ggucauccacuaggacauu

SEQ ID NO: 1113027 - RNA, 19 nt, Artificial Sequence
  Description of Artificial Sequence: Synthetic oligonucleotide
  Antisense strand to SEQ ID NO: 1113026
aauguccuaguggaugacc

SEQ ID NO: 1113028 - RNA, 19 nt, Artificial Sequence
  Description of Artificial Sequence: Synthetic oligonucleotide
  Sense strand starting at position 1121 of SEQ ID NO: 915877
uaaagucacuuugcaggaa

SEQ ID NO: 1113029 - RNA, 19 nt, Artificial Sequence
  Description of Artificial Sequence: Synthetic oligonucleotide
  Antisense strand to SEQ ID NO: 1113028
uuccugcaaagugacuuua

SEQ ID NO: 1113030 - RNA, 19 nt, Artificial Sequence
  Description of Artificial Sequence: Synthetic oligonucleotide
  Sense strand starting at position 1125 of SEQ ID NO: 915877
gucacuuugcaggaacauu

SEQ ID NO: 1113031 - RNA, 19 nt, Artificial Sequence
  Description of Artificial Sequence: Synthetic oligonucleotide
  Antisense strand to SEQ ID NO: 1113030
aauguuccugcaaagugac

SEQ ID NO: 1113032 - RNA, 19 nt, Artificial Sequence
  Description of Artificial Sequence: Synthetic oligonucleotide
  Sense strand starting at position 1488 of SEQ ID NO: 915877
ugaccaaaucucuauguug

SEQ ID NO: 1113033 - RNA, 19 nt, Artificial Sequence
  Description of Artificial Sequence: Synthetic oligonucleotide
  Antisense strand to SEQ ID NO: 1113032
caacauagagauuugguca

SEQ ID NO: 1113034 - RNA, 19 nt, Artificial Sequence
  Description of Artificial Sequence: Synthetic oligonucleotide
  Sense strand starting at position 1519 of SEQ ID NO: 915877
augagcuuuccugaacuga

SEQ ID NO: 1113035 - RNA, 19 nt, Artificial Sequence
  Description of Artificial Sequence: Synthetic oligonucleotide
  Antisense strand to SEQ ID NO: 1113034
ucaguucaggaaagcucau

SEQ ID NO: 1113036 - RNA, 19 nt, Artificial Sequence
  Description of Artificial Sequence: Synthetic oligonucleotide
  Sense strand starting at position 1527 of SEQ ID NO: 915877
uccugaacugagcaagagu

SEQ ID NO: 1113037 - RNA, 19 nt, Artificial Sequence
  Description of Artificial Sequence: Synthetic oligonucleotide
  Antisense strand to SEQ ID NO: 1113036
acucuugcucaguucagga

SEQ ID NO: 1113038 - RNA, 19 nt, Artificial Sequence
  Description of Artificial Sequence: Synthetic oligonucleotide
  Sense strand starting at position 2017 of SEQ ID NO: 915877
gcaccauuagacugaagaa

SEQ ID NO: 1113039 - RNA, 19 nt, Artificial Sequence
  Description of Artificial Sequence: Synthetic oligonucleotide
  Antisense strand to SEQ ID NO: 1113038
uucuucagucuaauggugc

SEQ ID NO: 1113040 - RNA, 19 nt, Artificial Sequence
  Description of Artificial Sequence: Synthetic oligonucleotide
  Sense strand starting at position 2057 of SEQ ID NO: 915877
ggcuguuacgcucucauau

SEQ ID NO: 1113041 - RNA, 19 nt, Artificial Sequence
  Description of Artificial Sequence: Synthetic oligonucleotide
  Antisense strand to SEQ ID NO: 1113040
auaugagagcguaacagcc

SEQ ID NO: 1113042 - RNA, 19 nt, Artificial Sequence
  Description of Artificial Sequence: Synthetic oligonucleotide
  Sense strand starting at position 2058 of SEQ ID NO: 915877
gcuguuacgcucucauaug

SEQ ID NO: 1113043 - RNA, 19 nt, Artificial Sequence
  Description of Artificial Sequence: Synthetic oligonucleotide
  Antisense strand to SEQ ID NO: 1113042
cauaugagagcguaacagc

SEQ ID NO: 1113044 - RNA, 19 nt, Artificial Sequence
  Description of Artificial Sequence: Synthetic oligonucleotide
  Sense strand starting at position 2134 of SEQ ID NO: 915877
aguagacauccuuaguuac

SEQ ID NO: 1113045 - RNA, 19 nt, Artificial Sequence
  Description of Artificial Sequence: Synthetic oligonucleotide
  Antisense strand to SEQ ID NO: 1113044
guaacuaaggaugucuacu

SEQ ID NO: 1113046 - RNA, 19 nt, Artificial Sequence
  Description of Artificial Sequence: Synthetic oligonucleotide
  Sense strand starting at position 2679 of SEQ ID NO: 915877
gcauaucaacuguauaaag

SEQ ID NO: 1113047 - RNA, 19 nt, Artificial Sequence
  Description of Artificial Sequence: Synthetic oligonucleotide
  Antisense strand to SEQ ID NO: 1113046
cuuuauacaguugauaugc

SEQ ID NO: 1113048 - RNA, 19 nt, Artificial Sequence
  Description of Artificial Sequence: Synthetic oligonucleotide
  Sense strand starting at position 2763 of SEQ ID NO: 915877
accaauucguuacucagaa

SEQ ID NO: 1113049 - RNA, 19 nt, Artificial Sequence
  Description of Artificial Sequence: Synthetic oligonucleotide
  Antisense strand to SEQ ID NO: 1113048
uucugaguaacgaauuggu

SEQ ID NO: 1113050 - RNA, 19 nt, Artificial Sequence
  Description of Artificial Sequence: Synthetic oligonucleotide
  Sense strand starting at position 2764 of SEQ ID NO: 915877
ccaauucguuacucagaag

SEQ ID NO: 1113051 - RNA, 19 nt, Artificial Sequence
  Description of Artificial Sequence: Synthetic oligonucleotide
  Antisense strand to SEQ ID NO: 1113050
cuucugaguaacgaauugg

SEQ ID NO: 1113052 - RNA, 19 nt, Artificial Sequence
  Description of Artificial Sequence: Synthetic oligonucleotide
  Sense strand starting at position 2770 of SEQ ID NO: 915877
cguuacucagaagauuaau

SEQ ID NO: 1113053 - RNA, 19 nt, Artificial Sequence
  Description of Artificial Sequence: Synthetic oligonucleotide
  Antisense strand to SEQ ID NO: 1113052
auuaaucuucugaguaacg

SEQ ID NO: 1113054 - RNA, 19 nt, Artificial Sequence
  Description of Artificial Sequence: Synthetic oligonucleotide
  Sense strand starting at position 2864 of SEQ ID NO: 915877
acagaagaauucuugcuaa

SEQ ID NO: 1113055 - RNA, 19 nt, Artificial Sequence
  Description of Artificial Sequence: Synthetic oligonucleotide
  Antisense strand to SEQ ID NO: 1113054
uuagcaagaauucuucugu

SEQ ID NO: 1113056 - RNA, 19 nt, Artificial Sequence
  Description of Artificial Sequence: Synthetic oligonucleotide
  Sense strand starting at position 3067 of SEQ ID NO: 915877
ucuaucauugacggacaga

SEQ ID NO: 1113057 - RNA, 19 nt, Artificial Sequence
  Description of Artificial Sequence: Synthetic oligonucleotide
  Antisense strand to SEQ ID NO: 1113056
ucuguccgucaaugauaga

SEQ ID NO: 1113058 - RNA, 19 nt, Artificial Sequence
  Description of Artificial Sequence: Synthetic oligonucleotide
  Sense strand starting at position 3548 of SEQ ID NO: 915877
cugagugagaacuguacuu

SEQ ID NO: 1113059 - RNA, 19 nt, Artificial Sequence
  Description of Artificial Sequence: Synthetic oligonucleotide
  Antisense strand to SEQ ID NO: 1113058
aaguacaguucucacucag

SEQ ID NO: 1113060 - RNA, 19 nt, Artificial Sequence
  Description of Artificial Sequence: Synthetic oligonucleotide
  Sense strand starting at position 3640 of SEQ ID NO: 915877
guaugucuuaaguauugga

SEQ ID NO: 1113061 - RNA, 19 nt, Artificial Sequence
  Description of Artificial Sequence: Synthetic oligonucleotide
  Antisense strand to SEQ ID NO: 1113060
uccaauacuuaagacauac

SEQ ID NO: 1113062 - RNA, 19 nt, Artificial Sequence
  Description of Artificial Sequence: Synthetic oligonucleotide
  Sense strand starting at position 3693 of SEQ ID NO: 915877
cuuuacuggccagguauuu

SEQ ID NO: 1113063 - RNA, 19 nt, Artificial Sequence
  Description of Artificial Sequence: Synthetic oligonucleotide
  Antisense strand to SEQ ID NO: 1113062
aaauaccuggccaguaaag

SEQ ID NO: 1113064 - RNA, 19 nt, Artificial Sequence
  Description of Artificial Sequence: Synthetic oligonucleotide
  Sense strand starting at position 3942 of SEQ ID NO: 915877
ggucaugucaaagguaaga

SEQ ID NO: 1113065 - RNA, 19 nt, Artificial Sequence
  Description of Artificial Sequence: Synthetic oligonucleotide
  Antisense strand to SEQ ID NO: 1113064
ucuuaccuuugacaugacc

SEQ ID NO: 1113066 - RNA, 19 nt, Artificial Sequence
  Description of Artificial Sequence: Synthetic oligonucleotide
  Sense strand starting at position 155 of SEQ ID NO: 915878
ggaaacagacugugucaau

SEQ ID NO: 1113067 - RNA, 19 nt, Artificial Sequence
  Description of Artificial Sequence: Synthetic oligonucleotide
  Antisense strand to SEQ ID NO: 1113066
auugacacagucuguuucc

SEQ ID NO: 1113068 - RNA, 19 nt, Artificial Sequence
  Description of Artificial Sequence: Synthetic oligonucleotide
  Sense strand starting at position 156 of SEQ ID NO: 915878
gaaacagacugugucaauu

SEQ ID NO: 1113069 - RNA, 19 nt, Artificial Sequence
  Description of Artificial Sequence: Synthetic oligonucleotide
  Antisense strand to SEQ ID NO: 1113068
aauugacacagucuguuuc

SEQ ID NO: 1113070 - RNA, 19 nt, Artificial Sequence
  Description of Artificial Sequence: Synthetic oligonucleotide
  Sense strand starting at position 260 of SEQ ID NO: 915878
gagugacccagugguaaga

SEQ ID NO: 1113071 - RNA, 19 nt, Artificial Sequence
  Description of Artificial Sequence: Synthetic oligonucleotide
  Antisense strand to SEQ ID NO: 1113070
ucuuaccacugggucacuc

SEQ ID NO: 1113072 - RNA, 19 nt, Artificial Sequence
  Description of Artificial Sequence: Synthetic oligonucleotide
  Sense strand starting at position 271 of SEQ ID NO: 915878
ugguaagagcauuaaucuu

SEQ ID NO: 1113073 - RNA, 19 nt, Artificial Sequence
  Description of Artificial Sequence: Synthetic oligonucleotide
  Antisense strand to SEQ ID NO: 1113072
aagauuaaugcucuuacca

SEQ ID NO: 1113074 - RNA, 19 nt, Artificial Sequence
  Description of Artificial Sequence: Synthetic oligonucleotide
  Sense strand starting at position 315 of SEQ ID NO: 915878
uggguuugaaagugugaga

SEQ ID NO: 1113075 - RNA, 19 nt, Artificial Sequence
  Description of Artificial Sequence: Synthetic oligonucleotide
  Antisense strand to SEQ ID NO: 1113074
ucucacacuuucaaaccca

SEQ ID NO: 1113076 - RNA, 19 nt, Artificial Sequence
  Description of Artificial Sequence: Synthetic oligonucleotide
  Sense strand starting at position 452 of SEQ ID NO: 915878
aaacuaaaucauggagugu

SEQ ID NO: 1113077 - RNA, 19 nt, Artificial Sequence
  Description of Artificial Sequence: Synthetic oligonucleotide
  Antisense strand to SEQ ID NO: 1113076
acacuccaugauuuaguuu

SEQ ID NO: 1113078 - RNA, 19 nt, Artificial Sequence
  Description of Artificial Sequence: Synthetic oligonucleotide
  Sense strand starting at position 456 of SEQ ID NO: 915878
uaaaucauggaguguaauc

SEQ ID NO: 1113079 - RNA, 19 nt, Artificial Sequence
  Description of Artificial Sequence: Synthetic oligonucleotide
  Antisense strand to SEQ ID NO: 1113078
gauuacacuccaugauuua

SEQ ID NO: 1113080 - RNA, 19 nt, Artificial Sequence
  Description of Artificial Sequence: Synthetic oligonucleotide
  Sense strand starting at position 466 of SEQ ID NO: 915878
aguguaaucuccucuauuc

SEQ ID NO: 1113081 - RNA, 19 nt, Artificial Sequence
  Description of Artificial Sequence: Synthetic oligonucleotide
  Antisense strand to SEQ ID NO: 1113080
gaauagaggagauuacacu

SEQ ID NO: 1113082 - RNA, 19 nt, Artificial Sequence
  Description of Artificial Sequence: Synthetic oligonucleotide
  Sense strand starting at position 468 of SEQ ID NO: 915878
uguaaucuccucuauucga

SEQ ID NO: 1113083 - RNA, 19 nt, Artificial Sequence
  Description of Artificial Sequence: Synthetic oligonucleotide
  Antisense strand to SEQ ID NO: 1113082
ucgaauagaggagauuaca

SEQ ID NO: 1113084 - RNA, 19 nt, Artificial Sequence
  Description of Artificial Sequence: Synthetic oligonucleotide
  Sense strand starting at position 692 of SEQ ID NO: 915878
aacagacuggcuugguaau

SEQ ID NO: 1113085 - RNA, 19 nt, Artificial Sequence
  Description of Artificial Sequence: Synthetic oligonucleotide
  Antisense strand to SEQ ID NO: 1113084
auuaccaagccagucuguu

SEQ ID NO: 1113086 - RNA, 19 nt, Artificial Sequence
  Description of Artificial Sequence: Synthetic oligonucleotide
  Sense strand starting at position 693 of SEQ ID NO: 915878
acagacuggcuugguaauu

SEQ ID NO: 1113087 - RNA, 19 nt, Artificial Sequence
  Description of Artificial Sequence: Synthetic oligonucleotide
  Antisense strand to SEQ ID NO: 1113086
aauuaccaagccagucugu

SEQ ID NO: 1113088 - RNA, 19 nt, Artificial Sequence
  Description of Artificial Sequence: Synthetic oligonucleotide
  Sense strand starting at position 712 of SEQ ID NO: 915878
uaauuagagucuucuggag

SEQ ID NO: 1113089 - RNA, 19 nt, Artificial Sequence
  Description of Artificial Sequence: Synthetic oligonucleotide
  Antisense strand to SEQ ID NO: 1113088
cuccagaagacucuaauua

SEQ ID NO: 1113090 - RNA, 19 nt, Artificial Sequence
  Description of Artificial Sequence: Synthetic oligonucleotide
  Sense strand starting at position 757 of SEQ ID NO: 915878
caguguucucuuuagggac

SEQ ID NO: 1113091 - RNA, 19 nt, Artificial Sequence
  Description of Artificial Sequence: Synthetic oligonucleotide
  Antisense strand to SEQ ID NO: 1113090
gucccuaaagagaacacug

SEQ ID NO: 1113092 - RNA, 19 nt, Artificial Sequence
  Description of Artificial Sequence: Synthetic oligonucleotide
  Sense strand starting at position 889 of SEQ ID NO: 915878
uugucacuuccaugcauuu

SEQ ID NO: 1113093 - RNA, 19 nt, Artificial Sequence
  Description of Artificial Sequence: Synthetic oligonucleotide
  Antisense strand to SEQ ID NO: 1113092
aaaugcauggaagugacaa

SEQ ID NO: 1113094 - RNA, 19 nt, Artificial Sequence
  Description of Artificial Sequence: Synthetic oligonucleotide
  Sense strand starting at position 1005 of SEQ ID NO: 915878
gggaauuccuccuccgauc

SEQ ID NO: 1113095 - RNA, 19 nt, Artificial Sequence
  Description of Artificial Sequence: Synthetic oligonucleotide
  Antisense strand to SEQ ID NO: 1113094
gaucggaggaggaauuccc

SEQ ID NO: 1113096 - RNA, 19 nt, Artificial Sequence
  Description of Artificial Sequence: Synthetic oligonucleotide
  Sense strand starting at position 1283 of SEQ ID NO: 915878
aguugcuucugaguggaga

SEQ ID NO: 1113097 - RNA, 19 nt, Artificial Sequence
  Description of Artificial Sequence: Synthetic oligonucleotide
  Antisense strand to SEQ ID NO: 1113096
ucuccacucagaagcaacu

SEQ ID NO: 1113098 - RNA, 19 nt, Artificial Sequence
  Description of Artificial Sequence: Synthetic oligonucleotide
  Sense strand starting at position 2067 of SEQ ID NO: 915878
uggguucccugagcauuga

SEQ ID NO: 1113099 - RNA, 19 nt, Artificial Sequence
  Description of Artificial Sequence: Synthetic oligonucleotide
  Antisense strand to SEQ ID NO: 1113098
ucaaugcucagggaaccca

SEQ ID NO: 1113100 - RNA, 19 nt, Artificial Sequence
  Description of Artificial Sequence: Synthetic oligonucleotide
  Sense strand starting at position 2068 of SEQ ID NO: 915878
ggguucccugagcauugau

SEQ ID NO: 1113101 - RNA, 19 nt, Artificial Sequence
  Description of Artificial Sequence: Synthetic oligonucleotide
  Antisense strand to SEQ ID NO: 1113100
aucaaugcucagggaaccc

SEQ ID NO: 1113102 - RNA, 19 nt, Artificial Sequence
  Description of Artificial Sequence: Synthetic oligonucleotide
  Sense strand starting at position 2316 of SEQ ID NO: 915878
uuaagauuacgguggaguc

SEQ ID NO: 1113103 - RNA, 19 nt, Artificial Sequence
  Description of Artificial Sequence: Synthetic oligonucleotide
  Antisense strand to SEQ ID NO: 1113102
gacuccaccguaaucuuaa

SEQ ID NO: 1113104 - RNA, 19 nt, Artificial Sequence
  Description of Artificial Sequence: Synthetic oligonucleotide
  Sense strand starting at position 2419 of SEQ ID NO: 915878
uaaauaaacgugugcacaa

SEQ ID NO: 1113105 - RNA, 19 nt, Artificial Sequence
  Description of Artificial Sequence: Synthetic oligonucleotide
  Antisense strand to SEQ ID NO: 1113104
uugugcacacguuuauuua

SEQ ID NO: 1113106 - RNA, 19 nt, Artificial Sequence
  Description of Artificial Sequence: Synthetic oligonucleotide
  Sense strand starting at position 2513 of SEQ ID NO: 915878
cagggaguggucggaagau

SEQ ID NO: 1113107 - RNA, 19 nt, Artificial Sequence
  Description of Artificial Sequence: Synthetic oligonucleotide
  Antisense strand to SEQ ID NO: 1113106
aucuuccgaccacucccug

SEQ ID NO: 1113108 - RNA, 19 nt, Artificial Sequence
  Description of Artificial Sequence: Synthetic oligonucleotide
  Sense strand starting at position 2523 of SEQ ID NO: 915878
ucggaagauaaucgcugaa

SEQ ID NO: 1113109 - RNA, 19 nt, Artificial Sequence
  Description of Artificial Sequence: Synthetic oligonucleotide
  Antisense strand to SEQ ID NO: 1113108
uucagcgauuaucuuccga

SEQ ID NO: 1113110 - RNA, 19 nt, Artificial Sequence
  Description of Artificial Sequence: Synthetic oligonucleotide
  Sense strand starting at position 2527 of SEQ ID NO: 915878
aagauaaucgcugaagcgu

SEQ ID NO: 1113111 - RNA, 19 nt, Artificial Sequence
  Description of Artificial Sequence: Synthetic oligonucleotide
  Antisense strand to SEQ ID NO: 1113110
acgcuucagcgauuaucuu

SEQ ID NO: 1113112 - RNA, 19 nt, Artificial Sequence
  Description of Artificial Sequence: Synthetic oligonucleotide
  Sense strand starting at position 2564 of SEQ ID NO: 915878
ugaaacuaguccucugugu

SEQ ID NO: 1113113 - RNA, 19 nt, Artificial Sequence
  Description of Artificial Sequence: Synthetic oligonucleotide
  Antisense strand to SEQ ID NO: 1113112
acacagaggacuaguuuca

SEQ ID NO: 1113114 - RNA, 19 nt, Artificial Sequence
  Description of Artificial Sequence: Synthetic oligonucleotide
  Sense strand starting at position 2568 of SEQ ID NO: 915878
acuaguccucugugucaaa

SEQ ID NO: 1113115 - RNA, 19 nt, Artificial Sequence
  Description of Artificial Sequence: Synthetic oligonucleotide
  Antisense strand to SEQ ID NO: 1113114
uuugacacagaggacuagu

SEQ ID NO: 1113116 - RNA, 19 nt, Artificial Sequence
  Description of Artificial Sequence: Synthetic oligonucleotide
  Sense strand starting at position 2599 of SEQ ID NO: 915878
gccgaagaccacuagaguu

SEQ ID NO: 1113117 - RNA, 19 nt, Artificial Sequence
  Description of Artificial Sequence: Synthetic oligonucleotide
  Antisense strand to SEQ ID NO: 1113116
aacucuaguggucuucggc

SEQ ID NO: 1113118 - RNA, 19 nt, Artificial Sequence
  Description of Artificial Sequence: Synthetic oligonucleotide
  Sense strand starting at position 2629 of SEQ ID NO: 915878
cuucuaaagcaauguggaa

SEQ ID NO: 1113119 - RNA, 19 nt, Artificial Sequence
  Description of Artificial Sequence: Synthetic oligonucleotide
  Antisense strand to SEQ ID NO: 1113118
uuccacauugcuuuagaag

SEQ ID NO: 1113120 - RNA, 19 nt, Artificial Sequence
  Description of Artificial Sequence: Synthetic oligonucleotide
  Sense strand starting at position 2770 of SEQ ID NO: 915878
uuuaaagacccuuggaguu

SEQ ID NO: 1113121 - RNA, 19 nt, Artificial Sequence
  Description of Artificial Sequence: Synthetic oligonucleotide
  Antisense strand to SEQ ID NO: 1113120
aacuccaagggucuuuaaa

SEQ ID NO: 1113122 - RNA, 19 nt, Artificial Sequence
  Description of Artificial Sequence: Synthetic oligonucleotide
  Sense strand starting at position 2776 of SEQ ID NO: 915878
gacccuuggaguuguuuga

SEQ ID NO: 1113123 - RNA, 19 nt, Artificial Sequence
  Description of Artificial Sequence: Synthetic oligonucleotide
  Antisense strand to SEQ ID NO: 1113122
ucaaacaacuccaaggguc

SEQ ID NO: 1113124 - RNA, 19 nt, Artificial Sequence
  Description of Artificial Sequence: Synthetic oligonucleotide
  Sense strand starting at position 2887 of SEQ ID NO: 915878
gaagguauauuugaaaucu

SEQ ID NO: 1113125 - RNA, 19 nt, Artificial Sequence
  Description of Artificial Sequence: Synthetic oligonucleotide
  Antisense strand to SEQ ID NO: 1113124
agauuucaaauauaccuuc

SEQ ID NO: 1113126 - RNA, 19 nt, Artificial Sequence
  Description of Artificial Sequence: Synthetic oligonucleotide
  Sense strand starting at position 2897 of SEQ ID NO: 915878
uugaaaucuugguuauaug

SEQ ID NO: 1113127 - RNA, 19 nt, Artificial Sequence
  Description of Artificial Sequence: Synthetic oligonucleotide
  Antisense strand to SEQ ID NO: 1113126
cauauaaccaagauuucaa

SEQ ID NO: 1113128 - RNA, 19 nt, Artificial Sequence
  Description of Artificial Sequence: Synthetic oligonucleotide
  Sense strand starting at position 2898 of SEQ ID NO: 915878
ugaaaucuugguuauaugu

SEQ ID NO: 1113129 - RNA, 19 nt, Artificial Sequence
  Description of Artificial Sequence: Synthetic oligonucleotide
  Antisense strand to SEQ ID NO: 1113128
acauauaaccaagauuuca

SEQ ID NO: 1113130 - RNA, 19 nt, Artificial Sequence
  Description of Artificial Sequence: Synthetic oligonucleotide
  Sense strand starting at position 2914 of SEQ ID NO: 915878
uguguuauugucuacucau

SEQ ID NO: 1113131 - RNA, 19 nt, Artificial Sequence
  Description of Artificial Sequence: Synthetic oligonucleotide
  Antisense strand to SEQ ID NO: 1113130
augaguagacaauaacaca

SEQ ID NO: 1113132 - RNA, 19 nt, Artificial Sequence
  Description of Artificial Sequence: Synthetic oligonucleotide
  Sense strand starting at position 2917 of SEQ ID NO: 915878
guuauugucuacucauuga

SEQ ID NO: 1113133 - RNA, 19 nt, Artificial Sequence
  Description of Artificial Sequence: Synthetic oligonucleotide
  Antisense strand to SEQ ID NO: 1113132
ucaaugaguagacaauaac

SEQ ID NO: 1113134 - RNA, 19 nt, Artificial Sequence
  Description of Artificial Sequence: Synthetic oligonucleotide
  Sense strand starting at position 2955 of SEQ ID NO: 915878
acugaagugcuaggguuau

SEQ ID NO: 1113135 - RNA, 19 nt, Artificial Sequence
  Description of Artificial Sequence: Synthetic oligonucleotide
  Antisense strand to SEQ ID NO: 1113134
auaacccuagcacuucagu

SEQ ID NO: 1113136 - RNA, 19 nt, Artificial Sequence
  Description of Artificial Sequence: Synthetic oligonucleotide
  Sense strand starting at position 2959 of SEQ ID NO: 915878
aagugcuaggguuaucaca

SEQ ID NO: 1113137 - RNA, 19 nt, Artificial Sequence
  Description of Artificial Sequence: Synthetic oligonucleotide
  Antisense strand to SEQ ID NO: 1113136
ugugauaacccuagcacuu

SEQ ID NO: 1113138 - RNA, 19 nt, Artificial Sequence
  Description of Artificial Sequence: Synthetic oligonucleotide
  Sense strand starting at position 2961 of SEQ ID NO: 915878
gugcuaggguuaucacaau

SEQ ID NO: 1113139 - RNA, 19 nt, Artificial Sequence
  Description of Artificial Sequence: Synthetic oligonucleotide
  Antisense strand to SEQ ID NO: 1113138
auugugauaacccuagcac

SEQ ID NO: 1113140 - RNA, 19 nt, Artificial Sequence
  Description of Artificial Sequence: Synthetic oligonucleotide
  Sense strand starting at position 3051 of SEQ ID NO: 915878
gugggaguucaguaacuag

SEQ ID NO: 1113141 - RNA, 19 nt, Artificial Sequence
  Description of Artificial Sequence: Synthetic oligonucleotide
  Antisense strand to SEQ ID NO: 1113140
cuaguuacugaacucccac

SEQ ID NO: 1113142 - RNA, 19 nt, Artificial Sequence
  Description of Artificial Sequence: Synthetic oligonucleotide
  Sense strand starting at position 3429 of SEQ ID NO: 915878
gaagaaagaugagaagaga

SEQ ID NO: 1113143 - RNA, 19 nt, Artificial Sequence
  Description of Artificial Sequence: Synthetic oligonucleotide
  Antisense strand to SEQ ID NO: 1113142
ucucuucucaucuuucuuc

SEQ ID NO: 1113144 - RNA, 19 nt, Artificial Sequence
  Description of Artificial Sequence: Synthetic oligonucleotide
  Sense strand starting at position 3440 of SEQ ID NO: 915878
agaagagauuguuuccuuu

SEQ ID NO: 1113145 - RNA, 19 nt, Artificial Sequence
  Description of Artificial Sequence: Synthetic oligonucleotide
  Antisense strand to SEQ ID NO: 1113144
aaaggaaacaaucucuucu

SEQ ID NO: 1113146 - RNA, 19 nt, Artificial Sequence
  Description of Artificial Sequence: Synthetic oligonucleotide
  Sense strand starting at position 297 of SEQ ID NO: 915879
auguaaacuuugucagggu

SEQ ID NO: 1113147 - RNA, 19 nt, Artificial Sequence
  Description of Artificial Sequence: Synthetic oligonucleotide
  Antisense strand to SEQ ID NO: 1113146
acccugacaaaguuuacau

SEQ ID NO: 1113148 - RNA, 19 nt, Artificial Sequence
  Description of Artificial Sequence: Synthetic oligonucleotide
  Sense strand starting at position 301 of SEQ ID NO: 915879
aaacuuugucaggguaaga

SEQ ID NO: 1113149 - RNA, 19 nt, Artificial Sequence
  Description of Artificial Sequence: Synthetic oligonucleotide
  Antisense strand to SEQ ID NO: 1113148
ucuuacccugacaaaguuu

SEQ ID NO: 1113150 - RNA, 19 nt, Artificial Sequence
  Description of Artificial Sequence: Synthetic oligonucleotide
  Sense strand starting at position 437 of SEQ ID NO: 915879
gugcuacccuucuugaaua

SEQ ID NO: 1113151 - RNA, 19 nt, Artificial Sequence
  Description of Artificial Sequence: Synthetic oligonucleotide
  Antisense strand to SEQ ID NO: 1113150
uauucaagaaggguagcac

SEQ ID NO: 1113152 - RNA, 19 nt, Artificial Sequence
  Description of Artificial Sequence: Synthetic oligonucleotide
  Sense strand starting at position 494 of SEQ ID NO: 915879
ggagccauucuugaccuuu

SEQ ID NO: 1113153 - RNA, 19 nt, Artificial Sequence
  Description of Artificial Sequence: Synthetic oligonucleotide
  Antisense strand to SEQ ID NO: 1113152
aaaggucaagaauggcucc

SEQ ID NO: 1113154 - RNA, 19 nt, Artificial Sequence
  Description of Artificial Sequence: Synthetic oligonucleotide
  Sense strand starting at position 535 of SEQ ID NO: 915879
uuugguaagucacuaaauu

SEQ ID NO: 1113155 - RNA, 19 nt, Artificial Sequence
  Description of Artificial Sequence: Synthetic oligonucleotide
  Antisense strand to SEQ ID NO: 1113154
aauuuagugacuuaccaaa

SEQ ID NO: 1113156 - RNA, 19 nt, Artificial Sequence
  Description of Artificial Sequence: Synthetic oligonucleotide
  Sense strand starting at position 536 of SEQ ID NO: 915879
uugguaagucacuaaauua

SEQ ID NO: 1113157 - RNA, 19 nt, Artificial Sequence
  Description of Artificial Sequence: Synthetic oligonucleotide
  Antisense strand to SEQ ID NO: 1113156
uaauuuagugacuuaccaa

SEQ ID NO: 1113158 - RNA, 19 nt, Artificial Sequence
  Description of Artificial Sequence: Synthetic oligonucleotide
  Sense strand starting at position 769 of SEQ ID NO: 915879
auugcauuauuggcuauua

SEQ ID NO: 1113159 - RNA, 19 nt, Artificial Sequence
  Description of Artificial Sequence: Synthetic oligonucleotide
  Antisense strand to SEQ ID NO: 1113158
uaauagccaauaaugcaau

SEQ ID NO: 1113160 - RNA, 19 nt, Artificial Sequence
  Description of Artificial Sequence: Synthetic oligonucleotide
  Sense strand starting at position 770 of SEQ ID NO: 915879
uugcauuauuggcuauuaa

SEQ ID NO: 1113161 - RNA, 19 nt, Artificial Sequence
  Description of Artificial Sequence: Synthetic oligonucleotide
  Antisense strand to SEQ ID NO: 1113160
uuaauagccaauaaugcaa

SEQ ID NO: 1113162 - RNA, 19 nt, Artificial Sequence
  Description of Artificial Sequence: Synthetic oligonucleotide
  Sense strand starting at position 771 of SEQ ID NO: 915879
ugcauuauuggcuauuaaa

SEQ ID NO: 1113163 - RNA, 19 nt, Artificial Sequence
  Description of Artificial Sequence: Synthetic oligonucleotide
  Antisense strand to SEQ ID NO: 1113162
uuuaauagccaauaaugca

SEQ ID NO: 1113164 - RNA, 19 nt, Artificial Sequence
  Description of Artificial Sequence: Synthetic oligonucleotide
  Sense strand starting at position 1292 of SEQ ID NO: 915879
aagauagguguugauccuu

SEQ ID NO: 1113165 - RNA, 19 nt, Artificial Sequence
  Description of Artificial Sequence: Synthetic oligonucleotide
  Antisense strand to SEQ ID NO: 1113164
aaggaucaacaccuaucuu

SEQ ID NO: 1113166 - RNA, 19 nt, Artificial Sequence
  Description of Artificial Sequence: Synthetic oligonucleotide
  Sense strand starting at position 1297 of SEQ ID NO: 915879
agguguugauccuucuuau

SEQ ID NO: 1113167 - RNA, 19 nt, Artificial Sequence
  Description of Artificial Sequence: Synthetic oligonucleotide
  Antisense strand to SEQ ID NO: 1113166
auaagaaggaucaacaccu

SEQ ID NO: 1113168 - RNA, 19 nt, Artificial Sequence
  Description of Artificial Sequence: Synthetic oligonucleotide
  Sense strand starting at position 1300 of SEQ ID NO: 915879
uguugauccuucuuaucac

SEQ ID NO: 1113169 - RNA, 19 nt, Artificial Sequence
  Description of Artificial Sequence: Synthetic oligonucleotide
  Antisense strand to SEQ ID NO: 1113168
gugauaagaaggaucaaca

SEQ ID NO: 1113170 - RNA, 19 nt, Artificial Sequence
  Description of Artificial Sequence: Synthetic oligonucleotide
  Sense strand starting at position 1372 of SEQ ID NO: 915879
agggcaagccauugucuua

SEQ ID NO: 1113171 - RNA, 19 nt, Artificial Sequence
  Description of Artificial Sequence: Synthetic oligonucleotide
  Antisense strand to SEQ ID NO: 1113170
uaagacaauggcuugcccu

SEQ ID NO: 1113172 - RNA, 19 nt, Artificial Sequence
  Description of Artificial Sequence: Synthetic oligonucleotide
  Sense strand starting at position 1487 of SEQ ID NO: 915879
uugucacuccaguacaguu

SEQ ID NO: 1113173 - RNA, 19 nt, Artificial Sequence
  Description of Artificial Sequence: Synthetic oligonucleotide
  Antisense strand to SEQ ID NO: 1113172
aacuguacuggagugacaa

SEQ ID NO: 1113174 - RNA, 19 nt, Artificial Sequence
  Description of Artificial Sequence: Synthetic oligonucleotide
  Sense strand starting at position 1547 of SEQ ID NO: 915879
auaagagagugcuucuauu

SEQ ID NO: 1113175 - RNA, 19 nt, Artificial Sequence
  Description of Artificial Sequence: Synthetic oligonucleotide
  Antisense strand to SEQ ID NO: 1113174
aauagaagcacucucuuau

SEQ ID NO: 1113176 - RNA, 19 nt, Artificial Sequence
  Description of Artificial Sequence: Synthetic oligonucleotide
  Sense strand starting at position 1555 of SEQ ID NO: 915879
gugcuucuauuuccagaac

SEQ ID NO: 1113177 - RNA, 19 nt, Artificial Sequence
  Description of Artificial Sequence: Synthetic oligonucleotide
  Antisense strand to SEQ ID NO: 1113176
guucuggaaauagaagcac

SEQ ID NO: 1113178 - RNA, 19 nt, Artificial Sequence
  Description of Artificial Sequence: Synthetic oligonucleotide
  Sense strand starting at position 2033 of SEQ ID NO: 915879
aaacaugcguccuuuggaa

SEQ ID NO: 1113179 - RNA, 19 nt, Artificial Sequence
  Description of Artificial Sequence: Synthetic oligonucleotide
  Antisense strand to SEQ ID NO: 1113178
uuccaaaggacgcauguuu

SEQ ID NO: 1113180 - RNA, 19 nt, Artificial Sequence
  Description of Artificial Sequence: Synthetic oligonucleotide
  Sense strand starting at position 2035 of SEQ ID NO: 915879
acaugcguccuuuggaaga

SEQ ID NO: 1113181 - RNA, 19 nt, Artificial Sequence
  Description of Artificial Sequence: Synthetic oligonucleotide
  Antisense strand to SEQ ID NO: 1113180
ucuuccaaaggacgcaugu

SEQ ID NO: 1113182 - RNA, 19 nt, Artificial Sequence
  Description of Artificial Sequence: Synthetic oligonucleotide
  Sense strand starting at position 2379 of SEQ ID NO: 915879
agucccuaguuaucucuaa

SEQ ID NO: 1113183 - RNA, 19 nt, Artificial Sequence
  Description of Artificial Sequence: Synthetic oligonucleotide
  Antisense strand to SEQ ID NO: 1113182
uuagagauaacuagggacu

SEQ ID NO: 1113184 - RNA, 19 nt, Artificial Sequence
  Description of Artificial Sequence: Synthetic oligonucleotide
  Sense strand starting at position 2380 of SEQ ID NO: 915879
gucccuaguuaucucuaau

SEQ ID NO: 1113185 - RNA, 19 nt, Artificial Sequence
  Description of Artificial Sequence: Synthetic oligonucleotide
  Antisense strand to SEQ ID NO: 1113184
auuagagauaacuagggac

SEQ ID NO: 1113186 - RNA, 19 nt, Artificial Sequence
  Description of Artificial Sequence: Synthetic oligonucleotide
  Sense strand starting at position 2542 of SEQ ID NO: 915879
uguuccuuucuaugacaga

SEQ ID NO: 1113187 - RNA, 19 nt, Artificial Sequence
  Description of Artificial Sequence: Synthetic oligonucleotide
  Antisense strand to SEQ ID NO: 1113186
ucugucauagaaaggaaca

SEQ ID NO: 1113188 - RNA, 19 nt, Artificial Sequence
  Description of Artificial Sequence: Synthetic oligonucleotide
  Sense strand starting at position 2558 of SEQ ID NO: 915879
agaauaauacuucguugua

SEQ ID NO: 1113189 - RNA, 19 nt, Artificial Sequence
  Description of Artificial Sequence: Synthetic oligonucleotide
  Antisense strand to SEQ ID NO: 1113188
uacaacgaaguauuauucu

SEQ ID NO: 1113190 - RNA, 19 nt, Artificial Sequence
  Description of Artificial Sequence: Synthetic oligonucleotide
  Sense strand starting at position 2559 of SEQ ID NO: 915879
gaauaauacuucguuguac

SEQ ID NO: 1113191 - RNA, 19 nt, Artificial Sequence
  Description of Artificial Sequence: Synthetic oligonucleotide
  Antisense strand to SEQ ID NO: 1113190
guacaacgaaguauuauuc

SEQ ID NO: 1113192 - RNA, 19 nt, Artificial Sequence
  Description of Artificial Sequence: Synthetic oligonucleotide
  Sense strand starting at position 2561 of SEQ ID NO: 915879
auaauacuucguuguacag

SEQ ID NO: 1113193 - RNA, 19 nt, Artificial Sequence
  Description of Artificial Sequence: Synthetic oligonucleotide
  Antisense strand to SEQ ID NO: 1113192
cuguacaacgaaguauuau

SEQ ID NO: 1113194 - RNA, 19 nt, Artificial Sequence
  Description of Artificial Sequence: Synthetic oligonucleotide
  Sense strand starting at position 2565 of SEQ ID NO: 915879
uacuucguuguacagauau

SEQ ID NO: 1113195 - RNA, 19 nt, Artificial Sequence
  Description of Artificial Sequence: Synthetic oligonucleotide
  Antisense strand to SEQ ID NO: 1113194
auaucuguacaacgaagua

SEQ ID NO: 1113196 - RNA, 19 nt, Artificial Sequence
  Description of Artificial Sequence: Synthetic oligonucleotide
  Sense strand starting at position 2576 of SEQ ID NO: 915879
acagauauacuacgcugua

SEQ ID NO: 1113197 - RNA, 19 nt, Artificial Sequence
  Description of Artificial Sequence: Synthetic oligonucleotide
  Antisense strand to SEQ ID NO: 1113196
uacagcguaguauaucugu

SEQ ID NO: 1113198 - RNA, 19 nt, Artificial Sequence
  Description of Artificial Sequence: Synthetic oligonucleotide
  Sense strand starting at position 2577 of SEQ ID NO: 915879
cagauauacuacgcuguau

SEQ ID NO: 1113199 - RNA, 19 nt, Artificial Sequence
  Description of Artificial Sequence: Synthetic oligonucleotide
  Antisense strand to SEQ ID NO: 1113198
auacagcguaguauaucug

SEQ ID NO: 1113200 - RNA, 19 nt, Artificial Sequence
  Description of Artificial Sequence: Synthetic oligonucleotide
  Sense strand starting at position 2579 of SEQ ID NO: 915879
gauauacuacgcuguauuu

SEQ ID NO: 1113201 - RNA, 19 nt, Artificial Sequence
  Description of Artificial Sequence: Synthetic oligonucleotide
  Antisense strand to SEQ ID NO: 1113200
aaauacagcguaguauauc

SEQ ID NO: 1113202 - RNA, 19 nt, Artificial Sequence
  Description of Artificial Sequence: Synthetic oligonucleotide
  Sense strand starting at position 2710 of SEQ ID NO: 915879
uuggguguauaucuaggau

SEQ ID NO: 1113203 - RNA, 19 nt, Artificial Sequence
  Description of Artificial Sequence: Synthetic oligonucleotide
  Antisense strand to SEQ ID NO: 1113202
auccuagauauacacccaa

SEQ ID NO: 1113204 - RNA, 19 nt, Artificial Sequence
  Description of Artificial Sequence: Synthetic oligonucleotide
  Sense strand starting at position 2738 of SEQ ID NO: 915879
uggaucguacgauaauuau

SEQ ID NO: 1113205 - RNA, 19 nt, Artificial Sequence
  Description of Artificial Sequence: Synthetic oligonucleotide
  Antisense strand to SEQ ID NO: 1113204
auaauuaucguacgaucca

SEQ ID NO: 1113206 - RNA, 19 nt, Artificial Sequence
  Description of Artificial Sequence: Synthetic oligonucleotide
  Sense strand starting at position 2874 of SEQ ID NO: 915879
gugugcucuuauuugauua

SEQ ID NO: 1113207 - RNA, 19 nt, Artificial Sequence
  Description of Artificial Sequence: Synthetic oligonucleotide
  Antisense strand to SEQ ID NO: 1113206
uaaucaaauaagagcacac

SEQ ID NO: 1113208 - RNA, 19 nt, Artificial Sequence
  Description of Artificial Sequence: Synthetic oligonucleotide
  Sense strand starting at position 2956 of SEQ ID NO: 915879
ccuaauggugaaugauguu

SEQ ID NO: 1113209 - RNA, 19 nt, Artificial Sequence
  Description of Artificial Sequence: Synthetic oligonucleotide
  Antisense strand to SEQ ID NO: 1113208
aacaucauucaccauuagg

SEQ ID NO: 1113210 - RNA, 19 nt, Artificial Sequence
  Description of Artificial Sequence: Synthetic oligonucleotide
  Sense strand starting at position 2963 of SEQ ID NO: 915879
gugaaugauguugagcauu

SEQ ID NO: 1113211 - RNA, 19 nt, Artificial Sequence
  Description of Artificial Sequence: Synthetic oligonucleotide
  Antisense strand to SEQ ID NO: 1113210
aaugcucaacaucauucac

SEQ ID NO: 1113212 - RNA, 19 nt, Artificial Sequence
  Description of Artificial Sequence: Synthetic oligonucleotide
  Sense strand starting at position 2991 of SEQ ID NO: 915879
gcuauuagauaucuguaca

SEQ ID NO: 1113213 - RNA, 19 nt, Artificial Sequence
  Description of Artificial Sequence: Synthetic oligonucleotide
  Antisense strand to SEQ ID NO: 1113212
uguacagauaucuaauagc

SEQ ID NO: 1113214 - RNA, 19 nt, Artificial Sequence
  Description of Artificial Sequence: Synthetic oligonucleotide
  Sense strand starting at position 3077 of SEQ ID NO: 915879
ugcuguguucaggaguuau

SEQ ID NO: 1113215 - RNA, 19 nt, Artificial Sequence
  Description of Artificial Sequence: Synthetic oligonucleotide
  Antisense strand to SEQ ID NO: 1113214
auaacuccugaacacagca

SEQ ID NO: 1113216 - RNA, 19 nt, Artificial Sequence
  Description of Artificial Sequence: Synthetic oligonucleotide
  Sense strand starting at position 3280 of SEQ ID NO: 915879
cugccaaauccaggucaua

SEQ ID NO: 1113217 - RNA, 19 nt, Artificial Sequence
  Description of Artificial Sequence: Synthetic oligonucleotide
  Antisense strand to SEQ ID NO: 1113216
uaugaccuggauuuggcag

SEQ ID NO: 1113218 - RNA, 19 nt, Artificial Sequence
  Description of Artificial Sequence: Synthetic oligonucleotide
  Sense strand starting at position 3559 of SEQ ID NO: 915879
ugugaugugaggugggauu

SEQ ID NO: 1113219 - RNA, 19 nt, Artificial Sequence
  Description of Artificial Sequence: Synthetic oligonucleotide
  Antisense strand to SEQ ID NO: 1113218
aaucccaccucacaucaca

SEQ ID NO: 1113220 - RNA, 19 nt, Artificial Sequence
  Description of Artificial Sequence: Synthetic oligonucleotide
  Sense strand starting at position 3686 of SEQ ID NO: 915879
gggccauugacaugugggu

SEQ ID NO: 1113221 - RNA, 19 nt, Artificial Sequence
  Description of Artificial Sequence: Synthetic oligonucleotide
  Antisense strand to SEQ ID NO: 1113220
acccacaugucaauggccc

SEQ ID NO: 1113222 - RNA, 19 nt, Artificial Sequence
  Description of Artificial Sequence: Synthetic oligonucleotide
  Sense strand starting at position 3690 of SEQ ID NO: 915879
cauugacauguggguuuau

SEQ ID NO: 1113223 - RNA, 19 nt, Artificial Sequence
  Description of Artificial Sequence: Synthetic oligonucleotide
  Antisense strand to SEQ ID NO: 1113222
auaaacccacaugucaaug

SEQ ID NO: 1113224 - RNA, 19 nt, Artificial Sequence
  Description of Artificial Sequence: Synthetic oligonucleotide
  Sense strand starting at position 3691 of SEQ ID NO: 915879
auugacauguggguuuauu

SEQ ID NO: 1113225 - RNA, 19 nt, Artificial Sequence
  Description of Artificial Sequence: Synthetic oligonucleotide
  Antisense strand to SEQ ID NO: 1113224
aauaaacccacaugucaau

SEQ ID NO: 1113226 - RNA, 19 nt, Artificial Sequence
  Description of Artificial Sequence: Synthetic oligonucleotide
  Sense strand starting at position 542 of SEQ ID NO: 915880
guuugaggguuuguuucuu

SEQ ID NO: 1113227 - RNA, 19 nt, Artificial Sequence
  Description of Artificial Sequence: Synthetic oligonucleotide
  Antisense strand to SEQ ID NO: 1113226
aagaaacaaacccucaaac

SEQ ID NO: 1113228 - RNA, 19 nt, Artificial Sequence
  Description of Artificial Sequence: Synthetic oligonucleotide
  Sense strand starting at position 630 of SEQ ID NO: 915880
cucuuaagcucucaagagu

SEQ ID NO: 1113229 - RNA, 19 nt, Artificial Sequence
  Description of Artificial Sequence: Synthetic oligonucleotide
  Antisense strand to SEQ ID NO: 1113228
acucuugagagcuuaagag

SEQ ID NO: 1113230 - RNA, 19 nt, Artificial Sequence
  Description of Artificial Sequence: Synthetic oligonucleotide
  Sense strand starting at position 655 of SEQ ID NO: 915880
ugaguccucuuuguagaag

SEQ ID NO: 1113231 - RNA, 19 nt, Artificial Sequence
  Description of Artificial Sequence: Synthetic oligonucleotide
  Antisense strand to SEQ ID NO: 1113230
cuucuacaaagaggacuca

SEQ ID NO: 1113232 - RNA, 19 nt, Artificial Sequence
  Description of Artificial Sequence: Synthetic oligonucleotide
  Sense strand starting at position 658 of SEQ ID NO: 915880
guccucuuuguagaaggaa

SEQ ID NO: 1113233 - RNA, 19 nt, Artificial Sequence
  Description of Artificial Sequence: Synthetic oligonucleotide
  Antisense strand to SEQ ID NO: 1113232
uuccuucuacaaagaggac

SEQ ID NO: 1113234 - RNA, 19 nt, Artificial Sequence
  Description of Artificial Sequence: Synthetic oligonucleotide
  Sense strand starting at position 847 of SEQ ID NO: 915880
ccuucuggguguugaguaa

SEQ ID NO: 1113235 - RNA, 19 nt, Artificial Sequence
  Description of Artificial Sequence: Synthetic oligonucleotide
  Antisense strand to SEQ ID NO: 1113234
uuacucaacacccagaagg

SEQ ID NO: 1113236 - RNA, 19 nt, Artificial Sequence
  Description of Artificial Sequence: Synthetic oligonucleotide
  Sense strand starting at position 851 of SEQ ID NO: 915880
cuggguguugaguaaccaa

SEQ ID NO: 1113237 - RNA, 19 nt, Artificial Sequence
  Description of Artificial Sequence: Synthetic oligonucleotide
  Antisense strand to SEQ ID NO: 1113236
uugguuacucaacacccag

SEQ ID NO: 1113238 - RNA, 19 nt, Artificial Sequence
  Description of Artificial Sequence: Synthetic oligonucleotide
  Sense strand starting at position 854 of SEQ ID NO: 915880
gguguugaguaaccaaacu

SEQ ID NO: 1113239 - RNA, 19 nt, Artificial Sequence
  Description of Artificial Sequence: Synthetic oligonucleotide
  Antisense strand to SEQ ID NO: 1113238
aguuugguuacucaacacc

SEQ ID NO: 1113240 - RNA, 19 nt, Artificial Sequence
  Description of Artificial Sequence: Synthetic oligonucleotide
  Sense strand starting at position 963 of SEQ ID NO: 915880
aacaaaugcuuagugugua

SEQ ID NO: 1113241 - RNA, 19 nt, Artificial Sequence
  Description of Artificial Sequence: Synthetic oligonucleotide
  Antisense strand to SEQ ID NO: 1113240
uacacacuaagcauuuguu

SEQ ID NO: 1113242 - RNA, 19 nt, Artificial Sequence
  Description of Artificial Sequence: Synthetic oligonucleotide
  Sense strand starting at position 967 of SEQ ID NO: 915880
aaugcuuaguguguacuua

SEQ ID NO: 1113243 - RNA, 19 nt, Artificial Sequence
  Description of Artificial Sequence: Synthetic oligonucleotide
  Antisense strand to SEQ ID NO: 1113242
uaaguacacacuaagcauu

SEQ ID NO: 1113244 - RNA, 19 nt, Artificial Sequence
  Description of Artificial Sequence: Synthetic oligonucleotide
  Sense strand starting at position 968 of SEQ ID NO: 915880
augcuuaguguguacuuaa

SEQ ID NO: 1113245 - RNA, 19 nt, Artificial Sequence
  Description of Artificial Sequence: Synthetic oligonucleotide
  Antisense strand to SEQ ID NO: 1113244
uuaaguacacacuaagcau

SEQ ID NO: 1113246 - RNA, 19 nt, Artificial Sequence
  Description of Artificial Sequence: Synthetic oligonucleotide
  Sense strand starting at position 1542 of SEQ ID NO: 915880
ccuugucauccgggucaca

SEQ ID NO: 1113247 - RNA, 19 nt, Artificial Sequence
  Description of Artificial Sequence: Synthetic oligonucleotide
  Antisense strand to SEQ ID NO: 1113246
ugugacccggaugacaagg

SEQ ID NO: 1113248 - RNA, 19 nt, Artificial Sequence
  Description of Artificial Sequence: Synthetic oligonucleotide
  Sense strand starting at position 1554 of SEQ ID NO: 915880
ggucacagccguugagaua

SEQ ID NO: 1113249 - RNA, 19 nt, Artificial Sequence
  Description of Artificial Sequence: Synthetic oligonucleotide
  Antisense strand to SEQ ID NO: 1113248
uaucucaacggcugugacc

SEQ ID NO: 1113250 - RNA, 19 nt, Artificial Sequence
  Description of Artificial Sequence: Synthetic oligonucleotide
  Sense strand starting at position 1555 of SEQ ID NO: 915880
gucacagccguugagauau

SEQ ID NO: 1113251 - RNA, 19 nt, Artificial Sequence
  Description of Artificial Sequence: Synthetic oligonucleotide
  Antisense strand to SEQ ID NO: 1113250
auaucucaacggcugugac

SEQ ID NO: 1113252 - RNA, 19 nt, Artificial Sequence
  Description of Artificial Sequence: Synthetic oligonucleotide
  Sense strand starting at position 1605 of SEQ ID NO: 915880
cucaguaguuguucagguu

SEQ ID NO: 1113253 - RNA, 19 nt, Artificial Sequence
  Description of Artificial Sequence: Synthetic oligonucleotide
  Antisense strand to SEQ ID NO: 1113252
aaccugaacaacuacugag

SEQ ID NO: 1113254 - RNA, 19 nt, Artificial Sequence
  Description of Artificial Sequence: Synthetic oligonucleotide
  Sense strand starting at position 2094 of SEQ ID NO: 915880
ucugcuggguucuccgaaa

SEQ ID NO: 1113255 - RNA, 19 nt, Artificial Sequence
  Description of Artificial Sequence: Synthetic oligonucleotide
  Antisense strand to SEQ ID NO: 1113254
uuucggagaacccagcaga

SEQ ID NO: 1113256 - RNA, 19 nt, Artificial Sequence
  Description of Artificial Sequence: Synthetic oligonucleotide
  Sense strand starting at position 2242 of SEQ ID NO: 915880
gauagauguauuggcugua

SEQ ID NO: 1113257 - RNA, 19 nt, Artificial Sequence
  Description of Artificial Sequence: Synthetic oligonucleotide
  Antisense strand to SEQ ID NO: 1113256
uacagccaauacaucuauc

SEQ ID NO: 1113258 - RNA, 19 nt, Artificial Sequence
  Description of Artificial Sequence: Synthetic oligonucleotide
  Sense strand starting at position 2317 of SEQ ID NO: 915880
guauauaucucacggacug

SEQ ID NO: 1113259 - RNA, 19 nt, Artificial Sequence
  Description of Artificial Sequence: Synthetic oligonucleotide
  Antisense strand to SEQ ID NO: 1113258
caguccgugagauauauac

SEQ ID NO: 1113260 - RNA, 19 nt, Artificial Sequence
  Description of Artificial Sequence: Synthetic oligonucleotide
  Sense strand starting at position 2318 of SEQ ID NO: 915880
uauauaucucacggacugu

SEQ ID NO: 1113261 - RNA, 19 nt, Artificial Sequence
  Description of Artificial Sequence: Synthetic oligonucleotide
  Antisense strand to SEQ ID NO: 1113260
acaguccgugagauauaua

SEQ ID NO: 1113262 - RNA, 19 nt, Artificial Sequence
  Description of Artificial Sequence: Synthetic oligonucleotide
  Sense strand starting at position 2430 of SEQ ID NO: 915880
gguuaauagagcugauaaa

SEQ ID NO: 1113263 - RNA, 19 nt, Artificial Sequence
  Description of Artificial Sequence: Synthetic oligonucleotide
  Antisense strand to SEQ ID NO: 1113262
uuuaucagcucuauuaacc

SEQ ID NO: 1113264 - RNA, 19 nt, Artificial Sequence
  Description of Artificial Sequence: Synthetic oligonucleotide
  Sense strand starting at position 3277 of SEQ ID NO: 915880
agcacuguuuacuaagauu

SEQ ID NO: 1113265 - RNA, 19 nt, Artificial Sequence
  Description of Artificial Sequence: Synthetic oligonucleotide
  Antisense strand to SEQ ID NO: 1113264
aaucuuaguaaacagugcu

SEQ ID NO: 1113266 - RNA, 19 nt, Artificial Sequence
  Description of Artificial Sequence: Synthetic oligonucleotide
  Sense strand starting at position 3285 of SEQ ID NO: 915880
uuacuaagauuuggaagca

SEQ ID NO: 1113267 - RNA, 19 nt, Artificial Sequence
  Description of Artificial Sequence: Synthetic oligonucleotide
  Antisense strand to SEQ ID NO: 1113266
ugcuuccaaaucuuaguaa

SEQ ID NO: 1113268 - RNA, 19 nt, Artificial Sequence
  Description of Artificial Sequence: Synthetic oligonucleotide
  Sense strand starting at position 3360 of SEQ ID NO: 915880
uggaguacucgucagccau

SEQ ID NO: 1113269 - RNA, 19 nt, Artificial Sequence
  Description of Artificial Sequence: Synthetic oligonucleotide
  Antisense strand to SEQ ID NO: 1113268
auggcugacgaguacucca

SEQ ID NO: 1113270 - RNA, 19 nt, Artificial Sequence
  Description of Artificial Sequence: Synthetic oligonucleotide
  Sense strand starting at position 3362 of SEQ ID NO: 915880
gaguacucgucagccauaa

SEQ ID NO: 1113271 - RNA, 19 nt, Artificial Sequence
  Description of Artificial Sequence: Synthetic oligonucleotide
  Antisense strand to SEQ ID NO: 1113270
uuauggcugacgaguacuc

SEQ ID NO: 1113272 - RNA, 19 nt, Artificial Sequence
  Description of Artificial Sequence: Synthetic oligonucleotide
  Sense strand starting at position 3686 of SEQ ID NO: 915880
guguaauugcauuauuugu

SEQ ID NO: 1113273 - RNA, 19 nt, Artificial Sequence
  Description of Artificial Sequence: Synthetic oligonucleotide
  Antisense strand to SEQ ID NO: 1113272
acaaauaaugcaauuacac

SEQ ID NO: 1113274 - RNA, 19 nt, Artificial Sequence
  Description of Artificial Sequence: Synthetic oligonucleotide
  Sense strand starting at position 3738 of SEQ ID NO: 915880
cuccauuauccaugaugug

SEQ ID NO: 1113275 - RNA, 19 nt, Artificial Sequence
  Description of Artificial Sequence: Synthetic oligonucleotide
  Antisense strand to SEQ ID NO: 1113274
cacaucauggauaauggag

SEQ ID NO: 1113276 - RNA, 19 nt, Artificial Sequence
  Description of Artificial Sequence: Synthetic oligonucleotide
  Sense strand starting at position 3791 of SEQ ID NO: 915880
ccauguacgccauaaguau

SEQ ID NO: 1113277 - RNA, 19 nt, Artificial Sequence
  Description of Artificial Sequence: Synthetic oligonucleotide
  Antisense strand to SEQ ID NO: 1113276
auacuuauggcguacaugg

SEQ ID NO: 1113278 - RNA, 19 nt, Artificial Sequence
  Description of Artificial Sequence: Synthetic oligonucleotide
  Sense strand starting at position 3899 of SEQ ID NO: 915880
aggaaaugcccuuguugac

SEQ ID NO: 1113279 - RNA, 19 nt, Artificial Sequence
  Description of Artificial Sequence: Synthetic oligonucleotide
  Antisense strand to SEQ ID NO: 1113278
gucaacaagggcauuuccu

SEQ ID NO: 1113280 - RNA, 19 nt, Artificial Sequence
  Description of Artificial Sequence: Synthetic oligonucleotide
  Sense strand starting at position 249 of SEQ ID NO: 915881
uagugauuacauugaaguc

SEQ ID NO: 1113281 - RNA, 19 nt, Artificial Sequence
  Description of Artificial Sequence: Synthetic oligonucleotide
  Antisense strand to SEQ ID NO: 1113280
gacuucaauguaaucacua

SEQ ID NO: 1113282 - RNA, 19 nt, Artificial Sequence
  Description of Artificial Sequence: Synthetic oligonucleotide
  Sense strand starting at position 308 of SEQ ID NO: 915881
gagugaauagagcauuguu

SEQ ID NO: 1113283 - RNA, 19 nt, Artificial Sequence
  Description of Artificial Sequence: Synthetic oligonucleotide
  Antisense strand to SEQ ID NO: 1113282
aacaaugcucuauucacuc

SEQ ID NO: 1113284 - RNA, 19 nt, Artificial Sequence
  Description of Artificial Sequence: Synthetic oligonucleotide
  Sense strand starting at position 311 of SEQ ID NO: 915881
ugaauagagcauuguuacu

SEQ ID NO: 1113285 - RNA, 19 nt, Artificial Sequence
  Description of Artificial Sequence: Synthetic oligonucleotide
  Antisense strand to SEQ ID NO: 1113284
aguaacaaugcucuauuca

SEQ ID NO: 1113286 - RNA, 19 nt, Artificial Sequence
  Description of Artificial Sequence: Synthetic oligonucleotide
  Sense strand starting at position 316 of SEQ ID NO: 915881
agagcauuguuacuauuga

SEQ ID NO: 1113287 - RNA, 19 nt, Artificial Sequence
  Description of Artificial Sequence: Synthetic oligonucleotide
  Antisense strand to SEQ ID NO: 1113286
ucaauaguaacaaugcucu

SEQ ID NO: 1113288 - RNA, 19 nt, Artificial Sequence
  Description of Artificial Sequence: Synthetic oligonucleotide
  Sense strand starting at position 324 of SEQ ID NO: 915881
guuacuauugaguauuagu

SEQ ID NO: 1113289 - RNA, 19 nt, Artificial Sequence
  Description of Artificial Sequence: Synthetic oligonucleotide
  Antisense strand to SEQ ID NO: 1113288
acuaauacucaauaguaac

SEQ ID NO: 1113290 - RNA, 19 nt, Artificial Sequence
  Description of Artificial Sequence: Synthetic oligonucleotide
  Sense strand starting at position 341 of SEQ ID NO: 915881
guucucguucaaggaggau

SEQ ID NO: 1113291 - RNA, 19 nt, Artificial Sequence
  Description of Artificial Sequence: Synthetic oligonucleotide
  Antisense strand to SEQ ID NO: 1113290
auccuccuugaacgagaac

SEQ ID NO: 1113292 - RNA, 19 nt, Artificial Sequence
  Description of Artificial Sequence: Synthetic oligonucleotide
  Sense strand starting at position 367 of SEQ ID NO: 915881
cuagguccuccuugcuaaa

SEQ ID NO: 1113293 - RNA, 19 nt, Artificial Sequence
  Description of Artificial Sequence: Synthetic oligonucleotide
  Antisense strand to SEQ ID NO: 1113292
uuuagcaaggaggaccuag

SEQ ID NO: 1113294 - RNA, 19 nt, Artificial Sequence
  Description of Artificial Sequence: Synthetic oligonucleotide
  Sense strand starting at position 369 of SEQ ID NO: 915881
agguccuccuugcuaaaca

SEQ ID NO: 1113295 - RNA, 19 nt, Artificial Sequence
  Description of Artificial Sequence: Synthetic oligonucleotide
  Antisense strand to SEQ ID NO: 1113294
uguuuagcaaggaggaccu

SEQ ID NO: 1113296 - RNA, 19 nt, Artificial Sequence
  Description of Artificial Sequence: Synthetic oligonucleotide
  Sense strand starting at position 422 of SEQ ID NO: 915881
ugugauuucucagaccagg

SEQ ID NO: 1113297 - RNA, 19 nt, Artificial Sequence
  Description of Artificial Sequence: Synthetic oligonucleotide
  Antisense strand to SEQ ID NO: 1113296
ccuggucugagaaaucaca

SEQ ID NO: 1113298 - RNA, 19 nt, Artificial Sequence
  Description of Artificial Sequence: Synthetic oligonucleotide
  Sense strand starting at position 604 of SEQ ID NO: 915881
agagucuaaacggguuuau

SEQ ID NO: 1113299 - RNA, 19 nt, Artificial Sequence
  Description of Artificial Sequence: Synthetic oligonucleotide
  Antisense strand to SEQ ID NO: 1113298
auaaacccguuuagacucu

SEQ ID NO: 1113300 - RNA, 19 nt, Artificial Sequence
  Description of Artificial Sequence: Synthetic oligonucleotide
  Sense strand starting at position 608 of SEQ ID NO: 915881
ucuaaacggguuuaucaau

SEQ ID NO: 1113301 - RNA, 19 nt, Artificial Sequence
  Description of Artificial Sequence: Synthetic oligonucleotide
  Antisense strand to SEQ ID NO: 1113300
auugauaaacccguuuaga

SEQ ID NO: 1113302 - RNA, 19 nt, Artificial Sequence
  Description of Artificial Sequence: Synthetic oligonucleotide
  Sense strand starting at position 752 of SEQ ID NO: 915881
gaaugugaaugcccgaagu

SEQ ID NO: 1113303 - RNA, 19 nt, Artificial Sequence
  Description of Artificial Sequence: Synthetic oligonucleotide
  Antisense strand to SEQ ID NO: 1113302
acuucgggcauucacauuc

SEQ ID NO: 1113304 - RNA, 19 nt, Artificial Sequence
  Description of Artificial Sequence: Synthetic oligonucleotide
  Sense strand starting at position 810 of SEQ ID NO: 915881
gggcaauaauuaucaagcu

SEQ ID NO: 1113305 - RNA, 19 nt, Artificial Sequence
  Description of Artificial Sequence: Synthetic oligonucleotide
  Antisense strand to SEQ ID NO: 1113304
agcuugauaauuauugccc

SEQ ID NO: 1113306 - RNA, 19 nt, Artificial Sequence
  Description of Artificial Sequence: Synthetic oligonucleotide
  Sense strand starting at position 886 of SEQ ID NO: 915881
agggcauuugccuaugcuu

SEQ ID NO: 1113307 - RNA, 19 nt, Artificial Sequence
  Description of Artificial Sequence: Synthetic oligonucleotide
  Antisense strand to SEQ ID NO: 1113306
aagcauaggcaaaugcccu

SEQ ID NO: 1113308 - RNA, 19 nt, Artificial Sequence
  Description of Artificial Sequence: Synthetic oligonucleotide
  Sense strand starting at position 1039 of SEQ ID NO: 915881
aaugaaauucgaugugaaa

SEQ ID NO: 1113309 - RNA, 19 nt, Artificial Sequence
  Description of Artificial Sequence: Synthetic oligonucleotide
  Antisense strand to SEQ ID NO: 1113308
uuucacaucgaauuucauu

SEQ ID NO: 1113310 - RNA, 19 nt, Artificial Sequence
  Description of Artificial Sequence: Synthetic oligonucleotide
  Sense strand starting at position 1082 of SEQ ID NO: 915881
ggugauguccaauagcuaa

SEQ ID NO: 1113311 - RNA, 19 nt, Artificial Sequence
  Description of Artificial Sequence: Synthetic oligonucleotide
  Antisense strand to SEQ ID NO: 1113310
uuagcuauuggacaucacc

SEQ ID NO: 1113312 - RNA, 19 nt, Artificial Sequence
  Description of Artificial Sequence: Synthetic oligonucleotide
  Sense strand starting at position 1354 of SEQ ID NO: 915881
ggagcaggaugguuaucaa

SEQ ID NO: 1113313 - RNA, 19 nt, Artificial Sequence
  Description of Artificial Sequence: Synthetic oligonucleotide
  Antisense strand to SEQ ID NO: 1113312
uugauaaccauccugcucc

SEQ ID NO: 1113314 - RNA, 19 nt, Artificial Sequence
  Description of Artificial Sequence: Synthetic oligonucleotide
  Sense strand starting at position 1357 of SEQ ID NO: 915881
gcaggaugguuaucaaaua

SEQ ID NO: 1113315 - RNA, 19 nt, Artificial Sequence
  Description of Artificial Sequence: Synthetic oligonucleotide
  Antisense strand to SEQ ID NO: 1113314
uauuugauaaccauccugc

SEQ ID NO: 1113316 - RNA, 19 nt, Artificial Sequence
  Description of Artificial Sequence: Synthetic oligonucleotide
  Sense strand starting at position 2589 of SEQ ID NO: 915881
ggucuccagacaugucuga

SEQ ID NO: 1113317 - RNA, 19 nt, Artificial Sequence
  Description of Artificial Sequence: Synthetic oligonucleotide
  Antisense strand to SEQ ID NO: 1113316
ucagacaugucuggagacc

SEQ ID NO: 1113318 - RNA, 19 nt, Artificial Sequence
  Description of Artificial Sequence: Synthetic oligonucleotide
  Sense strand starting at position 2598 of SEQ ID NO: 915881
acaugucugaggugaagag

SEQ ID NO: 1113319 - RNA, 19 nt, Artificial Sequence
  Description of Artificial Sequence: Synthetic oligonucleotide
  Antisense strand to SEQ ID NO: 1113318
cucuucaccucagacaugu

SEQ ID NO: 1113320 - RNA, 19 nt, Artificial Sequence
  Description of Artificial Sequence: Synthetic oligonucleotide
  Sense strand starting at position 2952 of SEQ ID NO: 915881
gcguuucuuguaucucauu

SEQ ID NO: 1113321 - RNA, 19 nt, Artificial Sequence
  Description of Artificial Sequence: Synthetic oligonucleotide
  Antisense strand to SEQ ID NO: 1113320
aaugagauacaagaaacgc

SEQ ID NO: 1113322 - RNA, 19 nt, Artificial Sequence
  Description of Artificial Sequence: Synthetic oligonucleotide
  Sense strand starting at position 3007 of SEQ ID NO: 915881
aggaguugaggcuaagguu

SEQ ID NO: 1113323 - RNA, 19 nt, Artificial Sequence
  Description of Artificial Sequence: Synthetic oligonucleotide
  Antisense strand to SEQ ID NO: 1113322
aaccuuagccucaacuccu

SEQ ID NO: 1113324 - RNA, 19 nt, Artificial Sequence
  Description of Artificial Sequence: Synthetic oligonucleotide
  Sense strand starting at position 3039 of SEQ ID NO: 915881
uuuguuaagagcugcagau

SEQ ID NO: 1113325 - RNA, 19 nt, Artificial Sequence
  Description of Artificial Sequence: Synthetic oligonucleotide
  Antisense strand to SEQ ID NO: 1113324
aucugcagcucuuaacaaa

SEQ ID NO: 1113326 - RNA, 19 nt, Artificial Sequence
  Description of Artificial Sequence: Synthetic oligonucleotide
  Sense strand starting at position 3092 of SEQ ID NO: 915881
agaagcguucacguuguua

SEQ ID NO: 1113327 - RNA, 19 nt, Artificial Sequence
  Description of Artificial Sequence: Synthetic oligonucleotide
  Antisense strand to SEQ ID NO: 1113326
uaacaacgugaacgcuucu

SEQ ID NO: 1113328 - RNA, 19 nt, Artificial Sequence
  Description of Artificial Sequence: Synthetic oligonucleotide
  Sense strand starting at position 3095 of SEQ ID NO: 915881
agcguucacguuguuauaa

SEQ ID NO: 1113329 - RNA, 19 nt, Artificial Sequence
  Description of Artificial Sequence: Synthetic oligonucleotide
  Antisense strand to SEQ ID NO: 1113328
uuauaacaacgugaacgcu

SEQ ID NO: 1113330 - RNA, 19 nt, Artificial Sequence
  Description of Artificial Sequence: Synthetic oligonucleotide
  Sense strand starting at position 3104 of SEQ ID NO: 915881
guuguuauaaaccguuacu

SEQ ID NO: 1113331 - RNA, 19 nt, Artificial Sequence
  Description of Artificial Sequence: Synthetic oligonucleotide
  Antisense strand to SEQ ID NO: 1113330
aguaacgguuuauaacaac

SEQ ID NO: 1113332 - RNA, 19 nt, Artificial Sequence
  Description of Artificial Sequence: Synthetic oligonucleotide
  Sense strand starting at position 3212 of SEQ ID NO: 915881
agaucauuauguuuggaga

SEQ ID NO: 1113333 - RNA, 19 nt, Artificial Sequence
  Description of Artificial Sequence: Synthetic oligonucleotide
  Antisense strand to SEQ ID NO: 1113332
ucuccaaacauaaugaucu

SEQ ID NO: 1113334 - RNA, 19 nt, Artificial Sequence
  Description of Artificial Sequence: Synthetic oligonucleotide
  Sense strand starting at position 3213 of SEQ ID NO: 915881
gaucauuauguuuggagac

SEQ ID NO: 1113335 - RNA, 19 nt, Artificial Sequence
  Description of Artificial Sequence: Synthetic oligonucleotide
  Antisense strand to SEQ ID NO: 1113334
gucuccaaacauaaugauc

SEQ ID NO: 1113336 - RNA, 19 nt, Artificial Sequence
  Description of Artificial Sequence: Synthetic oligonucleotide
  Sense strand starting at position 3509 of SEQ ID NO: 915881
aggagcaaacguuauagua

SEQ ID NO: 1113337 - RNA, 19 nt, Artificial Sequence
  Description of Artificial Sequence: Synthetic oligonucleotide
  Antisense strand to SEQ ID NO: 1113336
uacuauaacguuugcuccu

SEQ ID NO: 1113338 - RNA, 19 nt, Artificial Sequence
  Description of Artificial Sequence: Synthetic oligonucleotide
  Sense strand starting at position 3561 of SEQ ID NO: 915881
ccgugcaugcauuaugaau

SEQ ID NO: 1113339 - RNA, 19 nt, Artificial Sequence
  Description of Artificial Sequence: Synthetic oligonucleotide
  Antisense strand to SEQ ID NO: 1113338
auucauaaugcaugcacgg

SEQ ID NO: 1113340 - RNA, 19 nt, Artificial Sequence
  Description of Artificial Sequence: Synthetic oligonucleotide
  Sense strand starting at position 3680 of SEQ ID NO: 915881
cagguaaauggcgauauau

SEQ ID NO: 1113341 - RNA, 19 nt, Artificial Sequence
  Description of Artificial Sequence: Synthetic oligonucleotide
  Antisense strand to SEQ ID NO: 1113340
auauaucgccauuuaccug

SEQ ID NO: 1113342 - RNA, 19 nt, Artificial Sequence
  Description of Artificial Sequence: Synthetic oligonucleotide
  Sense strand starting at position 3682 of SEQ ID NO: 915881
gguaaauggcgauauauug

SEQ ID NO: 1113343 - RNA, 19 nt, Artificial Sequence
  Description of Artificial Sequence: Synthetic oligonucleotide
  Antisense strand to SEQ ID NO: 1113342
caauauaucgccauuuacc

SEQ ID NO: 1113344 - RNA, 19 nt, Artificial Sequence
  Description of Artificial Sequence: Synthetic oligonucleotide
  Sense strand starting at position 3688 of SEQ ID NO: 915881
uggcgauauauugguguca

SEQ ID NO: 1113345 - RNA, 19 nt, Artificial Sequence
  Description of Artificial Sequence: Synthetic oligonucleotide
  Antisense strand to SEQ ID NO: 1113344
ugacaccaauauaucgcca

SEQ ID NO: 1113346 - RNA, 19 nt, Artificial Sequence
  Description of Artificial Sequence: Synthetic oligonucleotide
  Sense strand starting at position 3689 of SEQ ID NO: 915881
ggcgauauauuggugucau

SEQ ID NO: 1113347 - RNA, 19 nt, Artificial Sequence
  Description of Artificial Sequence: Synthetic oligonucleotide
  Antisense strand to SEQ ID NO: 1113346
augacaccaauauaucgcc

SEQ ID NO: 1113348 - RNA, 19 nt, Artificial Sequence
  Description of Artificial Sequence: Synthetic oligonucleotide
  Sense strand starting at position 3840 of SEQ ID NO: 915881
uuaauaagauuggcaucuu

SEQ ID NO: 1113349 - RNA, 19 nt, Artificial Sequence
  Description of Artificial Sequence: Synthetic oligonucleotide
  Antisense strand to SEQ ID NO: 1113348
aagaugccaaucuuauuaa

SEQ ID NO: 1113350 - RNA, 19 nt, Artificial Sequence
  Description of Artificial Sequence: Synthetic oligonucleotide
  Sense strand starting at position 3895 of SEQ ID NO: 915881
guuauuuaguaagacuguu

SEQ ID NO: 1113351 - RNA, 19 nt, Artificial Sequence
  Description of Artificial Sequence: Synthetic oligonucleotide
  Antisense strand to SEQ ID NO: 1113350
aacagucuuacuaaauaac

SEQ ID NO: 1113352 - RNA, 19 nt, Artificial Sequence
  Description of Artificial Sequence: Synthetic oligonucleotide
  Sense strand starting at position 3903 of SEQ ID NO: 915881
guaagacuguuguuaaucu

SEQ ID NO: 1113353 - RNA, 19 nt, Artificial Sequence
  Description of Artificial Sequence: Synthetic oligonucleotide
  Antisense strand to SEQ ID NO: 1113352
agauuaacaacagucuuac

SEQ ID NO: 1113354 - RNA, 19 nt, Artificial Sequence
  Description of Artificial Sequence: Synthetic oligonucleotide
  Sense strand starting at position 3910 of SEQ ID NO: 915881
uguuguuaaucuuccagag

SEQ ID NO: 1113355 - RNA, 19 nt, Artificial Sequence
  Description of Artificial Sequence: Synthetic oligonucleotide
  Antisense strand to SEQ ID NO: 1113354
cucuggaagauuaacaaca

SEQ ID NO: 1113356 - RNA, 19 nt, Artificial Sequence
  Description of Artificial Sequence: Synthetic oligonucleotide
  Sense strand starting at position 3914 of SEQ ID NO: 915881
guuaaucuuccagagugau

SEQ ID NO: 1113357 - RNA, 19 nt, Artificial Sequence
  Description of Artificial Sequence: Synthetic oligonucleotide
  Antisense strand to SEQ ID NO: 1113356
aucacucuggaagauuaac

SEQ ID NO: 1113358 - RNA, 19 nt, Artificial Sequence
  Description of Artificial Sequence: Synthetic oligonucleotide
  Sense strand starting at position 3917 of SEQ ID NO: 915881
aaucuuccagagugauaga

SEQ ID NO: 1113359 - RNA, 19 nt, Artificial Sequence
  Description of Artificial Sequence: Synthetic oligonucleotide
  Antisense strand to SEQ ID NO: 1113358
ucuaucacucuggaagauu

SEQ ID NO: 1113360 - RNA, 19 nt, Artificial Sequence
  Description of Artificial Sequence: Synthetic oligonucleotide
  Sense strand starting at position 412 of SEQ ID NO: 915882
aguaaaugugucuaaagca

SEQ ID NO: 1113361 - RNA, 19 nt, Artificial Sequence
  Description of Artificial Sequence: Synthetic oligonucleotide
  Antisense strand to SEQ ID NO: 1113360
ugcuuuagacacauuuacu

SEQ ID NO: 1113362 - RNA, 19 nt, Artificial Sequence
  Description of Artificial Sequence: Synthetic oligonucleotide
  Sense strand starting at position 438 of SEQ ID NO: 915882
agucauaucucugugcuau

SEQ ID NO: 1113363 - RNA, 19 nt, Artificial Sequence
  Description of Artificial Sequence: Synthetic oligonucleotide
  Antisense strand to SEQ ID NO: 1113362
auagcacagagauaugacu

SEQ ID NO: 1113364 - RNA, 19 nt, Artificial Sequence
  Description of Artificial Sequence: Synthetic oligonucleotide
  Sense strand starting at position 523 of SEQ ID NO: 915882
cgaaguccucuauaguaua

SEQ ID NO: 1113365 - RNA, 19 nt, Artificial Sequence
  Description of Artificial Sequence: Synthetic oligonucleotide
  Antisense strand to SEQ ID NO: 1113364
uauacuauagaggacuucg

SEQ ID NO: 1113366 - RNA, 19 nt, Artificial Sequence
  Description of Artificial Sequence: Synthetic oligonucleotide
  Sense strand starting at position 695 of SEQ ID NO: 915882
cucuucuuugucgauccaa

SEQ ID NO: 1113367 - RNA, 19 nt, Artificial Sequence
  Description of Artificial Sequence: Synthetic oligonucleotide
  Antisense strand to SEQ ID NO: 1113366
uuggaucgacaaagaagag

SEQ ID NO: 1113368 - RNA, 19 nt, Artificial Sequence
  Description of Artificial Sequence: Synthetic oligonucleotide
  Sense strand starting at position 1044 of SEQ ID NO: 915882
uuccuaguacuuugagaga

SEQ ID NO: 1113369 - RNA, 19 nt, Artificial Sequence
  Description of Artificial Sequence: Synthetic oligonucleotide
  Antisense strand to SEQ ID NO: 1113368
ucucucaaaguacuaggaa

SEQ ID NO: 1113370 - RNA, 19 nt, Artificial Sequence
  Description of Artificial Sequence: Synthetic oligonucleotide
  Sense strand starting at position 1169 of SEQ ID NO: 915882
ggucuacacuucucuuaga

SEQ ID NO: 1113371 - RNA, 19 nt, Artificial Sequence
  Description of Artificial Sequence: Synthetic oligonucleotide
  Antisense strand to SEQ ID NO: 1113370
ucuaagagaaguguagacc

SEQ ID NO: 1113372 - RNA, 19 nt, Artificial Sequence
  Description of Artificial Sequence: Synthetic oligonucleotide
  Sense strand starting at position 1201 of SEQ ID NO: 915882
ccuagcucagcugaaauua

SEQ ID NO: 1113373 - RNA, 19 nt, Artificial Sequence
  Description of Artificial Sequence: Synthetic oligonucleotide
  Antisense strand to SEQ ID NO: 1113372
uaauuucagcugagcuagg

SEQ ID NO: 1113374 - RNA, 19 nt, Artificial Sequence
  Description of Artificial Sequence: Synthetic oligonucleotide
  Sense strand starting at position 1311 of SEQ ID NO: 915882
ugucaauuagcacauuguu

SEQ ID NO: 1113375 - RNA, 19 nt, Artificial Sequence
  Description of Artificial Sequence: Synthetic oligonucleotide
  Antisense strand to SEQ ID NO: 1113374
aacaaugugcuaauugaca

SEQ ID NO: 1113376 - RNA, 19 nt, Artificial Sequence
  Description of Artificial Sequence: Synthetic oligonucleotide
  Sense strand starting at position 1343 of SEQ ID NO: 915882
gucuguuguuaccuuaaac

SEQ ID NO: 1113377 - RNA, 19 nt, Artificial Sequence
  Description of Artificial Sequence: Synthetic oligonucleotide
  Antisense strand to SEQ ID NO: 1113376
guuuaagguaacaacagac

SEQ ID NO: 1113378 - RNA, 19 nt, Artificial Sequence
  Description of Artificial Sequence: Synthetic oligonucleotide
  Sense strand starting at position 1682 of SEQ ID NO: 915882
gcgccuggcuacuuaauuu

SEQ ID NO: 1113379 - RNA, 19 nt, Artificial Sequence
  Description of Artificial Sequence: Synthetic oligonucleotide
  Antisense strand to SEQ ID NO: 1113378
aaauuaaguagccaggcgc

SEQ ID NO: 1113380 - RNA, 19 nt, Artificial Sequence
  Description of Artificial Sequence: Synthetic oligonucleotide
  Sense strand starting at position 1730 of SEQ ID NO: 915882
guuaaagucacuuggagau

SEQ ID NO: 1113381 - RNA, 19 nt, Artificial Sequence
  Description of Artificial Sequence: Synthetic oligonucleotide
  Antisense strand to SEQ ID NO: 1113380
aucuccaagugacuuuaac

SEQ ID NO: 1113382 - RNA, 19 nt, Artificial Sequence
  Description of Artificial Sequence: Synthetic oligonucleotide
  Sense strand starting at position 1736 of SEQ ID NO: 915882
gucacuuggagauguaaau

SEQ ID NO: 1113383 - RNA, 19 nt, Artificial Sequence
  Description of Artificial Sequence: Synthetic oligonucleotide
  Antisense strand to SEQ ID NO: 1113382
auuuacaucuccaagugac

SEQ ID NO: 1113384 - RNA, 19 nt, Artificial Sequence
  Description of Artificial Sequence: Synthetic oligonucleotide
  Sense strand starting at position 1998 of SEQ ID NO: 915882
gucauaaguugugcugauu

SEQ ID NO: 1113385 - RNA, 19 nt, Artificial Sequence
  Description of Artificial Sequence: Synthetic oligonucleotide
  Antisense strand to SEQ ID NO: 1113384
aaucagcacaacuuaugac

SEQ ID NO: 1113386 - RNA, 19 nt, Artificial Sequence
  Description of Artificial Sequence: Synthetic oligonucleotide
  Sense strand starting at position 2001 of SEQ ID NO: 915882
auaaguugugcugauuguu

SEQ ID NO: 1113387 - RNA, 19 nt, Artificial Sequence
  Description of Artificial Sequence: Synthetic oligonucleotide
  Antisense strand to SEQ ID NO: 1113386
aacaaucagcacaacuuau

SEQ ID NO: 1113388 - RNA, 19 nt, Artificial Sequence
  Description of Artificial Sequence: Synthetic oligonucleotide
  Sense strand starting at position 2009 of SEQ ID NO: 915882
ugcugauuguuccuggacu

SEQ ID NO: 1113389 - RNA, 19 nt, Artificial Sequence
  Description of Artificial Sequence: Synthetic oligonucleotide
  Antisense strand to SEQ ID NO: 1113388
aguccaggaacaaucagca

SEQ ID NO: 1113390 - RNA, 19 nt, Artificial Sequence
  Description of Artificial Sequence: Synthetic oligonucleotide
  Sense strand starting at position 2011 of SEQ ID NO: 915882
cugauuguuccuggacuuu

SEQ ID NO: 1113391 - RNA, 19 nt, Artificial Sequence
  Description of Artificial Sequence: Synthetic oligonucleotide
  Antisense strand to SEQ ID NO: 1113390
aaaguccaggaacaaucag

SEQ ID NO: 1113392 - RNA, 19 nt, Artificial Sequence
  Description of Artificial Sequence: Synthetic oligonucleotide
  Sense strand starting at position 2082 of SEQ ID NO: 915882
ccgcaucucaggcaguuau

SEQ ID NO: 1113393 - RNA, 19 nt, Artificial Sequence
  Description of Artificial Sequence: Synthetic oligonucleotide
  Antisense strand to SEQ ID NO: 1113392
auaacugccugagaugcgg

SEQ ID NO: 1113394 - RNA, 19 nt, Artificial Sequence
  Description of Artificial Sequence: Synthetic oligonucleotide
  Sense strand starting at position 2099 of SEQ ID NO: 915882
augggaaucugagcugucu

SEQ ID NO: 1113395 - RNA, 19 nt, Artificial Sequence
  Description of Artificial Sequence: Synthetic oligonucleotide
  Antisense strand to SEQ ID NO: 1113394
agacagcucagauucccau

SEQ ID NO: 1113396 - RNA, 19 nt, Artificial Sequence
  Description of Artificial Sequence: Synthetic oligonucleotide
  Sense strand starting at position 2101 of SEQ ID NO: 915882
gggaaucugagcugucugu

SEQ ID NO: 1113397 - RNA, 19 nt, Artificial Sequence
  Description of Artificial Sequence: Synthetic oligonucleotide
  Antisense strand to SEQ ID NO: 1113396
acagacagcucagauuccc

SEQ ID NO: 1113398 - RNA, 19 nt, Artificial Sequence
  Description of Artificial Sequence: Synthetic oligonucleotide
  Sense strand starting at position 2105 of SEQ ID NO: 915882
aucugagcugucuguacaa

SEQ ID NO: 1113399 - RNA, 19 nt, Artificial Sequence
  Description of Artificial Sequence: Synthetic oligonucleotide
  Antisense strand to SEQ ID NO: 1113398
uuguacagacagcucagau

SEQ ID NO: 1113400 - RNA, 19 nt, Artificial Sequence
  Description of Artificial Sequence: Synthetic oligonucleotide
  Sense strand starting at position 2107 of SEQ ID NO: 915882
cugagcugucuguacaaac

SEQ ID NO: 1113401 - RNA, 19 nt, Artificial Sequence
  Description of Artificial Sequence: Synthetic oligonucleotide
  Antisense strand to SEQ ID NO: 1113400
guuuguacagacagcucag

SEQ ID NO: 1113402 - RNA, 19 nt, Artificial Sequence
  Description of Artificial Sequence: Synthetic oligonucleotide
  Sense strand starting at position 2160 of SEQ ID NO: 915882
uuugcaucuuuagugauga

SEQ ID NO: 1113403 - RNA, 19 nt, Artificial Sequence
  Description of Artificial Sequence: Synthetic oligonucleotide
  Antisense strand to SEQ ID NO: 1113402
ucaucacuaaagaugcaaa

SEQ ID NO: 1113404 - RNA, 19 nt, Artificial Sequence
  Description of Artificial Sequence: Synthetic oligonucleotide
  Sense strand starting at position 2162 of SEQ ID NO: 915882
ugcaucuuuagugaugaga

SEQ ID NO: 1113405 - RNA, 19 nt, Artificial Sequence
  Description of Artificial Sequence: Synthetic oligonucleotide
  Antisense strand to SEQ ID NO: 1113404
ucucaucacuaaagaugca

SEQ ID NO: 1113406 - RNA, 19 nt, Artificial Sequence
  Description of Artificial Sequence: Synthetic oligonucleotide
  Sense strand starting at position 2176 of SEQ ID NO: 915882
ugagaaagccuaugaugca

SEQ ID NO: 1113407 - RNA, 19 nt, Artificial Sequence
  Description of Artificial Sequence: Synthetic oligonucleotide
  Antisense strand to SEQ ID NO: 1113406
ugcaucauaggcuuucuca

SEQ ID NO: 1113408 - RNA, 19 nt, Artificial Sequence
  Description of Artificial Sequence: Synthetic oligonucleotide
  Sense strand starting at position 2188 of SEQ ID NO: 915882
ugaugcaaaugacaugaau

SEQ ID NO: 1113409 - RNA, 19 nt, Artificial Sequence
  Description of Artificial Sequence: Synthetic oligonucleotide
  Antisense strand to SEQ ID NO: 1113408
auucaugucauuugcauca

SEQ ID NO: 1113410 - RNA, 19 nt, Artificial Sequence
  Description of Artificial Sequence: Synthetic oligonucleotide
  Sense strand starting at position 2255 of SEQ ID NO: 915882
aucugaauuugguaaacuu

SEQ ID NO: 1113411 - RNA, 19 nt, Artificial Sequence
  Description of Artificial Sequence: Synthetic oligonucleotide
  Antisense strand to SEQ ID NO: 1113410
aaguuuaccaaauucagau

SEQ ID NO: 1113412 - RNA, 19 nt, Artificial Sequence
  Description of Artificial Sequence: Synthetic oligonucleotide
  Sense strand starting at position 2362 of SEQ ID NO: 915882
ccuacucugcaucaaggau

SEQ ID NO: 1113413 - RNA, 19 nt, Artificial Sequence
  Description of Artificial Sequence: Synthetic oligonucleotide
  Antisense strand to SEQ ID NO: 1113412
auccuugaugcagaguagg

SEQ ID NO: 1113414 - RNA, 19 nt, Artificial Sequence
  Description of Artificial Sequence: Synthetic oligonucleotide
  Sense strand starting at position 2694 of SEQ ID NO: 915882
ugcaucauucuuuaaugga

SEQ ID NO: 1113415 - RNA, 19 nt, Artificial Sequence
  Description of Artificial Sequence: Synthetic oligonucleotide
  Antisense strand to SEQ ID NO: 1113414
uccauuaaagaaugaugca

SEQ ID NO: 1113416 - RNA, 19 nt, Artificial Sequence
  Description of Artificial Sequence: Synthetic oligonucleotide
  Sense strand starting at position 2750 of SEQ ID NO: 915882
cuguaacuauagcuugaaa

SEQ ID NO: 1113417 - RNA, 19 nt, Artificial Sequence
  Description of Artificial Sequence: Synthetic oligonucleotide
  Antisense strand to SEQ ID NO: 1113416
uuucaagcuauaguuacag

SEQ ID NO: 1113418 - RNA, 19 nt, Artificial Sequence
  Description of Artificial Sequence: Synthetic oligonucleotide
  Sense strand starting at position 2775 of SEQ ID NO: 915882
auguuaucuggugagcaca

SEQ ID NO: 1113419 - RNA, 19 nt, Artificial Sequence
  Description of Artificial Sequence: Synthetic oligonucleotide
  Antisense strand to SEQ ID NO: 1113418
ugugcucaccagauaacau

SEQ ID NO: 1113420 - RNA, 19 nt, Artificial Sequence
  Description of Artificial Sequence: Synthetic oligonucleotide
  Sense strand starting at position 2909 of SEQ ID NO: 915882
gaccuuggccucugaguca

SEQ ID NO: 1113421 - RNA, 19 nt, Artificial Sequence
  Description of Artificial Sequence: Synthetic oligonucleotide
  Antisense strand to SEQ ID NO: 1113420
ugacucagaggccaagguc

SEQ ID NO: 1113422 - RNA, 19 nt, Artificial Sequence
  Description of Artificial Sequence: Synthetic oligonucleotide
  Sense strand starting at position 2916 of SEQ ID NO: 915882
gccucugagucagcuaauu

SEQ ID NO: 1113423 - RNA, 19 nt, Artificial Sequence
  Description of Artificial Sequence: Synthetic oligonucleotide
  Antisense strand to SEQ ID NO: 1113422
aauuagcugacucagaggc

SEQ ID NO: 1113424 - RNA, 19 nt, Artificial Sequence
  Description of Artificial Sequence: Synthetic oligonucleotide
  Sense strand starting at position 2964 of SEQ ID NO: 915882
ccuugaaucuaagauuaag

SEQ ID NO: 1113425 - RNA, 19 nt, Artificial Sequence
  Description of Artificial Sequence: Synthetic oligonucleotide
  Antisense strand to SEQ ID NO: 1113424
cuuaaucuuagauucaagg

SEQ ID NO: 1113426 - RNA, 19 nt, Artificial Sequence
  Description of Artificial Sequence: Synthetic oligonucleotide
  Sense strand starting at position 2975 of SEQ ID NO: 915882
agauuaaguguguggccaa

SEQ ID NO: 1113427 - RNA, 19 nt, Artificial Sequence
  Description of Artificial Sequence: Synthetic oligonucleotide
  Antisense strand to SEQ ID NO: 1113426
uuggccacacacuuaaucu

SEQ ID NO: 1113428 - RNA, 19 nt, Artificial Sequence
  Description of Artificial Sequence: Synthetic oligonucleotide
  Sense strand starting at position 3407 of SEQ ID NO: 915882
cucugagucucagcacuua

SEQ ID NO: 1113429 - RNA, 19 nt, Artificial Sequence
  Description of Artificial Sequence: Synthetic oligonucleotide
  Antisense strand to SEQ ID NO: 1113428
uaagugcugagacucagag

SEQ ID NO: 1113430 - RNA, 19 nt, Artificial Sequence
  Description of Artificial Sequence: Synthetic oligonucleotide
  Sense strand starting at position 3463 of SEQ ID NO: 915882
ucccucuagugucucaaau

SEQ ID NO: 1113431 - RNA, 19 nt, Artificial Sequence
  Description of Artificial Sequence: Synthetic oligonucleotide
  Antisense strand to SEQ ID NO: 1113430
auuugagacacuagaggga

SEQ ID NO: 1113432 - RNA, 19 nt, Artificial Sequence
  Description of Artificial Sequence: Synthetic oligonucleotide
  Sense strand starting at position 3544 of SEQ ID NO: 915882
agacuuuacuuaguuauga

SEQ ID NO: 1113433 - RNA, 19 nt, Artificial Sequence
  Description of Artificial Sequence: Synthetic oligonucleotide
  Antisense strand to SEQ ID NO: 1113432
ucauaacuaaguaaagucu

SEQ ID NO: 1113434 - RNA, 19 nt, Artificial Sequence
  Description of Artificial Sequence: Synthetic oligonucleotide
  Sense strand starting at position 3583 of SEQ ID NO: 915882
ugagauaaagcagguguuu

SEQ ID NO: 1113435 - RNA, 19 nt, Artificial Sequence
  Description of Artificial Sequence: Synthetic oligonucleotide
  Antisense strand to SEQ ID NO: 1113434
aaacaccugcuuuaucuca

SEQ ID NO: 1113436 - RNA, 19 nt, Artificial Sequence
  Description of Artificial Sequence: Synthetic oligonucleotide
  Sense strand starting at position 3680 of SEQ ID NO: 915882
uucuaaguuagguaagagu

SEQ ID NO: 1113437 - RNA, 19 nt, Artificial Sequence
  Description of Artificial Sequence: Synthetic oligonucleotide
  Antisense strand to SEQ ID NO: 1113436
acucuuaccuaacuuagaa

SEQ ID NO: 1113438 - RNA, 19 nt, Artificial Sequence
  Description of Artificial Sequence: Synthetic oligonucleotide
  Sense strand starting at position 3694 of SEQ ID NO: 915882
agaguagaaucauuguaga

SEQ ID NO: 1113439 - RNA, 19 nt, Artificial Sequence
  Description of Artificial Sequence: Synthetic oligonucleotide
  Antisense strand to SEQ ID NO: 1113438
ucuacaaugauucuacucu

SEQ ID NO: 1113440 - RNA, 19 nt, Artificial Sequence
  Description of Artificial Sequence: Synthetic oligonucleotide
  Sense strand starting at position 98 of SEQ ID NO: 915883
uugaaaguacugugauaag

SEQ ID NO: 1113441 - RNA, 19 nt, Artificial Sequence
  Description of Artificial Sequence: Synthetic oligonucleotide
  Antisense strand to SEQ ID NO: 1113440
cuuaucacaguacuuucaa

SEQ ID NO: 1113442 - RNA, 19 nt, Artificial Sequence
  Description of Artificial Sequence: Synthetic oligonucleotide
  Sense strand starting at position 151 of SEQ ID NO: 915883
gggcaacucauugagguua

SEQ ID NO: 1113443 - RNA, 19 nt, Artificial Sequence
  Description of Artificial Sequence: Synthetic oligonucleotide
  Antisense strand to SEQ ID NO: 1113442
uaaccucaaugaguugccc

SEQ ID NO: 1113444 - RNA, 19 nt, Artificial Sequence
  Description of Artificial Sequence: Synthetic oligonucleotide
  Sense strand starting at position 331 of SEQ ID NO: 915883
gccuuccuccuggauaaau

SEQ ID NO: 1113445 - RNA, 19 nt, Artificial Sequence
  Description of Artificial Sequence: Synthetic oligonucleotide
  Antisense strand to SEQ ID NO: 1113444
auuuauccaggaggaaggc

SEQ ID NO: 1113446 - RNA, 19 nt, Artificial Sequence
  Description of Artificial Sequence: Synthetic oligonucleotide
  Sense strand starting at position 363 of SEQ ID NO: 915883
ugaagacauguauauagcu

SEQ ID NO: 1113447 - RNA, 19 nt, Artificial Sequence
  Description of Artificial Sequence: Synthetic oligonucleotide
  Antisense strand to SEQ ID NO: 1113446
agcuauauacaugucuuca

SEQ ID NO: 1113448 - RNA, 19 nt, Artificial Sequence
  Description of Artificial Sequence: Synthetic oligonucleotide
  Sense strand starting at position 459 of SEQ ID NO: 915883
gucauagcucuugauuaug

SEQ ID NO: 1113449 - RNA, 19 nt, Artificial Sequence
  Description of Artificial Sequence: Synthetic oligonucleotide
  Antisense strand to SEQ ID NO: 1113448
cauaaucaagagcuaugac

SEQ ID NO: 1113450 - RNA, 19 nt, Artificial Sequence
  Description of Artificial Sequence: Synthetic oligonucleotide
  Sense strand starting at position 680 of SEQ ID NO: 915883
cacugaucgcuagacccau

SEQ ID NO: 1113451 - RNA, 19 nt, Artificial Sequence
  Description of Artificial Sequence: Synthetic oligonucleotide
  Antisense strand to SEQ ID NO: 1113450
augggucuagcgaucagug

SEQ ID NO: 1113452 - RNA, 19 nt, Artificial Sequence
  Description of Artificial Sequence: Synthetic oligonucleotide
  Sense strand starting at position 716 of SEQ ID NO: 915883
cagccauggucaucagaag

SEQ ID NO: 1113453 - RNA, 19 nt, Artificial Sequence
  Description of Artificial Sequence: Synthetic oligonucleotide
  Antisense strand to SEQ ID NO: 1113452
cuucugaugaccauggcug

SEQ ID NO: 1113454 - RNA, 19 nt, Artificial Sequence
  Description of Artificial Sequence: Synthetic oligonucleotide
  Sense strand starting at position 722 of SEQ ID NO: 915883
uggucaucagaaggucaua

SEQ ID NO: 1113455 - RNA, 19 nt, Artificial Sequence
  Description of Artificial Sequence: Synthetic oligonucleotide
  Antisense strand to SEQ ID NO: 1113454
uaugaccuucugaugacca

SEQ ID NO: 1113456 - RNA, 19 nt, Artificial Sequence
  Description of Artificial Sequence: Synthetic oligonucleotide
  Sense strand starting at position 734 of SEQ ID NO: 915883
ggucauaucccagaucuau

SEQ ID NO: 1113457 - RNA, 19 nt, Artificial Sequence
  Description of Artificial Sequence: Synthetic oligonucleotide
  Antisense strand to SEQ ID NO: 1113456
auagaucugggauaugacc

SEQ ID NO: 1113458 - RNA, 19 nt, Artificial Sequence
  Description of Artificial Sequence: Synthetic oligonucleotide
  Sense strand starting at position 1081 of SEQ ID NO: 915883
agcuguagagcccaaacau

SEQ ID NO: 1113459 - RNA, 19 nt, Artificial Sequence
  Description of Artificial Sequence: Synthetic oligonucleotide
  Antisense strand to SEQ ID NO: 1113458
auguuugggcucuacagcu

SEQ ID NO: 1113460 - RNA, 19 nt, Artificial Sequence
  Description of Artificial Sequence: Synthetic oligonucleotide
  Sense strand starting at position 1191 of SEQ ID NO: 915883
ugacuuugggugcagaaau

SEQ ID NO: 1113461 - RNA, 19 nt, Artificial Sequence
  Description of Artificial Sequence: Synthetic oligonucleotide
  Antisense strand to SEQ ID NO: 1113460
auuucugcacccaaaguca

SEQ ID NO: 1113462 - RNA, 19 nt, Artificial Sequence
  Description of Artificial Sequence: Synthetic oligonucleotide
  Sense strand starting at position 1273 of SEQ ID NO: 915883
acauuugucugcuuuccau

SEQ ID NO: 1113463 - RNA, 19 nt, Artificial Sequence
  Description of Artificial Sequence: Synthetic oligonucleotide
  Antisense strand to SEQ ID NO: 1113462
auggaaagcagacaaaugu

SEQ ID NO: 1113464 - RNA, 19 nt, Artificial Sequence
  Description of Artificial Sequence: Synthetic oligonucleotide
  Sense strand starting at position 1279 of SEQ ID NO: 915883
gucugcuuuccauaugaag

SEQ ID NO: 1113465 - RNA, 19 nt, Artificial Sequence
  Description of Artificial Sequence: Synthetic oligonucleotide
  Antisense strand to SEQ ID NO: 1113464
cuucauauggaaagcagac

SEQ ID NO: 1113466 - RNA, 19 nt, Artificial Sequence
  Description of Artificial Sequence: Synthetic oligonucleotide
  Sense strand starting at position 1814 of SEQ ID NO: 915883
gguaaaggccuaggaaaua

SEQ ID NO: 1113467 - RNA, 19 nt, Artificial Sequence
  Description of Artificial Sequence: Synthetic oligonucleotide
  Antisense strand to SEQ ID NO: 1113466
uauuuccuaggccuuuacc

SEQ ID NO: 1113468 - RNA, 19 nt, Artificial Sequence
  Description of Artificial Sequence: Synthetic oligonucleotide
  Sense strand starting at position 1934 of SEQ ID NO: 915883
acaguccagucauugagaa

SEQ ID NO: 1113469 - RNA, 19 nt, Artificial Sequence
  Description of Artificial Sequence: Synthetic oligonucleotide
  Antisense strand to SEQ ID NO: 1113468
uucucaaugacuggacugu

SEQ ID NO: 1113470 - RNA, 19 nt, Artificial Sequence
  Description of Artificial Sequence: Synthetic oligonucleotide
  Sense strand starting at position 1935 of SEQ ID NO: 915883
caguccagucauugagaag

SEQ ID NO: 1113471 - RNA, 19 nt, Artificial Sequence
  Description of Artificial Sequence: Synthetic oligonucleotide
  Antisense strand to SEQ ID NO: 1113470
cuucucaaugacuggacug

SEQ ID NO: 1113472 - RNA, 19 nt, Artificial Sequence
  Description of Artificial Sequence: Synthetic oligonucleotide
  Sense strand starting at position 1936 of SEQ ID NO: 915883
aguccagucauugagaagu

SEQ ID NO: 1113473 - RNA, 19 nt, Artificial Sequence
  Description of Artificial Sequence: Synthetic oligonucleotide
  Antisense strand to SEQ ID NO: 1113472
acuucucaaugacuggacu

SEQ ID NO: 1113474 - RNA, 19 nt, Artificial Sequence
  Description of Artificial Sequence: Synthetic oligonucleotide
  Sense strand starting at position 1942 of SEQ ID NO: 915883
gucauugagaagugagacu

SEQ ID NO: 1113475 - RNA, 19 nt, Artificial Sequence
  Description of Artificial Sequence: Synthetic oligonucleotide
  Antisense strand to SEQ ID NO: 1113474
agucucacuucucaaugac

SEQ ID NO: 1113476 - RNA, 19 nt, Artificial Sequence
  Description of Artificial Sequence: Synthetic oligonucleotide
  Sense strand starting at position 2039 of SEQ ID NO: 915883
cccuaugaucagugaagga

SEQ ID NO: 1113477 - RNA, 19 nt, Artificial Sequence
  Description of Artificial Sequence: Synthetic oligonucleotide
  Antisense strand to SEQ ID NO: 1113476
uccuucacugaucauaggg

SEQ ID NO: 1113478 - RNA, 19 nt, Artificial Sequence
  Description of Artificial Sequence: Synthetic oligonucleotide
  Sense strand starting at position 2043 of SEQ ID NO: 915883
augaucagugaaggaugua

SEQ ID NO: 1113479 - RNA, 19 nt, Artificial Sequence
  Description of Artificial Sequence: Synthetic oligonucleotide
  Antisense strand to SEQ ID NO: 1113478
uacauccuucacugaucau

SEQ ID NO: 1113480 - RNA, 19 nt, Artificial Sequence
  Description of Artificial Sequence: Synthetic oligonucleotide
  Sense strand starting at position 2046 of SEQ ID NO: 915883
aucagugaaggauguaauc

SEQ ID NO: 1113481 - RNA, 19 nt, Artificial Sequence
  Description of Artificial Sequence: Synthetic oligonucleotide
  Antisense strand to SEQ ID NO: 1113480
gauuacauccuucacugau

SEQ ID NO: 1113482 - RNA, 19 nt, Artificial Sequence
  Description of Artificial Sequence: Synthetic oligonucleotide
  Sense strand starting at position 2082 of SEQ ID NO: 915883
auuuauacuggcugcucaa

SEQ ID NO: 1113483 - RNA, 19 nt, Artificial Sequence
  Description of Artificial Sequence: Synthetic oligonucleotide
  Antisense strand to SEQ ID NO: 1113482
uugagcagccaguauaaau

SEQ ID NO: 1113484 - RNA, 19 nt, Artificial Sequence
  Description of Artificial Sequence: Synthetic oligonucleotide
  Sense strand starting at position 2229 of SEQ ID NO: 915883
agaugagauguuugugaua

SEQ ID NO: 1113485 - RNA, 19 nt, Artificial Sequence
  Description of Artificial Sequence: Synthetic oligonucleotide
  Antisense strand to SEQ ID NO: 1113484
uaucacaaacaucucaucu

SEQ ID NO: 1113486 - RNA, 19 nt, Artificial Sequence
  Description of Artificial Sequence: Synthetic oligonucleotide
  Sense strand starting at position 2638 of SEQ ID NO: 915883
gcuaacacuggucacauau

SEQ ID NO: 1113487 - RNA, 19 nt, Artificial Sequence
  Description of Artificial Sequence: Synthetic oligonucleotide
  Antisense strand to SEQ ID NO: 1113486
auaugugaccaguguuagc

SEQ ID NO: 1113488 - RNA, 19 nt, Artificial Sequence
  Description of Artificial Sequence: Synthetic oligonucleotide
  Sense strand starting at position 2698 of SEQ ID NO: 915883
cuaaguggucuccaacauu

SEQ ID NO: 1113489 - RNA, 19 nt, Artificial Sequence
  Description of Artificial Sequence: Synthetic oligonucleotide
  Antisense strand to SEQ ID NO: 1113488
aauguuggagaccacuuag

SEQ ID NO: 1113490 - RNA, 19 nt, Artificial Sequence
  Description of Artificial Sequence: Synthetic oligonucleotide
  Sense strand starting at position 2732 of SEQ ID NO: 915883
ugugccauccuugaauaca

SEQ ID NO: 1113491 - RNA, 19 nt, Artificial Sequence
  Description of Artificial Sequence: Synthetic oligonucleotide
  Antisense strand to SEQ ID NO: 1113490
uguauucaaggauggcaca

SEQ ID NO: 1113492 - RNA, 19 nt, Artificial Sequence
  Description of Artificial Sequence: Synthetic oligonucleotide
  Sense strand starting at position 2762 of SEQ ID NO: 915883
ggagacucauuacuuaugu

SEQ ID NO: 1113493 - RNA, 19 nt, Artificial Sequence
  Description of Artificial Sequence: Synthetic oligonucleotide
  Antisense strand to SEQ ID NO: 1113492
acauaaguaaugagucucc

SEQ ID NO: 1113494 - RNA, 19 nt, Artificial Sequence
  Description of Artificial Sequence: Synthetic oligonucleotide
  Sense strand starting at position 2767 of SEQ ID NO: 915883
cucauuacuuaugugauau

SEQ ID NO: 1113495 - RNA, 19 nt, Artificial Sequence
  Description of Artificial Sequence: Synthetic oligonucleotide
  Antisense strand to SEQ ID NO: 1113494
auaucacauaaguaaugag

SEQ ID NO: 1113496 - RNA, 19 nt, Artificial Sequence
  Description of Artificial Sequence: Synthetic oligonucleotide
  Sense strand starting at position 2778 of SEQ ID NO: 915883
ugugauauugaauagcuga

SEQ ID NO: 1113497 - RNA, 19 nt, Artificial Sequence
  Description of Artificial Sequence: Synthetic oligonucleotide
  Antisense strand to SEQ ID NO: 1113496
ucagcuauucaauaucaca

SEQ ID NO: 1113498 - RNA, 19 nt, Artificial Sequence
  Description of Artificial Sequence: Synthetic oligonucleotide
  Sense strand starting at position 2793 of SEQ ID NO: 915883
cugaaaugagccgggauca

SEQ ID NO: 1113499 - RNA, 19 nt, Artificial Sequence
  Description of Artificial Sequence: Synthetic oligonucleotide
  Antisense strand to SEQ ID NO: 1113498
ugaucccggcucauuucag

SEQ ID NO: 1113500 - RNA, 19 nt, Artificial Sequence
  Description of Artificial Sequence: Synthetic oligonucleotide
  Sense strand starting at position 2794 of SEQ ID NO: 915883
ugaaaugagccgggaucaa

SEQ ID NO: 1113501 - RNA, 19 nt, Artificial Sequence
  Description of Artificial Sequence: Synthetic oligonucleotide
  Antisense strand to SEQ ID NO: 1113500
uugaucccggcucauuuca

SEQ ID NO: 1113502 - RNA, 19 nt, Artificial Sequence
  Description of Artificial Sequence: Synthetic oligonucleotide
  Sense strand starting at position 2806 of SEQ ID NO: 915883
ggaucaauuccuggaucau

SEQ ID NO: 1113503 - RNA, 19 nt, Artificial Sequence
  Description of Artificial Sequence: Synthetic oligonucleotide
  Antisense strand to SEQ ID NO: 1113502
augauccaggaauugaucc

SEQ ID NO: 1113504 - RNA, 19 nt, Artificial Sequence
  Description of Artificial Sequence: Synthetic oligonucleotide
  Sense strand starting at position 2852 of SEQ ID NO: 915883
uguggaacauuugauagau

SEQ ID NO: 1113505 - RNA, 19 nt, Artificial Sequence
  Description of Artificial Sequence: Synthetic oligonucleotide
  Antisense strand to SEQ ID NO: 1113504
aucuaucaaauguuccaca

SEQ ID NO: 1113506 - RNA, 19 nt, Artificial Sequence
  Description of Artificial Sequence: Synthetic oligonucleotide
  Sense strand starting at position 2854 of SEQ ID NO: 915883
uggaacauuugauagauua

SEQ ID NO: 1113507 - RNA, 19 nt, Artificial Sequence
  Description of Artificial Sequence: Synthetic oligonucleotide
  Antisense strand to SEQ ID NO: 1113506
uaaucuaucaaauguucca

SEQ ID NO: 1113508 - RNA, 19 nt, Artificial Sequence
  Description of Artificial Sequence: Synthetic oligonucleotide
  Sense strand starting at position 3020 of SEQ ID NO: 915883
ggagaugguuucucagcaa

SEQ ID NO: 1113509 - RNA, 19 nt, Artificial Sequence
  Description of Artificial Sequence: Synthetic oligonucleotide
  Antisense strand to SEQ ID NO: 1113508
uugcugagaaaccaucucc

SEQ ID NO: 1113510 - RNA, 19 nt, Artificial Sequence
  Description of Artificial Sequence: Synthetic oligonucleotide
  Sense strand starting at position 3159 of SEQ ID NO: 915883
acuacuagauucgucacaa

SEQ ID NO: 1113511 - RNA, 19 nt, Artificial Sequence
  Description of Artificial Sequence: Synthetic oligonucleotide
  Antisense strand to SEQ ID NO: 1113510
uugugacgaaucuaguagu

SEQ ID NO: 1113512 - RNA, 19 nt, Artificial Sequence
  Description of Artificial Sequence: Synthetic oligonucleotide
  Sense strand starting at position 3368 of SEQ ID NO: 915883
guaagagaucuuggcagau

SEQ ID NO: 1113513 - RNA, 19 nt, Artificial Sequence
  Description of Artificial Sequence: Synthetic oligonucleotide
  Antisense strand to SEQ ID NO: 1113512
aucugccaagaucucuuac

SEQ ID NO: 1113514 - RNA, 19 nt, Artificial Sequence
  Description of Artificial Sequence: Synthetic oligonucleotide
  Sense strand starting at position 3400 of SEQ ID NO: 915883
agaggaaucuggcucucca

SEQ ID NO: 1113515 - RNA, 19 nt, Artificial Sequence
  Description of Artificial Sequence: Synthetic oligonucleotide
  Antisense strand to SEQ ID NO: 1113514
uggagagccagauuccucu

SEQ ID NO: 1113516 - RNA, 19 nt, Artificial Sequence
  Description of Artificial Sequence: Synthetic oligonucleotide
  Sense strand starting at position 3489 of SEQ ID NO: 915883
gucucauucugagcauuuc

SEQ ID NO: 1113517 - RNA, 19 nt, Artificial Sequence
  Description of Artificial Sequence: Synthetic oligonucleotide
  Antisense strand to SEQ ID NO: 1113516
gaaaugcucagaaugagac

SEQ ID NO: 1113518 - RNA, 19 nt, Artificial Sequence
  Description of Artificial Sequence: Synthetic oligonucleotide
  Sense strand starting at position 3886 of SEQ ID NO: 915883
gaaaguugauggcuuccaa

SEQ ID NO: 1113519 - RNA, 19 nt, Artificial Sequence
  Description of Artificial Sequence: Synthetic oligonucleotide
  Antisense strand to SEQ ID NO: 1113518
uuggaagccaucaacuuuc

SEQ ID NO: 1113520 - RNA, 19 nt, Artificial Sequence
  Description of Artificial Sequence: Synthetic oligonucleotide
  Sense strand starting at position 13 of SEQ ID NO: 915884
cagagaugcuagguauggu

SEQ ID NO: 1113521 - RNA, 19 nt, Artificial Sequence
  Description of Artificial Sequence: Synthetic oligonucleotide
  Antisense strand to SEQ ID NO: 1113520
accauaccuagcaucucug

SEQ ID NO: 1113522 - RNA, 19 nt, Artificial Sequence
  Description of Artificial Sequence: Synthetic oligonucleotide
  Sense strand starting at position 173 of SEQ ID NO: 915884
auguaauugcagugauucu

SEQ ID NO: 1113523 - RNA, 19 nt, Artificial Sequence
  Description of Artificial Sequence: Synthetic oligonucleotide
  Antisense strand to SEQ ID NO: 1113522
agaaucacugcaauuacau

SEQ ID NO: 1113524 - RNA, 19 nt, Artificial Sequence
  Description of Artificial Sequence: Synthetic oligonucleotide
  Sense strand starting at position 365 of SEQ ID NO: 915884
ucacuuuaauuugagaagu

SEQ ID NO: 1113525 - RNA, 19 nt, Artificial Sequence
  Description of Artificial Sequence: Synthetic oligonucleotide
  Antisense strand to SEQ ID NO: 1113524
acuucucaaauuaaaguga

SEQ ID NO: 1113526 - RNA, 19 nt, Artificial Sequence
  Description of Artificial Sequence: Synthetic oligonucleotide
  Sense strand starting at position 465 of SEQ ID NO: 915884
ggugauagucuugaacagu

SEQ ID NO: 1113527 - RNA, 19 nt, Artificial Sequence
  Description of Artificial Sequence: Synthetic oligonucleotide
  Antisense strand to SEQ ID NO: 1113526
acuguucaagacuaucacc

SEQ ID NO: 1113528 - RNA, 19 nt, Artificial Sequence
  Description of Artificial Sequence: Synthetic oligonucleotide
  Sense strand starting at position 506 of SEQ ID NO: 915884
ugagacacaucuguaaauu

SEQ ID NO: 1113529 - RNA, 19 nt, Artificial Sequence
  Description of Artificial Sequence: Synthetic oligonucleotide
  Antisense strand to SEQ ID NO: 1113528
aauuuacagaugugucuca

SEQ ID NO: 1113530 - RNA, 19 nt, Artificial Sequence
  Description of Artificial Sequence: Synthetic oligonucleotide
  Sense strand starting at position 514 of SEQ ID NO: 915884
aucuguaaauugucuagua

SEQ ID NO: 1113531 - RNA, 19 nt, Artificial Sequence
  Description of Artificial Sequence: Synthetic oligonucleotide
  Antisense strand to SEQ ID NO: 1113530
uacuagacaauuuacagau

SEQ ID NO: 1113532 - RNA, 19 nt, Artificial Sequence
  Description of Artificial Sequence: Synthetic oligonucleotide
  Sense strand starting at position 515 of SEQ ID NO: 915884
ucuguaaauugucuaguaa

SEQ ID NO: 1113533 - RNA, 19 nt, Artificial Sequence
  Description of Artificial Sequence: Synthetic oligonucleotide
  Antisense strand to SEQ ID NO: 1113532
uuacuagacaauuuacaga

SEQ ID NO: 1113534 - RNA, 19 nt, Artificial Sequence
  Description of Artificial Sequence: Synthetic oligonucleotide
  Sense strand starting at position 516 of SEQ ID NO: 915884
cuguaaauugucuaguaac

SEQ ID NO: 1113535 - RNA, 19 nt, Artificial Sequence
  Description of Artificial Sequence: Synthetic oligonucleotide
  Antisense strand to SEQ ID NO: 1113534
guuacuagacaauuuacag

SEQ ID NO: 1113536 - RNA, 19 nt, Artificial Sequence
  Description of Artificial Sequence: Synthetic oligonucleotide
  Sense strand starting at position 684 of SEQ ID NO: 915884
aaacgugguguuuaucuca

SEQ ID NO: 1113537 - RNA, 19 nt, Artificial Sequence
  Description of Artificial Sequence: Synthetic oligonucleotide
  Antisense strand to SEQ ID NO: 1113536
ugagauaaacaccacguuu

SEQ ID NO: 1113538 - RNA, 19 nt, Artificial Sequence
  Description of Artificial Sequence: Synthetic oligonucleotide
  Sense strand starting at position 749 of SEQ ID NO: 915884
gccacacagcucuacaaga

SEQ ID NO: 1113539 - RNA, 19 nt, Artificial Sequence
  Description of Artificial Sequence: Synthetic oligonucleotide
  Antisense strand to SEQ ID NO: 1113538
ucuuguagagcuguguggc

SEQ ID NO: 1113540 - RNA, 19 nt, Artificial Sequence
  Description of Artificial Sequence: Synthetic oligonucleotide
  Sense strand starting at position 769 of SEQ ID NO: 915884
gcuaaugagcaaggaaagu

SEQ ID NO: 1113541 - RNA, 19 nt, Artificial Sequence
  Description of Artificial Sequence: Synthetic oligonucleotide
  Antisense strand to SEQ ID NO: 1113540
acuuuccuugcucauuagc

SEQ ID NO: 1113542 - RNA, 19 nt, Artificial Sequence
  Description of Artificial Sequence: Synthetic oligonucleotide
  Sense strand starting at position 778 of SEQ ID NO: 915884
caaggaaaguggcuuaauu

SEQ ID NO: 1113543 - RNA, 19 nt, Artificial Sequence
  Description of Artificial Sequence: Synthetic oligonucleotide
  Antisense strand to SEQ ID NO: 1113542
aauuaagccacuuuccuug

SEQ ID NO: 1113544 - RNA, 19 nt, Artificial Sequence
  Description of Artificial Sequence: Synthetic oligonucleotide
  Sense strand starting at position 808 of SEQ ID NO: 915884
cagaaaugccaagguugga

SEQ ID NO: 1113545 - RNA, 19 nt, Artificial Sequence
  Description of Artificial Sequence: Synthetic oligonucleotide
  Antisense strand to SEQ ID NO: 1113544
uccaaccuuggcauuucug

SEQ ID NO: 1113546 - RNA, 19 nt, Artificial Sequence
  Description of Artificial Sequence: Synthetic oligonucleotide
  Sense strand starting at position 848 of SEQ ID NO: 915884
ggaauagacuuugaaauca

SEQ ID NO: 1113547 - RNA, 19 nt, Artificial Sequence
  Description of Artificial Sequence: Synthetic oligonucleotide
  Antisense strand to SEQ ID NO: 1113546
ugauuucaaagucuauucc

SEQ ID NO: 1113548 - RNA, 19 nt, Artificial Sequence
  Description of Artificial Sequence: Synthetic oligonucleotide
  Sense strand starting at position 892 of SEQ ID NO: 915884
gaaucuugucuacaacguu

SEQ ID NO: 1113549 - RNA, 19 nt, Artificial Sequence
  Description of Artificial Sequence: Synthetic oligonucleotide
  Antisense strand to SEQ ID NO: 1113548
aacguuguagacaagauuc

SEQ ID NO: 1113550 - RNA, 19 nt, Artificial Sequence
  Description of Artificial Sequence: Synthetic oligonucleotide
  Sense strand starting at position 929 of SEQ ID NO: 915884
aagacuagugcuugacuca

SEQ ID NO: 1113551 - RNA, 19 nt, Artificial Sequence
  Description of Artificial Sequence: Synthetic oligonucleotide
  Antisense strand to SEQ ID NO: 1113550
ugagucaagcacuagucuu

SEQ ID NO: 1113552 - RNA, 19 nt, Artificial Sequence
  Description of Artificial Sequence: Synthetic oligonucleotide
  Sense strand starting at position 1119 of SEQ ID NO: 915884
ugaacacagccuugcuaaa

SEQ ID NO: 1113553 - RNA, 19 nt, Artificial Sequence
  Description of Artificial Sequence: Synthetic oligonucleotide
  Antisense strand to SEQ ID NO: 1113552
uuuagcaaggcuguguuca

SEQ ID NO: 1113554 - RNA, 19 nt, Artificial Sequence
  Description of Artificial Sequence: Synthetic oligonucleotide
  Sense strand starting at position 1139 of SEQ ID NO: 915884
gcauaaucagguugguuua

SEQ ID NO: 1113555 - RNA, 19 nt, Artificial Sequence
  Description of Artificial Sequence: Synthetic oligonucleotide
  Antisense strand to SEQ ID NO: 1113554
uaaaccaaccugauuaugc

SEQ ID NO: 1113556 - RNA, 19 nt, Artificial Sequence
  Description of Artificial Sequence: Synthetic oligonucleotide
  Sense strand starting at position 1178 of SEQ ID NO: 915884
uuaagagguuuguuaggcu

SEQ ID NO: 1113557 - RNA, 19 nt, Artificial Sequence
  Description of Artificial Sequence: Synthetic oligonucleotide
  Antisense strand to SEQ ID NO: 1113556
agccuaacaaaccucuuaa

SEQ ID NO: 1113558 - RNA, 19 nt, Artificial Sequence
  Description of Artificial Sequence: Synthetic oligonucleotide
  Sense strand starting at position 1182 of SEQ ID NO: 915884
gagguuuguuaggcuaaga

SEQ ID NO: 1113559 - RNA, 19 nt, Artificial Sequence
  Description of Artificial Sequence: Synthetic oligonucleotide
  Antisense strand to SEQ ID NO: 1113558
ucuuagccuaacaaaccuc

SEQ ID NO: 1113560 - RNA, 19 nt, Artificial Sequence
  Description of Artificial Sequence: Synthetic oligonucleotide
  Sense strand starting at position 1229 of SEQ ID NO: 915884
ugucaccacugaguuagaa

SEQ ID NO: 1113561 - RNA, 19 nt, Artificial Sequence
  Description of Artificial Sequence: Synthetic oligonucleotide
  Antisense strand to SEQ ID NO: 1113560
uucuaacucaguggugaca

SEQ ID NO: 1113562 - RNA, 19 nt, Artificial Sequence
  Description of Artificial Sequence: Synthetic oligonucleotide
  Sense strand starting at position 1238 of SEQ ID NO: 915884
ugaguuagaaacuguuaga

SEQ ID NO: 1113563 - RNA, 19 nt, Artificial Sequence
  Description of Artificial Sequence: Synthetic oligonucleotide
  Antisense strand to SEQ ID NO: 1113562
ucuaacaguuucuaacuca

SEQ ID NO: 1113564 - RNA, 19 nt, Artificial Sequence
  Description of Artificial Sequence: Synthetic oligonucleotide
  Sense strand starting at position 1257 of SEQ ID NO: 915884
aggcuagugcuggauaucu

SEQ ID NO: 1113565 - RNA, 19 nt, Artificial Sequence
  Description of Artificial Sequence: Synthetic oligonucleotide
  Antisense strand to SEQ ID NO: 1113564
agauauccagcacuagccu

SEQ ID NO: 1113566 - RNA, 19 nt, Artificial Sequence
  Description of Artificial Sequence: Synthetic oligonucleotide
  Sense strand starting at position 1266 of SEQ ID NO: 915884
cuggauaucugguuaaacu

SEQ ID NO: 1113567 - RNA, 19 nt, Artificial Sequence
  Description of Artificial Sequence: Synthetic oligonucleotide
  Antisense strand to SEQ ID NO: 1113566
aguuuaaccagauauccag

SEQ ID NO: 1113568 - RNA, 19 nt, Artificial Sequence
  Description of Artificial Sequence: Synthetic oligonucleotide
  Sense strand starting at position 1338 of SEQ ID NO: 915884
augcaaauuucgcuaauau

SEQ ID NO: 1113569 - RNA, 19 nt, Artificial Sequence
  Description of Artificial Sequence: Synthetic oligonucleotide
  Antisense strand to SEQ ID NO: 1113568
auauuagcgaaauuugcau

SEQ ID NO: 1113570 - RNA, 19 nt, Artificial Sequence
  Description of Artificial Sequence: Synthetic oligonucleotide
  Sense strand starting at position 1393 of SEQ ID NO: 915884
agagaaucauuugacuuau

SEQ ID NO: 1113571 - RNA, 19 nt, Artificial Sequence
  Description of Artificial Sequence: Synthetic oligonucleotide
  Antisense strand to SEQ ID NO: 1113570
auaagucaaaugauucucu

SEQ ID NO: 1113572 - RNA, 19 nt, Artificial Sequence
  Description of Artificial Sequence: Synthetic oligonucleotide
  Sense strand starting at position 1513 of SEQ ID NO: 915884
guacacacgcuuuaucaaa

SEQ ID NO: 1113573 - RNA, 19 nt, Artificial Sequence
  Description of Artificial Sequence: Synthetic oligonucleotide
  Antisense strand to SEQ ID NO: 1113572
uuugauaaagcguguguac

SEQ ID NO: 1113574 - RNA, 19 nt, Artificial Sequence
  Description of Artificial Sequence: Synthetic oligonucleotide
  Sense strand starting at position 1571 of SEQ ID NO: 915884
cucauuucguaucuugagu

SEQ ID NO: 1113575 - RNA, 19 nt, Artificial Sequence
  Description of Artificial Sequence: Synthetic oligonucleotide
  Antisense strand to SEQ ID NO: 1113574
acucaagauacgaaaugag

SEQ ID NO: 1113576 - RNA, 19 nt, Artificial Sequence
  Description of Artificial Sequence: Synthetic oligonucleotide
  Sense strand starting at position 1669 of SEQ ID NO: 915884
caccgacuggcugaauuau

SEQ ID NO: 1113577 - RNA, 19 nt, Artificial Sequence
  Description of Artificial Sequence: Synthetic oligonucleotide
  Antisense strand to SEQ ID NO: 1113576
auaauucagccagucggug

SEQ ID NO: 1113578 - RNA, 19 nt, Artificial Sequence
  Description of Artificial Sequence: Synthetic oligonucleotide
  Sense strand starting at position 1681 of SEQ ID NO: 915884
gaauuaugauggguucuga

SEQ ID NO: 1113579 - RNA, 19 nt, Artificial Sequence
  Description of Artificial Sequence: Synthetic oligonucleotide
  Antisense strand to SEQ ID NO: 1113578
ucagaacccaucauaauuc

SEQ ID NO: 1113580 - RNA, 19 nt, Artificial Sequence
  Description of Artificial Sequence: Synthetic oligonucleotide
  Sense strand starting at position 1696 of SEQ ID NO: 915884
cugaguggcgguugaaaua

SEQ ID NO: 1113581 - RNA, 19 nt, Artificial Sequence
  Description of Artificial Sequence: Synthetic oligonucleotide
  Antisense strand to SEQ ID NO: 1113580
uauuucaaccgccacucag

SEQ ID NO: 1113582 - RNA, 19 nt, Artificial Sequence
  Description of Artificial Sequence: Synthetic oligonucleotide
  Sense strand starting at position 2596 of SEQ ID NO: 915884
gggcgagaauguuugugaa

SEQ ID NO: 1113583 - RNA, 19 nt, Artificial Sequence
  Description of Artificial Sequence: Synthetic oligonucleotide
  Antisense strand to SEQ ID NO: 1113582
uucacaaacauucucgccc

SEQ ID NO: 1113584 - RNA, 19 nt, Artificial Sequence
  Description of Artificial Sequence: Synthetic oligonucleotide
  Sense strand starting at position 2598 of SEQ ID NO: 915884
gcgagaauguuugugaaau

SEQ ID NO: 1113585 - RNA, 19 nt, Artificial Sequence
  Description of Artificial Sequence: Synthetic oligonucleotide
  Antisense strand to SEQ ID NO: 1113584
auuucacaaacauucucgc

SEQ ID NO: 1113586 - RNA, 19 nt, Artificial Sequence
  Description of Artificial Sequence: Synthetic oligonucleotide
  Sense strand starting at position 2779 of SEQ ID NO: 915884
uucucaacguuccuuuaga

SEQ ID NO: 1113587 - RNA, 19 nt, Artificial Sequence
  Description of Artificial Sequence: Synthetic oligonucleotide
  Antisense strand to SEQ ID NO: 1113586
ucuaaaggaacguugagaa

SEQ ID NO: 1113588 - RNA, 19 nt, Artificial Sequence
  Description of Artificial Sequence: Synthetic oligonucleotide
  Sense strand starting at position 2780 of SEQ ID NO: 915884
ucucaacguuccuuuagag

SEQ ID NO: 1113589 - RNA, 19 nt, Artificial Sequence
  Description of Artificial Sequence: Synthetic oligonucleotide
  Antisense strand to SEQ ID NO: 1113588
cucuaaaggaacguugaga

SEQ ID NO: 1113590 - RNA, 19 nt, Artificial Sequence
  Description of Artificial Sequence: Synthetic oligonucleotide
  Sense strand starting at position 3126 of SEQ ID NO: 915884
ggguguggcccaggugaaa

SEQ ID NO: 1113591 - RNA, 19 nt, Artificial Sequence
  Description of Artificial Sequence: Synthetic oligonucleotide
  Antisense strand to SEQ ID NO: 1113590
uuucaccugggccacaccc

SEQ ID NO: 1113592 - RNA, 19 nt, Artificial Sequence
  Description of Artificial Sequence: Synthetic oligonucleotide
  Sense strand starting at position 3226 of SEQ ID NO: 915884
gugcaaagagcuugagaga

SEQ ID NO: 1113593 - RNA, 19 nt, Artificial Sequence
  Description of Artificial Sequence: Synthetic oligonucleotide
  Antisense strand to SEQ ID NO: 1113592
ucucucaagcucuuugcac

SEQ ID NO: 1113594 - RNA, 19 nt, Artificial Sequence
  Description of Artificial Sequence: Synthetic oligonucleotide
  Sense strand starting at position 3229 of SEQ ID NO: 915884
caaagagcuugagagaaga

SEQ ID NO: 1113595 - RNA, 19 nt, Artificial Sequence
  Description of Artificial Sequence: Synthetic oligonucleotide
  Antisense strand to SEQ ID NO: 1113594
ucuucucucaagcucuuug

SEQ ID NO: 1113596 - RNA, 19 nt, Artificial Sequence
  Description of Artificial Sequence: Synthetic oligonucleotide
  Sense strand starting at position 3815 of SEQ ID NO: 915884
aggaaaguuucugagaaac

SEQ ID NO: 1113597 - RNA, 19 nt, Artificial Sequence
  Description of Artificial Sequence: Synthetic oligonucleotide
  Antisense strand to SEQ ID NO: 1113596
guuucucagaaacuuuccu

SEQ ID NO: 1113598 - RNA, 19 nt, Artificial Sequence
  Description of Artificial Sequence: Synthetic oligonucleotide
  Sense strand starting at position 3915 of SEQ ID NO: 915884
gcacguuacagaugaggga

SEQ ID NO: 1113599 - RNA, 19 nt, Artificial Sequence
  Description of Artificial Sequence: Synthetic oligonucleotide
  Antisense strand to SEQ ID NO: 1113598
ucccucaucuguaacgugc

SEQ ID NO: 1113600 - RNA, 19 nt, Artificial Sequence
  Description of Artificial Sequence: Synthetic oligonucleotide
  Sense strand starting at position 779 of SEQ ID NO: 915885
ggaacuuggcacgaguuca

SEQ ID NO: 1113601 - RNA, 19 nt, Artificial Sequence
  Description of Artificial Sequence: Synthetic oligonucleotide
  Antisense strand to SEQ ID NO: 1113600
ugaacucgugccaaguucc

SEQ ID NO: 1113602 - RNA, 19 nt, Artificial Sequence
  Description of Artificial Sequence: Synthetic oligonucleotide
  Sense strand starting at position 843 of SEQ ID NO: 915885
ggaucaugagacgaguucu

SEQ ID NO: 1113603 - RNA, 19 nt, Artificial Sequence
  Description of Artificial Sequence: Synthetic oligonucleotide
  Antisense strand to SEQ ID NO: 1113602
agaacucgucucaugaucc

SEQ ID NO: 1113604 - RNA, 19 nt, Artificial Sequence
  Description of Artificial Sequence: Synthetic oligonucleotide
  Sense strand starting at position 849 of SEQ ID NO: 915885
ugagacgaguucucaaaga

SEQ ID NO: 1113605 - RNA, 19 nt, Artificial Sequence
  Description of Artificial Sequence: Synthetic oligonucleotide
  Antisense strand to SEQ ID NO: 1113604
ucuuugagaacucgucuca

SEQ ID NO: 1113606 - RNA, 19 nt, Artificial Sequence
  Description of Artificial Sequence: Synthetic oligonucleotide
  Sense strand starting at position 905 of SEQ ID NO: 915885
aggaccuuaucucugcaua

SEQ ID NO: 1113607 - RNA, 19 nt, Artificial Sequence
  Description of Artificial Sequence: Synthetic oligonucleotide
  Antisense strand to SEQ ID NO: 1113606
uaugcagagauaagguccu

SEQ ID NO: 1113608 - RNA, 19 nt, Artificial Sequence
  Description of Artificial Sequence: Synthetic oligonucleotide
  Sense strand starting at position 906 of SEQ ID NO: 915885
ggaccuuaucucugcauau

SEQ ID NO: 1113609 - RNA, 19 nt, Artificial Sequence
  Description of Artificial Sequence: Synthetic oligonucleotide
  Antisense strand to SEQ ID NO: 1113608
auaugcagagauaaggucc

SEQ ID NO: 1113610 - RNA, 19 nt, Artificial Sequence
  Description of Artificial Sequence: Synthetic oligonucleotide
  Sense strand starting at position 910 of SEQ ID NO: 915885
cuuaucucugcauauggaa

SEQ ID NO: 1113611 - RNA, 19 nt, Artificial Sequence
  Description of Artificial Sequence: Synthetic oligonucleotide
  Antisense strand to SEQ ID NO: 1113610
uuccauaugcagagauaag

SEQ ID NO: 1113612 - RNA, 19 nt, Artificial Sequence
  Description of Artificial Sequence: Synthetic oligonucleotide
  Sense strand starting at position 1029 of SEQ ID NO: 915885
uuagaaggcuucuccagua

SEQ ID NO: 1113613 - RNA, 19 nt, Artificial Sequence
  Description of Artificial Sequence: Synthetic oligonucleotide
  Antisense strand to SEQ ID NO: 1113612
uacuggagaagccuucuaa

SEQ ID NO: 1113614 - RNA, 19 nt, Artificial Sequence
  Description of Artificial Sequence: Synthetic oligonucleotide
  Sense strand starting at position 1241 of SEQ ID NO: 915885
agaugcuugccugaagcaa

SEQ ID NO: 1113615 - RNA, 19 nt, Artificial Sequence
  Description of Artificial Sequence: Synthetic oligonucleotide
  Antisense strand to SEQ ID NO: 1113614
uugcuucaggcaagcaucu

SEQ ID NO: 1113616 - RNA, 19 nt, Artificial Sequence
  Description of Artificial Sequence: Synthetic oligonucleotide
  Sense strand starting at position 1308 of SEQ ID NO: 915885
aaaugagauuugcacuguu

SEQ ID NO: 1113617 - RNA, 19 nt, Artificial Sequence
  Description of Artificial Sequence: Synthetic oligonucleotide
  Antisense strand to SEQ ID NO: 1113616
aacagugcaaaucucauuu

SEQ ID NO: 1113618 - RNA, 19 nt, Artificial Sequence
  Description of Artificial Sequence: Synthetic oligonucleotide
  Sense strand starting at position 1449 of SEQ ID NO: 915885
augaguaaugguugaauaa

SEQ ID NO: 1113619 - RNA, 19 nt, Artificial Sequence
  Description of Artificial Sequence: Synthetic oligonucleotide
  Antisense strand to SEQ ID NO: 1113618
uuauucaaccauuacucau

SEQ ID NO: 1113620 - RNA, 19 nt, Artificial Sequence
  Description of Artificial Sequence: Synthetic oligonucleotide
  Sense strand starting at position 1508 of SEQ ID NO: 915885
guugaagccaacugaagau

SEQ ID NO: 1113621 - RNA, 19 nt, Artificial Sequence
  Description of Artificial Sequence: Synthetic oligonucleotide
  Antisense strand to SEQ ID NO: 1113620
aucuucaguuggcuucaac

SEQ ID NO: 1113622 - RNA, 19 nt, Artificial Sequence
  Description of Artificial Sequence: Synthetic oligonucleotide
  Sense strand starting at position 1521 of SEQ ID NO: 915885
gaagaugacugacaaagau

SEQ ID NO: 1113623 - RNA, 19 nt, Artificial Sequence
  Description of Artificial Sequence: Synthetic oligonucleotide
  Antisense strand to SEQ ID NO: 1113622
aucuuugucagucaucuuc

SEQ ID NO: 1113624 - RNA, 19 nt, Artificial Sequence
  Description of Artificial Sequence: Synthetic oligonucleotide
  Sense strand starting at position 1677 of SEQ ID NO: 915885
cugagcuaucagggcagaa

SEQ ID NO: 1113625 - RNA, 19 nt, Artificial Sequence
  Description of Artificial Sequence: Synthetic oligonucleotide
  Antisense strand to SEQ ID NO: 1113624
uucugcccugauagcucag

SEQ ID NO: 1113626 - RNA, 19 nt, Artificial Sequence
  Description of Artificial Sequence: Synthetic oligonucleotide
  Sense strand starting at position 1681 of SEQ ID NO: 915885
gcuaucagggcagaaauca

SEQ ID NO: 1113627 - RNA, 19 nt, Artificial Sequence
  Description of Artificial Sequence: Synthetic oligonucleotide
  Antisense strand to SEQ ID NO: 1113626
ugauuucugcccugauagc

SEQ ID NO: 1113628 - RNA, 19 nt, Artificial Sequence
  Description of Artificial Sequence: Synthetic oligonucleotide
  Sense strand starting at position 1707 of SEQ ID NO: 915885
cuggaagaauugccugcau

SEQ ID NO: 1113629 - RNA, 19 nt, Artificial Sequence
  Description of Artificial Sequence: Synthetic oligonucleotide
  Antisense strand to SEQ ID NO: 1113628
augcaggcaauucuuccag

SEQ ID NO: 1113630 - RNA, 19 nt, Artificial Sequence
  Description of Artificial Sequence: Synthetic oligonucleotide
  Sense strand starting at position 1709 of SEQ ID NO: 915885
ggaagaauugccugcauca

SEQ ID NO: 1113631 - RNA, 19 nt, Artificial Sequence
  Description of Artificial Sequence: Synthetic oligonucleotide
  Antisense strand to SEQ ID NO: 1113630
ugaugcaggcaauucuucc

SEQ ID NO: 1113632 - RNA, 19 nt, Artificial Sequence
  Description of Artificial Sequence: Synthetic oligonucleotide
  Sense strand starting at position 1885 of SEQ ID NO: 915885
gaauauaugccucaggguu

SEQ ID NO: 1113633 - RNA, 19 nt, Artificial Sequence
  Description of Artificial Sequence: Synthetic oligonucleotide
  Antisense strand to SEQ ID NO: 1113632
aacccugaggcauauauuc

SEQ ID NO: 1113634 - RNA, 19 nt, Artificial Sequence
  Description of Artificial Sequence: Synthetic oligonucleotide
  Sense strand starting at position 2005 of SEQ ID NO: 915885
gggaaagccuugucucauu

SEQ ID NO: 1113635 - RNA, 19 nt, Artificial Sequence
  Description of Artificial Sequence: Synthetic oligonucleotide
  Antisense strand to SEQ ID NO: 1113634
aaugagacaaggcuuuccc

SEQ ID NO: 1113636 - RNA, 19 nt, Artificial Sequence
  Description of Artificial Sequence: Synthetic oligonucleotide
  Sense strand starting at position 2016 of SEQ ID NO: 915885
gucucauucugagaauuug

SEQ ID NO: 1113637 - RNA, 19 nt, Artificial Sequence
  Description of Artificial Sequence: Synthetic oligonucleotide
  Antisense strand to SEQ ID NO: 1113636
caaauucucagaaugagac

SEQ ID NO: 1113638 - RNA, 19 nt, Artificial Sequence
  Description of Artificial Sequence: Synthetic oligonucleotide
  Sense strand starting at position 2130 of SEQ ID NO: 915885
gaacauuguguguucgcuu

SEQ ID NO: 1113639 - RNA, 19 nt, Artificial Sequence
  Description of Artificial Sequence: Synthetic oligonucleotide
  Antisense strand to SEQ ID NO: 1113638
aagcgaacacacaauguuc

SEQ ID NO: 1113640 - RNA, 19 nt, Artificial Sequence
  Description of Artificial Sequence: Synthetic oligonucleotide
  Sense strand starting at position 2207 of SEQ ID NO: 915885
ucauucucccagugggaua

SEQ ID NO: 1113641 - RNA, 19 nt, Artificial Sequence
  Description of Artificial Sequence: Synthetic oligonucleotide
  Antisense strand to SEQ ID NO: 1113640
uaucccacugggagaauga

SEQ ID NO: 1113642 - RNA, 19 nt, Artificial Sequence
  Description of Artificial Sequence: Synthetic oligonucleotide
  Sense strand starting at position 2227 of SEQ ID NO: 915885
ccugccuuuccugagaaua

SEQ ID NO: 1113643 - RNA, 19 nt, Artificial Sequence
  Description of Artificial Sequence: Synthetic oligonucleotide
  Antisense strand to SEQ ID NO: 1113642
uauucucaggaaaggcagg

SEQ ID NO: 1113644 - RNA, 19 nt, Artificial Sequence
  Description of Artificial Sequence: Synthetic oligonucleotide
  Sense strand starting at position 2232 of SEQ ID NO: 915885
cuuuccugagaauagcuaa

SEQ ID NO: 1113645 - RNA, 19 nt, Artificial Sequence
  Description of Artificial Sequence: Synthetic oligonucleotide
  Antisense strand to SEQ ID NO: 1113644
uuagcuauucucaggaaag

SEQ ID NO: 1113646 - RNA, 19 nt, Artificial Sequence
  Description of Artificial Sequence: Synthetic oligonucleotide
  Sense strand starting at position 2235 of SEQ ID NO: 915885
uccugagaauagcuaauga

SEQ ID NO: 1113647 - RNA, 19 nt, Artificial Sequence
  Description of Artificial Sequence: Synthetic oligonucleotide
  Antisense strand to SEQ ID NO: 1113646
ucauuagcuauucucagga

SEQ ID NO: 1113648 - RNA, 19 nt, Artificial Sequence
  Description of Artificial Sequence: Synthetic oligonucleotide
  Sense strand starting at position 2680 of SEQ ID NO: 915885
gcaauuguagcccauguga

SEQ ID NO: 1113649 - RNA, 19 nt, Artificial Sequence
  Description of Artificial Sequence: Synthetic oligonucleotide
  Antisense strand to SEQ ID NO: 1113648
ucacaugggcuacaauugc

SEQ ID NO: 1113650 - RNA, 19 nt, Artificial Sequence
  Description of Artificial Sequence: Synthetic oligonucleotide
  Sense strand starting at position 2682 of SEQ ID NO: 915885
aauuguagcccaugugaua

SEQ ID NO: 1113651 - RNA, 19 nt, Artificial Sequence
  Description of Artificial Sequence: Synthetic oligonucleotide
  Antisense strand to SEQ ID NO: 1113650
uaucacaugggcuacaauu

SEQ ID NO: 1113652 - RNA, 19 nt, Artificial Sequence
  Description of Artificial Sequence: Synthetic oligonucleotide
  Sense strand starting at position 2689 of SEQ ID NO: 915885
gcccaugugauagggaaau

SEQ ID NO: 1113653 - RNA, 19 nt, Artificial Sequence
  Description of Artificial Sequence: Synthetic oligonucleotide
  Antisense strand to SEQ ID NO: 1113652
auuucccuaucacaugggc

SEQ ID NO: 1113654 - RNA, 19 nt, Artificial Sequence
  Description of Artificial Sequence: Synthetic oligonucleotide
  Sense strand starting at position 2950 of SEQ ID NO: 915885
cguuucucacuugaauaag

SEQ ID NO: 1113655 - RNA, 19 nt, Artificial Sequence
  Description of Artificial Sequence: Synthetic oligonucleotide
  Antisense strand to SEQ ID NO: 1113654
cuuauucaagugagaaacg

SEQ ID NO: 1113656 - RNA, 19 nt, Artificial Sequence
  Description of Artificial Sequence: Synthetic oligonucleotide
  Sense strand starting at position 3001 of SEQ ID NO: 915885
ccuuaacagccguaucauu

SEQ ID NO: 1113657 - RNA, 19 nt, Artificial Sequence
  Description of Artificial Sequence: Synthetic oligonucleotide
  Antisense strand to SEQ ID NO: 1113656
aaugauacggcuguuaagg

SEQ ID NO: 1113658 - RNA, 19 nt, Artificial Sequence
  Description of Artificial Sequence: Synthetic oligonucleotide
  Sense strand starting at position 3011 of SEQ ID NO: 915885
cguaucauucuggaacaug

SEQ ID NO: 1113659 - RNA, 19 nt, Artificial Sequence
  Description of Artificial Sequence: Synthetic oligonucleotide
  Antisense strand to SEQ ID NO: 1113658
cauguuccagaaugauacg

SEQ ID NO: 1113660 - RNA, 19 nt, Artificial Sequence
  Description of Artificial Sequence: Synthetic oligonucleotide
  Sense strand starting at position 3161 of SEQ ID NO: 915885
guuacagcuccucaaagga

SEQ ID NO: 1113661 - RNA, 19 nt, Artificial Sequence
  Description of Artificial Sequence: Synthetic oligonucleotide
  Antisense strand to SEQ ID NO: 1113660
uccuuugaggagcuguaac

SEQ ID NO: 1113662 - RNA, 19 nt, Artificial Sequence
  Description of Artificial Sequence: Synthetic oligonucleotide
  Sense strand starting at position 3317 of SEQ ID NO: 915885
ggaacauaccacugauucu

SEQ ID NO: 1113663 - RNA, 19 nt, Artificial Sequence
  Description of Artificial Sequence: Synthetic oligonucleotide
  Antisense strand to SEQ ID NO: 1113662
agaaucagugguauguucc

SEQ ID NO: 1113664 - RNA, 19 nt, Artificial Sequence
  Description of Artificial Sequence: Synthetic oligonucleotide
  Sense strand starting at position 3425 of SEQ ID NO: 915885
ugaggaauauugcugggau

SEQ ID NO: 1113665 - RNA, 19 nt, Artificial Sequence
  Description of Artificial Sequence: Synthetic oligonucleotide
  Antisense strand to SEQ ID NO: 1113664
aucccagcaauauuccuca

SEQ ID NO: 1113666 - RNA, 19 nt, Artificial Sequence
  Description of Artificial Sequence: Synthetic oligonucleotide
  Sense strand starting at position 3427 of SEQ ID NO: 915885
aggaauauugcugggauac

SEQ ID NO: 1113667 - RNA, 19 nt, Artificial Sequence
  Description of Artificial Sequence: Synthetic oligonucleotide
  Antisense strand to SEQ ID NO: 1113666
guaucccagcaauauuccu

SEQ ID NO: 1113668 - RNA, 19 nt, Artificial Sequence
  Description of Artificial Sequence: Synthetic oligonucleotide
  Sense strand starting at position 3428 of SEQ ID NO: 915885
ggaauauugcugggauaca

SEQ ID NO: 1113669 - RNA, 19 nt, Artificial Sequence
  Description of Artificial Sequence: Synthetic oligonucleotide
  Antisense strand to SEQ ID NO: 1113668
uguaucccagcaauauucc

SEQ ID NO: 1113670 - RNA, 19 nt, Artificial Sequence
  Description of Artificial Sequence: Synthetic oligonucleotide
  Sense strand starting at position 3538 of SEQ ID NO: 915885
gcccauaucuuggaauuug

SEQ ID NO: 1113671 - RNA, 19 nt, Artificial Sequence
  Description of Artificial Sequence: Synthetic oligonucleotide
  Antisense strand to SEQ ID NO: 1113670
caaauuccaagauaugggc

SEQ ID NO: 1113672 - RNA, 19 nt, Artificial Sequence
  Description of Artificial Sequence: Synthetic oligonucleotide
  Sense strand starting at position 3584 of SEQ ID NO: 915885
cuuuguauuugccucuuua

SEQ ID NO: 1113673 - RNA, 19 nt, Artificial Sequence
  Description of Artificial Sequence: Synthetic oligonucleotide
  Antisense strand to SEQ ID NO: 1113672
uaaagaggcaaauacaaag

SEQ ID NO: 1113674 - RNA, 19 nt, Artificial Sequence
  Description of Artificial Sequence: Synthetic oligonucleotide
  Sense strand starting at position 3588 of SEQ ID NO: 915885
guauuugccucuuuaugga

SEQ ID NO: 1113675 - RNA, 19 nt, Artificial Sequence
  Description of Artificial Sequence: Synthetic oligonucleotide
  Antisense strand to SEQ ID NO: 1113674
uccauaaagaggcaaauac

SEQ ID NO: 1113676 - RNA, 19 nt, Artificial Sequence
  Description of Artificial Sequence: Synthetic oligonucleotide
  Sense strand starting at position 3629 of SEQ ID NO: 915885
gacaguuugggcuaaaguu

SEQ ID NO: 1113677 - RNA, 19 nt, Artificial Sequence
  Description of Artificial Sequence: Synthetic oligonucleotide
  Antisense strand to SEQ ID NO: 1113676
aacuuuagcccaaacuguc

SEQ ID NO: 1113678 - RNA, 19 nt, Artificial Sequence
  Description of Artificial Sequence: Synthetic oligonucleotide
  Sense strand starting at position 3666 of SEQ ID NO: 915885
ugguacuuuggccagucau

SEQ ID NO: 1113679 - RNA, 19 nt, Artificial Sequence
  Description of Artificial Sequence: Synthetic oligonucleotide
  Antisense strand to SEQ ID NO: 1113678
augacuggccaaaguacca

SEQ ID NO: 1113680 - RNA, 19 nt, Artificial Sequence
  Description of Artificial Sequence: Synthetic oligonucleotide
  Sense strand starting at position 26 of SEQ ID NO: 915886
ucuaaagcaccuugaagau

SEQ ID NO: 1113681 - RNA, 19 nt, Artificial Sequence
  Description of Artificial Sequence: Synthetic oligonucleotide
  Antisense strand to SEQ ID NO: 1113680
aucuucaaggugcuuuaga

SEQ ID NO: 1113682 - RNA, 19 nt, Artificial Sequence
  Description of Artificial Sequence: Synthetic oligonucleotide
  Sense strand starting at position 62 of SEQ ID NO: 915886
ucucucauucuguagaugu

SEQ ID NO: 1113683 - RNA, 19 nt, Artificial Sequence
  Description of Artificial Sequence: Synthetic oligonucleotide
  Antisense strand to SEQ ID NO: 1113682
acaucuacagaaugagaga

SEQ ID NO: 1113684 - RNA, 19 nt, Artificial Sequence
  Description of Artificial Sequence: Synthetic oligonucleotide
  Sense strand starting at position 73 of SEQ ID NO: 915886
guagauguucuguagauua

SEQ ID NO: 1113685 - RNA, 19 nt, Artificial Sequence
  Description of Artificial Sequence: Synthetic oligonucleotide
  Antisense strand to SEQ ID NO: 1113684
uaaucuacagaacaucuac

SEQ ID NO: 1113686 - RNA, 19 nt, Artificial Sequence
  Description of Artificial Sequence: Synthetic oligonucleotide
  Sense strand starting at position 151 of SEQ ID NO: 915886
gagcgugagagccagaauu

SEQ ID NO: 1113687 - RNA, 19 nt, Artificial Sequence
  Description of Artificial Sequence: Synthetic oligonucleotide
  Antisense strand to SEQ ID NO: 1113686
aauucuggcucucacgcuc

SEQ ID NO: 1113688 - RNA, 19 nt, Artificial Sequence
  Description of Artificial Sequence: Synthetic oligonucleotide
  Sense strand starting at position 153 of SEQ ID NO: 915886
gcgugagagccagaauuag

SEQ ID NO: 1113689 - RNA, 19 nt, Artificial Sequence
  Description of Artificial Sequence: Synthetic oligonucleotide
  Antisense strand to SEQ ID NO: 1113688
cuaauucuggcucucacgc

SEQ ID NO: 1113690 - RNA, 19 nt, Artificial Sequence
  Description of Artificial Sequence: Synthetic oligonucleotide
  Sense strand starting at position 222 of SEQ ID NO: 915886
gggcaaauccuuuaagcca

SEQ ID NO: 1113691 - RNA, 19 nt, Artificial Sequence
  Description of Artificial Sequence: Synthetic oligonucleotide
  Antisense strand to SEQ ID NO: 1113690
uggcuuaaaggauuugccc

SEQ ID NO: 1113692 - RNA, 19 nt, Artificial Sequence
  Description of Artificial Sequence: Synthetic oligonucleotide
  Sense strand starting at position 263 of SEQ ID NO: 915886
uuauguuagagcuggaaau

SEQ ID NO: 1113693 - RNA, 19 nt, Artificial Sequence
  Description of Artificial Sequence: Synthetic oligonucleotide
  Antisense strand to SEQ ID NO: 1113692
auuuccagcucuaacauaa

SEQ ID NO: 1113694 - RNA, 19 nt, Artificial Sequence
  Description of Artificial Sequence: Synthetic oligonucleotide
  Sense strand starting at position 264 of SEQ ID NO: 915886
uauguuagagcuggaaauu

SEQ ID NO: 1113695 - RNA, 19 nt, Artificial Sequence
  Description of Artificial Sequence: Synthetic oligonucleotide
  Antisense strand to SEQ ID NO: 1113694
aauuuccagcucuaacaua

SEQ ID NO: 1113696 - RNA, 19 nt, Artificial Sequence
  Description of Artificial Sequence: Synthetic oligonucleotide
  Sense strand starting at position 284 of SEQ ID NO: 915886
agaauaugaucuguuugug

SEQ ID NO: 1113697 - RNA, 19 nt, Artificial Sequence
  Description of Artificial Sequence: Synthetic oligonucleotide
  Antisense strand to SEQ ID NO: 1113696
cacaaacagaucauauucu

SEQ ID NO: 1113698 - RNA, 19 nt, Artificial Sequence
  Description of Artificial Sequence: Synthetic oligonucleotide
  Sense strand starting at position 287 of SEQ ID NO: 915886
auaugaucuguuugugagg

SEQ ID NO: 1113699 - RNA, 19 nt, Artificial Sequence
  Description of Artificial Sequence: Synthetic oligonucleotide
  Antisense strand to SEQ ID NO: 1113698
ccucacaaacagaucauau

SEQ ID NO: 1113700 - RNA, 19 nt, Artificial Sequence
  Description of Artificial Sequence: Synthetic oligonucleotide
  Sense strand starting at position 288 of SEQ ID NO: 915886
uaugaucuguuugugagga

SEQ ID NO: 1113701 - RNA, 19 nt, Artificial Sequence
  Description of Artificial Sequence: Synthetic oligonucleotide
  Antisense strand to SEQ ID NO: 1113700
uccucacaaacagaucaua

SEQ ID NO: 1113702 - RNA, 19 nt, Artificial Sequence
  Description of Artificial Sequence: Synthetic oligonucleotide
  Sense strand starting at position 293 of SEQ ID NO: 915886
ucuguuugugaggacaaca

SEQ ID NO: 1113703 - RNA, 19 nt, Artificial Sequence
  Description of Artificial Sequence: Synthetic oligonucleotide
  Antisense strand to SEQ ID NO: 1113702
uguuguccucacaaacaga

SEQ ID NO: 1113704 - RNA, 19 nt, Artificial Sequence
  Description of Artificial Sequence: Synthetic oligonucleotide
  Sense strand starting at position 323 of SEQ ID NO: 915886
uuaguauaaucacuguaac

SEQ ID NO: 1113705 - RNA, 19 nt, Artificial Sequence
  Description of Artificial Sequence: Synthetic oligonucleotide
  Antisense strand to SEQ ID NO: 1113704
guuacagugauuauacuaa

SEQ ID NO: 1113706 - RNA, 19 nt, Artificial Sequence
  Description of Artificial Sequence: Synthetic oligonucleotide
  Sense strand starting at position 326 of SEQ ID NO: 915886
guauaaucacuguaaccug

SEQ ID NO: 1113707 - RNA, 19 nt, Artificial Sequence
  Description of Artificial Sequence: Synthetic oligonucleotide
  Antisense strand to SEQ ID NO: 1113706
cagguuacagugauuauac

SEQ ID NO: 1113708 - RNA, 19 nt, Artificial Sequence
  Description of Artificial Sequence: Synthetic oligonucleotide
  Sense strand starting at position 350 of SEQ ID NO: 915886
ggcaucaccauguagguua

SEQ ID NO: 1113709 - RNA, 19 nt, Artificial Sequence
  Description of Artificial Sequence: Synthetic oligonucleotide
  Antisense strand to SEQ ID NO: 1113708
uaaccuacauggugaugcc

SEQ ID NO: 1113710 - RNA, 19 nt, Artificial Sequence
  Description of Artificial Sequence: Synthetic oligonucleotide
  Sense strand starting at position 377 of SEQ ID NO: 915886
ggauauuucugugcaccuc

SEQ ID NO: 1113711 - RNA, 19 nt, Artificial Sequence
  Description of Artificial Sequence: Synthetic oligonucleotide
  Antisense strand to SEQ ID NO: 1113710
gaggugcacagaaauaucc

SEQ ID NO: 1113712 - RNA, 19 nt, Artificial Sequence
  Description of Artificial Sequence: Synthetic oligonucleotide
  Sense strand starting at position 515 of SEQ ID NO: 915886
agggcuuuagucugauuaa

SEQ ID NO: 1113713 - RNA, 19 nt, Artificial Sequence
  Description of Artificial Sequence: Synthetic oligonucleotide
  Antisense strand to SEQ ID NO: 1113712
uuaaucagacuaaagcccu

SEQ ID NO: 1113714 - RNA, 19 nt, Artificial Sequence
  Description of Artificial Sequence: Synthetic oligonucleotide
  Sense strand starting at position 821 of SEQ ID NO: 915886
gggaaagugugaaacgaaa

SEQ ID NO: 1113715 - RNA, 19 nt, Artificial Sequence
  Description of Artificial Sequence: Synthetic oligonucleotide
  Antisense strand to SEQ ID NO: 1113714
uuucguuucacacuuuccc

SEQ ID NO: 1113716 - RNA, 19 nt, Artificial Sequence
  Description of Artificial Sequence: Synthetic oligonucleotide
  Sense strand starting at position 842 of SEQ ID NO: 915886
agguuaaucuuauucuaag

SEQ ID NO: 1113717 - RNA, 19 nt, Artificial Sequence
  Description of Artificial Sequence: Synthetic oligonucleotide
  Antisense strand to SEQ ID NO: 1113716
cuuagaauaagauuaaccu

SEQ ID NO: 1113718 - RNA, 19 nt, Artificial Sequence
  Description of Artificial Sequence: Synthetic oligonucleotide
  Sense strand starting at position 843 of SEQ ID NO: 915886
gguuaaucuuauucuaagu

SEQ ID NO: 1113719 - RNA, 19 nt, Artificial Sequence
  Description of Artificial Sequence: Synthetic oligonucleotide
  Antisense strand to SEQ ID NO: 1113718
acuuagaauaagauuaacc

SEQ ID NO: 1113720 - RNA, 19 nt, Artificial Sequence
  Description of Artificial Sequence: Synthetic oligonucleotide
  Sense strand starting at position 871 of SEQ ID NO: 915886
uugagacacuaggaaauaa

SEQ ID NO: 1113721 - RNA, 19 nt, Artificial Sequence
  Description of Artificial Sequence: Synthetic oligonucleotide
  Antisense strand to SEQ ID NO: 1113720
uuauuuccuagugucucaa

SEQ ID NO: 1113722 - RNA, 19 nt, Artificial Sequence
  Description of Artificial Sequence: Synthetic oligonucleotide
  Sense strand starting at position 1241 of SEQ ID NO: 915886
caucauuaggaguagcagu

SEQ ID NO: 1113723 - RNA, 19 nt, Artificial Sequence
  Description of Artificial Sequence: Synthetic oligonucleotide
  Antisense strand to SEQ ID NO: 1113722
acugcuacuccuaaugaug

SEQ ID NO: 1113724 - RNA, 19 nt, Artificial Sequence
  Description of Artificial Sequence: Synthetic oligonucleotide
  Sense strand starting at position 1270 of SEQ ID NO: 915886
acucauuaucuguaccgga

SEQ ID NO: 1113725 - RNA, 19 nt, Artificial Sequence
  Description of Artificial Sequence: Synthetic oligonucleotide
  Antisense strand to SEQ ID NO: 1113724
uccgguacagauaaugagu

SEQ ID NO: 1113726 - RNA, 19 nt, Artificial Sequence
  Description of Artificial Sequence: Synthetic oligonucleotide
  Sense strand starting at position 1309 of SEQ ID NO: 915886
acagguauuucucauugac

SEQ ID NO: 1113727 - RNA, 19 nt, Artificial Sequence
  Description of Artificial Sequence: Synthetic oligonucleotide
  Antisense strand to SEQ ID NO: 1113726
gucaaugagaaauaccugu

SEQ ID NO: 1113728 - RNA, 19 nt, Artificial Sequence
  Description of Artificial Sequence: Synthetic oligonucleotide
  Sense strand starting at position 2224 of SEQ ID NO: 915886
gcuuauggcuacccagaaa

SEQ ID NO: 1113729 - RNA, 19 nt, Artificial Sequence
  Description of Artificial Sequence: Synthetic oligonucleotide
  Antisense strand to SEQ ID NO: 1113728
uuucuggguagccauaagc

SEQ ID NO: 1113730 - RNA, 19 nt, Artificial Sequence
  Description of Artificial Sequence: Synthetic oligonucleotide
  Sense strand starting at position 2455 of SEQ ID NO: 915886
agcuauuugauguggucau

SEQ ID NO: 1113731 - RNA, 19 nt, Artificial Sequence
  Description of Artificial Sequence: Synthetic oligonucleotide
  Antisense strand to SEQ ID NO: 1113730
augaccacaucaaauagcu

SEQ ID NO: 1113732 - RNA, 19 nt, Artificial Sequence
  Description of Artificial Sequence: Synthetic oligonucleotide
  Sense strand starting at position 2550 of SEQ ID NO: 915886
cuagauaaucuagguucca

SEQ ID NO: 1113733 - RNA, 19 nt, Artificial Sequence
  Description of Artificial Sequence: Synthetic oligonucleotide
  Antisense strand to SEQ ID NO: 1113732
uggaaccuagauuaucuag

SEQ ID NO: 1113734 - RNA, 19 nt, Artificial Sequence
  Description of Artificial Sequence: Synthetic oligonucleotide
  Sense strand starting at position 2563 of SEQ ID NO: 915886
guuccaguguugucauuua

SEQ ID NO: 1113735 - RNA, 19 nt, Artificial Sequence
  Description of Artificial Sequence: Synthetic oligonucleotide
  Antisense strand to SEQ ID NO: 1113734
uaaaugacaacacuggaac

SEQ ID NO: 1113736 - RNA, 19 nt, Artificial Sequence
  Description of Artificial Sequence: Synthetic oligonucleotide
  Sense strand starting at position 2630 of SEQ ID NO: 915886
guuaguaaacgccagagga

SEQ ID NO: 1113737 - RNA, 19 nt, Artificial Sequence
  Description of Artificial Sequence: Synthetic oligonucleotide
  Antisense strand to SEQ ID NO: 1113736
uccucuggcguuuacuaac

SEQ ID NO: 1113738 - RNA, 19 nt, Artificial Sequence
  Description of Artificial Sequence: Synthetic oligonucleotide
  Sense strand starting at position 2729 of SEQ ID NO: 915886
ugaaguuccuucuuuagaa

SEQ ID NO: 1113739 - RNA, 19 nt, Artificial Sequence
  Description of Artificial Sequence: Synthetic oligonucleotide
  Antisense strand to SEQ ID NO: 1113738
uucuaaagaaggaacuuca

SEQ ID NO: 1113740 - RNA, 19 nt, Artificial Sequence
  Description of Artificial Sequence: Synthetic oligonucleotide
  Sense strand starting at position 2730 of SEQ ID NO: 915886
gaaguuccuucuuuagaag

SEQ ID NO: 1113741 - RNA, 19 nt, Artificial Sequence
  Description of Artificial Sequence: Synthetic oligonucleotide
  Antisense strand to SEQ ID NO: 1113740
cuucuaaagaaggaacuuc

SEQ ID NO: 1113742 - RNA, 19 nt, Artificial Sequence
  Description of Artificial Sequence: Synthetic oligonucleotide
  Sense strand starting at position 3340 of SEQ ID NO: 915886
ucuugucuucccuauaggu

SEQ ID NO: 1113743 - RNA, 19 nt, Artificial Sequence
  Description of Artificial Sequence: Synthetic oligonucleotide
  Antisense strand to SEQ ID NO: 1113742
accuauagggaagacaaga

SEQ ID NO: 1113744 - RNA, 19 nt, Artificial Sequence
  Description of Artificial Sequence: Synthetic oligonucleotide
  Sense strand starting at position 3501 of SEQ ID NO: 915886
uccugauugcgagaacagu

SEQ ID NO: 1113745 - RNA, 19 nt, Artificial Sequence
  Description of Artificial Sequence: Synthetic oligonucleotide
  Antisense strand to SEQ ID NO: 1113744
acuguucucgcaaucagga

SEQ ID NO: 1113746 - RNA, 19 nt, Artificial Sequence
  Description of Artificial Sequence: Synthetic oligonucleotide
  Sense strand starting at position 3526 of SEQ ID NO: 915886
auaguauuauacccaggga

SEQ ID NO: 1113747 - RNA, 19 nt, Artificial Sequence
  Description of Artificial Sequence: Synthetic oligonucleotide
  Antisense strand to SEQ ID NO: 1113746
ucccuggguauaauacuau

SEQ ID NO: 1113748 - RNA, 19 nt, Artificial Sequence
  Description of Artificial Sequence: Synthetic oligonucleotide
  Sense strand starting at position 3529 of SEQ ID NO: 915886
guauuauacccagggaaau

SEQ ID NO: 1113749 - RNA, 19 nt, Artificial Sequence
  Description of Artificial Sequence: Synthetic oligonucleotide
  Antisense strand to SEQ ID NO: 1113748
auuucccuggguauaauac

SEQ ID NO: 1113750 - RNA, 19 nt, Artificial Sequence
  Description of Artificial Sequence: Synthetic oligonucleotide
  Sense strand starting at position 3541 of SEQ ID NO: 915886
gggaaauaaaugugcacau

SEQ ID NO: 1113751 - RNA, 19 nt, Artificial Sequence
  Description of Artificial Sequence: Synthetic oligonucleotide
  Antisense strand to SEQ ID NO: 1113750
augugcacauuuauuuccc

SEQ ID NO: 1113752 - RNA, 19 nt, Artificial Sequence
  Description of Artificial Sequence: Synthetic oligonucleotide
  Sense strand starting at position 3542 of SEQ ID NO: 915886
ggaaauaaaugugcacauu

SEQ ID NO: 1113753 - RNA, 19 nt, Artificial Sequence
  Description of Artificial Sequence: Synthetic oligonucleotide
  Antisense strand to SEQ ID NO: 1113752
aaugugcacauuuauuucc

SEQ ID NO: 1113754 - RNA, 19 nt, Artificial Sequence
  Description of Artificial Sequence: Synthetic oligonucleotide
  Sense strand starting at position 3584 of SEQ ID NO: 915886
agaaguuagugcccucaga

SEQ ID NO: 1113755 - RNA, 19 nt, Artificial Sequence
  Description of Artificial Sequence: Synthetic oligonucleotide
  Antisense strand to SEQ ID NO: 1113754
ucugagggcacuaacuucu

SEQ ID NO: 1113756 - RNA, 19 nt, Artificial Sequence
  Description of Artificial Sequence: Synthetic oligonucleotide
  Sense strand starting at position 3779 of SEQ ID NO: 915886
ugggauuucuuggaacuua

SEQ ID NO: 1113757 - RNA, 19 nt, Artificial Sequence
  Description of Artificial Sequence: Synthetic oligonucleotide
  Antisense strand to SEQ ID NO: 1113756
uaaguuccaagaaauccca

SEQ ID NO: 1113758 - RNA, 19 nt, Artificial Sequence
  Description of Artificial Sequence: Synthetic oligonucleotide
  Sense strand starting at position 3980 of SEQ ID NO: 915886
ccacuuguuugauucucau

SEQ ID NO: 1113759 - RNA, 19 nt, Artificial Sequence
  Description of Artificial Sequence: Synthetic oligonucleotide
  Antisense strand to SEQ ID NO: 1113758
augagaaucaaacaagugg

SEQ ID NO: 1113760 - RNA, 19 nt, Artificial Sequence
  Description of Artificial Sequence: Synthetic oligonucleotide
  Sense strand starting at position 29 of SEQ ID NO: 915887
cuagcaacucuccaaggua

SEQ ID NO: 1113761 - RNA, 19 nt, Artificial Sequence
  Description of Artificial Sequence: Synthetic oligonucleotide
  Antisense strand to SEQ ID NO: 1113760
uaccuuggagaguugcuag

SEQ ID NO: 1113762 - RNA, 19 nt, Artificial Sequence
  Description of Artificial Sequence: Synthetic oligonucleotide
  Sense strand starting at position 345 of SEQ ID NO: 915887
uggaaaugcaacugugaug

SEQ ID NO: 1113763 - RNA, 19 nt, Artificial Sequence
  Description of Artificial Sequence: Synthetic oligonucleotide
  Antisense strand to SEQ ID NO: 1113762
caucacaguugcauuucca

SEQ ID NO: 1113764 - RNA, 19 nt, Artificial Sequence
  Description of Artificial Sequence: Synthetic oligonucleotide
  Sense strand starting at position 354 of SEQ ID NO: 915887
aacugugaugcccauuaga

SEQ ID NO: 1113765 - RNA, 19 nt, Artificial Sequence
  Description of Artificial Sequence: Synthetic oligonucleotide
  Antisense strand to SEQ ID NO: 1113764
ucuaaugggcaucacaguu

SEQ ID NO: 1113766 - RNA, 19 nt, Artificial Sequence
  Description of Artificial Sequence: Synthetic oligonucleotide
  Sense strand starting at position 357 of SEQ ID NO: 915887
ugugaugcccauuagaacu

SEQ ID NO: 1113767 - RNA, 19 nt, Artificial Sequence
  Description of Artificial Sequence: Synthetic oligonucleotide
  Antisense strand to SEQ ID NO: 1113766
aguucuaaugggcaucaca

SEQ ID NO: 1113768 - RNA, 19 nt, Artificial Sequence
  Description of Artificial Sequence: Synthetic oligonucleotide
  Sense strand starting at position 490 of SEQ ID NO: 915887
cucaaacuuugguuuggaa

SEQ ID NO: 1113769 - RNA, 19 nt, Artificial Sequence
  Description of Artificial Sequence: Synthetic oligonucleotide
  Antisense strand to SEQ ID NO: 1113768
uuccaaaccaaaguuugag

SEQ ID NO: 1113770 - RNA, 19 nt, Artificial Sequence
  Description of Artificial Sequence: Synthetic oligonucleotide
  Sense strand starting at position 492 of SEQ ID NO: 915887
caaacuuugguuuggaaca

SEQ ID NO: 1113771 - RNA, 19 nt, Artificial Sequence
  Description of Artificial Sequence: Synthetic oligonucleotide
  Antisense strand to SEQ ID NO: 1113770
uguuccaaaccaaaguuug

SEQ ID NO: 1113772 - RNA, 19 nt, Artificial Sequence
  Description of Artificial Sequence: Synthetic oligonucleotide
  Sense strand starting at position 1484 of SEQ ID NO: 915887
agauuaucuuguuugagga

SEQ ID NO: 1113773 - RNA, 19 nt, Artificial Sequence
  Description of Artificial Sequence: Synthetic oligonucleotide
  Antisense strand to SEQ ID NO: 1113772
uccucaaacaagauaaucu

SEQ ID NO: 1113774 - RNA, 19 nt, Artificial Sequence
  Description of Artificial Sequence: Synthetic oligonucleotide
  Sense strand starting at position 1485 of SEQ ID NO: 915887
gauuaucuuguuugaggaa

SEQ ID NO: 1113775 - RNA, 19 nt, Artificial Sequence
  Description of Artificial Sequence: Synthetic oligonucleotide
  Antisense strand to SEQ ID NO: 1113774
uuccucaaacaagauaauc

SEQ ID NO: 1113776 - RNA, 19 nt, Artificial Sequence
  Description of Artificial Sequence: Synthetic oligonucleotide
  Sense strand starting at position 1639 of SEQ ID NO: 915887
gcaacagugcuguugucuu

SEQ ID NO: 1113777 - RNA, 19 nt, Artificial Sequence
  Description of Artificial Sequence: Synthetic oligonucleotide
  Antisense strand to SEQ ID NO: 1113776
aagacaacagcacuguugc

SEQ ID NO: 1113778 - RNA, 19 nt, Artificial Sequence
  Description of Artificial Sequence: Synthetic oligonucleotide
  Sense strand starting at position 1791 of SEQ ID NO: 915887
auuaucugucucuggaaca

SEQ ID NO: 1113779 - RNA, 19 nt, Artificial Sequence
  Description of Artificial Sequence: Synthetic oligonucleotide
  Antisense strand to SEQ ID NO: 1113778
uguuccagagacagauaau

SEQ ID NO: 1113780 - RNA, 19 nt, Artificial Sequence
  Description of Artificial Sequence: Synthetic oligonucleotide
  Sense strand starting at position 2037 of SEQ ID NO: 915887
augaauagaugugucuaag

SEQ ID NO: 1113781 - RNA, 19 nt, Artificial Sequence
  Description of Artificial Sequence: Synthetic oligonucleotide
  Antisense strand to SEQ ID NO: 1113780
cuuagacacaucuauucau

SEQ ID NO: 1113782 - RNA, 19 nt, Artificial Sequence
  Description of Artificial Sequence: Synthetic oligonucleotide
  Sense strand starting at position 2040 of SEQ ID NO: 915887
aauagaugugucuaagguc

SEQ ID NO: 1113783 - RNA, 19 nt, Artificial Sequence
  Description of Artificial Sequence: Synthetic oligonucleotide
  Antisense strand to SEQ ID NO: 1113782
gaccuuagacacaucuauu

SEQ ID NO: 1113784 - RNA, 19 nt, Artificial Sequence
  Description of Artificial Sequence: Synthetic oligonucleotide
  Sense strand starting at position 2134 of SEQ ID NO: 915887
gugcaaucacauuacugaa

SEQ ID NO: 1113785 - RNA, 19 nt, Artificial Sequence
  Description of Artificial Sequence: Synthetic oligonucleotide
  Antisense strand to SEQ ID NO: 1113784
uucaguaaugugauugcac

SEQ ID NO: 1113786 - RNA, 19 nt, Artificial Sequence
  Description of Artificial Sequence: Synthetic oligonucleotide
  Sense strand starting at position 2197 of SEQ ID NO: 915887
auagaugguuuauuaggau

SEQ ID NO: 1113787 - RNA, 19 nt, Artificial Sequence
  Description of Artificial Sequence: Synthetic oligonucleotide
  Antisense strand to SEQ ID NO: 1113786
auccuaauaaaccaucuau

SEQ ID NO: 1113788 - RNA, 19 nt, Artificial Sequence
  Description of Artificial Sequence: Synthetic oligonucleotide
  Sense strand starting at position 2374 of SEQ ID NO: 915887
cucugcuccuuaguuauuu

SEQ ID NO: 1113789 - RNA, 19 nt, Artificial Sequence
  Description of Artificial Sequence: Synthetic oligonucleotide
  Antisense strand to SEQ ID NO: 1113788
aaauaacuaaggagcagag

SEQ ID NO: 1113790 - RNA, 19 nt, Artificial Sequence
  Description of Artificial Sequence: Synthetic oligonucleotide
  Sense strand starting at position 2375 of SEQ ID NO: 915887
ucugcuccuuaguuauuua

SEQ ID NO: 1113791 - RNA, 19 nt, Artificial Sequence
  Description of Artificial Sequence: Synthetic oligonucleotide
  Antisense strand to SEQ ID NO: 1113790
uaaauaacuaaggagcaga

SEQ ID NO: 1113792 - RNA, 19 nt, Artificial Sequence
  Description of Artificial Sequence: Synthetic oligonucleotide
  Sense strand starting at position 2420 of SEQ ID NO: 915887
gggaggauugagugaguua

SEQ ID NO: 1113793 - RNA, 19 nt, Artificial Sequence
  Description of Artificial Sequence: Synthetic oligonucleotide
  Antisense strand to SEQ ID NO: 1113792
uaacucacucaauccuccc

SEQ ID NO: 1113794 - RNA, 19 nt, Artificial Sequence
  Description of Artificial Sequence: Synthetic oligonucleotide
  Sense strand starting at position 2456 of SEQ ID NO: 915887
agaagagucccuggcacau

SEQ ID NO: 1113795 - RNA, 19 nt, Artificial Sequence
  Description of Artificial Sequence: Synthetic oligonucleotide
  Antisense strand to SEQ ID NO: 1113794
augugccagggacucuucu

SEQ ID NO: 1113796 - RNA, 19 nt, Artificial Sequence
  Description of Artificial Sequence: Synthetic oligonucleotide
  Sense strand starting at position 2536 of SEQ ID NO: 915887
ggauuagauuccuuccagu

SEQ ID NO: 1113797 - RNA, 19 nt, Artificial Sequence
  Description of Artificial Sequence: Synthetic oligonucleotide
  Antisense strand to SEQ ID NO: 1113796
acuggaaggaaucuaaucc

SEQ ID NO: 1113798 - RNA, 19 nt, Artificial Sequence
  Description of Artificial Sequence: Synthetic oligonucleotide
  Sense strand starting at position 2564 of SEQ ID NO: 915887
aggagucaccuugggagua

SEQ ID NO: 1113799 - RNA, 19 nt, Artificial Sequence
  Description of Artificial Sequence: Synthetic oligonucleotide
  Antisense strand to SEQ ID NO: 1113798
uacucccaaggugacuccu

SEQ ID NO: 1113800 - RNA, 19 nt, Artificial Sequence
  Description of Artificial Sequence: Synthetic oligonucleotide
  Sense strand starting at position 2619 of SEQ ID NO: 915887
guauauaaauaugcucuga

SEQ ID NO: 1113801 - RNA, 19 nt, Artificial Sequence
  Description of Artificial Sequence: Synthetic oligonucleotide
  Antisense strand to SEQ ID NO: 1113800
ucagagcauauuuauauac

SEQ ID NO: 1113802 - RNA, 19 nt, Artificial Sequence
  Description of Artificial Sequence: Synthetic oligonucleotide
  Sense strand starting at position 2621 of SEQ ID NO: 915887
auauaaauaugcucugaug

SEQ ID NO: 1113803 - RNA, 19 nt, Artificial Sequence
  Description of Artificial Sequence: Synthetic oligonucleotide
  Antisense strand to SEQ ID NO: 1113802
caucagagcauauuuauau

SEQ ID NO: 1113804 - RNA, 19 nt, Artificial Sequence
  Description of Artificial Sequence: Synthetic oligonucleotide
  Sense strand starting at position 2623 of SEQ ID NO: 915887
auaaauaugcucugaugau

SEQ ID NO: 1113805 - RNA, 19 nt, Artificial Sequence
  Description of Artificial Sequence: Synthetic oligonucleotide
  Antisense strand to SEQ ID NO: 1113804
aucaucagagcauauuuau

SEQ ID NO: 1113806 - RNA, 19 nt, Artificial Sequence
  Description of Artificial Sequence: Synthetic oligonucleotide
  Sense strand starting at position 2627 of SEQ ID NO: 915887
auaugcucugaugaucauu

SEQ ID NO: 1113807 - RNA, 19 nt, Artificial Sequence
  Description of Artificial Sequence: Synthetic oligonucleotide
  Antisense strand to SEQ ID NO: 1113806
aaugaucaucagagcauau

SEQ ID NO: 1113808 - RNA, 19 nt, Artificial Sequence
  Description of Artificial Sequence: Synthetic oligonucleotide
  Sense strand starting at position 2629 of SEQ ID NO: 915887
augcucugaugaucauuaa

SEQ ID NO: 1113809 - RNA, 19 nt, Artificial Sequence
  Description of Artificial Sequence: Synthetic oligonucleotide
  Antisense strand to SEQ ID NO: 1113808
uuaaugaucaucagagcau

SEQ ID NO: 1113810 - RNA, 19 nt, Artificial Sequence
  Description of Artificial Sequence: Synthetic oligonucleotide
  Sense strand starting at position 2630 of SEQ ID NO: 915887
ugcucugaugaucauuaaa

SEQ ID NO: 1113811 - RNA, 19 nt, Artificial Sequence
  Description of Artificial Sequence: Synthetic oligonucleotide
  Antisense strand to SEQ ID NO: 1113810
uuuaaugaucaucagagca

SEQ ID NO: 1113812 - RNA, 19 nt, Artificial Sequence
  Description of Artificial Sequence: Synthetic oligonucleotide
  Sense strand starting at position 2818 of SEQ ID NO: 915887
aguuauacaccauguagau

SEQ ID NO: 1113813 - RNA, 19 nt, Artificial Sequence
  Description of Artificial Sequence: Synthetic oligonucleotide
  Antisense strand to SEQ ID NO: 1113812
aucuacaugguguauaacu

SEQ ID NO: 1113814 - RNA, 19 nt, Artificial Sequence
  Description of Artificial Sequence: Synthetic oligonucleotide
  Sense strand starting at position 2851 of SEQ ID NO: 915887
ucuaaagcaccuugaagau

SEQ ID NO: 1113815 - RNA, 19 nt, Artificial Sequence
  Description of Artificial Sequence: Synthetic oligonucleotide
  Antisense strand to SEQ ID NO: 1113814
aucuucaaggugcuuuaga

SEQ ID NO: 1113816 - RNA, 19 nt, Artificial Sequence
  Description of Artificial Sequence: Synthetic oligonucleotide
  Sense strand starting at position 2898 of SEQ ID NO: 915887
guagauguucuguagauua

SEQ ID NO: 1113817 - RNA, 19 nt, Artificial Sequence
  Description of Artificial Sequence: Synthetic oligonucleotide
  Antisense strand to SEQ ID NO: 1113816
uaaucuacagaacaucuac

SEQ ID NO: 1113818 - RNA, 19 nt, Artificial Sequence
  Description of Artificial Sequence: Synthetic oligonucleotide
  Sense strand starting at position 3047 of SEQ ID NO: 915887
gggcaaauccuuuaagcca

SEQ ID NO: 1113819 - RNA, 19 nt, Artificial Sequence
  Description of Artificial Sequence: Synthetic oligonucleotide
  Antisense strand to SEQ ID NO: 1113818
uggcuuaaaggauuugccc

SEQ ID NO: 1113820 - RNA, 19 nt, Artificial Sequence
  Description of Artificial Sequence: Synthetic oligonucleotide
  Sense strand starting at position 3088 of SEQ ID NO: 915887
uuauguuagagcuggaaau

SEQ ID NO: 1113821 - RNA, 19 nt, Artificial Sequence
  Description of Artificial Sequence: Synthetic oligonucleotide
  Antisense strand to SEQ ID NO: 1113820
auuuccagcucuaacauaa

SEQ ID NO: 1113822 - RNA, 19 nt, Artificial Sequence
  Description of Artificial Sequence: Synthetic oligonucleotide
  Sense strand starting at position 3089 of SEQ ID NO: 915887
uauguuagagcuggaaauu

SEQ ID NO: 1113823 - RNA, 19 nt, Artificial Sequence
  Description of Artificial Sequence: Synthetic oligonucleotide
  Antisense strand to SEQ ID NO: 1113822
aauuuccagcucuaacaua

SEQ ID NO: 1113824 - RNA, 19 nt, Artificial Sequence
  Description of Artificial Sequence: Synthetic oligonucleotide
  Sense strand starting at position 3109 of SEQ ID NO: 915887
agaauaugaucuguuugug

SEQ ID NO: 1113825 - RNA, 19 nt, Artificial Sequence
  Description of Artificial Sequence: Synthetic oligonucleotide
  Antisense strand to SEQ ID NO: 1113824
cacaaacagaucauauucu

SEQ ID NO: 1113826 - RNA, 19 nt, Artificial Sequence
  Description of Artificial Sequence: Synthetic oligonucleotide
  Sense strand starting at position 3118 of SEQ ID NO: 915887
ucuguuugugaggacaaca

SEQ ID NO: 1113827 - RNA, 19 nt, Artificial Sequence
  Description of Artificial Sequence: Synthetic oligonucleotide
  Antisense strand to SEQ ID NO: 1113826
uguuguccucacaaacaga

SEQ ID NO: 1113828 - RNA, 19 nt, Artificial Sequence
  Description of Artificial Sequence: Synthetic oligonucleotide
  Sense strand starting at position 3148 of SEQ ID NO: 915887
uuaguauaaucacuguaac

SEQ ID NO: 1113829 - RNA, 19 nt, Artificial Sequence
  Description of Artificial Sequence: Synthetic oligonucleotide
  Antisense strand to SEQ ID NO: 1113828
guuacagugauuauacuaa

SEQ ID NO: 1113830 - RNA, 19 nt, Artificial Sequence
  Description of Artificial Sequence: Synthetic oligonucleotide
  Sense strand starting at position 3151 of SEQ ID NO: 915887
guauaaucacuguaaccug

SEQ ID NO: 1113831 - RNA, 19 nt, Artificial Sequence
  Description of Artificial Sequence: Synthetic oligonucleotide
  Antisense strand to SEQ ID NO: 1113830
cagguuacagugauuauac

SEQ ID NO: 1113832 - RNA, 19 nt, Artificial Sequence
  Description of Artificial Sequence: Synthetic oligonucleotide
  Sense strand starting at position 3175 of SEQ ID NO: 915887
ggcaucaccauguagguua

SEQ ID NO: 1113833 - RNA, 19 nt, Artificial Sequence
  Description of Artificial Sequence: Synthetic oligonucleotide
  Antisense strand to SEQ ID NO: 1113832
uaaccuacauggugaugcc

SEQ ID NO: 1113834 - RNA, 19 nt, Artificial Sequence
  Description of Artificial Sequence: Synthetic oligonucleotide
  Sense strand starting at position 3202 of SEQ ID NO: 915887
ggauauuucugugcaccuc

SEQ ID NO: 1113835 - RNA, 19 nt, Artificial Sequence
  Description of Artificial Sequence: Synthetic oligonucleotide
  Antisense strand to SEQ ID NO: 1113834
gaggugcacagaaauaucc

SEQ ID NO: 1113836 - RNA, 19 nt, Artificial Sequence
  Description of Artificial Sequence: Synthetic oligonucleotide
  Sense strand starting at position 3646 of SEQ ID NO: 915887
gggaaagugugaaacgaaa

SEQ ID NO: 1113837 - RNA, 19 nt, Artificial Sequence
  Description of Artificial Sequence: Synthetic oligonucleotide
  Antisense strand to SEQ ID NO: 1113836
uuucguuucacacuuuccc

SEQ ID NO: 1113838 - RNA, 19 nt, Artificial Sequence
  Description of Artificial Sequence: Synthetic oligonucleotide
  Sense strand starting at position 3667 of SEQ ID NO: 915887
agguuaaucuuauucuaag

SEQ ID NO: 1113839 - RNA, 19 nt, Artificial Sequence
  Description of Artificial Sequence: Synthetic oligonucleotide
  Antisense strand to SEQ ID NO: 1113838
cuuagaauaagauuaaccu

SEQ ID NO: 1113840 - RNA, 19 nt, Artificial Sequence
  Description of Artificial Sequence: Synthetic oligonucleotide
  Sense strand starting at position 6 of SEQ ID NO: 915888
gguccucaaggugguaaau

SEQ ID NO: 1113841 - RNA, 19 nt, Artificial Sequence
  Description of Artificial Sequence: Synthetic oligonucleotide
  Antisense strand to SEQ ID NO: 1113840
auuuaccaccuugaggacc

SEQ ID NO: 1113842 - RNA, 19 nt, Artificial Sequence
  Description of Artificial Sequence: Synthetic oligonucleotide
  Sense strand starting at position 16 of SEQ ID NO: 915888
gugguaaaugcugagaagu

SEQ ID NO: 1113843 - RNA, 19 nt, Artificial Sequence
  Description of Artificial Sequence: Synthetic oligonucleotide
  Antisense strand to SEQ ID NO: 1113842
acuucucagcauuuaccac

SEQ ID NO: 1113844 - RNA, 19 nt, Artificial Sequence
  Description of Artificial Sequence: Synthetic oligonucleotide
  Sense strand starting at position 80 of SEQ ID NO: 915888
ucaguugugaaaugaugga

SEQ ID NO: 1113845 - RNA, 19 nt, Artificial Sequence
  Description of Artificial Sequence: Synthetic oligonucleotide
  Antisense strand to SEQ ID NO: 1113844
uccaucauuucacaacuga

SEQ ID NO: 1113846 - RNA, 19 nt, Artificial Sequence
  Description of Artificial Sequence: Synthetic oligonucleotide
  Sense strand starting at position 99 of SEQ ID NO: 915888
ggaggaggacugcauguuu

SEQ ID NO: 1113847 - RNA, 19 nt, Artificial Sequence
  Description of Artificial Sequence: Synthetic oligonucleotide
  Antisense strand to SEQ ID NO: 1113846
aaacaugcaguccuccucc

SEQ ID NO: 1113848 - RNA, 19 nt, Artificial Sequence
  Description of Artificial Sequence: Synthetic oligonucleotide
  Sense strand starting at position 154 of SEQ ID NO: 915888
gaaggacuuccuggucaug

SEQ ID NO: 1113849 - RNA, 19 nt, Artificial Sequence
  Description of Artificial Sequence: Synthetic oligonucleotide
  Antisense strand to SEQ ID NO: 1113848
caugaccaggaaguccuuc

SEQ ID NO: 1113850 - RNA, 19 nt, Artificial Sequence
  Description of Artificial Sequence: Synthetic oligonucleotide
  Sense strand starting at position 484 of SEQ ID NO: 915888
cguguaaucccaugggagg

SEQ ID NO: 1113851 - RNA, 19 nt, Artificial Sequence
  Description of Artificial Sequence: Synthetic oligonucleotide
  Antisense strand to SEQ ID NO: 1113850
ccucccaugggauuacacg

SEQ ID NO: 1113852 - RNA, 19 nt, Artificial Sequence
  Description of Artificial Sequence: Synthetic oligonucleotide
  Sense strand starting at position 616 of SEQ ID NO: 915888
cagagaaguucccuaauug

SEQ ID NO: 1113853 - RNA, 19 nt, Artificial Sequence
  Description of Artificial Sequence: Synthetic oligonucleotide
  Antisense strand to SEQ ID NO: 1113852
caauuagggaacuucucug

SEQ ID NO: 1113854 - RNA, 19 nt, Artificial Sequence
  Description of Artificial Sequence: Synthetic oligonucleotide
  Sense strand starting at position 620 of SEQ ID NO: 915888
gaaguucccuaauugggau

SEQ ID NO: 1113855 - RNA, 19 nt, Artificial Sequence
  Description of Artificial Sequence: Synthetic oligonucleotide
  Antisense strand to SEQ ID NO: 1113854
aucccaauuagggaacuuc

SEQ ID NO: 1113856 - RNA, 19 nt, Artificial Sequence
  Description of Artificial Sequence: Synthetic oligonucleotide
  Sense strand starting at position 632 of SEQ ID NO: 915888
uugggauaccucuguccca

SEQ ID NO: 1113857 - RNA, 19 nt, Artificial Sequence
  Description of Artificial Sequence: Synthetic oligonucleotide
  Antisense strand to SEQ ID NO: 1113856
ugggacagagguaucccaa

SEQ ID NO: 1113858 - RNA, 19 nt, Artificial Sequence
  Description of Artificial Sequence: Synthetic oligonucleotide
  Sense strand starting at position 639 of SEQ ID NO: 915888
accucugucccacagauga

SEQ ID NO: 1113859 - RNA, 19 nt, Artificial Sequence
  Description of Artificial Sequence: Synthetic oligonucleotide
  Antisense strand to SEQ ID NO: 1113858
ucaucugugggacagaggu

SEQ ID NO: 1113860 - RNA, 19 nt, Artificial Sequence
  Description of Artificial Sequence: Synthetic oligonucleotide
  Sense strand starting at position 662 of SEQ ID NO: 915888
gggccacuugugcagagaa

SEQ ID NO: 1113861 - RNA, 19 nt, Artificial Sequence
  Description of Artificial Sequence: Synthetic oligonucleotide
  Antisense strand to SEQ ID NO: 1113860
uucucugcacaaguggccc

SEQ ID NO: 1113862 - RNA, 19 nt, Artificial Sequence
  Description of Artificial Sequence: Synthetic oligonucleotide
  Sense strand starting at position 693 of SEQ ID NO: 915888
agagauugugcgggacuca

SEQ ID NO: 1113863 - RNA, 19 nt, Artificial Sequence
  Description of Artificial Sequence: Synthetic oligonucleotide
  Antisense strand to SEQ ID NO: 1113862
ugagucccgcacaaucucu

SEQ ID NO: 1113864 - RNA, 19 nt, Artificial Sequence
  Description of Artificial Sequence: Synthetic oligonucleotide
  Sense strand starting at position 694 of SEQ ID NO: 915888
gagauugugcgggacucau

SEQ ID NO: 1113865 - RNA, 19 nt, Artificial Sequence
  Description of Artificial Sequence: Synthetic oligonucleotide
  Antisense strand to SEQ ID NO: 1113864
augagucccgcacaaucuc

SEQ ID NO: 1113866 - RNA, 19 nt, Artificial Sequence
  Description of Artificial Sequence: Synthetic oligonucleotide
  Sense strand starting at position 698 of SEQ ID NO: 915888
uugugcgggacucaucaaa

SEQ ID NO: 1113867 - RNA, 19 nt, Artificial Sequence
  Description of Artificial Sequence: Synthetic oligonucleotide
  Antisense strand to SEQ ID NO: 1113866
uuugaugagucccgcacaa

SEQ ID NO: 1113868 - RNA, 19 nt, Artificial Sequence
  Description of Artificial Sequence: Synthetic oligonucleotide
  Sense strand starting at position 731 of SEQ ID NO: 915888
uguccaguggcucaaggau

SEQ ID NO: 1113869 - RNA, 19 nt, Artificial Sequence
  Description of Artificial Sequence: Synthetic oligonucleotide
  Antisense strand to SEQ ID NO: 1113868
auccuugagccacuggaca

SEQ ID NO: 1113870 - RNA, 19 nt, Artificial Sequence
  Description of Artificial Sequence: Synthetic oligonucleotide
  Sense strand starting at position 847 of SEQ ID NO: 915888
acaggucauuccuccacau

SEQ ID NO: 1113871 - RNA, 19 nt, Artificial Sequence
  Description of Artificial Sequence: Synthetic oligonucleotide
  Antisense strand to SEQ ID NO: 1113870
auguggaggaaugaccugu

SEQ ID NO: 1113872 - RNA, 19 nt, Artificial Sequence
  Description of Artificial Sequence: Synthetic oligonucleotide
  Sense strand starting at position 976 of SEQ ID NO: 915888
caguuagcgccuguaucau

SEQ ID NO: 1113873 - RNA, 19 nt, Artificial Sequence
  Description of Artificial Sequence: Synthetic oligonucleotide
  Antisense strand to SEQ ID NO: 1113872
augauacaggcgcuaacug

SEQ ID NO: 1113874 - RNA, 19 nt, Artificial Sequence
  Description of Artificial Sequence: Synthetic oligonucleotide
  Sense strand starting at position 1028 of SEQ ID NO: 915888
cuccucaagguuuggagaa

SEQ ID NO: 1113875 - RNA, 19 nt, Artificial Sequence
  Description of Artificial Sequence: Synthetic oligonucleotide
  Antisense strand to SEQ ID NO: 1113874
uucuccaaaccuugaggag

SEQ ID NO: 1113876 - RNA, 19 nt, Artificial Sequence
  Description of Artificial Sequence: Synthetic oligonucleotide
  Sense strand starting at position 1043 of SEQ ID NO: 915888
agaagugaguaugcccauu

SEQ ID NO: 1113877 - RNA, 19 nt, Artificial Sequence
  Description of Artificial Sequence: Synthetic oligonucleotide
  Antisense strand to SEQ ID NO: 1113876
aaugggcauacucacuucu

SEQ ID NO: 1113878 - RNA, 19 nt, Artificial Sequence
  Description of Artificial Sequence: Synthetic oligonucleotide
  Sense strand starting at position 1165 of SEQ ID NO: 915888
ucuugagaacccugugaug

SEQ ID NO: 1113879 - RNA, 19 nt, Artificial Sequence
  Description of Artificial Sequence: Synthetic oligonucleotide
  Antisense strand to SEQ ID NO: 1113878
caucacaggguucucaaga

SEQ ID NO: 1113880 - RNA, 19 nt, Artificial Sequence
  Description of Artificial Sequence: Synthetic oligonucleotide
  Sense strand starting at position 1167 of SEQ ID NO: 915888
uugagaacccugugaugau

SEQ ID NO: 1113881 - RNA, 19 nt, Artificial Sequence
  Description of Artificial Sequence: Synthetic oligonucleotide
  Antisense strand to SEQ ID NO: 1113880
aucaucacaggguucucaa

SEQ ID NO: 1113882 - RNA, 19 nt, Artificial Sequence
  Description of Artificial Sequence: Synthetic oligonucleotide
  Sense strand starting at position 1176 of SEQ ID NO: 915888
cugugaugaucacuccaag

SEQ ID NO: 1113883 - RNA, 19 nt, Artificial Sequence
  Description of Artificial Sequence: Synthetic oligonucleotide
  Antisense strand to SEQ ID NO: 1113882
cuuggagugaucaucacag

SEQ ID NO: 1113884 - RNA, 19 nt, Artificial Sequence
  Description of Artificial Sequence: Synthetic oligonucleotide
  Sense strand starting at position 1179 of SEQ ID NO: 915888
ugaugaucacuccaaggcu

SEQ ID NO: 1113885 - RNA, 19 nt, Artificial Sequence
  Description of Artificial Sequence: Synthetic oligonucleotide
  Antisense strand to SEQ ID NO: 1113884
agccuuggagugaucauca

SEQ ID NO: 1113886 - RNA, 19 nt, Artificial Sequence
  Description of Artificial Sequence: Synthetic oligonucleotide
  Sense strand starting at position 1265 of SEQ ID NO: 915888
uguaauguaggcguugagu

SEQ ID NO: 1113887 - RNA, 19 nt, Artificial Sequence
  Description of Artificial Sequence: Synthetic oligonucleotide
  Antisense strand to SEQ ID NO: 1113886
acucaacgccuacauuaca

SEQ ID NO: 1113888 - RNA, 19 nt, Artificial Sequence
  Description of Artificial Sequence: Synthetic oligonucleotide
  Sense strand starting at position 1273 of SEQ ID NO: 915888
aggcguugaguccaacaga

SEQ ID NO: 1113889 - RNA, 19 nt, Artificial Sequence
  Description of Artificial Sequence: Synthetic oligonucleotide
  Antisense strand to SEQ ID NO: 1113888
ucuguuggacucaacgccu

SEQ ID NO: 1113890 - RNA, 19 nt, Artificial Sequence
  Description of Artificial Sequence: Synthetic oligonucleotide
  Sense strand starting at position 1276 of SEQ ID NO: 915888
cguugaguccaacagaaac

SEQ ID NO: 1113891 - RNA, 19 nt, Artificial Sequence
  Description of Artificial Sequence: Synthetic oligonucleotide
  Antisense strand to SEQ ID NO: 1113890
guuucuguuggacucaacg

SEQ ID NO: 1113892 - RNA, 19 nt, Artificial Sequence
  Description of Artificial Sequence: Synthetic oligonucleotide
  Sense strand starting at position 2295 of SEQ ID NO: 915888
gggucuugugaaugggaac

SEQ ID NO: 1113893 - RNA, 19 nt, Artificial Sequence
  Description of Artificial Sequence: Synthetic oligonucleotide
  Antisense strand to SEQ ID NO: 1113892
guucccauucacaagaccc

SEQ ID NO: 1113894 - RNA, 19 nt, Artificial Sequence
  Description of Artificial Sequence: Synthetic oligonucleotide
  Sense strand starting at position 2431 of SEQ ID NO: 915888
ggaaguucuucugucagac

SEQ ID NO: 1113895 - RNA, 19 nt, Artificial Sequence
  Description of Artificial Sequence: Synthetic oligonucleotide
  Antisense strand to SEQ ID NO: 1113894
gucugacagaagaacuucc

SEQ ID NO: 1113896 - RNA, 19 nt, Artificial Sequence
  Description of Artificial Sequence: Synthetic oligonucleotide
  Sense strand starting at position 2536 of SEQ ID NO: 915888
gcuugcauucuugcagcua

SEQ ID NO: 1113897 - RNA, 19 nt, Artificial Sequence
  Description of Artificial Sequence: Synthetic oligonucleotide
  Antisense strand to SEQ ID NO: 1113896
uagcugcaagaaugcaagc

SEQ ID NO: 1113898 - RNA, 19 nt, Artificial Sequence
  Description of Artificial Sequence: Synthetic oligonucleotide
  Sense strand starting at position 2797 of SEQ ID NO: 915888
gaaacaauguaugucaagu

SEQ ID NO: 1113899 - RNA, 19 nt, Artificial Sequence
  Description of Artificial Sequence: Synthetic oligonucleotide
  Antisense strand to SEQ ID NO: 1113898
acuugacauacauuguuuc

SEQ ID NO: 1113900 - RNA, 19 nt, Artificial Sequence
  Description of Artificial Sequence: Synthetic oligonucleotide
  Sense strand starting at position 2840 of SEQ ID NO: 915888
guagguggucaaugaauau

SEQ ID NO: 1113901 - RNA, 19 nt, Artificial Sequence
  Description of Artificial Sequence: Synthetic oligonucleotide
  Antisense strand to SEQ ID NO: 1113900
auauucauugaccaccuac

SEQ ID NO: 1113902 - RNA, 19 nt, Artificial Sequence
  Description of Artificial Sequence: Synthetic oligonucleotide
  Sense strand starting at position 2893 of SEQ ID NO: 915888
gagaacaggucuuugcaca

SEQ ID NO: 1113903 - RNA, 19 nt, Artificial Sequence
  Description of Artificial Sequence: Synthetic oligonucleotide
  Antisense strand to SEQ ID NO: 1113902
ugugcaaagaccuguucuc

SEQ ID NO: 1113904 - RNA, 19 nt, Artificial Sequence
  Description of Artificial Sequence: Synthetic oligonucleotide
  Sense strand starting at position 3029 of SEQ ID NO: 915888
gcggcugugaugccugaua

SEQ ID NO: 1113905 - RNA, 19 nt, Artificial Sequence
  Description of Artificial Sequence: Synthetic oligonucleotide
  Antisense strand to SEQ ID NO: 1113904
uaucaggcaucacagccgc

SEQ ID NO: 1113906 - RNA, 19 nt, Artificial Sequence
  Description of Artificial Sequence: Synthetic oligonucleotide
  Sense strand starting at position 3323 of SEQ ID NO: 915888
acagaaaucugggagagau

SEQ ID NO: 1113907 - RNA, 19 nt, Artificial Sequence
  Description of Artificial Sequence: Synthetic oligonucleotide
  Antisense strand to SEQ ID NO: 1113906
aucucucccagauuucugu

SEQ ID NO: 1113908 - RNA, 19 nt, Artificial Sequence
  Description of Artificial Sequence: Synthetic oligonucleotide
  Sense strand starting at position 3358 of SEQ ID NO: 915888
gcgcuuuguguuguaucau

SEQ ID NO: 1113909 - RNA, 19 nt, Artificial Sequence
  Description of Artificial Sequence: Synthetic oligonucleotide
  Antisense strand to SEQ ID NO: 1113908
augauacaacacaaagcgc

SEQ ID NO: 1113910 - RNA, 19 nt, Artificial Sequence
  Description of Artificial Sequence: Synthetic oligonucleotide
  Sense strand starting at position 3423 of SEQ ID NO: 915888
gagugacuuaucuagggug

SEQ ID NO: 1113911 - RNA, 19 nt, Artificial Sequence
  Description of Artificial Sequence: Synthetic oligonucleotide
  Antisense strand to SEQ ID NO: 1113910
cacccuagauaagucacuc

SEQ ID NO: 1113912 - RNA, 19 nt, Artificial Sequence
  Description of Artificial Sequence: Synthetic oligonucleotide
  Sense strand starting at position 3544 of SEQ ID NO: 915888
ggacaaugggaguguggau

SEQ ID NO: 1113913 - RNA, 19 nt, Artificial Sequence
  Description of Artificial Sequence: Synthetic oligonucleotide
  Antisense strand to SEQ ID NO: 1113912
auccacacucccauugucc

SEQ ID NO: 1113914 - RNA, 19 nt, Artificial Sequence
  Description of Artificial Sequence: Synthetic oligonucleotide
  Sense strand starting at position 3620 of SEQ ID NO: 915888
ugcaacugagaauguauca

SEQ ID NO: 1113915 - RNA, 19 nt, Artificial Sequence
  Description of Artificial Sequence: Synthetic oligonucleotide
  Antisense strand to SEQ ID NO: 1113914
ugauacauucucaguugca

SEQ ID NO: 1113916 - RNA, 19 nt, Artificial Sequence
  Description of Artificial Sequence: Synthetic oligonucleotide
  Sense strand starting at position 3779 of SEQ ID NO: 915888
guuuguucuccuguguauu

SEQ ID NO: 1113917 - RNA, 19 nt, Artificial Sequence
  Description of Artificial Sequence: Synthetic oligonucleotide
  Antisense strand to SEQ ID NO: 1113916
aauacacaggagaacaaac

SEQ ID NO: 1113918 - RNA, 19 nt, Artificial Sequence
  Description of Artificial Sequence: Synthetic oligonucleotide
  Sense strand starting at position 3780 of SEQ ID NO: 915888
uuuguucuccuguguauuu

SEQ ID NO: 1113919 - RNA, 19 nt, Artificial Sequence
  Description of Artificial Sequence: Synthetic oligonucleotide
  Antisense strand to SEQ ID NO: 1113918
aaauacacaggagaacaaa

SEQ ID NO: 1113920 - RNA, 19 nt, Artificial Sequence
  Description of Artificial Sequence: Synthetic oligonucleotide
  Sense strand starting at position 35 of SEQ ID NO: 915889
gccaccuucuggcuguaua

SEQ ID NO: 1113921 - RNA, 19 nt, Artificial Sequence
  Description of Artificial Sequence: Synthetic oligonucleotide
  Antisense strand to SEQ ID NO: 1113920
uauacagccagaagguggc

SEQ ID NO: 1113922 - RNA, 19 nt, Artificial Sequence
  Description of Artificial Sequence: Synthetic oligonucleotide
  Sense strand starting at position 143 of SEQ ID NO: 915889
agcgaagccauuuguuaaa

SEQ ID NO: 1113923 - RNA, 19 nt, Artificial Sequence
  Description of Artificial Sequence: Synthetic oligonucleotide
  Antisense strand to SEQ ID NO: 1113922
uuuaacaaauggcuucgcu

SEQ ID NO: 1113924 - RNA, 19 nt, Artificial Sequence
  Description of Artificial Sequence: Synthetic oligonucleotide
  Sense strand starting at position 146 of SEQ ID NO: 915889
gaagccauuuguuaaagac

SEQ ID NO: 1113925 - RNA, 19 nt, Artificial Sequence
  Description of Artificial Sequence: Synthetic oligonucleotide
  Antisense strand to SEQ ID NO: 1113924
gucuuuaacaaauggcuuc

SEQ ID NO: 1113926 - RNA, 19 nt, Artificial Sequence
  Description of Artificial Sequence: Synthetic oligonucleotide
  Sense strand starting at position 155 of SEQ ID NO: 915889
uguuaaagacacuguacau

SEQ ID NO: 1113927 - RNA, 19 nt, Artificial Sequence
  Description of Artificial Sequence: Synthetic oligonucleotide
  Antisense strand to SEQ ID NO: 1113926
auguacagugucuuuaaca

SEQ ID NO: 1113928 - RNA, 19 nt, Artificial Sequence
  Description of Artificial Sequence: Synthetic oligonucleotide
  Sense strand starting at position 242 of SEQ ID NO: 915889
uggacacgggccuaucaau

SEQ ID NO: 1113929 - RNA, 19 nt, Artificial Sequence
  Description of Artificial Sequence: Synthetic oligonucleotide
  Antisense strand to SEQ ID NO: 1113928
auugauaggcccgugucca

SEQ ID NO: 1113930 - RNA, 19 nt, Artificial Sequence
  Description of Artificial Sequence: Synthetic oligonucleotide
  Sense strand starting at position 414 of SEQ ID NO: 915889
ugacucacagcuugacaau

SEQ ID NO: 1113931 - RNA, 19 nt, Artificial Sequence
  Description of Artificial Sequence: Synthetic oligonucleotide
  Antisense strand to SEQ ID NO: 1113930
auugucaagcugugaguca

SEQ ID NO: 1113932 - RNA, 19 nt, Artificial Sequence
  Description of Artificial Sequence: Synthetic oligonucleotide
  Sense strand starting at position 438 of SEQ ID NO: 915889
agcaaauccuccucugugu

SEQ ID NO: 1113933 - RNA, 19 nt, Artificial Sequence
  Description of Artificial Sequence: Synthetic oligonucleotide
  Antisense strand to SEQ ID NO: 1113932
acacagaggaggauuugcu

SEQ ID NO: 1113934 - RNA, 19 nt, Artificial Sequence
  Description of Artificial Sequence: Synthetic oligonucleotide
  Sense strand starting at position 445 of SEQ ID NO: 915889
ccuccucuguguuugauua

SEQ ID NO: 1113935 - RNA, 19 nt, Artificial Sequence
  Description of Artificial Sequence: Synthetic oligonucleotide
  Antisense strand to SEQ ID NO: 1113934
uaaucaaacacagaggagg

SEQ ID NO: 1113936 - RNA, 19 nt, Artificial Sequence
  Description of Artificial Sequence: Synthetic oligonucleotide
  Sense strand starting at position 446 of SEQ ID NO: 915889
cuccucuguguuugauuaa

SEQ ID NO: 1113937 - RNA, 19 nt, Artificial Sequence
  Description of Artificial Sequence: Synthetic oligonucleotide
  Antisense strand to SEQ ID NO: 1113936
uuaaucaaacacagaggag

SEQ ID NO: 1113938 - RNA, 19 nt, Artificial Sequence
  Description of Artificial Sequence: Synthetic oligonucleotide
  Sense strand starting at position 447 of SEQ ID NO: 915889
uccucuguguuugauuaau

SEQ ID NO: 1113939 - RNA, 19 nt, Artificial Sequence
  Description of Artificial Sequence: Synthetic oligonucleotide
  Antisense strand to SEQ ID NO: 1113938
auuaaucaaacacagagga

SEQ ID NO: 1113940 - RNA, 19 nt, Artificial Sequence
  Description of Artificial Sequence: Synthetic oligonucleotide
  Sense strand starting at position 449 of SEQ ID NO: 915889
cucuguguuugauuaauga

SEQ ID NO: 1113941 - RNA, 19 nt, Artificial Sequence
  Description of Artificial Sequence: Synthetic oligonucleotide
  Antisense strand to SEQ ID NO: 1113940
ucauuaaucaaacacagag

SEQ ID NO: 1113942 - RNA, 19 nt, Artificial Sequence
  Description of Artificial Sequence: Synthetic oligonucleotide
  Sense strand starting at position 725 of SEQ ID NO: 915889
acccaaagccgugaugaca

SEQ ID NO: 1113943 - RNA, 19 nt, Artificial Sequence
  Description of Artificial Sequence: Synthetic oligonucleotide
  Antisense strand to SEQ ID NO: 1113942
ugucaucacggcuuugggu

SEQ ID NO: 1113944 - RNA, 19 nt, Artificial Sequence
  Description of Artificial Sequence: Synthetic oligonucleotide
  Sense strand starting at position 846 of SEQ ID NO: 915889
gcagaaguuucuggcagga

SEQ ID NO: 1113945 - RNA, 19 nt, Artificial Sequence
  Description of Artificial Sequence: Synthetic oligonucleotide
  Antisense strand to SEQ ID NO: 1113944
uccugccagaaacuucugc

SEQ ID NO: 1113946 - RNA, 19 nt, Artificial Sequence
  Description of Artificial Sequence: Synthetic oligonucleotide
  Sense strand starting at position 947 of SEQ ID NO: 915889
acauaucagccuggagagu

SEQ ID NO: 1113947 - RNA, 19 nt, Artificial Sequence
  Description of Artificial Sequence: Synthetic oligonucleotide
  Antisense strand to SEQ ID NO: 1113946
acucuccaggcugauaugu

SEQ ID NO: 1113948 - RNA, 19 nt, Artificial Sequence
  Description of Artificial Sequence: Synthetic oligonucleotide
  Sense strand starting at position 948 of SEQ ID NO: 915889
cauaucagccuggagaguu

SEQ ID NO: 1113949 - RNA, 19 nt, Artificial Sequence
  Description of Artificial Sequence: Synthetic oligonucleotide
  Antisense strand to SEQ ID NO: 1113948
aacucuccaggcugauaug

SEQ ID NO: 1113950 - RNA, 19 nt, Artificial Sequence
  Description of Artificial Sequence: Synthetic oligonucleotide
  Sense strand starting at position 2127 of SEQ ID NO: 915889
gagugaugcucgucccgca

SEQ ID NO: 1113951 - RNA, 19 nt, Artificial Sequence
  Description of Artificial Sequence: Synthetic oligonucleotide
  Antisense strand to SEQ ID NO: 1113950
ugcgggacgagcaucacuc

SEQ ID NO: 1113952 - RNA, 19 nt, Artificial Sequence
  Description of Artificial Sequence: Synthetic oligonucleotide
  Sense strand starting at position 2446 of SEQ ID NO: 915889
ccuugagacucugggaguu

SEQ ID NO: 1113953 - RNA, 19 nt, Artificial Sequence
  Description of Artificial Sequence: Synthetic oligonucleotide
  Antisense strand to SEQ ID NO: 1113952
aacucccagagucucaagg

SEQ ID NO: 1113954 - RNA, 19 nt, Artificial Sequence
  Description of Artificial Sequence: Synthetic oligonucleotide
  Sense strand starting at position 2636 of SEQ ID NO: 915889
cucgaaaucuguuucuguc

SEQ ID NO: 1113955 - RNA, 19 nt, Artificial Sequence
  Description of Artificial Sequence: Synthetic oligonucleotide
  Antisense strand to SEQ ID NO: 1113954
gacagaaacagauuucgag

SEQ ID NO: 1113956 - RNA, 19 nt, Artificial Sequence
  Description of Artificial Sequence: Synthetic oligonucleotide
  Sense strand starting at position 2639 of SEQ ID NO: 915889
gaaaucuguuucugucagu

SEQ ID NO: 1113957 - RNA, 19 nt, Artificial Sequence
  Description of Artificial Sequence: Synthetic oligonucleotide
  Antisense strand to SEQ ID NO: 1113956
acugacagaaacagauuuc

SEQ ID NO: 1113958 - RNA, 19 nt, Artificial Sequence
  Description of Artificial Sequence: Synthetic oligonucleotide
  Sense strand starting at position 2652 of SEQ ID NO: 915889
gucagucagucuuugcaaa

SEQ ID NO: 1113959 - RNA, 19 nt, Artificial Sequence
  Description of Artificial Sequence: Synthetic oligonucleotide
  Antisense strand to SEQ ID NO: 1113958
uuugcaaagacugacugac

SEQ ID NO: 1113960 - RNA, 19 nt, Artificial Sequence
  Description of Artificial Sequence: Synthetic oligonucleotide
  Sense strand starting at position 2894 of SEQ ID NO: 915889
guuucugucuccuggcuau

SEQ ID NO: 1113961 - RNA, 19 nt, Artificial Sequence
  Description of Artificial Sequence: Synthetic oligonucleotide
  Antisense strand to SEQ ID NO: 1113960
auagccaggagacagaaac

SEQ ID NO: 1113962 - RNA, 19 nt, Artificial Sequence
  Description of Artificial Sequence: Synthetic oligonucleotide
  Sense strand starting at position 2960 of SEQ ID NO: 915889
gucuguuucuaccucauuu

SEQ ID NO: 1113963 - RNA, 19 nt, Artificial Sequence
  Description of Artificial Sequence: Synthetic oligonucleotide
  Antisense strand to SEQ ID NO: 1113962
aaaugagguagaaacagac

SEQ ID NO: 1113964 - RNA, 19 nt, Artificial Sequence
  Description of Artificial Sequence: Synthetic oligonucleotide
  Sense strand starting at position 3050 of SEQ ID NO: 915889
ggugacacuuucuuccagu

SEQ ID NO: 1113965 - RNA, 19 nt, Artificial Sequence
  Description of Artificial Sequence: Synthetic oligonucleotide
  Antisense strand to SEQ ID NO: 1113964
acuggaagaaagugucacc

SEQ ID NO: 1113966 - RNA, 19 nt, Artificial Sequence
  Description of Artificial Sequence: Synthetic oligonucleotide
  Sense strand starting at position 3051 of SEQ ID NO: 915889
gugacacuuucuuccaguu

SEQ ID NO: 1113967 - RNA, 19 nt, Artificial Sequence
  Description of Artificial Sequence: Synthetic oligonucleotide
  Antisense strand to SEQ ID NO: 1113966
aacuggaagaaagugucac

SEQ ID NO: 1113968 - RNA, 19 nt, Artificial Sequence
  Description of Artificial Sequence: Synthetic oligonucleotide
  Sense strand starting at position 3300 of SEQ ID NO: 915889
cagaguaaggcucaguaaa

SEQ ID NO: 1113969 - RNA, 19 nt, Artificial Sequence
  Description of Artificial Sequence: Synthetic oligonucleotide
  Antisense strand to SEQ ID NO: 1113968
uuuacugagccuuacucug

SEQ ID NO: 1113970 - RNA, 19 nt, Artificial Sequence
  Description of Artificial Sequence: Synthetic oligonucleotide
  Sense strand starting at position 3302 of SEQ ID NO: 915889
gaguaaggcucaguaaagu

SEQ ID NO: 1113971 - RNA, 19 nt, Artificial Sequence
  Description of Artificial Sequence: Synthetic oligonucleotide
  Antisense strand to SEQ ID NO: 1113970
acuuuacugagccuuacuc

SEQ ID NO: 1113972 - RNA, 19 nt, Artificial Sequence
  Description of Artificial Sequence: Synthetic oligonucleotide
  Sense strand starting at position 3313 of SEQ ID NO: 915889
aguaaagucuccuuacguu

SEQ ID NO: 1113973 - RNA, 19 nt, Artificial Sequence
  Description of Artificial Sequence: Synthetic oligonucleotide
  Antisense strand to SEQ ID NO: 1113972
aacguaaggagacuuuacu

SEQ ID NO: 1113974 - RNA, 19 nt, Artificial Sequence
  Description of Artificial Sequence: Synthetic oligonucleotide
  Sense strand starting at position 3325 of SEQ ID NO: 915889
uuacguugugacuguuaau

SEQ ID NO: 1113975 - RNA, 19 nt, Artificial Sequence
  Description of Artificial Sequence: Synthetic oligonucleotide
  Antisense strand to SEQ ID NO: 1113974
auuaacagucacaacguaa

SEQ ID NO: 1113976 - RNA, 19 nt, Artificial Sequence
  Description of Artificial Sequence: Synthetic oligonucleotide
  Sense strand starting at position 3359 of SEQ ID NO: 915889
aggguuuaguguggugcua

SEQ ID NO: 1113977 - RNA, 19 nt, Artificial Sequence
  Description of Artificial Sequence: Synthetic oligonucleotide
  Antisense strand to SEQ ID NO: 1113976
uagcaccacacuaaacccu

SEQ ID NO: 1113978 - RNA, 19 nt, Artificial Sequence
  Description of Artificial Sequence: Synthetic oligonucleotide
  Sense strand starting at position 3580 of SEQ ID NO: 915889
ggcauuuccugcuggagca

SEQ ID NO: 1113979 - RNA, 19 nt, Artificial Sequence
  Description of Artificial Sequence: Synthetic oligonucleotide
  Antisense strand to SEQ ID NO: 1113978
ugcuccagcaggaaaugcc

SEQ ID NO: 1113980 - RNA, 19 nt, Artificial Sequence
  Description of Artificial Sequence: Synthetic oligonucleotide
  Sense strand starting at position 3608 of SEQ ID NO: 915889
ccaggucucuccucuuaag

SEQ ID NO: 1113981 - RNA, 19 nt, Artificial Sequence
  Description of Artificial Sequence: Synthetic oligonucleotide
  Antisense strand to SEQ ID NO: 1113980
cuuaagaggagagaccugg

SEQ ID NO: 1113982 - RNA, 19 nt, Artificial Sequence
  Description of Artificial Sequence: Synthetic oligonucleotide
  Sense strand starting at position 3700 of SEQ ID NO: 915889
gccaguuguacgcaggauu

SEQ ID NO: 1113983 - RNA, 19 nt, Artificial Sequence
  Description of Artificial Sequence: Synthetic oligonucleotide
  Antisense strand to SEQ ID NO: 1113982
aauccugcguacaacuggc

SEQ ID NO: 1113984 - RNA, 19 nt, Artificial Sequence
  Description of Artificial Sequence: Synthetic oligonucleotide
  Sense strand starting at position 3732 of SEQ ID NO: 915889
gggacuugggcuggacaau

SEQ ID NO: 1113985 - RNA, 19 nt, Artificial Sequence
  Description of Artificial Sequence: Synthetic oligonucleotide
  Antisense strand to SEQ ID NO: 1113984
auuguccagcccaaguccc

SEQ ID NO: 1113986 - RNA, 19 nt, Artificial Sequence
  Description of Artificial Sequence: Synthetic oligonucleotide
  Sense strand starting at position 3884 of SEQ ID NO: 915889
uccagcaucucagaaugaa

SEQ ID NO: 1113987 - RNA, 19 nt, Artificial Sequence
  Description of Artificial Sequence: Synthetic oligonucleotide
  Antisense strand to SEQ ID NO: 1113986
uucauucugagaugcugga

SEQ ID NO: 1113988 - RNA, 19 nt, Artificial Sequence
  Description of Artificial Sequence: Synthetic oligonucleotide
  Sense strand starting at position 3943 of SEQ ID NO: 915889
aagcuccgaccugaagauu

SEQ ID NO: 1113989 - RNA, 19 nt, Artificial Sequence
  Description of Artificial Sequence: Synthetic oligonucleotide
  Antisense strand to SEQ ID NO: 1113988
aaucuucaggucggagcuu

SEQ ID NO: 1113990 - RNA, 19 nt, Artificial Sequence
  Description of Artificial Sequence: Synthetic oligonucleotide
  Sense strand starting at position 3951 of SEQ ID NO: 915889
accugaagauuugaacuaa

SEQ ID NO: 1113991 - RNA, 19 nt, Artificial Sequence
  Description of Artificial Sequence: Synthetic oligonucleotide
  Antisense strand to SEQ ID NO: 1113990
uuaguucaaaucuucaggu

SEQ ID NO: 1113992 - RNA, 19 nt, Artificial Sequence
  Description of Artificial Sequence: Synthetic oligonucleotide
  Sense strand starting at position 201 of SEQ ID NO: 915890
gugccauauccugggccua

SEQ ID NO: 1113993 - RNA, 19 nt, Artificial Sequence
  Description of Artificial Sequence: Synthetic oligonucleotide
  Antisense strand to SEQ ID NO: 1113992
uaggcccaggauauggcac

SEQ ID NO: 1113994 - RNA, 19 nt, Artificial Sequence
  Description of Artificial Sequence: Synthetic oligonucleotide
  Sense strand starting at position 203 of SEQ ID NO: 915890
gccauauccugggccuaga

SEQ ID NO: 1113995 - RNA, 19 nt, Artificial Sequence
  Description of Artificial Sequence: Synthetic oligonucleotide
  Antisense strand to SEQ ID NO: 1113994
ucuaggcccaggauauggc

SEQ ID NO: 1113996 - RNA, 19 nt, Artificial Sequence
  Description of Artificial Sequence: Synthetic oligonucleotide
  Sense strand starting at position 524 of SEQ ID NO: 915890
gggaguuacucuggaccag

SEQ ID NO: 1113997 - RNA, 19 nt, Artificial Sequence
  Description of Artificial Sequence: Synthetic oligonucleotide
  Antisense strand to SEQ ID NO: 1113996
cugguccagaguaacuccc

SEQ ID NO: 1113998 - RNA, 19 nt, Artificial Sequence
  Description of Artificial Sequence: Synthetic oligonucleotide
  Sense strand starting at position 752 of SEQ ID NO: 915890
ucaggaggcuugcuugaga

SEQ ID NO: 1113999 - RNA, 19 nt, Artificial Sequence
  Description of Artificial Sequence: Synthetic oligonucleotide
  Antisense strand to SEQ ID NO: 1113998
ucucaagcaagccuccuga

SEQ ID NO: 1114000 - RNA, 19 nt, Artificial Sequence
  Description of Artificial Sequence: Synthetic oligonucleotide
  Sense strand starting at position 755 of SEQ ID NO: 915890
ggaggcuugcuugagagga

SEQ ID NO: 1114001 - RNA, 19 nt, Artificial Sequence
  Description of Artificial Sequence: Synthetic oligonucleotide
  Antisense strand to SEQ ID NO: 1114000
uccucucaagcaagccucc

SEQ ID NO: 1114002 - RNA, 19 nt, Artificial Sequence
  Description of Artificial Sequence: Synthetic oligonucleotide
  Sense strand starting at position 757 of SEQ ID NO: 915890
aggcuugcuugagaggaga

SEQ ID NO: 1114003 - RNA, 19 nt, Artificial Sequence
  Description of Artificial Sequence: Synthetic oligonucleotide
  Antisense strand to SEQ ID NO: 1114002
ucuccucucaagcaagccu

SEQ ID NO: 1114004 - RNA, 19 nt, Artificial Sequence
  Description of Artificial Sequence: Synthetic oligonucleotide
  Sense strand starting at position 759 of SEQ ID NO: 915890
gcuugcuugagaggagacu

SEQ ID NO: 1114005 - RNA, 19 nt, Artificial Sequence
  Description of Artificial Sequence: Synthetic oligonucleotide
  Antisense strand to SEQ ID NO: 1114004
agucuccucucaagcaagc

SEQ ID NO: 1114006 - RNA, 19 nt, Artificial Sequence
  Description of Artificial Sequence: Synthetic oligonucleotide
  Sense strand starting at position 822 of SEQ ID NO: 915890
cacagaugguuacgaaaug

SEQ ID NO: 1114007 - RNA, 19 nt, Artificial Sequence
  Description of Artificial Sequence: Synthetic oligonucleotide
  Antisense strand to SEQ ID NO: 1114006
cauuucguaaccaucugug

SEQ ID NO: 1114008 - RNA, 19 nt, Artificial Sequence
  Description of Artificial Sequence: Synthetic oligonucleotide
  Sense strand starting at position 876 of SEQ ID NO: 915890
ggaagaacuugggaacagu

SEQ ID NO: 1114009 - RNA, 19 nt, Artificial Sequence
  Description of Artificial Sequence: Synthetic oligonucleotide
  Antisense strand to SEQ ID NO: 1114008
acuguucccaaguucuucc

SEQ ID NO: 1114010 - RNA, 19 nt, Artificial Sequence
  Description of Artificial Sequence: Synthetic oligonucleotide
  Sense strand starting at position 983 of SEQ ID NO: 915890
ggccgcaucuacccuuaaa

SEQ ID NO: 1114011 - RNA, 19 nt, Artificial Sequence
  Description of Artificial Sequence: Synthetic oligonucleotide
  Antisense strand to SEQ ID NO: 1114010
uuuaaggguagaugcggcc

SEQ ID NO: 1114012 - RNA, 19 nt, Artificial Sequence
  Description of Artificial Sequence: Synthetic oligonucleotide
  Sense strand starting at position 1985 of SEQ ID NO: 915890
ggaaccuccuacgaugauu

SEQ ID NO: 1114013 - RNA, 19 nt, Artificial Sequence
  Description of Artificial Sequence: Synthetic oligonucleotide
  Antisense strand to SEQ ID NO: 1114012
aaucaucguaggagguucc

SEQ ID NO: 1114014 - RNA, 19 nt, Artificial Sequence
  Description of Artificial Sequence: Synthetic oligonucleotide
  Sense strand starting at position 2107 of SEQ ID NO: 915890
guuccaaugucagcuuaga

SEQ ID NO: 1114015 - RNA, 19 nt, Artificial Sequence
  Description of Artificial Sequence: Synthetic oligonucleotide
  Antisense strand to SEQ ID NO: 1114014
ucuaagcugacauuggaac

SEQ ID NO: 1114016 - RNA, 19 nt, Artificial Sequence
  Description of Artificial Sequence: Synthetic oligonucleotide
  Sense strand starting at position 2127 of SEQ ID NO: 915890
acagcaagaucacucagau

SEQ ID NO: 1114017 - RNA, 19 nt, Artificial Sequence
  Description of Artificial Sequence: Synthetic oligonucleotide
  Antisense strand to SEQ ID NO: 1114016
aucugagugaucuugcugu

SEQ ID NO: 1114018 - RNA, 19 nt, Artificial Sequence
  Description of Artificial Sequence: Synthetic oligonucleotide
  Sense strand starting at position 2247 of SEQ ID NO: 915890
cccguaaacccagaaagua

SEQ ID NO: 1114019 - RNA, 19 nt, Artificial Sequence
  Description of Artificial Sequence: Synthetic oligonucleotide
  Antisense strand to SEQ ID NO: 1114018
uacuuucuggguuuacggg

SEQ ID NO: 1114020 - RNA, 19 nt, Artificial Sequence
  Description of Artificial Sequence: Synthetic oligonucleotide
  Sense strand starting at position 2301 of SEQ ID NO: 915890
acagaaugcagaugugaau

SEQ ID NO: 1114021 - RNA, 19 nt, Artificial Sequence
  Description of Artificial Sequence: Synthetic oligonucleotide
  Antisense strand to SEQ ID NO: 1114020
auucacaucugcauucugu

SEQ ID NO: 1114022 - RNA, 19 nt, Artificial Sequence
  Description of Artificial Sequence: Synthetic oligonucleotide
  Sense strand starting at position 2304 of SEQ ID NO: 915890
gaaugcagaugugaauaca

SEQ ID NO: 1114023 - RNA, 19 nt, Artificial Sequence
  Description of Artificial Sequence: Synthetic oligonucleotide
  Antisense strand to SEQ ID NO: 1114022
uguauucacaucugcauuc

SEQ ID NO: 1114024 - RNA, 19 nt, Artificial Sequence
  Description of Artificial Sequence: Synthetic oligonucleotide
  Sense strand starting at position 2314 of SEQ ID NO: 915890
gugaauacagucgacuuua

SEQ ID NO: 1114025 - RNA, 19 nt, Artificial Sequence
  Description of Artificial Sequence: Synthetic oligonucleotide
  Antisense strand to SEQ ID NO: 1114024
uaaagucgacuguauucac

SEQ ID NO: 1114026 - RNA, 19 nt, Artificial Sequence
  Description of Artificial Sequence: Synthetic oligonucleotide
  Sense strand starting at position 2389 of SEQ ID NO: 915890
ggguuuauuccacagcgac

SEQ ID NO: 1114027 - RNA, 19 nt, Artificial Sequence
  Description of Artificial Sequence: Synthetic oligonucleotide
  Antisense strand to SEQ ID NO: 1114026
gucgcuguggaauaaaccc

SEQ ID NO: 1114028 - RNA, 19 nt, Artificial Sequence
  Description of Artificial Sequence: Synthetic oligonucleotide
  Sense strand starting at position 2703 of SEQ ID NO: 915890
agcagauagcaagguaucu

SEQ ID NO: 1114029 - RNA, 19 nt, Artificial Sequence
  Description of Artificial Sequence: Synthetic oligonucleotide
  Antisense strand to SEQ ID NO: 1114028
agauaccuugcuaucugcu

SEQ ID NO: 1114030 - RNA, 19 nt, Artificial Sequence
  Description of Artificial Sequence: Synthetic oligonucleotide
  Sense strand starting at position 2733 of SEQ ID NO: 915890
aguguuccucccuaagaag

SEQ ID NO: 1114031 - RNA, 19 nt, Artificial Sequence
  Description of Artificial Sequence: Synthetic oligonucleotide
  Antisense strand to SEQ ID NO: 1114030
cuucuuagggaggaacacu

SEQ ID NO: 1114032 - RNA, 19 nt, Artificial Sequence
  Description of Artificial Sequence: Synthetic oligonucleotide
  Sense strand starting at position 2736 of SEQ ID NO: 915890
guuccucccuaagaagagu

SEQ ID NO: 1114033 - RNA, 19 nt, Artificial Sequence
  Description of Artificial Sequence: Synthetic oligonucleotide
  Antisense strand to SEQ ID NO: 1114032
acucuucuuagggaggaac

SEQ ID NO: 1114034 - RNA, 19 nt, Artificial Sequence
  Description of Artificial Sequence: Synthetic oligonucleotide
  Sense strand starting at position 2808 of SEQ ID NO: 915890
ugaccucaucccuggcaua

SEQ ID NO: 1114035 - RNA, 19 nt, Artificial Sequence
  Description of Artificial Sequence: Synthetic oligonucleotide
  Antisense strand to SEQ ID NO: 1114034
uaugccagggaugagguca

SEQ ID NO: 1114036 - RNA, 19 nt, Artificial Sequence
  Description of Artificial Sequence: Synthetic oligonucleotide
  Sense strand starting at position 2820 of SEQ ID NO: 915890
uggcauaucuaccugccua

SEQ ID NO: 1114037 - RNA, 19 nt, Artificial Sequence
  Description of Artificial Sequence: Synthetic oligonucleotide
  Antisense strand to SEQ ID NO: 1114036
uaggcagguagauaugcca

SEQ ID NO: 1114038 - RNA, 19 nt, Artificial Sequence
  Description of Artificial Sequence: Synthetic oligonucleotide
  Sense strand starting at position 2871 of SEQ ID NO: 915890
aacgcaaucugucuccaga

SEQ ID NO: 1114039 - RNA, 19 nt, Artificial Sequence
  Description of Artificial Sequence: Synthetic oligonucleotide
  Antisense strand to SEQ ID NO: 1114038
ucuggagacagauugcguu

SEQ ID NO: 1114040 - RNA, 19 nt, Artificial Sequence
  Description of Artificial Sequence: Synthetic oligonucleotide
  Sense strand starting at position 2873 of SEQ ID NO: 915890
cgcaaucugucuccagaug

SEQ ID NO: 1114041 - RNA, 19 nt, Artificial Sequence
  Description of Artificial Sequence: Synthetic oligonucleotide
  Antisense strand to SEQ ID NO: 1114040
caucuggagacagauugcg

SEQ ID NO: 1114042 - RNA, 19 nt, Artificial Sequence
  Description of Artificial Sequence: Synthetic oligonucleotide
  Sense strand starting at position 2874 of SEQ ID NO: 915890
gcaaucugucuccagaugu

SEQ ID NO: 1114043 - RNA, 19 nt, Artificial Sequence
  Description of Artificial Sequence: Synthetic oligonucleotide
  Antisense strand to SEQ ID NO: 1114042
acaucuggagacagauugc

SEQ ID NO: 1114044 - RNA, 19 nt, Artificial Sequence
  Description of Artificial Sequence: Synthetic oligonucleotide
  Sense strand starting at position 2959 of SEQ ID NO: 915890
gguggcaucugggaagcau

SEQ ID NO: 1114045 - RNA, 19 nt, Artificial Sequence
  Description of Artificial Sequence: Synthetic oligonucleotide
  Antisense strand to SEQ ID NO: 1114044
augcuucccagaugccacc

SEQ ID NO: 1114046 - RNA, 19 nt, Artificial Sequence
  Description of Artificial Sequence: Synthetic oligonucleotide
  Sense strand starting at position 3318 of SEQ ID NO: 915890
gcuggccucuccuuggaaa

SEQ ID NO: 1114047 - RNA, 19 nt, Artificial Sequence
  Description of Artificial Sequence: Synthetic oligonucleotide
  Antisense strand to SEQ ID NO: 1114046
uuuccaaggagaggccagc

SEQ ID NO: 1114048 - RNA, 19 nt, Artificial Sequence
  Description of Artificial Sequence: Synthetic oligonucleotide
  Sense strand starting at position 3368 of SEQ ID NO: 915890
acucccuuugcuuggguaa

SEQ ID NO: 1114049 - RNA, 19 nt, Artificial Sequence
  Description of Artificial Sequence: Synthetic oligonucleotide
  Antisense strand to SEQ ID NO: 1114048
uuacccaagcaaagggagu

SEQ ID NO: 1114050 - RNA, 19 nt, Artificial Sequence
  Description of Artificial Sequence: Synthetic oligonucleotide
  Sense strand starting at position 3496 of SEQ ID NO: 915890
ggguguugucaugguguga

SEQ ID NO: 1114051 - RNA, 19 nt, Artificial Sequence
  Description of Artificial Sequence: Synthetic oligonucleotide
  Antisense strand to SEQ ID NO: 1114050
ucacaccaugacaacaccc

SEQ ID NO: 1114052 - RNA, 19 nt, Artificial Sequence
  Description of Artificial Sequence: Synthetic oligonucleotide
  Sense strand starting at position 3500 of SEQ ID NO: 915890
guugucauggugugaaugu

SEQ ID NO: 1114053 - RNA, 19 nt, Artificial Sequence
  Description of Artificial Sequence: Synthetic oligonucleotide
  Antisense strand to SEQ ID NO: 1114052
acauucacaccaugacaac

SEQ ID NO: 1114054 - RNA, 19 nt, Artificial Sequence
  Description of Artificial Sequence: Synthetic oligonucleotide
  Sense strand starting at position 3583 of SEQ ID NO: 915890
gcauguagugucuugcaca

SEQ ID NO: 1114055 - RNA, 19 nt, Artificial Sequence
  Description of Artificial Sequence: Synthetic oligonucleotide
  Antisense strand to SEQ ID NO: 1114054
ugugcaagacacuacaugc

SEQ ID NO: 1114056 - RNA, 19 nt, Artificial Sequence
  Description of Artificial Sequence: Synthetic oligonucleotide
  Sense strand starting at position 3588 of SEQ ID NO: 915890
uagugucuugcacagagau

SEQ ID NO: 1114057 - RNA, 19 nt, Artificial Sequence
  Description of Artificial Sequence: Synthetic oligonucleotide
  Antisense strand to SEQ ID NO: 1114056
aucucugugcaagacacua

SEQ ID NO: 1114058 - RNA, 19 nt, Artificial Sequence
  Description of Artificial Sequence: Synthetic oligonucleotide
  Sense strand starting at position 3590 of SEQ ID NO: 915890
gugucuugcacagagauug

SEQ ID NO: 1114059 - RNA, 19 nt, Artificial Sequence
  Description of Artificial Sequence: Synthetic oligonucleotide
  Antisense strand to SEQ ID NO: 1114058
caaucucugugcaagacac

SEQ ID NO: 1114060 - RNA, 19 nt, Artificial Sequence
  Description of Artificial Sequence: Synthetic oligonucleotide
  Sense strand starting at position 3598 of SEQ ID NO: 915890
cacagagauuggcacagua

SEQ ID NO: 1114061 - RNA, 19 nt, Artificial Sequence
  Description of Artificial Sequence: Synthetic oligonucleotide
  Antisense strand to SEQ ID NO: 1114060
uacugugccaaucucugug

SEQ ID NO: 1114062 - RNA, 19 nt, Artificial Sequence
  Description of Artificial Sequence: Synthetic oligonucleotide
  Sense strand starting at position 3676 of SEQ ID NO: 915890
augacuaugucugcugcau

SEQ ID NO: 1114063 - RNA, 19 nt, Artificial Sequence
  Description of Artificial Sequence: Synthetic oligonucleotide
  Antisense strand to SEQ ID NO: 1114062
augcagcagacauagucau

SEQ ID NO: 1114064 - RNA, 19 nt, Artificial Sequence
  Description of Artificial Sequence: Synthetic oligonucleotide
  Sense strand starting at position 3678 of SEQ ID NO: 915890
gacuaugucugcugcauuu

SEQ ID NO: 1114065 - RNA, 19 nt, Artificial Sequence
  Description of Artificial Sequence: Synthetic oligonucleotide
  Antisense strand to SEQ ID NO: 1114064
aaaugcagcagacauaguc

SEQ ID NO: 1114066 - RNA, 19 nt, Artificial Sequence
  Description of Artificial Sequence: Synthetic oligonucleotide
  Sense strand starting at position 3728 of SEQ ID NO: 915890
gacugagcccucugauauc

SEQ ID NO: 1114067 - RNA, 19 nt, Artificial Sequence
  Description of Artificial Sequence: Synthetic oligonucleotide
  Antisense strand to SEQ ID NO: 1114066
gauaucagagggcucaguc

SEQ ID NO: 1114068 - RNA, 19 nt, Artificial Sequence
  Description of Artificial Sequence: Synthetic oligonucleotide
  Sense strand starting at position 3863 of SEQ ID NO: 915890
ccauguccucuccagggaa

SEQ ID NO: 1114069 - RNA, 19 nt, Artificial Sequence
  Description of Artificial Sequence: Synthetic oligonucleotide
  Antisense strand to SEQ ID NO: 1114068
uucccuggagaggacaugg

SEQ ID NO: 1114070 - RNA, 19 nt, Artificial Sequence
  Description of Artificial Sequence: Synthetic oligonucleotide
  Sense strand starting at position 3963 of SEQ ID NO: 915890
gcgugucucuguucucauc

SEQ ID NO: 1114071 - RNA, 19 nt, Artificial Sequence
  Description of Artificial Sequence: Synthetic oligonucleotide
  Antisense strand to SEQ ID NO: 1114070
gaugagaacagagacacgc

SEQ ID NO: 1114072 - RNA, 19 nt, Artificial Sequence
  Description of Artificial Sequence: Synthetic oligonucleotide
  Sense strand starting at position 4 of SEQ ID NO: 915891
ggucuuaaguuuccauuau

SEQ ID NO: 1114073 - RNA, 19 nt, Artificial Sequence
  Description of Artificial Sequence: Synthetic oligonucleotide
  Antisense strand to SEQ ID NO: 1114072
auaauggaaacuuaagacc

SEQ ID NO: 1114074 - RNA, 19 nt, Artificial Sequence
  Description of Artificial Sequence: Synthetic oligonucleotide
  Sense strand starting at position 169 of SEQ ID NO: 915891
uuagaaagcuuguugaguu

SEQ ID NO: 1114075 - RNA, 19 nt, Artificial Sequence
  Description of Artificial Sequence: Synthetic oligonucleotide
  Antisense strand to SEQ ID NO: 1114074
aacucaacaagcuuucuaa

SEQ ID NO: 1114076 - RNA, 19 nt, Artificial Sequence
  Description of Artificial Sequence: Synthetic oligonucleotide
  Sense strand starting at position 173 of SEQ ID NO: 915891
aaagcuuguugaguucuau

SEQ ID NO: 1114077 - RNA, 19 nt, Artificial Sequence
  Description of Artificial Sequence: Synthetic oligonucleotide
  Antisense strand to SEQ ID NO: 1114076
auagaacucaacaagcuuu

SEQ ID NO: 1114078 - RNA, 19 nt, Artificial Sequence
  Description of Artificial Sequence: Synthetic oligonucleotide
  Sense strand starting at position 326 of SEQ ID NO: 915891
cuaacuaugcaagguaaua

SEQ ID NO: 1114079 - RNA, 19 nt, Artificial Sequence
  Description of Artificial Sequence: Synthetic oligonucleotide
  Antisense strand to SEQ ID NO: 1114078
uauuaccuugcauaguuag

SEQ ID NO: 1114080 - RNA, 19 nt, Artificial Sequence
  Description of Artificial Sequence: Synthetic oligonucleotide
  Sense strand starting at position 360 of SEQ ID NO: 915891
acaggacgcaugugaauau

SEQ ID NO: 1114081 - RNA, 19 nt, Artificial Sequence
  Description of Artificial Sequence: Synthetic oligonucleotide
  Antisense strand to SEQ ID NO: 1114080
auauucacaugcguccugu

SEQ ID NO: 1114082 - RNA, 19 nt, Artificial Sequence
  Description of Artificial Sequence: Synthetic oligonucleotide
  Sense strand starting at position 364 of SEQ ID NO: 915891
gacgcaugugaauauguga

SEQ ID NO: 1114083 - RNA, 19 nt, Artificial Sequence
  Description of Artificial Sequence: Synthetic oligonucleotide
  Antisense strand to SEQ ID NO: 1114082
ucacauauucacaugcguc

SEQ ID NO: 1114084 - RNA, 19 nt, Artificial Sequence
  Description of Artificial Sequence: Synthetic oligonucleotide
  Sense strand starting at position 389 of SEQ ID NO: 915891
ggagccuuuccuggcugaa

SEQ ID NO: 1114085 - RNA, 19 nt, Artificial Sequence
  Description of Artificial Sequence: Synthetic oligonucleotide
  Antisense strand to SEQ ID NO: 1114084
uucagccaggaaaggcucc

SEQ ID NO: 1114086 - RNA, 19 nt, Artificial Sequence
  Description of Artificial Sequence: Synthetic oligonucleotide
  Sense strand starting at position 401 of SEQ ID NO: 915891
ggcugaauccaaggucaau

SEQ ID NO: 1114087 - RNA, 19 nt, Artificial Sequence
  Description of Artificial Sequence: Synthetic oligonucleotide
  Antisense strand to SEQ ID NO: 1114086
auugaccuuggauucagcc

SEQ ID NO: 1114088 - RNA, 19 nt, Artificial Sequence
  Description of Artificial Sequence: Synthetic oligonucleotide
  Sense strand starting at position 449 of SEQ ID NO: 915891
uggauuaguuucuuucuua

SEQ ID NO: 1114089 - RNA, 19 nt, Artificial Sequence
  Description of Artificial Sequence: Synthetic oligonucleotide
  Antisense strand to SEQ ID NO: 1114088
uaagaaagaaacuaaucca

SEQ ID NO: 1114090 - RNA, 19 nt, Artificial Sequence
  Description of Artificial Sequence: Synthetic oligonucleotide
  Sense strand starting at position 450 of SEQ ID NO: 915891
ggauuaguuucuuucuuag

SEQ ID NO: 1114091 - RNA, 19 nt, Artificial Sequence
  Description of Artificial Sequence: Synthetic oligonucleotide
  Antisense strand to SEQ ID NO: 1114090
cuaagaaagaaacuaaucc

SEQ ID NO: 1114092 - RNA, 19 nt, Artificial Sequence
  Description of Artificial Sequence: Synthetic oligonucleotide
  Sense strand starting at position 502 of SEQ ID NO: 915891
aguccaaugggcuaugaua

SEQ ID NO: 1114093 - RNA, 19 nt, Artificial Sequence
  Description of Artificial Sequence: Synthetic oligonucleotide
  Antisense strand to SEQ ID NO: 1114092
uaucauagcccauuggacu

SEQ ID NO: 1114094 - RNA, 19 nt, Artificial Sequence
  Description of Artificial Sequence: Synthetic oligonucleotide
  Sense strand starting at position 504 of SEQ ID NO: 915891
uccaaugggcuaugauaau

SEQ ID NO: 1114095 - RNA, 19 nt, Artificial Sequence
  Description of Artificial Sequence: Synthetic oligonucleotide
  Antisense strand to SEQ ID NO: 1114094
auuaucauagcccauugga

SEQ ID NO: 1114096 - RNA, 19 nt, Artificial Sequence
  Description of Artificial Sequence: Synthetic oligonucleotide
  Sense strand starting at position 621 of SEQ ID NO: 915891
cuaccuaccugauugagga

SEQ ID NO: 1114097 - RNA, 19 nt, Artificial Sequence
  Description of Artificial Sequence: Synthetic oligonucleotide
  Antisense strand to SEQ ID NO: 1114096
uccucaaucagguagguag

SEQ ID NO: 1114098 - RNA, 19 nt, Artificial Sequence
  Description of Artificial Sequence: Synthetic oligonucleotide
  Sense strand starting at position 648 of SEQ ID NO: 915891
gagguaugcagcgacuaga

SEQ ID NO: 1114099 - RNA, 19 nt, Artificial Sequence
  Description of Artificial Sequence: Synthetic oligonucleotide
  Antisense strand to SEQ ID NO: 1114098
ucuagucgcugcauaccuc

SEQ ID NO: 1114100 - RNA, 19 nt, Artificial Sequence
  Description of Artificial Sequence: Synthetic oligonucleotide
  Sense strand starting at position 803 of SEQ ID NO: 915891
ccgggacggccuuacuauu

SEQ ID NO: 1114101 - RNA, 19 nt, Artificial Sequence
  Description of Artificial Sequence: Synthetic oligonucleotide
  Antisense strand to SEQ ID NO: 1114100
aauaguaaggccgucccgg

SEQ ID NO: 1114102 - RNA, 19 nt, Artificial Sequence
  Description of Artificial Sequence: Synthetic oligonucleotide
  Sense strand starting at position 873 of SEQ ID NO: 915891
ccuccuggccuggaaagau

SEQ ID NO: 1114103 - RNA, 19 nt, Artificial Sequence
  Description of Artificial Sequence: Synthetic oligonucleotide
  Antisense strand to SEQ ID NO: 1114102
aucuuuccaggccaggagg

SEQ ID NO: 1114104 - RNA, 19 nt, Artificial Sequence
  Description of Artificial Sequence: Synthetic oligonucleotide
  Sense strand starting at position 906 of SEQ ID NO: 915891
augcaaucaagacgggaau

SEQ ID NO: 1114105 - RNA, 19 nt, Artificial Sequence
  Description of Artificial Sequence: Synthetic oligonucleotide
  Antisense strand to SEQ ID NO: 1114104
auucccgucuugauugcau

SEQ ID NO: 1114106 - RNA, 19 nt, Artificial Sequence
  Description of Artificial Sequence: Synthetic oligonucleotide
  Sense strand starting at position 1173 of SEQ ID NO: 915891
ucucuucucccaggaagau

SEQ ID NO: 1114107 - RNA, 19 nt, Artificial Sequence
  Description of Artificial Sequence: Synthetic oligonucleotide
  Antisense strand to SEQ ID NO: 1114106
aucuuccugggagaagaga

SEQ ID NO: 1114108 - RNA, 19 nt, Artificial Sequence
  Description of Artificial Sequence: Synthetic oligonucleotide
  Sense strand starting at position 2255 of SEQ ID NO: 915891
aggguugugccuggaauuu

SEQ ID NO: 1114109 - RNA, 19 nt, Artificial Sequence
  Description of Artificial Sequence: Synthetic oligonucleotide
  Antisense strand to SEQ ID NO: 1114108
aaauuccaggcacaacccu

SEQ ID NO: 1114110 - RNA, 19 nt, Artificial Sequence
  Description of Artificial Sequence: Synthetic oligonucleotide
  Sense strand starting at position 2264 of SEQ ID NO: 915891
ccuggaauuuaaggacuga

SEQ ID NO: 1114111 - RNA, 19 nt, Artificial Sequence
  Description of Artificial Sequence: Synthetic oligonucleotide
  Antisense strand to SEQ ID NO: 1114110
ucaguccuuaaauuccagg

SEQ ID NO: 1114112 - RNA, 19 nt, Artificial Sequence
  Description of Artificial Sequence: Synthetic oligonucleotide
  Sense strand starting at position 2354 of SEQ ID NO: 915891
cgggauaugggugaacagu

SEQ ID NO: 1114113 - RNA, 19 nt, Artificial Sequence
  Description of Artificial Sequence: Synthetic oligonucleotide
  Antisense strand to SEQ ID NO: 1114112
acuguucacccauaucccg

SEQ ID NO: 1114114 - RNA, 19 nt, Artificial Sequence
  Description of Artificial Sequence: Synthetic oligonucleotide
  Sense strand starting at position 2578 of SEQ ID NO: 915891
uggacucugagccaguuaa

SEQ ID NO: 1114115 - RNA, 19 nt, Artificial Sequence
  Description of Artificial Sequence: Synthetic oligonucleotide
  Antisense strand to SEQ ID NO: 1114114
uuaacuggcucagagucca

SEQ ID NO: 1114116 - RNA, 19 nt, Artificial Sequence
  Description of Artificial Sequence: Synthetic oligonucleotide
  Sense strand starting at position 2588 of SEQ ID NO: 915891
gccaguuaaguuggaacuu

SEQ ID NO: 1114117 - RNA, 19 nt, Artificial Sequence
  Description of Artificial Sequence: Synthetic oligonucleotide
  Antisense strand to SEQ ID NO: 1114116
aaguuccaacuuaacuggc

SEQ ID NO: 1114118 - RNA, 19 nt, Artificial Sequence
  Description of Artificial Sequence: Synthetic oligonucleotide
  Sense strand starting at position 2636 of SEQ ID NO: 915891
agaagugugguuugaggaa

SEQ ID NO: 1114119 - RNA, 19 nt, Artificial Sequence
  Description of Artificial Sequence: Synthetic oligonucleotide
  Antisense strand to SEQ ID NO: 1114118
uuccucaaaccacacuucu

SEQ ID NO: 1114120 - RNA, 19 nt, Artificial Sequence
  Description of Artificial Sequence: Synthetic oligonucleotide
  Sense strand starting at position 2640 of SEQ ID NO: 915891
gugugguuugaggaagugu

SEQ ID NO: 1114121 - RNA, 19 nt, Artificial Sequence
  Description of Artificial Sequence: Synthetic oligonucleotide
  Antisense strand to SEQ ID NO: 1114120
acacuuccucaaaccacac

SEQ ID NO: 1114122 - RNA, 19 nt, Artificial Sequence
  Description of Artificial Sequence: Synthetic oligonucleotide
  Sense strand starting at position 2649 of SEQ ID NO: 915891
gaggaagugugccuagaug

SEQ ID NO: 1114123 - RNA, 19 nt, Artificial Sequence
  Description of Artificial Sequence: Synthetic oligonucleotide
  Antisense strand to SEQ ID NO: 1114122
caucuaggcacacuuccuc

SEQ ID NO: 1114124 - RNA, 19 nt, Artificial Sequence
  Description of Artificial Sequence: Synthetic oligonucleotide
  Sense strand starting at position 2658 of SEQ ID NO: 915891
ugccuagaugaguagggau

SEQ ID NO: 1114125 - RNA, 19 nt, Artificial Sequence
  Description of Artificial Sequence: Synthetic oligonucleotide
  Antisense strand to SEQ ID NO: 1114124
aucccuacucaucuaggca

SEQ ID NO: 1114126 - RNA, 19 nt, Artificial Sequence
  Description of Artificial Sequence: Synthetic oligonucleotide
  Sense strand starting at position 2765 of SEQ ID NO: 915891
cuggucuagacaugcagaa

SEQ ID NO: 1114127 - RNA, 19 nt, Artificial Sequence
  Description of Artificial Sequence: Synthetic oligonucleotide
  Antisense strand to SEQ ID NO: 1114126
uucugcaugucuagaccag

SEQ ID NO: 1114128 - RNA, 19 nt, Artificial Sequence
  Description of Artificial Sequence: Synthetic oligonucleotide
  Sense strand starting at position 2767 of SEQ ID NO: 915891
ggucuagacaugcagaacu

SEQ ID NO: 1114129 - RNA, 19 nt, Artificial Sequence
  Description of Artificial Sequence: Synthetic oligonucleotide
  Antisense strand to SEQ ID NO: 1114128
aguucugcaugucuagacc

SEQ ID NO: 1114130 - RNA, 19 nt, Artificial Sequence
  Description of Artificial Sequence: Synthetic oligonucleotide
  Sense strand starting at position 2778 of SEQ ID NO: 915891
gcagaacugccuugaaaca

SEQ ID NO: 1114131 - RNA, 19 nt, Artificial Sequence
  Description of Artificial Sequence: Synthetic oligonucleotide
  Antisense strand to SEQ ID NO: 1114130
uguuucaaggcaguucugc

SEQ ID NO: 1114132 - RNA, 19 nt, Artificial Sequence
  Description of Artificial Sequence: Synthetic oligonucleotide
  Sense strand starting at position 3014 of SEQ ID NO: 915891
aauagaagguucucuaagu

SEQ ID NO: 1114133 - RNA, 19 nt, Artificial Sequence
  Description of Artificial Sequence: Synthetic oligonucleotide
  Antisense strand to SEQ ID NO: 1114132
acuuagagaaccuucuauu

SEQ ID NO: 1114134 - RNA, 19 nt, Artificial Sequence
  Description of Artificial Sequence: Synthetic oligonucleotide
  Sense strand starting at position 3015 of SEQ ID NO: 915891
auagaagguucucuaagug

SEQ ID NO: 1114135 - RNA, 19 nt, Artificial Sequence
  Description of Artificial Sequence: Synthetic oligonucleotide
  Antisense strand to SEQ ID NO: 1114134
cacuuagagaaccuucuau

SEQ ID NO: 1114136 - RNA, 19 nt, Artificial Sequence
  Description of Artificial Sequence: Synthetic oligonucleotide
  Sense strand starting at position 3098 of SEQ ID NO: 915891
ccaaauuguugcucuuaug

SEQ ID NO: 1114137 - RNA, 19 nt, Artificial Sequence
  Description of Artificial Sequence: Synthetic oligonucleotide
  Antisense strand to SEQ ID NO: 1114136
cauaagagcaacaauuugg

SEQ ID NO: 1114138 - RNA, 19 nt, Artificial Sequence
  Description of Artificial Sequence: Synthetic oligonucleotide
  Sense strand starting at position 3115 of SEQ ID NO: 915891
ugaauuuauugccuugguu

SEQ ID NO: 1114139 - RNA, 19 nt, Artificial Sequence
  Description of Artificial Sequence: Synthetic oligonucleotide
  Antisense strand to SEQ ID NO: 1114138
aaccaaggcaauaaauuca

SEQ ID NO: 1114140 - RNA, 19 nt, Artificial Sequence
  Description of Artificial Sequence: Synthetic oligonucleotide
  Sense strand starting at position 3118 of SEQ ID NO: 915891
auuuauugccuugguugau

SEQ ID NO: 1114141 - RNA, 19 nt, Artificial Sequence
  Description of Artificial Sequence: Synthetic oligonucleotide
  Antisense strand to SEQ ID NO: 1114140
aucaaccaaggcaauaaau

SEQ ID NO: 1114142 - RNA, 19 nt, Artificial Sequence
  Description of Artificial Sequence: Synthetic oligonucleotide
  Sense strand starting at position 3144 of SEQ ID NO: 915891
guuuguuuccuugcuucca

SEQ ID NO: 1114143 - RNA, 19 nt, Artificial Sequence
  Description of Artificial Sequence: Synthetic oligonucleotide
  Antisense strand to SEQ ID NO: 1114142
uggaagcaaggaaacaaac

SEQ ID NO: 1114144 - RNA, 19 nt, Artificial Sequence
  Description of Artificial Sequence: Synthetic oligonucleotide
  Sense strand starting at position 3511 of SEQ ID NO: 915891
cucaucaaucccuggugua

SEQ ID NO: 1114145 - RNA, 19 nt, Artificial Sequence
  Description of Artificial Sequence: Synthetic oligonucleotide
  Antisense strand to SEQ ID NO: 1114144
uacaccagggauugaugag

SEQ ID NO: 1114146 - RNA, 19 nt, Artificial Sequence
  Description of Artificial Sequence: Synthetic oligonucleotide
  Sense strand starting at position 3512 of SEQ ID NO: 915891
ucaucaaucccugguguau

SEQ ID NO: 1114147 - RNA, 19 nt, Artificial Sequence
  Description of Artificial Sequence: Synthetic oligonucleotide
  Antisense strand to SEQ ID NO: 1114146
auacaccagggauugauga

SEQ ID NO: 1114148 - RNA, 19 nt, Artificial Sequence
  Description of Artificial Sequence: Synthetic oligonucleotide
  Sense strand starting at position 3612 of SEQ ID NO: 915891
accuuaauuuaagauggua

SEQ ID NO: 1114149 - RNA, 19 nt, Artificial Sequence
  Description of Artificial Sequence: Synthetic oligonucleotide
  Antisense strand to SEQ ID NO: 1114148
uaccaucuuaaauuaaggu

SEQ ID NO: 1114150 - RNA, 19 nt, Artificial Sequence
  Description of Artificial Sequence: Synthetic oligonucleotide
  Sense strand starting at position 3617 of SEQ ID NO: 915891
aauuuaagaugguaaggga

SEQ ID NO: 1114151 - RNA, 19 nt, Artificial Sequence
  Description of Artificial Sequence: Synthetic oligonucleotide
  Antisense strand to SEQ ID NO: 1114150
ucccuuaccaucuuaaauu

SEQ ID NO: 1114152 - RNA, 19 nt, Artificial Sequence
  Description of Artificial Sequence: Synthetic oligonucleotide
  Sense strand starting at position 444 of SEQ ID NO: 915892
gguggcucucgguagaaca

SEQ ID NO: 1114153 - RNA, 19 nt, Artificial Sequence
  Description of Artificial Sequence: Synthetic oligonucleotide
  Antisense strand to SEQ ID NO: 1114152
uguucuaccgagagccacc

SEQ ID NO: 1114154 - RNA, 19 nt, Artificial Sequence
  Description of Artificial Sequence: Synthetic oligonucleotide
  Sense strand starting at position 538 of SEQ ID NO: 915892
uagcgaacaggucauucua

SEQ ID NO: 1114155 - RNA, 19 nt, Artificial Sequence
  Description of Artificial Sequence: Synthetic oligonucleotide
  Antisense strand to SEQ ID NO: 1114154
uagaaugaccuguucgcua

SEQ ID NO: 1114156 - RNA, 19 nt, Artificial Sequence
  Description of Artificial Sequence: Synthetic oligonucleotide
  Sense strand starting at position 540 of SEQ ID NO: 915892
gcgaacaggucauucuaga

SEQ ID NO: 1114157 - RNA, 19 nt, Artificial Sequence
  Description of Artificial Sequence: Synthetic oligonucleotide
  Antisense strand to SEQ ID NO: 1114156
ucuagaaugaccuguucgc

SEQ ID NO: 1114158 - RNA, 19 nt, Artificial Sequence
  Description of Artificial Sequence: Synthetic oligonucleotide
  Sense strand starting at position 634 of SEQ ID NO: 915892
uggguucucaccugagcuu

SEQ ID NO: 1114159 - RNA, 19 nt, Artificial Sequence
  Description of Artificial Sequence: Synthetic oligonucleotide
  Antisense strand to SEQ ID NO: 1114158
aagcucaggugagaaccca

SEQ ID NO: 1114160 - RNA, 19 nt, Artificial Sequence
  Description of Artificial Sequence: Synthetic oligonucleotide
  Sense strand starting at position 663 of SEQ ID NO: 915892
ugggcaaucuuggucaugu

SEQ ID NO: 1114161 - RNA, 19 nt, Artificial Sequence
  Description of Artificial Sequence: Synthetic oligonucleotide
  Antisense strand to SEQ ID NO: 1114160
acaugaccaagauugccca

SEQ ID NO: 1114162 - RNA, 19 nt, Artificial Sequence
  Description of Artificial Sequence: Synthetic oligonucleotide
  Sense strand starting at position 664 of SEQ ID NO: 915892
gggcaaucuuggucauguu

SEQ ID NO: 1114163 - RNA, 19 nt, Artificial Sequence
  Description of Artificial Sequence: Synthetic oligonucleotide
  Antisense strand to SEQ ID NO: 1114162
aacaugaccaagauugccc

SEQ ID NO: 1114164 - RNA, 19 nt, Artificial Sequence
  Description of Artificial Sequence: Synthetic oligonucleotide
  Sense strand starting at position 671 of SEQ ID NO: 915892
cuuggucauguugagcaga

SEQ ID NO: 1114165 - RNA, 19 nt, Artificial Sequence
  Description of Artificial Sequence: Synthetic oligonucleotide
  Antisense strand to SEQ ID NO: 1114164
ucugcucaacaugaccaag

SEQ ID NO: 1114166 - RNA, 19 nt, Artificial Sequence
  Description of Artificial Sequence: Synthetic oligonucleotide
  Sense strand starting at position 719 of SEQ ID NO: 915892
gggaaugggaucuguaagu

SEQ ID NO: 1114167 - RNA, 19 nt, Artificial Sequence
  Description of Artificial Sequence: Synthetic oligonucleotide
  Antisense strand to SEQ ID NO: 1114166
acuuacagaucccauuccc

SEQ ID NO: 1114168 - RNA, 19 nt, Artificial Sequence
  Description of Artificial Sequence: Synthetic oligonucleotide
  Sense strand starting at position 788 of SEQ ID NO: 915892
agugaagucccuuaaaguu

SEQ ID NO: 1114169 - RNA, 19 nt, Artificial Sequence
  Description of Artificial Sequence: Synthetic oligonucleotide
  Antisense strand to SEQ ID NO: 1114168
aacuuuaagggacuucacu

SEQ ID NO: 1114170 - RNA, 19 nt, Artificial Sequence
  Description of Artificial Sequence: Synthetic oligonucleotide
  Sense strand starting at position 826 of SEQ ID NO: 915892
ggaggauauucagaaagag

SEQ ID NO: 1114171 - RNA, 19 nt, Artificial Sequence
  Description of Artificial Sequence: Synthetic oligonucleotide
  Antisense strand to SEQ ID NO: 1114170
cucuuucugaauauccucc

SEQ ID NO: 1114172 - RNA, 19 nt, Artificial Sequence
  Description of Artificial Sequence: Synthetic oligonucleotide
  Sense strand starting at position 851 of SEQ ID NO: 915892
guuuauguggagcaggaaa

SEQ ID NO: 1114173 - RNA, 19 nt, Artificial Sequence
  Description of Artificial Sequence: Synthetic oligonucleotide
  Antisense strand to SEQ ID NO: 1114172
uuuccugcuccacauaaac

SEQ ID NO: 1114174 - RNA, 19 nt, Artificial Sequence
  Description of Artificial Sequence: Synthetic oligonucleotide
  Sense strand starting at position 1178 of SEQ ID NO: 915892
cugcaugugacugggagau

SEQ ID NO: 1114175 - RNA, 19 nt, Artificial Sequence
  Description of Artificial Sequence: Synthetic oligonucleotide
  Antisense strand to SEQ ID NO: 1114174
aucucccagucacaugcag

SEQ ID NO: 1114176 - RNA, 19 nt, Artificial Sequence
  Description of Artificial Sequence: Synthetic oligonucleotide
  Sense strand starting at position 1264 of SEQ ID NO: 915892
gagguugcaggacaucauu

SEQ ID NO: 1114177 - RNA, 19 nt, Artificial Sequence
  Description of Artificial Sequence: Synthetic oligonucleotide
  Antisense strand to SEQ ID NO: 1114176
aaugauguccugcaaccuc

SEQ ID NO: 1114178 - RNA, 19 nt, Artificial Sequence
  Description of Artificial Sequence: Synthetic oligonucleotide
  Sense strand starting at position 1388 of SEQ ID NO: 915892
cuucuuauacuuggcugau

SEQ ID NO: 1114179 - RNA, 19 nt, Artificial Sequence
  Description of Artificial Sequence: Synthetic oligonucleotide
  Antisense strand to SEQ ID NO: 1114178
aucagccaaguauaagaag

SEQ ID NO: 1114180 - RNA, 19 nt, Artificial Sequence
  Description of Artificial Sequence: Synthetic oligonucleotide
  Sense strand starting at position 1389 of SEQ ID NO: 915892
uucuuauacuuggcugauu

SEQ ID NO: 1114181 - RNA, 19 nt, Artificial Sequence
  Description of Artificial Sequence: Synthetic oligonucleotide
  Antisense strand to SEQ ID NO: 1114180
aaucagccaaguauaagaa

SEQ ID NO: 1114182 - RNA, 19 nt, Artificial Sequence
  Description of Artificial Sequence: Synthetic oligonucleotide
  Sense strand starting at position 1406 of SEQ ID NO: 915892
uucuucugaucuucugaga

SEQ ID NO: 1114183 - RNA, 19 nt, Artificial Sequence
  Description of Artificial Sequence: Synthetic oligonucleotide
  Antisense strand to SEQ ID NO: 1114182
ucucagaagaucagaagaa

SEQ ID NO: 1114184 - RNA, 19 nt, Artificial Sequence
  Description of Artificial Sequence: Synthetic oligonucleotide
  Sense strand starting at position 1553 of SEQ ID NO: 915892
gcagccagucagugaauuu

SEQ ID NO: 1114185 - RNA, 19 nt, Artificial Sequence
  Description of Artificial Sequence: Synthetic oligonucleotide
  Antisense strand to SEQ ID NO: 1114184
aaauucacugacuggcugc

SEQ ID NO: 1114186 - RNA, 19 nt, Artificial Sequence
  Description of Artificial Sequence: Synthetic oligonucleotide
  Sense strand starting at position 2056 of SEQ ID NO: 915892
ccucacauccugcaaggua

SEQ ID NO: 1114187 - RNA, 19 nt, Artificial Sequence
  Description of Artificial Sequence: Synthetic oligonucleotide
  Antisense strand to SEQ ID NO: 1114186
uaccuugcaggaugugagg

SEQ ID NO: 1114188 - RNA, 19 nt, Artificial Sequence
  Description of Artificial Sequence: Synthetic oligonucleotide
  Sense strand starting at position 2453 of SEQ ID NO: 915892
ccuuuagacuuaucaguag

SEQ ID NO: 1114189 - RNA, 19 nt, Artificial Sequence
  Description of Artificial Sequence: Synthetic oligonucleotide
  Antisense strand to SEQ ID NO: 1114188
cuacugauaagucuaaagg

SEQ ID NO: 1114190 - RNA, 19 nt, Artificial Sequence
  Description of Artificial Sequence: Synthetic oligonucleotide
  Sense strand starting at position 2470 of SEQ ID NO: 915892
aguaccaagcguuaucuua

SEQ ID NO: 1114191 - RNA, 19 nt, Artificial Sequence
  Description of Artificial Sequence: Synthetic oligonucleotide
  Antisense strand to SEQ ID NO: 1114190
uaagauaacgcuugguacu

SEQ ID NO: 1114192 - RNA, 19 nt, Artificial Sequence
  Description of Artificial Sequence: Synthetic oligonucleotide
  Sense strand starting at position 2547 of SEQ ID NO: 915892
cuguccugugccuagaaca

SEQ ID NO: 1114193 - RNA, 19 nt, Artificial Sequence
  Description of Artificial Sequence: Synthetic oligonucleotide
  Antisense strand to SEQ ID NO: 1114192
uguucuaggcacaggacag

SEQ ID NO: 1114194 - RNA, 19 nt, Artificial Sequence
  Description of Artificial Sequence: Synthetic oligonucleotide
  Sense strand starting at position 2618 of SEQ ID NO: 915892
gcaagucuuccugggagag

SEQ ID NO: 1114195 - RNA, 19 nt, Artificial Sequence
  Description of Artificial Sequence: Synthetic oligonucleotide
  Antisense strand to SEQ ID NO: 1114194
cucucccaggaagacuugc

SEQ ID NO: 1114196 - RNA, 19 nt, Artificial Sequence
  Description of Artificial Sequence: Synthetic oligonucleotide
  Sense strand starting at position 2634 of SEQ ID NO: 915892
gagggaucuuccgcuuggu

SEQ ID NO: 1114197 - RNA, 19 nt, Artificial Sequence
  Description of Artificial Sequence: Synthetic oligonucleotide
  Antisense strand to SEQ ID NO: 1114196
accaagcggaagaucccuc

SEQ ID NO: 1114198 - RNA, 19 nt, Artificial Sequence
  Description of Artificial Sequence: Synthetic oligonucleotide
  Sense strand starting at position 2683 of SEQ ID NO: 915892
cucagauugucagugcuga

SEQ ID NO: 1114199 - RNA, 19 nt, Artificial Sequence
  Description of Artificial Sequence: Synthetic oligonucleotide
  Antisense strand to SEQ ID NO: 1114198
ucagcacugacaaucugag

SEQ ID NO: 1114200 - RNA, 19 nt, Artificial Sequence
  Description of Artificial Sequence: Synthetic oligonucleotide
  Sense strand starting at position 2684 of SEQ ID NO: 915892
ucagauugucagugcugac

SEQ ID NO: 1114201 - RNA, 19 nt, Artificial Sequence
  Description of Artificial Sequence: Synthetic oligonucleotide
  Antisense strand to SEQ ID NO: 1114200
gucagcacugacaaucuga

SEQ ID NO: 1114202 - RNA, 19 nt, Artificial Sequence
  Description of Artificial Sequence: Synthetic oligonucleotide
  Sense strand starting at position 2844 of SEQ ID NO: 915892
ggugaucagagguguuguu

SEQ ID NO: 1114203 - RNA, 19 nt, Artificial Sequence
  Description of Artificial Sequence: Synthetic oligonucleotide
  Antisense strand to SEQ ID NO: 1114202
aacaacaccucugaucacc

SEQ ID NO: 1114204 - RNA, 19 nt, Artificial Sequence
  Description of Artificial Sequence: Synthetic oligonucleotide
  Sense strand starting at position 2932 of SEQ ID NO: 915892
gcaugagaccuagaagccu

SEQ ID NO: 1114205 - RNA, 19 nt, Artificial Sequence
  Description of Artificial Sequence: Synthetic oligonucleotide
  Antisense strand to SEQ ID NO: 1114204
aggcuucuaggucucaugc

SEQ ID NO: 1114206 - RNA, 19 nt, Artificial Sequence
  Description of Artificial Sequence: Synthetic oligonucleotide
  Sense strand starting at position 3000 of SEQ ID NO: 915892
gagguaggcugaucaaaga

SEQ ID NO: 1114207 - RNA, 19 nt, Artificial Sequence
  Description of Artificial Sequence: Synthetic oligonucleotide
  Antisense strand to SEQ ID NO: 1114206
ucuuugaucagccuaccuc

SEQ ID NO: 1114208 - RNA, 19 nt, Artificial Sequence
  Description of Artificial Sequence: Synthetic oligonucleotide
  Sense strand starting at position 3134 of SEQ ID NO: 915892
gcgcuuacucaccaggagu

SEQ ID NO: 1114209 - RNA, 19 nt, Artificial Sequence
  Description of Artificial Sequence: Synthetic oligonucleotide
  Antisense strand to SEQ ID NO: 1114208
acuccuggugaguaagcgc

SEQ ID NO: 1114210 - RNA, 19 nt, Artificial Sequence
  Description of Artificial Sequence: Synthetic oligonucleotide
  Sense strand starting at position 3178 of SEQ ID NO: 915892
guaguuggacucugggaag

SEQ ID NO: 1114211 - RNA, 19 nt, Artificial Sequence
  Description of Artificial Sequence: Synthetic oligonucleotide
  Antisense strand to SEQ ID NO: 1114210
cuucccagaguccaacuac

SEQ ID NO: 1114212 - RNA, 19 nt, Artificial Sequence
  Description of Artificial Sequence: Synthetic oligonucleotide
  Sense strand starting at position 3469 of SEQ ID NO: 915892
agcacugucaccugugaga

SEQ ID NO: 1114213 - RNA, 19 nt, Artificial Sequence
  Description of Artificial Sequence: Synthetic oligonucleotide
  Antisense strand to SEQ ID NO: 1114212
ucucacaggugacagugcu

SEQ ID NO: 1114214 - RNA, 19 nt, Artificial Sequence
  Description of Artificial Sequence: Synthetic oligonucleotide
  Sense strand starting at position 3471 of SEQ ID NO: 915892
cacugucaccugugagaaa

SEQ ID NO: 1114215 - RNA, 19 nt, Artificial Sequence
  Description of Artificial Sequence: Synthetic oligonucleotide
  Antisense strand to SEQ ID NO: 1114214
uuucucacaggugacagug

SEQ ID NO: 1114216 - RNA, 19 nt, Artificial Sequence
  Description of Artificial Sequence: Synthetic oligonucleotide
  Sense strand starting at position 3536 of SEQ ID NO: 915892
guagacagacaugguucua

SEQ ID NO: 1114217 - RNA, 19 nt, Artificial Sequence
  Description of Artificial Sequence: Synthetic oligonucleotide
  Antisense strand to SEQ ID NO: 1114216
uagaaccaugucugucuac

SEQ ID NO: 1114218 - RNA, 19 nt, Artificial Sequence
  Description of Artificial Sequence: Synthetic oligonucleotide
  Sense strand starting at position 3667 of SEQ ID NO: 915892
gugucuggugaggaaguau

SEQ ID NO: 1114219 - RNA, 19 nt, Artificial Sequence
  Description of Artificial Sequence: Synthetic oligonucleotide
  Antisense strand to SEQ ID NO: 1114218
auacuuccucaccagacac

SEQ ID NO: 1114220 - RNA, 19 nt, Artificial Sequence
  Description of Artificial Sequence: Synthetic oligonucleotide
  Sense strand starting at position 3678 of SEQ ID NO: 915892
ggaaguauguaaguaacau

SEQ ID NO: 1114221 - RNA, 19 nt, Artificial Sequence
  Description of Artificial Sequence: Synthetic oligonucleotide
  Antisense strand to SEQ ID NO: 1114220
auguuacuuacauacuucc

SEQ ID NO: 1114222 - RNA, 19 nt, Artificial Sequence
  Description of Artificial Sequence: Synthetic oligonucleotide
  Sense strand starting at position 3816 of SEQ ID NO: 915892
ggaguugguccuggguagu

SEQ ID NO: 1114223 - RNA, 19 nt, Artificial Sequence
  Description of Artificial Sequence: Synthetic oligonucleotide
  Antisense strand to SEQ ID NO: 1114222
acuacccaggaccaacucc

SEQ ID NO: 1114224 - RNA, 19 nt, Artificial Sequence
  Description of Artificial Sequence: Synthetic oligonucleotide
  Sense strand starting at position 3836 of SEQ ID NO: 915892
gugggagucuugaggugga

SEQ ID NO: 1114225 - RNA, 19 nt, Artificial Sequence
  Description of Artificial Sequence: Synthetic oligonucleotide
  Antisense strand to SEQ ID NO: 1114224
uccaccucaagacucccac

SEQ ID NO: 1114226 - RNA, 19 nt, Artificial Sequence
  Description of Artificial Sequence: Synthetic oligonucleotide
  Sense strand starting at position 3840 of SEQ ID NO: 915892
gagucuugagguggacaca

SEQ ID NO: 1114227 - RNA, 19 nt, Artificial Sequence
  Description of Artificial Sequence: Synthetic oligonucleotide
  Antisense strand to SEQ ID NO: 1114226
uguguccaccucaagacuc

SEQ ID NO: 1114228 - RNA, 19 nt, Artificial Sequence
  Description of Artificial Sequence: Synthetic oligonucleotide
  Sense strand starting at position 3965 of SEQ ID NO: 915892
aucaauguuuccguuacca

SEQ ID NO: 1114229 - RNA, 19 nt, Artificial Sequence
  Description of Artificial Sequence: Synthetic oligonucleotide
  Antisense strand to SEQ ID NO: 1114228
ugguaacggaaacauugau

SEQ ID NO: 1114230 - RNA, 19 nt, Artificial Sequence
  Description of Artificial Sequence: Synthetic oligonucleotide
  Sense strand starting at position 3967 of SEQ ID NO: 915892
caauguuuccguuaccagu

SEQ ID NO: 1114231 - RNA, 19 nt, Artificial Sequence
  Description of Artificial Sequence: Synthetic oligonucleotide
  Antisense strand to SEQ ID NO: 1114230
acugguaacggaaacauug

SEQ ID NO: 1114232 - RNA, 19 nt, Artificial Sequence
  Description of Artificial Sequence: Synthetic oligonucleotide
  Sense strand starting at position 360 of SEQ ID NO: 915893
ccucacauccugcaaggua

SEQ ID NO: 1114233 - RNA, 19 nt, Artificial Sequence
  Description of Artificial Sequence: Synthetic oligonucleotide
  Antisense strand to SEQ ID NO: 1114232
uaccuugcaggaugugagg

SEQ ID NO: 1114234 - RNA, 19 nt, Artificial Sequence
  Description of Artificial Sequence: Synthetic oligonucleotide
  Sense strand starting at position 757 of SEQ ID NO: 915893
ccuuuagacuuaucaguag

SEQ ID NO: 1114235 - RNA, 19 nt, Artificial Sequence
  Description of Artificial Sequence: Synthetic oligonucleotide
  Antisense strand to SEQ ID NO: 1114234
cuacugauaagucuaaagg

SEQ ID NO: 1114236 - RNA, 19 nt, Artificial Sequence
  Description of Artificial Sequence: Synthetic oligonucleotide
  Sense strand starting at position 774 of SEQ ID NO: 915893
aguaccaagcguuaucuua

SEQ ID NO: 1114237 - RNA, 19 nt, Artificial Sequence
  Description of Artificial Sequence: Synthetic oligonucleotide
  Antisense strand to SEQ ID NO: 1114236
uaagauaacgcuugguacu

SEQ ID NO: 1114238 - RNA, 19 nt, Artificial Sequence
  Description of Artificial Sequence: Synthetic oligonucleotide
  Sense strand starting at position 851 of SEQ ID NO: 915893
cuguccugugccuagaaca

SEQ ID NO: 1114239 - RNA, 19 nt, Artificial Sequence
  Description of Artificial Sequence: Synthetic oligonucleotide
  Antisense strand to SEQ ID NO: 1114238
uguucuaggcacaggacag

SEQ ID NO: 1114240 - RNA, 19 nt, Artificial Sequence
  Description of Artificial Sequence: Synthetic oligonucleotide
  Sense strand starting at position 922 of SEQ ID NO: 915893
gcaagucuuccugggagag

SEQ ID NO: 1114241 - RNA, 19 nt, Artificial Sequence
  Description of Artificial Sequence: Synthetic oligonucleotide
  Antisense strand to SEQ ID NO: 1114240
cucucccaggaagacuugc

SEQ ID NO: 1114242 - RNA, 19 nt, Artificial Sequence
  Description of Artificial Sequence: Synthetic oligonucleotide
  Sense strand starting at position 938 of SEQ ID NO: 915893
gagggaucuuccgcuuggu

SEQ ID NO: 1114243 - RNA, 19 nt, Artificial Sequence
  Description of Artificial Sequence: Synthetic oligonucleotide
  Antisense strand to SEQ ID NO: 1114242
accaagcggaagaucccuc

SEQ ID NO: 1114244 - RNA, 19 nt, Artificial Sequence
  Description of Artificial Sequence: Synthetic oligonucleotide
  Sense strand starting at position 987 of SEQ ID NO: 915893
cucagauugucagugcuga

SEQ ID NO: 1114245 - RNA, 19 nt, Artificial Sequence
  Description of Artificial Sequence: Synthetic oligonucleotide
  Antisense strand to SEQ ID NO: 1114244
ucagcacugacaaucugag

SEQ ID NO: 1114246 - RNA, 19 nt, Artificial Sequence
  Description of Artificial Sequence: Synthetic oligonucleotide
  Sense strand starting at position 988 of SEQ ID NO: 915893
ucagauugucagugcugac

SEQ ID NO: 1114247 - RNA, 19 nt, Artificial Sequence
  Description of Artificial Sequence: Synthetic oligonucleotide
  Antisense strand to SEQ ID NO: 1114246
gucagcacugacaaucuga

SEQ ID NO: 1114248 - RNA, 19 nt, Artificial Sequence
  Description of Artificial Sequence: Synthetic oligonucleotide
  Sense strand starting at position 1148 of SEQ ID NO: 915893
ggugaucagagguguuguu

SEQ ID NO: 1114249 - RNA, 19 nt, Artificial Sequence
  Description of Artificial Sequence: Synthetic oligonucleotide
  Antisense strand to SEQ ID NO: 1114248
aacaacaccucugaucacc

SEQ ID NO: 1114250 - RNA, 19 nt, Artificial Sequence
  Description of Artificial Sequence: Synthetic oligonucleotide
  Sense strand starting at position 1236 of SEQ ID NO: 915893
gcaugagaccuagaagccu

SEQ ID NO: 1114251 - RNA, 19 nt, Artificial Sequence
  Description of Artificial Sequence: Synthetic oligonucleotide
  Antisense strand to SEQ ID NO: 1114250
aggcuucuaggucucaugc

SEQ ID NO: 1114252 - RNA, 19 nt, Artificial Sequence
  Description of Artificial Sequence: Synthetic oligonucleotide
  Sense strand starting at position 1304 of SEQ ID NO: 915893
gagguaggcugaucaaaga

SEQ ID NO: 1114253 - RNA, 19 nt, Artificial Sequence
  Description of Artificial Sequence: Synthetic oligonucleotide
  Antisense strand to SEQ ID NO: 1114252
ucuuugaucagccuaccuc

SEQ ID NO: 1114254 - RNA, 19 nt, Artificial Sequence
  Description of Artificial Sequence: Synthetic oligonucleotide
  Sense strand starting at position 1438 of SEQ ID NO: 915893
gcgcuuacucaccaggagu

SEQ ID NO: 1114255 - RNA, 19 nt, Artificial Sequence
  Description of Artificial Sequence: Synthetic oligonucleotide
  Antisense strand to SEQ ID NO: 1114254
acuccuggugaguaagcgc

SEQ ID NO: 1114256 - RNA, 19 nt, Artificial Sequence
  Description of Artificial Sequence: Synthetic oligonucleotide
  Sense strand starting at position 1482 of SEQ ID NO: 915893
guaguuggacucugggaag

SEQ ID NO: 1114257 - RNA, 19 nt, Artificial Sequence
  Description of Artificial Sequence: Synthetic oligonucleotide
  Antisense strand to SEQ ID NO: 1114256
cuucccagaguccaacuac

SEQ ID NO: 1114258 - RNA, 19 nt, Artificial Sequence
  Description of Artificial Sequence: Synthetic oligonucleotide
  Sense strand starting at position 1588 of SEQ ID NO: 915893
cggaguuggucuuucgaag

SEQ ID NO: 1114259 - RNA, 19 nt, Artificial Sequence
  Description of Artificial Sequence: Synthetic oligonucleotide
  Antisense strand to SEQ ID NO: 1114258
cuucgaaagaccaacuccg

SEQ ID NO: 1114260 - RNA, 19 nt, Artificial Sequence
  Description of Artificial Sequence: Synthetic oligonucleotide
  Sense strand starting at position 1773 of SEQ ID NO: 915893
agcacugucaccugugaga

SEQ ID NO: 1114261 - RNA, 19 nt, Artificial Sequence
  Description of Artificial Sequence: Synthetic oligonucleotide
  Antisense strand to SEQ ID NO: 1114260
ucucacaggugacagugcu

SEQ ID NO: 1114262 - RNA, 19 nt, Artificial Sequence
  Description of Artificial Sequence: Synthetic oligonucleotide
  Sense strand starting at position 1775 of SEQ ID NO: 915893
cacugucaccugugagaaa

SEQ ID NO: 1114263 - RNA, 19 nt, Artificial Sequence
  Description of Artificial Sequence: Synthetic oligonucleotide
  Antisense strand to SEQ ID NO: 1114262
uuucucacaggugacagug

SEQ ID NO: 1114264 - RNA, 19 nt, Artificial Sequence
  Description of Artificial Sequence: Synthetic oligonucleotide
  Sense strand starting at position 1840 of SEQ ID NO: 915893
guagacagacaugguucua

SEQ ID NO: 1114265 - RNA, 19 nt, Artificial Sequence
  Description of Artificial Sequence: Synthetic oligonucleotide
  Antisense strand to SEQ ID NO: 1114264
uagaaccaugucugucuac

SEQ ID NO: 1114266 - RNA, 19 nt, Artificial Sequence
  Description of Artificial Sequence: Synthetic oligonucleotide
  Sense strand starting at position 1971 of SEQ ID NO: 915893
gugucuggugaggaaguau

SEQ ID NO: 1114267 - RNA, 19 nt, Artificial Sequence
  Description of Artificial Sequence: Synthetic oligonucleotide
  Antisense strand to SEQ ID NO: 1114266
auacuuccucaccagacac

SEQ ID NO: 1114268 - RNA, 19 nt, Artificial Sequence
  Description of Artificial Sequence: Synthetic oligonucleotide
  Sense strand starting at position 1982 of SEQ ID NO: 915893
ggaaguauguaaguaacau

SEQ ID NO: 1114269 - RNA, 19 nt, Artificial Sequence
  Description of Artificial Sequence: Synthetic oligonucleotide
  Antisense strand to SEQ ID NO: 1114268
auguuacuuacauacuucc

SEQ ID NO: 1114270 - RNA, 19 nt, Artificial Sequence
  Description of Artificial Sequence: Synthetic oligonucleotide
  Sense strand starting at position 2120 of SEQ ID NO: 915893
ggaguugguccuggguagu

SEQ ID NO: 1114271 - RNA, 19 nt, Artificial Sequence
  Description of Artificial Sequence: Synthetic oligonucleotide
  Antisense strand to SEQ ID NO: 1114270
acuacccaggaccaacucc

SEQ ID NO: 1114272 - RNA, 19 nt, Artificial Sequence
  Description of Artificial Sequence: Synthetic oligonucleotide
  Sense strand starting at position 2140 of SEQ ID NO: 915893
gugggagucuugaggugga

SEQ ID NO: 1114273 - RNA, 19 nt, Artificial Sequence
  Description of Artificial Sequence: Synthetic oligonucleotide
  Antisense strand to SEQ ID NO: 1114272
uccaccucaagacucccac

SEQ ID NO: 1114274 - RNA, 19 nt, Artificial Sequence
  Description of Artificial Sequence: Synthetic oligonucleotide
  Sense strand starting at position 2144 of SEQ ID NO: 915893
gagucuugagguggacaca

SEQ ID NO: 1114275 - RNA, 19 nt, Artificial Sequence
  Description of Artificial Sequence: Synthetic oligonucleotide
  Antisense strand to SEQ ID NO: 1114274
uguguccaccucaagacuc

SEQ ID NO: 1114276 - RNA, 19 nt, Artificial Sequence
  Description of Artificial Sequence: Synthetic oligonucleotide
  Sense strand starting at position 2210 of SEQ ID NO: 915893
acacaagguuaaugacaaa

SEQ ID NO: 1114277 - RNA, 19 nt, Artificial Sequence
  Description of Artificial Sequence: Synthetic oligonucleotide
  Antisense strand to SEQ ID NO: 1114276
uuugucauuaaccuugugu

SEQ ID NO: 1114278 - RNA, 19 nt, Artificial Sequence
  Description of Artificial Sequence: Synthetic oligonucleotide
  Sense strand starting at position 2269 of SEQ ID NO: 915893
aucaauguuuccguuacca

SEQ ID NO: 1114279 - RNA, 19 nt, Artificial Sequence
  Description of Artificial Sequence: Synthetic oligonucleotide
  Antisense strand to SEQ ID NO: 1114278
ugguaacggaaacauugau

SEQ ID NO: 1114280 - RNA, 19 nt, Artificial Sequence
  Description of Artificial Sequence: Synthetic oligonucleotide
  Sense strand starting at position 2271 of SEQ ID NO: 915893
caauguuuccguuaccagu

SEQ ID NO: 1114281 - RNA, 19 nt, Artificial Sequence
  Description of Artificial Sequence: Synthetic oligonucleotide
  Antisense strand to SEQ ID NO: 1114280
acugguaacggaaacauug

SEQ ID NO: 1114282 - RNA, 19 nt, Artificial Sequence
  Description of Artificial Sequence: Synthetic oligonucleotide
  Sense strand starting at position 2331 of SEQ ID NO: 915893
gagacauggugacagagaa

SEQ ID NO: 1114283 - RNA, 19 nt, Artificial Sequence
  Description of Artificial Sequence: Synthetic oligonucleotide
  Antisense strand to SEQ ID NO: 1114282
uucucugucaccaugucuc

SEQ ID NO: 1114284 - RNA, 19 nt, Artificial Sequence
  Description of Artificial Sequence: Synthetic oligonucleotide
  Sense strand starting at position 2987 of SEQ ID NO: 915893
acaauugaaucaggaacaa

SEQ ID NO: 1114285 - RNA, 19 nt, Artificial Sequence
  Description of Artificial Sequence: Synthetic oligonucleotide
  Antisense strand to SEQ ID NO: 1114284
uuguuccugauucaauugu

SEQ ID NO: 1114286 - RNA, 19 nt, Artificial Sequence
  Description of Artificial Sequence: Synthetic oligonucleotide
  Sense strand starting at position 3010 of SEQ ID NO: 915893
caaguaaugcaagacgcua

SEQ ID NO: 1114287 - RNA, 19 nt, Artificial Sequence
  Description of Artificial Sequence: Synthetic oligonucleotide
  Antisense strand to SEQ ID NO: 1114286
uagcgucuugcauuacuug

SEQ ID NO: 1114288 - RNA, 19 nt, Artificial Sequence
  Description of Artificial Sequence: Synthetic oligonucleotide
  Sense strand starting at position 3022 of SEQ ID NO: 915893
gacgcuaugacagguagau

SEQ ID NO: 1114289 - RNA, 19 nt, Artificial Sequence
  Description of Artificial Sequence: Synthetic oligonucleotide
  Antisense strand to SEQ ID NO: 1114288
aucuaccugucauagcguc

SEQ ID NO: 1114290 - RNA, 19 nt, Artificial Sequence
  Description of Artificial Sequence: Synthetic oligonucleotide
  Sense strand starting at position 3024 of SEQ ID NO: 915893
cgcuaugacagguagauag

SEQ ID NO: 1114291 - RNA, 19 nt, Artificial Sequence
  Description of Artificial Sequence: Synthetic oligonucleotide
  Antisense strand to SEQ ID NO: 1114290
cuaucuaccugucauagcg

SEQ ID NO: 1114292 - RNA, 19 nt, Artificial Sequence
  Description of Artificial Sequence: Synthetic oligonucleotide
  Sense strand starting at position 3054 of SEQ ID NO: 915893
cagcuucuccuugguggaa

SEQ ID NO: 1114293 - RNA, 19 nt, Artificial Sequence
  Description of Artificial Sequence: Synthetic oligonucleotide
  Antisense strand to SEQ ID NO: 1114292
uuccaccaaggagaagcug

SEQ ID NO: 1114294 - RNA, 19 nt, Artificial Sequence
  Description of Artificial Sequence: Synthetic oligonucleotide
  Sense strand starting at position 3079 of SEQ ID NO: 915893
aagugaccuucccuggauu

SEQ ID NO: 1114295 - RNA, 19 nt, Artificial Sequence
  Description of Artificial Sequence: Synthetic oligonucleotide
  Antisense strand to SEQ ID NO: 1114294
aauccagggaaggucacuu

SEQ ID NO: 1114296 - RNA, 19 nt, Artificial Sequence
  Description of Artificial Sequence: Synthetic oligonucleotide
  Sense strand starting at position 3080 of SEQ ID NO: 915893
agugaccuucccuggauua

SEQ ID NO: 1114297 - RNA, 19 nt, Artificial Sequence
  Description of Artificial Sequence: Synthetic oligonucleotide
  Antisense strand to SEQ ID NO: 1114296
uaauccagggaaggucacu

SEQ ID NO: 1114298 - RNA, 19 nt, Artificial Sequence
  Description of Artificial Sequence: Synthetic oligonucleotide
  Sense strand starting at position 3091 of SEQ ID NO: 915893
cuggauuaccagcacuuua

SEQ ID NO: 1114299 - RNA, 19 nt, Artificial Sequence
  Description of Artificial Sequence: Synthetic oligonucleotide
  Antisense strand to SEQ ID NO: 1114298
uaaagugcugguaauccag

SEQ ID NO: 1114300 - RNA, 19 nt, Artificial Sequence
  Description of Artificial Sequence: Synthetic oligonucleotide
  Sense strand starting at position 3186 of SEQ ID NO: 915893
gaggcuuucuguuuggguu

SEQ ID NO: 1114301 - RNA, 19 nt, Artificial Sequence
  Description of Artificial Sequence: Synthetic oligonucleotide
  Antisense strand to SEQ ID NO: 1114300
aacccaaacagaaagccuc

SEQ ID NO: 1114302 - RNA, 19 nt, Artificial Sequence
  Description of Artificial Sequence: Synthetic oligonucleotide
  Sense strand starting at position 3295 of SEQ ID NO: 915893
gggcuucugccucagugau

SEQ ID NO: 1114303 - RNA, 19 nt, Artificial Sequence
  Description of Artificial Sequence: Synthetic oligonucleotide
  Antisense strand to SEQ ID NO: 1114302
aucacugaggcagaagccc

SEQ ID NO: 1114304 - RNA, 19 nt, Artificial Sequence
  Description of Artificial Sequence: Synthetic oligonucleotide
  Sense strand starting at position 3310 of SEQ ID NO: 915893
ugaucuuccuaguuuacuu

SEQ ID NO: 1114305 - RNA, 19 nt, Artificial Sequence
  Description of Artificial Sequence: Synthetic oligonucleotide
  Antisense strand to SEQ ID NO: 1114304
aaguaaacuaggaagauca

SEQ ID NO: 1114306 - RNA, 19 nt, Artificial Sequence
  Description of Artificial Sequence: Synthetic oligonucleotide
  Sense strand starting at position 3425 of SEQ ID NO: 915893
gguguucagugcuugaauc

SEQ ID NO: 1114307 - RNA, 19 nt, Artificial Sequence
  Description of Artificial Sequence: Synthetic oligonucleotide
  Antisense strand to SEQ ID NO: 1114306
gauucaagcacugaacacc

SEQ ID NO: 1114308 - RNA, 19 nt, Artificial Sequence
  Description of Artificial Sequence: Synthetic oligonucleotide
  Sense strand starting at position 3498 of SEQ ID NO: 915893
guuagcuucgucgcauuca

SEQ ID NO: 1114309 - RNA, 19 nt, Artificial Sequence
  Description of Artificial Sequence: Synthetic oligonucleotide
  Antisense strand to SEQ ID NO: 1114308
ugaaugcgacgaagcuaac

SEQ ID NO: 1114310 - RNA, 19 nt, Artificial Sequence
  Description of Artificial Sequence: Synthetic oligonucleotide
  Sense strand starting at position 3938 of SEQ ID NO: 915893
uugaguugccuacacugua

SEQ ID NO: 1114311 - RNA, 19 nt, Artificial Sequence
  Description of Artificial Sequence: Synthetic oligonucleotide
  Antisense strand to SEQ ID NO: 1114310
uacaguguaggcaacucaa

SEQ ID NO: 1114312 - RNA, 19 nt, Artificial Sequence
  Description of Artificial Sequence: Synthetic oligonucleotide
  Sense strand starting at position 151 of SEQ ID NO: 915894
ccucacauccugcaaggua

SEQ ID NO: 1114313 - RNA, 19 nt, Artificial Sequence
  Description of Artificial Sequence: Synthetic oligonucleotide
  Antisense strand to SEQ ID NO: 1114312
uaccuugcaggaugugagg

SEQ ID NO: 1114314 - RNA, 19 nt, Artificial Sequence
  Description of Artificial Sequence: Synthetic oligonucleotide
  Sense strand starting at position 548 of SEQ ID NO: 915894
ccuuuagacuuaucaguag

SEQ ID NO: 1114315 - RNA, 19 nt, Artificial Sequence
  Description of Artificial Sequence: Synthetic oligonucleotide
  Antisense strand to SEQ ID NO: 1114314
cuacugauaagucuaaagg

SEQ ID NO: 1114316 - RNA, 19 nt, Artificial Sequence
  Description of Artificial Sequence: Synthetic oligonucleotide
  Sense strand starting at position 565 of SEQ ID NO: 915894
aguaccaagcguuaucuua

SEQ ID NO: 1114317 - RNA, 19 nt, Artificial Sequence
  Description of Artificial Sequence: Synthetic oligonucleotide
  Antisense strand to SEQ ID NO: 1114316
uaagauaacgcuugguacu

SEQ ID NO: 1114318 - RNA, 19 nt, Artificial Sequence
  Description of Artificial Sequence: Synthetic oligonucleotide
  Sense strand starting at position 642 of SEQ ID NO: 915894
cuguccugugccuagaaca

SEQ ID NO: 1114319 - RNA, 19 nt, Artificial Sequence
  Description of Artificial Sequence: Synthetic oligonucleotide
  Antisense strand to SEQ ID NO: 1114318
uguucuaggcacaggacag

SEQ ID NO: 1114320 - RNA, 19 nt, Artificial Sequence
  Description of Artificial Sequence: Synthetic oligonucleotide
  Sense strand starting at position 713 of SEQ ID NO: 915894
gcaagucuuccugggagag

SEQ ID NO: 1114321 - RNA, 19 nt, Artificial Sequence
  Description of Artificial Sequence: Synthetic oligonucleotide
  Antisense strand to SEQ ID NO: 1114320
cucucccaggaagacuugc

SEQ ID NO: 1114322 - RNA, 19 nt, Artificial Sequence
  Description of Artificial Sequence: Synthetic oligonucleotide
  Sense strand starting at position 729 of SEQ ID NO: 915894
gagggaucuuccgcuuggu

SEQ ID NO: 1114323 - RNA, 19 nt, Artificial Sequence
  Description of Artificial Sequence: Synthetic oligonucleotide
  Antisense strand to SEQ ID NO: 1114322
accaagcggaagaucccuc

SEQ ID NO: 1114324 - RNA, 19 nt, Artificial Sequence
  Description of Artificial Sequence: Synthetic oligonucleotide
  Sense strand starting at position 778 of SEQ ID NO: 915894
cucagauugucagugcuga

SEQ ID NO: 1114325 - RNA, 19 nt, Artificial Sequence
  Description of Artificial Sequence: Synthetic oligonucleotide
  Antisense strand to SEQ ID NO: 1114324
ucagcacugacaaucugag

SEQ ID NO: 1114326 - RNA, 19 nt, Artificial Sequence
  Description of Artificial Sequence: Synthetic oligonucleotide
  Sense strand starting at position 779 of SEQ ID NO: 915894
ucagauugucagugcugac

SEQ ID NO: 1114327 - RNA, 19 nt, Artificial Sequence
  Description of Artificial Sequence: Synthetic oligonucleotide
  Antisense strand to SEQ ID NO: 1114326
gucagcacugacaaucuga

SEQ ID NO: 1114328 - RNA, 19 nt, Artificial Sequence
  Description of Artificial Sequence: Synthetic oligonucleotide
  Sense strand starting at position 939 of SEQ ID NO: 915894
ggugaucagagguguuguu

SEQ ID NO: 1114329 - RNA, 19 nt, Artificial Sequence
  Description of Artificial Sequence: Synthetic oligonucleotide
  Antisense strand to SEQ ID NO: 1114328
aacaacaccucugaucacc

SEQ ID NO: 1114330 - RNA, 19 nt, Artificial Sequence
  Description of Artificial Sequence: Synthetic oligonucleotide
  Sense strand starting at position 1027 of SEQ ID NO: 915894
gcaugagaccuagaagccu

SEQ ID NO: 1114331 - RNA, 19 nt, Artificial Sequence
  Description of Artificial Sequence: Synthetic oligonucleotide
  Antisense strand to SEQ ID NO: 1114330
aggcuucuaggucucaugc

SEQ ID NO: 1114332 - RNA, 19 nt, Artificial Sequence
  Description of Artificial Sequence: Synthetic oligonucleotide
  Sense strand starting at position 1095 of SEQ ID NO: 915894
gagguaggcugaucaaaga

SEQ ID NO: 1114333 - RNA, 19 nt, Artificial Sequence
  Description of Artificial Sequence: Synthetic oligonucleotide
  Antisense strand to SEQ ID NO: 1114332
ucuuugaucagccuaccuc

SEQ ID NO: 1114334 - RNA, 19 nt, Artificial Sequence
  Description of Artificial Sequence: Synthetic oligonucleotide
  Sense strand starting at position 1229 of SEQ ID NO: 915894
gcgcuuacucaccaggagu

SEQ ID NO: 1114335 - RNA, 19 nt, Artificial Sequence
  Description of Artificial Sequence: Synthetic oligonucleotide
  Antisense strand to SEQ ID NO: 1114334
acuccuggugaguaagcgc

SEQ ID NO: 1114336 - RNA, 19 nt, Artificial Sequence
  Description of Artificial Sequence: Synthetic oligonucleotide
  Sense strand starting at position 1273 of SEQ ID NO: 915894
guaguuggacucugggaag

SEQ ID NO: 1114337 - RNA, 19 nt, Artificial Sequence
  Description of Artificial Sequence: Synthetic oligonucleotide
  Antisense strand to SEQ ID NO: 1114336
cuucccagaguccaacuac

SEQ ID NO: 1114338 - RNA, 19 nt, Artificial Sequence
  Description of Artificial Sequence: Synthetic oligonucleotide
  Sense strand starting at position 1564 of SEQ ID NO: 915894
agcacugucaccugugaga

SEQ ID NO: 1114339 - RNA, 19 nt, Artificial Sequence
  Description of Artificial Sequence: Synthetic oligonucleotide
  Antisense strand to SEQ ID NO: 1114338
ucucacaggugacagugcu

SEQ ID NO: 1114340 - RNA, 19 nt, Artificial Sequence
  Description of Artificial Sequence: Synthetic oligonucleotide
  Sense strand starting at position 1566 of SEQ ID NO: 915894
cacugucaccugugagaaa

SEQ ID NO: 1114341 - RNA, 19 nt, Artificial Sequence
  Description of Artificial Sequence: Synthetic oligonucleotide
  Antisense strand to SEQ ID NO: 1114340
uuucucacaggugacagug

SEQ ID NO: 1114342 - RNA, 19 nt, Artificial Sequence
  Description of Artificial Sequence: Synthetic oligonucleotide
  Sense strand starting at position 1631 of SEQ ID NO: 915894
guagacagacaugguucua

SEQ ID NO: 1114343 - RNA, 19 nt, Artificial Sequence
  Description of Artificial Sequence: Synthetic oligonucleotide
  Antisense strand to SEQ ID NO: 1114342
uagaaccaugucugucuac

SEQ ID NO: 1114344 - RNA, 19 nt, Artificial Sequence
  Description of Artificial Sequence: Synthetic oligonucleotide
  Sense strand starting at position 1762 of SEQ ID NO: 915894
gugucuggugaggaaguau

SEQ ID NO: 1114345 - RNA, 19 nt, Artificial Sequence
  Description of Artificial Sequence: Synthetic oligonucleotide
  Antisense strand to SEQ ID NO: 1114344
auacuuccucaccagacac

SEQ ID NO: 1114346 - RNA, 19 nt, Artificial Sequence
  Description of Artificial Sequence: Synthetic oligonucleotide
  Sense strand starting at position 1773 of SEQ ID NO: 915894
ggaaguauguaaguaacau

SEQ ID NO: 1114347 - RNA, 19 nt, Artificial Sequence
  Description of Artificial Sequence: Synthetic oligonucleotide
  Antisense strand to SEQ ID NO: 1114346
auguuacuuacauacuucc

SEQ ID NO: 1114348 - RNA, 19 nt, Artificial Sequence
  Description of Artificial Sequence: Synthetic oligonucleotide
  Sense strand starting at position 1931 of SEQ ID NO: 915894
gugggagucuugaggugga

SEQ ID NO: 1114349 - RNA, 19 nt, Artificial Sequence
  Description of Artificial Sequence: Synthetic oligonucleotide
  Antisense strand to SEQ ID NO: 1114348
uccaccucaagacucccac

SEQ ID NO: 1114350 - RNA, 19 nt, Artificial Sequence
  Description of Artificial Sequence: Synthetic oligonucleotide
  Sense strand starting at position 1935 of SEQ ID NO: 915894
gagucuugagguggacaca

SEQ ID NO: 1114351 - RNA, 19 nt, Artificial Sequence
  Description of Artificial Sequence: Synthetic oligonucleotide
  Antisense strand to SEQ ID NO: 1114350
uguguccaccucaagacuc

SEQ ID NO: 1114352 - RNA, 19 nt, Artificial Sequence
  Description of Artificial Sequence: Synthetic oligonucleotide
  Sense strand starting at position 2060 of SEQ ID NO: 915894
aucaauguuuccguuacca

SEQ ID NO: 1114353 - RNA, 19 nt, Artificial Sequence
  Description of Artificial Sequence: Synthetic oligonucleotide
  Antisense strand to SEQ ID NO: 1114352
ugguaacggaaacauugau

SEQ ID NO: 1114354 - RNA, 19 nt, Artificial Sequence
  Description of Artificial Sequence: Synthetic oligonucleotide
  Sense strand starting at position 2062 of SEQ ID NO: 915894
caauguuuccguuaccagu

SEQ ID NO: 1114355 - RNA, 19 nt, Artificial Sequence
  Description of Artificial Sequence: Synthetic oligonucleotide
  Antisense strand to SEQ ID NO: 1114354
acugguaacggaaacauug

SEQ ID NO: 1114356 - RNA, 19 nt, Artificial Sequence
  Description of Artificial Sequence: Synthetic oligonucleotide
  Sense strand starting at position 2122 of SEQ ID NO: 915894
gagacauggugacagagaa

SEQ ID NO: 1114357 - RNA, 19 nt, Artificial Sequence
  Description of Artificial Sequence: Synthetic oligonucleotide
  Antisense strand to SEQ ID NO: 1114356
uucucugucaccaugucuc

SEQ ID NO: 1114358 - RNA, 19 nt, Artificial Sequence
  Description of Artificial Sequence: Synthetic oligonucleotide
  Sense strand starting at position 2778 of SEQ ID NO: 915894
acaauugaaucaggaacaa

SEQ ID NO: 1114359 - RNA, 19 nt, Artificial Sequence
  Description of Artificial Sequence: Synthetic oligonucleotide
  Antisense strand to SEQ ID NO: 1114358
uuguuccugauucaauugu

SEQ ID NO: 1114360 - RNA, 19 nt, Artificial Sequence
  Description of Artificial Sequence: Synthetic oligonucleotide
  Sense strand starting at position 2801 of SEQ ID NO: 915894
caaguaaugcaagacgcua

SEQ ID NO: 1114361 - RNA, 19 nt, Artificial Sequence
  Description of Artificial Sequence: Synthetic oligonucleotide
  Antisense strand to SEQ ID NO: 1114360
uagcgucuugcauuacuug

SEQ ID NO: 1114362 - RNA, 19 nt, Artificial Sequence
  Description of Artificial Sequence: Synthetic oligonucleotide
  Sense strand starting at position 2813 of SEQ ID NO: 915894
gacgcuaugacagguagau

SEQ ID NO: 1114363 - RNA, 19 nt, Artificial Sequence
  Description of Artificial Sequence: Synthetic oligonucleotide
  Antisense strand to SEQ ID NO: 1114362
aucuaccugucauagcguc

SEQ ID NO: 1114364 - RNA, 19 nt, Artificial Sequence
  Description of Artificial Sequence: Synthetic oligonucleotide
  Sense strand starting at position 2815 of SEQ ID NO: 915894
cgcuaugacagguagauag

SEQ ID NO: 1114365 - RNA, 19 nt, Artificial Sequence
  Description of Artificial Sequence: Synthetic oligonucleotide
  Antisense strand to SEQ ID NO: 1114364
cuaucuaccugucauagcg

SEQ ID NO: 1114366 - RNA, 19 nt, Artificial Sequence
  Description of Artificial Sequence: Synthetic oligonucleotide
  Sense strand starting at position 2845 of SEQ ID NO: 915894
cagcuucuccuugguggaa

SEQ ID NO: 1114367 - RNA, 19 nt, Artificial Sequence
  Description of Artificial Sequence: Synthetic oligonucleotide
  Antisense strand to SEQ ID NO: 1114366
uuccaccaaggagaagcug

SEQ ID NO: 1114368 - RNA, 19 nt, Artificial Sequence
  Description of Artificial Sequence: Synthetic oligonucleotide
  Sense strand starting at position 2870 of SEQ ID NO: 915894
aagugaccuucccuggauu

SEQ ID NO: 1114369 - RNA, 19 nt, Artificial Sequence
  Description of Artificial Sequence: Synthetic oligonucleotide
  Antisense strand to SEQ ID NO: 1114368
aauccagggaaggucacuu

SEQ ID NO: 1114370 - RNA, 19 nt, Artificial Sequence
  Description of Artificial Sequence: Synthetic oligonucleotide
  Sense strand starting at position 2871 of SEQ ID NO: 915894
agugaccuucccuggauua

SEQ ID NO: 1114371 - RNA, 19 nt, Artificial Sequence
  Description of Artificial Sequence: Synthetic oligonucleotide
  Antisense strand to SEQ ID NO: 1114370
uaauccagggaaggucacu

SEQ ID NO: 1114372 - RNA, 19 nt, Artificial Sequence
  Description of Artificial Sequence: Synthetic oligonucleotide
  Sense strand starting at position 2882 of SEQ ID NO: 915894
cuggauuaccagcacuuua

SEQ ID NO: 1114373 - RNA, 19 nt, Artificial Sequence
  Description of Artificial Sequence: Synthetic oligonucleotide
  Antisense strand to SEQ ID NO: 1114372
uaaagugcugguaauccag

SEQ ID NO: 1114374 - RNA, 19 nt, Artificial Sequence
  Description of Artificial Sequence: Synthetic oligonucleotide
  Sense strand starting at position 3086 of SEQ ID NO: 915894
gggcuucugccucagugau

SEQ ID NO: 1114375 - RNA, 19 nt, Artificial Sequence
  Description of Artificial Sequence: Synthetic oligonucleotide
  Antisense strand to SEQ ID NO: 1114374
aucacugaggcagaagccc

SEQ ID NO: 1114376 - RNA, 19 nt, Artificial Sequence
  Description of Artificial Sequence: Synthetic oligonucleotide
  Sense strand starting at position 3101 of SEQ ID NO: 915894
ugaucuuccuaguuuacuu

SEQ ID NO: 1114377 - RNA, 19 nt, Artificial Sequence
  Description of Artificial Sequence: Synthetic oligonucleotide
  Antisense strand to SEQ ID NO: 1114376
aaguaaacuaggaagauca

SEQ ID NO: 1114378 - RNA, 19 nt, Artificial Sequence
  Description of Artificial Sequence: Synthetic oligonucleotide
  Sense strand starting at position 3289 of SEQ ID NO: 915894
guuagcuucgucgcauuca

SEQ ID NO: 1114379 - RNA, 19 nt, Artificial Sequence
  Description of Artificial Sequence: Synthetic oligonucleotide
  Antisense strand to SEQ ID NO: 1114378
ugaaugcgacgaagcuaac

SEQ ID NO: 1114380 - RNA, 19 nt, Artificial Sequence
  Description of Artificial Sequence: Synthetic oligonucleotide
  Sense strand starting at position 3729 of SEQ ID NO: 915894
uugaguugccuacacugua

SEQ ID NO: 1114381 - RNA, 19 nt, Artificial Sequence
  Description of Artificial Sequence: Synthetic oligonucleotide
  Antisense strand to SEQ ID NO: 1114380
uacaguguaggcaacucaa

SEQ ID NO: 1114382 - RNA, 19 nt, Artificial Sequence
  Description of Artificial Sequence: Synthetic oligonucleotide
  Sense strand starting at position 3834 of SEQ ID NO: 915894
uccugcaguccuuaugcaa

SEQ ID NO: 1114383 - RNA, 19 nt, Artificial Sequence
  Description of Artificial Sequence: Synthetic oligonucleotide
  Antisense strand to SEQ ID NO: 1114382
uugcauaaggacugcagga

SEQ ID NO: 1114384 - RNA, 19 nt, Artificial Sequence
  Description of Artificial Sequence: Synthetic oligonucleotide
  Sense strand starting at position 3852 of SEQ ID NO: 915894
auccuuauguugcuugaca

SEQ ID NO: 1114385 - RNA, 19 nt, Artificial Sequence
  Description of Artificial Sequence: Synthetic oligonucleotide
  Antisense strand to SEQ ID NO: 1114384
ugucaagcaacauaaggau

SEQ ID NO: 1114386 - RNA, 19 nt, Artificial Sequence
  Description of Artificial Sequence: Synthetic oligonucleotide
  Sense strand starting at position 3853 of SEQ ID NO: 915894
uccuuauguugcuugacau

SEQ ID NO: 1114387 - RNA, 19 nt, Artificial Sequence
  Description of Artificial Sequence: Synthetic oligonucleotide
  Antisense strand to SEQ ID NO: 1114386
augucaagcaacauaagga

SEQ ID NO: 1114388 - RNA, 19 nt, Artificial Sequence
  Description of Artificial Sequence: Synthetic oligonucleotide
  Sense strand starting at position 3951 of SEQ ID NO: 915894
uugucuguggcaugagaaa

SEQ ID NO: 1114389 - RNA, 19 nt, Artificial Sequence
  Description of Artificial Sequence: Synthetic oligonucleotide
  Antisense strand to SEQ ID NO: 1114388
uuucucaugccacagacaa

SEQ ID NO: 1114390 - RNA, 19 nt, Artificial Sequence
  Description of Artificial Sequence: Synthetic oligonucleotide
  Sense strand starting at position 3958 of SEQ ID NO: 915894
uggcaugagaaaugaccuu

SEQ ID NO: 1114391 - RNA, 19 nt, Artificial Sequence
  Description of Artificial Sequence: Synthetic oligonucleotide
  Antisense strand to SEQ ID NO: 1114390
aaggucauuucucaugcca

SEQ ID NO: 1114392 - RNA, 19 nt, Artificial Sequence
  Description of Artificial Sequence: Synthetic oligonucleotide
  Sense strand starting at position 14 of SEQ ID NO: 915895
guaucuuucccucagaaug

SEQ ID NO: 1114393 - RNA, 19 nt, Artificial Sequence
  Description of Artificial Sequence: Synthetic oligonucleotide
  Antisense strand to SEQ ID NO: 1114392
cauucugagggaaagauac

SEQ ID NO: 1114394 - RNA, 19 nt, Artificial Sequence
  Description of Artificial Sequence: Synthetic oligonucleotide
  Sense strand starting at position 206 of SEQ ID NO: 915895
gcaucugugaagcauggau

SEQ ID NO: 1114395 - RNA, 19 nt, Artificial Sequence
  Description of Artificial Sequence: Synthetic oligonucleotide
  Antisense strand to SEQ ID NO: 1114394
auccaugcuucacagaugc

SEQ ID NO: 1114396 - RNA, 19 nt, Artificial Sequence
  Description of Artificial Sequence: Synthetic oligonucleotide
  Sense strand starting at position 224 of SEQ ID NO: 915895
uggagaaagaacugucucu

SEQ ID NO: 1114397 - RNA, 19 nt, Artificial Sequence
  Description of Artificial Sequence: Synthetic oligonucleotide
  Antisense strand to SEQ ID NO: 1114396
agagacaguucuuucucca

SEQ ID NO: 1114398 - RNA, 19 nt, Artificial Sequence
  Description of Artificial Sequence: Synthetic oligonucleotide
  Sense strand starting at position 302 of SEQ ID NO: 915895
ucugcuuugggagggaaua

SEQ ID NO: 1114399 - RNA, 19 nt, Artificial Sequence
  Description of Artificial Sequence: Synthetic oligonucleotide
  Antisense strand to SEQ ID NO: 1114398
uauucccucccaaagcaga

SEQ ID NO: 1114400 - RNA, 19 nt, Artificial Sequence
  Description of Artificial Sequence: Synthetic oligonucleotide
  Sense strand starting at position 445 of SEQ ID NO: 915895
ugaccaucccugcagugaa

SEQ ID NO: 1114401 - RNA, 19 nt, Artificial Sequence
  Description of Artificial Sequence: Synthetic oligonucleotide
  Antisense strand to SEQ ID NO: 1114400
uucacugcagggaugguca

SEQ ID NO: 1114402 - RNA, 19 nt, Artificial Sequence
  Description of Artificial Sequence: Synthetic oligonucleotide
  Sense strand starting at position 604 of SEQ ID NO: 915895
uuaccauaggucuagaguu

SEQ ID NO: 1114403 - RNA, 19 nt, Artificial Sequence
  Description of Artificial Sequence: Synthetic oligonucleotide
  Antisense strand to SEQ ID NO: 1114402
aacucuagaccuaugguaa

SEQ ID NO: 1114404 - RNA, 19 nt, Artificial Sequence
  Description of Artificial Sequence: Synthetic oligonucleotide
  Sense strand starting at position 606 of SEQ ID NO: 915895
accauaggucuagaguuua

SEQ ID NO: 1114405 - RNA, 19 nt, Artificial Sequence
  Description of Artificial Sequence: Synthetic oligonucleotide
  Antisense strand to SEQ ID NO: 1114404
uaaacucuagaccuauggu

SEQ ID NO: 1114406 - RNA, 19 nt, Artificial Sequence
  Description of Artificial Sequence: Synthetic oligonucleotide
  Sense strand starting at position 614 of SEQ ID NO: 915895
ucuagaguuuaauuacaga

SEQ ID NO: 1114407 - RNA, 19 nt, Artificial Sequence
  Description of Artificial Sequence: Synthetic oligonucleotide
  Antisense strand to SEQ ID NO: 1114406
ucuguaauuaaacucuaga

SEQ ID NO: 1114408 - RNA, 19 nt, Artificial Sequence
  Description of Artificial Sequence: Synthetic oligonucleotide
  Sense strand starting at position 643 of SEQ ID NO: 915895
gaaacaugcuggcugggaa

SEQ ID NO: 1114409 - RNA, 19 nt, Artificial Sequence
  Description of Artificial Sequence: Synthetic oligonucleotide
  Antisense strand to SEQ ID NO: 1114408
uucccagccagcauguuuc

SEQ ID NO: 1114410 - RNA, 19 nt, Artificial Sequence
  Description of Artificial Sequence: Synthetic oligonucleotide
  Sense strand starting at position 801 of SEQ ID NO: 915895
gucucuuaauacguuauuu

SEQ ID NO: 1114411 - RNA, 19 nt, Artificial Sequence
  Description of Artificial Sequence: Synthetic oligonucleotide
  Antisense strand to SEQ ID NO: 1114410
aaauaacguauuaagagac

SEQ ID NO: 1114412 - RNA, 19 nt, Artificial Sequence
  Description of Artificial Sequence: Synthetic oligonucleotide
  Sense strand starting at position 860 of SEQ ID NO: 915895
gggcuauuaucauuauuaa

SEQ ID NO: 1114413 - RNA, 19 nt, Artificial Sequence
  Description of Artificial Sequence: Synthetic oligonucleotide
  Antisense strand to SEQ ID NO: 1114412
uuaauaaugauaauagccc

SEQ ID NO: 1114414 - RNA, 19 nt, Artificial Sequence
  Description of Artificial Sequence: Synthetic oligonucleotide
  Sense strand starting at position 1258 of SEQ ID NO: 915895
auucuaucacuguaugacu

SEQ ID NO: 1114415 - RNA, 19 nt, Artificial Sequence
  Description of Artificial Sequence: Synthetic oligonucleotide
  Antisense strand to SEQ ID NO: 1114414
agucauacagugauagaau

SEQ ID NO: 1114416 - RNA, 19 nt, Artificial Sequence
  Description of Artificial Sequence: Synthetic oligonucleotide
  Sense strand starting at position 1304 of SEQ ID NO: 915895
auacuuccucuuugaggga

SEQ ID NO: 1114417 - RNA, 19 nt, Artificial Sequence
  Description of Artificial Sequence: Synthetic oligonucleotide
  Antisense strand to SEQ ID NO: 1114416
ucccucaaagaggaaguau

SEQ ID NO: 1114418 - RNA, 19 nt, Artificial Sequence
  Description of Artificial Sequence: Synthetic oligonucleotide
  Sense strand starting at position 1308 of SEQ ID NO: 915895
uuccucuuugagggauaaa

SEQ ID NO: 1114419 - RNA, 19 nt, Artificial Sequence
  Description of Artificial Sequence: Synthetic oligonucleotide
  Antisense strand to SEQ ID NO: 1114418
uuuaucccucaaagaggaa

SEQ ID NO: 1114420 - RNA, 19 nt, Artificial Sequence
  Description of Artificial Sequence: Synthetic oligonucleotide
  Sense strand starting at position 1516 of SEQ ID NO: 915895
cagcacagaccguaucauu

SEQ ID NO: 1114421 - RNA, 19 nt, Artificial Sequence
  Description of Artificial Sequence: Synthetic oligonucleotide
  Antisense strand to SEQ ID NO: 1114420
aaugauacggucugugcug

SEQ ID NO: 1114422 - RNA, 19 nt, Artificial Sequence
  Description of Artificial Sequence: Synthetic oligonucleotide
  Sense strand starting at position 1749 of SEQ ID NO: 915895
gcagccuccuuagcaauuu

SEQ ID NO: 1114423 - RNA, 19 nt, Artificial Sequence
  Description of Artificial Sequence: Synthetic oligonucleotide
  Antisense strand to SEQ ID NO: 1114422
aaauugcuaaggaggcugc

SEQ ID NO: 1114424 - RNA, 19 nt, Artificial Sequence
  Description of Artificial Sequence: Synthetic oligonucleotide
  Sense strand starting at position 1888 of SEQ ID NO: 915895
gcccgagguauuugaacuu

SEQ ID NO: 1114425 - RNA, 19 nt, Artificial Sequence
  Description of Artificial Sequence: Synthetic oligonucleotide
  Antisense strand to SEQ ID NO: 1114424
aaguucaaauaccucgggc

SEQ ID NO: 1114426 - RNA, 19 nt, Artificial Sequence
  Description of Artificial Sequence: Synthetic oligonucleotide
  Sense strand starting at position 1965 of SEQ ID NO: 915895
aguacuggcaguuagaaca

SEQ ID NO: 1114427 - RNA, 19 nt, Artificial Sequence
  Description of Artificial Sequence: Synthetic oligonucleotide
  Antisense strand to SEQ ID NO: 1114426
uguucuaacugccaguacu

SEQ ID NO: 1114428 - RNA, 19 nt, Artificial Sequence
  Description of Artificial Sequence: Synthetic oligonucleotide
  Sense strand starting at position 2117 of SEQ ID NO: 915895
ggcacaugugcgagcauga

SEQ ID NO: 1114429 - RNA, 19 nt, Artificial Sequence
  Description of Artificial Sequence: Synthetic oligonucleotide
  Antisense strand to SEQ ID NO: 1114428
ucaugcucgcacaugugcc

SEQ ID NO: 1114430 - RNA, 19 nt, Artificial Sequence
  Description of Artificial Sequence: Synthetic oligonucleotide
  Sense strand starting at position 2215 of SEQ ID NO: 915895
gaggguauuucugauaauc

SEQ ID NO: 1114431 - RNA, 19 nt, Artificial Sequence
  Description of Artificial Sequence: Synthetic oligonucleotide
  Antisense strand to SEQ ID NO: 1114430
gauuaucagaaauacccuc

SEQ ID NO: 1114432 - RNA, 19 nt, Artificial Sequence
  Description of Artificial Sequence: Synthetic oligonucleotide
  Sense strand starting at position 2217 of SEQ ID NO: 915895
ggguauuucugauaaucag

SEQ ID NO: 1114433 - RNA, 19 nt, Artificial Sequence
  Description of Artificial Sequence: Synthetic oligonucleotide
  Antisense strand to SEQ ID NO: 1114432
cugauuaucagaaauaccc

SEQ ID NO: 1114434 - RNA, 19 nt, Artificial Sequence
  Description of Artificial Sequence: Synthetic oligonucleotide
  Sense strand starting at position 2226 of SEQ ID NO: 915895
ugauaaucaggucauugca

SEQ ID NO: 1114435 - RNA, 19 nt, Artificial Sequence
  Description of Artificial Sequence: Synthetic oligonucleotide
  Antisense strand to SEQ ID NO: 1114434
ugcaaugaccugauuauca

SEQ ID NO: 1114436 - RNA, 19 nt, Artificial Sequence
  Description of Artificial Sequence: Synthetic oligonucleotide
  Sense strand starting at position 2270 of SEQ ID NO: 915895
gccugaaaccaguagcaau

SEQ ID NO: 1114437 - RNA, 19 nt, Artificial Sequence
  Description of Artificial Sequence: Synthetic oligonucleotide
  Antisense strand to SEQ ID NO: 1114436
auugcuacugguuucaggc

SEQ ID NO: 1114438 - RNA, 19 nt, Artificial Sequence
  Description of Artificial Sequence: Synthetic oligonucleotide
  Sense strand starting at position 2356 of SEQ ID NO: 915895
ucaaccagauacguugaaa

SEQ ID NO: 1114439 - RNA, 19 nt, Artificial Sequence
  Description of Artificial Sequence: Synthetic oligonucleotide
  Antisense strand to SEQ ID NO: 1114438
uuucaacguaucugguuga

SEQ ID NO: 1114440 - RNA, 19 nt, Artificial Sequence
  Description of Artificial Sequence: Synthetic oligonucleotide
  Sense strand starting at position 2359 of SEQ ID NO: 915895
accagauacguugaaaguu

SEQ ID NO: 1114441 - RNA, 19 nt, Artificial Sequence
  Description of Artificial Sequence: Synthetic oligonucleotide
  Antisense strand to SEQ ID NO: 1114440
aacuuucaacguaucuggu

SEQ ID NO: 1114442 - RNA, 19 nt, Artificial Sequence
  Description of Artificial Sequence: Synthetic oligonucleotide
  Sense strand starting at position 2396 of SEQ ID NO: 915895
agugcuaagaaaugaugau

SEQ ID NO: 1114443 - RNA, 19 nt, Artificial Sequence
  Description of Artificial Sequence: Synthetic oligonucleotide
  Antisense strand to SEQ ID NO: 1114442
aucaucauuucuuagcacu

SEQ ID NO: 1114444 - RNA, 19 nt, Artificial Sequence
  Description of Artificial Sequence: Synthetic oligonucleotide
  Sense strand starting at position 2405 of SEQ ID NO: 915895
aaaugaugauuguuaacug

SEQ ID NO: 1114445 - RNA, 19 nt, Artificial Sequence
  Description of Artificial Sequence: Synthetic oligonucleotide
  Antisense strand to SEQ ID NO: 1114444
caguuaacaaucaucauuu

SEQ ID NO: 1114446 - RNA, 19 nt, Artificial Sequence
  Description of Artificial Sequence: Synthetic oligonucleotide
  Sense strand starting at position 2409 of SEQ ID NO: 915895
gaugauuguuaacugcaua

SEQ ID NO: 1114447 - RNA, 19 nt, Artificial Sequence
  Description of Artificial Sequence: Synthetic oligonucleotide
  Antisense strand to SEQ ID NO: 1114446
uaugcaguuaacaaucauc

SEQ ID NO: 1114448 - RNA, 19 nt, Artificial Sequence
  Description of Artificial Sequence: Synthetic oligonucleotide
  Sense strand starting at position 2601 of SEQ ID NO: 915895
gaugaaaccuaggaaagaa

SEQ ID NO: 1114449 - RNA, 19 nt, Artificial Sequence
  Description of Artificial Sequence: Synthetic oligonucleotide
  Antisense strand to SEQ ID NO: 1114448
uucuuuccuagguuucauc

SEQ ID NO: 1114450 - RNA, 19 nt, Artificial Sequence
  Description of Artificial Sequence: Synthetic oligonucleotide
  Sense strand starting at position 2704 of SEQ ID NO: 915895
uguaccauauuugaggaaa

SEQ ID NO: 1114451 - RNA, 19 nt, Artificial Sequence
  Description of Artificial Sequence: Synthetic oligonucleotide
  Antisense strand to SEQ ID NO: 1114450
uuuccucaaauaugguaca

SEQ ID NO: 1114452 - RNA, 19 nt, Artificial Sequence
  Description of Artificial Sequence: Synthetic oligonucleotide
  Sense strand starting at position 2898 of SEQ ID NO: 915895
auauuuagaucugacuaag

SEQ ID NO: 1114453 - RNA, 19 nt, Artificial Sequence
  Description of Artificial Sequence: Synthetic oligonucleotide
  Antisense strand to SEQ ID NO: 1114452
cuuagucagaucuaaauau

SEQ ID NO: 1114454 - RNA, 19 nt, Artificial Sequence
  Description of Artificial Sequence: Synthetic oligonucleotide
  Sense strand starting at position 2901 of SEQ ID NO: 915895
uuuagaucugacuaagcac

SEQ ID NO: 1114455 - RNA, 19 nt, Artificial Sequence
  Description of Artificial Sequence: Synthetic oligonucleotide
  Antisense strand to SEQ ID NO: 1114454
gugcuuagucagaucuaaa

SEQ ID NO: 1114456 - RNA, 19 nt, Artificial Sequence
  Description of Artificial Sequence: Synthetic oligonucleotide
  Sense strand starting at position 2916 of SEQ ID NO: 915895
gcacacaaauuuggagaaa

SEQ ID NO: 1114457 - RNA, 19 nt, Artificial Sequence
  Description of Artificial Sequence: Synthetic oligonucleotide
  Antisense strand to SEQ ID NO: 1114456
uuucuccaaauuugugugc

SEQ ID NO: 1114458 - RNA, 19 nt, Artificial Sequence
  Description of Artificial Sequence: Synthetic oligonucleotide
  Sense strand starting at position 3024 of SEQ ID NO: 915895
agucaaugaaaucggaaua

SEQ ID NO: 1114459 - RNA, 19 nt, Artificial Sequence
  Description of Artificial Sequence: Synthetic oligonucleotide
  Antisense strand to SEQ ID NO: 1114458
uauuccgauuucauugacu

SEQ ID NO: 1114460 - RNA, 19 nt, Artificial Sequence
  Description of Artificial Sequence: Synthetic oligonucleotide
  Sense strand starting at position 3346 of SEQ ID NO: 915895
guucuaguucccuugugca

SEQ ID NO: 1114461 - RNA, 19 nt, Artificial Sequence
  Description of Artificial Sequence: Synthetic oligonucleotide
  Antisense strand to SEQ ID NO: 1114460
ugcacaagggaacuagaac

SEQ ID NO: 1114462 - RNA, 19 nt, Artificial Sequence
  Description of Artificial Sequence: Synthetic oligonucleotide
  Sense strand starting at position 3405 of SEQ ID NO: 915895
uuauguuguaccuaggaga

SEQ ID NO: 1114463 - RNA, 19 nt, Artificial Sequence
  Description of Artificial Sequence: Synthetic oligonucleotide
  Antisense strand to SEQ ID NO: 1114462
ucuccuagguacaacauaa

SEQ ID NO: 1114464 - RNA, 19 nt, Artificial Sequence
  Description of Artificial Sequence: Synthetic oligonucleotide
  Sense strand starting at position 3440 of SEQ ID NO: 915895
ggcagaauacauuaauugu

SEQ ID NO: 1114465 - RNA, 19 nt, Artificial Sequence
  Description of Artificial Sequence: Synthetic oligonucleotide
  Antisense strand to SEQ ID NO: 1114464
acaauuaauguauucugcc

SEQ ID NO: 1114466 - RNA, 19 nt, Artificial Sequence
  Description of Artificial Sequence: Synthetic oligonucleotide
  Sense strand starting at position 3491 of SEQ ID NO: 915895
augcauggucucuauucca

SEQ ID NO: 1114467 - RNA, 19 nt, Artificial Sequence
  Description of Artificial Sequence: Synthetic oligonucleotide
  Antisense strand to SEQ ID NO: 1114466
uggaauagagaccaugcau

SEQ ID NO: 1114468 - RNA, 19 nt, Artificial Sequence
  Description of Artificial Sequence: Synthetic oligonucleotide
  Sense strand starting at position 3517 of SEQ ID NO: 915895
uuucucauguuauuaggga

SEQ ID NO: 1114469 - RNA, 19 nt, Artificial Sequence
  Description of Artificial Sequence: Synthetic oligonucleotide
  Antisense strand to SEQ ID NO: 1114468
ucccuaauaacaugagaaa

SEQ ID NO: 1114470 - RNA, 19 nt, Artificial Sequence
  Description of Artificial Sequence: Synthetic oligonucleotide
  Sense strand starting at position 3741 of SEQ ID NO: 915895
cuuaauuccuggucauaug

SEQ ID NO: 1114471 - RNA, 19 nt, Artificial Sequence
  Description of Artificial Sequence: Synthetic oligonucleotide
  Antisense strand to SEQ ID NO: 1114470
cauaugaccaggaauuaag

SEQ ID NO: 1114472 - RNA, 19 nt, Artificial Sequence
  Description of Artificial Sequence: Synthetic oligonucleotide
  Sense strand starting at position 1060 of SEQ ID NO: 915896
uggccugugcgaagauguu

SEQ ID NO: 1114473 - RNA, 19 nt, Artificial Sequence
  Description of Artificial Sequence: Synthetic oligonucleotide
  Antisense strand to SEQ ID NO: 1114472
aacaucuucgcacaggcca

SEQ ID NO: 1114474 - RNA, 19 nt, Artificial Sequence
  Description of Artificial Sequence: Synthetic oligonucleotide
  Sense strand starting at position 1066 of SEQ ID NO: 915896
gugcgaagauguucugggu

SEQ ID NO: 1114475 - RNA, 19 nt, Artificial Sequence
  Description of Artificial Sequence: Synthetic oligonucleotide
  Antisense strand to SEQ ID NO: 1114474
acccagaacaucuucgcac

SEQ ID NO: 1114476 - RNA, 19 nt, Artificial Sequence
  Description of Artificial Sequence: Synthetic oligonucleotide
  Sense strand starting at position 1069 of SEQ ID NO: 915896
cgaagauguucuggguuug

SEQ ID NO: 1114477 - RNA, 19 nt, Artificial Sequence
  Description of Artificial Sequence: Synthetic oligonucleotide
  Antisense strand to SEQ ID NO: 1114476
caaacccagaacaucuucg

SEQ ID NO: 1114478 - RNA, 19 nt, Artificial Sequence
  Description of Artificial Sequence: Synthetic oligonucleotide
  Sense strand starting at position 1219 of SEQ ID NO: 915896
agcuaagacuaaucgccaa

SEQ ID NO: 1114479 - RNA, 19 nt, Artificial Sequence
  Description of Artificial Sequence: Synthetic oligonucleotide
  Antisense strand to SEQ ID NO: 1114478
uuggcgauuagucuuagcu

SEQ ID NO: 1114480 - RNA, 19 nt, Artificial Sequence
  Description of Artificial Sequence: Synthetic oligonucleotide
  Sense strand starting at position 1361 of SEQ ID NO: 915896
aguggaggucucugcgauu

SEQ ID NO: 1114481 - RNA, 19 nt, Artificial Sequence
  Description of Artificial Sequence: Synthetic oligonucleotide
  Antisense strand to SEQ ID NO: 1114480
aaucgcagagaccuccacu

SEQ ID NO: 1114482 - RNA, 19 nt, Artificial Sequence
  Description of Artificial Sequence: Synthetic oligonucleotide
  Sense strand starting at position 1364 of SEQ ID NO: 915896
ggaggucucugcgauuaaa

SEQ ID NO: 1114483 - RNA, 19 nt, Artificial Sequence
  Description of Artificial Sequence: Synthetic oligonucleotide
  Antisense strand to SEQ ID NO: 1114482
uuuaaucgcagagaccucc

SEQ ID NO: 1114484 - RNA, 19 nt, Artificial Sequence
  Description of Artificial Sequence: Synthetic oligonucleotide
  Sense strand starting at position 1373 of SEQ ID NO: 915896
ugcgauuaaaugggucuca

SEQ ID NO: 1114485 - RNA, 19 nt, Artificial Sequence
  Description of Artificial Sequence: Synthetic oligonucleotide
  Antisense strand to SEQ ID NO: 1114484
ugagacccauuuaaucgca

SEQ ID NO: 1114486 - RNA, 19 nt, Artificial Sequence
  Description of Artificial Sequence: Synthetic oligonucleotide
  Sense strand starting at position 1374 of SEQ ID NO: 915896
gcgauuaaaugggucucau

SEQ ID NO: 1114487 - RNA, 19 nt, Artificial Sequence
  Description of Artificial Sequence: Synthetic oligonucleotide
  Antisense strand to SEQ ID NO: 1114486
augagacccauuuaaucgc

SEQ ID NO: 1114488 - RNA, 19 nt, Artificial Sequence
  Description of Artificial Sequence: Synthetic oligonucleotide
  Sense strand starting at position 1378 of SEQ ID NO: 915896
uuaaaugggucucaugcaa

SEQ ID NO: 1114489 - RNA, 19 nt, Artificial Sequence
  Description of Artificial Sequence: Synthetic oligonucleotide
  Antisense strand to SEQ ID NO: 1114488
uugcaugagacccauuuaa

SEQ ID NO: 1114490 - RNA, 19 nt, Artificial Sequence
  Description of Artificial Sequence: Synthetic oligonucleotide
  Sense strand starting at position 1400 of SEQ ID NO: 915896
agaugcgaacuuuaugcua

SEQ ID NO: 1114491 - RNA, 19 nt, Artificial Sequence
  Description of Artificial Sequence: Synthetic oligonucleotide
  Antisense strand to SEQ ID NO: 1114490
uagcauaaaguucgcaucu

SEQ ID NO: 1114492 - RNA, 19 nt, Artificial Sequence
  Description of Artificial Sequence: Synthetic oligonucleotide
  Sense strand starting at position 1402 of SEQ ID NO: 915896
augcgaacuuuaugcuaau

SEQ ID NO: 1114493 - RNA, 19 nt, Artificial Sequence
  Description of Artificial Sequence: Synthetic oligonucleotide
  Antisense strand to SEQ ID NO: 1114492
auuagcauaaaguucgcau

SEQ ID NO: 1114494 - RNA, 19 nt, Artificial Sequence
  Description of Artificial Sequence: Synthetic oligonucleotide
  Sense strand starting at position 1403 of SEQ ID NO: 915896
ugcgaacuuuaugcuaaua

SEQ ID NO: 1114495 - RNA, 19 nt, Artificial Sequence
  Description of Artificial Sequence: Synthetic oligonucleotide
  Antisense strand to SEQ ID NO: 1114494
uauuagcauaaaguucgca

SEQ ID NO: 1114496 - RNA, 19 nt, Artificial Sequence
  Description of Artificial Sequence: Synthetic oligonucleotide
  Sense strand starting at position 1405 of SEQ ID NO: 915896
cgaacuuuaugcuaauaag

SEQ ID NO: 1114497 - RNA, 19 nt, Artificial Sequence
  Description of Artificial Sequence: Synthetic oligonucleotide
  Antisense strand to SEQ ID NO: 1114496
cuuauuagcauaaaguucg

SEQ ID NO: 1114498 - RNA, 19 nt, Artificial Sequence
  Description of Artificial Sequence: Synthetic oligonucleotide
  Sense strand starting at position 1727 of SEQ ID NO: 915896
ggcuauggcccucguaaua

SEQ ID NO: 1114499 - RNA, 19 nt, Artificial Sequence
  Description of Artificial Sequence: Synthetic oligonucleotide
  Antisense strand to SEQ ID NO: 1114498
uauuacgagggccauagcc

SEQ ID NO: 1114500 - RNA, 19 nt, Artificial Sequence
  Description of Artificial Sequence: Synthetic oligonucleotide
  Sense strand starting at position 1732 of SEQ ID NO: 915896
uggcccucguaauagaauu

SEQ ID NO: 1114501 - RNA, 19 nt, Artificial Sequence
  Description of Artificial Sequence: Synthetic oligonucleotide
  Antisense strand to SEQ ID NO: 1114500
aauucuauuacgagggcca

SEQ ID NO: 1114502 - RNA, 19 nt, Artificial Sequence
  Description of Artificial Sequence: Synthetic oligonucleotide
  Sense strand starting at position 2045 of SEQ ID NO: 915896
ggaguugcugcugcggaau

SEQ ID NO: 1114503 - RNA, 19 nt, Artificial Sequence
  Description of Artificial Sequence: Synthetic oligonucleotide
  Antisense strand to SEQ ID NO: 1114502
auuccgcagcagcaacucc

SEQ ID NO: 1114504 - RNA, 19 nt, Artificial Sequence
  Description of Artificial Sequence: Synthetic oligonucleotide
  Sense strand starting at position 2203 of SEQ ID NO: 915896
guuucucaguguuacuaca

SEQ ID NO: 1114505 - RNA, 19 nt, Artificial Sequence
  Description of Artificial Sequence: Synthetic oligonucleotide
  Antisense strand to SEQ ID NO: 1114504
uguaguaacacugagaaac

SEQ ID NO: 1114506 - RNA, 19 nt, Artificial Sequence
  Description of Artificial Sequence: Synthetic oligonucleotide
  Sense strand starting at position 2205 of SEQ ID NO: 915896
uucucaguguuacuacaga

SEQ ID NO: 1114507 - RNA, 19 nt, Artificial Sequence
  Description of Artificial Sequence: Synthetic oligonucleotide
  Antisense strand to SEQ ID NO: 1114506
ucuguaguaacacugagaa

SEQ ID NO: 1114508 - RNA, 19 nt, Artificial Sequence
  Description of Artificial Sequence: Synthetic oligonucleotide
  Sense strand starting at position 3130 of SEQ ID NO: 915896
aggguuguuagcuguuuga

SEQ ID NO: 1114509 - RNA, 19 nt, Artificial Sequence
  Description of Artificial Sequence: Synthetic oligonucleotide
  Antisense strand to SEQ ID NO: 1114508
ucaaacagcuaacaacccu

SEQ ID NO: 1114510 - RNA, 19 nt, Artificial Sequence
  Description of Artificial Sequence: Synthetic oligonucleotide
  Sense strand starting at position 3133 of SEQ ID NO: 915896
guuguuagcuguuugaacu

SEQ ID NO: 1114511 - RNA, 19 nt, Artificial Sequence
  Description of Artificial Sequence: Synthetic oligonucleotide
  Antisense strand to SEQ ID NO: 1114510
aguucaaacagcuaacaac

SEQ ID NO: 1114512 - RNA, 19 nt, Artificial Sequence
  Description of Artificial Sequence: Synthetic oligonucleotide
  Sense strand starting at position 3143 of SEQ ID NO: 915896
guuugaacuugcuauuauc

SEQ ID NO: 1114513 - RNA, 19 nt, Artificial Sequence
  Description of Artificial Sequence: Synthetic oligonucleotide
  Antisense strand to SEQ ID NO: 1114512
gauaauagcaaguucaaac

SEQ ID NO: 1114514 - RNA, 19 nt, Artificial Sequence
  Description of Artificial Sequence: Synthetic oligonucleotide
  Sense strand starting at position 3293 of SEQ ID NO: 915896
gguugaauguaggagaaac

SEQ ID NO: 1114515 - RNA, 19 nt, Artificial Sequence
  Description of Artificial Sequence: Synthetic oligonucleotide
  Antisense strand to SEQ ID NO: 1114514
guuucuccuacauucaacc

SEQ ID NO: 1114516 - RNA, 19 nt, Artificial Sequence
  Description of Artificial Sequence: Synthetic oligonucleotide
  Sense strand starting at position 3318 of SEQ ID NO: 915896
ggcugaacaguuuggaagu

SEQ ID NO: 1114517 - RNA, 19 nt, Artificial Sequence
  Description of Artificial Sequence: Synthetic oligonucleotide
  Antisense strand to SEQ ID NO: 1114516
acuuccaaacuguucagcc

SEQ ID NO: 1114518 - RNA, 19 nt, Artificial Sequence
  Description of Artificial Sequence: Synthetic oligonucleotide
  Sense strand starting at position 3331 of SEQ ID NO: 915896
ggaagugguucucuccagu

SEQ ID NO: 1114519 - RNA, 19 nt, Artificial Sequence
  Description of Artificial Sequence: Synthetic oligonucleotide
  Antisense strand to SEQ ID NO: 1114518
acuggagagaaccacuucc

SEQ ID NO: 1114520 - RNA, 19 nt, Artificial Sequence
  Description of Artificial Sequence: Synthetic oligonucleotide
  Sense strand starting at position 3376 of SEQ ID NO: 915896
gugggucccucaguggaaa

SEQ ID NO: 1114521 - RNA, 19 nt, Artificial Sequence
  Description of Artificial Sequence: Synthetic oligonucleotide
  Antisense strand to SEQ ID NO: 1114520
uuuccacugagggacccac

SEQ ID NO: 1114522 - RNA, 19 nt, Artificial Sequence
  Description of Artificial Sequence: Synthetic oligonucleotide
  Sense strand starting at position 3377 of SEQ ID NO: 915896
ugggucccucaguggaaau

SEQ ID NO: 1114523 - RNA, 19 nt, Artificial Sequence
  Description of Artificial Sequence: Synthetic oligonucleotide
  Antisense strand to SEQ ID NO: 1114522
auuuccacugagggaccca

SEQ ID NO: 1114524 - RNA, 19 nt, Artificial Sequence
  Description of Artificial Sequence: Synthetic oligonucleotide
  Sense strand starting at position 3652 of SEQ ID NO: 915896
gguguucagccugggagga

SEQ ID NO: 1114525 - RNA, 19 nt, Artificial Sequence
  Description of Artificial Sequence: Synthetic oligonucleotide
  Antisense strand to SEQ ID NO: 1114524
uccucccaggcugaacacc

SEQ ID NO: 1114526 - RNA, 19 nt, Artificial Sequence
  Description of Artificial Sequence: Synthetic oligonucleotide
  Sense strand starting at position 3653 of SEQ ID NO: 915896
guguucagccugggaggaa

SEQ ID NO: 1114527 - RNA, 19 nt, Artificial Sequence
  Description of Artificial Sequence: Synthetic oligonucleotide
  Antisense strand to SEQ ID NO: 1114526
uuccucccaggcugaacac

SEQ ID NO: 1114528 - RNA, 19 nt, Artificial Sequence
  Description of Artificial Sequence: Synthetic oligonucleotide
  Sense strand starting at position 3727 of SEQ ID NO: 915896
gagggucauccaggcuagu

SEQ ID NO: 1114529 - RNA, 19 nt, Artificial Sequence
  Description of Artificial Sequence: Synthetic oligonucleotide
  Antisense strand to SEQ ID NO: 1114528
acuagccuggaugacccuc

SEQ ID NO: 1114530 - RNA, 19 nt, Artificial Sequence
  Description of Artificial Sequence: Synthetic oligonucleotide
  Sense strand starting at position 3737 of SEQ ID NO: 915896
caggcuagucucugucuga

SEQ ID NO: 1114531 - RNA, 19 nt, Artificial Sequence
  Description of Artificial Sequence: Synthetic oligonucleotide
  Antisense strand to SEQ ID NO: 1114530
ucagacagagacuagccug

SEQ ID NO: 1114532 - RNA, 19 nt, Artificial Sequence
  Description of Artificial Sequence: Synthetic oligonucleotide
  Sense strand starting at position 3740 of SEQ ID NO: 915896
gcuagucucugucugagca

SEQ ID NO: 1114533 - RNA, 19 nt, Artificial Sequence
  Description of Artificial Sequence: Synthetic oligonucleotide
  Antisense strand to SEQ ID NO: 1114532
ugcucagacagagacuagc

SEQ ID NO: 1114534 - RNA, 19 nt, Artificial Sequence
  Description of Artificial Sequence: Synthetic oligonucleotide
  Sense strand starting at position 3790 of SEQ ID NO: 915896
gcugacagcuuuccacaga

SEQ ID NO: 1114535 - RNA, 19 nt, Artificial Sequence
  Description of Artificial Sequence: Synthetic oligonucleotide
  Antisense strand to SEQ ID NO: 1114534
ucuguggaaagcugucagc

SEQ ID NO: 1114536 - RNA, 19 nt, Artificial Sequence
  Description of Artificial Sequence: Synthetic oligonucleotide
  Sense strand starting at position 3791 of SEQ ID NO: 915896
cugacagcuuuccacagaa

SEQ ID NO: 1114537 - RNA, 19 nt, Artificial Sequence
  Description of Artificial Sequence: Synthetic oligonucleotide
  Antisense strand to SEQ ID NO: 1114536
uucuguggaaagcugucag

SEQ ID NO: 1114538 - RNA, 19 nt, Artificial Sequence
  Description of Artificial Sequence: Synthetic oligonucleotide
  Sense strand starting at position 3833 of SEQ ID NO: 915896
gcaagagccuguuucagag

SEQ ID NO: 1114539 - RNA, 19 nt, Artificial Sequence
  Description of Artificial Sequence: Synthetic oligonucleotide
  Antisense strand to SEQ ID NO: 1114538
cucugaaacaggcucuugc

SEQ ID NO: 1114540 - RNA, 19 nt, Artificial Sequence
  Description of Artificial Sequence: Synthetic oligonucleotide
  Sense strand starting at position 3848 of SEQ ID NO: 915896
agagcauaauccuuaugug

SEQ ID NO: 1114541 - RNA, 19 nt, Artificial Sequence
  Description of Artificial Sequence: Synthetic oligonucleotide
  Antisense strand to SEQ ID NO: 1114540
cacauaaggauuaugcucu

SEQ ID NO: 1114542 - RNA, 19 nt, Artificial Sequence
  Description of Artificial Sequence: Synthetic oligonucleotide
  Sense strand starting at position 3849 of SEQ ID NO: 915896
gagcauaauccuuaugugu

SEQ ID NO: 1114543 - RNA, 19 nt, Artificial Sequence
  Description of Artificial Sequence: Synthetic oligonucleotide
  Antisense strand to SEQ ID NO: 1114542
acacauaaggauuaugcuc

SEQ ID NO: 1114544 - RNA, 19 nt, Artificial Sequence
  Description of Artificial Sequence: Synthetic oligonucleotide
  Sense strand starting at position 3856 of SEQ ID NO: 915896
auccuuauguguuaagaga

SEQ ID NO: 1114545 - RNA, 19 nt, Artificial Sequence
  Description of Artificial Sequence: Synthetic oligonucleotide
  Antisense strand to SEQ ID NO: 1114544
ucucuuaacacauaaggau

SEQ ID NO: 1114546 - RNA, 19 nt, Artificial Sequence
  Description of Artificial Sequence: Synthetic oligonucleotide
  Sense strand starting at position 3886 of SEQ ID NO: 915896
gucucaaucccucaagucu

SEQ ID NO: 1114547 - RNA, 19 nt, Artificial Sequence
  Description of Artificial Sequence: Synthetic oligonucleotide
  Antisense strand to SEQ ID NO: 1114546
agacuugagggauugagac

SEQ ID NO: 1114548 - RNA, 19 nt, Artificial Sequence
  Description of Artificial Sequence: Synthetic oligonucleotide
  Sense strand starting at position 3918 of SEQ ID NO: 915896
aauggauucucagaaguga

SEQ ID NO: 1114549 - RNA, 19 nt, Artificial Sequence
  Description of Artificial Sequence: Synthetic oligonucleotide
  Antisense strand to SEQ ID NO: 1114548
ucacuucugagaauccauu

SEQ ID NO: 1114550 - RNA, 19 nt, Artificial Sequence
  Description of Artificial Sequence: Synthetic oligonucleotide
  Sense strand starting at position 3926 of SEQ ID NO: 915896
cucagaagugauggaaguu

SEQ ID NO: 1114551 - RNA, 19 nt, Artificial Sequence
  Description of Artificial Sequence: Synthetic oligonucleotide
  Antisense strand to SEQ ID NO: 1114550
aacuuccaucacuucugag

SEQ ID NO: 1114552 - RNA, 19 nt, Artificial Sequence
  Description of Artificial Sequence: Synthetic oligonucleotide
  Sense strand starting at position 183 of SEQ ID NO: 915897
gaaaucaagugucagaggu

SEQ ID NO: 1114553 - RNA, 19 nt, Artificial Sequence
  Description of Artificial Sequence: Synthetic oligonucleotide
  Antisense strand to SEQ ID NO: 1114552
accucugacacuugauuuc

SEQ ID NO: 1114554 - RNA, 19 nt, Artificial Sequence
  Description of Artificial Sequence: Synthetic oligonucleotide
  Sense strand starting at position 253 of SEQ ID NO: 915897
auagaugucccacaugcuu

SEQ ID NO: 1114555 - RNA, 19 nt, Artificial Sequence
  Description of Artificial Sequence: Synthetic oligonucleotide
  Antisense strand to SEQ ID NO: 1114554
aagcaugugggacaucuau

SEQ ID NO: 1114556 - RNA, 19 nt, Artificial Sequence
  Description of Artificial Sequence: Synthetic oligonucleotide
  Sense strand starting at position 502 of SEQ ID NO: 915897
ggauucuaaugggaggaaa

SEQ ID NO: 1114557 - RNA, 19 nt, Artificial Sequence
  Description of Artificial Sequence: Synthetic oligonucleotide
  Antisense strand to SEQ ID NO: 1114556
uuuccucccauuagaaucc

SEQ ID NO: 1114558 - RNA, 19 nt, Artificial Sequence
  Description of Artificial Sequence: Synthetic oligonucleotide
  Sense strand starting at position 760 of SEQ ID NO: 915897
cugagcauagcauagauau

SEQ ID NO: 1114559 - RNA, 19 nt, Artificial Sequence
  Description of Artificial Sequence: Synthetic oligonucleotide
  Antisense strand to SEQ ID NO: 1114558
auaucuaugcuaugcucag

SEQ ID NO: 1114560 - RNA, 19 nt, Artificial Sequence
  Description of Artificial Sequence: Synthetic oligonucleotide
  Sense strand starting at position 790 of SEQ ID NO: 915897
cagccaucugggcagacau

SEQ ID NO: 1114561 - RNA, 19 nt, Artificial Sequence
  Description of Artificial Sequence: Synthetic oligonucleotide
  Antisense strand to SEQ ID NO: 1114560
augucugcccagauggcug

SEQ ID NO: 1114562 - RNA, 19 nt, Artificial Sequence
  Description of Artificial Sequence: Synthetic oligonucleotide
  Sense strand starting at position 865 of SEQ ID NO: 915897
agaccauucucugggaaga

SEQ ID NO: 1114563 - RNA, 19 nt, Artificial Sequence
  Description of Artificial Sequence: Synthetic oligonucleotide
  Antisense strand to SEQ ID NO: 1114562
ucuucccagagaauggucu

SEQ ID NO: 1114564 - RNA, 19 nt, Artificial Sequence
  Description of Artificial Sequence: Synthetic oligonucleotide
  Sense strand starting at position 1019 of SEQ ID NO: 915897
gaggguccaucaggguuau

SEQ ID NO: 1114565 - RNA, 19 nt, Artificial Sequence
  Description of Artificial Sequence: Synthetic oligonucleotide
  Antisense strand to SEQ ID NO: 1114564
auaacccugauggacccuc

SEQ ID NO: 1114566 - RNA, 19 nt, Artificial Sequence
  Description of Artificial Sequence: Synthetic oligonucleotide
  Sense strand starting at position 1023 of SEQ ID NO: 915897
guccaucaggguuaucguu

SEQ ID NO: 1114567 - RNA, 19 nt, Artificial Sequence
  Description of Artificial Sequence: Synthetic oligonucleotide
  Antisense strand to SEQ ID NO: 1114566
aacgauaacccugauggac

SEQ ID NO: 1114568 - RNA, 19 nt, Artificial Sequence
  Description of Artificial Sequence: Synthetic oligonucleotide
  Sense strand starting at position 1043 of SEQ ID NO: 915897
gccugugcucagcgacaga

SEQ ID NO: 1114569 - RNA, 19 nt, Artificial Sequence
  Description of Artificial Sequence: Synthetic oligonucleotide
  Antisense strand to SEQ ID NO: 1114568
ucugucgcugagcacaggc

SEQ ID NO: 1114570 - RNA, 19 nt, Artificial Sequence
  Description of Artificial Sequence: Synthetic oligonucleotide
  Sense strand starting at position 1054 of SEQ ID NO: 915897
gcgacagagagcugugauu

SEQ ID NO: 1114571 - RNA, 19 nt, Artificial Sequence
  Description of Artificial Sequence: Synthetic oligonucleotide
  Antisense strand to SEQ ID NO: 1114570
aaucacagcucucugucgc

SEQ ID NO: 1114572 - RNA, 19 nt, Artificial Sequence
  Description of Artificial Sequence: Synthetic oligonucleotide
  Sense strand starting at position 1134 of SEQ ID NO: 915897
agaaguagauucuuagcaa

SEQ ID NO: 1114573 - RNA, 19 nt, Artificial Sequence
  Description of Artificial Sequence: Synthetic oligonucleotide
  Antisense strand to SEQ ID NO: 1114572
uugcuaagaaucuacuucu

SEQ ID NO: 1114574 - RNA, 19 nt, Artificial Sequence
  Description of Artificial Sequence: Synthetic oligonucleotide
  Sense strand starting at position 1135 of SEQ ID NO: 915897
gaaguagauucuuagcaaa

SEQ ID NO: 1114575 - RNA, 19 nt, Artificial Sequence
  Description of Artificial Sequence: Synthetic oligonucleotide
  Antisense strand to SEQ ID NO: 1114574
uuugcuaagaaucuacuuc

SEQ ID NO: 1114576 - RNA, 19 nt, Artificial Sequence
  Description of Artificial Sequence: Synthetic oligonucleotide
  Sense strand starting at position 2315 of SEQ ID NO: 915897
uggccugugcgaagauguu

SEQ ID NO: 1114577 - RNA, 19 nt, Artificial Sequence
  Description of Artificial Sequence: Synthetic oligonucleotide
  Antisense strand to SEQ ID NO: 1114576
aacaucuucgcacaggcca

SEQ ID NO: 1114578 - RNA, 19 nt, Artificial Sequence
  Description of Artificial Sequence: Synthetic oligonucleotide
  Sense strand starting at position 2321 of SEQ ID NO: 915897
gugcgaagauguucugggu

SEQ ID NO: 1114579 - RNA, 19 nt, Artificial Sequence
  Description of Artificial Sequence: Synthetic oligonucleotide
  Antisense strand to SEQ ID NO: 1114578
acccagaacaucuucgcac

SEQ ID NO: 1114580 - RNA, 19 nt, Artificial Sequence
  Description of Artificial Sequence: Synthetic oligonucleotide
  Sense strand starting at position 2324 of SEQ ID NO: 915897
cgaagauguucuggguuug

SEQ ID NO: 1114581 - RNA, 19 nt, Artificial Sequence
  Description of Artificial Sequence: Synthetic oligonucleotide
  Antisense strand to SEQ ID NO: 1114580
caaacccagaacaucuucg

SEQ ID NO: 1114582 - RNA, 19 nt, Artificial Sequence
  Description of Artificial Sequence: Synthetic oligonucleotide
  Sense strand starting at position 2474 of SEQ ID NO: 915897
agcuaagacuaaucgccaa

SEQ ID NO: 1114583 - RNA, 19 nt, Artificial Sequence
  Description of Artificial Sequence: Synthetic oligonucleotide
  Antisense strand to SEQ ID NO: 1114582
uuggcgauuagucuuagcu

SEQ ID NO: 1114584 - RNA, 19 nt, Artificial Sequence
  Description of Artificial Sequence: Synthetic oligonucleotide
  Sense strand starting at position 2616 of SEQ ID NO: 915897
aguggaggucucugcgauu

SEQ ID NO: 1114585 - RNA, 19 nt, Artificial Sequence
  Description of Artificial Sequence: Synthetic oligonucleotide
  Antisense strand to SEQ ID NO: 1114584
aaucgcagagaccuccacu

SEQ ID NO: 1114586 - RNA, 19 nt, Artificial Sequence
  Description of Artificial Sequence: Synthetic oligonucleotide
  Sense strand starting at position 2619 of SEQ ID NO: 915897
ggaggucucugcgauuaaa

SEQ ID NO: 1114587 - RNA, 19 nt, Artificial Sequence
  Description of Artificial Sequence: Synthetic oligonucleotide
  Antisense strand to SEQ ID NO: 1114586
uuuaaucgcagagaccucc

SEQ ID NO: 1114588 - RNA, 19 nt, Artificial Sequence
  Description of Artificial Sequence: Synthetic oligonucleotide
  Sense strand starting at position 2628 of SEQ ID NO: 915897
ugcgauuaaaugggucuca

SEQ ID NO: 1114589 - RNA, 19 nt, Artificial Sequence
  Description of Artificial Sequence: Synthetic oligonucleotide
  Antisense strand to SEQ ID NO: 1114588
ugagacccauuuaaucgca

SEQ ID NO: 1114590 - RNA, 19 nt, Artificial Sequence
  Description of Artificial Sequence: Synthetic oligonucleotide
  Sense strand starting at position 2629 of SEQ ID NO: 915897
gcgauuaaaugggucucau

SEQ ID NO: 1114591 - RNA, 19 nt, Artificial Sequence
  Description of Artificial Sequence: Synthetic oligonucleotide
  Antisense strand to SEQ ID NO: 1114590
augagacccauuuaaucgc

SEQ ID NO: 1114592 - RNA, 19 nt, Artificial Sequence
  Description of Artificial Sequence: Synthetic oligonucleotide
  Sense strand starting at position 2633 of SEQ ID NO: 915897
uuaaaugggucucaugcaa

SEQ ID NO: 1114593 - RNA, 19 nt, Artificial Sequence
  Description of Artificial Sequence: Synthetic oligonucleotide
  Antisense strand to SEQ ID NO: 1114592
uugcaugagacccauuuaa

SEQ ID NO: 1114594 - RNA, 19 nt, Artificial Sequence
  Description of Artificial Sequence: Synthetic oligonucleotide
  Sense strand starting at position 2655 of SEQ ID NO: 915897
agaugcgaacuuuaugcua

SEQ ID NO: 1114595 - RNA, 19 nt, Artificial Sequence
  Description of Artificial Sequence: Synthetic oligonucleotide
  Antisense strand to SEQ ID NO: 1114594
uagcauaaaguucgcaucu

SEQ ID NO: 1114596 - RNA, 19 nt, Artificial Sequence
  Description of Artificial Sequence: Synthetic oligonucleotide
  Sense strand starting at position 2657 of SEQ ID NO: 915897
augcgaacuuuaugcuaau

SEQ ID NO: 1114597 - RNA, 19 nt, Artificial Sequence
  Description of Artificial Sequence: Synthetic oligonucleotide
  Antisense strand to SEQ ID NO: 1114596
auuagcauaaaguucgcau

SEQ ID NO: 1114598 - RNA, 19 nt, Artificial Sequence
  Description of Artificial Sequence: Synthetic oligonucleotide
  Sense strand starting at position 2658 of SEQ ID NO: 915897
ugcgaacuuuaugcuaaua

SEQ ID NO: 1114599 - RNA, 19 nt, Artificial Sequence
  Description of Artificial Sequence: Synthetic oligonucleotide
  Antisense strand to SEQ ID NO: 1114598
uauuagcauaaaguucgca

SEQ ID NO: 1114600 - RNA, 19 nt, Artificial Sequence
  Description of Artificial Sequence: Synthetic oligonucleotide
  Sense strand starting at position 2660 of SEQ ID NO: 915897
cgaacuuuaugcuaauaag

SEQ ID NO: 1114601 - RNA, 19 nt, Artificial Sequence
  Description of Artificial Sequence: Synthetic oligonucleotide
  Antisense strand to SEQ ID NO: 1114600
cuuauuagcauaaaguucg

SEQ ID NO: 1114602 - RNA, 19 nt, Artificial Sequence
  Description of Artificial Sequence: Synthetic oligonucleotide
  Sense strand starting at position 2982 of SEQ ID NO: 915897
ggcuauggcccucguaaua

SEQ ID NO: 1114603 - RNA, 19 nt, Artificial Sequence
  Description of Artificial Sequence: Synthetic oligonucleotide
  Antisense strand to SEQ ID NO: 1114602
uauuacgagggccauagcc

SEQ ID NO: 1114604 - RNA, 19 nt, Artificial Sequence
  Description of Artificial Sequence: Synthetic oligonucleotide
  Sense strand starting at position 2987 of SEQ ID NO: 915897
uggcccucguaauagaauu

SEQ ID NO: 1114605 - RNA, 19 nt, Artificial Sequence
  Description of Artificial Sequence: Synthetic oligonucleotide
  Antisense strand to SEQ ID NO: 1114604
aauucuauuacgagggcca

SEQ ID NO: 1114606 - RNA, 19 nt, Artificial Sequence
  Description of Artificial Sequence: Synthetic oligonucleotide
  Sense strand starting at position 3299 of SEQ ID NO: 915897
gggaguugcugcugcggaa

SEQ ID NO: 1114607 - RNA, 19 nt, Artificial Sequence
  Description of Artificial Sequence: Synthetic oligonucleotide
  Antisense strand to SEQ ID NO: 1114606
uuccgcagcagcaacuccc

SEQ ID NO: 1114608 - RNA, 19 nt, Artificial Sequence
  Description of Artificial Sequence: Synthetic oligonucleotide
  Sense strand starting at position 3300 of SEQ ID NO: 915897
ggaguugcugcugcggaau

SEQ ID NO: 1114609 - RNA, 19 nt, Artificial Sequence
  Description of Artificial Sequence: Synthetic oligonucleotide
  Antisense strand to SEQ ID NO: 1114608
auuccgcagcagcaacucc

SEQ ID NO: 1114610 - RNA, 19 nt, Artificial Sequence
  Description of Artificial Sequence: Synthetic oligonucleotide
  Sense strand starting at position 3458 of SEQ ID NO: 915897
guuucucaguguuacuaca

SEQ ID NO: 1114611 - RNA, 19 nt, Artificial Sequence
  Description of Artificial Sequence: Synthetic oligonucleotide
  Antisense strand to SEQ ID NO: 1114610
uguaguaacacugagaaac

SEQ ID NO: 1114612 - RNA, 19 nt, Artificial Sequence
  Description of Artificial Sequence: Synthetic oligonucleotide
  Sense strand starting at position 3460 of SEQ ID NO: 915897
uucucaguguuacuacaga

SEQ ID NO: 1114613 - RNA, 19 nt, Artificial Sequence
  Description of Artificial Sequence: Synthetic oligonucleotide
  Antisense strand to SEQ ID NO: 1114612
ucuguaguaacacugagaa

SEQ ID NO: 1114614 - RNA, 19 nt, Artificial Sequence
  Description of Artificial Sequence: Synthetic oligonucleotide
  Sense strand starting at position 22 of SEQ ID NO: 915898
cauguuaugccauguagga

SEQ ID NO: 1114615 - RNA, 19 nt, Artificial Sequence
  Description of Artificial Sequence: Synthetic oligonucleotide
  Antisense strand to SEQ ID NO: 1114614
uccuacauggcauaacaug

SEQ ID NO: 1114616 - RNA, 19 nt, Artificial Sequence
  Description of Artificial Sequence: Synthetic oligonucleotide
  Sense strand starting at position 24 of SEQ ID NO: 915898
uguuaugccauguaggaau

SEQ ID NO: 1114617 - RNA, 19 nt, Artificial Sequence
  Description of Artificial Sequence: Synthetic oligonucleotide
  Antisense strand to SEQ ID NO: 1114616
auuccuacauggcauaaca

SEQ ID NO: 1114618 - RNA, 19 nt, Artificial Sequence
  Description of Artificial Sequence: Synthetic oligonucleotide
  Sense strand starting at position 232 of SEQ ID NO: 915898
guggguaucaagcgaugaa

SEQ ID NO: 1114619 - RNA, 19 nt, Artificial Sequence
  Description of Artificial Sequence: Synthetic oligonucleotide
  Antisense strand to SEQ ID NO: 1114618
uucaucgcuugauacccac

SEQ ID NO: 1114620 - RNA, 19 nt, Artificial Sequence
  Description of Artificial Sequence: Synthetic oligonucleotide
  Sense strand starting at position 233 of SEQ ID NO: 915898
uggguaucaagcgaugaau

SEQ ID NO: 1114621 - RNA, 19 nt, Artificial Sequence
  Description of Artificial Sequence: Synthetic oligonucleotide
  Antisense strand to SEQ ID NO: 1114620
auucaucgcuugauaccca

SEQ ID NO: 1114622 - RNA, 19 nt, Artificial Sequence
  Description of Artificial Sequence: Synthetic oligonucleotide
  Sense strand starting at position 235 of SEQ ID NO: 915898
gguaucaagcgaugaauaa

SEQ ID NO: 1114623 - RNA, 19 nt, Artificial Sequence
  Description of Artificial Sequence: Synthetic oligonucleotide
  Antisense strand to SEQ ID NO: 1114622
uuauucaucgcuugauacc

SEQ ID NO: 1114624 - RNA, 19 nt, Artificial Sequence
  Description of Artificial Sequence: Synthetic oligonucleotide
  Sense strand starting at position 236 of SEQ ID NO: 915898
guaucaagcgaugaauaac

SEQ ID NO: 1114625 - RNA, 19 nt, Artificial Sequence
  Description of Artificial Sequence: Synthetic oligonucleotide
  Antisense strand to SEQ ID NO: 1114624
guuauucaucgcuugauac

SEQ ID NO: 1114626 - RNA, 19 nt, Artificial Sequence
  Description of Artificial Sequence: Synthetic oligonucleotide
  Sense strand starting at position 291 of SEQ ID NO: 915898
gggugucaccuguaaugau

SEQ ID NO: 1114627 - RNA, 19 nt, Artificial Sequence
  Description of Artificial Sequence: Synthetic oligonucleotide
  Antisense strand to SEQ ID NO: 1114626
aucauuacaggugacaccc

SEQ ID NO: 1114628 - RNA, 19 nt, Artificial Sequence
  Description of Artificial Sequence: Synthetic oligonucleotide
  Sense strand starting at position 388 of SEQ ID NO: 915898
aaaugugucucagucugaa

SEQ ID NO: 1114629 - RNA, 19 nt, Artificial Sequence
  Description of Artificial Sequence: Synthetic oligonucleotide
  Antisense strand to SEQ ID NO: 1114628
uucagacugagacacauuu

SEQ ID NO: 1114630 - RNA, 19 nt, Artificial Sequence
  Description of Artificial Sequence: Synthetic oligonucleotide
  Sense strand starting at position 642 of SEQ ID NO: 915898
uugucugaacgugaacaau

SEQ ID NO: 1114631 - RNA, 19 nt, Artificial Sequence
  Description of Artificial Sequence: Synthetic oligonucleotide
  Antisense strand to SEQ ID NO: 1114630
auuguucacguucagacaa

SEQ ID NO: 1114632 - RNA, 19 nt, Artificial Sequence
  Description of Artificial Sequence: Synthetic oligonucleotide
  Sense strand starting at position 742 of SEQ ID NO: 915898
cggaucgaucgguaagagu

SEQ ID NO: 1114633 - RNA, 19 nt, Artificial Sequence
  Description of Artificial Sequence: Synthetic oligonucleotide
  Antisense strand to SEQ ID NO: 1114632
acucuuaccgaucgauccg

SEQ ID NO: 1114634 - RNA, 19 nt, Artificial Sequence
  Description of Artificial Sequence: Synthetic oligonucleotide
  Sense strand starting at position 749 of SEQ ID NO: 915898
aucgguaagaguuacuaag

SEQ ID NO: 1114635 - RNA, 19 nt, Artificial Sequence
  Description of Artificial Sequence: Synthetic oligonucleotide
  Antisense strand to SEQ ID NO: 1114634
cuuaguaacucuuaccgau

SEQ ID NO: 1114636 - RNA, 19 nt, Artificial Sequence
  Description of Artificial Sequence: Synthetic oligonucleotide
  Sense strand starting at position 751 of SEQ ID NO: 915898
cgguaagaguuacuaagca

SEQ ID NO: 1114637 - RNA, 19 nt, Artificial Sequence
  Description of Artificial Sequence: Synthetic oligonucleotide
  Antisense strand to SEQ ID NO: 1114636
ugcuuaguaacucuuaccg

SEQ ID NO: 1114638 - RNA, 19 nt, Artificial Sequence
  Description of Artificial Sequence: Synthetic oligonucleotide
  Sense strand starting at position 1129 of SEQ ID NO: 915898
gagacagguccugguuucu

SEQ ID NO: 1114639 - RNA, 19 nt, Artificial Sequence
  Description of Artificial Sequence: Synthetic oligonucleotide
  Antisense strand to SEQ ID NO: 1114638
agaaaccaggaccugucuc

SEQ ID NO: 1114640 - RNA, 19 nt, Artificial Sequence
  Description of Artificial Sequence: Synthetic oligonucleotide
  Sense strand starting at position 1207 of SEQ ID NO: 915898
uuauuucgcagccgauuau

SEQ ID NO: 1114641 - RNA, 19 nt, Artificial Sequence
  Description of Artificial Sequence: Synthetic oligonucleotide
  Antisense strand to SEQ ID NO: 1114640
auaaucggcugcgaaauaa

SEQ ID NO: 1114642 - RNA, 19 nt, Artificial Sequence
  Description of Artificial Sequence: Synthetic oligonucleotide
  Sense strand starting at position 2278 of SEQ ID NO: 915898
aagaaaucggagcgaaacu

SEQ ID NO: 1114643 - RNA, 19 nt, Artificial Sequence
  Description of Artificial Sequence: Synthetic oligonucleotide
  Antisense strand to SEQ ID NO: 1114642
aguuucgcuccgauuucuu

SEQ ID NO: 1114644 - RNA, 19 nt, Artificial Sequence
  Description of Artificial Sequence: Synthetic oligonucleotide
  Sense strand starting at position 2911 of SEQ ID NO: 915898
cugcaaugugccgcacauu

SEQ ID NO: 1114645 - RNA, 19 nt, Artificial Sequence
  Description of Artificial Sequence: Synthetic oligonucleotide
  Antisense strand to SEQ ID NO: 1114644
aaugugcggcacauugcag

SEQ ID NO: 1114646 - RNA, 19 nt, Artificial Sequence
  Description of Artificial Sequence: Synthetic oligonucleotide
  Sense strand starting at position 2912 of SEQ ID NO: 915898
ugcaaugugccgcacauuu

SEQ ID NO: 1114647 - RNA, 19 nt, Artificial Sequence
  Description of Artificial Sequence: Synthetic oligonucleotide
  Antisense strand to SEQ ID NO: 1114646
aaaugugcggcacauugca

SEQ ID NO: 1114648 - RNA, 19 nt, Artificial Sequence
  Description of Artificial Sequence: Synthetic oligonucleotide
  Sense strand starting at position 3251 of SEQ ID NO: 915898
augaauuauccacacgcua

SEQ ID NO: 1114649 - RNA, 19 nt, Artificial Sequence
  Description of Artificial Sequence: Synthetic oligonucleotide
  Antisense strand to SEQ ID NO: 1114648
uagcguguggauaauucau

SEQ ID NO: 1114650 - RNA, 19 nt, Artificial Sequence
  Description of Artificial Sequence: Synthetic oligonucleotide
  Sense strand starting at position 3262 of SEQ ID NO: 915898
acacgcuaacuuuagcaaa

SEQ ID NO: 1114651 - RNA, 19 nt, Artificial Sequence
  Description of Artificial Sequence: Synthetic oligonucleotide
  Antisense strand to SEQ ID NO: 1114650
uuugcuaaaguuagcgugu

SEQ ID NO: 1114652 - RNA, 19 nt, Artificial Sequence
  Description of Artificial Sequence: Synthetic oligonucleotide
  Sense strand starting at position 3275 of SEQ ID NO: 915898
agcaaacuauacguuaaau

SEQ ID NO: 1114653 - RNA, 19 nt, Artificial Sequence
  Description of Artificial Sequence: Synthetic oligonucleotide
  Antisense strand to SEQ ID NO: 1114652
auuuaacguauaguuugcu

SEQ ID NO: 1114654 - RNA, 19 nt, Artificial Sequence
  Description of Artificial Sequence: Synthetic oligonucleotide
  Sense strand starting at position 3286 of SEQ ID NO: 915898
cguuaaauacaaugugaac

SEQ ID NO: 1114655 - RNA, 19 nt, Artificial Sequence
  Description of Artificial Sequence: Synthetic oligonucleotide
  Antisense strand to SEQ ID NO: 1114654
guucacauuguauuuaacg

SEQ ID NO: 1114656 - RNA, 19 nt, Artificial Sequence
  Description of Artificial Sequence: Synthetic oligonucleotide
  Sense strand starting at position 3309 of SEQ ID NO: 915898
uguccuaguucuguggaaa

SEQ ID NO: 1114657 - RNA, 19 nt, Artificial Sequence
  Description of Artificial Sequence: Synthetic oligonucleotide
  Antisense strand to SEQ ID NO: 1114656
uuuccacagaacuaggaca

SEQ ID NO: 1114658 - RNA, 19 nt, Artificial Sequence
  Description of Artificial Sequence: Synthetic oligonucleotide
  Sense strand starting at position 3312 of SEQ ID NO: 915898
ccuaguucuguggaaauag

SEQ ID NO: 1114659 - RNA, 19 nt, Artificial Sequence
  Description of Artificial Sequence: Synthetic oligonucleotide
  Antisense strand to SEQ ID NO: 1114658
cuauuuccacagaacuagg

SEQ ID NO: 1114660 - RNA, 19 nt, Artificial Sequence
  Description of Artificial Sequence: Synthetic oligonucleotide
  Sense strand starting at position 3321 of SEQ ID NO: 915898
guggaaauagaguaaugcu

SEQ ID NO: 1114661 - RNA, 19 nt, Artificial Sequence
  Description of Artificial Sequence: Synthetic oligonucleotide
  Antisense strand to SEQ ID NO: 1114660
agcauuacucuauuuccac

SEQ ID NO: 1114662 - RNA, 19 nt, Artificial Sequence
  Description of Artificial Sequence: Synthetic oligonucleotide
  Sense strand starting at position 3380 of SEQ ID NO: 915898
uggaguauucuaugagcaa

SEQ ID NO: 1114663 - RNA, 19 nt, Artificial Sequence
  Description of Artificial Sequence: Synthetic oligonucleotide
  Antisense strand to SEQ ID NO: 1114662
uugcucauagaauacucca

SEQ ID NO: 1114664 - RNA, 19 nt, Artificial Sequence
  Description of Artificial Sequence: Synthetic oligonucleotide
  Sense strand starting at position 3383 of SEQ ID NO: 915898
aguauucuaugagcaaagu

SEQ ID NO: 1114665 - RNA, 19 nt, Artificial Sequence
  Description of Artificial Sequence: Synthetic oligonucleotide
  Antisense strand to SEQ ID NO: 1114664
acuuugcucauagaauacu

SEQ ID NO: 1114666 - RNA, 19 nt, Artificial Sequence
  Description of Artificial Sequence: Synthetic oligonucleotide
  Sense strand starting at position 3384 of SEQ ID NO: 915898
guauucuaugagcaaaguu

SEQ ID NO: 1114667 - RNA, 19 nt, Artificial Sequence
  Description of Artificial Sequence: Synthetic oligonucleotide
  Antisense strand to SEQ ID NO: 1114666
aacuuugcucauagaauac

SEQ ID NO: 1114668 - RNA, 19 nt, Artificial Sequence
  Description of Artificial Sequence: Synthetic oligonucleotide
  Sense strand starting at position 3393 of SEQ ID NO: 915898
gagcaaaguuaugcaaacu

SEQ ID NO: 1114669 - RNA, 19 nt, Artificial Sequence
  Description of Artificial Sequence: Synthetic oligonucleotide
  Antisense strand to SEQ ID NO: 1114668
aguuugcauaacuuugcuc

SEQ ID NO: 1114670 - RNA, 19 nt, Artificial Sequence
  Description of Artificial Sequence: Synthetic oligonucleotide
  Sense strand starting at position 3434 of SEQ ID NO: 915898
ucuaucgaacuucgacaau

SEQ ID NO: 1114671 - RNA, 19 nt, Artificial Sequence
  Description of Artificial Sequence: Synthetic oligonucleotide
  Antisense strand to SEQ ID NO: 1114670
auugucgaaguucgauaga

SEQ ID NO: 1114672 - RNA, 19 nt, Artificial Sequence
  Description of Artificial Sequence: Synthetic oligonucleotide
  Sense strand starting at position 3446 of SEQ ID NO: 915898
cgacaauaauaauuaaggu

SEQ ID NO: 1114673 - RNA, 19 nt, Artificial Sequence
  Description of Artificial Sequence: Synthetic oligonucleotide
  Antisense strand to SEQ ID NO: 1114672
accuuaauuauuauugucg

SEQ ID NO: 1114674 - RNA, 19 nt, Artificial Sequence
  Description of Artificial Sequence: Synthetic oligonucleotide
  Sense strand starting at position 3669 of SEQ ID NO: 915898
ggcucuuugcuacaaaugu

SEQ ID NO: 1114675 - RNA, 19 nt, Artificial Sequence
  Description of Artificial Sequence: Synthetic oligonucleotide
  Antisense strand to SEQ ID NO: 1114674
acauuuguagcaaagagcc

SEQ ID NO: 1114676 - RNA, 19 nt, Artificial Sequence
  Description of Artificial Sequence: Synthetic oligonucleotide
  Sense strand starting at position 3691 of SEQ ID NO: 915898
uuaagauuacaguacguga

SEQ ID NO: 1114677 - RNA, 19 nt, Artificial Sequence
  Description of Artificial Sequence: Synthetic oligonucleotide
  Antisense strand to SEQ ID NO: 1114676
ucacguacuguaaucuuaa

SEQ ID NO: 1114678 - RNA, 19 nt, Artificial Sequence
  Description of Artificial Sequence: Synthetic oligonucleotide
  Sense strand starting at position 3693 of SEQ ID NO: 915898
aagauuacaguacgugaaa

SEQ ID NO: 1114679 - RNA, 19 nt, Artificial Sequence
  Description of Artificial Sequence: Synthetic oligonucleotide
  Antisense strand to SEQ ID NO: 1114678
uuucacguacuguaaucuu

SEQ ID NO: 1114680 - RNA, 19 nt, Artificial Sequence
  Description of Artificial Sequence: Synthetic oligonucleotide
  Sense strand starting at position 3747 of SEQ ID NO: 915898
gggcaaagucacugccuaa

SEQ ID NO: 1114681 - RNA, 19 nt, Artificial Sequence
  Description of Artificial Sequence: Synthetic oligonucleotide
  Antisense strand to SEQ ID NO: 1114680
uuaggcagugacuuugccc

SEQ ID NO: 1114682 - RNA, 19 nt, Artificial Sequence
  Description of Artificial Sequence: Synthetic oligonucleotide
  Sense strand starting at position 3811 of SEQ ID NO: 915898
agucguuccaaugggaaca

SEQ ID NO: 1114683 - RNA, 19 nt, Artificial Sequence
  Description of Artificial Sequence: Synthetic oligonucleotide
  Antisense strand to SEQ ID NO: 1114682
uguucccauuggaacgacu

SEQ ID NO: 1114684 - RNA, 19 nt, Artificial Sequence
  Description of Artificial Sequence: Synthetic oligonucleotide
  Sense strand starting at position 3812 of SEQ ID NO: 915898
gucguuccaaugggaacau

SEQ ID NO: 1114685 - RNA, 19 nt, Artificial Sequence
  Description of Artificial Sequence: Synthetic oligonucleotide
  Antisense strand to SEQ ID NO: 1114684
auguucccauuggaacgac

SEQ ID NO: 1114686 - RNA, 19 nt, Artificial Sequence
  Description of Artificial Sequence: Synthetic oligonucleotide
  Sense strand starting at position 3824 of SEQ ID NO: 915898
ggaacauugcuuuggaggu

SEQ ID NO: 1114687 - RNA, 19 nt, Artificial Sequence
  Description of Artificial Sequence: Synthetic oligonucleotide
  Antisense strand to SEQ ID NO: 1114686
accuccaaagcaauguucc

SEQ ID NO: 1114688 - RNA, 19 nt, Artificial Sequence
  Description of Artificial Sequence: Synthetic oligonucleotide
  Sense strand starting at position 3828 of SEQ ID NO: 915898
cauugcuuuggaggugaaa

SEQ ID NO: 1114689 - RNA, 19 nt, Artificial Sequence
  Description of Artificial Sequence: Synthetic oligonucleotide
  Antisense strand to SEQ ID NO: 1114688
uuucaccuccaaagcaaug

SEQ ID NO: 1114690 - RNA, 19 nt, Artificial Sequence
  Description of Artificial Sequence: Synthetic oligonucleotide
  Sense strand starting at position 3875 of SEQ ID NO: 915898
cggugcucacucuaggaaa

SEQ ID NO: 1114691 - RNA, 19 nt, Artificial Sequence
  Description of Artificial Sequence: Synthetic oligonucleotide
  Antisense strand to SEQ ID NO: 1114690
uuuccuagagugagcaccg

SEQ ID NO: 1114692 - RNA, 19 nt, Artificial Sequence
  Description of Artificial Sequence: Synthetic oligonucleotide
  Sense strand starting at position 3909 of SEQ ID NO: 915898
acuaaaguuugucucuuaa

SEQ ID NO: 1114693 - RNA, 19 nt, Artificial Sequence
  Description of Artificial Sequence: Synthetic oligonucleotide
  Antisense strand to SEQ ID NO: 1114692
uuaagagacaaacuuuagu

SEQ ID NO: 1114694 - RNA, 19 nt, Artificial Sequence
  Description of Artificial Sequence: Synthetic oligonucleotide
  Sense strand starting at position 225 of SEQ ID NO: 915899
cuaaccuuguccuuugaga

SEQ ID NO: 1114695 - RNA, 19 nt, Artificial Sequence
  Description of Artificial Sequence: Synthetic oligonucleotide
  Antisense strand to SEQ ID NO: 1114694
ucucaaaggacaagguuag

SEQ ID NO: 1114696 - RNA, 19 nt, Artificial Sequence
  Description of Artificial Sequence: Synthetic oligonucleotide
  Sense strand starting at position 341 of SEQ ID NO: 915899
uuauguuacuauguccuua

SEQ ID NO: 1114697 - RNA, 19 nt, Artificial Sequence
  Description of Artificial Sequence: Synthetic oligonucleotide
  Antisense strand to SEQ ID NO: 1114696
uaaggacauaguaacauaa

SEQ ID NO: 1114698 - RNA, 19 nt, Artificial Sequence
  Description of Artificial Sequence: Synthetic oligonucleotide
  Sense strand starting at position 374 of SEQ ID NO: 915899
gugucaugcaggcacagaa

SEQ ID NO: 1114699 - RNA, 19 nt, Artificial Sequence
  Description of Artificial Sequence: Synthetic oligonucleotide
  Antisense strand to SEQ ID NO: 1114698
uucugugccugcaugacac

SEQ ID NO: 1114700 - RNA, 19 nt, Artificial Sequence
  Description of Artificial Sequence: Synthetic oligonucleotide
  Sense strand starting at position 532 of SEQ ID NO: 915899
guaauccucgcacaggaaa

SEQ ID NO: 1114701 - RNA, 19 nt, Artificial Sequence
  Description of Artificial Sequence: Synthetic oligonucleotide
  Antisense strand to SEQ ID NO: 1114700
uuuccugugcgaggauuac

SEQ ID NO: 1114702 - RNA, 19 nt, Artificial Sequence
  Description of Artificial Sequence: Synthetic oligonucleotide
  Sense strand starting at position 587 of SEQ ID NO: 915899
caaucagaguucuccacga

SEQ ID NO: 1114703 - RNA, 19 nt, Artificial Sequence
  Description of Artificial Sequence: Synthetic oligonucleotide
  Antisense strand to SEQ ID NO: 1114702
ucguggagaacucugauug

SEQ ID NO: 1114704 - RNA, 19 nt, Artificial Sequence
  Description of Artificial Sequence: Synthetic oligonucleotide
  Sense strand starting at position 589 of SEQ ID NO: 915899
aucagaguucuccacgaag

SEQ ID NO: 1114705 - RNA, 19 nt, Artificial Sequence
  Description of Artificial Sequence: Synthetic oligonucleotide
  Antisense strand to SEQ ID NO: 1114704
cuucguggagaacucugau

SEQ ID NO: 1114706 - RNA, 19 nt, Artificial Sequence
  Description of Artificial Sequence: Synthetic oligonucleotide
  Sense strand starting at position 591 of SEQ ID NO: 915899
cagaguucuccacgaagca

SEQ ID NO: 1114707 - RNA, 19 nt, Artificial Sequence
  Description of Artificial Sequence: Synthetic oligonucleotide
  Antisense strand to SEQ ID NO: 1114706
ugcuucguggagaacucug

SEQ ID NO: 1114708 - RNA, 19 nt, Artificial Sequence
  Description of Artificial Sequence: Synthetic oligonucleotide
  Sense strand starting at position 592 of SEQ ID NO: 915899
agaguucuccacgaagcaa

SEQ ID NO: 1114709 - RNA, 19 nt, Artificial Sequence
  Description of Artificial Sequence: Synthetic oligonucleotide
  Antisense strand to SEQ ID NO: 1114708
uugcuucguggagaacucu

SEQ ID NO: 1114710 - RNA, 19 nt, Artificial Sequence
  Description of Artificial Sequence: Synthetic oligonucleotide
  Sense strand starting at position 720 of SEQ ID NO: 915899
ccagaaagcuuccuguaca

SEQ ID NO: 1114711 - RNA, 19 nt, Artificial Sequence
  Description of Artificial Sequence: Synthetic oligonucleotide
  Antisense strand to SEQ ID NO: 1114710
uguacaggaagcuuucugg

SEQ ID NO: 1114712 - RNA, 19 nt, Artificial Sequence
  Description of Artificial Sequence: Synthetic oligonucleotide
  Sense strand starting at position 739 of SEQ ID NO: 915899
ccaaguauuguguaggaua

SEQ ID NO: 1114713 - RNA, 19 nt, Artificial Sequence
  Description of Artificial Sequence: Synthetic oligonucleotide
  Antisense strand to SEQ ID NO: 1114712
uauccuacacaauacuugg

SEQ ID NO: 1114714 - RNA, 19 nt, Artificial Sequence
  Description of Artificial Sequence: Synthetic oligonucleotide
  Sense strand starting at position 741 of SEQ ID NO: 915899
aaguauuguguaggauaaa

SEQ ID NO: 1114715 - RNA, 19 nt, Artificial Sequence
  Description of Artificial Sequence: Synthetic oligonucleotide
  Antisense strand to SEQ ID NO: 1114714
uuuauccuacacaauacuu

SEQ ID NO: 1114716 - RNA, 19 nt, Artificial Sequence
  Description of Artificial Sequence: Synthetic oligonucleotide
  Sense strand starting at position 856 of SEQ ID NO: 915899
acuguuauuuggcaaagac

SEQ ID NO: 1114717 - RNA, 19 nt, Artificial Sequence
  Description of Artificial Sequence: Synthetic oligonucleotide
  Antisense strand to SEQ ID NO: 1114716
gucuuugccaaauaacagu

SEQ ID NO: 1114718 - RNA, 19 nt, Artificial Sequence
  Description of Artificial Sequence: Synthetic oligonucleotide
  Sense strand starting at position 864 of SEQ ID NO: 915899
uuggcaaagacauggcaua

SEQ ID NO: 1114719 - RNA, 19 nt, Artificial Sequence
  Description of Artificial Sequence: Synthetic oligonucleotide
  Antisense strand to SEQ ID NO: 1114718
uaugccaugucuuugccaa

SEQ ID NO: 1114720 - RNA, 19 nt, Artificial Sequence
  Description of Artificial Sequence: Synthetic oligonucleotide
  Sense strand starting at position 865 of SEQ ID NO: 915899
uggcaaagacauggcauaa

SEQ ID NO: 1114721 - RNA, 19 nt, Artificial Sequence
  Description of Artificial Sequence: Synthetic oligonucleotide
  Antisense strand to SEQ ID NO: 1114720
uuaugccaugucuuugcca

SEQ ID NO: 1114722 - RNA, 19 nt, Artificial Sequence
  Description of Artificial Sequence: Synthetic oligonucleotide
  Sense strand starting at position 945 of SEQ ID NO: 915899
acagaauaggugugacuug

SEQ ID NO: 1114723 - RNA, 19 nt, Artificial Sequence
  Description of Artificial Sequence: Synthetic oligonucleotide
  Antisense strand to SEQ ID NO: 1114722
caagucacaccuauucugu

SEQ ID NO: 1114724 - RNA, 19 nt, Artificial Sequence
  Description of Artificial Sequence: Synthetic oligonucleotide
  Sense strand starting at position 1101 of SEQ ID NO: 915899
gccaaagaaucugcaccuu

SEQ ID NO: 1114725 - RNA, 19 nt, Artificial Sequence
  Description of Artificial Sequence: Synthetic oligonucleotide
  Antisense strand to SEQ ID NO: 1114724
aaggugcagauucuuuggc

SEQ ID NO: 1114726 - RNA, 19 nt, Artificial Sequence
  Description of Artificial Sequence: Synthetic oligonucleotide
  Sense strand starting at position 1126 of SEQ ID NO: 915899
gagggugagaaacgaguua

SEQ ID NO: 1114727 - RNA, 19 nt, Artificial Sequence
  Description of Artificial Sequence: Synthetic oligonucleotide
  Antisense strand to SEQ ID NO: 1114726
uaacucguuucucacccuc

SEQ ID NO: 1114728 - RNA, 19 nt, Artificial Sequence
  Description of Artificial Sequence: Synthetic oligonucleotide
  Sense strand starting at position 1180 of SEQ ID NO: 915899
gaggguguuaccugaugcu

SEQ ID NO: 1114729 - RNA, 19 nt, Artificial Sequence
  Description of Artificial Sequence: Synthetic oligonucleotide
  Antisense strand to SEQ ID NO: 1114728
agcaucagguaacacccuc

SEQ ID NO: 1114730 - RNA, 19 nt, Artificial Sequence
  Description of Artificial Sequence: Synthetic oligonucleotide
  Sense strand starting at position 1187 of SEQ ID NO: 915899
uuaccugaugcuugugaga

SEQ ID NO: 1114731 - RNA, 19 nt, Artificial Sequence
  Description of Artificial Sequence: Synthetic oligonucleotide
  Antisense strand to SEQ ID NO: 1114730
ucucacaagcaucagguaa

SEQ ID NO: 1114732 - RNA, 19 nt, Artificial Sequence
  Description of Artificial Sequence: Synthetic oligonucleotide
  Sense strand starting at position 1272 of SEQ ID NO: 915899
cguauuauuacaugaaacg

SEQ ID NO: 1114733 - RNA, 19 nt, Artificial Sequence
  Description of Artificial Sequence: Synthetic oligonucleotide
  Antisense strand to SEQ ID NO: 1114732
cguuucauguaauaauacg

SEQ ID NO: 1114734 - RNA, 19 nt, Artificial Sequence
  Description of Artificial Sequence: Synthetic oligonucleotide
  Sense strand starting at position 1673 of SEQ ID NO: 915899
gauccaaagugagucaagu

SEQ ID NO: 1114735 - RNA, 19 nt, Artificial Sequence
  Description of Artificial Sequence: Synthetic oligonucleotide
  Antisense strand to SEQ ID NO: 1114734
acuugacucacuuuggauc

SEQ ID NO: 1114736 - RNA, 19 nt, Artificial Sequence
  Description of Artificial Sequence: Synthetic oligonucleotide
  Sense strand starting at position 2303 of SEQ ID NO: 915899
cuaggugcuuucucccaga

SEQ ID NO: 1114737 - RNA, 19 nt, Artificial Sequence
  Description of Artificial Sequence: Synthetic oligonucleotide
  Antisense strand to SEQ ID NO: 1114736
ucugggagaaagcaccuag

SEQ ID NO: 1114738 - RNA, 19 nt, Artificial Sequence
  Description of Artificial Sequence: Synthetic oligonucleotide
  Sense strand starting at position 2308 of SEQ ID NO: 915899
ugcuuucucccagaaagaa

SEQ ID NO: 1114739 - RNA, 19 nt, Artificial Sequence
  Description of Artificial Sequence: Synthetic oligonucleotide
  Antisense strand to SEQ ID NO: 1114738
uucuuucugggagaaagca

SEQ ID NO: 1114740 - RNA, 19 nt, Artificial Sequence
  Description of Artificial Sequence: Synthetic oligonucleotide
  Sense strand starting at position 2535 of SEQ ID NO: 915899
gacuuauucccucgagggu

SEQ ID NO: 1114741 - RNA, 19 nt, Artificial Sequence
  Description of Artificial Sequence: Synthetic oligonucleotide
  Antisense strand to SEQ ID NO: 1114740
acccucgagggaauaaguc

SEQ ID NO: 1114742 - RNA, 19 nt, Artificial Sequence
  Description of Artificial Sequence: Synthetic oligonucleotide
  Sense strand starting at position 2550 of SEQ ID NO: 915899
gggucgacuguuggaagua

SEQ ID NO: 1114743 - RNA, 19 nt, Artificial Sequence
  Description of Artificial Sequence: Synthetic oligonucleotide
  Antisense strand to SEQ ID NO: 1114742
uacuuccaacagucgaccc

SEQ ID NO: 1114744 - RNA, 19 nt, Artificial Sequence
  Description of Artificial Sequence: Synthetic oligonucleotide
  Sense strand starting at position 2555 of SEQ ID NO: 915899
gacuguuggaaguaaugua

SEQ ID NO: 1114745 - RNA, 19 nt, Artificial Sequence
  Description of Artificial Sequence: Synthetic oligonucleotide
  Antisense strand to SEQ ID NO: 1114744
uacauuacuuccaacaguc

SEQ ID NO: 1114746 - RNA, 19 nt, Artificial Sequence
  Description of Artificial Sequence: Synthetic oligonucleotide
  Sense strand starting at position 2560 of SEQ ID NO: 915899
uuggaaguaauguagguuu

SEQ ID NO: 1114747 - RNA, 19 nt, Artificial Sequence
  Description of Artificial Sequence: Synthetic oligonucleotide
  Antisense strand to SEQ ID NO: 1114746
aaaccuacauuacuuccaa

SEQ ID NO: 1114748 - RNA, 19 nt, Artificial Sequence
  Description of Artificial Sequence: Synthetic oligonucleotide
  Sense strand starting at position 2585 of SEQ ID NO: 915899
ugaaguguguggagaggaa

SEQ ID NO: 1114749 - RNA, 19 nt, Artificial Sequence
  Description of Artificial Sequence: Synthetic oligonucleotide
  Antisense strand to SEQ ID NO: 1114748
uuccucuccacacacuuca

SEQ ID NO: 1114750 - RNA, 19 nt, Artificial Sequence
  Description of Artificial Sequence: Synthetic oligonucleotide
  Sense strand starting at position 2658 of SEQ ID NO: 915899
aaagguugagcauguaugu

SEQ ID NO: 1114751 - RNA, 19 nt, Artificial Sequence
  Description of Artificial Sequence: Synthetic oligonucleotide
  Antisense strand to SEQ ID NO: 1114750
acauacaugcucaaccuuu

SEQ ID NO: 1114752 - RNA, 19 nt, Artificial Sequence
  Description of Artificial Sequence: Synthetic oligonucleotide
  Sense strand starting at position 3055 of SEQ ID NO: 915899
cccaguagucacuacuguu

SEQ ID NO: 1114753 - RNA, 19 nt, Artificial Sequence
  Description of Artificial Sequence: Synthetic oligonucleotide
  Antisense strand to SEQ ID NO: 1114752
aacaguagugacuacuggg

SEQ ID NO: 1114754 - RNA, 19 nt, Artificial Sequence
  Description of Artificial Sequence: Synthetic oligonucleotide
  Sense strand starting at position 3070 of SEQ ID NO: 915899
uguuaauacucucuuaggu

SEQ ID NO: 1114755 - RNA, 19 nt, Artificial Sequence
  Description of Artificial Sequence: Synthetic oligonucleotide
  Antisense strand to SEQ ID NO: 1114754
accuaagagaguauuaaca

SEQ ID NO: 1114756 - RNA, 19 nt, Artificial Sequence
  Description of Artificial Sequence: Synthetic oligonucleotide
  Sense strand starting at position 3306 of SEQ ID NO: 915899
ucgugugugcuugugugua

SEQ ID NO: 1114757 - RNA, 19 nt, Artificial Sequence
  Description of Artificial Sequence: Synthetic oligonucleotide
  Antisense strand to SEQ ID NO: 1114756
uacacacaagcacacacga

SEQ ID NO: 1114758 - RNA, 19 nt, Artificial Sequence
  Description of Artificial Sequence: Synthetic oligonucleotide
  Sense strand starting at position 3584 of SEQ ID NO: 915899
ccaagaucccgccauuauu

SEQ ID NO: 1114759 - RNA, 19 nt, Artificial Sequence
  Description of Artificial Sequence: Synthetic oligonucleotide
  Antisense strand to SEQ ID NO: 1114758
aauaauggcgggaucuugg

SEQ ID NO: 1114760 - RNA, 19 nt, Artificial Sequence
  Description of Artificial Sequence: Synthetic oligonucleotide
  Sense strand starting at position 3639 of SEQ ID NO: 915899
uacauauaagugggaucau

SEQ ID NO: 1114761 - RNA, 19 nt, Artificial Sequence
  Description of Artificial Sequence: Synthetic oligonucleotide
  Antisense strand to SEQ ID NO: 1114760
augaucccacuuauaugua

SEQ ID NO: 1114762 - RNA, 19 nt, Artificial Sequence
  Description of Artificial Sequence: Synthetic oligonucleotide
  Sense strand starting at position 3830 of SEQ ID NO: 915899
acucuuaggugauuccaua

SEQ ID NO: 1114763 - RNA, 19 nt, Artificial Sequence
  Description of Artificial Sequence: Synthetic oligonucleotide
  Antisense strand to SEQ ID NO: 1114762
uauggaaucaccuaagagu

SEQ ID NO: 1114764 - RNA, 19 nt, Artificial Sequence
  Description of Artificial Sequence: Synthetic oligonucleotide
  Sense strand starting at position 3870 of SEQ ID NO: 915899
cugcaaugagcauggugau

SEQ ID NO: 1114765 - RNA, 19 nt, Artificial Sequence
  Description of Artificial Sequence: Synthetic oligonucleotide
  Antisense strand to SEQ ID NO: 1114764
aucaccaugcucauugcag

SEQ ID NO: 1114766 - RNA, 19 nt, Artificial Sequence
  Description of Artificial Sequence: Synthetic oligonucleotide
  Sense strand starting at position 3880 of SEQ ID NO: 915899
cauggugaugcagauaucu

SEQ ID NO: 1114767 - RNA, 19 nt, Artificial Sequence
  Description of Artificial Sequence: Synthetic oligonucleotide
  Antisense strand to SEQ ID NO: 1114766
agauaucugcaucaccaug

SEQ ID NO: 1114768 - RNA, 19 nt, Artificial Sequence
  Description of Artificial Sequence: Synthetic oligonucleotide
  Sense strand starting at position 3939 of SEQ ID NO: 915899
gaauauaugguauauacgu

SEQ ID NO: 1114769 - RNA, 19 nt, Artificial Sequence
  Description of Artificial Sequence: Synthetic oligonucleotide
  Antisense strand to SEQ ID NO: 1114768
acguauauaccauauauuc

SEQ ID NO: 1114770 - RNA, 19 nt, Artificial Sequence
  Description of Artificial Sequence: Synthetic oligonucleotide
  Sense strand starting at position 3947 of SEQ ID NO: 915899
gguauauacguauauauug

SEQ ID NO: 1114771 - RNA, 19 nt, Artificial Sequence
  Description of Artificial Sequence: Synthetic oligonucleotide
  Antisense strand to SEQ ID NO: 1114770
caauauauacguauauacc

SEQ ID NO: 1114772 - RNA, 19 nt, Artificial Sequence
  Description of Artificial Sequence: Synthetic oligonucleotide
  Sense strand starting at position 3973 of SEQ ID NO: 915899
gguacauaugcauauauga

SEQ ID NO: 1114773 - RNA, 19 nt, Artificial Sequence
  Description of Artificial Sequence: Synthetic oligonucleotide
  Antisense strand to SEQ ID NO: 1114772
ucauauaugcauauguacc

SEQ ID NO: 1114774 - RNA, 19 nt, Artificial Sequence
  Description of Artificial Sequence: Synthetic oligonucleotide
  Sense strand starting at position 599 of SEQ ID NO: 915900
gauggagcuucccagagga

SEQ ID NO: 1114775 - RNA, 19 nt, Artificial Sequence
  Description of Artificial Sequence: Synthetic oligonucleotide
  Antisense strand to SEQ ID NO: 1114774
uccucugggaagcuccauc

SEQ ID NO: 1114776 - RNA, 19 nt, Artificial Sequence
  Description of Artificial Sequence: Synthetic oligonucleotide
  Sense strand starting at position 3609 of SEQ ID NO: 915900
gcgcuucuccucuguggaa

SEQ ID NO: 1114777 - RNA, 19 nt, Artificial Sequence
  Description of Artificial Sequence: Synthetic oligonucleotide
  Antisense strand to SEQ ID NO: 1114776
uuccacagaggagaagcgc

SEQ ID NO: 1114778 - RNA, 19 nt, Artificial Sequence
  Description of Artificial Sequence: Synthetic oligonucleotide
  Sense strand starting at position 3634 of SEQ ID NO: 915900
auggucuguuggccugaau

SEQ ID NO: 1114779 - RNA, 19 nt, Artificial Sequence
  Description of Artificial Sequence: Synthetic oligonucleotide
  Antisense strand to SEQ ID NO: 1114778
auucaggccaacagaccau

SEQ ID NO: 1114780 - RNA, 19 nt, Artificial Sequence
  Description of Artificial Sequence: Synthetic oligonucleotide
  Sense strand starting at position 3698 of SEQ ID NO: 915900
ucaccugugccauggagau

SEQ ID NO: 1114781 - RNA, 19 nt, Artificial Sequence
  Description of Artificial Sequence: Synthetic oligonucleotide
  Antisense strand to SEQ ID NO: 1114780
aucuccauggcacagguga

SEQ ID NO: 1114782 - RNA, 19 nt, Artificial Sequence
  Description of Artificial Sequence: Synthetic oligonucleotide
  Sense strand starting at position 3732 of SEQ ID NO: 915900
cagggcuauugugaugacu

SEQ ID NO: 1114783 - RNA, 19 nt, Artificial Sequence
  Description of Artificial Sequence: Synthetic oligonucleotide
  Antisense strand to SEQ ID NO: 1114782
agucaucacaauagcccug

SEQ ID NO: 1114784 - RNA, 19 nt, Artificial Sequence
  Description of Artificial Sequence: Synthetic oligonucleotide
  Sense strand starting at position 3734 of SEQ ID NO: 915900
gggcuauugugaugacuua

SEQ ID NO: 1114785 - RNA, 19 nt, Artificial Sequence
  Description of Artificial Sequence: Synthetic oligonucleotide
  Antisense strand to SEQ ID NO: 1114784
uaagucaucacaauagccc

SEQ ID NO: 1114786 - RNA, 19 nt, Artificial Sequence
  Description of Artificial Sequence: Synthetic oligonucleotide
  Sense strand starting at position 3735 of SEQ ID NO: 915900
ggcuauugugaugacuuaa

SEQ ID NO: 1114787 - RNA, 19 nt, Artificial Sequence
  Description of Artificial Sequence: Synthetic oligonucleotide
  Antisense strand to SEQ ID NO: 1114786
uuaagucaucacaauagcc

SEQ ID NO: 1114788 - RNA, 19 nt, Artificial Sequence
  Description of Artificial Sequence: Synthetic oligonucleotide
  Sense strand starting at position 27 of SEQ ID NO: 915901
cugugaaaugucugugaca

SEQ ID NO: 1114789 - RNA, 19 nt, Artificial Sequence
  Description of Artificial Sequence: Synthetic oligonucleotide
  Antisense strand to SEQ ID NO: 1114788
ugucacagacauuucacag

SEQ ID NO: 1114790 - RNA, 19 nt, Artificial Sequence
  Description of Artificial Sequence: Synthetic oligonucleotide
  Sense strand starting at position 28 of SEQ ID NO: 915901
ugugaaaugucugugacau

SEQ ID NO: 1114791 - RNA, 19 nt, Artificial Sequence
  Description of Artificial Sequence: Synthetic oligonucleotide
  Antisense strand to SEQ ID NO: 1114790
augucacagacauuucaca

SEQ ID NO: 1114792 - RNA, 19 nt, Artificial Sequence
  Description of Artificial Sequence: Synthetic oligonucleotide
  Sense strand starting at position 29 of SEQ ID NO: 915901
gugaaaugucugugacauc

SEQ ID NO: 1114793 - RNA, 19 nt, Artificial Sequence
  Description of Artificial Sequence: Synthetic oligonucleotide
  Antisense strand to SEQ ID NO: 1114792
gaugucacagacauuucac

SEQ ID NO: 1114794 - RNA, 19 nt, Artificial Sequence
  Description of Artificial Sequence: Synthetic oligonucleotide
  Sense strand starting at position 40 of SEQ ID NO: 915901
gugacaucuuagguacuca

SEQ ID NO: 1114795 - RNA, 19 nt, Artificial Sequence
  Description of Artificial Sequence: Synthetic oligonucleotide
  Antisense strand to SEQ ID NO: 1114794
ugaguaccuaagaugucac

SEQ ID NO: 1114796 - RNA, 19 nt, Artificial Sequence
  Description of Artificial Sequence: Synthetic oligonucleotide
  Sense strand starting at position 134 of SEQ ID NO: 915901
gcuuuacauuugguaugca

SEQ ID NO: 1114797 - RNA, 19 nt, Artificial Sequence
  Description of Artificial Sequence: Synthetic oligonucleotide
  Antisense strand to SEQ ID NO: 1114796
ugcauaccaaauguaaagc

SEQ ID NO: 1114798 - RNA, 19 nt, Artificial Sequence
  Description of Artificial Sequence: Synthetic oligonucleotide
  Sense strand starting at position 143 of SEQ ID NO: 915901
uugguaugcaaagagcaau

SEQ ID NO: 1114799 - RNA, 19 nt, Artificial Sequence
  Description of Artificial Sequence: Synthetic oligonucleotide
  Antisense strand to SEQ ID NO: 1114798
auugcucuuugcauaccaa

SEQ ID NO: 1114800 - RNA, 19 nt, Artificial Sequence
  Description of Artificial Sequence: Synthetic oligonucleotide
  Sense strand starting at position 146 of SEQ ID NO: 915901
guaugcaaagagcaauaaa

SEQ ID NO: 1114801 - RNA, 19 nt, Artificial Sequence
  Description of Artificial Sequence: Synthetic oligonucleotide
  Antisense strand to SEQ ID NO: 1114800
uuuauugcucuuugcauac

SEQ ID NO: 1114802 - RNA, 19 nt, Artificial Sequence
  Description of Artificial Sequence: Synthetic oligonucleotide
  Sense strand starting at position 213 of SEQ ID NO: 915901
gcuuguuguaaguucguaa

SEQ ID NO: 1114803 - RNA, 19 nt, Artificial Sequence
  Description of Artificial Sequence: Synthetic oligonucleotide
  Antisense strand to SEQ ID NO: 1114802
uuacgaacuuacaacaagc

SEQ ID NO: 1114804 - RNA, 19 nt, Artificial Sequence
  Description of Artificial Sequence: Synthetic oligonucleotide
  Sense strand starting at position 242 of SEQ ID NO: 915901
gggaauuaguaggugcauu

SEQ ID NO: 1114805 - RNA, 19 nt, Artificial Sequence
  Description of Artificial Sequence: Synthetic oligonucleotide
  Antisense strand to SEQ ID NO: 1114804
aaugcaccuacuaauuccc

SEQ ID NO: 1114806 - RNA, 19 nt, Artificial Sequence
  Description of Artificial Sequence: Synthetic oligonucleotide
  Sense strand starting at position 435 of SEQ ID NO: 915901
uaaguauugggcuaagcau

SEQ ID NO: 1114807 - RNA, 19 nt, Artificial Sequence
  Description of Artificial Sequence: Synthetic oligonucleotide
  Antisense strand to SEQ ID NO: 1114806
augcuuagcccaauacuua

SEQ ID NO: 1114808 - RNA, 19 nt, Artificial Sequence
  Description of Artificial Sequence: Synthetic oligonucleotide
  Sense strand starting at position 560 of SEQ ID NO: 915901
ucaaauaaccugggugaca

SEQ ID NO: 1114809 - RNA, 19 nt, Artificial Sequence
  Description of Artificial Sequence: Synthetic oligonucleotide
  Antisense strand to SEQ ID NO: 1114808
ugucacccagguuauuuga

SEQ ID NO: 1114810 - RNA, 19 nt, Artificial Sequence
  Description of Artificial Sequence: Synthetic oligonucleotide
  Sense strand starting at position 623 of SEQ ID NO: 915901
ggugucagagcuuauaaac

SEQ ID NO: 1114811 - RNA, 19 nt, Artificial Sequence
  Description of Artificial Sequence: Synthetic oligonucleotide
  Antisense strand to SEQ ID NO: 1114810
guuuauaagcucugacacc

SEQ ID NO: 1114812 - RNA, 19 nt, Artificial Sequence
  Description of Artificial Sequence: Synthetic oligonucleotide
  Sense strand starting at position 703 of SEQ ID NO: 915901
gaucgaauuucugaaaucg

SEQ ID NO: 1114813 - RNA, 19 nt, Artificial Sequence
  Description of Artificial Sequence: Synthetic oligonucleotide
  Antisense strand to SEQ ID NO: 1114812
cgauuucagaaauucgauc

SEQ ID NO: 1114814 - RNA, 19 nt, Artificial Sequence
  Description of Artificial Sequence: Synthetic oligonucleotide
  Sense strand starting at position 985 of SEQ ID NO: 915901
gaauacugccagugaauac

SEQ ID NO: 1114815 - RNA, 19 nt, Artificial Sequence
  Description of Artificial Sequence: Synthetic oligonucleotide
  Antisense strand to SEQ ID NO: 1114814
guauucacuggcaguauuc

SEQ ID NO: 1114816 - RNA, 19 nt, Artificial Sequence
  Description of Artificial Sequence: Synthetic oligonucleotide
  Sense strand starting at position 1242 of SEQ ID NO: 915901
cgggaagccgcgaguauua

SEQ ID NO: 1114817 - RNA, 19 nt, Artificial Sequence
  Description of Artificial Sequence: Synthetic oligonucleotide
  Antisense strand to SEQ ID NO: 1114816
uaauacucgcggcuucccg

SEQ ID NO: 1114818 - RNA, 19 nt, Artificial Sequence
  Description of Artificial Sequence: Synthetic oligonucleotide
  Sense strand starting at position 2192 of SEQ ID NO: 915901
cagcauuccgaagauugca

SEQ ID NO: 1114819 - RNA, 19 nt, Artificial Sequence
  Description of Artificial Sequence: Synthetic oligonucleotide
  Antisense strand to SEQ ID NO: 1114818
ugcaaucuucggaaugcug

SEQ ID NO: 1114820 - RNA, 19 nt, Artificial Sequence
  Description of Artificial Sequence: Synthetic oligonucleotide
  Sense strand starting at position 2201 of SEQ ID NO: 915901
gaagauugcaguuguuaga

SEQ ID NO: 1114821 - RNA, 19 nt, Artificial Sequence
  Description of Artificial Sequence: Synthetic oligonucleotide
  Antisense strand to SEQ ID NO: 1114820
ucuaacaacugcaaucuuc

SEQ ID NO: 1114822 - RNA, 19 nt, Artificial Sequence
  Description of Artificial Sequence: Synthetic oligonucleotide
  Sense strand starting at position 2407 of SEQ ID NO: 915901
ccuggaacgguuggguaaa

SEQ ID NO: 1114823 - RNA, 19 nt, Artificial Sequence
  Description of Artificial Sequence: Synthetic oligonucleotide
  Antisense strand to SEQ ID NO: 1114822
uuuacccaaccguuccagg

SEQ ID NO: 1114824 - RNA, 19 nt, Artificial Sequence
  Description of Artificial Sequence: Synthetic oligonucleotide
  Sense strand starting at position 2522 of SEQ ID NO: 915901
agacccauuccuugguaau

SEQ ID NO: 1114825 - RNA, 19 nt, Artificial Sequence
  Description of Artificial Sequence: Synthetic oligonucleotide
  Antisense strand to SEQ ID NO: 1114824
auuaccaaggaaugggucu

SEQ ID NO: 1114826 - RNA, 19 nt, Artificial Sequence
  Description of Artificial Sequence: Synthetic oligonucleotide
  Sense strand starting at position 2528 of SEQ ID NO: 915901
auuccuugguaaucuagua

SEQ ID NO: 1114827 - RNA, 19 nt, Artificial Sequence
  Description of Artificial Sequence: Synthetic oligonucleotide
  Antisense strand to SEQ ID NO: 1114826
uacuagauuaccaaggaau

SEQ ID NO: 1114828 - RNA, 19 nt, Artificial Sequence
  Description of Artificial Sequence: Synthetic oligonucleotide
  Sense strand starting at position 2720 of SEQ ID NO: 915901
uguguucccaagcagaagu

SEQ ID NO: 1114829 - RNA, 19 nt, Artificial Sequence
  Description of Artificial Sequence: Synthetic oligonucleotide
  Antisense strand to SEQ ID NO: 1114828
acuucugcuugggaacaca

SEQ ID NO: 1114830 - RNA, 19 nt, Artificial Sequence
  Description of Artificial Sequence: Synthetic oligonucleotide
  Sense strand starting at position 2932 of SEQ ID NO: 915901
ggcagcuagaaacaguaau

SEQ ID NO: 1114831 - RNA, 19 nt, Artificial Sequence
  Description of Artificial Sequence: Synthetic oligonucleotide
  Antisense strand to SEQ ID NO: 1114830
auuacuguuucuagcugcc

SEQ ID NO: 1114832 - RNA, 19 nt, Artificial Sequence
  Description of Artificial Sequence: Synthetic oligonucleotide
  Sense strand starting at position 2965 of SEQ ID NO: 915901
cccgaaugugaucaaaccu

SEQ ID NO: 1114833 - RNA, 19 nt, Artificial Sequence
  Description of Artificial Sequence: Synthetic oligonucleotide
  Antisense strand to SEQ ID NO: 1114832
agguuugaucacauucggg

SEQ ID NO: 1114834 - RNA, 19 nt, Artificial Sequence
  Description of Artificial Sequence: Synthetic oligonucleotide
  Sense strand starting at position 2982 of SEQ ID NO: 915901
cuuggcuuuccagacaagu

SEQ ID NO: 1114835 - RNA, 19 nt, Artificial Sequence
  Description of Artificial Sequence: Synthetic oligonucleotide
  Antisense strand to SEQ ID NO: 1114834
acuugucuggaaagccaag

SEQ ID NO: 1114836 - RNA, 19 nt, Artificial Sequence
  Description of Artificial Sequence: Synthetic oligonucleotide
  Sense strand starting at position 2984 of SEQ ID NO: 915901
uggcuuuccagacaagugu

SEQ ID NO: 1114837 - RNA, 19 nt, Artificial Sequence
  Description of Artificial Sequence: Synthetic oligonucleotide
  Antisense strand to SEQ ID NO: 1114836
acacuugucuggaaagcca

SEQ ID NO: 1114838 - RNA, 19 nt, Artificial Sequence
  Description of Artificial Sequence: Synthetic oligonucleotide
  Sense strand starting at position 3044 of SEQ ID NO: 915901
uuaauuagaccugggcuuu

SEQ ID NO: 1114839 - RNA, 19 nt, Artificial Sequence
  Description of Artificial Sequence: Synthetic oligonucleotide
  Antisense strand to SEQ ID NO: 1114838
aaagcccaggucuaauuaa

SEQ ID NO: 1114840 - RNA, 19 nt, Artificial Sequence
  Description of Artificial Sequence: Synthetic oligonucleotide
  Sense strand starting at position 3057 of SEQ ID NO: 915901
ggcuuuaagaucuggguua

SEQ ID NO: 1114841 - RNA, 19 nt, Artificial Sequence
  Description of Artificial Sequence: Synthetic oligonucleotide
  Antisense strand to SEQ ID NO: 1114840
uaacccagaucuuaaagcc

SEQ ID NO: 1114842 - RNA, 19 nt, Artificial Sequence
  Description of Artificial Sequence: Synthetic oligonucleotide
  Sense strand starting at position 3059 of SEQ ID NO: 915901
cuuuaagaucuggguuaaa

SEQ ID NO: 1114843 - RNA, 19 nt, Artificial Sequence
  Description of Artificial Sequence: Synthetic oligonucleotide
  Antisense strand to SEQ ID NO: 1114842
uuuaacccagaucuuaaag

SEQ ID NO: 1114844 - RNA, 19 nt, Artificial Sequence
  Description of Artificial Sequence: Synthetic oligonucleotide
  Sense strand starting at position 3162 of SEQ ID NO: 915901
auuccugucuuaguagaga

SEQ ID NO: 1114845 - RNA, 19 nt, Artificial Sequence
  Description of Artificial Sequence: Synthetic oligonucleotide
  Antisense strand to SEQ ID NO: 1114844
ucucuacuaagacaggaau

SEQ ID NO: 1114846 - RNA, 19 nt, Artificial Sequence
  Description of Artificial Sequence: Synthetic oligonucleotide
  Sense strand starting at position 3189 of SEQ ID NO: 915901
uucagagaugucgaguauu

SEQ ID NO: 1114847 - RNA, 19 nt, Artificial Sequence
  Description of Artificial Sequence: Synthetic oligonucleotide
  Antisense strand to SEQ ID NO: 1114846
aauacucgacaucucugaa

SEQ ID NO: 1114848 - RNA, 19 nt, Artificial Sequence
  Description of Artificial Sequence: Synthetic oligonucleotide
  Sense strand starting at position 3215 of SEQ ID NO: 915901
ggaucacucagcuaguaga

SEQ ID NO: 1114849 - RNA, 19 nt, Artificial Sequence
  Description of Artificial Sequence: Synthetic oligonucleotide
  Antisense strand to SEQ ID NO: 1114848
ucuacuagcugagugaucc

SEQ ID NO: 1114850 - RNA, 19 nt, Artificial Sequence
  Description of Artificial Sequence: Synthetic oligonucleotide
  Sense strand starting at position 3326 of SEQ ID NO: 915901
guuucuuagaaacgaugau

SEQ ID NO: 1114851 - RNA, 19 nt, Artificial Sequence
  Description of Artificial Sequence: Synthetic oligonucleotide
  Antisense strand to SEQ ID NO: 1114850
aucaucguuucuaagaaac

SEQ ID NO: 1114852 - RNA, 19 nt, Artificial Sequence
  Description of Artificial Sequence: Synthetic oligonucleotide
  Sense strand starting at position 3617 of SEQ ID NO: 915901
uauaaugucuugccagaug

SEQ ID NO: 1114853 - RNA, 19 nt, Artificial Sequence
  Description of Artificial Sequence: Synthetic oligonucleotide
  Antisense strand to SEQ ID NO: 1114852
caucuggcaagacauuaua

SEQ ID NO: 1114854 - RNA, 19 nt, Artificial Sequence
  Description of Artificial Sequence: Synthetic oligonucleotide
  Sense strand starting at position 3620 of SEQ ID NO: 915901
aaugucuugccagauggau

SEQ ID NO: 1114855 - RNA, 19 nt, Artificial Sequence
  Description of Artificial Sequence: Synthetic oligonucleotide
  Antisense strand to SEQ ID NO: 1114854
auccaucuggcaagacauu

SEQ ID NO: 1114856 - RNA, 19 nt, Artificial Sequence
  Description of Artificial Sequence: Synthetic oligonucleotide
  Sense strand starting at position 3622 of SEQ ID NO: 915901
ugucuugccagauggauag

SEQ ID NO: 1114857 - RNA, 19 nt, Artificial Sequence
  Description of Artificial Sequence: Synthetic oligonucleotide
  Antisense strand to SEQ ID NO: 1114856
cuauccaucuggcaagaca

SEQ ID NO: 1114858 - RNA, 19 nt, Artificial Sequence
  Description of Artificial Sequence: Synthetic oligonucleotide
  Sense strand starting at position 3725 of SEQ ID NO: 915901
uguauaauagaaugcuaga

SEQ ID NO: 1114859 - RNA, 19 nt, Artificial Sequence
  Description of Artificial Sequence: Synthetic oligonucleotide
  Antisense strand to SEQ ID NO: 1114858
ucuagcauucuauuauaca

SEQ ID NO: 1114860 - RNA, 19 nt, Artificial Sequence
  Description of Artificial Sequence: Synthetic oligonucleotide
  Sense strand starting at position 3744 of SEQ ID NO: 915901
gaauuuguguaauagaaug

SEQ ID NO: 1114861 - RNA, 19 nt, Artificial Sequence
  Description of Artificial Sequence: Synthetic oligonucleotide
  Antisense strand to SEQ ID NO: 1114860
cauucuauuacacaaauuc

SEQ ID NO: 1114862 - RNA, 19 nt, Artificial Sequence
  Description of Artificial Sequence: Synthetic oligonucleotide
  Sense strand starting at position 3813 of SEQ ID NO: 915901
ugccuugcucuccaggaau

SEQ ID NO: 1114863 - RNA, 19 nt, Artificial Sequence
  Description of Artificial Sequence: Synthetic oligonucleotide
  Antisense strand to SEQ ID NO: 1114862
auuccuggagagcaaggca

SEQ ID NO: 1114864 - RNA, 19 nt, Artificial Sequence
  Description of Artificial Sequence: Synthetic oligonucleotide
  Sense strand starting at position 3815 of SEQ ID NO: 915901
ccuugcucuccaggaauca

SEQ ID NO: 1114865 - RNA, 19 nt, Artificial Sequence
  Description of Artificial Sequence: Synthetic oligonucleotide
  Antisense strand to SEQ ID NO: 1114864
ugauuccuggagagcaagg

SEQ ID NO: 1114866 - RNA, 19 nt, Artificial Sequence
  Description of Artificial Sequence: Synthetic oligonucleotide
  Sense strand starting at position 3816 of SEQ ID NO: 915901
cuugcucuccaggaaucau

SEQ ID NO: 1114867 - RNA, 19 nt, Artificial Sequence
  Description of Artificial Sequence: Synthetic oligonucleotide
  Antisense strand to SEQ ID NO: 1114866
augauuccuggagagcaag

SEQ ID NO: 1114868 - RNA, 19 nt, Artificial Sequence
  Description of Artificial Sequence: Synthetic oligonucleotide
  Sense strand starting at position 191 of SEQ ID NO: 915902
gaguuugugucacugaacu

SEQ ID NO: 1114869 - RNA, 19 nt, Artificial Sequence
  Description of Artificial Sequence: Synthetic oligonucleotide
  Antisense strand to SEQ ID NO: 1114868
aguucagugacacaaacuc

SEQ ID NO: 1114870 - RNA, 19 nt, Artificial Sequence
  Description of Artificial Sequence: Synthetic oligonucleotide
  Sense strand starting at position 289 of SEQ ID NO: 915902
acagguaugcuuuaucuaa

SEQ ID NO: 1114871 - RNA, 19 nt, Artificial Sequence
  Description of Artificial Sequence: Synthetic oligonucleotide
  Antisense strand to SEQ ID NO: 1114870
uuagauaaagcauaccugu

SEQ ID NO: 1114872 - RNA, 19 nt, Artificial Sequence
  Description of Artificial Sequence: Synthetic oligonucleotide
  Sense strand starting at position 291 of SEQ ID NO: 915902
agguaugcuuuaucuaaag

SEQ ID NO: 1114873 - RNA, 19 nt, Artificial Sequence
  Description of Artificial Sequence: Synthetic oligonucleotide
  Antisense strand to SEQ ID NO: 1114872
cuuuagauaaagcauaccu

SEQ ID NO: 1114874 - RNA, 19 nt, Artificial Sequence
  Description of Artificial Sequence: Synthetic oligonucleotide
  Sense strand starting at position 327 of SEQ ID NO: 915902
cucaccaacugucuuguua

SEQ ID NO: 1114875 - RNA, 19 nt, Artificial Sequence
  Description of Artificial Sequence: Synthetic oligonucleotide
  Antisense strand to SEQ ID NO: 1114874
uaacaagacaguuggugag

SEQ ID NO: 1114876 - RNA, 19 nt, Artificial Sequence
  Description of Artificial Sequence: Synthetic oligonucleotide
  Sense strand starting at position 331 of SEQ ID NO: 915902
ccaacugucuuguuaccca

SEQ ID NO: 1114877 - RNA, 19 nt, Artificial Sequence
  Description of Artificial Sequence: Synthetic oligonucleotide
  Antisense strand to SEQ ID NO: 1114876
uggguaacaagacaguugg

SEQ ID NO: 1114878 - RNA, 19 nt, Artificial Sequence
  Description of Artificial Sequence: Synthetic oligonucleotide
  Sense strand starting at position 335 of SEQ ID NO: 915902
cugucuuguuacccaucua

SEQ ID NO: 1114879 - RNA, 19 nt, Artificial Sequence
  Description of Artificial Sequence: Synthetic oligonucleotide
  Antisense strand to SEQ ID NO: 1114878
uagauggguaacaagacag

SEQ ID NO: 1114880 - RNA, 19 nt, Artificial Sequence
  Description of Artificial Sequence: Synthetic oligonucleotide
  Sense strand starting at position 697 of SEQ ID NO: 915902
cugacacuaccguauguau

SEQ ID NO: 1114881 - RNA, 19 nt, Artificial Sequence
  Description of Artificial Sequence: Synthetic oligonucleotide
  Antisense strand to SEQ ID NO: 1114880
auacauacgguagugucag

SEQ ID NO: 1114882 - RNA, 19 nt, Artificial Sequence
  Description of Artificial Sequence: Synthetic oligonucleotide
  Sense strand starting at position 706 of SEQ ID NO: 915902
ccguauguaucuccuuuau

SEQ ID NO: 1114883 - RNA, 19 nt, Artificial Sequence
  Description of Artificial Sequence: Synthetic oligonucleotide
  Antisense strand to SEQ ID NO: 1114882
auaaaggagauacauacgg

SEQ ID NO: 1114884 - RNA, 19 nt, Artificial Sequence
  Description of Artificial Sequence: Synthetic oligonucleotide
  Sense strand starting at position 708 of SEQ ID NO: 915902
guauguaucuccuuuauua

SEQ ID NO: 1114885 - RNA, 19 nt, Artificial Sequence
  Description of Artificial Sequence: Synthetic oligonucleotide
  Antisense strand to SEQ ID NO: 1114884
uaauaaaggagauacauac

SEQ ID NO: 1114886 - RNA, 19 nt, Artificial Sequence
  Description of Artificial Sequence: Synthetic oligonucleotide
  Sense strand starting at position 710 of SEQ ID NO: 915902
auguaucuccuuuauuaug

SEQ ID NO: 1114887 - RNA, 19 nt, Artificial Sequence
  Description of Artificial Sequence: Synthetic oligonucleotide
  Antisense strand to SEQ ID NO: 1114886
cauaauaaaggagauacau

SEQ ID NO: 1114888 - RNA, 19 nt, Artificial Sequence
  Description of Artificial Sequence: Synthetic oligonucleotide
  Sense strand starting at position 835 of SEQ ID NO: 915902
gcucguuaacguuuguuaa

SEQ ID NO: 1114889 - RNA, 19 nt, Artificial Sequence
  Description of Artificial Sequence: Synthetic oligonucleotide
  Antisense strand to SEQ ID NO: 1114888
uuaacaaacguuaacgagc

SEQ ID NO: 1114890 - RNA, 19 nt, Artificial Sequence
  Description of Artificial Sequence: Synthetic oligonucleotide
  Sense strand starting at position 836 of SEQ ID NO: 915902
cucguuaacguuuguuaaa

SEQ ID NO: 1114891 - RNA, 19 nt, Artificial Sequence
  Description of Artificial Sequence: Synthetic oligonucleotide
  Antisense strand to SEQ ID NO: 1114890
uuuaacaaacguuaacgag

SEQ ID NO: 1114892 - RNA, 19 nt, Artificial Sequence
  Description of Artificial Sequence: Synthetic oligonucleotide
  Sense strand starting at position 1223 of SEQ ID NO: 915902
agaccaugacggugauaaa

SEQ ID NO: 1114893 - RNA, 19 nt, Artificial Sequence
  Description of Artificial Sequence: Synthetic oligonucleotide
  Antisense strand to SEQ ID NO: 1114892
uuuaucaccgucauggucu

SEQ ID NO: 1114894 - RNA, 19 nt, Artificial Sequence
  Description of Artificial Sequence: Synthetic oligonucleotide
  Sense strand starting at position 1226 of SEQ ID NO: 915902
ccaugacggugauaaaucu

SEQ ID NO: 1114895 - RNA, 19 nt, Artificial Sequence
  Description of Artificial Sequence: Synthetic oligonucleotide
  Antisense strand to SEQ ID NO: 1114894
agauuuaucaccgucaugg

SEQ ID NO: 1114896 - RNA, 19 nt, Artificial Sequence
  Description of Artificial Sequence: Synthetic oligonucleotide
  Sense strand starting at position 1248 of SEQ ID NO: 915902
ccacaaacuggcugucaga

SEQ ID NO: 1114897 - RNA, 19 nt, Artificial Sequence
  Description of Artificial Sequence: Synthetic oligonucleotide
  Antisense strand to SEQ ID NO: 1114896
ucugacagccaguuugugg

SEQ ID NO: 1114898 - RNA, 19 nt, Artificial Sequence
  Description of Artificial Sequence: Synthetic oligonucleotide
  Sense strand starting at position 1251 of SEQ ID NO: 915902
caaacuggcugucagaaau

SEQ ID NO: 1114899 - RNA, 19 nt, Artificial Sequence
  Description of Artificial Sequence: Synthetic oligonucleotide
  Antisense strand to SEQ ID NO: 1114898
auuucugacagccaguuug

SEQ ID NO: 1114900 - RNA, 19 nt, Artificial Sequence
  Description of Artificial Sequence: Synthetic oligonucleotide
  Sense strand starting at position 1261 of SEQ ID NO: 915902
gucagaaauuaaguacaac

SEQ ID NO: 1114901 - RNA, 19 nt, Artificial Sequence
  Description of Artificial Sequence: Synthetic oligonucleotide
  Antisense strand to SEQ ID NO: 1114900
guuguacuuaauuucugac

SEQ ID NO: 1114902 - RNA, 19 nt, Artificial Sequence
  Description of Artificial Sequence: Synthetic oligonucleotide
  Sense strand starting at position 1276 of SEQ ID NO: 915902
caaccaggccgucauaauu

SEQ ID NO: 1114903 - RNA, 19 nt, Artificial Sequence
  Description of Artificial Sequence: Synthetic oligonucleotide
  Antisense strand to SEQ ID NO: 1114902
aauuaugacggccugguug

SEQ ID NO: 1114904 - RNA, 19 nt, Artificial Sequence
  Description of Artificial Sequence: Synthetic oligonucleotide
  Sense strand starting at position 1324 of SEQ ID NO: 915902
aaggaaaucuuuggaaguc

SEQ ID NO: 1114905 - RNA, 19 nt, Artificial Sequence
  Description of Artificial Sequence: Synthetic oligonucleotide
  Antisense strand to SEQ ID NO: 1114904
gacuuccaaagauuuccuu

SEQ ID NO: 1114906 - RNA, 19 nt, Artificial Sequence
  Description of Artificial Sequence: Synthetic oligonucleotide
  Sense strand starting at position 1325 of SEQ ID NO: 915902
aggaaaucuuuggaaguca

SEQ ID NO: 1114907 - RNA, 19 nt, Artificial Sequence
  Description of Artificial Sequence: Synthetic oligonucleotide
  Antisense strand to SEQ ID NO: 1114906
ugacuuccaaagauuuccu

SEQ ID NO: 1114908 - RNA, 19 nt, Artificial Sequence
  Description of Artificial Sequence: Synthetic oligonucleotide
  Sense strand starting at position 1406 of SEQ ID NO: 915902
ggaaguggguucugacaaa

SEQ ID NO: 1114909 - RNA, 19 nt, Artificial Sequence
  Description of Artificial Sequence: Synthetic oligonucleotide
  Antisense strand to SEQ ID NO: 1114908
uuugucagaacccacuucc

SEQ ID NO: 1114910 - RNA, 19 nt, Artificial Sequence
  Description of Artificial Sequence: Synthetic oligonucleotide
  Sense strand starting at position 1538 of SEQ ID NO: 915902
uggcuucgcucucuaguga

SEQ ID NO: 1114911 - RNA, 19 nt, Artificial Sequence
  Description of Artificial Sequence: Synthetic oligonucleotide
  Antisense strand to SEQ ID NO: 1114910
ucacuagagagcgaagcca

SEQ ID NO: 1114912 - RNA, 19 nt, Artificial Sequence
  Description of Artificial Sequence: Synthetic oligonucleotide
  Sense strand starting at position 2100 of SEQ ID NO: 915902
guuccagaaucugagauca

SEQ ID NO: 1114913 - RNA, 19 nt, Artificial Sequence
  Description of Artificial Sequence: Synthetic oligonucleotide
  Antisense strand to SEQ ID NO: 1114912
ugaucucagauucuggaac

SEQ ID NO: 1114914 - RNA, 19 nt, Artificial Sequence
  Description of Artificial Sequence: Synthetic oligonucleotide
  Sense strand starting at position 2397 of SEQ ID NO: 915902
ccgggaugacagugugacu

SEQ ID NO: 1114915 - RNA, 19 nt, Artificial Sequence
  Description of Artificial Sequence: Synthetic oligonucleotide
  Antisense strand to SEQ ID NO: 1114914
agucacacugucaucccgg

SEQ ID NO: 1114916 - RNA, 19 nt, Artificial Sequence
  Description of Artificial Sequence: Synthetic oligonucleotide
  Sense strand starting at position 2451 of SEQ ID NO: 915902
ucaccuuuccugugaagca

SEQ ID NO: 1114917 - RNA, 19 nt, Artificial Sequence
  Description of Artificial Sequence: Synthetic oligonucleotide
  Antisense strand to SEQ ID NO: 1114916
ugcuucacaggaaagguga

SEQ ID NO: 1114918 - RNA, 19 nt, Artificial Sequence
  Description of Artificial Sequence: Synthetic oligonucleotide
  Sense strand starting at position 2537 of SEQ ID NO: 915902
uucccuuaguucuuacgau

SEQ ID NO: 1114919 - RNA, 19 nt, Artificial Sequence
  Description of Artificial Sequence: Synthetic oligonucleotide
  Antisense strand to SEQ ID NO: 1114918
aucguaagaacuaagggaa

SEQ ID NO: 1114920 - RNA, 19 nt, Artificial Sequence
  Description of Artificial Sequence: Synthetic oligonucleotide
  Sense strand starting at position 2546 of SEQ ID NO: 915902
uucuuacgauucuuguauu

SEQ ID NO: 1114921 - RNA, 19 nt, Artificial Sequence
  Description of Artificial Sequence: Synthetic oligonucleotide
  Antisense strand to SEQ ID NO: 1114920
aauacaagaaucguaagaa

SEQ ID NO: 1114922 - RNA, 19 nt, Artificial Sequence
  Description of Artificial Sequence: Synthetic oligonucleotide
  Sense strand starting at position 2552 of SEQ ID NO: 915902
cgauucuuguauuuaguuu

SEQ ID NO: 1114923 - RNA, 19 nt, Artificial Sequence
  Description of Artificial Sequence: Synthetic oligonucleotide
  Antisense strand to SEQ ID NO: 1114922
aaacuaaauacaagaaucg

SEQ ID NO: 1114924 - RNA, 19 nt, Artificial Sequence
  Description of Artificial Sequence: Synthetic oligonucleotide
  Sense strand starting at position 2570 of SEQ ID NO: 915902
uacucuuagugcuugugaa

SEQ ID NO: 1114925 - RNA, 19 nt, Artificial Sequence
  Description of Artificial Sequence: Synthetic oligonucleotide
  Antisense strand to SEQ ID NO: 1114924
uucacaagcacuaagagua

SEQ ID NO: 1114926 - RNA, 19 nt, Artificial Sequence
  Description of Artificial Sequence: Synthetic oligonucleotide
  Sense strand starting at position 2571 of SEQ ID NO: 915902
acucuuagugcuugugaau

SEQ ID NO: 1114927 - RNA, 19 nt, Artificial Sequence
  Description of Artificial Sequence: Synthetic oligonucleotide
  Antisense strand to SEQ ID NO: 1114926
auucacaagcacuaagagu

SEQ ID NO: 1114928 - RNA, 19 nt, Artificial Sequence
  Description of Artificial Sequence: Synthetic oligonucleotide
  Sense strand starting at position 2577 of SEQ ID NO: 915902
agugcuugugaaugccaaa

SEQ ID NO: 1114929 - RNA, 19 nt, Artificial Sequence
  Description of Artificial Sequence: Synthetic oligonucleotide
  Antisense strand to SEQ ID NO: 1114928
uuuggcauucacaagcacu

SEQ ID NO: 1114930 - RNA, 19 nt, Artificial Sequence
  Description of Artificial Sequence: Synthetic oligonucleotide
  Sense strand starting at position 2639 of SEQ ID NO: 915902
gacgguauguaggaaacau

SEQ ID NO: 1114931 - RNA, 19 nt, Artificial Sequence
  Description of Artificial Sequence: Synthetic oligonucleotide
  Antisense strand to SEQ ID NO: 1114930
auguuuccuacauaccguc

SEQ ID NO: 1114932 - RNA, 19 nt, Artificial Sequence
  Description of Artificial Sequence: Synthetic oligonucleotide
  Sense strand starting at position 2654 of SEQ ID NO: 915902
acaucaauauuugagugaa

SEQ ID NO: 1114933 - RNA, 19 nt, Artificial Sequence
  Description of Artificial Sequence: Synthetic oligonucleotide
  Antisense strand to SEQ ID NO: 1114932
uucacucaaauauugaugu

SEQ ID NO: 1114934 - RNA, 19 nt, Artificial Sequence
  Description of Artificial Sequence: Synthetic oligonucleotide
  Sense strand starting at position 2960 of SEQ ID NO: 915902
guucauugcugccugagag

SEQ ID NO: 1114935 - RNA, 19 nt, Artificial Sequence
  Description of Artificial Sequence: Synthetic oligonucleotide
  Antisense strand to SEQ ID NO: 1114934
cucucaggcagcaaugaac

SEQ ID NO: 1114936 - RNA, 19 nt, Artificial Sequence
  Description of Artificial Sequence: Synthetic oligonucleotide
  Sense strand starting at position 2978 of SEQ ID NO: 915902
gccauuucuucugccaguu

SEQ ID NO: 1114937 - RNA, 19 nt, Artificial Sequence
  Description of Artificial Sequence: Synthetic oligonucleotide
  Antisense strand to SEQ ID NO: 1114936
aacuggcagaagaaauggc

SEQ ID NO: 1114938 - RNA, 19 nt, Artificial Sequence
  Description of Artificial Sequence: Synthetic oligonucleotide
  Sense strand starting at position 3042 of SEQ ID NO: 915902
ucagcugacugggcaaaua

SEQ ID NO: 1114939 - RNA, 19 nt, Artificial Sequence
  Description of Artificial Sequence: Synthetic oligonucleotide
  Antisense strand to SEQ ID NO: 1114938
uauuugcccagucagcuga

SEQ ID NO: 1114940 - RNA, 19 nt, Artificial Sequence
  Description of Artificial Sequence: Synthetic oligonucleotide
  Sense strand starting at position 3312 of SEQ ID NO: 915902
cugccuaugagacagugaa

SEQ ID NO: 1114941 - RNA, 19 nt, Artificial Sequence
  Description of Artificial Sequence: Synthetic oligonucleotide
  Antisense strand to SEQ ID NO: 1114940
uucacugucucauaggcag

SEQ ID NO: 1114942 - RNA, 19 nt, Artificial Sequence
  Description of Artificial Sequence: Synthetic oligonucleotide
  Sense strand starting at position 3324 of SEQ ID NO: 915902
cagugaaauccucgaggac

SEQ ID NO: 1114943 - RNA, 19 nt, Artificial Sequence
  Description of Artificial Sequence: Synthetic oligonucleotide
  Antisense strand to SEQ ID NO: 1114942
guccucgaggauuucacug

SEQ ID NO: 1114944 - RNA, 19 nt, Artificial Sequence
  Description of Artificial Sequence: Synthetic oligonucleotide
  Sense strand starting at position 3511 of SEQ ID NO: 915902
augugacaauaaguuucua

SEQ ID NO: 1114945 - RNA, 19 nt, Artificial Sequence
  Description of Artificial Sequence: Synthetic oligonucleotide
  Antisense strand to SEQ ID NO: 1114944
uagaaacuuauugucacau

SEQ ID NO: 1114946 - RNA, 19 nt, Artificial Sequence
  Description of Artificial Sequence: Synthetic oligonucleotide
  Sense strand starting at position 3718 of SEQ ID NO: 915902
acuuacagguccucacauu

SEQ ID NO: 1114947 - RNA, 19 nt, Artificial Sequence
  Description of Artificial Sequence: Synthetic oligonucleotide
  Antisense strand to SEQ ID NO: 1114946
aaugugaggaccuguaagu

SEQ ID NO: 1114948 - RNA, 19 nt, Artificial Sequence
  Description of Artificial Sequence: Synthetic oligonucleotide
  Sense strand starting at position 109 of SEQ ID NO: 915903
auccuuaagcuaugaauag

SEQ ID NO: 1114949 - RNA, 19 nt, Artificial Sequence
  Description of Artificial Sequence: Synthetic oligonucleotide
  Antisense strand to SEQ ID NO: 1114948
cuauucauagcuuaaggau

SEQ ID NO: 1114950 - RNA, 19 nt, Artificial Sequence
  Description of Artificial Sequence: Synthetic oligonucleotide
  Sense strand starting at position 136 of SEQ ID NO: 915903
gggcucucauaaguaacaa

SEQ ID NO: 1114951 - RNA, 19 nt, Artificial Sequence
  Description of Artificial Sequence: Synthetic oligonucleotide
  Antisense strand to SEQ ID NO: 1114950
uuguuacuuaugagagccc

SEQ ID NO: 1114952 - RNA, 19 nt, Artificial Sequence
  Description of Artificial Sequence: Synthetic oligonucleotide
  Sense strand starting at position 351 of SEQ ID NO: 915903
cagguaagauucuugucau

SEQ ID NO: 1114953 - RNA, 19 nt, Artificial Sequence
  Description of Artificial Sequence: Synthetic oligonucleotide
  Antisense strand to SEQ ID NO: 1114952
augacaagaaucuuaccug

SEQ ID NO: 1114954 - RNA, 19 nt, Artificial Sequence
  Description of Artificial Sequence: Synthetic oligonucleotide
  Sense strand starting at position 354 of SEQ ID NO: 915903
guaagauucuugucauggg

SEQ ID NO: 1114955 - RNA, 19 nt, Artificial Sequence
  Description of Artificial Sequence: Synthetic oligonucleotide
  Antisense strand to SEQ ID NO: 1114954
cccaugacaagaaucuuac

SEQ ID NO: 1114956 - RNA, 19 nt, Artificial Sequence
  Description of Artificial Sequence: Synthetic oligonucleotide
  Sense strand starting at position 403 of SEQ ID NO: 915903
ggcuaacucccaggaggau

SEQ ID NO: 1114957 - RNA, 19 nt, Artificial Sequence
  Description of Artificial Sequence: Synthetic oligonucleotide
  Antisense strand to SEQ ID NO: 1114956
auccuccugggaguuagcc

SEQ ID NO: 1114958 - RNA, 19 nt, Artificial Sequence
  Description of Artificial Sequence: Synthetic oligonucleotide
  Sense strand starting at position 505 of SEQ ID NO: 915903
gagugagucaaggguugga

SEQ ID NO: 1114959 - RNA, 19 nt, Artificial Sequence
  Description of Artificial Sequence: Synthetic oligonucleotide
  Antisense strand to SEQ ID NO: 1114958
uccaacccuugacucacuc

SEQ ID NO: 1114960 - RNA, 19 nt, Artificial Sequence
  Description of Artificial Sequence: Synthetic oligonucleotide
  Sense strand starting at position 518 of SEQ ID NO: 915903
guuggacaguggucaggaa

SEQ ID NO: 1114961 - RNA, 19 nt, Artificial Sequence
  Description of Artificial Sequence: Synthetic oligonucleotide
  Antisense strand to SEQ ID NO: 1114960
uuccugaccacuguccaac

SEQ ID NO: 1114962 - RNA, 19 nt, Artificial Sequence
  Description of Artificial Sequence: Synthetic oligonucleotide
  Sense strand starting at position 530 of SEQ ID NO: 915903
ucaggaaugugccuaggaa

SEQ ID NO: 1114963 - RNA, 19 nt, Artificial Sequence
  Description of Artificial Sequence: Synthetic oligonucleotide
  Antisense strand to SEQ ID NO: 1114962
uuccuaggcacauuccuga

SEQ ID NO: 1114964 - RNA, 19 nt, Artificial Sequence
  Description of Artificial Sequence: Synthetic oligonucleotide
  Sense strand starting at position 719 of SEQ ID NO: 915903
auuccuuucuuggcaaaga

SEQ ID NO: 1114965 - RNA, 19 nt, Artificial Sequence
  Description of Artificial Sequence: Synthetic oligonucleotide
  Antisense strand to SEQ ID NO: 1114964
ucuuugccaagaaaggaau

SEQ ID NO: 1114966 - RNA, 19 nt, Artificial Sequence
  Description of Artificial Sequence: Synthetic oligonucleotide
  Sense strand starting at position 749 of SEQ ID NO: 915903
cguaauaaacaguacucau

SEQ ID NO: 1114967 - RNA, 19 nt, Artificial Sequence
  Description of Artificial Sequence: Synthetic oligonucleotide
  Antisense strand to SEQ ID NO: 1114966
augaguacuguuuauuacg

SEQ ID NO: 1114968 - RNA, 19 nt, Artificial Sequence
  Description of Artificial Sequence: Synthetic oligonucleotide
  Sense strand starting at position 803 of SEQ ID NO: 915903
caauguuaaggauguugga

SEQ ID NO: 1114969 - RNA, 19 nt, Artificial Sequence
  Description of Artificial Sequence: Synthetic oligonucleotide
  Antisense strand to SEQ ID NO: 1114968
uccaacauccuuaacauug

SEQ ID NO: 1114970 - RNA, 19 nt, Artificial Sequence
  Description of Artificial Sequence: Synthetic oligonucleotide
  Sense strand starting at position 964 of SEQ ID NO: 915903
auaggucuacgguaucuau

SEQ ID NO: 1114971 - RNA, 19 nt, Artificial Sequence
  Description of Artificial Sequence: Synthetic oligonucleotide
  Antisense strand to SEQ ID NO: 1114970
auagauaccguagaccuau

SEQ ID NO: 1114972 - RNA, 19 nt, Artificial Sequence
  Description of Artificial Sequence: Synthetic oligonucleotide
  Sense strand starting at position 967 of SEQ ID NO: 915903
ggucuacgguaucuauuua

SEQ ID NO: 1114973 - RNA, 19 nt, Artificial Sequence
  Description of Artificial Sequence: Synthetic oligonucleotide
  Antisense strand to SEQ ID NO: 1114972
uaaauagauaccguagacc

SEQ ID NO: 1114974 - RNA, 19 nt, Artificial Sequence
  Description of Artificial Sequence: Synthetic oligonucleotide
  Sense strand starting at position 1026 of SEQ ID NO: 915903
gucaacugucaugaugaac

SEQ ID NO: 1114975 - RNA, 19 nt, Artificial Sequence
  Description of Artificial Sequence: Synthetic oligonucleotide
  Antisense strand to SEQ ID NO: 1114974
guucaucaugacaguugac

SEQ ID NO: 1114976 - RNA, 19 nt, Artificial Sequence
  Description of Artificial Sequence: Synthetic oligonucleotide
  Sense strand starting at position 1056 of SEQ ID NO: 915903
guuaauauguuacuagauc

SEQ ID NO: 1114977 - RNA, 19 nt, Artificial Sequence
  Description of Artificial Sequence: Synthetic oligonucleotide
  Antisense strand to SEQ ID NO: 1114976
gaucuaguaacauauuaac

SEQ ID NO: 1114978 - RNA, 19 nt, Artificial Sequence
  Description of Artificial Sequence: Synthetic oligonucleotide
  Sense strand starting at position 1184 of SEQ ID NO: 915903
ccaaauagacuugguuuau

SEQ ID NO: 1114979 - RNA, 19 nt, Artificial Sequence
  Description of Artificial Sequence: Synthetic oligonucleotide
  Antisense strand to SEQ ID NO: 1114978
auaaaccaagucuauuugg

SEQ ID NO: 1114980 - RNA, 19 nt, Artificial Sequence
  Description of Artificial Sequence: Synthetic oligonucleotide
  Sense strand starting at position 1211 of SEQ ID NO: 915903
guuuguacuauggaagcaa

SEQ ID NO: 1114981 - RNA, 19 nt, Artificial Sequence
  Description of Artificial Sequence: Synthetic oligonucleotide
  Antisense strand to SEQ ID NO: 1114980
uugcuuccauaguacaaac

SEQ ID NO: 1114982 - RNA, 19 nt, Artificial Sequence
  Description of Artificial Sequence: Synthetic oligonucleotide
  Sense strand starting at position 1296 of SEQ ID NO: 915903
guguacuaacagugaagga

SEQ ID NO: 1114983 - RNA, 19 nt, Artificial Sequence
  Description of Artificial Sequence: Synthetic oligonucleotide
  Antisense strand to SEQ ID NO: 1114982
uccuucacuguuaguacac

SEQ ID NO: 1114984 - RNA, 19 nt, Artificial Sequence
  Description of Artificial Sequence: Synthetic oligonucleotide
  Sense strand starting at position 1384 of SEQ ID NO: 915903
cuagauucugaaugccuaa

SEQ ID NO: 1114985 - RNA, 19 nt, Artificial Sequence
  Description of Artificial Sequence: Synthetic oligonucleotide
  Antisense strand to SEQ ID NO: 1114984
uuaggcauucagaaucuag

SEQ ID NO: 1114986 - RNA, 19 nt, Artificial Sequence
  Description of Artificial Sequence: Synthetic oligonucleotide
  Sense strand starting at position 1582 of SEQ ID NO: 915903
gguacaguaguugggagaa

SEQ ID NO: 1114987 - RNA, 19 nt, Artificial Sequence
  Description of Artificial Sequence: Synthetic oligonucleotide
  Antisense strand to SEQ ID NO: 1114986
uucucccaacuacuguacc

SEQ ID NO: 1114988 - RNA, 19 nt, Artificial Sequence
  Description of Artificial Sequence: Synthetic oligonucleotide
  Sense strand starting at position 1595 of SEQ ID NO: 915903
ggagaagaaucuucuugca

SEQ ID NO: 1114989 - RNA, 19 nt, Artificial Sequence
  Description of Artificial Sequence: Synthetic oligonucleotide
  Antisense strand to SEQ ID NO: 1114988
ugcaagaagauucuucucc

SEQ ID NO: 1114990 - RNA, 19 nt, Artificial Sequence
  Description of Artificial Sequence: Synthetic oligonucleotide
  Sense strand starting at position 1597 of SEQ ID NO: 915903
agaagaaucuucuugcauc

SEQ ID NO: 1114991 - RNA, 19 nt, Artificial Sequence
  Description of Artificial Sequence: Synthetic oligonucleotide
  Antisense strand to SEQ ID NO: 1114990
gaugcaagaagauucuucu

SEQ ID NO: 1114992 - RNA, 19 nt, Artificial Sequence
  Description of Artificial Sequence: Synthetic oligonucleotide
  Sense strand starting at position 1608 of SEQ ID NO: 915903
cuugcaucuguugaucaau

SEQ ID NO: 1114993 - RNA, 19 nt, Artificial Sequence
  Description of Artificial Sequence: Synthetic oligonucleotide
  Antisense strand to SEQ ID NO: 1114992
auugaucaacagaugcaag

SEQ ID NO: 1114994 - RNA, 19 nt, Artificial Sequence
  Description of Artificial Sequence: Synthetic oligonucleotide
  Sense strand starting at position 1611 of SEQ ID NO: 915903
gcaucuguugaucaaugga

SEQ ID NO: 1114995 - RNA, 19 nt, Artificial Sequence
  Description of Artificial Sequence: Synthetic oligonucleotide
  Antisense strand to SEQ ID NO: 1114994
uccauugaucaacagaugc

SEQ ID NO: 1114996 - RNA, 19 nt, Artificial Sequence
  Description of Artificial Sequence: Synthetic oligonucleotide
  Sense strand starting at position 1628 of SEQ ID NO: 915903
gacccauuugcuuguguca

SEQ ID NO: 1114997 - RNA, 19 nt, Artificial Sequence
  Description of Artificial Sequence: Synthetic oligonucleotide
  Antisense strand to SEQ ID NO: 1114996
ugacacaagcaaauggguc

SEQ ID NO: 1114998 - RNA, 19 nt, Artificial Sequence
  Description of Artificial Sequence: Synthetic oligonucleotide
  Sense strand starting at position 1631 of SEQ ID NO: 915903
ccauuugcuugugucacaa

SEQ ID NO: 1114999 - RNA, 19 nt, Artificial Sequence
  Description of Artificial Sequence: Synthetic oligonucleotide
  Antisense strand to SEQ ID NO: 1114998
uugugacacaagcaaaugg

SEQ ID NO: 1115000 - RNA, 19 nt, Artificial Sequence
  Description of Artificial Sequence: Synthetic oligonucleotide
  Sense strand starting at position 1681 of SEQ ID NO: 915903
ugagaugaauucucagagu

SEQ ID NO: 1115001 - RNA, 19 nt, Artificial Sequence
  Description of Artificial Sequence: Synthetic oligonucleotide
  Antisense strand to SEQ ID NO: 1115000
acucugagaauucaucuca

SEQ ID NO: 1115002 - RNA, 19 nt, Artificial Sequence
  Description of Artificial Sequence: Synthetic oligonucleotide
  Sense strand starting at position 1831 of SEQ ID NO: 915903
acugaaaucucugugaaau

SEQ ID NO: 1115003 - RNA, 19 nt, Artificial Sequence
  Description of Artificial Sequence: Synthetic oligonucleotide
  Antisense strand to SEQ ID NO: 1115002
auuucacagagauuucagu

SEQ ID NO: 1115004 - RNA, 19 nt, Artificial Sequence
  Description of Artificial Sequence: Synthetic oligonucleotide
  Sense strand starting at position 1832 of SEQ ID NO: 915903
cugaaaucucugugaaaua

SEQ ID NO: 1115005 - RNA, 19 nt, Artificial Sequence
  Description of Artificial Sequence: Synthetic oligonucleotide
  Antisense strand to SEQ ID NO: 1115004
uauuucacagagauuucag

SEQ ID NO: 1115006 - RNA, 19 nt, Artificial Sequence
  Description of Artificial Sequence: Synthetic oligonucleotide
  Sense strand starting at position 2212 of SEQ ID NO: 915903
aaagaaggcucuuuguacu

SEQ ID NO: 1115007 - RNA, 19 nt, Artificial Sequence
  Description of Artificial Sequence: Synthetic oligonucleotide
  Antisense strand to SEQ ID NO: 1115006
aguacaaagagccuucuuu

SEQ ID NO: 1115008 - RNA, 19 nt, Artificial Sequence
  Description of Artificial Sequence: Synthetic oligonucleotide
  Sense strand starting at position 2381 of SEQ ID NO: 915903
uuauguagagcugacauaa

SEQ ID NO: 1115009 - RNA, 19 nt, Artificial Sequence
  Description of Artificial Sequence: Synthetic oligonucleotide
  Antisense strand to SEQ ID NO: 1115008
uuaugucagcucuacauaa

SEQ ID NO: 1115010 - RNA, 19 nt, Artificial Sequence
  Description of Artificial Sequence: Synthetic oligonucleotide
  Sense strand starting at position 2665 of SEQ ID NO: 915903
guucuuaaguauucuagaa

SEQ ID NO: 1115011 - RNA, 19 nt, Artificial Sequence
  Description of Artificial Sequence: Synthetic oligonucleotide
  Antisense strand to SEQ ID NO: 1115010
uucuagaauacuuaagaac

SEQ ID NO: 1115012 - RNA, 19 nt, Artificial Sequence
  Description of Artificial Sequence: Synthetic oligonucleotide
  Sense strand starting at position 2757 of SEQ ID NO: 915903
ucagaauauuuagaaagca

SEQ ID NO: 1115013 - RNA, 19 nt, Artificial Sequence
  Description of Artificial Sequence: Synthetic oligonucleotide
  Antisense strand to SEQ ID NO: 1115012
ugcuuucuaaauauucuga

SEQ ID NO: 1115014 - RNA, 19 nt, Artificial Sequence
  Description of Artificial Sequence: Synthetic oligonucleotide
  Sense strand starting at position 3140 of SEQ ID NO: 915903
cuaaaugugugaucuugga

SEQ ID NO: 1115015 - RNA, 19 nt, Artificial Sequence
  Description of Artificial Sequence: Synthetic oligonucleotide
  Antisense strand to SEQ ID NO: 1115014
uccaagaucacacauuuag

SEQ ID NO: 1115016 - RNA, 19 nt, Artificial Sequence
  Description of Artificial Sequence: Synthetic oligonucleotide
  Sense strand starting at position 3398 of SEQ ID NO: 915903
gaugcaguucuagagaugu

SEQ ID NO: 1115017 - RNA, 19 nt, Artificial Sequence
  Description of Artificial Sequence: Synthetic oligonucleotide
  Antisense strand to SEQ ID NO: 1115016
acaucucuagaacugcauc

SEQ ID NO: 1115018 - RNA, 19 nt, Artificial Sequence
  Description of Artificial Sequence: Synthetic oligonucleotide
  Sense strand starting at position 3400 of SEQ ID NO: 915903
ugcaguucuagagauguga

SEQ ID NO: 1115019 - RNA, 19 nt, Artificial Sequence
  Description of Artificial Sequence: Synthetic oligonucleotide
  Antisense strand to SEQ ID NO: 1115018
ucacaucucuagaacugca

SEQ ID NO: 1115020 - RNA, 19 nt, Artificial Sequence
  Description of Artificial Sequence: Synthetic oligonucleotide
  Sense strand starting at position 3404 of SEQ ID NO: 915903
guucuagagaugugacuac

SEQ ID NO: 1115021 - RNA, 19 nt, Artificial Sequence
  Description of Artificial Sequence: Synthetic oligonucleotide
  Antisense strand to SEQ ID NO: 1115020
guagucacaucucuagaac

SEQ ID NO: 1115022 - RNA, 19 nt, Artificial Sequence
  Description of Artificial Sequence: Synthetic oligonucleotide
  Sense strand starting at position 3504 of SEQ ID NO: 915903
ucuuaagguuccuuauuag

SEQ ID NO: 1115023 - RNA, 19 nt, Artificial Sequence
  Description of Artificial Sequence: Synthetic oligonucleotide
  Antisense strand to SEQ ID NO: 1115022
cuaauaaggaaccuuaaga

SEQ ID NO: 1115024 - RNA, 19 nt, Artificial Sequence
  Description of Artificial Sequence: Synthetic oligonucleotide
  Sense strand starting at position 3680 of SEQ ID NO: 915903
aguugucaggcuuaaauaa

SEQ ID NO: 1115025 - RNA, 19 nt, Artificial Sequence
  Description of Artificial Sequence: Synthetic oligonucleotide
  Antisense strand to SEQ ID NO: 1115024
uuauuuaagccugacaacu

SEQ ID NO: 1115026 - RNA, 19 nt, Artificial Sequence
  Description of Artificial Sequence: Synthetic oligonucleotide
  Sense strand starting at position 3822 of SEQ ID NO: 915903
cccugugaaguuuaauaac

SEQ ID NO: 1115027 - RNA, 19 nt, Artificial Sequence
  Description of Artificial Sequence: Synthetic oligonucleotide
  Antisense strand to SEQ ID NO: 1115026
guuauuaaacuucacaggg

SEQ ID NO: 1115028 - RNA, 19 nt, Artificial Sequence
  Description of Artificial Sequence: Synthetic oligonucleotide
  Sense strand starting at position 502 of SEQ ID NO: 915904
uguguaucccuuuauauau

SEQ ID NO: 1115029 - RNA, 19 nt, Artificial Sequence
  Description of Artificial Sequence: Synthetic oligonucleotide
  Antisense strand to SEQ ID NO: 1115028
auauauaaagggauacaca

SEQ ID NO: 1115030 - RNA, 19 nt, Artificial Sequence
  Description of Artificial Sequence: Synthetic oligonucleotide
  Sense strand starting at position 672 of SEQ ID NO: 915904
cugacacacuuguuuauau

SEQ ID NO: 1115031 - RNA, 19 nt, Artificial Sequence
  Description of Artificial Sequence: Synthetic oligonucleotide
  Antisense strand to SEQ ID NO: 1115030
auauaaacaagugugucag

SEQ ID NO: 1115032 - RNA, 19 nt, Artificial Sequence
  Description of Artificial Sequence: Synthetic oligonucleotide
  Sense strand starting at position 684 of SEQ ID NO: 915904
uuuauaugucucuaugaca

SEQ ID NO: 1115033 - RNA, 19 nt, Artificial Sequence
  Description of Artificial Sequence: Synthetic oligonucleotide
  Antisense strand to SEQ ID NO: 1115032
ugucauagagacauauaaa

SEQ ID NO: 1115034 - RNA, 19 nt, Artificial Sequence
  Description of Artificial Sequence: Synthetic oligonucleotide
  Sense strand starting at position 716 of SEQ ID NO: 915904
uuagauuuggcauguguuu

SEQ ID NO: 1115035 - RNA, 19 nt, Artificial Sequence
  Description of Artificial Sequence: Synthetic oligonucleotide
  Antisense strand to SEQ ID NO: 1115034
aaacacaugccaaaucuaa

SEQ ID NO: 1115036 - RNA, 19 nt, Artificial Sequence
  Description of Artificial Sequence: Synthetic oligonucleotide
  Sense strand starting at position 750 of SEQ ID NO: 915904
ccacuaaacugcucugaga

SEQ ID NO: 1115037 - RNA, 19 nt, Artificial Sequence
  Description of Artificial Sequence: Synthetic oligonucleotide
  Antisense strand to SEQ ID NO: 1115036
ucucagagcaguuuagugg

SEQ ID NO: 1115038 - RNA, 19 nt, Artificial Sequence
  Description of Artificial Sequence: Synthetic oligonucleotide
  Sense strand starting at position 752 of SEQ ID NO: 915904
acuaaacugcucugagaca

SEQ ID NO: 1115039 - RNA, 19 nt, Artificial Sequence
  Description of Artificial Sequence: Synthetic oligonucleotide
  Antisense strand to SEQ ID NO: 1115038
ugucucagagcaguuuagu

SEQ ID NO: 1115040 - RNA, 19 nt, Artificial Sequence
  Description of Artificial Sequence: Synthetic oligonucleotide
  Sense strand starting at position 766 of SEQ ID NO: 915904
agacaaguaucuguaucuu

SEQ ID NO: 1115041 - RNA, 19 nt, Artificial Sequence
  Description of Artificial Sequence: Synthetic oligonucleotide
  Antisense strand to SEQ ID NO: 1115040
aagauacagauacuugucu

SEQ ID NO: 1115042 - RNA, 19 nt, Artificial Sequence
  Description of Artificial Sequence: Synthetic oligonucleotide
  Sense strand starting at position 817 of SEQ ID NO: 915904
aagugcauuugaguuggua

SEQ ID NO: 1115043 - RNA, 19 nt, Artificial Sequence
  Description of Artificial Sequence: Synthetic oligonucleotide
  Antisense strand to SEQ ID NO: 1115042
uaccaacucaaaugcacuu

SEQ ID NO: 1115044 - RNA, 19 nt, Artificial Sequence
  Description of Artificial Sequence: Synthetic oligonucleotide
  Sense strand starting at position 819 of SEQ ID NO: 915904
gugcauuugaguugguaau

SEQ ID NO: 1115045 - RNA, 19 nt, Artificial Sequence
  Description of Artificial Sequence: Synthetic oligonucleotide
  Antisense strand to SEQ ID NO: 1115044
auuaccaacucaaaugcac

SEQ ID NO: 1115046 - RNA, 19 nt, Artificial Sequence
  Description of Artificial Sequence: Synthetic oligonucleotide
  Sense strand starting at position 820 of SEQ ID NO: 915904
ugcauuugaguugguaauu

SEQ ID NO: 1115047 - RNA, 19 nt, Artificial Sequence
  Description of Artificial Sequence: Synthetic oligonucleotide
  Antisense strand to SEQ ID NO: 1115046
aauuaccaacucaaaugca

SEQ ID NO: 1115048 - RNA, 19 nt, Artificial Sequence
  Description of Artificial Sequence: Synthetic oligonucleotide
  Sense strand starting at position 821 of SEQ ID NO: 915904
gcauuugaguugguaauuc

SEQ ID NO: 1115049 - RNA, 19 nt, Artificial Sequence
  Description of Artificial Sequence: Synthetic oligonucleotide
  Antisense strand to SEQ ID NO: 1115048
gaauuaccaacucaaaugc

SEQ ID NO: 1115050 - RNA, 19 nt, Artificial Sequence
  Description of Artificial Sequence: Synthetic oligonucleotide
  Sense strand starting at position 942 of SEQ ID NO: 915904
acucuugaaccuggaaguu

SEQ ID NO: 1115051 - RNA, 19 nt, Artificial Sequence
  Description of Artificial Sequence: Synthetic oligonucleotide
  Antisense strand to SEQ ID NO: 1115050
aacuuccagguucaagagu

SEQ ID NO: 1115052 - RNA, 19 nt, Artificial Sequence
  Description of Artificial Sequence: Synthetic oligonucleotide
  Sense strand starting at position 1070 of SEQ ID NO: 915904
ggccaugauaaucggauga

SEQ ID NO: 1115053 - RNA, 19 nt, Artificial Sequence
  Description of Artificial Sequence: Synthetic oligonucleotide
  Antisense strand to SEQ ID NO: 1115052
ucauccgauuaucauggcc

SEQ ID NO: 1115054 - RNA, 19 nt, Artificial Sequence
  Description of Artificial Sequence: Synthetic oligonucleotide
  Sense strand starting at position 1175 of SEQ ID NO: 915904
ggaagcucccgguaaagga

SEQ ID NO: 1115055 - RNA, 19 nt, Artificial Sequence
  Description of Artificial Sequence: Synthetic oligonucleotide
  Antisense strand to SEQ ID NO: 1115054
uccuuuaccgggagcuucc

SEQ ID NO: 1115056 - RNA, 19 nt, Artificial Sequence
  Description of Artificial Sequence: Synthetic oligonucleotide
  Sense strand starting at position 1183 of SEQ ID NO: 915904
ccgguaaaggaaugaaacu

SEQ ID NO: 1115057 - RNA, 19 nt, Artificial Sequence
  Description of Artificial Sequence: Synthetic oligonucleotide
  Antisense strand to SEQ ID NO: 1115056
aguuucauuccuuuaccgg

SEQ ID NO: 1115058 - RNA, 19 nt, Artificial Sequence
  Description of Artificial Sequence: Synthetic oligonucleotide
  Sense strand starting at position 1731 of SEQ ID NO: 915904
cuucuaaggcccggaaaua

SEQ ID NO: 1115059 - RNA, 19 nt, Artificial Sequence
  Description of Artificial Sequence: Synthetic oligonucleotide
  Antisense strand to SEQ ID NO: 1115058
uauuuccgggccuuagaag

SEQ ID NO: 1115060 - RNA, 19 nt, Artificial Sequence
  Description of Artificial Sequence: Synthetic oligonucleotide
  Sense strand starting at position 1732 of SEQ ID NO: 915904
uucuaaggcccggaaauaa

SEQ ID NO: 1115061 - RNA, 19 nt, Artificial Sequence
  Description of Artificial Sequence: Synthetic oligonucleotide
  Antisense strand to SEQ ID NO: 1115060
uuauuuccgggccuuagaa

SEQ ID NO: 1115062 - RNA, 19 nt, Artificial Sequence
  Description of Artificial Sequence: Synthetic oligonucleotide
  Sense strand starting at position 1750 of SEQ ID NO: 915904
agucucagccucgagaacu

SEQ ID NO: 1115063 - RNA, 19 nt, Artificial Sequence
  Description of Artificial Sequence: Synthetic oligonucleotide
  Antisense strand to SEQ ID NO: 1115062
aguucucgaggcugagacu

SEQ ID NO: 1115064 - RNA, 19 nt, Artificial Sequence
  Description of Artificial Sequence: Synthetic oligonucleotide
  Sense strand starting at position 1823 of SEQ ID NO: 915904
uaggaaaccuggcuguaga

SEQ ID NO: 1115065 - RNA, 19 nt, Artificial Sequence
  Description of Artificial Sequence: Synthetic oligonucleotide
  Antisense strand to SEQ ID NO: 1115064
ucuacagccagguuuccua

SEQ ID NO: 1115066 - RNA, 19 nt, Artificial Sequence
  Description of Artificial Sequence: Synthetic oligonucleotide
  Sense strand starting at position 1943 of SEQ ID NO: 915904
cucuguuuaccggacuaga

SEQ ID NO: 1115067 - RNA, 19 nt, Artificial Sequence
  Description of Artificial Sequence: Synthetic oligonucleotide
  Antisense strand to SEQ ID NO: 1115066
ucuaguccgguaaacagag

SEQ ID NO: 1115068 - RNA, 19 nt, Artificial Sequence
  Description of Artificial Sequence: Synthetic oligonucleotide
  Sense strand starting at position 2034 of SEQ ID NO: 915904
gcagcuuucgcccuccaga

SEQ ID NO: 1115069 - RNA, 19 nt, Artificial Sequence
  Description of Artificial Sequence: Synthetic oligonucleotide
  Antisense strand to SEQ ID NO: 1115068
ucuggagggcgaaagcugc

SEQ ID NO: 1115070 - RNA, 19 nt, Artificial Sequence
  Description of Artificial Sequence: Synthetic oligonucleotide
  Sense strand starting at position 2250 of SEQ ID NO: 915904
gguucaguugcuuaggaga

SEQ ID NO: 1115071 - RNA, 19 nt, Artificial Sequence
  Description of Artificial Sequence: Synthetic oligonucleotide
  Antisense strand to SEQ ID NO: 1115070
ucuccuaagcaacugaacc

SEQ ID NO: 1115072 - RNA, 19 nt, Artificial Sequence
  Description of Artificial Sequence: Synthetic oligonucleotide
  Sense strand starting at position 2281 of SEQ ID NO: 915904
uaggaagugucuuugacaa

SEQ ID NO: 1115073 - RNA, 19 nt, Artificial Sequence
  Description of Artificial Sequence: Synthetic oligonucleotide
  Antisense strand to SEQ ID NO: 1115072
uugucaaagacacuuccua

SEQ ID NO: 1115074 - RNA, 19 nt, Artificial Sequence
  Description of Artificial Sequence: Synthetic oligonucleotide
  Sense strand starting at position 2407 of SEQ ID NO: 915904
ccacccaagagguguagua

SEQ ID NO: 1115075 - RNA, 19 nt, Artificial Sequence
  Description of Artificial Sequence: Synthetic oligonucleotide
  Antisense strand to SEQ ID NO: 1115074
uacuacaccucuugggugg

SEQ ID NO: 1115076 - RNA, 19 nt, Artificial Sequence
  Description of Artificial Sequence: Synthetic oligonucleotide
  Sense strand starting at position 2409 of SEQ ID NO: 915904
acccaagagguguaguauu

SEQ ID NO: 1115077 - RNA, 19 nt, Artificial Sequence
  Description of Artificial Sequence: Synthetic oligonucleotide
  Antisense strand to SEQ ID NO: 1115076
aauacuacaccucuugggu

SEQ ID NO: 1115078 - RNA, 19 nt, Artificial Sequence
  Description of Artificial Sequence: Synthetic oligonucleotide
  Sense strand starting at position 2453 of SEQ ID NO: 915904
uuauaacucuuauuagggu

SEQ ID NO: 1115079 - RNA, 19 nt, Artificial Sequence
  Description of Artificial Sequence: Synthetic oligonucleotide
  Antisense strand to SEQ ID NO: 1115078
acccuaauaagaguuauaa

SEQ ID NO: 1115080 - RNA, 19 nt, Artificial Sequence
  Description of Artificial Sequence: Synthetic oligonucleotide
  Sense strand starting at position 2497 of SEQ ID NO: 915904
ugaugacaccucugaguga

SEQ ID NO: 1115081 - RNA, 19 nt, Artificial Sequence
  Description of Artificial Sequence: Synthetic oligonucleotide
  Antisense strand to SEQ ID NO: 1115080
ucacucagaggugucauca

SEQ ID NO: 1115082 - RNA, 19 nt, Artificial Sequence
  Description of Artificial Sequence: Synthetic oligonucleotide
  Sense strand starting at position 2501 of SEQ ID NO: 915904
gacaccucugagugacaga

SEQ ID NO: 1115083 - RNA, 19 nt, Artificial Sequence
  Description of Artificial Sequence: Synthetic oligonucleotide
  Antisense strand to SEQ ID NO: 1115082
ucugucacucagagguguc

SEQ ID NO: 1115084 - RNA, 19 nt, Artificial Sequence
  Description of Artificial Sequence: Synthetic oligonucleotide
  Sense strand starting at position 2514 of SEQ ID NO: 915904
gacagacuuucugugcaaa

SEQ ID NO: 1115085 - RNA, 19 nt, Artificial Sequence
  Description of Artificial Sequence: Synthetic oligonucleotide
  Antisense strand to SEQ ID NO: 1115084
uuugcacagaaagucuguc

SEQ ID NO: 1115086 - RNA, 19 nt, Artificial Sequence
  Description of Artificial Sequence: Synthetic oligonucleotide
  Sense strand starting at position 2515 of SEQ ID NO: 915904
acagacuuucugugcaaag

SEQ ID NO: 1115087 - RNA, 19 nt, Artificial Sequence
  Description of Artificial Sequence: Synthetic oligonucleotide
  Antisense strand to SEQ ID NO: 1115086
cuuugcacagaaagucugu

SEQ ID NO: 1115088 - RNA, 19 nt, Artificial Sequence
  Description of Artificial Sequence: Synthetic oligonucleotide
  Sense strand starting at position 2517 of SEQ ID NO: 915904
agacuuucugugcaaagca

SEQ ID NO: 1115089 - RNA, 19 nt, Artificial Sequence
  Description of Artificial Sequence: Synthetic oligonucleotide
  Antisense strand to SEQ ID NO: 1115088
ugcuuugcacagaaagucu

SEQ ID NO: 1115090 - RNA, 19 nt, Artificial Sequence
  Description of Artificial Sequence: Synthetic oligonucleotide
  Sense strand starting at position 2793 of SEQ ID NO: 915904
cuuugagcuccagacucaa

SEQ ID NO: 1115091 - RNA, 19 nt, Artificial Sequence
  Description of Artificial Sequence: Synthetic oligonucleotide
  Antisense strand to SEQ ID NO: 1115090
uugagucuggagcucaaag

SEQ ID NO: 1115092 - RNA, 19 nt, Artificial Sequence
  Description of Artificial Sequence: Synthetic oligonucleotide
  Sense strand starting at position 3007 of SEQ ID NO: 915904
uguaguuucgcucuucuca

SEQ ID NO: 1115093 - RNA, 19 nt, Artificial Sequence
  Description of Artificial Sequence: Synthetic oligonucleotide
  Antisense strand to SEQ ID NO: 1115092
ugagaagagcgaaacuaca

SEQ ID NO: 1115094 - RNA, 19 nt, Artificial Sequence
  Description of Artificial Sequence: Synthetic oligonucleotide
  Sense strand starting at position 3339 of SEQ ID NO: 915904
gggaaaccaucagcaucuu

SEQ ID NO: 1115095 - RNA, 19 nt, Artificial Sequence
  Description of Artificial Sequence: Synthetic oligonucleotide
  Antisense strand to SEQ ID NO: 1115094
aagaugcugaugguuuccc

SEQ ID NO: 1115096 - RNA, 19 nt, Artificial Sequence
  Description of Artificial Sequence: Synthetic oligonucleotide
  Sense strand starting at position 3377 of SEQ ID NO: 915904
gagucucccagggagugau

SEQ ID NO: 1115097 - RNA, 19 nt, Artificial Sequence
  Description of Artificial Sequence: Synthetic oligonucleotide
  Antisense strand to SEQ ID NO: 1115096
aucacucccugggagacuc

SEQ ID NO: 1115098 - RNA, 19 nt, Artificial Sequence
  Description of Artificial Sequence: Synthetic oligonucleotide
  Sense strand starting at position 3380 of SEQ ID NO: 915904
ucucccagggagugauaaa

SEQ ID NO: 1115099 - RNA, 19 nt, Artificial Sequence
  Description of Artificial Sequence: Synthetic oligonucleotide
  Antisense strand to SEQ ID NO: 1115098
uuuaucacucccugggaga

SEQ ID NO: 1115100 - RNA, 19 nt, Artificial Sequence
  Description of Artificial Sequence: Synthetic oligonucleotide
  Sense strand starting at position 3528 of SEQ ID NO: 915904
uuccauuuggcaugucauu

SEQ ID NO: 1115101 - RNA, 19 nt, Artificial Sequence
  Description of Artificial Sequence: Synthetic oligonucleotide
  Antisense strand to SEQ ID NO: 1115100
aaugacaugccaaauggaa

SEQ ID NO: 1115102 - RNA, 19 nt, Artificial Sequence
  Description of Artificial Sequence: Synthetic oligonucleotide
  Sense strand starting at position 3630 of SEQ ID NO: 915904
agaucucaucuuuauuagu

SEQ ID NO: 1115103 - RNA, 19 nt, Artificial Sequence
  Description of Artificial Sequence: Synthetic oligonucleotide
  Antisense strand to SEQ ID NO: 1115102
acuaauaaagaugagaucu

SEQ ID NO: 1115104 - RNA, 19 nt, Artificial Sequence
  Description of Artificial Sequence: Synthetic oligonucleotide
  Sense strand starting at position 3680 of SEQ ID NO: 915904
caagccugacagugauauu

SEQ ID NO: 1115105 - RNA, 19 nt, Artificial Sequence
  Description of Artificial Sequence: Synthetic oligonucleotide
  Antisense strand to SEQ ID NO: 1115104
aauaucacugucaggcuug

SEQ ID NO: 1115106 - RNA, 19 nt, Artificial Sequence
  Description of Artificial Sequence: Synthetic oligonucleotide
  Sense strand starting at position 3740 of SEQ ID NO: 915904
auaaacuuugaauggcaga

SEQ ID NO: 1115107 - RNA, 19 nt, Artificial Sequence
  Description of Artificial Sequence: Synthetic oligonucleotide
  Antisense strand to SEQ ID NO: 1115106
ucugccauucaaaguuuau

SEQ ID NO: 1115108 - RNA, 19 nt, Artificial Sequence
  Description of Artificial Sequence: Synthetic oligonucleotide
  Sense strand starting at position 303 of SEQ ID NO: 915905
gugcgaucacccuauaaca

SEQ ID NO: 1115109 - RNA, 19 nt, Artificial Sequence
  Description of Artificial Sequence: Synthetic oligonucleotide
  Antisense strand to SEQ ID NO: 1115108
uguuauagggugaucgcac

SEQ ID NO: 1115110 - RNA, 19 nt, Artificial Sequence
  Description of Artificial Sequence: Synthetic oligonucleotide
  Sense strand starting at position 305 of SEQ ID NO: 915905
gcgaucacccuauaacaua

SEQ ID NO: 1115111 - RNA, 19 nt, Artificial Sequence
  Description of Artificial Sequence: Synthetic oligonucleotide
  Antisense strand to SEQ ID NO: 1115110
uauguuauagggugaucgc

SEQ ID NO: 1115112 - RNA, 19 nt, Artificial Sequence
  Description of Artificial Sequence: Synthetic oligonucleotide
  Sense strand starting at position 341 of SEQ ID NO: 915905
gguuaauuugaacguguag

SEQ ID NO: 1115113 - RNA, 19 nt, Artificial Sequence
  Description of Artificial Sequence: Synthetic oligonucleotide
  Antisense strand to SEQ ID NO: 1115112
cuacacguucaaauuaacc

SEQ ID NO: 1115114 - RNA, 19 nt, Artificial Sequence
  Description of Artificial Sequence: Synthetic oligonucleotide
  Sense strand starting at position 388 of SEQ ID NO: 915905
gggaaagagucugucaggu

SEQ ID NO: 1115115 - RNA, 19 nt, Artificial Sequence
  Description of Artificial Sequence: Synthetic oligonucleotide
  Antisense strand to SEQ ID NO: 1115114
accugacagacucuuuccc

SEQ ID NO: 1115116 - RNA, 19 nt, Artificial Sequence
  Description of Artificial Sequence: Synthetic oligonucleotide
  Sense strand starting at position 394 of SEQ ID NO: 915905
gagucugucagguagacau

SEQ ID NO: 1115117 - RNA, 19 nt, Artificial Sequence
  Description of Artificial Sequence: Synthetic oligonucleotide
  Antisense strand to SEQ ID NO: 1115116
augucuaccugacagacuc

SEQ ID NO: 1115118 - RNA, 19 nt, Artificial Sequence
  Description of Artificial Sequence: Synthetic oligonucleotide
  Sense strand starting at position 506 of SEQ ID NO: 915905
gaggccagugcugaaacua

SEQ ID NO: 1115119 - RNA, 19 nt, Artificial Sequence
  Description of Artificial Sequence: Synthetic oligonucleotide
  Antisense strand to SEQ ID NO: 1115118
uaguuucagcacuggccuc

SEQ ID NO: 1115120 - RNA, 19 nt, Artificial Sequence
  Description of Artificial Sequence: Synthetic oligonucleotide
  Sense strand starting at position 579 of SEQ ID NO: 915905
ccuuaucuccuuggagaca

SEQ ID NO: 1115121 - RNA, 19 nt, Artificial Sequence
  Description of Artificial Sequence: Synthetic oligonucleotide
  Antisense strand to SEQ ID NO: 1115120
ugucuccaaggagauaagg

SEQ ID NO: 1115122 - RNA, 19 nt, Artificial Sequence
  Description of Artificial Sequence: Synthetic oligonucleotide
  Sense strand starting at position 2264 of SEQ ID NO: 915905
cggacucccggcugaauaa

SEQ ID NO: 1115123 - RNA, 19 nt, Artificial Sequence
  Description of Artificial Sequence: Synthetic oligonucleotide
  Antisense strand to SEQ ID NO: 1115122
uuauucagccgggaguccg

SEQ ID NO: 1115124 - RNA, 19 nt, Artificial Sequence
  Description of Artificial Sequence: Synthetic oligonucleotide
  Sense strand starting at position 2265 of SEQ ID NO: 915905
ggacucccggcugaauaaa

SEQ ID NO: 1115125 - RNA, 19 nt, Artificial Sequence
  Description of Artificial Sequence: Synthetic oligonucleotide
  Antisense strand to SEQ ID NO: 1115124
uuuauucagccgggagucc

SEQ ID NO: 1115126 - RNA, 19 nt, Artificial Sequence
  Description of Artificial Sequence: Synthetic oligonucleotide
  Sense strand starting at position 2367 of SEQ ID NO: 915905
uaggaauugagguguauag

SEQ ID NO: 1115127 - RNA, 19 nt, Artificial Sequence
  Description of Artificial Sequence: Synthetic oligonucleotide
  Antisense strand to SEQ ID NO: 1115126
cuauacaccucaauuccua

SEQ ID NO: 1115128 - RNA, 19 nt, Artificial Sequence
  Description of Artificial Sequence: Synthetic oligonucleotide
  Sense strand starting at position 2369 of SEQ ID NO: 915905
ggaauugagguguauaggu

SEQ ID NO: 1115129 - RNA, 19 nt, Artificial Sequence
  Description of Artificial Sequence: Synthetic oligonucleotide
  Antisense strand to SEQ ID NO: 1115128
accuauacaccucaauucc

SEQ ID NO: 1115130 - RNA, 19 nt, Artificial Sequence
  Description of Artificial Sequence: Synthetic oligonucleotide
  Sense strand starting at position 2374 of SEQ ID NO: 915905
ugagguguauagguggaaa

SEQ ID NO: 1115131 - RNA, 19 nt, Artificial Sequence
  Description of Artificial Sequence: Synthetic oligonucleotide
  Antisense strand to SEQ ID NO: 1115130
uuuccaccuauacaccuca

SEQ ID NO: 1115132 - RNA, 19 nt, Artificial Sequence
  Description of Artificial Sequence: Synthetic oligonucleotide
  Sense strand starting at position 2376 of SEQ ID NO: 915905
agguguauagguggaaaga

SEQ ID NO: 1115133 - RNA, 19 nt, Artificial Sequence
  Description of Artificial Sequence: Synthetic oligonucleotide
  Antisense strand to SEQ ID NO: 1115132
ucuuuccaccuauacaccu

SEQ ID NO: 1115134 - RNA, 19 nt, Artificial Sequence
  Description of Artificial Sequence: Synthetic oligonucleotide
  Sense strand starting at position 2399 of SEQ ID NO: 915905
gggugaagcucucuuggau

SEQ ID NO: 1115135 - RNA, 19 nt, Artificial Sequence
  Description of Artificial Sequence: Synthetic oligonucleotide
  Antisense strand to SEQ ID NO: 1115134
auccaagagagcuucaccc

SEQ ID NO: 1115136 - RNA, 19 nt, Artificial Sequence
  Description of Artificial Sequence: Synthetic oligonucleotide
  Sense strand starting at position 2579 of SEQ ID NO: 915905
gcaaauuacgauugaaguu

SEQ ID NO: 1115137 - RNA, 19 nt, Artificial Sequence
  Description of Artificial Sequence: Synthetic oligonucleotide
  Antisense strand to SEQ ID NO: 1115136
aacuucaaucguaauuugc

SEQ ID NO: 1115138 - RNA, 19 nt, Artificial Sequence
  Description of Artificial Sequence: Synthetic oligonucleotide
  Sense strand starting at position 2644 of SEQ ID NO: 915905
agugcuggacuaugugaaa

SEQ ID NO: 1115139 - RNA, 19 nt, Artificial Sequence
  Description of Artificial Sequence: Synthetic oligonucleotide
  Antisense strand to SEQ ID NO: 1115138
uuucacauaguccagcacu

SEQ ID NO: 1115140 - RNA, 19 nt, Artificial Sequence
  Description of Artificial Sequence: Synthetic oligonucleotide
  Sense strand starting at position 2756 of SEQ ID NO: 915905
agaauauggucucuaaugu

SEQ ID NO: 1115141 - RNA, 19 nt, Artificial Sequence
  Description of Artificial Sequence: Synthetic oligonucleotide
  Antisense strand to SEQ ID NO: 1115140
acauuagagaccauauucu

SEQ ID NO: 1115142 - RNA, 19 nt, Artificial Sequence
  Description of Artificial Sequence: Synthetic oligonucleotide
  Sense strand starting at position 2757 of SEQ ID NO: 915905
gaauauggucucuaauguc

SEQ ID NO: 1115143 - RNA, 19 nt, Artificial Sequence
  Description of Artificial Sequence: Synthetic oligonucleotide
  Antisense strand to SEQ ID NO: 1115142
gacauuagagaccauauuc

SEQ ID NO: 1115144 - RNA, 19 nt, Artificial Sequence
  Description of Artificial Sequence: Synthetic oligonucleotide
  Sense strand starting at position 2858 of SEQ ID NO: 915905
gguugugagccguccugua

SEQ ID NO: 1115145 - RNA, 19 nt, Artificial Sequence
  Description of Artificial Sequence: Synthetic oligonucleotide
  Antisense strand to SEQ ID NO: 1115144
uacaggacggcucacaacc

SEQ ID NO: 1115146 - RNA, 19 nt, Artificial Sequence
  Description of Artificial Sequence: Synthetic oligonucleotide
  Sense strand starting at position 2962 of SEQ ID NO: 915905
aagauuauuuccggaccag

SEQ ID NO: 1115147 - RNA, 19 nt, Artificial Sequence
  Description of Artificial Sequence: Synthetic oligonucleotide
  Antisense strand to SEQ ID NO: 1115146
cugguccggaaauaaucuu

SEQ ID NO: 1115148 - RNA, 19 nt, Artificial Sequence
  Description of Artificial Sequence: Synthetic oligonucleotide
  Sense strand starting at position 2978 of SEQ ID NO: 915905
cagcuuagcggauaucaua

SEQ ID NO: 1115149 - RNA, 19 nt, Artificial Sequence
  Description of Artificial Sequence: Synthetic oligonucleotide
  Antisense strand to SEQ ID NO: 1115148
uaugauauccgcuaagcug

SEQ ID NO: 1115150 - RNA, 19 nt, Artificial Sequence
  Description of Artificial Sequence: Synthetic oligonucleotide
  Sense strand starting at position 3000 of SEQ ID NO: 915905
aagggagugcucugggaua

SEQ ID NO: 1115151 - RNA, 19 nt, Artificial Sequence
  Description of Artificial Sequence: Synthetic oligonucleotide
  Antisense strand to SEQ ID NO: 1115150
uaucccagagcacucccuu

SEQ ID NO: 1115152 - RNA, 19 nt, Artificial Sequence
  Description of Artificial Sequence: Synthetic oligonucleotide
  Sense strand starting at position 3002 of SEQ ID NO: 915905
gggagugcucugggauacu

SEQ ID NO: 1115153 - RNA, 19 nt, Artificial Sequence
  Description of Artificial Sequence: Synthetic oligonucleotide
  Antisense strand to SEQ ID NO: 1115152
aguaucccagagcacuccc

SEQ ID NO: 1115154 - RNA, 19 nt, Artificial Sequence
  Description of Artificial Sequence: Synthetic oligonucleotide
  Sense strand starting at position 3492 of SEQ ID NO: 915905
guagaaauaauccgagauc

SEQ ID NO: 1115155 - RNA, 19 nt, Artificial Sequence
  Description of Artificial Sequence: Synthetic oligonucleotide
  Antisense strand to SEQ ID NO: 1115154
gaucucggauuauuucuac

SEQ ID NO: 1115156 - RNA, 19 nt, Artificial Sequence
  Description of Artificial Sequence: Synthetic oligonucleotide
  Sense strand starting at position 3503 of SEQ ID NO: 915905
ccgagaucugggugcagga

SEQ ID NO: 1115157 - RNA, 19 nt, Artificial Sequence
  Description of Artificial Sequence: Synthetic oligonucleotide
  Antisense strand to SEQ ID NO: 1115156
uccugcacccagaucucgg

SEQ ID NO: 1115158 - RNA, 19 nt, Artificial Sequence
  Description of Artificial Sequence: Synthetic oligonucleotide
  Sense strand starting at position 3527 of SEQ ID NO: 915905
uguggugaauuauccggau

SEQ ID NO: 1115159 - RNA, 19 nt, Artificial Sequence
  Description of Artificial Sequence: Synthetic oligonucleotide
  Antisense strand to SEQ ID NO: 1115158
auccggauaauucaccaca

SEQ ID NO: 1115160 - RNA, 19 nt, Artificial Sequence
  Description of Artificial Sequence: Synthetic oligonucleotide
  Sense strand starting at position 3529 of SEQ ID NO: 915905
uggugaauuauccggauaa

SEQ ID NO: 1115161 - RNA, 19 nt, Artificial Sequence
  Description of Artificial Sequence: Synthetic oligonucleotide
  Antisense strand to SEQ ID NO: 1115160
uuauccggauaauucacca

SEQ ID NO: 1115162 - RNA, 19 nt, Artificial Sequence
  Description of Artificial Sequence: Synthetic oligonucleotide
  Sense strand starting at position 3531 of SEQ ID NO: 915905
gugaauuauccggauaauu

SEQ ID NO: 1115163 - RNA, 19 nt, Artificial Sequence
  Description of Artificial Sequence: Synthetic oligonucleotide
  Antisense strand to SEQ ID NO: 1115162
aauuauccggauaauucac

SEQ ID NO: 1115164 - RNA, 19 nt, Artificial Sequence
  Description of Artificial Sequence: Synthetic oligonucleotide
  Sense strand starting at position 3539 of SEQ ID NO: 915905
uccggauaauugguucuaa

SEQ ID NO: 1115165 - RNA, 19 nt, Artificial Sequence
  Description of Artificial Sequence: Synthetic oligonucleotide
  Antisense strand to SEQ ID NO: 1115164
uuagaaccaauuauccgga

SEQ ID NO: 1115166 - RNA, 19 nt, Artificial Sequence
  Description of Artificial Sequence: Synthetic oligonucleotide
  Sense strand starting at position 3540 of SEQ ID NO: 915905
ccggauaauugguucuaau

SEQ ID NO: 1115167 - RNA, 19 nt, Artificial Sequence
  Description of Artificial Sequence: Synthetic oligonucleotide
  Antisense strand to SEQ ID NO: 1115166
auuagaaccaauuauccgg

SEQ ID NO: 1115168 - RNA, 19 nt, Artificial Sequence
  Description of Artificial Sequence: Synthetic oligonucleotide
  Sense strand starting at position 3574 of SEQ ID NO: 915905
ggagguggaucuuucuaaa

SEQ ID NO: 1115169 - RNA, 19 nt, Artificial Sequence
  Description of Artificial Sequence: Synthetic oligonucleotide
  Antisense strand to SEQ ID NO: 1115168
uuuagaaagauccaccucc

SEQ ID NO: 1115170 - RNA, 19 nt, Artificial Sequence
  Description of Artificial Sequence: Synthetic oligonucleotide
  Sense strand starting at position 3637 of SEQ ID NO: 915905
ggcugaguguuucuggaac

SEQ ID NO: 1115171 - RNA, 19 nt, Artificial Sequence
  Description of Artificial Sequence: Synthetic oligonucleotide
  Antisense strand to SEQ ID NO: 1115170
guuccagaaacacucagcc

SEQ ID NO: 1115172 - RNA, 19 nt, Artificial Sequence
  Description of Artificial Sequence: Synthetic oligonucleotide
  Sense strand starting at position 3643 of SEQ ID NO: 915905
guguuucuggaacaauagu

SEQ ID NO: 1115173 - RNA, 19 nt, Artificial Sequence
  Description of Artificial Sequence: Synthetic oligonucleotide
  Antisense strand to SEQ ID NO: 1115172
acuauuguuccagaaacac

SEQ ID NO: 1115174 - RNA, 19 nt, Artificial Sequence
  Description of Artificial Sequence: Synthetic oligonucleotide
  Sense strand starting at position 3662 of SEQ ID NO: 915905
gaugauggugggcaguaau

SEQ ID NO: 1115175 - RNA, 19 nt, Artificial Sequence
  Description of Artificial Sequence: Synthetic oligonucleotide
  Antisense strand to SEQ ID NO: 1115174
auuacugcccaccaucauc

SEQ ID NO: 1115176 - RNA, 19 nt, Artificial Sequence
  Description of Artificial Sequence: Synthetic oligonucleotide
  Sense strand starting at position 3685 of SEQ ID NO: 915905
ggcggcucccgaagugaau

SEQ ID NO: 1115177 - RNA, 19 nt, Artificial Sequence
  Description of Artificial Sequence: Synthetic oligonucleotide
  Antisense strand to SEQ ID NO: 1115176
auucacuucgggagccgcc

SEQ ID NO: 1115178 - RNA, 19 nt, Artificial Sequence
  Description of Artificial Sequence: Synthetic oligonucleotide
  Sense strand starting at position 3735 of SEQ ID NO: 915905
gcagaauagguaggcuuca

SEQ ID NO: 1115179 - RNA, 19 nt, Artificial Sequence
  Description of Artificial Sequence: Synthetic oligonucleotide
  Antisense strand to SEQ ID NO: 1115178
ugaagccuaccuauucugc

SEQ ID NO: 1115180 - RNA, 19 nt, Artificial Sequence
  Description of Artificial Sequence: Synthetic oligonucleotide
  Sense strand starting at position 3781 of SEQ ID NO: 915905
gaggucaauucuguaaccu

SEQ ID NO: 1115181 - RNA, 19 nt, Artificial Sequence
  Description of Artificial Sequence: Synthetic oligonucleotide
  Antisense strand to SEQ ID NO: 1115180
agguuacagaauugaccuc

SEQ ID NO: 1115182 - RNA, 19 nt, Artificial Sequence
  Description of Artificial Sequence: Synthetic oligonucleotide
  Sense strand starting at position 3782 of SEQ ID NO: 915905
aggucaauucuguaaccuu

SEQ ID NO: 1115183 - RNA, 19 nt, Artificial Sequence
  Description of Artificial Sequence: Synthetic oligonucleotide
  Antisense strand to SEQ ID NO: 1115182
aagguuacagaauugaccu

SEQ ID NO: 1115184 - RNA, 19 nt, Artificial Sequence
  Description of Artificial Sequence: Synthetic oligonucleotide
  Sense strand starting at position 3840 of SEQ ID NO: 915905
gcuugauggccucacagga

SEQ ID NO: 1115185 - RNA, 19 nt, Artificial Sequence
  Description of Artificial Sequence: Synthetic oligonucleotide
  Antisense strand to SEQ ID NO: 1115184
uccugugaggccaucaagc

SEQ ID NO: 1115186 - RNA, 19 nt, Artificial Sequence
  Description of Artificial Sequence: Synthetic oligonucleotide
  Sense strand starting at position 3923 of SEQ ID NO: 915905
cuaagaggucucuggaagu

SEQ ID NO: 1115187 - RNA, 19 nt, Artificial Sequence
  Description of Artificial Sequence: Synthetic oligonucleotide
  Antisense strand to SEQ ID NO: 1115186
acuuccagagaccucuuag

SEQ ID NO: 1115188 - RNA, 19 nt, Artificial Sequence
  Description of Artificial Sequence: Synthetic oligonucleotide
  Sense strand starting at position 2081 of SEQ ID NO: 915906
cgcgcuuagccgguuauuu

SEQ ID NO: 1115189 - RNA, 19 nt, Artificial Sequence
  Description of Artificial Sequence: Synthetic oligonucleotide
  Antisense strand to SEQ ID NO: 1115188
aaauaaccggcuaagcgcg

SEQ ID NO: 1115190 - RNA, 19 nt, Artificial Sequence
  Description of Artificial Sequence: Synthetic oligonucleotide
  Sense strand starting at position 2089 of SEQ ID NO: 915906
gccgguuauuucucacagu

SEQ ID NO: 1115191 - RNA, 19 nt, Artificial Sequence
  Description of Artificial Sequence: Synthetic oligonucleotide
  Antisense strand to SEQ ID NO: 1115190
acugugagaaauaaccggc

SEQ ID NO: 1115192 - RNA, 19 nt, Artificial Sequence
  Description of Artificial Sequence: Synthetic oligonucleotide
  Sense strand starting at position 2090 of SEQ ID NO: 915906
ccgguuauuucucacagug

SEQ ID NO: 1115193 - RNA, 19 nt, Artificial Sequence
  Description of Artificial Sequence: Synthetic oligonucleotide
  Antisense strand to SEQ ID NO: 1115192
cacugugagaaauaaccgg

SEQ ID NO: 1115194 - RNA, 19 nt, Artificial Sequence
  Description of Artificial Sequence: Synthetic oligonucleotide
  Sense strand starting at position 2092 of SEQ ID NO: 915906
gguuauuucucacagugcu

SEQ ID NO: 1115195 - RNA, 19 nt, Artificial Sequence
  Description of Artificial Sequence: Synthetic oligonucleotide
  Antisense strand to SEQ ID NO: 1115194
agcacugugagaaauaacc

SEQ ID NO: 1115196 - RNA, 19 nt, Artificial Sequence
  Description of Artificial Sequence: Synthetic oligonucleotide
  Sense strand starting at position 2302 of SEQ ID NO: 915906
gagaaaggaugaugucuuu

SEQ ID NO: 1115197 - RNA, 19 nt, Artificial Sequence
  Description of Artificial Sequence: Synthetic oligonucleotide
  Antisense strand to SEQ ID NO: 1115196
aaagacaucauccuuucuc

SEQ ID NO: 1115198 - RNA, 19 nt, Artificial Sequence
  Description of Artificial Sequence: Synthetic oligonucleotide
  Sense strand starting at position 2308 of SEQ ID NO: 915906
ggaugaugucuuugaagac

SEQ ID NO: 1115199 - RNA, 19 nt, Artificial Sequence
  Description of Artificial Sequence: Synthetic oligonucleotide
  Antisense strand to SEQ ID NO: 1115198
gucuucaaagacaucaucc

SEQ ID NO: 1115200 - RNA, 19 nt, Artificial Sequence
  Description of Artificial Sequence: Synthetic oligonucleotide
  Sense strand starting at position 2309 of SEQ ID NO: 915906
gaugaugucuuugaagacu

SEQ ID NO: 1115201 - RNA, 19 nt, Artificial Sequence
  Description of Artificial Sequence: Synthetic oligonucleotide
  Antisense strand to SEQ ID NO: 1115200
agucuucaaagacaucauc

SEQ ID NO: 1115202 - RNA, 19 nt, Artificial Sequence
  Description of Artificial Sequence: Synthetic oligonucleotide
  Sense strand starting at position 2378 of SEQ ID NO: 915906
uugguaaaccuuugaagau

SEQ ID NO: 1115203 - RNA, 19 nt, Artificial Sequence
  Description of Artificial Sequence: Synthetic oligonucleotide
  Antisense strand to SEQ ID NO: 1115202
aucuucaaagguuuaccaa

SEQ ID NO: 1115204 - RNA, 19 nt, Artificial Sequence
  Description of Artificial Sequence: Synthetic oligonucleotide
  Sense strand starting at position 2413 of SEQ ID NO: 915906
auccaacuguacugguuaa

SEQ ID NO: 1115205 - RNA, 19 nt, Artificial Sequence
  Description of Artificial Sequence: Synthetic oligonucleotide
  Antisense strand to SEQ ID NO: 1115204
uuaaccaguacaguuggau

SEQ ID NO: 1115206 - RNA, 19 nt, Artificial Sequence
  Description of Artificial Sequence: Synthetic oligonucleotide
  Sense strand starting at position 2423 of SEQ ID NO: 915906
acugguuaacgucaaagaa

SEQ ID NO: 1115207 - RNA, 19 nt, Artificial Sequence
  Description of Artificial Sequence: Synthetic oligonucleotide
  Antisense strand to SEQ ID NO: 1115206
uucuuugacguuaaccagu

SEQ ID NO: 1115208 - RNA, 19 nt, Artificial Sequence
  Description of Artificial Sequence: Synthetic oligonucleotide
  Sense strand starting at position 2430 of SEQ ID NO: 915906
aacgucaaagaauauguua

SEQ ID NO: 1115209 - RNA, 19 nt, Artificial Sequence
  Description of Artificial Sequence: Synthetic oligonucleotide
  Antisense strand to SEQ ID NO: 1115208
uaacauauucuuugacguu

SEQ ID NO: 1115210 - RNA, 19 nt, Artificial Sequence
  Description of Artificial Sequence: Synthetic oligonucleotide
  Sense strand starting at position 2433 of SEQ ID NO: 915906
gucaaagaauauguuauca

SEQ ID NO: 1115211 - RNA, 19 nt, Artificial Sequence
  Description of Artificial Sequence: Synthetic oligonucleotide
  Antisense strand to SEQ ID NO: 1115210
ugauaacauauucuuugac

SEQ ID NO: 1115212 - RNA, 19 nt, Artificial Sequence
  Description of Artificial Sequence: Synthetic oligonucleotide
  Sense strand starting at position 2545 of SEQ ID NO: 915906
cccuacauuuaugaugaga

SEQ ID NO: 1115213 - RNA, 19 nt, Artificial Sequence
  Description of Artificial Sequence: Synthetic oligonucleotide
  Antisense strand to SEQ ID NO: 1115212
ucucaucauaaauguaggg

SEQ ID NO: 1115214 - RNA, 19 nt, Artificial Sequence
  Description of Artificial Sequence: Synthetic oligonucleotide
  Sense strand starting at position 2550 of SEQ ID NO: 915906
cauuuaugaugagagcuuu

SEQ ID NO: 1115215 - RNA, 19 nt, Artificial Sequence
  Description of Artificial Sequence: Synthetic oligonucleotide
  Antisense strand to SEQ ID NO: 1115214
aaagcucucaucauaaaug

SEQ ID NO: 1115216 - RNA, 19 nt, Artificial Sequence
  Description of Artificial Sequence: Synthetic oligonucleotide
  Sense strand starting at position 2568 of SEQ ID NO: 915906
uugccuauuccucagcaga

SEQ ID NO: 1115217 - RNA, 19 nt, Artificial Sequence
  Description of Artificial Sequence: Synthetic oligonucleotide
  Antisense strand to SEQ ID NO: 1115216
ucugcugaggaauaggcaa

SEQ ID NO: 1115218 - RNA, 19 nt, Artificial Sequence
  Description of Artificial Sequence: Synthetic oligonucleotide
  Sense strand starting at position 2570 of SEQ ID NO: 915906
gccuauuccucagcagaca

SEQ ID NO: 1115219 - RNA, 19 nt, Artificial Sequence
  Description of Artificial Sequence: Synthetic oligonucleotide
  Antisense strand to SEQ ID NO: 1115218
ugucugcugaggaauaggc

SEQ ID NO: 1115220 - RNA, 19 nt, Artificial Sequence
  Description of Artificial Sequence: Synthetic oligonucleotide
  Sense strand starting at position 2636 of SEQ ID NO: 915906
cuucccuguuuguucuaaa

SEQ ID NO: 1115221 - RNA, 19 nt, Artificial Sequence
  Description of Artificial Sequence: Synthetic oligonucleotide
  Antisense strand to SEQ ID NO: 1115220
uuuagaacaaacagggaag

SEQ ID NO: 1115222 - RNA, 19 nt, Artificial Sequence
  Description of Artificial Sequence: Synthetic oligonucleotide
  Sense strand starting at position 2637 of SEQ ID NO: 915906
uucccuguuuguucuaaau

SEQ ID NO: 1115223 - RNA, 19 nt, Artificial Sequence
  Description of Artificial Sequence: Synthetic oligonucleotide
  Antisense strand to SEQ ID NO: 1115222
auuuagaacaaacagggaa

SEQ ID NO: 1115224 - RNA, 19 nt, Artificial Sequence
  Description of Artificial Sequence: Synthetic oligonucleotide
  Sense strand starting at position 2639 of SEQ ID NO: 915906
cccuguuuguucuaaauga

SEQ ID NO: 1115225 - RNA, 19 nt, Artificial Sequence
  Description of Artificial Sequence: Synthetic oligonucleotide
  Antisense strand to SEQ ID NO: 1115224
ucauuuagaacaaacaggg

SEQ ID NO: 1115226 - RNA, 19 nt, Artificial Sequence
  Description of Artificial Sequence: Synthetic oligonucleotide
  Sense strand starting at position 2649 of SEQ ID NO: 915906
ucuaaaugauccgccugaa

SEQ ID NO: 1115227 - RNA, 19 nt, Artificial Sequence
  Description of Artificial Sequence: Synthetic oligonucleotide
  Antisense strand to SEQ ID NO: 1115226
uucaggcggaucauuuaga

SEQ ID NO: 1115228 - RNA, 19 nt, Artificial Sequence
  Description of Artificial Sequence: Synthetic oligonucleotide
  Sense strand starting at position 2652 of SEQ ID NO: 915906
aaaugauccgccugaagca

SEQ ID NO: 1115229 - RNA, 19 nt, Artificial Sequence
  Description of Artificial Sequence: Synthetic oligonucleotide
  Antisense strand to SEQ ID NO: 1115228
ugcuucaggcggaucauuu

SEQ ID NO: 1115230 - RNA, 19 nt, Artificial Sequence
  Description of Artificial Sequence: Synthetic oligonucleotide
  Sense strand starting at position 2706 of SEQ ID NO: 915906
auuccuuucggguauaagu

SEQ ID NO: 1115231 - RNA, 19 nt, Artificial Sequence
  Description of Artificial Sequence: Synthetic oligonucleotide
  Antisense strand to SEQ ID NO: 1115230
acuuauacccgaaaggaau

SEQ ID NO: 1115232 - RNA, 19 nt, Artificial Sequence
  Description of Artificial Sequence: Synthetic oligonucleotide
  Sense strand starting at position 2708 of SEQ ID NO: 915906
uccuuucggguauaaguua

SEQ ID NO: 1115233 - RNA, 19 nt, Artificial Sequence
  Description of Artificial Sequence: Synthetic oligonucleotide
  Antisense strand to SEQ ID NO: 1115232
uaacuuauacccgaaagga

SEQ ID NO: 1115234 - RNA, 19 nt, Artificial Sequence
  Description of Artificial Sequence: Synthetic oligonucleotide
  Sense strand starting at position 2715 of SEQ ID NO: 915906
ggguauaaguuagucacau

SEQ ID NO: 1115235 - RNA, 19 nt, Artificial Sequence
  Description of Artificial Sequence: Synthetic oligonucleotide
  Antisense strand to SEQ ID NO: 1115234
augugacuaacuuauaccc

SEQ ID NO: 1115236 - RNA, 19 nt, Artificial Sequence
  Description of Artificial Sequence: Synthetic oligonucleotide
  Sense strand starting at position 2716 of SEQ ID NO: 915906
gguauaaguuagucacauu

SEQ ID NO: 1115237 - RNA, 19 nt, Artificial Sequence
  Description of Artificial Sequence: Synthetic oligonucleotide
  Antisense strand to SEQ ID NO: 1115236
aaugugacuaacuuauacc

SEQ ID NO: 1115238 - RNA, 19 nt, Artificial Sequence
  Description of Artificial Sequence: Synthetic oligonucleotide
  Sense strand starting at position 2908 of SEQ ID NO: 915906
ugagguuuguacuggcaaa

SEQ ID NO: 1115239 - RNA, 19 nt, Artificial Sequence
  Description of Artificial Sequence: Synthetic oligonucleotide
  Antisense strand to SEQ ID NO: 1115238
uuugccaguacaaaccuca

SEQ ID NO: 1115240 - RNA, 19 nt, Artificial Sequence
  Description of Artificial Sequence: Synthetic oligonucleotide
  Sense strand starting at position 2909 of SEQ ID NO: 915906
gagguuuguacuggcaaau

SEQ ID NO: 1115241 - RNA, 19 nt, Artificial Sequence
  Description of Artificial Sequence: Synthetic oligonucleotide
  Antisense strand to SEQ ID NO: 1115240
auuugccaguacaaaccuc

SEQ ID NO: 1115242 - RNA, 19 nt, Artificial Sequence
  Description of Artificial Sequence: Synthetic oligonucleotide
  Sense strand starting at position 2920 of SEQ ID NO: 915906
uggcaaauagccuaauaua

SEQ ID NO: 1115243 - RNA, 19 nt, Artificial Sequence
  Description of Artificial Sequence: Synthetic oligonucleotide
  Antisense strand to SEQ ID NO: 1115242
uauauuaggcuauuugcca

SEQ ID NO: 1115244 - RNA, 19 nt, Artificial Sequence
  Description of Artificial Sequence: Synthetic oligonucleotide
  Sense strand starting at position 2968 of SEQ ID NO: 915906
agcccuuucuauuaggaga

SEQ ID NO: 1115245 - RNA, 19 nt, Artificial Sequence
  Description of Artificial Sequence: Synthetic oligonucleotide
  Antisense strand to SEQ ID NO: 1115244
ucuccuaauagaaagggcu

SEQ ID NO: 1115246 - RNA, 19 nt, Artificial Sequence
  Description of Artificial Sequence: Synthetic oligonucleotide
  Sense strand starting at position 2970 of SEQ ID NO: 915906
cccuuucuauuaggagaaa

SEQ ID NO: 1115247 - RNA, 19 nt, Artificial Sequence
  Description of Artificial Sequence: Synthetic oligonucleotide
  Antisense strand to SEQ ID NO: 1115246
uuucuccuaauagaaaggg

SEQ ID NO: 1115248 - RNA, 19 nt, Artificial Sequence
  Description of Artificial Sequence: Synthetic oligonucleotide
  Sense strand starting at position 3068 of SEQ ID NO: 915906
acaggaagauaaugaaaua

SEQ ID NO: 1115249 - RNA, 19 nt, Artificial Sequence
  Description of Artificial Sequence: Synthetic oligonucleotide
  Antisense strand to SEQ ID NO: 1115248
uauuucauuaucuuccugu

SEQ ID NO: 1115250 - RNA, 19 nt, Artificial Sequence
  Description of Artificial Sequence: Synthetic oligonucleotide
  Sense strand starting at position 3128 of SEQ ID NO: 915906
aaagauaacugugucugca

SEQ ID NO: 1115251 - RNA, 19 nt, Artificial Sequence
  Description of Artificial Sequence: Synthetic oligonucleotide
  Antisense strand to SEQ ID NO: 1115250
ugcagacacaguuaucuuu

SEQ ID NO: 1115252 - RNA, 19 nt, Artificial Sequence
  Description of Artificial Sequence: Synthetic oligonucleotide
  Sense strand starting at position 3130 of SEQ ID NO: 915906
agauaacugugucugcaga

SEQ ID NO: 1115253 - RNA, 19 nt, Artificial Sequence
  Description of Artificial Sequence: Synthetic oligonucleotide
  Antisense strand to SEQ ID NO: 1115252
ucugcagacacaguuaucu

SEQ ID NO: 1115254 - RNA, 19 nt, Artificial Sequence
  Description of Artificial Sequence: Synthetic oligonucleotide
  Sense strand starting at position 3131 of SEQ ID NO: 915906
gauaacugugucugcagau

SEQ ID NO: 1115255 - RNA, 19 nt, Artificial Sequence
  Description of Artificial Sequence: Synthetic oligonucleotide
  Antisense strand to SEQ ID NO: 1115254
aucugcagacacaguuauc

SEQ ID NO: 1115256 - RNA, 19 nt, Artificial Sequence
  Description of Artificial Sequence: Synthetic oligonucleotide
  Sense strand starting at position 3132 of SEQ ID NO: 915906
auaacugugucugcagauu

SEQ ID NO: 1115257 - RNA, 19 nt, Artificial Sequence
  Description of Artificial Sequence: Synthetic oligonucleotide
  Antisense strand to SEQ ID NO: 1115256
aaucugcagacacaguuau

SEQ ID NO: 1115258 - RNA, 19 nt, Artificial Sequence
  Description of Artificial Sequence: Synthetic oligonucleotide
  Sense strand starting at position 3152 of SEQ ID NO: 915906
aggacuagauuggaagaga

SEQ ID NO: 1115259 - RNA, 19 nt, Artificial Sequence
  Description of Artificial Sequence: Synthetic oligonucleotide
  Antisense strand to SEQ ID NO: 1115258
ucucuuccaaucuaguccu

SEQ ID NO: 1115260 - RNA, 19 nt, Artificial Sequence
  Description of Artificial Sequence: Synthetic oligonucleotide
  Sense strand starting at position 3202 of SEQ ID NO: 915906
uccuucucagauuggcaaa

SEQ ID NO: 1115261 - RNA, 19 nt, Artificial Sequence
  Description of Artificial Sequence: Synthetic oligonucleotide
  Antisense strand to SEQ ID NO: 1115260
uuugccaaucugagaagga

SEQ ID NO: 1115262 - RNA, 19 nt, Artificial Sequence
  Description of Artificial Sequence: Synthetic oligonucleotide
  Sense strand starting at position 3249 of SEQ ID NO: 915906
aggcaaggauuugaggaaa

SEQ ID NO: 1115263 - RNA, 19 nt, Artificial Sequence
  Description of Artificial Sequence: Synthetic oligonucleotide
  Antisense strand to SEQ ID NO: 1115262
uuuccucaaauccuugccu

SEQ ID NO: 1115264 - RNA, 19 nt, Artificial Sequence
  Description of Artificial Sequence: Synthetic oligonucleotide
  Sense strand starting at position 3533 of SEQ ID NO: 915906
ucagauaucugugccguuu

SEQ ID NO: 1115265 - RNA, 19 nt, Artificial Sequence
  Description of Artificial Sequence: Synthetic oligonucleotide
  Antisense strand to SEQ ID NO: 1115264
aaacggcacagauaucuga

SEQ ID NO: 1115266 - RNA, 19 nt, Artificial Sequence
  Description of Artificial Sequence: Synthetic oligonucleotide
  Sense strand starting at position 3605 of SEQ ID NO: 915906
uugcaacauuuguagcaau

SEQ ID NO: 1115267 - RNA, 19 nt, Artificial Sequence
  Description of Artificial Sequence: Synthetic oligonucleotide
  Antisense strand to SEQ ID NO: 1115266
auugcuacaaauguugcaa

SEQ ID NO: 1115268 - RNA, 19 nt, Artificial Sequence
  Description of Artificial Sequence: Synthetic oligonucleotide
  Sense strand starting at position 22 of SEQ ID NO: 915907
accacaugggucugaaaug

SEQ ID NO: 1115269 - RNA, 19 nt, Artificial Sequence
  Description of Artificial Sequence: Synthetic oligonucleotide
  Antisense strand to SEQ ID NO: 1115268
cauuucagacccauguggu

SEQ ID NO: 1115270 - RNA, 19 nt, Artificial Sequence
  Description of Artificial Sequence: Synthetic oligonucleotide
  Sense strand starting at position 23 of SEQ ID NO: 915907
ccacaugggucugaaauga

SEQ ID NO: 1115271 - RNA, 19 nt, Artificial Sequence
  Description of Artificial Sequence: Synthetic oligonucleotide
  Antisense strand to SEQ ID NO: 1115270
ucauuucagacccaugugg

SEQ ID NO: 1115272 - RNA, 19 nt, Artificial Sequence
  Description of Artificial Sequence: Synthetic oligonucleotide
  Sense strand starting at position 156 of SEQ ID NO: 915907
uguaguuucuacccuuuaa

SEQ ID NO: 1115273 - RNA, 19 nt, Artificial Sequence
  Description of Artificial Sequence: Synthetic oligonucleotide
  Antisense strand to SEQ ID NO: 1115272
uuaaaggguagaaacuaca

SEQ ID NO: 1115274 - RNA, 19 nt, Artificial Sequence
  Description of Artificial Sequence: Synthetic oligonucleotide
  Sense strand starting at position 234 of SEQ ID NO: 915907
agguaaagcucacuccaga

SEQ ID NO: 1115275 - RNA, 19 nt, Artificial Sequence
  Description of Artificial Sequence: Synthetic oligonucleotide
  Antisense strand to SEQ ID NO: 1115274
ucuggagugagcuuuaccu

SEQ ID NO: 1115276 - RNA, 19 nt, Artificial Sequence
  Description of Artificial Sequence: Synthetic oligonucleotide
  Sense strand starting at position 303 of SEQ ID NO: 915907
ggacuaugcugggaucgga

SEQ ID NO: 1115277 - RNA, 19 nt, Artificial Sequence
  Description of Artificial Sequence: Synthetic oligonucleotide
  Antisense strand to SEQ ID NO: 1115276
uccgaucccagcauagucc

SEQ ID NO: 1115278 - RNA, 19 nt, Artificial Sequence
  Description of Artificial Sequence: Synthetic oligonucleotide
  Sense strand starting at position 909 of SEQ ID NO: 915907
gucuaucauuguccuggga

SEQ ID NO: 1115279 - RNA, 19 nt, Artificial Sequence
  Description of Artificial Sequence: Synthetic oligonucleotide
  Antisense strand to SEQ ID NO: 1115278
ucccaggacaaugauagac

SEQ ID NO: 1115280 - RNA, 19 nt, Artificial Sequence
  Description of Artificial Sequence: Synthetic oligonucleotide
  Sense strand starting at position 912 of SEQ ID NO: 915907
uaucauuguccugggauga

SEQ ID NO: 1115281 - RNA, 19 nt, Artificial Sequence
  Description of Artificial Sequence: Synthetic oligonucleotide
  Antisense strand to SEQ ID NO: 1115280
ucaucccaggacaaugaua

SEQ ID NO: 1115282 - RNA, 19 nt, Artificial Sequence
  Description of Artificial Sequence: Synthetic oligonucleotide
  Sense strand starting at position 913 of SEQ ID NO: 915907
aucauuguccugggaugaa

SEQ ID NO: 1115283 - RNA, 19 nt, Artificial Sequence
  Description of Artificial Sequence: Synthetic oligonucleotide
  Antisense strand to SEQ ID NO: 1115282
uucaucccaggacaaugau

SEQ ID NO: 1115284 - RNA, 19 nt, Artificial Sequence
  Description of Artificial Sequence: Synthetic oligonucleotide
  Sense strand starting at position 970 of SEQ ID NO: 915907
uccucaucuccagagguca

SEQ ID NO: 1115285 - RNA, 19 nt, Artificial Sequence
  Description of Artificial Sequence: Synthetic oligonucleotide
  Antisense strand to SEQ ID NO: 1115284
ugaccucuggagaugagga

SEQ ID NO: 1115286 - RNA, 19 nt, Artificial Sequence
  Description of Artificial Sequence: Synthetic oligonucleotide
  Sense strand starting at position 1000 of SEQ ID NO: 915907
gcagaagacuucccugcuu

SEQ ID NO: 1115287 - RNA, 19 nt, Artificial Sequence
  Description of Artificial Sequence: Synthetic oligonucleotide
  Antisense strand to SEQ ID NO: 1115286
aagcagggaagucuucugc

SEQ ID NO: 1115288 - RNA, 19 nt, Artificial Sequence
  Description of Artificial Sequence: Synthetic oligonucleotide
  Sense strand starting at position 1002 of SEQ ID NO: 915907
agaagacuucccugcuuug

SEQ ID NO: 1115289 - RNA, 19 nt, Artificial Sequence
  Description of Artificial Sequence: Synthetic oligonucleotide
  Antisense strand to SEQ ID NO: 1115288
caaagcagggaagucuucu

SEQ ID NO: 1115290 - RNA, 19 nt, Artificial Sequence
  Description of Artificial Sequence: Synthetic oligonucleotide
  Sense strand starting at position 1005 of SEQ ID NO: 915907
agacuucccugcuuugcaa

SEQ ID NO: 1115291 - RNA, 19 nt, Artificial Sequence
  Description of Artificial Sequence: Synthetic oligonucleotide
  Antisense strand to SEQ ID NO: 1115290
uugcaaagcagggaagucu

SEQ ID NO: 1115292 - RNA, 19 nt, Artificial Sequence
  Description of Artificial Sequence: Synthetic oligonucleotide
  Sense strand starting at position 1142 of SEQ ID NO: 915907
cagauauagucauccgagg

SEQ ID NO: 1115293 - RNA, 19 nt, Artificial Sequence
  Description of Artificial Sequence: Synthetic oligonucleotide
  Antisense strand to SEQ ID NO: 1115292
ccucggaugacuauaucug

SEQ ID NO: 1115294 - RNA, 19 nt, Artificial Sequence
  Description of Artificial Sequence: Synthetic oligonucleotide
  Sense strand starting at position 1144 of SEQ ID NO: 915907
gauauagucauccgagguu

SEQ ID NO: 1115295 - RNA, 19 nt, Artificial Sequence
  Description of Artificial Sequence: Synthetic oligonucleotide
  Antisense strand to SEQ ID NO: 1115294
aaccucggaugacuauauc

SEQ ID NO: 1115296 - RNA, 19 nt, Artificial Sequence
  Description of Artificial Sequence: Synthetic oligonucleotide
  Sense strand starting at position 1198 of SEQ ID NO: 915907
aggaguucccuccagaugu

SEQ ID NO: 1115297 - RNA, 19 nt, Artificial Sequence
  Description of Artificial Sequence: Synthetic oligonucleotide
  Antisense strand to SEQ ID NO: 1115296
acaucuggagggaacuccu

SEQ ID NO: 1115298 - RNA, 19 nt, Artificial Sequence
  Description of Artificial Sequence: Synthetic oligonucleotide
  Sense strand starting at position 1218 of SEQ ID NO: 915907
gggucacucugggacaaga

SEQ ID NO: 1115299 - RNA, 19 nt, Artificial Sequence
  Description of Artificial Sequence: Synthetic oligonucleotide
  Antisense strand to SEQ ID NO: 1115298
ucuugucccagagugaccc

SEQ ID NO: 1115300 - RNA, 19 nt, Artificial Sequence
  Description of Artificial Sequence: Synthetic oligonucleotide
  Sense strand starting at position 1423 of SEQ ID NO: 915907
ugucuccaguucucacaua

SEQ ID NO: 1115301 - RNA, 19 nt, Artificial Sequence
  Description of Artificial Sequence: Synthetic oligonucleotide
  Antisense strand to SEQ ID NO: 1115300
uaugugagaacuggagaca

SEQ ID NO: 1115302 - RNA, 19 nt, Artificial Sequence
  Description of Artificial Sequence: Synthetic oligonucleotide
  Sense strand starting at position 2226 of SEQ ID NO: 915907
gcccuauggcuugugugua

SEQ ID NO: 1115303 - RNA, 19 nt, Artificial Sequence
  Description of Artificial Sequence: Synthetic oligonucleotide
  Antisense strand to SEQ ID NO: 1115302
uacacacaagccauagggc

SEQ ID NO: 1115304 - RNA, 19 nt, Artificial Sequence
  Description of Artificial Sequence: Synthetic oligonucleotide
  Sense strand starting at position 2231 of SEQ ID NO: 915907
auggcuuguguguaugacu

SEQ ID NO: 1115305 - RNA, 19 nt, Artificial Sequence
  Description of Artificial Sequence: Synthetic oligonucleotide
  Antisense strand to SEQ ID NO: 1115304
agucauacacacaagccau

SEQ ID NO: 1115306 - RNA, 19 nt, Artificial Sequence
  Description of Artificial Sequence: Synthetic oligonucleotide
  Sense strand starting at position 2420 of SEQ ID NO: 915907
cgagucacacuugacuaau

SEQ ID NO: 1115307 - RNA, 19 nt, Artificial Sequence
  Description of Artificial Sequence: Synthetic oligonucleotide
  Antisense strand to SEQ ID NO: 1115306
auuagucaagugugacucg

SEQ ID NO: 1115308 - RNA, 19 nt, Artificial Sequence
  Description of Artificial Sequence: Synthetic oligonucleotide
  Sense strand starting at position 2517 of SEQ ID NO: 915907
gcaacagauguccacguau

SEQ ID NO: 1115309 - RNA, 19 nt, Artificial Sequence
  Description of Artificial Sequence: Synthetic oligonucleotide
  Antisense strand to SEQ ID NO: 1115308
auacguggacaucuguugc

SEQ ID NO: 1115310 - RNA, 19 nt, Artificial Sequence
  Description of Artificial Sequence: Synthetic oligonucleotide
  Sense strand starting at position 2614 of SEQ ID NO: 915907
gcacauaugugagccaaca

SEQ ID NO: 1115311 - RNA, 19 nt, Artificial Sequence
  Description of Artificial Sequence: Synthetic oligonucleotide
  Antisense strand to SEQ ID NO: 1115310
uguuggcucacauaugugc

SEQ ID NO: 1115312 - RNA, 19 nt, Artificial Sequence
  Description of Artificial Sequence: Synthetic oligonucleotide
  Sense strand starting at position 2748 of SEQ ID NO: 915907
gccagaggucaagggaauu

SEQ ID NO: 1115313 - RNA, 19 nt, Artificial Sequence
  Description of Artificial Sequence: Synthetic oligonucleotide
  Antisense strand to SEQ ID NO: 1115312
aauucccuugaccucuggc

SEQ ID NO: 1115314 - RNA, 19 nt, Artificial Sequence
  Description of Artificial Sequence: Synthetic oligonucleotide
  Sense strand starting at position 2826 of SEQ ID NO: 915907
gggagcuaugcucagggau

SEQ ID NO: 1115315 - RNA, 19 nt, Artificial Sequence
  Description of Artificial Sequence: Synthetic oligonucleotide
  Antisense strand to SEQ ID NO: 1115314
aucccugagcauagcuccc

SEQ ID NO: 1115316 - RNA, 19 nt, Artificial Sequence
  Description of Artificial Sequence: Synthetic oligonucleotide
  Sense strand starting at position 2829 of SEQ ID NO: 915907
agcuaugcucagggaugga

SEQ ID NO: 1115317 - RNA, 19 nt, Artificial Sequence
  Description of Artificial Sequence: Synthetic oligonucleotide
  Antisense strand to SEQ ID NO: 1115316
uccaucccugagcauagcu

SEQ ID NO: 1115318 - RNA, 19 nt, Artificial Sequence
  Description of Artificial Sequence: Synthetic oligonucleotide
  Sense strand starting at position 2848 of SEQ ID NO: 915907
gcagaagucucagcacaga

SEQ ID NO: 1115319 - RNA, 19 nt, Artificial Sequence
  Description of Artificial Sequence: Synthetic oligonucleotide
  Antisense strand to SEQ ID NO: 1115318
ucugugcugagacuucugc

SEQ ID NO: 1115320 - RNA, 19 nt, Artificial Sequence
  Description of Artificial Sequence: Synthetic oligonucleotide
  Sense strand starting at position 3052 of SEQ ID NO: 915907
gauggugucagaugaugag

SEQ ID NO: 1115321 - RNA, 19 nt, Artificial Sequence
  Description of Artificial Sequence: Synthetic oligonucleotide
  Antisense strand to SEQ ID NO: 1115320
cucaucaucugacaccauc

SEQ ID NO: 1115322 - RNA, 19 nt, Artificial Sequence
  Description of Artificial Sequence: Synthetic oligonucleotide
  Sense strand starting at position 3161 of SEQ ID NO: 915907
gguguauuccuaggacaug

SEQ ID NO: 1115323 - RNA, 19 nt, Artificial Sequence
  Description of Artificial Sequence: Synthetic oligonucleotide
  Antisense strand to SEQ ID NO: 1115322
cauguccuaggaauacacc

SEQ ID NO: 1115324 - RNA, 19 nt, Artificial Sequence
  Description of Artificial Sequence: Synthetic oligonucleotide
  Sense strand starting at position 3184 of SEQ ID NO: 915907
cgggcuuuaaguuagaaga

SEQ ID NO: 1115325 - RNA, 19 nt, Artificial Sequence
  Description of Artificial Sequence: Synthetic oligonucleotide
  Antisense strand to SEQ ID NO: 1115324
ucuucuaacuuaaagcccg

SEQ ID NO: 1115326 - RNA, 19 nt, Artificial Sequence
  Description of Artificial Sequence: Synthetic oligonucleotide
  Sense strand starting at position 3186 of SEQ ID NO: 915907
ggcuuuaaguuagaagaaa

SEQ ID NO: 1115327 - RNA, 19 nt, Artificial Sequence
  Description of Artificial Sequence: Synthetic oligonucleotide
  Antisense strand to SEQ ID NO: 1115326
uuucuucuaacuuaaagcc

SEQ ID NO: 1115328 - RNA, 19 nt, Artificial Sequence
  Description of Artificial Sequence: Synthetic oligonucleotide
  Sense strand starting at position 3246 of SEQ ID NO: 915907
augagaaguugggaguagu

SEQ ID NO: 1115329 - RNA, 19 nt, Artificial Sequence
  Description of Artificial Sequence: Synthetic oligonucleotide
  Antisense strand to SEQ ID NO: 1115328
acuacucccaacuucucau

SEQ ID NO: 1115330 - RNA, 19 nt, Artificial Sequence
  Description of Artificial Sequence: Synthetic oligonucleotide
  Sense strand starting at position 3316 of SEQ ID NO: 915907
gacuuaagauuguggagga

SEQ ID NO: 1115331 - RNA, 19 nt, Artificial Sequence
  Description of Artificial Sequence: Synthetic oligonucleotide
  Antisense strand to SEQ ID NO: 1115330
uccuccacaaucuuaaguc

SEQ ID NO: 1115332 - RNA, 19 nt, Artificial Sequence
  Description of Artificial Sequence: Synthetic oligonucleotide
  Sense strand starting at position 3572 of SEQ ID NO: 915907
ggcagagucugauuccuga

SEQ ID NO: 1115333 - RNA, 19 nt, Artificial Sequence
  Description of Artificial Sequence: Synthetic oligonucleotide
  Antisense strand to SEQ ID NO: 1115332
ucaggaaucagacucugcc

SEQ ID NO: 1115334 - RNA, 19 nt, Artificial Sequence
  Description of Artificial Sequence: Synthetic oligonucleotide
  Sense strand starting at position 3575 of SEQ ID NO: 915907
agagucugauuccugaauu

SEQ ID NO: 1115335 - RNA, 19 nt, Artificial Sequence
  Description of Artificial Sequence: Synthetic oligonucleotide
  Antisense strand to SEQ ID NO: 1115334
aauucaggaaucagacucu

SEQ ID NO: 1115336 - RNA, 19 nt, Artificial Sequence
  Description of Artificial Sequence: Synthetic oligonucleotide
  Sense strand starting at position 3678 of SEQ ID NO: 915907
cguggagccucuucaaaug

SEQ ID NO: 1115337 - RNA, 19 nt, Artificial Sequence
  Description of Artificial Sequence: Synthetic oligonucleotide
  Antisense strand to SEQ ID NO: 1115336
cauuugaagaggcuccacg

SEQ ID NO: 1115338 - RNA, 19 nt, Artificial Sequence
  Description of Artificial Sequence: Synthetic oligonucleotide
  Sense strand starting at position 3709 of SEQ ID NO: 915907
ucagucaccugggauguua

SEQ ID NO: 1115339 - RNA, 19 nt, Artificial Sequence
  Description of Artificial Sequence: Synthetic oligonucleotide
  Antisense strand to SEQ ID NO: 1115338
uaacaucccaggugacuga

SEQ ID NO: 1115340 - RNA, 19 nt, Artificial Sequence
  Description of Artificial Sequence: Synthetic oligonucleotide
  Sense strand starting at position 3717 of SEQ ID NO: 915907
cugggauguuacugaggga

SEQ ID NO: 1115341 - RNA, 19 nt, Artificial Sequence
  Description of Artificial Sequence: Synthetic oligonucleotide
  Antisense strand to SEQ ID NO: 1115340
ucccucaguaacaucccag

SEQ ID NO: 1115342 - RNA, 19 nt, Artificial Sequence
  Description of Artificial Sequence: Synthetic oligonucleotide
  Sense strand starting at position 3835 of SEQ ID NO: 915907
agguaugaaucaggagaau

SEQ ID NO: 1115343 - RNA, 19 nt, Artificial Sequence
  Description of Artificial Sequence: Synthetic oligonucleotide
  Antisense strand to SEQ ID NO: 1115342
auucuccugauucauaccu

SEQ ID NO: 1115344 - RNA, 19 nt, Artificial Sequence
  Description of Artificial Sequence: Synthetic oligonucleotide
  Sense strand starting at position 3925 of SEQ ID NO: 915907
ucaucuguaaggcagagau

SEQ ID NO: 1115345 - RNA, 19 nt, Artificial Sequence
  Description of Artificial Sequence: Synthetic oligonucleotide
  Antisense strand to SEQ ID NO: 1115344
aucucugccuuacagauga

SEQ ID NO: 1115346 - RNA, 19 nt, Artificial Sequence
  Description of Artificial Sequence: Synthetic oligonucleotide
  Sense strand starting at position 3979 of SEQ ID NO: 915907
gagcuaacgcauggaaagu

SEQ ID NO: 1115347 - RNA, 19 nt, Artificial Sequence
  Description of Artificial Sequence: Synthetic oligonucleotide
  Antisense strand to SEQ ID NO: 1115346
acuuuccaugcguuagcuc

SEQ ID NO: 1115348 - RNA, 19 nt, Artificial Sequence
  Description of Artificial Sequence: Synthetic oligonucleotide
  Sense strand starting at position 128 of SEQ ID NO: 915908
uccggaguuguaugggauu

SEQ ID NO: 1115349 - RNA, 19 nt, Artificial Sequence
  Description of Artificial Sequence: Synthetic oligonucleotide
  Antisense strand to SEQ ID NO: 1115348
aaucccauacaacuccgga

SEQ ID NO: 1115350 - RNA, 19 nt, Artificial Sequence
  Description of Artificial Sequence: Synthetic oligonucleotide
  Sense strand starting at position 130 of SEQ ID NO: 915908
cggaguuguaugggauuag

SEQ ID NO: 1115351 - RNA, 19 nt, Artificial Sequence
  Description of Artificial Sequence: Synthetic oligonucleotide
  Antisense strand to SEQ ID NO: 1115350
cuaaucccauacaacuccg

SEQ ID NO: 1115352 - RNA, 19 nt, Artificial Sequence
  Description of Artificial Sequence: Synthetic oligonucleotide
  Sense strand starting at position 131 of SEQ ID NO: 915908
ggaguuguaugggauuaga

SEQ ID NO: 1115353 - RNA, 19 nt, Artificial Sequence
  Description of Artificial Sequence: Synthetic oligonucleotide
  Antisense strand to SEQ ID NO: 1115352
ucuaaucccauacaacucc

SEQ ID NO: 1115354 - RNA, 19 nt, Artificial Sequence
  Description of Artificial Sequence: Synthetic oligonucleotide
  Sense strand starting at position 134 of SEQ ID NO: 915908
guuguaugggauuagaggu

SEQ ID NO: 1115355 - RNA, 19 nt, Artificial Sequence
  Description of Artificial Sequence: Synthetic oligonucleotide
  Antisense strand to SEQ ID NO: 1115354
accucuaaucccauacaac

SEQ ID NO: 1115356 - RNA, 19 nt, Artificial Sequence
  Description of Artificial Sequence: Synthetic oligonucleotide
  Sense strand starting at position 140 of SEQ ID NO: 915908
ugggauuagaggugucuga

SEQ ID NO: 1115357 - RNA, 19 nt, Artificial Sequence
  Description of Artificial Sequence: Synthetic oligonucleotide
  Antisense strand to SEQ ID NO: 1115356
ucagacaccucuaauccca

SEQ ID NO: 1115358 - RNA, 19 nt, Artificial Sequence
  Description of Artificial Sequence: Synthetic oligonucleotide
  Sense strand starting at position 175 of SEQ ID NO: 915908
ugucuugcgccgguucaga

SEQ ID NO: 1115359 - RNA, 19 nt, Artificial Sequence
  Description of Artificial Sequence: Synthetic oligonucleotide
  Antisense strand to SEQ ID NO: 1115358
ucugaaccggcgcaagaca

SEQ ID NO: 1115360 - RNA, 19 nt, Artificial Sequence
  Description of Artificial Sequence: Synthetic oligonucleotide
  Sense strand starting at position 244 of SEQ ID NO: 915908
ugagaacugucugcucuac

SEQ ID NO: 1115361 - RNA, 19 nt, Artificial Sequence
  Description of Artificial Sequence: Synthetic oligonucleotide
  Antisense strand to SEQ ID NO: 1115360
guagagcagacaguucuca

SEQ ID NO: 1115362 - RNA, 19 nt, Artificial Sequence
  Description of Artificial Sequence: Synthetic oligonucleotide
  Sense strand starting at position 332 of SEQ ID NO: 915908
cccuguaugccugcaguca

SEQ ID NO: 1115363 - RNA, 19 nt, Artificial Sequence
  Description of Artificial Sequence: Synthetic oligonucleotide
  Antisense strand to SEQ ID NO: 1115362
ugacugcaggcauacaggg

SEQ ID NO: 1115364 - RNA, 19 nt, Artificial Sequence
  Description of Artificial Sequence: Synthetic oligonucleotide
  Sense strand starting at position 333 of SEQ ID NO: 915908
ccuguaugccugcagucau

SEQ ID NO: 1115365 - RNA, 19 nt, Artificial Sequence
  Description of Artificial Sequence: Synthetic oligonucleotide
  Antisense strand to SEQ ID NO: 1115364
augacugcaggcauacagg

SEQ ID NO: 1115366 - RNA, 19 nt, Artificial Sequence
  Description of Artificial Sequence: Synthetic oligonucleotide
  Sense strand starting at position 344 of SEQ ID NO: 915908
gcagucaucccaugaugca

SEQ ID NO: 1115367 - RNA, 19 nt, Artificial Sequence
  Description of Artificial Sequence: Synthetic oligonucleotide
  Antisense strand to SEQ ID NO: 1115366
ugcaucaugggaugacugc

SEQ ID NO: 1115368 - RNA, 19 nt, Artificial Sequence
  Description of Artificial Sequence: Synthetic oligonucleotide
  Sense strand starting at position 353 of SEQ ID NO: 915908
ccaugaugcacggguauga

SEQ ID NO: 1115369 - RNA, 19 nt, Artificial Sequence
  Description of Artificial Sequence: Synthetic oligonucleotide
  Antisense strand to SEQ ID NO: 1115368
ucauacccgugcaucaugg

SEQ ID NO: 1115370 - RNA, 19 nt, Artificial Sequence
  Description of Artificial Sequence: Synthetic oligonucleotide
  Sense strand starting at position 582 of SEQ ID NO: 915908
gacaguucccagugagagc

SEQ ID NO: 1115371 - RNA, 19 nt, Artificial Sequence
  Description of Artificial Sequence: Synthetic oligonucleotide
  Antisense strand to SEQ ID NO: 1115370
gcucucacugggaacuguc

SEQ ID NO: 1115372 - RNA, 19 nt, Artificial Sequence
  Description of Artificial Sequence: Synthetic oligonucleotide
  Sense strand starting at position 645 of SEQ ID NO: 915908
ggauaugauuuagagaccu

SEQ ID NO: 1115373 - RNA, 19 nt, Artificial Sequence
  Description of Artificial Sequence: Synthetic oligonucleotide
  Antisense strand to SEQ ID NO: 1115372
aggucucuaaaucauaucc

SEQ ID NO: 1115374 - RNA, 19 nt, Artificial Sequence
  Description of Artificial Sequence: Synthetic oligonucleotide
  Sense strand starting at position 781 of SEQ ID NO: 915908
caaugaagucccugcugca

SEQ ID NO: 1115375 - RNA, 19 nt, Artificial Sequence
  Description of Artificial Sequence: Synthetic oligonucleotide
  Antisense strand to SEQ ID NO: 1115374
ugcagcagggacuucauug

SEQ ID NO: 1115376 - RNA, 19 nt, Artificial Sequence
  Description of Artificial Sequence: Synthetic oligonucleotide
  Sense strand starting at position 1140 of SEQ ID NO: 915908
ugguguggaccugggaaua

SEQ ID NO: 1115377 - RNA, 19 nt, Artificial Sequence
  Description of Artificial Sequence: Synthetic oligonucleotide
  Antisense strand to SEQ ID NO: 1115376
uauucccagguccacacca

SEQ ID NO: 1115378 - RNA, 19 nt, Artificial Sequence
  Description of Artificial Sequence: Synthetic oligonucleotide
  Sense strand starting at position 1197 of SEQ ID NO: 915908
uggccugugucagccagau

SEQ ID NO: 1115379 - RNA, 19 nt, Artificial Sequence
  Description of Artificial Sequence: Synthetic oligonucleotide
  Antisense strand to SEQ ID NO: 1115378
aucuggcugacacaggcca

SEQ ID NO: 1115380 - RNA, 19 nt, Artificial Sequence
  Description of Artificial Sequence: Synthetic oligonucleotide
  Sense strand starting at position 1199 of SEQ ID NO: 915908
gccugugucagccagauga

SEQ ID NO: 1115381 - RNA, 19 nt, Artificial Sequence
  Description of Artificial Sequence: Synthetic oligonucleotide
  Antisense strand to SEQ ID NO: 1115380
ucaucuggcugacacaggc

SEQ ID NO: 1115382 - RNA, 19 nt, Artificial Sequence
  Description of Artificial Sequence: Synthetic oligonucleotide
  Sense strand starting at position 1203 of SEQ ID NO: 915908
gugucagccagaugaggua

SEQ ID NO: 1115383 - RNA, 19 nt, Artificial Sequence
  Description of Artificial Sequence: Synthetic oligonucleotide
  Antisense strand to SEQ ID NO: 1115382
uaccucaucuggcugacac

SEQ ID NO: 1115384 - RNA, 19 nt, Artificial Sequence
  Description of Artificial Sequence: Synthetic oligonucleotide
  Sense strand starting at position 1984 of SEQ ID NO: 915908
gaagaucuggaugggcauu

SEQ ID NO: 1115385 - RNA, 19 nt, Artificial Sequence
  Description of Artificial Sequence: Synthetic oligonucleotide
  Antisense strand to SEQ ID NO: 1115384
aaugcccauccagaucuuc

SEQ ID NO: 1115386 - RNA, 19 nt, Artificial Sequence
  Description of Artificial Sequence: Synthetic oligonucleotide
  Sense strand starting at position 2224 of SEQ ID NO: 915908
gggugucugggcugaugaa

SEQ ID NO: 1115387 - RNA, 19 nt, Artificial Sequence
  Description of Artificial Sequence: Synthetic oligonucleotide
  Antisense strand to SEQ ID NO: 1115386
uucaucagcccagacaccc

SEQ ID NO: 1115388 - RNA, 19 nt, Artificial Sequence
  Description of Artificial Sequence: Synthetic oligonucleotide
  Sense strand starting at position 2225 of SEQ ID NO: 915908
ggugucugggcugaugaau

SEQ ID NO: 1115389 - RNA, 19 nt, Artificial Sequence
  Description of Artificial Sequence: Synthetic oligonucleotide
  Antisense strand to SEQ ID NO: 1115388
auucaucagcccagacacc

SEQ ID NO: 1115390 - RNA, 19 nt, Artificial Sequence
  Description of Artificial Sequence: Synthetic oligonucleotide
  Sense strand starting at position 2244 of SEQ ID NO: 915908
aauugauggcagugggaaa

SEQ ID NO: 1115391 - RNA, 19 nt, Artificial Sequence
  Description of Artificial Sequence: Synthetic oligonucleotide
  Antisense strand to SEQ ID NO: 1115390
uuucccacugccaucaauu

SEQ ID NO: 1115392 - RNA, 19 nt, Artificial Sequence
  Description of Artificial Sequence: Synthetic oligonucleotide
  Sense strand starting at position 2582 of SEQ ID NO: 915908
caguuauuccucugggaua

SEQ ID NO: 1115393 - RNA, 19 nt, Artificial Sequence
  Description of Artificial Sequence: Synthetic oligonucleotide
  Antisense strand to SEQ ID NO: 1115392
uaucccagaggaauaacug

SEQ ID NO: 1115394 - RNA, 19 nt, Artificial Sequence
  Description of Artificial Sequence: Synthetic oligonucleotide
  Sense strand starting at position 2836 of SEQ ID NO: 915908
agacucauuucugaccagu

SEQ ID NO: 1115395 - RNA, 19 nt, Artificial Sequence
  Description of Artificial Sequence: Synthetic oligonucleotide
  Antisense strand to SEQ ID NO: 1115394
acuggucagaaaugagucu

SEQ ID NO: 1115396 - RNA, 19 nt, Artificial Sequence
  Description of Artificial Sequence: Synthetic oligonucleotide
  Sense strand starting at position 2879 of SEQ ID NO: 915908
ugucuccugcagugggaaa

SEQ ID NO: 1115397 - RNA, 19 nt, Artificial Sequence
  Description of Artificial Sequence: Synthetic oligonucleotide
  Antisense strand to SEQ ID NO: 1115396
uuucccacugcaggagaca

SEQ ID NO: 1115398 - RNA, 19 nt, Artificial Sequence
  Description of Artificial Sequence: Synthetic oligonucleotide
  Sense strand starting at position 2948 of SEQ ID NO: 915908
aacaguuuaguuuguucga

SEQ ID NO: 1115399 - RNA, 19 nt, Artificial Sequence
  Description of Artificial Sequence: Synthetic oligonucleotide
  Antisense strand to SEQ ID NO: 1115398
ucgaacaaacuaaacuguu

SEQ ID NO: 1115400 - RNA, 19 nt, Artificial Sequence
  Description of Artificial Sequence: Synthetic oligonucleotide
  Sense strand starting at position 2951 of SEQ ID NO: 915908
aguuuaguuuguucgagga

SEQ ID NO: 1115401 - RNA, 19 nt, Artificial Sequence
  Description of Artificial Sequence: Synthetic oligonucleotide
  Antisense strand to SEQ ID NO: 1115400
uccucgaacaaacuaaacu

SEQ ID NO: 1115402 - RNA, 19 nt, Artificial Sequence
  Description of Artificial Sequence: Synthetic oligonucleotide
  Sense strand starting at position 2955 of SEQ ID NO: 915908
uaguuuguucgaggaauuc

SEQ ID NO: 1115403 - RNA, 19 nt, Artificial Sequence
  Description of Artificial Sequence: Synthetic oligonucleotide
  Antisense strand to SEQ ID NO: 1115402
gaauuccucgaacaaacua

SEQ ID NO: 1115404 - RNA, 19 nt, Artificial Sequence
  Description of Artificial Sequence: Synthetic oligonucleotide
  Sense strand starting at position 2974 of SEQ ID NO: 915908
ucugguggguggaagaaau

SEQ ID NO: 1115405 - RNA, 19 nt, Artificial Sequence
  Description of Artificial Sequence: Synthetic oligonucleotide
  Antisense strand to SEQ ID NO: 1115404
auuucuuccacccaccaga

SEQ ID NO: 1115406 - RNA, 19 nt, Artificial Sequence
  Description of Artificial Sequence: Synthetic oligonucleotide
  Sense strand starting at position 2984 of SEQ ID NO: 915908
ggaagaaauugagaucagu

SEQ ID NO: 1115407 - RNA, 19 nt, Artificial Sequence
  Description of Artificial Sequence: Synthetic oligonucleotide
  Antisense strand to SEQ ID NO: 1115406
acugaucucaauuucuucc

SEQ ID NO: 1115408 - RNA, 19 nt, Artificial Sequence
  Description of Artificial Sequence: Synthetic oligonucleotide
  Sense strand starting at position 3027 of SEQ ID NO: 915908
gggucagguagagaguauu

SEQ ID NO: 1115409 - RNA, 19 nt, Artificial Sequence
  Description of Artificial Sequence: Synthetic oligonucleotide
  Antisense strand to SEQ ID NO: 1115408
aauacucucuaccugaccc

SEQ ID NO: 1115410 - RNA, 19 nt, Artificial Sequence
  Description of Artificial Sequence: Synthetic oligonucleotide
  Sense strand starting at position 3157 of SEQ ID NO: 915908
cccucuguguguucugauu

SEQ ID NO: 1115411 - RNA, 19 nt, Artificial Sequence
  Description of Artificial Sequence: Synthetic oligonucleotide
  Antisense strand to SEQ ID NO: 1115410
aaucagaacacacagaggg

SEQ ID NO: 1115412 - RNA, 19 nt, Artificial Sequence
  Description of Artificial Sequence: Synthetic oligonucleotide
  Sense strand starting at position 3163 of SEQ ID NO: 915908
guguguucugauuacucag

SEQ ID NO: 1115413 - RNA, 19 nt, Artificial Sequence
  Description of Artificial Sequence: Synthetic oligonucleotide
  Antisense strand to SEQ ID NO: 1115412
cugaguaaucagaacacac

SEQ ID NO: 1115414 - RNA, 19 nt, Artificial Sequence
  Description of Artificial Sequence: Synthetic oligonucleotide
  Sense strand starting at position 3275 of SEQ ID NO: 915908
gcagauuaaugcuuucucu

SEQ ID NO: 1115415 - RNA, 19 nt, Artificial Sequence
  Description of Artificial Sequence: Synthetic oligonucleotide
  Antisense strand to SEQ ID NO: 1115414
agagaaagcauuaaucugc

SEQ ID NO: 1115416 - RNA, 19 nt, Artificial Sequence
  Description of Artificial Sequence: Synthetic oligonucleotide
  Sense strand starting at position 3504 of SEQ ID NO: 915908
cugagugauguggaaccuu

SEQ ID NO: 1115417 - RNA, 19 nt, Artificial Sequence
  Description of Artificial Sequence: Synthetic oligonucleotide
  Antisense strand to SEQ ID NO: 1115416
aagguuccacaucacucag

SEQ ID NO: 1115418 - RNA, 19 nt, Artificial Sequence
  Description of Artificial Sequence: Synthetic oligonucleotide
  Sense strand starting at position 3722 of SEQ ID NO: 915908
ccuuuaguucgaguugugu

SEQ ID NO: 1115419 - RNA, 19 nt, Artificial Sequence
  Description of Artificial Sequence: Synthetic oligonucleotide
  Antisense strand to SEQ ID NO: 1115418
acacaacucgaacuaaagg

SEQ ID NO: 1115420 - RNA, 19 nt, Artificial Sequence
  Description of Artificial Sequence: Synthetic oligonucleotide
  Sense strand starting at position 3724 of SEQ ID NO: 915908
uuuaguucgaguuguguga

SEQ ID NO: 1115421 - RNA, 19 nt, Artificial Sequence
  Description of Artificial Sequence: Synthetic oligonucleotide
  Antisense strand to SEQ ID NO: 1115420
ucacacaacucgaacuaaa

SEQ ID NO: 1115422 - RNA, 19 nt, Artificial Sequence
  Description of Artificial Sequence: Synthetic oligonucleotide
  Sense strand starting at position 3731 of SEQ ID NO: 915908
cgaguugugugacucugac

SEQ ID NO: 1115423 - RNA, 19 nt, Artificial Sequence
  Description of Artificial Sequence: Synthetic oligonucleotide
  Antisense strand to SEQ ID NO: 1115422
gucagagucacacaacucg

SEQ ID NO: 1115424 - RNA, 19 nt, Artificial Sequence
  Description of Artificial Sequence: Synthetic oligonucleotide
  Sense strand starting at position 3737 of SEQ ID NO: 915908
gugugacucugaccauucu

SEQ ID NO: 1115425 - RNA, 19 nt, Artificial Sequence
  Description of Artificial Sequence: Synthetic oligonucleotide
  Antisense strand to SEQ ID NO: 1115424
agaauggucagagucacac

SEQ ID NO: 1115426 - RNA, 19 nt, Artificial Sequence
  Description of Artificial Sequence: Synthetic oligonucleotide
  Sense strand starting at position 3766 of SEQ ID NO: 915908
gaccuucucuagccaggua

SEQ ID NO: 1115427 - RNA, 19 nt, Artificial Sequence
  Description of Artificial Sequence: Synthetic oligonucleotide
  Antisense strand to SEQ ID NO: 1115426
uaccuggcuagagaagguc

SEQ ID NO: 1115428 - RNA, 19 nt, Artificial Sequence
  Description of Artificial Sequence: Synthetic oligonucleotide
  Sense strand starting at position 33 of SEQ ID NO: 915909
uugaaauaugucuggcaca

SEQ ID NO: 1115429 - RNA, 19 nt, Artificial Sequence
  Description of Artificial Sequence: Synthetic oligonucleotide
  Antisense strand to SEQ ID NO: 1115428
ugugccagacauauuucaa

SEQ ID NO: 1115430 - RNA, 19 nt, Artificial Sequence
  Description of Artificial Sequence: Synthetic oligonucleotide
  Sense strand starting at position 38 of SEQ ID NO: 915909
auaugucuggcacauguaa

SEQ ID NO: 1115431 - RNA, 19 nt, Artificial Sequence
  Description of Artificial Sequence: Synthetic oligonucleotide
  Antisense strand to SEQ ID NO: 1115430
uuacaugugccagacauau

SEQ ID NO: 1115432 - RNA, 19 nt, Artificial Sequence
  Description of Artificial Sequence: Synthetic oligonucleotide
  Sense strand starting at position 51 of SEQ ID NO: 915909
auguaaagugcucaauaau

SEQ ID NO: 1115433 - RNA, 19 nt, Artificial Sequence
  Description of Artificial Sequence: Synthetic oligonucleotide
  Antisense strand to SEQ ID NO: 1115432
auuauugagcacuuuacau

SEQ ID NO: 1115434 - RNA, 19 nt, Artificial Sequence
  Description of Artificial Sequence: Synthetic oligonucleotide
  Sense strand starting at position 318 of SEQ ID NO: 915909
ugagcaaguccacaaugau

SEQ ID NO: 1115435 - RNA, 19 nt, Artificial Sequence
  Description of Artificial Sequence: Synthetic oligonucleotide
  Antisense strand to SEQ ID NO: 1115434
aucauuguggacuugcuca

SEQ ID NO: 1115436 - RNA, 19 nt, Artificial Sequence
  Description of Artificial Sequence: Synthetic oligonucleotide
  Sense strand starting at position 354 of SEQ ID NO: 915909
aggaaugauuccuuggguu

SEQ ID NO: 1115437 - RNA, 19 nt, Artificial Sequence
  Description of Artificial Sequence: Synthetic oligonucleotide
  Antisense strand to SEQ ID NO: 1115436
aacccaaggaaucauuccu

SEQ ID NO: 1115438 - RNA, 19 nt, Artificial Sequence
  Description of Artificial Sequence: Synthetic oligonucleotide
  Sense strand starting at position 356 of SEQ ID NO: 915909
gaaugauuccuuggguucu

SEQ ID NO: 1115439 - RNA, 19 nt, Artificial Sequence
  Description of Artificial Sequence: Synthetic oligonucleotide
  Antisense strand to SEQ ID NO: 1115438
agaacccaaggaaucauuc

SEQ ID NO: 1115440 - RNA, 19 nt, Artificial Sequence
  Description of Artificial Sequence: Synthetic oligonucleotide
  Sense strand starting at position 358 of SEQ ID NO: 915909
augauuccuuggguucuau

SEQ ID NO: 1115441 - RNA, 19 nt, Artificial Sequence
  Description of Artificial Sequence: Synthetic oligonucleotide
  Antisense strand to SEQ ID NO: 1115440
auagaacccaaggaaucau

SEQ ID NO: 1115442 - RNA, 19 nt, Artificial Sequence
  Description of Artificial Sequence: Synthetic oligonucleotide
  Sense strand starting at position 421 of SEQ ID NO: 915909
gccauauaagggcagugau

SEQ ID NO: 1115443 - RNA, 19 nt, Artificial Sequence
  Description of Artificial Sequence: Synthetic oligonucleotide
  Antisense strand to SEQ ID NO: 1115442
aucacugcccuuauauggc

SEQ ID NO: 1115444 - RNA, 19 nt, Artificial Sequence
  Description of Artificial Sequence: Synthetic oligonucleotide
  Sense strand starting at position 557 of SEQ ID NO: 915909
ucucaagaagauugucuuu

SEQ ID NO: 1115445 - RNA, 19 nt, Artificial Sequence
  Description of Artificial Sequence: Synthetic oligonucleotide
  Antisense strand to SEQ ID NO: 1115444
aaagacaaucuucuugaga

SEQ ID NO: 1115446 - RNA, 19 nt, Artificial Sequence
  Description of Artificial Sequence: Synthetic oligonucleotide
  Sense strand starting at position 562 of SEQ ID NO: 915909
agaagauugucuuucccuc

SEQ ID NO: 1115447 - RNA, 19 nt, Artificial Sequence
  Description of Artificial Sequence: Synthetic oligonucleotide
  Antisense strand to SEQ ID NO: 1115446
gagggaaagacaaucuucu

SEQ ID NO: 1115448 - RNA, 19 nt, Artificial Sequence
  Description of Artificial Sequence: Synthetic oligonucleotide
  Sense strand starting at position 568 of SEQ ID NO: 915909
uugucuuucccucaagaag

SEQ ID NO: 1115449 - RNA, 19 nt, Artificial Sequence
  Description of Artificial Sequence: Synthetic oligonucleotide
  Antisense strand to SEQ ID NO: 1115448
cuucuugagggaaagacaa

SEQ ID NO: 1115450 - RNA, 19 nt, Artificial Sequence
  Description of Artificial Sequence: Synthetic oligonucleotide
  Sense strand starting at position 855 of SEQ ID NO: 915909
uuaugauccuugcuaauug

SEQ ID NO: 1115451 - RNA, 19 nt, Artificial Sequence
  Description of Artificial Sequence: Synthetic oligonucleotide
  Antisense strand to SEQ ID NO: 1115450
caauuagcaaggaucauaa

SEQ ID NO: 1115452 - RNA, 19 nt, Artificial Sequence
  Description of Artificial Sequence: Synthetic oligonucleotide
  Sense strand starting at position 1022 of SEQ ID NO: 915909
cuaagauaaccgcacauca

SEQ ID NO: 1115453 - RNA, 19 nt, Artificial Sequence
  Description of Artificial Sequence: Synthetic oligonucleotide
  Antisense strand to SEQ ID NO: 1115452
ugaugugcgguuaucuuag

SEQ ID NO: 1115454 - RNA, 19 nt, Artificial Sequence
  Description of Artificial Sequence: Synthetic oligonucleotide
  Sense strand starting at position 1040 of SEQ ID NO: 915909
aggucuucgccuuaggaua

SEQ ID NO: 1115455 - RNA, 19 nt, Artificial Sequence
  Description of Artificial Sequence: Synthetic oligonucleotide
  Antisense strand to SEQ ID NO: 1115454
uauccuaaggcgaagaccu

SEQ ID NO: 1115456 - RNA, 19 nt, Artificial Sequence
  Description of Artificial Sequence: Synthetic oligonucleotide
  Sense strand starting at position 1143 of SEQ ID NO: 915909
aucacacugguguguagaa

SEQ ID NO: 1115457 - RNA, 19 nt, Artificial Sequence
  Description of Artificial Sequence: Synthetic oligonucleotide
  Antisense strand to SEQ ID NO: 1115456
uucuacacaccagugugau

SEQ ID NO: 1115458 - RNA, 19 nt, Artificial Sequence
  Description of Artificial Sequence: Synthetic oligonucleotide
  Sense strand starting at position 1150 of SEQ ID NO: 915909
ugguguguagaaggaaauu

SEQ ID NO: 1115459 - RNA, 19 nt, Artificial Sequence
  Description of Artificial Sequence: Synthetic oligonucleotide
  Antisense strand to SEQ ID NO: 1115458
aauuuccuucuacacacca

SEQ ID NO: 1115460 - RNA, 19 nt, Artificial Sequence
  Description of Artificial Sequence: Synthetic oligonucleotide
  Sense strand starting at position 2473 of SEQ ID NO: 915909
gugccuugcgccucuugaa

SEQ ID NO: 1115461 - RNA, 19 nt, Artificial Sequence
  Description of Artificial Sequence: Synthetic oligonucleotide
  Antisense strand to SEQ ID NO: 1115460
uucaagaggcgcaaggcac

SEQ ID NO: 1115462 - RNA, 19 nt, Artificial Sequence
  Description of Artificial Sequence: Synthetic oligonucleotide
  Sense strand starting at position 2718 of SEQ ID NO: 915909
ccuguuugcagcguuuaau

SEQ ID NO: 1115463 - RNA, 19 nt, Artificial Sequence
  Description of Artificial Sequence: Synthetic oligonucleotide
  Antisense strand to SEQ ID NO: 1115462
auuaaacgcugcaaacagg

SEQ ID NO: 1115464 - RNA, 19 nt, Artificial Sequence
  Description of Artificial Sequence: Synthetic oligonucleotide
  Sense strand starting at position 2719 of SEQ ID NO: 915909
cuguuugcagcguuuaaug

SEQ ID NO: 1115465 - RNA, 19 nt, Artificial Sequence
  Description of Artificial Sequence: Synthetic oligonucleotide
  Antisense strand to SEQ ID NO: 1115464
cauuaaacgcugcaaacag

SEQ ID NO: 1115466 - RNA, 19 nt, Artificial Sequence
  Description of Artificial Sequence: Synthetic oligonucleotide
  Sense strand starting at position 2728 of SEQ ID NO: 915909
gcguuuaaugaagauaacu

SEQ ID NO: 1115467 - RNA, 19 nt, Artificial Sequence
  Description of Artificial Sequence: Synthetic oligonucleotide
  Antisense strand to SEQ ID NO: 1115466
aguuaucuucauuaaacgc

SEQ ID NO: 1115468 - RNA, 19 nt, Artificial Sequence
  Description of Artificial Sequence: Synthetic oligonucleotide
  Sense strand starting at position 2737 of SEQ ID NO: 915909
gaagauaacuuguuucuug

SEQ ID NO: 1115469 - RNA, 19 nt, Artificial Sequence
  Description of Artificial Sequence: Synthetic oligonucleotide
  Antisense strand to SEQ ID NO: 1115468
caagaaacaaguuaucuuc

SEQ ID NO: 1115470 - RNA, 19 nt, Artificial Sequence
  Description of Artificial Sequence: Synthetic oligonucleotide
  Sense strand starting at position 2867 of SEQ ID NO: 915909
caggaaucaucauugguuc

SEQ ID NO: 1115471 - RNA, 19 nt, Artificial Sequence
  Description of Artificial Sequence: Synthetic oligonucleotide
  Antisense strand to SEQ ID NO: 1115470
gaaccaaugaugauuccug

SEQ ID NO: 1115472 - RNA, 19 nt, Artificial Sequence
  Description of Artificial Sequence: Synthetic oligonucleotide
  Sense strand starting at position 3199 of SEQ ID NO: 915909
gcgcuuugacagcucugua

SEQ ID NO: 1115473 - RNA, 19 nt, Artificial Sequence
  Description of Artificial Sequence: Synthetic oligonucleotide
  Antisense strand to SEQ ID NO: 1115472
uacagagcugucaaagcgc

SEQ ID NO: 1115474 - RNA, 19 nt, Artificial Sequence
  Description of Artificial Sequence: Synthetic oligonucleotide
  Sense strand starting at position 3244 of SEQ ID NO: 915909
guuuacuguuccucuauuu

SEQ ID NO: 1115475 - RNA, 19 nt, Artificial Sequence
  Description of Artificial Sequence: Synthetic oligonucleotide
  Antisense strand to SEQ ID NO: 1115474
aaauagaggaacaguaaac

SEQ ID NO: 1115476 - RNA, 19 nt, Artificial Sequence
  Description of Artificial Sequence: Synthetic oligonucleotide
  Sense strand starting at position 3290 of SEQ ID NO: 915909
aucauugucuucucagacu

SEQ ID NO: 1115477 - RNA, 19 nt, Artificial Sequence
  Description of Artificial Sequence: Synthetic oligonucleotide
  Antisense strand to SEQ ID NO: 1115476
agucugagaagacaaugau

SEQ ID NO: 1115478 - RNA, 19 nt, Artificial Sequence
  Description of Artificial Sequence: Synthetic oligonucleotide
  Sense strand starting at position 3377 of SEQ ID NO: 915909
gguuguauuauuuguuucu

SEQ ID NO: 1115479 - RNA, 19 nt, Artificial Sequence
  Description of Artificial Sequence: Synthetic oligonucleotide
  Antisense strand to SEQ ID NO: 1115478
agaaacaaauaauacaacc

SEQ ID NO: 1115480 - RNA, 19 nt, Artificial Sequence
  Description of Artificial Sequence: Synthetic oligonucleotide
  Sense strand starting at position 3418 of SEQ ID NO: 915909
ugggucugucuggaaucau

SEQ ID NO: 1115481 - RNA, 19 nt, Artificial Sequence
  Description of Artificial Sequence: Synthetic oligonucleotide
  Antisense strand to SEQ ID NO: 1115480
augauuccagacagaccca

SEQ ID NO: 1115482 - RNA, 19 nt, Artificial Sequence
  Description of Artificial Sequence: Synthetic oligonucleotide
  Sense strand starting at position 3532 of SEQ ID NO: 915909
aggaauucaccguaagagu

SEQ ID NO: 1115483 - RNA, 19 nt, Artificial Sequence
  Description of Artificial Sequence: Synthetic oligonucleotide
  Antisense strand to SEQ ID NO: 1115482
acucuuacggugaauuccu

SEQ ID NO: 1115484 - RNA, 19 nt, Artificial Sequence
  Description of Artificial Sequence: Synthetic oligonucleotide
  Sense strand starting at position 3595 of SEQ ID NO: 915909
uguacauuagcuuaaaggu

SEQ ID NO: 1115485 - RNA, 19 nt, Artificial Sequence
  Description of Artificial Sequence: Synthetic oligonucleotide
  Antisense strand to SEQ ID NO: 1115484
accuuuaagcuaauguaca

SEQ ID NO: 1115486 - RNA, 19 nt, Artificial Sequence
  Description of Artificial Sequence: Synthetic oligonucleotide
  Sense strand starting at position 3605 of SEQ ID NO: 915909
cuuaaaggucccgaccuau

SEQ ID NO: 1115487 - RNA, 19 nt, Artificial Sequence
  Description of Artificial Sequence: Synthetic oligonucleotide
  Antisense strand to SEQ ID NO: 1115486
auaggucgggaccuuuaag

SEQ ID NO: 1115488 - RNA, 19 nt, Artificial Sequence
  Description of Artificial Sequence: Synthetic oligonucleotide
  Sense strand starting at position 3632 of SEQ ID NO: 915909
ugagaaacccuguacuucu

SEQ ID NO: 1115489 - RNA, 19 nt, Artificial Sequence
  Description of Artificial Sequence: Synthetic oligonucleotide
  Antisense strand to SEQ ID NO: 1115488
agaaguacaggguuucuca

SEQ ID NO: 1115490 - RNA, 19 nt, Artificial Sequence
  Description of Artificial Sequence: Synthetic oligonucleotide
  Sense strand starting at position 3673 of SEQ ID NO: 915909
uaguaauuguugguugaaa

SEQ ID NO: 1115491 - RNA, 19 nt, Artificial Sequence
  Description of Artificial Sequence: Synthetic oligonucleotide
  Antisense strand to SEQ ID NO: 1115490
uuucaaccaacaauuacua

SEQ ID NO: 1115492 - RNA, 19 nt, Artificial Sequence
  Description of Artificial Sequence: Synthetic oligonucleotide
  Sense strand starting at position 3674 of SEQ ID NO: 915909
aguaauuguugguugaaau

SEQ ID NO: 1115493 - RNA, 19 nt, Artificial Sequence
  Description of Artificial Sequence: Synthetic oligonucleotide
  Antisense strand to SEQ ID NO: 1115492
auuucaaccaacaauuacu

SEQ ID NO: 1115494 - RNA, 19 nt, Artificial Sequence
  Description of Artificial Sequence: Synthetic oligonucleotide
  Sense strand starting at position 3681 of SEQ ID NO: 915909
guugguugaaauuauguau

SEQ ID NO: 1115495 - RNA, 19 nt, Artificial Sequence
  Description of Artificial Sequence: Synthetic oligonucleotide
  Antisense strand to SEQ ID NO: 1115494
auacauaauuucaaccaac

SEQ ID NO: 1115496 - RNA, 19 nt, Artificial Sequence
  Description of Artificial Sequence: Synthetic oligonucleotide
  Sense strand starting at position 3795 of SEQ ID NO: 915909
acagacagugcuuggagua

SEQ ID NO: 1115497 - RNA, 19 nt, Artificial Sequence
  Description of Artificial Sequence: Synthetic oligonucleotide
  Antisense strand to SEQ ID NO: 1115496
uacuccaagcacugucugu

SEQ ID NO: 1115498 - RNA, 19 nt, Artificial Sequence
  Description of Artificial Sequence: Synthetic oligonucleotide
  Sense strand starting at position 3846 of SEQ ID NO: 915909
uagccuguagguuagaaau

SEQ ID NO: 1115499 - RNA, 19 nt, Artificial Sequence
  Description of Artificial Sequence: Synthetic oligonucleotide
  Antisense strand to SEQ ID NO: 1115498
auuucuaaccuacaggcua

SEQ ID NO: 1115500 - RNA, 19 nt, Artificial Sequence
  Description of Artificial Sequence: Synthetic oligonucleotide
  Sense strand starting at position 3866 of SEQ ID NO: 915909
acugguuuagauuagguua

SEQ ID NO: 1115501 - RNA, 19 nt, Artificial Sequence
  Description of Artificial Sequence: Synthetic oligonucleotide
  Antisense strand to SEQ ID NO: 1115500
uaaccuaaucuaaaccagu

SEQ ID NO: 1115502 - RNA, 19 nt, Artificial Sequence
  Description of Artificial Sequence: Synthetic oligonucleotide
  Sense strand starting at position 3912 of SEQ ID NO: 915909
ugaacauauguaugugaaa

SEQ ID NO: 1115503 - RNA, 19 nt, Artificial Sequence
  Description of Artificial Sequence: Synthetic oligonucleotide
  Antisense strand to SEQ ID NO: 1115502
uuucacauacauauguuca

SEQ ID NO: 1115504 - RNA, 19 nt, Artificial Sequence
  Description of Artificial Sequence: Synthetic oligonucleotide
  Sense strand starting at position 3913 of SEQ ID NO: 915909
gaacauauguaugugaaac

SEQ ID NO: 1115505 - RNA, 19 nt, Artificial Sequence
  Description of Artificial Sequence: Synthetic oligonucleotide
  Antisense strand to SEQ ID NO: 1115504
guuucacauacauauguuc

SEQ ID NO: 1115506 - RNA, 19 nt, Artificial Sequence
  Description of Artificial Sequence: Synthetic oligonucleotide
  Sense strand starting at position 3947 of SEQ ID NO: 915909
auucuaagggaacguguaa

SEQ ID NO: 1115507 - RNA, 19 nt, Artificial Sequence
  Description of Artificial Sequence: Synthetic oligonucleotide
  Antisense strand to SEQ ID NO: 1115506
uuacacguucccuuagaau

SEQ ID NO: 1115508 - RNA, 19 nt, Artificial Sequence
  Description of Artificial Sequence: Synthetic oligonucleotide
  Sense strand starting at position 109 of SEQ ID NO: 915910
auuucucaaugauaggcua

SEQ ID NO: 1115509 - RNA, 19 nt, Artificial Sequence
  Description of Artificial Sequence: Synthetic oligonucleotide
  Antisense strand to SEQ ID NO: 1115508
uagccuaucauugagaaau

SEQ ID NO: 1115510 - RNA, 19 nt, Artificial Sequence
  Description of Artificial Sequence: Synthetic oligonucleotide
  Sense strand starting at position 420 of SEQ ID NO: 915910
uuaagauggaguuguucua

SEQ ID NO: 1115511 - RNA, 19 nt, Artificial Sequence
  Description of Artificial Sequence: Synthetic oligonucleotide
  Antisense strand to SEQ ID NO: 1115510
uagaacaacuccaucuuaa

SEQ ID NO: 1115512 - RNA, 19 nt, Artificial Sequence
  Description of Artificial Sequence: Synthetic oligonucleotide
  Sense strand starting at position 528 of SEQ ID NO: 915910
uauuuaaagucagaaggga

SEQ ID NO: 1115513 - RNA, 19 nt, Artificial Sequence
  Description of Artificial Sequence: Synthetic oligonucleotide
  Antisense strand to SEQ ID NO: 1115512
ucccuucugacuuuaaaua

SEQ ID NO: 1115514 - RNA, 19 nt, Artificial Sequence
  Description of Artificial Sequence: Synthetic oligonucleotide
  Sense strand starting at position 557 of SEQ ID NO: 915910
cuggugaucggguaggaau

SEQ ID NO: 1115515 - RNA, 19 nt, Artificial Sequence
  Description of Artificial Sequence: Synthetic oligonucleotide
  Antisense strand to SEQ ID NO: 1115514
auuccuacccgaucaccag

SEQ ID NO: 1115516 - RNA, 19 nt, Artificial Sequence
  Description of Artificial Sequence: Synthetic oligonucleotide
  Sense strand starting at position 732 of SEQ ID NO: 915910
acgcauuucuguuaacaaa

SEQ ID NO: 1115517 - RNA, 19 nt, Artificial Sequence
  Description of Artificial Sequence: Synthetic oligonucleotide
  Antisense strand to SEQ ID NO: 1115516
uuuguuaacagaaaugcgu

SEQ ID NO: 1115518 - RNA, 19 nt, Artificial Sequence
  Description of Artificial Sequence: Synthetic oligonucleotide
  Sense strand starting at position 775 of SEQ ID NO: 915910
agacauaaaugccuacgaa

SEQ ID NO: 1115519 - RNA, 19 nt, Artificial Sequence
  Description of Artificial Sequence: Synthetic oligonucleotide
  Antisense strand to SEQ ID NO: 1115518
uucguaggcauuuaugucu

SEQ ID NO: 1115520 - RNA, 19 nt, Artificial Sequence
  Description of Artificial Sequence: Synthetic oligonucleotide
  Sense strand starting at position 817 of SEQ ID NO: 915910
gacaaagaugccugccaga

SEQ ID NO: 1115521 - RNA, 19 nt, Artificial Sequence
  Description of Artificial Sequence: Synthetic oligonucleotide
  Antisense strand to SEQ ID NO: 1115520
ucuggcaggcaucuuuguc

SEQ ID NO: 1115522 - RNA, 19 nt, Artificial Sequence
  Description of Artificial Sequence: Synthetic oligonucleotide
  Sense strand starting at position 846 of SEQ ID NO: 915910
gcuucugaacccuaaaggu

SEQ ID NO: 1115523 - RNA, 19 nt, Artificial Sequence
  Description of Artificial Sequence: Synthetic oligonucleotide
  Antisense strand to SEQ ID NO: 1115522
accuuuaggguucagaagc

SEQ ID NO: 1115524 - RNA, 19 nt, Artificial Sequence
  Description of Artificial Sequence: Synthetic oligonucleotide
  Sense strand starting at position 855 of SEQ ID NO: 915910
cccuaaagguucucaaaga

SEQ ID NO: 1115525 - RNA, 19 nt, Artificial Sequence
  Description of Artificial Sequence: Synthetic oligonucleotide
  Antisense strand to SEQ ID NO: 1115524
ucuuugagaaccuuuaggg

SEQ ID NO: 1115526 - RNA, 19 nt, Artificial Sequence
  Description of Artificial Sequence: Synthetic oligonucleotide
  Sense strand starting at position 971 of SEQ ID NO: 915910
cgucgaucaaagugagaaa

SEQ ID NO: 1115527 - RNA, 19 nt, Artificial Sequence
  Description of Artificial Sequence: Synthetic oligonucleotide
  Antisense strand to SEQ ID NO: 1115526
uuucucacuuugaucgacg

SEQ ID NO: 1115528 - RNA, 19 nt, Artificial Sequence
  Description of Artificial Sequence: Synthetic oligonucleotide
  Sense strand starting at position 1070 of SEQ ID NO: 915910
gcccuugugucauuccuag

SEQ ID NO: 1115529 - RNA, 19 nt, Artificial Sequence
  Description of Artificial Sequence: Synthetic oligonucleotide
  Antisense strand to SEQ ID NO: 1115528
cuaggaaugacacaagggc

SEQ ID NO: 1115530 - RNA, 19 nt, Artificial Sequence
  Description of Artificial Sequence: Synthetic oligonucleotide
  Sense strand starting at position 1134 of SEQ ID NO: 915910
ggcgcaucucuccaggacu

SEQ ID NO: 1115531 - RNA, 19 nt, Artificial Sequence
  Description of Artificial Sequence: Synthetic oligonucleotide
  Antisense strand to SEQ ID NO: 1115530
aguccuggagagaugcgcc

SEQ ID NO: 1115532 - RNA, 19 nt, Artificial Sequence
  Description of Artificial Sequence: Synthetic oligonucleotide
  Sense strand starting at position 1179 of SEQ ID NO: 915910
gucgguugcccgcuagacu

SEQ ID NO: 1115533 - RNA, 19 nt, Artificial Sequence
  Description of Artificial Sequence: Synthetic oligonucleotide
  Antisense strand to SEQ ID NO: 1115532
agucuagcgggcaaccgac

SEQ ID NO: 1115534 - RNA, 19 nt, Artificial Sequence
  Description of Artificial Sequence: Synthetic oligonucleotide
  Sense strand starting at position 1435 of SEQ ID NO: 915910
ggcgguuucgggcuuuacu

SEQ ID NO: 1115535 - RNA, 19 nt, Artificial Sequence
  Description of Artificial Sequence: Synthetic oligonucleotide
  Antisense strand to SEQ ID NO: 1115534
aguaaagcccgaaaccgcc

SEQ ID NO: 1115536 - RNA, 19 nt, Artificial Sequence
  Description of Artificial Sequence: Synthetic oligonucleotide
  Sense strand starting at position 2268 of SEQ ID NO: 915910
gccaauugaccuugaccga

SEQ ID NO: 1115537 - RNA, 19 nt, Artificial Sequence
  Description of Artificial Sequence: Synthetic oligonucleotide
  Antisense strand to SEQ ID NO: 1115536
ucggucaaggucaauuggc

SEQ ID NO: 1115538 - RNA, 19 nt, Artificial Sequence
  Description of Artificial Sequence: Synthetic oligonucleotide
  Sense strand starting at position 2293 of SEQ ID NO: 915910
cccuguccucuuggaagga

SEQ ID NO: 1115539 - RNA, 19 nt, Artificial Sequence
  Description of Artificial Sequence: Synthetic oligonucleotide
  Antisense strand to SEQ ID NO: 1115538
uccuuccaagaggacaggg

SEQ ID NO: 1115540 - RNA, 19 nt, Artificial Sequence
  Description of Artificial Sequence: Synthetic oligonucleotide
  Sense strand starting at position 2320 of SEQ ID NO: 915910
gagugaaggcuuugacuuc

SEQ ID NO: 1115541 - RNA, 19 nt, Artificial Sequence
  Description of Artificial Sequence: Synthetic oligonucleotide
  Antisense strand to SEQ ID NO: 1115540
gaagucaaagccuucacuc

SEQ ID NO: 1115542 - RNA, 19 nt, Artificial Sequence
  Description of Artificial Sequence: Synthetic oligonucleotide
  Sense strand starting at position 2692 of SEQ ID NO: 915910
ugaguuguguccuuuaacc

SEQ ID NO: 1115543 - RNA, 19 nt, Artificial Sequence
  Description of Artificial Sequence: Synthetic oligonucleotide
  Antisense strand to SEQ ID NO: 1115542
gguuaaaggacacaacuca

SEQ ID NO: 1115544 - RNA, 19 nt, Artificial Sequence
  Description of Artificial Sequence: Synthetic oligonucleotide
  Sense strand starting at position 2694 of SEQ ID NO: 915910
aguuguguccuuuaaccca

SEQ ID NO: 1115545 - RNA, 19 nt, Artificial Sequence
  Description of Artificial Sequence: Synthetic oligonucleotide
  Antisense strand to SEQ ID NO: 1115544
uggguuaaaggacacaacu

SEQ ID NO: 1115546 - RNA, 19 nt, Artificial Sequence
  Description of Artificial Sequence: Synthetic oligonucleotide
  Sense strand starting at position 2701 of SEQ ID NO: 915910
uccuuuaacccauguggaa

SEQ ID NO: 1115547 - RNA, 19 nt, Artificial Sequence
  Description of Artificial Sequence: Synthetic oligonucleotide
  Antisense strand to SEQ ID NO: 1115546
uuccacauggguuaaagga

SEQ ID NO: 1115548 - RNA, 19 nt, Artificial Sequence
  Description of Artificial Sequence: Synthetic oligonucleotide
  Sense strand starting at position 3062 of SEQ ID NO: 915910
aacguaacagaguguuaau

SEQ ID NO: 1115549 - RNA, 19 nt, Artificial Sequence
  Description of Artificial Sequence: Synthetic oligonucleotide
  Antisense strand to SEQ ID NO: 1115548
auuaacacucuguuacguu

SEQ ID NO: 1115550 - RNA, 19 nt, Artificial Sequence
  Description of Artificial Sequence: Synthetic oligonucleotide
  Sense strand starting at position 3151 of SEQ ID NO: 915910
ggaguuaugccuuauucuu

SEQ ID NO: 1115551 - RNA, 19 nt, Artificial Sequence
  Description of Artificial Sequence: Synthetic oligonucleotide
  Antisense strand to SEQ ID NO: 1115550
aagaauaaggcauaacucc

SEQ ID NO: 1115552 - RNA, 19 nt, Artificial Sequence
  Description of Artificial Sequence: Synthetic oligonucleotide
  Sense strand starting at position 3323 of SEQ ID NO: 915910
uggagagagcuuugccuau

SEQ ID NO: 1115553 - RNA, 19 nt, Artificial Sequence
  Description of Artificial Sequence: Synthetic oligonucleotide
  Antisense strand to SEQ ID NO: 1115552
auaggcaaagcucucucca

SEQ ID NO: 1115554 - RNA, 19 nt, Artificial Sequence
  Description of Artificial Sequence: Synthetic oligonucleotide
  Sense strand starting at position 3346 of SEQ ID NO: 915910
ggcccuuugggucggagaa

SEQ ID NO: 1115555 - RNA, 19 nt, Artificial Sequence
  Description of Artificial Sequence: Synthetic oligonucleotide
  Antisense strand to SEQ ID NO: 1115554
uucuccgacccaaagggcc

SEQ ID NO: 1115556 - RNA, 19 nt, Artificial Sequence
  Description of Artificial Sequence: Synthetic oligonucleotide
  Sense strand starting at position 3347 of SEQ ID NO: 915910
gcccuuugggucggagaau

SEQ ID NO: 1115557 - RNA, 19 nt, Artificial Sequence
  Description of Artificial Sequence: Synthetic oligonucleotide
  Antisense strand to SEQ ID NO: 1115556
auucuccgacccaaagggc

SEQ ID NO: 1115558 - RNA, 19 nt, Artificial Sequence
  Description of Artificial Sequence: Synthetic oligonucleotide
  Sense strand starting at position 3353 of SEQ ID NO: 915910
ugggucggagaaugugaua

SEQ ID NO: 1115559 - RNA, 19 nt, Artificial Sequence
  Description of Artificial Sequence: Synthetic oligonucleotide
  Antisense strand to SEQ ID NO: 1115558
uaucacauucuccgaccca

SEQ ID NO: 1115560 - RNA, 19 nt, Artificial Sequence
  Description of Artificial Sequence: Synthetic oligonucleotide
  Sense strand starting at position 3358 of SEQ ID NO: 915910
cggagaaugugauauaaag

SEQ ID NO: 1115561 - RNA, 19 nt, Artificial Sequence
  Description of Artificial Sequence: Synthetic oligonucleotide
  Antisense strand to SEQ ID NO: 1115560
cuuuauaucacauucuccg

SEQ ID NO: 1115562 - RNA, 19 nt, Artificial Sequence
  Description of Artificial Sequence: Synthetic oligonucleotide
  Sense strand starting at position 3366 of SEQ ID NO: 915910
gugauauaaagccgaagau

SEQ ID NO: 1115563 - RNA, 19 nt, Artificial Sequence
  Description of Artificial Sequence: Synthetic oligonucleotide
  Antisense strand to SEQ ID NO: 1115562
aucuucggcuuuauaucac

SEQ ID NO: 1115564 - RNA, 19 nt, Artificial Sequence
  Description of Artificial Sequence: Synthetic oligonucleotide
  Sense strand starting at position 3382 of SEQ ID NO: 915910
gauuuacucugccagacag

SEQ ID NO: 1115565 - RNA, 19 nt, Artificial Sequence
  Description of Artificial Sequence: Synthetic oligonucleotide
  Antisense strand to SEQ ID NO: 1115564
cugucuggcagaguaaauc

SEQ ID NO: 1115566 - RNA, 19 nt, Artificial Sequence
  Description of Artificial Sequence: Synthetic oligonucleotide
  Sense strand starting at position 3400 of SEQ ID NO: 915910
gucuuaagaggucacuaac

SEQ ID NO: 1115567 - RNA, 19 nt, Artificial Sequence
  Description of Artificial Sequence: Synthetic oligonucleotide
  Antisense strand to SEQ ID NO: 1115566
guuagugaccucuuaagac

SEQ ID NO: 1115568 - RNA, 19 nt, Artificial Sequence
  Description of Artificial Sequence: Synthetic oligonucleotide
  Sense strand starting at position 3403 of SEQ ID NO: 915910
uuaagaggucacuaacguu

SEQ ID NO: 1115569 - RNA, 19 nt, Artificial Sequence
  Description of Artificial Sequence: Synthetic oligonucleotide
  Antisense strand to SEQ ID NO: 1115568
aacguuagugaccucuuaa

SEQ ID NO: 1115570 - RNA, 19 nt, Artificial Sequence
  Description of Artificial Sequence: Synthetic oligonucleotide
  Sense strand starting at position 3410 of SEQ ID NO: 915910
gucacuaacguuuagcuau

SEQ ID NO: 1115571 - RNA, 19 nt, Artificial Sequence
  Description of Artificial Sequence: Synthetic oligonucleotide
  Antisense strand to SEQ ID NO: 1115570
auagcuaaacguuagugac

SEQ ID NO: 1115572 - RNA, 19 nt, Artificial Sequence
  Description of Artificial Sequence: Synthetic oligonucleotide
  Sense strand starting at position 3476 of SEQ ID NO: 915910
ggacaacuguuauuaaguc

SEQ ID NO: 1115573 - RNA, 19 nt, Artificial Sequence
  Description of Artificial Sequence: Synthetic oligonucleotide
  Antisense strand to SEQ ID NO: 1115572
gacuuaauaacaguugucc

SEQ ID NO: 1115574 - RNA, 19 nt, Artificial Sequence
  Description of Artificial Sequence: Synthetic oligonucleotide
  Sense strand starting at position 3482 of SEQ ID NO: 915910
cuguuauuaagucaguguu

SEQ ID NO: 1115575 - RNA, 19 nt, Artificial Sequence
  Description of Artificial Sequence: Synthetic oligonucleotide
  Antisense strand to SEQ ID NO: 1115574
aacacugacuuaauaacag

SEQ ID NO: 1115576 - RNA, 19 nt, Artificial Sequence
  Description of Artificial Sequence: Synthetic oligonucleotide
  Sense strand starting at position 3484 of SEQ ID NO: 915910
guuauuaagucaguguuuc

SEQ ID NO: 1115577 - RNA, 19 nt, Artificial Sequence
  Description of Artificial Sequence: Synthetic oligonucleotide
  Antisense strand to SEQ ID NO: 1115576
gaaacacugacuuaauaac

SEQ ID NO: 1115578 - RNA, 19 nt, Artificial Sequence
  Description of Artificial Sequence: Synthetic oligonucleotide
  Sense strand starting at position 3544 of SEQ ID NO: 915910
ggaagaguuucucagauac

SEQ ID NO: 1115579 - RNA, 19 nt, Artificial Sequence
  Description of Artificial Sequence: Synthetic oligonucleotide
  Antisense strand to SEQ ID NO: 1115578
guaucugagaaacucuucc

SEQ ID NO: 1115580 - RNA, 19 nt, Artificial Sequence
  Description of Artificial Sequence: Synthetic oligonucleotide
  Sense strand starting at position 3558 of SEQ ID NO: 915910
gauaccagccuucgaugau

SEQ ID NO: 1115581 - RNA, 19 nt, Artificial Sequence
  Description of Artificial Sequence: Synthetic oligonucleotide
  Antisense strand to SEQ ID NO: 1115580
aucaucgaaggcugguauc

SEQ ID NO: 1115582 - RNA, 19 nt, Artificial Sequence
  Description of Artificial Sequence: Synthetic oligonucleotide
  Sense strand starting at position 3561 of SEQ ID NO: 915910
accagccuucgaugauuaa

SEQ ID NO: 1115583 - RNA, 19 nt, Artificial Sequence
  Description of Artificial Sequence: Synthetic oligonucleotide
  Antisense strand to SEQ ID NO: 1115582
uuaaucaucgaaggcuggu

SEQ ID NO: 1115584 - RNA, 19 nt, Artificial Sequence
  Description of Artificial Sequence: Synthetic oligonucleotide
  Sense strand starting at position 3564 of SEQ ID NO: 915910
agccuucgaugauuaacaa

SEQ ID NO: 1115585 - RNA, 19 nt, Artificial Sequence
  Description of Artificial Sequence: Synthetic oligonucleotide
  Antisense strand to SEQ ID NO: 1115584
uuguuaaucaucgaaggcu

SEQ ID NO: 1115586 - RNA, 19 nt, Artificial Sequence
  Description of Artificial Sequence: Synthetic oligonucleotide
  Sense strand starting at position 3565 of SEQ ID NO: 915910
gccuucgaugauuaacaaa

SEQ ID NO: 1115587 - RNA, 19 nt, Artificial Sequence
  Description of Artificial Sequence: Synthetic oligonucleotide
  Antisense strand to SEQ ID NO: 1115586
uuuguuaaucaucgaaggc

SEQ ID NO: 1115588 - RNA, 19 nt, Artificial Sequence
  Description of Artificial Sequence: Synthetic oligonucleotide
  Sense strand starting at position 41 of SEQ ID NO: 915911
agaaguuauuaauuggcua

SEQ ID NO: 1115589 - RNA, 19 nt, Artificial Sequence
  Description of Artificial Sequence: Synthetic oligonucleotide
  Antisense strand to SEQ ID NO: 1115588
uagccaauuaauaacuucu

SEQ ID NO: 1115590 - RNA, 19 nt, Artificial Sequence
  Description of Artificial Sequence: Synthetic oligonucleotide
  Sense strand starting at position 64 of SEQ ID NO: 915911
aguccaauucguuauuaaa

SEQ ID NO: 1115591 - RNA, 19 nt, Artificial Sequence
  Description of Artificial Sequence: Synthetic oligonucleotide
  Antisense strand to SEQ ID NO: 1115590
uuuaauaacgaauuggacu

SEQ ID NO: 1115592 - RNA, 19 nt, Artificial Sequence
  Description of Artificial Sequence: Synthetic oligonucleotide
  Sense strand starting at position 66 of SEQ ID NO: 915911
uccaauucguuauuaaaug

SEQ ID NO: 1115593 - RNA, 19 nt, Artificial Sequence
  Description of Artificial Sequence: Synthetic oligonucleotide
  Antisense strand to SEQ ID NO: 1115592
cauuuaauaacgaauugga

SEQ ID NO: 1115594 - RNA, 19 nt, Artificial Sequence
  Description of Artificial Sequence: Synthetic oligonucleotide
  Sense strand starting at position 232 of SEQ ID NO: 915911
uuacaacuuccauguguaa

SEQ ID NO: 1115595 - RNA, 19 nt, Artificial Sequence
  Description of Artificial Sequence: Synthetic oligonucleotide
  Antisense strand to SEQ ID NO: 1115594
uuacacauggaaguuguaa

SEQ ID NO: 1115596 - RNA, 19 nt, Artificial Sequence
  Description of Artificial Sequence: Synthetic oligonucleotide
  Sense strand starting at position 239 of SEQ ID NO: 915911
uuccauguguaaguacaaa

SEQ ID NO: 1115597 - RNA, 19 nt, Artificial Sequence
  Description of Artificial Sequence: Synthetic oligonucleotide
  Antisense strand to SEQ ID NO: 1115596
uuuguacuuacacauggaa

SEQ ID NO: 1115598 - RNA, 19 nt, Artificial Sequence
  Description of Artificial Sequence: Synthetic oligonucleotide
  Sense strand starting at position 436 of SEQ ID NO: 915911
uucgacaacucuucgagaa

SEQ ID NO: 1115599 - RNA, 19 nt, Artificial Sequence
  Description of Artificial Sequence: Synthetic oligonucleotide
  Antisense strand to SEQ ID NO: 1115598
uucucgaagaguugucgaa

SEQ ID NO: 1115600 - RNA, 19 nt, Artificial Sequence
  Description of Artificial Sequence: Synthetic oligonucleotide
  Sense strand starting at position 437 of SEQ ID NO: 915911
ucgacaacucuucgagaau

SEQ ID NO: 1115601 - RNA, 19 nt, Artificial Sequence
  Description of Artificial Sequence: Synthetic oligonucleotide
  Antisense strand to SEQ ID NO: 1115600
auucucgaagaguugucga

SEQ ID NO: 1115602 - RNA, 19 nt, Artificial Sequence
  Description of Artificial Sequence: Synthetic oligonucleotide
  Sense strand starting at position 505 of SEQ ID NO: 915911
ugcuuagaaugcccauaaa

SEQ ID NO: 1115603 - RNA, 19 nt, Artificial Sequence
  Description of Artificial Sequence: Synthetic oligonucleotide
  Antisense strand to SEQ ID NO: 1115602
uuuaugggcauucuaagca

SEQ ID NO: 1115604 - RNA, 19 nt, Artificial Sequence
  Description of Artificial Sequence: Synthetic oligonucleotide
  Sense strand starting at position 515 of SEQ ID NO: 915911
gcccauaaagacugauauc

SEQ ID NO: 1115605 - RNA, 19 nt, Artificial Sequence
  Description of Artificial Sequence: Synthetic oligonucleotide
  Antisense strand to SEQ ID NO: 1115604
gauaucagucuuuaugggc

SEQ ID NO: 1115606 - RNA, 19 nt, Artificial Sequence
  Description of Artificial Sequence: Synthetic oligonucleotide
  Sense strand starting at position 524 of SEQ ID NO: 915911
gacugauaucgcuacaaga

SEQ ID NO: 1115607 - RNA, 19 nt, Artificial Sequence
  Description of Artificial Sequence: Synthetic oligonucleotide
  Antisense strand to SEQ ID NO: 1115606
ucuuguagcgauaucaguc

SEQ ID NO: 1115608 - RNA, 19 nt, Artificial Sequence
  Description of Artificial Sequence: Synthetic oligonucleotide
  Sense strand starting at position 526 of SEQ ID NO: 915911
cugauaucgcuacaagaau

SEQ ID NO: 1115609 - RNA, 19 nt, Artificial Sequence
  Description of Artificial Sequence: Synthetic oligonucleotide
  Antisense strand to SEQ ID NO: 1115608
auucuuguagcgauaucag

SEQ ID NO: 1115610 - RNA, 19 nt, Artificial Sequence
  Description of Artificial Sequence: Synthetic oligonucleotide
  Sense strand starting at position 569 of SEQ ID NO: 915911
acaggacucaugugagcuu

SEQ ID NO: 1115611 - RNA, 19 nt, Artificial Sequence
  Description of Artificial Sequence: Synthetic oligonucleotide
  Antisense strand to SEQ ID NO: 1115610
aagcucacaugaguccugu

SEQ ID NO: 1115612 - RNA, 19 nt, Artificial Sequence
  Description of Artificial Sequence: Synthetic oligonucleotide
  Sense strand starting at position 658 of SEQ ID NO: 915911
acccucuguuaagcagaaa

SEQ ID NO: 1115613 - RNA, 19 nt, Artificial Sequence
  Description of Artificial Sequence: Synthetic oligonucleotide
  Antisense strand to SEQ ID NO: 1115612
uuucugcuuaacagagggu

SEQ ID NO: 1115614 - RNA, 19 nt, Artificial Sequence
  Description of Artificial Sequence: Synthetic oligonucleotide
  Sense strand starting at position 844 of SEQ ID NO: 915911
cugggaagaguuuggguaa

SEQ ID NO: 1115615 - RNA, 19 nt, Artificial Sequence
  Description of Artificial Sequence: Synthetic oligonucleotide
  Antisense strand to SEQ ID NO: 1115614
uuacccaaacucuucccag

SEQ ID NO: 1115616 - RNA, 19 nt, Artificial Sequence
  Description of Artificial Sequence: Synthetic oligonucleotide
  Sense strand starting at position 1005 of SEQ ID NO: 915911
accugauaccuaggcuaaa

SEQ ID NO: 1115617 - RNA, 19 nt, Artificial Sequence
  Description of Artificial Sequence: Synthetic oligonucleotide
  Antisense strand to SEQ ID NO: 1115616
uuuagccuagguaucaggu

SEQ ID NO: 1115618 - RNA, 19 nt, Artificial Sequence
  Description of Artificial Sequence: Synthetic oligonucleotide
  Sense strand starting at position 1016 of SEQ ID NO: 915911
aggcuaaagacauguguau

SEQ ID NO: 1115619 - RNA, 19 nt, Artificial Sequence
  Description of Artificial Sequence: Synthetic oligonucleotide
  Antisense strand to SEQ ID NO: 1115618
auacacaugucuuuagccu

SEQ ID NO: 1115620 - RNA, 19 nt, Artificial Sequence
  Description of Artificial Sequence: Synthetic oligonucleotide
  Sense strand starting at position 1074 of SEQ ID NO: 915911
aggcucauauccuuccaga

SEQ ID NO: 1115621 - RNA, 19 nt, Artificial Sequence
  Description of Artificial Sequence: Synthetic oligonucleotide
  Antisense strand to SEQ ID NO: 1115620
ucuggaaggauaugagccu

SEQ ID NO: 1115622 - RNA, 19 nt, Artificial Sequence
  Description of Artificial Sequence: Synthetic oligonucleotide
  Sense strand starting at position 1177 of SEQ ID NO: 915911
cugauaucaugucccugau

SEQ ID NO: 1115623 - RNA, 19 nt, Artificial Sequence
  Description of Artificial Sequence: Synthetic oligonucleotide
  Antisense strand to SEQ ID NO: 1115622
aucagggacaugauaucag

SEQ ID NO: 1115624 - RNA, 19 nt, Artificial Sequence
  Description of Artificial Sequence: Synthetic oligonucleotide
  Sense strand starting at position 1294 of SEQ ID NO: 915911
agaucaagaucuuuguucu

SEQ ID NO: 1115625 - RNA, 19 nt, Artificial Sequence
  Description of Artificial Sequence: Synthetic oligonucleotide
  Antisense strand to SEQ ID NO: 1115624
agaacaaagaucuugaucu

SEQ ID NO: 1115626 - RNA, 19 nt, Artificial Sequence
  Description of Artificial Sequence: Synthetic oligonucleotide
  Sense strand starting at position 1300 of SEQ ID NO: 915911
agaucuuuguucucaucua

SEQ ID NO: 1115627 - RNA, 19 nt, Artificial Sequence
  Description of Artificial Sequence: Synthetic oligonucleotide
  Antisense strand to SEQ ID NO: 1115626
uagaugagaacaaagaucu

SEQ ID NO: 1115628 - RNA, 19 nt, Artificial Sequence
  Description of Artificial Sequence: Synthetic oligonucleotide
  Sense strand starting at position 1451 of SEQ ID NO: 915911
uccauuaggcuccacuaga

SEQ ID NO: 1115629 - RNA, 19 nt, Artificial Sequence
  Description of Artificial Sequence: Synthetic oligonucleotide
  Antisense strand to SEQ ID NO: 1115628
ucuaguggagccuaaugga

SEQ ID NO: 1115630 - RNA, 19 nt, Artificial Sequence
  Description of Artificial Sequence: Synthetic oligonucleotide
  Sense strand starting at position 1817 of SEQ ID NO: 915911
ggagacucccgucagauca

SEQ ID NO: 1115631 - RNA, 19 nt, Artificial Sequence
  Description of Artificial Sequence: Synthetic oligonucleotide
  Antisense strand to SEQ ID NO: 1115630
ugaucugacgggagucucc

SEQ ID NO: 1115632 - RNA, 19 nt, Artificial Sequence
  Description of Artificial Sequence: Synthetic oligonucleotide
  Sense strand starting at position 1977 of SEQ ID NO: 915911
cgcucaacucucgcgagaa

SEQ ID NO: 1115633 - RNA, 19 nt, Artificial Sequence
  Description of Artificial Sequence: Synthetic oligonucleotide
  Antisense strand to SEQ ID NO: 1115632
uucucgcgagaguugagcg

SEQ ID NO: 1115634 - RNA, 19 nt, Artificial Sequence
  Description of Artificial Sequence: Synthetic oligonucleotide
  Sense strand starting at position 2122 of SEQ ID NO: 915911
gaguacuguccacacaggu

SEQ ID NO: 1115635 - RNA, 19 nt, Artificial Sequence
  Description of Artificial Sequence: Synthetic oligonucleotide
  Antisense strand to SEQ ID NO: 1115634
accuguguggacaguacuc

SEQ ID NO: 1115636 - RNA, 19 nt, Artificial Sequence
  Description of Artificial Sequence: Synthetic oligonucleotide
  Sense strand starting at position 2142 of SEQ ID NO: 915911
acacguguucggcugcaga

SEQ ID NO: 1115637 - RNA, 19 nt, Artificial Sequence
  Description of Artificial Sequence: Synthetic oligonucleotide
  Antisense strand to SEQ ID NO: 1115636
ucugcagccgaacacgugu

SEQ ID NO: 1115638 - RNA, 19 nt, Artificial Sequence
  Description of Artificial Sequence: Synthetic oligonucleotide
  Sense strand starting at position 2144 of SEQ ID NO: 915911
acguguucggcugcagaau

SEQ ID NO: 1115639 - RNA, 19 nt, Artificial Sequence
  Description of Artificial Sequence: Synthetic oligonucleotide
  Antisense strand to SEQ ID NO: 1115638
auucugcagccgaacacgu

SEQ ID NO: 1115640 - RNA, 19 nt, Artificial Sequence
  Description of Artificial Sequence: Synthetic oligonucleotide
  Sense strand starting at position 2156 of SEQ ID NO: 915911
gcagaaucuagcgggagaa

SEQ ID NO: 1115641 - RNA, 19 nt, Artificial Sequence
  Description of Artificial Sequence: Synthetic oligonucleotide
  Antisense strand to SEQ ID NO: 1115640
uucucccgcuagauucugc

SEQ ID NO: 1115642 - RNA, 19 nt, Artificial Sequence
  Description of Artificial Sequence: Synthetic oligonucleotide
  Sense strand starting at position 2157 of SEQ ID NO: 915911
cagaaucuagcgggagaaa

SEQ ID NO: 1115643 - RNA, 19 nt, Artificial Sequence
  Description of Artificial Sequence: Synthetic oligonucleotide
  Antisense strand to SEQ ID NO: 1115642
uuucucccgcuagauucug

SEQ ID NO: 1115644 - RNA, 19 nt, Artificial Sequence
  Description of Artificial Sequence: Synthetic oligonucleotide
  Sense strand starting at position 2247 of SEQ ID NO: 915911
cuuccuuaacggcaaagua

SEQ ID NO: 1115645 - RNA, 19 nt, Artificial Sequence
  Description of Artificial Sequence: Synthetic oligonucleotide
  Antisense strand to SEQ ID NO: 1115644
uacuuugccguuaaggaag

SEQ ID NO: 1115646 - RNA, 19 nt, Artificial Sequence
  Description of Artificial Sequence: Synthetic oligonucleotide
  Sense strand starting at position 2276 of SEQ ID NO: 915911
cccuuagcgcuagaaauga

SEQ ID NO: 1115647 - RNA, 19 nt, Artificial Sequence
  Description of Artificial Sequence: Synthetic oligonucleotide
  Antisense strand to SEQ ID NO: 1115646
ucauuucuagcgcuaaggg

SEQ ID NO: 1115648 - RNA, 19 nt, Artificial Sequence
  Description of Artificial Sequence: Synthetic oligonucleotide
  Sense strand starting at position 2752 of SEQ ID NO: 915911
acuccuaguguuugagaga

SEQ ID NO: 1115649 - RNA, 19 nt, Artificial Sequence
  Description of Artificial Sequence: Synthetic oligonucleotide
  Antisense strand to SEQ ID NO: 1115648
ucucucaaacacuaggagu

SEQ ID NO: 1115650 - RNA, 19 nt, Artificial Sequence
  Description of Artificial Sequence: Synthetic oligonucleotide
  Sense strand starting at position 2801 of SEQ ID NO: 915911
guugaauuaugaccuggga

SEQ ID NO: 1115651 - RNA, 19 nt, Artificial Sequence
  Description of Artificial Sequence: Synthetic oligonucleotide
  Antisense strand to SEQ ID NO: 1115650
ucccaggucauaauucaac

SEQ ID NO: 1115652 - RNA, 19 nt, Artificial Sequence
  Description of Artificial Sequence: Synthetic oligonucleotide
  Sense strand starting at position 2841 of SEQ ID NO: 915911
augcaaagucuauagucuu

SEQ ID NO: 1115653 - RNA, 19 nt, Artificial Sequence
  Description of Artificial Sequence: Synthetic oligonucleotide
  Antisense strand to SEQ ID NO: 1115652
aagacuauagacuuugcau

SEQ ID NO: 1115654 - RNA, 19 nt, Artificial Sequence
  Description of Artificial Sequence: Synthetic oligonucleotide
  Sense strand starting at position 3232 of SEQ ID NO: 915911
cgaauuguaguugacuuaa

SEQ ID NO: 1115655 - RNA, 19 nt, Artificial Sequence
  Description of Artificial Sequence: Synthetic oligonucleotide
  Antisense strand to SEQ ID NO: 1115654
uuaagucaacuacaauucg

SEQ ID NO: 1115656 - RNA, 19 nt, Artificial Sequence
  Description of Artificial Sequence: Synthetic oligonucleotide
  Sense strand starting at position 3449 of SEQ ID NO: 915911
agaggagucuuggcuucca

SEQ ID NO: 1115657 - RNA, 19 nt, Artificial Sequence
  Description of Artificial Sequence: Synthetic oligonucleotide
  Antisense strand to SEQ ID NO: 1115656
uggaagccaagacuccucu

SEQ ID NO: 1115658 - RNA, 19 nt, Artificial Sequence
  Description of Artificial Sequence: Synthetic oligonucleotide
  Sense strand starting at position 3765 of SEQ ID NO: 915911
ucuacaaaucgugguggaa

SEQ ID NO: 1115659 - RNA, 19 nt, Artificial Sequence
  Description of Artificial Sequence: Synthetic oligonucleotide
  Antisense strand to SEQ ID NO: 1115658
uuccaccacgauuuguaga

SEQ ID NO: 1115660 - RNA, 19 nt, Artificial Sequence
  Description of Artificial Sequence: Synthetic oligonucleotide
  Sense strand starting at position 3768 of SEQ ID NO: 915911
acaaaucgugguggaacaa

SEQ ID NO: 1115661 - RNA, 19 nt, Artificial Sequence
  Description of Artificial Sequence: Synthetic oligonucleotide
  Antisense strand to SEQ ID NO: 1115660
uuguuccaccacgauuugu

SEQ ID NO: 1115662 - RNA, 19 nt, Artificial Sequence
  Description of Artificial Sequence: Synthetic oligonucleotide
  Sense strand starting at position 3769 of SEQ ID NO: 915911
caaaucgugguggaacaau

SEQ ID NO: 1115663 - RNA, 19 nt, Artificial Sequence
  Description of Artificial Sequence: Synthetic oligonucleotide
  Antisense strand to SEQ ID NO: 1115662
auuguuccaccacgauuug

SEQ ID NO: 1115664 - RNA, 19 nt, Artificial Sequence
  Description of Artificial Sequence: Synthetic oligonucleotide
  Sense strand starting at position 3780 of SEQ ID NO: 915911
ggaacaauuggcuaucgcu

SEQ ID NO: 1115665 - RNA, 19 nt, Artificial Sequence
  Description of Artificial Sequence: Synthetic oligonucleotide
  Antisense strand to SEQ ID NO: 1115664
agcgauagccaauuguucc

SEQ ID NO: 1115666 - RNA, 19 nt, Artificial Sequence
  Description of Artificial Sequence: Synthetic oligonucleotide
  Sense strand starting at position 3799 of SEQ ID NO: 915911
guauacaugcaauagcuaa

SEQ ID NO: 1115667 - RNA, 19 nt, Artificial Sequence
  Description of Artificial Sequence: Synthetic oligonucleotide
  Antisense strand to SEQ ID NO: 1115666
uuagcuauugcauguauac

SEQ ID NO: 1115668 - RNA, 19 nt, Artificial Sequence
  Description of Artificial Sequence: Synthetic oligonucleotide
  Sense strand starting at position 53 of SEQ ID NO: 915912
aaaucuuggguuuaauagu

SEQ ID NO: 1115669 - RNA, 19 nt, Artificial Sequence
  Description of Artificial Sequence: Synthetic oligonucleotide
  Antisense strand to SEQ ID NO: 1115668
acuauuaaacccaagauuu

SEQ ID NO: 1115670 - RNA, 19 nt, Artificial Sequence
  Description of Artificial Sequence: Synthetic oligonucleotide
  Sense strand starting at position 64 of SEQ ID NO: 915912
uuaauagugcccuagucaa

SEQ ID NO: 1115671 - RNA, 19 nt, Artificial Sequence
  Description of Artificial Sequence: Synthetic oligonucleotide
  Antisense strand to SEQ ID NO: 1115670
uugacuagggcacuauuaa

SEQ ID NO: 1115672 - RNA, 19 nt, Artificial Sequence
  Description of Artificial Sequence: Synthetic oligonucleotide
  Sense strand starting at position 88 of SEQ ID NO: 915912
ucaccaauucuagggcaga

SEQ ID NO: 1115673 - RNA, 19 nt, Artificial Sequence
  Description of Artificial Sequence: Synthetic oligonucleotide
  Antisense strand to SEQ ID NO: 1115672
ucugcccuagaauugguga

SEQ ID NO: 1115674 - RNA, 19 nt, Artificial Sequence
  Description of Artificial Sequence: Synthetic oligonucleotide
  Sense strand starting at position 179 of SEQ ID NO: 915912
cugaauguccaauagcaau

SEQ ID NO: 1115675 - RNA, 19 nt, Artificial Sequence
  Description of Artificial Sequence: Synthetic oligonucleotide
  Antisense strand to SEQ ID NO: 1115674
auugcuauuggacauucag

SEQ ID NO: 1115676 - RNA, 19 nt, Artificial Sequence
  Description of Artificial Sequence: Synthetic oligonucleotide
  Sense strand starting at position 196 of SEQ ID NO: 915912
augcacuuacugugaaaua

SEQ ID NO: 1115677 - RNA, 19 nt, Artificial Sequence
  Description of Artificial Sequence: Synthetic oligonucleotide
  Antisense strand to SEQ ID NO: 1115676
uauuucacaguaagugcau

SEQ ID NO: 1115678 - RNA, 19 nt, Artificial Sequence
  Description of Artificial Sequence: Synthetic oligonucleotide
  Sense strand starting at position 250 of SEQ ID NO: 915912
agcaaugaauuggucucaa

SEQ ID NO: 1115679 - RNA, 19 nt, Artificial Sequence
  Description of Artificial Sequence: Synthetic oligonucleotide
  Antisense strand to SEQ ID NO: 1115678
uugagaccaauucauugcu

SEQ ID NO: 1115680 - RNA, 19 nt, Artificial Sequence
  Description of Artificial Sequence: Synthetic oligonucleotide
  Sense strand starting at position 284 of SEQ ID NO: 915912
acuucuuggccagggagaa

SEQ ID NO: 1115681 - RNA, 19 nt, Artificial Sequence
  Description of Artificial Sequence: Synthetic oligonucleotide
  Antisense strand to SEQ ID NO: 1115680
uucucccuggccaagaagu

SEQ ID NO: 1115682 - RNA, 19 nt, Artificial Sequence
  Description of Artificial Sequence: Synthetic oligonucleotide
  Sense strand starting at position 285 of SEQ ID NO: 915912
cuucuuggccagggagaaa

SEQ ID NO: 1115683 - RNA, 19 nt, Artificial Sequence
  Description of Artificial Sequence: Synthetic oligonucleotide
  Antisense strand to SEQ ID NO: 1115682
uuucucccuggccaagaag

SEQ ID NO: 1115684 - RNA, 19 nt, Artificial Sequence
  Description of Artificial Sequence: Synthetic oligonucleotide
  Sense strand starting at position 297 of SEQ ID NO: 915912
ggagaaaggcuucagcuga

SEQ ID NO: 1115685 - RNA, 19 nt, Artificial Sequence
  Description of Artificial Sequence: Synthetic oligonucleotide
  Antisense strand to SEQ ID NO: 1115684
ucagcugaagccuuucucc

SEQ ID NO: 1115686 - RNA, 19 nt, Artificial Sequence
  Description of Artificial Sequence: Synthetic oligonucleotide
  Sense strand starting at position 460 of SEQ ID NO: 915912
agaaguuauuaauuggcua

SEQ ID NO: 1115687 - RNA, 19 nt, Artificial Sequence
  Description of Artificial Sequence: Synthetic oligonucleotide
  Antisense strand to SEQ ID NO: 1115686
uagccaauuaauaacuucu

SEQ ID NO: 1115688 - RNA, 19 nt, Artificial Sequence
  Description of Artificial Sequence: Synthetic oligonucleotide
  Sense strand starting at position 483 of SEQ ID NO: 915912
aguccaauucguuauuaaa

SEQ ID NO: 1115689 - RNA, 19 nt, Artificial Sequence
  Description of Artificial Sequence: Synthetic oligonucleotide
  Antisense strand to SEQ ID NO: 1115688
uuuaauaacgaauuggacu

SEQ ID NO: 1115690 - RNA, 19 nt, Artificial Sequence
  Description of Artificial Sequence: Synthetic oligonucleotide
  Sense strand starting at position 485 of SEQ ID NO: 915912
uccaauucguuauuaaaug

SEQ ID NO: 1115691 - RNA, 19 nt, Artificial Sequence
  Description of Artificial Sequence: Synthetic oligonucleotide
  Antisense strand to SEQ ID NO: 1115690
cauuuaauaacgaauugga

SEQ ID NO: 1115692 - RNA, 19 nt, Artificial Sequence
  Description of Artificial Sequence: Synthetic oligonucleotide
  Sense strand starting at position 855 of SEQ ID NO: 915912
uucgacaacucuucgagaa

SEQ ID NO: 1115693 - RNA, 19 nt, Artificial Sequence
  Description of Artificial Sequence: Synthetic oligonucleotide
  Antisense strand to SEQ ID NO: 1115692
uucucgaagaguugucgaa

SEQ ID NO: 1115694 - RNA, 19 nt, Artificial Sequence
  Description of Artificial Sequence: Synthetic oligonucleotide
  Sense strand starting at position 856 of SEQ ID NO: 915912
ucgacaacucuucgagaau

SEQ ID NO: 1115695 - RNA, 19 nt, Artificial Sequence
  Description of Artificial Sequence: Synthetic oligonucleotide
  Antisense strand to SEQ ID NO: 1115694
auucucgaagaguugucga

SEQ ID NO: 1115696 - RNA, 19 nt, Artificial Sequence
  Description of Artificial Sequence: Synthetic oligonucleotide
  Sense strand starting at position 924 of SEQ ID NO: 915912
ugcuuagaaugcccauaaa

SEQ ID NO: 1115697 - RNA, 19 nt, Artificial Sequence
  Description of Artificial Sequence: Synthetic oligonucleotide
  Antisense strand to SEQ ID NO: 1115696
uuuaugggcauucuaagca

SEQ ID NO: 1115698 - RNA, 19 nt, Artificial Sequence
  Description of Artificial Sequence: Synthetic oligonucleotide
  Sense strand starting at position 934 of SEQ ID NO: 915912
gcccauaaagacugauauc

SEQ ID NO: 1115699 - RNA, 19 nt, Artificial Sequence
  Description of Artificial Sequence: Synthetic oligonucleotide
  Antisense strand to SEQ ID NO: 1115698
gauaucagucuuuaugggc

SEQ ID NO: 1115700 - RNA, 19 nt, Artificial Sequence
  Description of Artificial Sequence: Synthetic oligonucleotide
  Sense strand starting at position 943 of SEQ ID NO: 915912
gacugauaucgcuacaaga

SEQ ID NO: 1115701 - RNA, 19 nt, Artificial Sequence
  Description of Artificial Sequence: Synthetic oligonucleotide
  Antisense strand to SEQ ID NO: 1115700
ucuuguagcgauaucaguc

SEQ ID NO: 1115702 - RNA, 19 nt, Artificial Sequence
  Description of Artificial Sequence: Synthetic oligonucleotide
  Sense strand starting at position 945 of SEQ ID NO: 915912
cugauaucgcuacaagaau

SEQ ID NO: 1115703 - RNA, 19 nt, Artificial Sequence
  Description of Artificial Sequence: Synthetic oligonucleotide
  Antisense strand to SEQ ID NO: 1115702
auucuuguagcgauaucag

SEQ ID NO: 1115704 - RNA, 19 nt, Artificial Sequence
  Description of Artificial Sequence: Synthetic oligonucleotide
  Sense strand starting at position 988 of SEQ ID NO: 915912
acaggacucaugugagcuu

SEQ ID NO: 1115705 - RNA, 19 nt, Artificial Sequence
  Description of Artificial Sequence: Synthetic oligonucleotide
  Antisense strand to SEQ ID NO: 1115704
aagcucacaugaguccugu

SEQ ID NO: 1115706 - RNA, 19 nt, Artificial Sequence
  Description of Artificial Sequence: Synthetic oligonucleotide
  Sense strand starting at position 1077 of SEQ ID NO: 915912
acccucuguuaagcagaaa

SEQ ID NO: 1115707 - RNA, 19 nt, Artificial Sequence
  Description of Artificial Sequence: Synthetic oligonucleotide
  Antisense strand to SEQ ID NO: 1115706
uuucugcuuaacagagggu

SEQ ID NO: 1115708 - RNA, 19 nt, Artificial Sequence
  Description of Artificial Sequence: Synthetic oligonucleotide
  Sense strand starting at position 1263 of SEQ ID NO: 915912
cugggaagaguuuggguaa

SEQ ID NO: 1115709 - RNA, 19 nt, Artificial Sequence
  Description of Artificial Sequence: Synthetic oligonucleotide
  Antisense strand to SEQ ID NO: 1115708
uuacccaaacucuucccag

SEQ ID NO: 1115710 - RNA, 19 nt, Artificial Sequence
  Description of Artificial Sequence: Synthetic oligonucleotide
  Sense strand starting at position 1424 of SEQ ID NO: 915912
accugauaccuaggcuaaa

SEQ ID NO: 1115711 - RNA, 19 nt, Artificial Sequence
  Description of Artificial Sequence: Synthetic oligonucleotide
  Antisense strand to SEQ ID NO: 1115710
uuuagccuagguaucaggu

SEQ ID NO: 1115712 - RNA, 19 nt, Artificial Sequence
  Description of Artificial Sequence: Synthetic oligonucleotide
  Sense strand starting at position 1435 of SEQ ID NO: 915912
aggcuaaagacauguguau

SEQ ID NO: 1115713 - RNA, 19 nt, Artificial Sequence
  Description of Artificial Sequence: Synthetic oligonucleotide
  Antisense strand to SEQ ID NO: 1115712
auacacaugucuuuagccu

SEQ ID NO: 1115714 - RNA, 19 nt, Artificial Sequence
  Description of Artificial Sequence: Synthetic oligonucleotide
  Sense strand starting at position 1493 of SEQ ID NO: 915912
aggcucauauccuuccaga

SEQ ID NO: 1115715 - RNA, 19 nt, Artificial Sequence
  Description of Artificial Sequence: Synthetic oligonucleotide
  Antisense strand to SEQ ID NO: 1115714
ucuggaaggauaugagccu

SEQ ID NO: 1115716 - RNA, 19 nt, Artificial Sequence
  Description of Artificial Sequence: Synthetic oligonucleotide
  Sense strand starting at position 1596 of SEQ ID NO: 915912
cugauaucaugucccugau

SEQ ID NO: 1115717 - RNA, 19 nt, Artificial Sequence
  Description of Artificial Sequence: Synthetic oligonucleotide
  Antisense strand to SEQ ID NO: 1115716
aucagggacaugauaucag

SEQ ID NO: 1115718 - RNA, 19 nt, Artificial Sequence
  Description of Artificial Sequence: Synthetic oligonucleotide
  Sense strand starting at position 1713 of SEQ ID NO: 915912
agaucaagaucuuuguucu

SEQ ID NO: 1115719 - RNA, 19 nt, Artificial Sequence
  Description of Artificial Sequence: Synthetic oligonucleotide
  Antisense strand to SEQ ID NO: 1115718
agaacaaagaucuugaucu

SEQ ID NO: 1115720 - RNA, 19 nt, Artificial Sequence
  Description of Artificial Sequence: Synthetic oligonucleotide
  Sense strand starting at position 1870 of SEQ ID NO: 915912
uccauuaggcuccacuaga

SEQ ID NO: 1115721 - RNA, 19 nt, Artificial Sequence
  Description of Artificial Sequence: Synthetic oligonucleotide
  Antisense strand to SEQ ID NO: 1115720
ucuaguggagccuaaugga

SEQ ID NO: 1115722 - RNA, 19 nt, Artificial Sequence
  Description of Artificial Sequence: Synthetic oligonucleotide
  Sense strand starting at position 2236 of SEQ ID NO: 915912
ggagacucccgucagauca

SEQ ID NO: 1115723 - RNA, 19 nt, Artificial Sequence
  Description of Artificial Sequence: Synthetic oligonucleotide
  Antisense strand to SEQ ID NO: 1115722
ugaucugacgggagucucc

SEQ ID NO: 1115724 - RNA, 19 nt, Artificial Sequence
  Description of Artificial Sequence: Synthetic oligonucleotide
  Sense strand starting at position 2396 of SEQ ID NO: 915912
cgcucaacucucgcgagaa

SEQ ID NO: 1115725 - RNA, 19 nt, Artificial Sequence
  Description of Artificial Sequence: Synthetic oligonucleotide
  Antisense strand to SEQ ID NO: 1115724
uucucgcgagaguugagcg

SEQ ID NO: 1115726 - RNA, 19 nt, Artificial Sequence
  Description of Artificial Sequence: Synthetic oligonucleotide
  Sense strand starting at position 2541 of SEQ ID NO: 915912
gaguacuguccacacaggu

SEQ ID NO: 1115727 - RNA, 19 nt, Artificial Sequence
  Description of Artificial Sequence: Synthetic oligonucleotide
  Antisense strand to SEQ ID NO: 1115726
accuguguggacaguacuc

SEQ ID NO: 1115728 - RNA, 19 nt, Artificial Sequence
  Description of Artificial Sequence: Synthetic oligonucleotide
  Sense strand starting at position 2561 of SEQ ID NO: 915912
acacguguucggcugcaga

SEQ ID NO: 1115729 - RNA, 19 nt, Artificial Sequence
  Description of Artificial Sequence: Synthetic oligonucleotide
  Antisense strand to SEQ ID NO: 1115728
ucugcagccgaacacgugu

SEQ ID NO: 1115730 - RNA, 19 nt, Artificial Sequence
  Description of Artificial Sequence: Synthetic oligonucleotide
  Sense strand starting at position 2563 of SEQ ID NO: 915912
acguguucggcugcagaau

SEQ ID NO: 1115731 - RNA, 19 nt, Artificial Sequence
  Description of Artificial Sequence: Synthetic oligonucleotide
  Antisense strand to SEQ ID NO: 1115730
auucugcagccgaacacgu

SEQ ID NO: 1115732 - RNA, 19 nt, Artificial Sequence
  Description of Artificial Sequence: Synthetic oligonucleotide
  Sense strand starting at position 2575 of SEQ ID NO: 915912
gcagaaucuagcgggagaa

SEQ ID NO: 1115733 - RNA, 19 nt, Artificial Sequence
  Description of Artificial Sequence: Synthetic oligonucleotide
  Antisense strand to SEQ ID NO: 1115732
uucucccgcuagauucugc

SEQ ID NO: 1115734 - RNA, 19 nt, Artificial Sequence
  Description of Artificial Sequence: Synthetic oligonucleotide
  Sense strand starting at position 2576 of SEQ ID NO: 915912
cagaaucuagcgggagaaa

SEQ ID NO: 1115735 - RNA, 19 nt, Artificial Sequence
  Description of Artificial Sequence: Synthetic oligonucleotide
  Antisense strand to SEQ ID NO: 1115734
uuucucccgcuagauucug

SEQ ID NO: 1115736 - RNA, 19 nt, Artificial Sequence
  Description of Artificial Sequence: Synthetic oligonucleotide
  Sense strand starting at position 2666 of SEQ ID NO: 915912
cuuccuuaacggcaaagua

SEQ ID NO: 1115737 - RNA, 19 nt, Artificial Sequence
  Description of Artificial Sequence: Synthetic oligonucleotide
  Antisense strand to SEQ ID NO: 1115736
uacuuugccguuaaggaag

SEQ ID NO: 1115738 - RNA, 19 nt, Artificial Sequence
  Description of Artificial Sequence: Synthetic oligonucleotide
  Sense strand starting at position 2695 of SEQ ID NO: 915912
cccuuagcgcuagaaauga

SEQ ID NO: 1115739 - RNA, 19 nt, Artificial Sequence
  Description of Artificial Sequence: Synthetic oligonucleotide
  Antisense strand to SEQ ID NO: 1115738
ucauuucuagcgcuaaggg

SEQ ID NO: 1115740 - RNA, 19 nt, Artificial Sequence
  Description of Artificial Sequence: Synthetic oligonucleotide
  Sense strand starting at position 3171 of SEQ ID NO: 915912
acuccuaguguuugagaga

SEQ ID NO: 1115741 - RNA, 19 nt, Artificial Sequence
  Description of Artificial Sequence: Synthetic oligonucleotide
  Antisense strand to SEQ ID NO: 1115740
ucucucaaacacuaggagu

SEQ ID NO: 1115742 - RNA, 19 nt, Artificial Sequence
  Description of Artificial Sequence: Synthetic oligonucleotide
  Sense strand starting at position 3220 of SEQ ID NO: 915912
guugaauuaugaccuggga

SEQ ID NO: 1115743 - RNA, 19 nt, Artificial Sequence
  Description of Artificial Sequence: Synthetic oligonucleotide
  Antisense strand to SEQ ID NO: 1115742
ucccaggucauaauucaac

SEQ ID NO: 1115744 - RNA, 19 nt, Artificial Sequence
  Description of Artificial Sequence: Synthetic oligonucleotide
  Sense strand starting at position 3260 of SEQ ID NO: 915912
augcaaagucuauagucuu

SEQ ID NO: 1115745 - RNA, 19 nt, Artificial Sequence
  Description of Artificial Sequence: Synthetic oligonucleotide
  Antisense strand to SEQ ID NO: 1115744
aagacuauagacuuugcau

SEQ ID NO: 1115746 - RNA, 19 nt, Artificial Sequence
  Description of Artificial Sequence: Synthetic oligonucleotide
  Sense strand starting at position 3651 of SEQ ID NO: 915912
cgaauuguaguugacuuaa

SEQ ID NO: 1115747 - RNA, 19 nt, Artificial Sequence
  Description of Artificial Sequence: Synthetic oligonucleotide
  Antisense strand to SEQ ID NO: 1115746
uuaagucaacuacaauucg

SEQ ID NO: 1115748 - RNA, 19 nt, Artificial Sequence
  Description of Artificial Sequence: Synthetic oligonucleotide
  Sense strand starting at position 20 of SEQ ID NO: 915913
ggaaauguaaaguguacca

SEQ ID NO: 1115749 - RNA, 19 nt, Artificial Sequence
  Description of Artificial Sequence: Synthetic oligonucleotide
  Antisense strand to SEQ ID NO: 1115748
ugguacacuuuacauuucc

SEQ ID NO: 1115750 - RNA, 19 nt, Artificial Sequence
  Description of Artificial Sequence: Synthetic oligonucleotide
  Sense strand starting at position 109 of SEQ ID NO: 915913
ccugaaauagcauguggua

SEQ ID NO: 1115751 - RNA, 19 nt, Artificial Sequence
  Description of Artificial Sequence: Synthetic oligonucleotide
  Antisense strand to SEQ ID NO: 1115750
uaccacaugcuauuucagg

SEQ ID NO: 1115752 - RNA, 19 nt, Artificial Sequence
  Description of Artificial Sequence: Synthetic oligonucleotide
  Sense strand starting at position 111 of SEQ ID NO: 915913
ugaaauagcaugugguaga

SEQ ID NO: 1115753 - RNA, 19 nt, Artificial Sequence
  Description of Artificial Sequence: Synthetic oligonucleotide
  Antisense strand to SEQ ID NO: 1115752
ucuaccacaugcuauuuca

SEQ ID NO: 1115754 - RNA, 19 nt, Artificial Sequence
  Description of Artificial Sequence: Synthetic oligonucleotide
  Sense strand starting at position 194 of SEQ ID NO: 915913
auauacuucuguguagaag

SEQ ID NO: 1115755 - RNA, 19 nt, Artificial Sequence
  Description of Artificial Sequence: Synthetic oligonucleotide
  Antisense strand to SEQ ID NO: 1115754
cuucuacacagaaguauau

SEQ ID NO: 1115756 - RNA, 19 nt, Artificial Sequence
  Description of Artificial Sequence: Synthetic oligonucleotide
  Sense strand starting at position 195 of SEQ ID NO: 915913
uauacuucuguguagaaga

SEQ ID NO: 1115757 - RNA, 19 nt, Artificial Sequence
  Description of Artificial Sequence: Synthetic oligonucleotide
  Antisense strand to SEQ ID NO: 1115756
ucuucuacacagaaguaua

SEQ ID NO: 1115758 - RNA, 19 nt, Artificial Sequence
  Description of Artificial Sequence: Synthetic oligonucleotide
  Sense strand starting at position 239 of SEQ ID NO: 915913
ggucaaauauucucuugag

SEQ ID NO: 1115759 - RNA, 19 nt, Artificial Sequence
  Description of Artificial Sequence: Synthetic oligonucleotide
  Antisense strand to SEQ ID NO: 1115758
cucaagagaauauuugacc

SEQ ID NO: 1115760 - RNA, 19 nt, Artificial Sequence
  Description of Artificial Sequence: Synthetic oligonucleotide
  Sense strand starting at position 240 of SEQ ID NO: 915913
gucaaauauucucuugaga

SEQ ID NO: 1115761 - RNA, 19 nt, Artificial Sequence
  Description of Artificial Sequence: Synthetic oligonucleotide
  Antisense strand to SEQ ID NO: 1115760
ucucaagagaauauuugac

SEQ ID NO: 1115762 - RNA, 19 nt, Artificial Sequence
  Description of Artificial Sequence: Synthetic oligonucleotide
  Sense strand starting at position 352 of SEQ ID NO: 915913
gguaauauuuacuaauggu

SEQ ID NO: 1115763 - RNA, 19 nt, Artificial Sequence
  Description of Artificial Sequence: Synthetic oligonucleotide
  Antisense strand to SEQ ID NO: 1115762
accauuaguaaauauuacc

SEQ ID NO: 1115764 - RNA, 19 nt, Artificial Sequence
  Description of Artificial Sequence: Synthetic oligonucleotide
  Sense strand starting at position 394 of SEQ ID NO: 915913
ucccuaaauuaaccgagau

SEQ ID NO: 1115765 - RNA, 19 nt, Artificial Sequence
  Description of Artificial Sequence: Synthetic oligonucleotide
  Antisense strand to SEQ ID NO: 1115764
aucucgguuaauuuaggga

SEQ ID NO: 1115766 - RNA, 19 nt, Artificial Sequence
  Description of Artificial Sequence: Synthetic oligonucleotide
  Sense strand starting at position 486 of SEQ ID NO: 915913
ccaguuguuguauauauga

SEQ ID NO: 1115767 - RNA, 19 nt, Artificial Sequence
  Description of Artificial Sequence: Synthetic oligonucleotide
  Antisense strand to SEQ ID NO: 1115766
ucauauauacaacaacugg

SEQ ID NO: 1115768 - RNA, 19 nt, Artificial Sequence
  Description of Artificial Sequence: Synthetic oligonucleotide
  Sense strand starting at position 488 of SEQ ID NO: 915913
aguuguuguauauaugaac

SEQ ID NO: 1115769 - RNA, 19 nt, Artificial Sequence
  Description of Artificial Sequence: Synthetic oligonucleotide
  Antisense strand to SEQ ID NO: 1115768
guucauauauacaacaacu

SEQ ID NO: 1115770 - RNA, 19 nt, Artificial Sequence
  Description of Artificial Sequence: Synthetic oligonucleotide
  Sense strand starting at position 537 of SEQ ID NO: 915913
aguuucuuugcuuaguaag

SEQ ID NO: 1115771 - RNA, 19 nt, Artificial Sequence
  Description of Artificial Sequence: Synthetic oligonucleotide
  Antisense strand to SEQ ID NO: 1115770
cuuacuaagcaaagaaacu

SEQ ID NO: 1115772 - RNA, 19 nt, Artificial Sequence
  Description of Artificial Sequence: Synthetic oligonucleotide
  Sense strand starting at position 830 of SEQ ID NO: 915913
caggguaauggauguucuu

SEQ ID NO: 1115773 - RNA, 19 nt, Artificial Sequence
  Description of Artificial Sequence: Synthetic oligonucleotide
  Antisense strand to SEQ ID NO: 1115772
aagaacauccauuacccug

SEQ ID NO: 1115774 - RNA, 19 nt, Artificial Sequence
  Description of Artificial Sequence: Synthetic oligonucleotide
  Sense strand starting at position 836 of SEQ ID NO: 915913
aauggauguucuuucuaga

SEQ ID NO: 1115775 - RNA, 19 nt, Artificial Sequence
  Description of Artificial Sequence: Synthetic oligonucleotide
  Antisense strand to SEQ ID NO: 1115774
ucuagaaagaacauccauu

SEQ ID NO: 1115776 - RNA, 19 nt, Artificial Sequence
  Description of Artificial Sequence: Synthetic oligonucleotide
  Sense strand starting at position 1263 of SEQ ID NO: 915913
ugcacuucccgugagaaca

SEQ ID NO: 1115777 - RNA, 19 nt, Artificial Sequence
  Description of Artificial Sequence: Synthetic oligonucleotide
  Antisense strand to SEQ ID NO: 1115776
uguucucacgggaagugca

SEQ ID NO: 1115778 - RNA, 19 nt, Artificial Sequence
  Description of Artificial Sequence: Synthetic oligonucleotide
  Sense strand starting at position 1583 of SEQ ID NO: 915913
ugaauauugcgcuugcgca

SEQ ID NO: 1115779 - RNA, 19 nt, Artificial Sequence
  Description of Artificial Sequence: Synthetic oligonucleotide
  Antisense strand to SEQ ID NO: 1115778
ugcgcaagcgcaauauuca

SEQ ID NO: 1115780 - RNA, 19 nt, Artificial Sequence
  Description of Artificial Sequence: Synthetic oligonucleotide
  Sense strand starting at position 1721 of SEQ ID NO: 915913
cgccauaaugcggucuuga

SEQ ID NO: 1115781 - RNA, 19 nt, Artificial Sequence
  Description of Artificial Sequence: Synthetic oligonucleotide
  Antisense strand to SEQ ID NO: 1115780
ucaagaccgcauuauggcg

SEQ ID NO: 1115782 - RNA, 19 nt, Artificial Sequence
  Description of Artificial Sequence: Synthetic oligonucleotide
  Sense strand starting at position 2104 of SEQ ID NO: 915913
uuauuugaaugagggacau

SEQ ID NO: 1115783 - RNA, 19 nt, Artificial Sequence
  Description of Artificial Sequence: Synthetic oligonucleotide
  Antisense strand to SEQ ID NO: 1115782
augucccucauucaaauaa

SEQ ID NO: 1115784 - RNA, 19 nt, Artificial Sequence
  Description of Artificial Sequence: Synthetic oligonucleotide
  Sense strand starting at position 2206 of SEQ ID NO: 915913
uugaguggaucuuccucaa

SEQ ID NO: 1115785 - RNA, 19 nt, Artificial Sequence
  Description of Artificial Sequence: Synthetic oligonucleotide
  Antisense strand to SEQ ID NO: 1115784
uugaggaagauccacucaa

SEQ ID NO: 1115786 - RNA, 19 nt, Artificial Sequence
  Description of Artificial Sequence: Synthetic oligonucleotide
  Sense strand starting at position 2209 of SEQ ID NO: 915913
aguggaucuuccucaauca

SEQ ID NO: 1115787 - RNA, 19 nt, Artificial Sequence
  Description of Artificial Sequence: Synthetic oligonucleotide
  Antisense strand to SEQ ID NO: 1115786
ugauugaggaagauccacu

SEQ ID NO: 1115788 - RNA, 19 nt, Artificial Sequence
  Description of Artificial Sequence: Synthetic oligonucleotide
  Sense strand starting at position 2210 of SEQ ID NO: 915913
guggaucuuccucaaucaa

SEQ ID NO: 1115789 - RNA, 19 nt, Artificial Sequence
  Description of Artificial Sequence: Synthetic oligonucleotide
  Antisense strand to SEQ ID NO: 1115788
uugauugaggaagauccac

SEQ ID NO: 1115790 - RNA, 19 nt, Artificial Sequence
  Description of Artificial Sequence: Synthetic oligonucleotide
  Sense strand starting at position 2372 of SEQ ID NO: 915913
cagaauguacuuugaauug

SEQ ID NO: 1115791 - RNA, 19 nt, Artificial Sequence
  Description of Artificial Sequence: Synthetic oligonucleotide
  Antisense strand to SEQ ID NO: 1115790
caauucaaaguacauucug

SEQ ID NO: 1115792 - RNA, 19 nt, Artificial Sequence
  Description of Artificial Sequence: Synthetic oligonucleotide
  Sense strand starting at position 2514 of SEQ ID NO: 915913
ggagucggccuuuaaugaa

SEQ ID NO: 1115793 - RNA, 19 nt, Artificial Sequence
  Description of Artificial Sequence: Synthetic oligonucleotide
  Antisense strand to SEQ ID NO: 1115792
uucauuaaaggccgacucc

SEQ ID NO: 1115794 - RNA, 19 nt, Artificial Sequence
  Description of Artificial Sequence: Synthetic oligonucleotide
  Sense strand starting at position 2548 of SEQ ID NO: 915913
uggacaagucacugccuua

SEQ ID NO: 1115795 - RNA, 19 nt, Artificial Sequence
  Description of Artificial Sequence: Synthetic oligonucleotide
  Antisense strand to SEQ ID NO: 1115794
uaaggcagugacuugucca

SEQ ID NO: 1115796 - RNA, 19 nt, Artificial Sequence
  Description of Artificial Sequence: Synthetic oligonucleotide
  Sense strand starting at position 2559 of SEQ ID NO: 915913
cugccuuacugguuaagag

SEQ ID NO: 1115797 - RNA, 19 nt, Artificial Sequence
  Description of Artificial Sequence: Synthetic oligonucleotide
  Antisense strand to SEQ ID NO: 1115796
cucuuaaccaguaaggcag

SEQ ID NO: 1115798 - RNA, 19 nt, Artificial Sequence
  Description of Artificial Sequence: Synthetic oligonucleotide
  Sense strand starting at position 2560 of SEQ ID NO: 915913
ugccuuacugguuaagaga

SEQ ID NO: 1115799 - RNA, 19 nt, Artificial Sequence
  Description of Artificial Sequence: Synthetic oligonucleotide
  Antisense strand to SEQ ID NO: 1115798
ucucuuaaccaguaaggca

SEQ ID NO: 1115800 - RNA, 19 nt, Artificial Sequence
  Description of Artificial Sequence: Synthetic oligonucleotide
  Sense strand starting at position 2569 of SEQ ID NO: 915913
gguuaagagaucuggguuc

SEQ ID NO: 1115801 - RNA, 19 nt, Artificial Sequence
  Description of Artificial Sequence: Synthetic oligonucleotide
  Antisense strand to SEQ ID NO: 1115800
gaacccagaucucuuaacc

SEQ ID NO: 1115802 - RNA, 19 nt, Artificial Sequence
  Description of Artificial Sequence: Synthetic oligonucleotide
  Sense strand starting at position 2615 of SEQ ID NO: 915913
gguuccucggaauaagugu

SEQ ID NO: 1115803 - RNA, 19 nt, Artificial Sequence
  Description of Artificial Sequence: Synthetic oligonucleotide
  Antisense strand to SEQ ID NO: 1115802
acacuuauuccgaggaacc

SEQ ID NO: 1115804 - RNA, 19 nt, Artificial Sequence
  Description of Artificial Sequence: Synthetic oligonucleotide
  Sense strand starting at position 2660 of SEQ ID NO: 915913
uggcaaucaugacuauagu

SEQ ID NO: 1115805 - RNA, 19 nt, Artificial Sequence
  Description of Artificial Sequence: Synthetic oligonucleotide
  Antisense strand to SEQ ID NO: 1115804
acuauagucaugauugcca

SEQ ID NO: 1115806 - RNA, 19 nt, Artificial Sequence
  Description of Artificial Sequence: Synthetic oligonucleotide
  Sense strand starting at position 2661 of SEQ ID NO: 915913
ggcaaucaugacuauaguu

SEQ ID NO: 1115807 - RNA, 19 nt, Artificial Sequence
  Description of Artificial Sequence: Synthetic oligonucleotide
  Antisense strand to SEQ ID NO: 1115806
aacuauagucaugauugcc

SEQ ID NO: 1115808 - RNA, 19 nt, Artificial Sequence
  Description of Artificial Sequence: Synthetic oligonucleotide
  Sense strand starting at position 2666 of SEQ ID NO: 915913
ucaugacuauaguugaacu

SEQ ID NO: 1115809 - RNA, 19 nt, Artificial Sequence
  Description of Artificial Sequence: Synthetic oligonucleotide
  Antisense strand to SEQ ID NO: 1115808
aguucaacuauagucauga

SEQ ID NO: 1115810 - RNA, 19 nt, Artificial Sequence
  Description of Artificial Sequence: Synthetic oligonucleotide
  Sense strand starting at position 3062 of SEQ ID NO: 915913
aggcaagaauagccugaaa

SEQ ID NO: 1115811 - RNA, 19 nt, Artificial Sequence
  Description of Artificial Sequence: Synthetic oligonucleotide
  Antisense strand to SEQ ID NO: 1115810
uuucaggcuauucuugccu

SEQ ID NO: 1115812 - RNA, 19 nt, Artificial Sequence
  Description of Artificial Sequence: Synthetic oligonucleotide
  Sense strand starting at position 3189 of SEQ ID NO: 915913
ggugccuguccucaagaaa

SEQ ID NO: 1115813 - RNA, 19 nt, Artificial Sequence
  Description of Artificial Sequence: Synthetic oligonucleotide
  Antisense strand to SEQ ID NO: 1115812
uuucuugaggacaggcacc

SEQ ID NO: 1115814 - RNA, 19 nt, Artificial Sequence
  Description of Artificial Sequence: Synthetic oligonucleotide
  Sense strand starting at position 3192 of SEQ ID NO: 915913
gccuguccucaagaaaucu

SEQ ID NO: 1115815 - RNA, 19 nt, Artificial Sequence
  Description of Artificial Sequence: Synthetic oligonucleotide
  Antisense strand to SEQ ID NO: 1115814
agauuucuugaggacaggc

SEQ ID NO: 1115816 - RNA, 19 nt, Artificial Sequence
  Description of Artificial Sequence: Synthetic oligonucleotide
  Sense strand starting at position 3203 of SEQ ID NO: 915913
agaaaucuguacucuagug

SEQ ID NO: 1115817 - RNA, 19 nt, Artificial Sequence
  Description of Artificial Sequence: Synthetic oligonucleotide
  Antisense strand to SEQ ID NO: 1115816
cacuagaguacagauuucu

SEQ ID NO: 1115818 - RNA, 19 nt, Artificial Sequence
  Description of Artificial Sequence: Synthetic oligonucleotide
  Sense strand starting at position 3268 of SEQ ID NO: 915913
uuagaauaggguuguuaau

SEQ ID NO: 1115819 - RNA, 19 nt, Artificial Sequence
  Description of Artificial Sequence: Synthetic oligonucleotide
  Antisense strand to SEQ ID NO: 1115818
auuaacaacccuauucuaa

SEQ ID NO: 1115820 - RNA, 19 nt, Artificial Sequence
  Description of Artificial Sequence: Synthetic oligonucleotide
  Sense strand starting at position 3328 of SEQ ID NO: 915913
uaagguggccuuuagaaau

SEQ ID NO: 1115821 - RNA, 19 nt, Artificial Sequence
  Description of Artificial Sequence: Synthetic oligonucleotide
  Antisense strand to SEQ ID NO: 1115820
auuucuaaaggccaccuua

SEQ ID NO: 1115822 - RNA, 19 nt, Artificial Sequence
  Description of Artificial Sequence: Synthetic oligonucleotide
  Sense strand starting at position 3852 of SEQ ID NO: 915913
guaacaucauuagcacagu

SEQ ID NO: 1115823 - RNA, 19 nt, Artificial Sequence
  Description of Artificial Sequence: Synthetic oligonucleotide
  Antisense strand to SEQ ID NO: 1115822
acugugcuaaugauguuac

SEQ ID NO: 1115824 - RNA, 19 nt, Artificial Sequence
  Description of Artificial Sequence: Synthetic oligonucleotide
  Sense strand starting at position 3944 of SEQ ID NO: 915913
gcucaauuauaaguagaug

SEQ ID NO: 1115825 - RNA, 19 nt, Artificial Sequence
  Description of Artificial Sequence: Synthetic oligonucleotide
  Antisense strand to SEQ ID NO: 1115824
caucuacuuauaauugagc

SEQ ID NO: 1115826 - RNA, 19 nt, Artificial Sequence
  Description of Artificial Sequence: Synthetic oligonucleotide
  Sense strand starting at position 3952 of SEQ ID NO: 915913
auaaguagaugcucagaaa

SEQ ID NO: 1115827 - RNA, 19 nt, Artificial Sequence
  Description of Artificial Sequence: Synthetic oligonucleotide
  Antisense strand to SEQ ID NO: 1115826
uuucugagcaucuacuuau

SEQ ID NO: 1115828 - RNA, 19 nt, Artificial Sequence
  Description of Artificial Sequence: Synthetic oligonucleotide
  Sense strand starting at position 236 of SEQ ID NO: 915914
ugaauuccacagugccuua

SEQ ID NO: 1115829 - RNA, 19 nt, Artificial Sequence
  Description of Artificial Sequence: Synthetic oligonucleotide
  Antisense strand to SEQ ID NO: 1115828
uaaggcacuguggaauuca

SEQ ID NO: 1115830 - RNA, 19 nt, Artificial Sequence
  Description of Artificial Sequence: Synthetic oligonucleotide
  Sense strand starting at position 278 of SEQ ID NO: 915914
gugaacuagaucuggaucu

SEQ ID NO: 1115831 - RNA, 19 nt, Artificial Sequence
  Description of Artificial Sequence: Synthetic oligonucleotide
  Antisense strand to SEQ ID NO: 1115830
agauccagaucuaguucac

SEQ ID NO: 1115832 - RNA, 19 nt, Artificial Sequence
  Description of Artificial Sequence: Synthetic oligonucleotide
  Sense strand starting at position 313 of SEQ ID NO: 915914
ugucauguacgaucucguu

SEQ ID NO: 1115833 - RNA, 19 nt, Artificial Sequence
  Description of Artificial Sequence: Synthetic oligonucleotide
  Antisense strand to SEQ ID NO: 1115832
aacgagaucguacaugaca

SEQ ID NO: 1115834 - RNA, 19 nt, Artificial Sequence
  Description of Artificial Sequence: Synthetic oligonucleotide
  Sense strand starting at position 388 of SEQ ID NO: 915914
acaugugaauaaguuuaca

SEQ ID NO: 1115835 - RNA, 19 nt, Artificial Sequence
  Description of Artificial Sequence: Synthetic oligonucleotide
  Antisense strand to SEQ ID NO: 1115834
uguaaacuuauucacaugu

SEQ ID NO: 1115836 - RNA, 19 nt, Artificial Sequence
  Description of Artificial Sequence: Synthetic oligonucleotide
  Sense strand starting at position 455 of SEQ ID NO: 915914
uuaagccuugcagaauuaa

SEQ ID NO: 1115837 - RNA, 19 nt, Artificial Sequence
  Description of Artificial Sequence: Synthetic oligonucleotide
  Antisense strand to SEQ ID NO: 1115836
uuaauucugcaaggcuuaa

SEQ ID NO: 1115838 - RNA, 19 nt, Artificial Sequence
  Description of Artificial Sequence: Synthetic oligonucleotide
  Sense strand starting at position 503 of SEQ ID NO: 915914
uuggaauccucccuaagag

SEQ ID NO: 1115839 - RNA, 19 nt, Artificial Sequence
  Description of Artificial Sequence: Synthetic oligonucleotide
  Antisense strand to SEQ ID NO: 1115838
cucuuagggaggauuccaa

SEQ ID NO: 1115840 - RNA, 19 nt, Artificial Sequence
  Description of Artificial Sequence: Synthetic oligonucleotide
  Sense strand starting at position 575 of SEQ ID NO: 915914
agaacuuacuguucuaugu

SEQ ID NO: 1115841 - RNA, 19 nt, Artificial Sequence
  Description of Artificial Sequence: Synthetic oligonucleotide
  Antisense strand to SEQ ID NO: 1115840
acauagaacaguaaguucu

SEQ ID NO: 1115842 - RNA, 19 nt, Artificial Sequence
  Description of Artificial Sequence: Synthetic oligonucleotide
  Sense strand starting at position 615 of SEQ ID NO: 915914
cuuaauacucuacggacaa

SEQ ID NO: 1115843 - RNA, 19 nt, Artificial Sequence
  Description of Artificial Sequence: Synthetic oligonucleotide
  Antisense strand to SEQ ID NO: 1115842
uuguccguagaguauuaag

SEQ ID NO: 1115844 - RNA, 19 nt, Artificial Sequence
  Description of Artificial Sequence: Synthetic oligonucleotide
  Sense strand starting at position 683 of SEQ ID NO: 915914
auuuaaguauugcugcuua

SEQ ID NO: 1115845 - RNA, 19 nt, Artificial Sequence
  Description of Artificial Sequence: Synthetic oligonucleotide
  Antisense strand to SEQ ID NO: 1115844
uaagcagcaauacuuaaau

SEQ ID NO: 1115846 - RNA, 19 nt, Artificial Sequence
  Description of Artificial Sequence: Synthetic oligonucleotide
  Sense strand starting at position 688 of SEQ ID NO: 915914
aguauugcugcuuaaagua

SEQ ID NO: 1115847 - RNA, 19 nt, Artificial Sequence
  Description of Artificial Sequence: Synthetic oligonucleotide
  Antisense strand to SEQ ID NO: 1115846
uacuuuaagcagcaauacu

SEQ ID NO: 1115848 - RNA, 19 nt, Artificial Sequence
  Description of Artificial Sequence: Synthetic oligonucleotide
  Sense strand starting at position 721 of SEQ ID NO: 915914
ucugaaauacuacgugaau

SEQ ID NO: 1115849 - RNA, 19 nt, Artificial Sequence
  Description of Artificial Sequence: Synthetic oligonucleotide
  Antisense strand to SEQ ID NO: 1115848
auucacguaguauuucaga

SEQ ID NO: 1115850 - RNA, 19 nt, Artificial Sequence
  Description of Artificial Sequence: Synthetic oligonucleotide
  Sense strand starting at position 722 of SEQ ID NO: 915914
cugaaauacuacgugaaua

SEQ ID NO: 1115851 - RNA, 19 nt, Artificial Sequence
  Description of Artificial Sequence: Synthetic oligonucleotide
  Antisense strand to SEQ ID NO: 1115850
uauucacguaguauuucag

SEQ ID NO: 1115852 - RNA, 19 nt, Artificial Sequence
  Description of Artificial Sequence: Synthetic oligonucleotide
  Sense strand starting at position 804 of SEQ ID NO: 915914
acuccagaacgauguuaag

SEQ ID NO: 1115853 - RNA, 19 nt, Artificial Sequence
  Description of Artificial Sequence: Synthetic oligonucleotide
  Antisense strand to SEQ ID NO: 1115852
cuuaacaucguucuggagu

SEQ ID NO: 1115854 - RNA, 19 nt, Artificial Sequence
  Description of Artificial Sequence: Synthetic oligonucleotide
  Sense strand starting at position 885 of SEQ ID NO: 915914
auacuacagguuugaauua

SEQ ID NO: 1115855 - RNA, 19 nt, Artificial Sequence
  Description of Artificial Sequence: Synthetic oligonucleotide
  Antisense strand to SEQ ID NO: 1115854
uaauucaaaccuguaguau

SEQ ID NO: 1115856 - RNA, 19 nt, Artificial Sequence
  Description of Artificial Sequence: Synthetic oligonucleotide
  Sense strand starting at position 996 of SEQ ID NO: 915914
augacuagaugugaauuua

SEQ ID NO: 1115857 - RNA, 19 nt, Artificial Sequence
  Description of Artificial Sequence: Synthetic oligonucleotide
  Antisense strand to SEQ ID NO: 1115856
uaaauucacaucuagucau

SEQ ID NO: 1115858 - RNA, 19 nt, Artificial Sequence
  Description of Artificial Sequence: Synthetic oligonucleotide
  Sense strand starting at position 1094 of SEQ ID NO: 915914
augucaaagaguuggauac

SEQ ID NO: 1115859 - RNA, 19 nt, Artificial Sequence
  Description of Artificial Sequence: Synthetic oligonucleotide
  Antisense strand to SEQ ID NO: 1115858
guauccaacucuuugacau

SEQ ID NO: 1115860 - RNA, 19 nt, Artificial Sequence
  Description of Artificial Sequence: Synthetic oligonucleotide
  Sense strand starting at position 1095 of SEQ ID NO: 915914
ugucaaagaguuggauacu

SEQ ID NO: 1115861 - RNA, 19 nt, Artificial Sequence
  Description of Artificial Sequence: Synthetic oligonucleotide
  Antisense strand to SEQ ID NO: 1115860
aguauccaacucuuugaca

SEQ ID NO: 1115862 - RNA, 19 nt, Artificial Sequence
  Description of Artificial Sequence: Synthetic oligonucleotide
  Sense strand starting at position 1419 of SEQ ID NO: 915914
cuacuauggugaucaaaug

SEQ ID NO: 1115863 - RNA, 19 nt, Artificial Sequence
  Description of Artificial Sequence: Synthetic oligonucleotide
  Antisense strand to SEQ ID NO: 1115862
cauuugaucaccauaguag

SEQ ID NO: 1115864 - RNA, 19 nt, Artificial Sequence
  Description of Artificial Sequence: Synthetic oligonucleotide
  Sense strand starting at position 1420 of SEQ ID NO: 915914
uacuauggugaucaaaugu

SEQ ID NO: 1115865 - RNA, 19 nt, Artificial Sequence
  Description of Artificial Sequence: Synthetic oligonucleotide
  Antisense strand to SEQ ID NO: 1115864
acauuugaucaccauagua

SEQ ID NO: 1115866 - RNA, 19 nt, Artificial Sequence
  Description of Artificial Sequence: Synthetic oligonucleotide
  Sense strand starting at position 1427 of SEQ ID NO: 915914
gugaucaaauguucuggca

SEQ ID NO: 1115867 - RNA, 19 nt, Artificial Sequence
  Description of Artificial Sequence: Synthetic oligonucleotide
  Antisense strand to SEQ ID NO: 1115866
ugccagaacauuugaucac

SEQ ID NO: 1115868 - RNA, 19 nt, Artificial Sequence
  Description of Artificial Sequence: Synthetic oligonucleotide
  Sense strand starting at position 1435 of SEQ ID NO: 915914
auguucuggcaaugacaga

SEQ ID NO: 1115869 - RNA, 19 nt, Artificial Sequence
  Description of Artificial Sequence: Synthetic oligonucleotide
  Antisense strand to SEQ ID NO: 1115868
ucugucauugccagaacau

SEQ ID NO: 1115870 - RNA, 19 nt, Artificial Sequence
  Description of Artificial Sequence: Synthetic oligonucleotide
  Sense strand starting at position 1436 of SEQ ID NO: 915914
uguucuggcaaugacagaa

SEQ ID NO: 1115871 - RNA, 19 nt, Artificial Sequence
  Description of Artificial Sequence: Synthetic oligonucleotide
  Antisense strand to SEQ ID NO: 1115870
uucugucauugccagaaca

SEQ ID NO: 1115872 - RNA, 19 nt, Artificial Sequence
  Description of Artificial Sequence: Synthetic oligonucleotide
  Sense strand starting at position 1646 of SEQ ID NO: 915914
aagaguaauugguucuuac

SEQ ID NO: 1115873 - RNA, 19 nt, Artificial Sequence
  Description of Artificial Sequence: Synthetic oligonucleotide
  Antisense strand to SEQ ID NO: 1115872
guaagaaccaauuacucuu

SEQ ID NO: 1115874 - RNA, 19 nt, Artificial Sequence
  Description of Artificial Sequence: Synthetic oligonucleotide
  Sense strand starting at position 2105 of SEQ ID NO: 915914
agggaauucgcuugaaaga

SEQ ID NO: 1115875 - RNA, 19 nt, Artificial Sequence
  Description of Artificial Sequence: Synthetic oligonucleotide
  Antisense strand to SEQ ID NO: 1115874
ucuuucaagcgaauucccu

SEQ ID NO: 1115876 - RNA, 19 nt, Artificial Sequence
  Description of Artificial Sequence: Synthetic oligonucleotide
  Sense strand starting at position 2264 of SEQ ID NO: 915914
ugacuugauugauuaaguu

SEQ ID NO: 1115877 - RNA, 19 nt, Artificial Sequence
  Description of Artificial Sequence: Synthetic oligonucleotide
  Antisense strand to SEQ ID NO: 1115876
aacuuaaucaaucaaguca

SEQ ID NO: 1115878 - RNA, 19 nt, Artificial Sequence
  Description of Artificial Sequence: Synthetic oligonucleotide
  Sense strand starting at position 2342 of SEQ ID NO: 915914
ucaaaucuagcagaacagu

SEQ ID NO: 1115879 - RNA, 19 nt, Artificial Sequence
  Description of Artificial Sequence: Synthetic oligonucleotide
  Antisense strand to SEQ ID NO: 1115878
acuguucugcuagauuuga

SEQ ID NO: 1115880 - RNA, 19 nt, Artificial Sequence
  Description of Artificial Sequence: Synthetic oligonucleotide
  Sense strand starting at position 2426 of SEQ ID NO: 915914
ugaguaauuuaccauagau

SEQ ID NO: 1115881 - RNA, 19 nt, Artificial Sequence
  Description of Artificial Sequence: Synthetic oligonucleotide
  Antisense strand to SEQ ID NO: 1115880
aucuaugguaaauuacuca

SEQ ID NO: 1115882 - RNA, 19 nt, Artificial Sequence
  Description of Artificial Sequence: Synthetic oligonucleotide
  Sense strand starting at position 2469 of SEQ ID NO: 915914
uaguacagauggucacaaa

SEQ ID NO: 1115883 - RNA, 19 nt, Artificial Sequence
  Description of Artificial Sequence: Synthetic oligonucleotide
  Antisense strand to SEQ ID NO: 1115882
uuugugaccaucuguacua

SEQ ID NO: 1115884 - RNA, 19 nt, Artificial Sequence
  Description of Artificial Sequence: Synthetic oligonucleotide
  Sense strand starting at position 2508 of SEQ ID NO: 915914
uguuuagucccagggcaaa

SEQ ID NO: 1115885 - RNA, 19 nt, Artificial Sequence
  Description of Artificial Sequence: Synthetic oligonucleotide
  Antisense strand to SEQ ID NO: 1115884
uuugcccugggacuaaaca

SEQ ID NO: 1115886 - RNA, 19 nt, Artificial Sequence
  Description of Artificial Sequence: Synthetic oligonucleotide
  Sense strand starting at position 2690 of SEQ ID NO: 915914
acaaauguggguuggcaga

SEQ ID NO: 1115887 - RNA, 19 nt, Artificial Sequence
  Description of Artificial Sequence: Synthetic oligonucleotide
  Antisense strand to SEQ ID NO: 1115886
ucugccaacccacauuugu

SEQ ID NO: 1115888 - RNA, 19 nt, Artificial Sequence
  Description of Artificial Sequence: Synthetic oligonucleotide
  Sense strand starting at position 2692 of SEQ ID NO: 915914
aaauguggguuggcagaaa

SEQ ID NO: 1115889 - RNA, 19 nt, Artificial Sequence
  Description of Artificial Sequence: Synthetic oligonucleotide
  Antisense strand to SEQ ID NO: 1115888
uuucugccaacccacauuu

SEQ ID NO: 1115890 - RNA, 19 nt, Artificial Sequence
  Description of Artificial Sequence: Synthetic oligonucleotide
  Sense strand starting at position 2916 of SEQ ID NO: 915914
ggagauuggcccuaugacu

SEQ ID NO: 1115891 - RNA, 19 nt, Artificial Sequence
  Description of Artificial Sequence: Synthetic oligonucleotide
  Antisense strand to SEQ ID NO: 1115890
agucauagggccaaucucc

SEQ ID NO: 1115892 - RNA, 19 nt, Artificial Sequence
  Description of Artificial Sequence: Synthetic oligonucleotide
  Sense strand starting at position 2924 of SEQ ID NO: 915914
gcccuaugacuugacaaug

SEQ ID NO: 1115893 - RNA, 19 nt, Artificial Sequence
  Description of Artificial Sequence: Synthetic oligonucleotide
  Antisense strand to SEQ ID NO: 1115892
cauugucaagucauagggc

SEQ ID NO: 1115894 - RNA, 19 nt, Artificial Sequence
  Description of Artificial Sequence: Synthetic oligonucleotide
  Sense strand starting at position 3556 of SEQ ID NO: 915914
uugauauuacuguagcacu

SEQ ID NO: 1115895 - RNA, 19 nt, Artificial Sequence
  Description of Artificial Sequence: Synthetic oligonucleotide
  Antisense strand to SEQ ID NO: 1115894
agugcuacaguaauaucaa

SEQ ID NO: 1115896 - RNA, 19 nt, Artificial Sequence
  Description of Artificial Sequence: Synthetic oligonucleotide
  Sense strand starting at position 3574 of SEQ ID NO: 915914
uggaaucuauguuuaauug

SEQ ID NO: 1115897 - RNA, 19 nt, Artificial Sequence
  Description of Artificial Sequence: Synthetic oligonucleotide
  Antisense strand to SEQ ID NO: 1115896
caauuaaacauagauucca

SEQ ID NO: 1115898 - RNA, 19 nt, Artificial Sequence
  Description of Artificial Sequence: Synthetic oligonucleotide
  Sense strand starting at position 3652 of SEQ ID NO: 915914
ucuuacauucuggaagcaa

SEQ ID NO: 1115899 - RNA, 19 nt, Artificial Sequence
  Description of Artificial Sequence: Synthetic oligonucleotide
  Antisense strand to SEQ ID NO: 1115898
uugcuuccagaauguaaga

SEQ ID NO: 1115900 - RNA, 19 nt, Artificial Sequence
  Description of Artificial Sequence: Synthetic oligonucleotide
  Sense strand starting at position 3679 of SEQ ID NO: 915914
uaggaagucugauccacaa

SEQ ID NO: 1115901 - RNA, 19 nt, Artificial Sequence
  Description of Artificial Sequence: Synthetic oligonucleotide
  Antisense strand to SEQ ID NO: 1115900
uuguggaucagacuuccua

SEQ ID NO: 1115902 - RNA, 19 nt, Artificial Sequence
  Description of Artificial Sequence: Synthetic oligonucleotide
  Sense strand starting at position 3719 of SEQ ID NO: 915914
cugucaaauggaugauauc

SEQ ID NO: 1115903 - RNA, 19 nt, Artificial Sequence
  Description of Artificial Sequence: Synthetic oligonucleotide
  Antisense strand to SEQ ID NO: 1115902
gauaucauccauuugacag

SEQ ID NO: 1115904 - RNA, 19 nt, Artificial Sequence
  Description of Artificial Sequence: Synthetic oligonucleotide
  Sense strand starting at position 3855 of SEQ ID NO: 915914
ggacaucccuaauccgaaa

SEQ ID NO: 1115905 - RNA, 19 nt, Artificial Sequence
  Description of Artificial Sequence: Synthetic oligonucleotide
  Antisense strand to SEQ ID NO: 1115904
uuucggauuagggaugucc

SEQ ID NO: 1115906 - RNA, 19 nt, Artificial Sequence
  Description of Artificial Sequence: Synthetic oligonucleotide
  Sense strand starting at position 3956 of SEQ ID NO: 915914
cugacagagcuuuauccau

SEQ ID NO: 1115907 - RNA, 19 nt, Artificial Sequence
  Description of Artificial Sequence: Synthetic oligonucleotide
  Antisense strand to SEQ ID NO: 1115906
auggauaaagcucugucag

SEQ ID NO: 1115908 - RNA, 19 nt, Artificial Sequence
  Description of Artificial Sequence: Synthetic oligonucleotide
  Sense strand starting at position 433 of SEQ ID NO: 915915
auucuuucugcugaagaau

SEQ ID NO: 1115909 - RNA, 19 nt, Artificial Sequence
  Description of Artificial Sequence: Synthetic oligonucleotide
  Antisense strand to SEQ ID NO: 1115908
auucuucagcagaaagaau

SEQ ID NO: 1115910 - RNA, 19 nt, Artificial Sequence
  Description of Artificial Sequence: Synthetic oligonucleotide
  Sense strand starting at position 444 of SEQ ID NO: 915915
ugaagaaucugucucuuag

SEQ ID NO: 1115911 - RNA, 19 nt, Artificial Sequence
  Description of Artificial Sequence: Synthetic oligonucleotide
  Antisense strand to SEQ ID NO: 1115910
cuaagagacagauucuuca

SEQ ID NO: 1115912 - RNA, 19 nt, Artificial Sequence
  Description of Artificial Sequence: Synthetic oligonucleotide
  Sense strand starting at position 615 of SEQ ID NO: 915915
augucuguuccacaucaca

SEQ ID NO: 1115913 - RNA, 19 nt, Artificial Sequence
  Description of Artificial Sequence: Synthetic oligonucleotide
  Antisense strand to SEQ ID NO: 1115912
ugugauguggaacagacau

SEQ ID NO: 1115914 - RNA, 19 nt, Artificial Sequence
  Description of Artificial Sequence: Synthetic oligonucleotide
  Sense strand starting at position 631 of SEQ ID NO: 915915
acaucuuaucugcauggaa

SEQ ID NO: 1115915 - RNA, 19 nt, Artificial Sequence
  Description of Artificial Sequence: Synthetic oligonucleotide
  Antisense strand to SEQ ID NO: 1115914
uuccaugcagauaagaugu

SEQ ID NO: 1115916 - RNA, 19 nt, Artificial Sequence
  Description of Artificial Sequence: Synthetic oligonucleotide
  Sense strand starting at position 633 of SEQ ID NO: 915915
aucuuaucugcauggaauc

SEQ ID NO: 1115917 - RNA, 19 nt, Artificial Sequence
  Description of Artificial Sequence: Synthetic oligonucleotide
  Antisense strand to SEQ ID NO: 1115916
gauuccaugcagauaagau

SEQ ID NO: 1115918 - RNA, 19 nt, Artificial Sequence
  Description of Artificial Sequence: Synthetic oligonucleotide
  Sense strand starting at position 655 of SEQ ID NO: 915915
gcagcucuccucuaaguau

SEQ ID NO: 1115919 - RNA, 19 nt, Artificial Sequence
  Description of Artificial Sequence: Synthetic oligonucleotide
  Antisense strand to SEQ ID NO: 1115918
auacuuagaggagagcugc

SEQ ID NO: 1115920 - RNA, 19 nt, Artificial Sequence
  Description of Artificial Sequence: Synthetic oligonucleotide
  Sense strand starting at position 678 of SEQ ID NO: 915915
cacucaucugguugacaga

SEQ ID NO: 1115921 - RNA, 19 nt, Artificial Sequence
  Description of Artificial Sequence: Synthetic oligonucleotide
  Antisense strand to SEQ ID NO: 1115920
ucugucaaccagaugagug

SEQ ID NO: 1115922 - RNA, 19 nt, Artificial Sequence
  Description of Artificial Sequence: Synthetic oligonucleotide
  Sense strand starting at position 685 of SEQ ID NO: 915915
cugguugacagauggugaa

SEQ ID NO: 1115923 - RNA, 19 nt, Artificial Sequence
  Description of Artificial Sequence: Synthetic oligonucleotide
  Antisense strand to SEQ ID NO: 1115922
uucaccaucugucaaccag

SEQ ID NO: 1115924 - RNA, 19 nt, Artificial Sequence
  Description of Artificial Sequence: Synthetic oligonucleotide
  Sense strand starting at position 688 of SEQ ID NO: 915915
guugacagauggugaauau

SEQ ID NO: 1115925 - RNA, 19 nt, Artificial Sequence
  Description of Artificial Sequence: Synthetic oligonucleotide
  Antisense strand to SEQ ID NO: 1115924
auauucaccaucugucaac

SEQ ID NO: 1115926 - RNA, 19 nt, Artificial Sequence
  Description of Artificial Sequence: Synthetic oligonucleotide
  Sense strand starting at position 828 of SEQ ID NO: 915915
ucgcgucuaccuguacuau

SEQ ID NO: 1115927 - RNA, 19 nt, Artificial Sequence
  Description of Artificial Sequence: Synthetic oligonucleotide
  Antisense strand to SEQ ID NO: 1115926
auaguacagguagacgcga

SEQ ID NO: 1115928 - RNA, 19 nt, Artificial Sequence
  Description of Artificial Sequence: Synthetic oligonucleotide
  Sense strand starting at position 1023 of SEQ ID NO: 915915
uggauuaguuucuccuaca

SEQ ID NO: 1115929 - RNA, 19 nt, Artificial Sequence
  Description of Artificial Sequence: Synthetic oligonucleotide
  Antisense strand to SEQ ID NO: 1115928
uguaggagaaacuaaucca

SEQ ID NO: 1115930 - RNA, 19 nt, Artificial Sequence
  Description of Artificial Sequence: Synthetic oligonucleotide
  Sense strand starting at position 1024 of SEQ ID NO: 915915
ggauuaguuucuccuacau

SEQ ID NO: 1115931 - RNA, 19 nt, Artificial Sequence
  Description of Artificial Sequence: Synthetic oligonucleotide
  Antisense strand to SEQ ID NO: 1115930
auguaggagaaacuaaucc

SEQ ID NO: 1115932 - RNA, 19 nt, Artificial Sequence
  Description of Artificial Sequence: Synthetic oligonucleotide
  Sense strand starting at position 1035 of SEQ ID NO: 915915
uccuacaugcuuggaucaa

SEQ ID NO: 1115933 - RNA, 19 nt, Artificial Sequence
  Description of Artificial Sequence: Synthetic oligonucleotide
  Antisense strand to SEQ ID NO: 1115932
uugauccaagcauguagga

SEQ ID NO: 1115934 - RNA, 19 nt, Artificial Sequence
  Description of Artificial Sequence: Synthetic oligonucleotide
  Sense strand starting at position 1237 of SEQ ID NO: 915915
cccucauucuacgugcuau

SEQ ID NO: 1115935 - RNA, 19 nt, Artificial Sequence
  Description of Artificial Sequence: Synthetic oligonucleotide
  Antisense strand to SEQ ID NO: 1115934
auagcacguagaaugaggg

SEQ ID NO: 1115936 - RNA, 19 nt, Artificial Sequence
  Description of Artificial Sequence: Synthetic oligonucleotide
  Sense strand starting at position 1315 of SEQ ID NO: 915915
ugccacauuuggucuguga

SEQ ID NO: 1115937 - RNA, 19 nt, Artificial Sequence
  Description of Artificial Sequence: Synthetic oligonucleotide
  Antisense strand to SEQ ID NO: 1115936
ucacagaccaaauguggca

SEQ ID NO: 1115938 - RNA, 19 nt, Artificial Sequence
  Description of Artificial Sequence: Synthetic oligonucleotide
  Sense strand starting at position 1488 of SEQ ID NO: 915915
ccaccuugaguguagaguu

SEQ ID NO: 1115939 - RNA, 19 nt, Artificial Sequence
  Description of Artificial Sequence: Synthetic oligonucleotide
  Antisense strand to SEQ ID NO: 1115938
aacucuacacucaaggugg

SEQ ID NO: 1115940 - RNA, 19 nt, Artificial Sequence
  Description of Artificial Sequence: Synthetic oligonucleotide
  Sense strand starting at position 2165 of SEQ ID NO: 915915
gcuccuuucgugguuaugu

SEQ ID NO: 1115941 - RNA, 19 nt, Artificial Sequence
  Description of Artificial Sequence: Synthetic oligonucleotide
  Antisense strand to SEQ ID NO: 1115940
acauaaccacgaaaggagc

SEQ ID NO: 1115942 - RNA, 19 nt, Artificial Sequence
  Description of Artificial Sequence: Synthetic oligonucleotide
  Sense strand starting at position 2173 of SEQ ID NO: 915915
cgugguuaugucucggauu

SEQ ID NO: 1115943 - RNA, 19 nt, Artificial Sequence
  Description of Artificial Sequence: Synthetic oligonucleotide
  Antisense strand to SEQ ID NO: 1115942
aauccgagacauaaccacg

SEQ ID NO: 1115944 - RNA, 19 nt, Artificial Sequence
  Description of Artificial Sequence: Synthetic oligonucleotide
  Sense strand starting at position 2192 of SEQ ID NO: 915915
uuaagaguugauggugaug

SEQ ID NO: 1115945 - RNA, 19 nt, Artificial Sequence
  Description of Artificial Sequence: Synthetic oligonucleotide
  Antisense strand to SEQ ID NO: 1115944
caucaccaucaacucuuaa

SEQ ID NO: 1115946 - RNA, 19 nt, Artificial Sequence
  Description of Artificial Sequence: Synthetic oligonucleotide
  Sense strand starting at position 2194 of SEQ ID NO: 915915
aagaguugauggugaugaa

SEQ ID NO: 1115947 - RNA, 19 nt, Artificial Sequence
  Description of Artificial Sequence: Synthetic oligonucleotide
  Antisense strand to SEQ ID NO: 1115946
uucaucaccaucaacucuu

SEQ ID NO: 1115948 - RNA, 19 nt, Artificial Sequence
  Description of Artificial Sequence: Synthetic oligonucleotide
  Sense strand starting at position 2250 of SEQ ID NO: 915915
ccgagaacgcugugguguu

SEQ ID NO: 1115949 - RNA, 19 nt, Artificial Sequence
  Description of Artificial Sequence: Synthetic oligonucleotide
  Antisense strand to SEQ ID NO: 1115948
aacaccacagcguucucgg

SEQ ID NO: 1115950 - RNA, 19 nt, Artificial Sequence
  Description of Artificial Sequence: Synthetic oligonucleotide
  Sense strand starting at position 2262 of SEQ ID NO: 915915
ugguguuucggcccguaca

SEQ ID NO: 1115951 - RNA, 19 nt, Artificial Sequence
  Description of Artificial Sequence: Synthetic oligonucleotide
  Antisense strand to SEQ ID NO: 1115950
uguacgggccgaaacacca

SEQ ID NO: 1115952 - RNA, 19 nt, Artificial Sequence
  Description of Artificial Sequence: Synthetic oligonucleotide
  Sense strand starting at position 2432 of SEQ ID NO: 915915
cacugaucaccgcaagaug

SEQ ID NO: 1115953 - RNA, 19 nt, Artificial Sequence
  Description of Artificial Sequence: Synthetic oligonucleotide
  Antisense strand to SEQ ID NO: 1115952
caucuugcggugaucagug

SEQ ID NO: 1115954 - RNA, 19 nt, Artificial Sequence
  Description of Artificial Sequence: Synthetic oligonucleotide
  Sense strand starting at position 2526 of SEQ ID NO: 915915
aaacuugaguuuguugaau

SEQ ID NO: 1115955 - RNA, 19 nt, Artificial Sequence
  Description of Artificial Sequence: Synthetic oligonucleotide
  Antisense strand to SEQ ID NO: 1115954
auucaacaaacucaaguuu

SEQ ID NO: 1115956 - RNA, 19 nt, Artificial Sequence
  Description of Artificial Sequence: Synthetic oligonucleotide
  Sense strand starting at position 2534 of SEQ ID NO: 915915
guuuguugaaugugcguaa

SEQ ID NO: 1115957 - RNA, 19 nt, Artificial Sequence
  Description of Artificial Sequence: Synthetic oligonucleotide
  Antisense strand to SEQ ID NO: 1115956
uuacgcacauucaacaaac

SEQ ID NO: 1115958 - RNA, 19 nt, Artificial Sequence
  Description of Artificial Sequence: Synthetic oligonucleotide
  Sense strand starting at position 2538 of SEQ ID NO: 915915
guugaaugugcguaacaga

SEQ ID NO: 1115959 - RNA, 19 nt, Artificial Sequence
  Description of Artificial Sequence: Synthetic oligonucleotide
  Antisense strand to SEQ ID NO: 1115958
ucuguuacgcacauucaac

SEQ ID NO: 1115960 - RNA, 19 nt, Artificial Sequence
  Description of Artificial Sequence: Synthetic oligonucleotide
  Sense strand starting at position 2607 of SEQ ID NO: 915915
cucucaguguugccuuuau

SEQ ID NO: 1115961 - RNA, 19 nt, Artificial Sequence
  Description of Artificial Sequence: Synthetic oligonucleotide
  Antisense strand to SEQ ID NO: 1115960
auaaaggcaacacugagag

SEQ ID NO: 1115962 - RNA, 19 nt, Artificial Sequence
  Description of Artificial Sequence: Synthetic oligonucleotide
  Sense strand starting at position 2679 of SEQ ID NO: 915915
aggcuaguaauucggccau

SEQ ID NO: 1115963 - RNA, 19 nt, Artificial Sequence
  Description of Artificial Sequence: Synthetic oligonucleotide
  Antisense strand to SEQ ID NO: 1115962
auggccgaauuacuagccu

SEQ ID NO: 1115964 - RNA, 19 nt, Artificial Sequence
  Description of Artificial Sequence: Synthetic oligonucleotide
  Sense strand starting at position 2681 of SEQ ID NO: 915915
gcuaguaauucggccauug

SEQ ID NO: 1115965 - RNA, 19 nt, Artificial Sequence
  Description of Artificial Sequence: Synthetic oligonucleotide
  Antisense strand to SEQ ID NO: 1115964
caauggccgaauuacuagc

SEQ ID NO: 1115966 - RNA, 19 nt, Artificial Sequence
  Description of Artificial Sequence: Synthetic oligonucleotide
  Sense strand starting at position 2683 of SEQ ID NO: 915915
uaguaauucggccauugcu

SEQ ID NO: 1115967 - RNA, 19 nt, Artificial Sequence
  Description of Artificial Sequence: Synthetic oligonucleotide
  Antisense strand to SEQ ID NO: 1115966
agcaauggccgaauuacua

SEQ ID NO: 1115968 - RNA, 19 nt, Artificial Sequence
  Description of Artificial Sequence: Synthetic oligonucleotide
  Sense strand starting at position 2776 of SEQ ID NO: 915915
ggagauaacucauaugaaa

SEQ ID NO: 1115969 - RNA, 19 nt, Artificial Sequence
  Description of Artificial Sequence: Synthetic oligonucleotide
  Antisense strand to SEQ ID NO: 1115968
uuucauaugaguuaucucc

SEQ ID NO: 1115970 - RNA, 19 nt, Artificial Sequence
  Description of Artificial Sequence: Synthetic oligonucleotide
  Sense strand starting at position 2789 of SEQ ID NO: 915915
augaaagauuucugugacc

SEQ ID NO: 1115971 - RNA, 19 nt, Artificial Sequence
  Description of Artificial Sequence: Synthetic oligonucleotide
  Antisense strand to SEQ ID NO: 1115970
ggucacagaaaucuuucau

SEQ ID NO: 1115972 - RNA, 19 nt, Artificial Sequence
  Description of Artificial Sequence: Synthetic oligonucleotide
  Sense strand starting at position 2792 of SEQ ID NO: 915915
aaagauuucugugaccugu

SEQ ID NO: 1115973 - RNA, 19 nt, Artificial Sequence
  Description of Artificial Sequence: Synthetic oligonucleotide
  Antisense strand to SEQ ID NO: 1115972
acaggucacagaaaucuuu

SEQ ID NO: 1115974 - RNA, 19 nt, Artificial Sequence
  Description of Artificial Sequence: Synthetic oligonucleotide
  Sense strand starting at position 2798 of SEQ ID NO: 915915
uucugugaccuguaaaguc

SEQ ID NO: 1115975 - RNA, 19 nt, Artificial Sequence
  Description of Artificial Sequence: Synthetic oligonucleotide
  Antisense strand to SEQ ID NO: 1115974
gacuuuacaggucacagaa

SEQ ID NO: 1115976 - RNA, 19 nt, Artificial Sequence
  Description of Artificial Sequence: Synthetic oligonucleotide
  Sense strand starting at position 2805 of SEQ ID NO: 915915
accuguaaagucuaauaug

SEQ ID NO: 1115977 - RNA, 19 nt, Artificial Sequence
  Description of Artificial Sequence: Synthetic oligonucleotide
  Antisense strand to SEQ ID NO: 1115976
cauauuagacuuuacaggu

SEQ ID NO: 1115978 - RNA, 19 nt, Artificial Sequence
  Description of Artificial Sequence: Synthetic oligonucleotide
  Sense strand starting at position 2864 of SEQ ID NO: 915915
gcauuugguucuccaugua

SEQ ID NO: 1115979 - RNA, 19 nt, Artificial Sequence
  Description of Artificial Sequence: Synthetic oligonucleotide
  Antisense strand to SEQ ID NO: 1115978
uacauggagaaccaaaugc

SEQ ID NO: 1115980 - RNA, 19 nt, Artificial Sequence
  Description of Artificial Sequence: Synthetic oligonucleotide
  Sense strand starting at position 2867 of SEQ ID NO: 915915
uuugguucuccauguagau

SEQ ID NO: 1115981 - RNA, 19 nt, Artificial Sequence
  Description of Artificial Sequence: Synthetic oligonucleotide
  Antisense strand to SEQ ID NO: 1115980
aucuacauggagaaccaaa

SEQ ID NO: 1115982 - RNA, 19 nt, Artificial Sequence
  Description of Artificial Sequence: Synthetic oligonucleotide
  Sense strand starting at position 2879 of SEQ ID NO: 915915
uguagauuguaagcccaga

SEQ ID NO: 1115983 - RNA, 19 nt, Artificial Sequence
  Description of Artificial Sequence: Synthetic oligonucleotide
  Antisense strand to SEQ ID NO: 1115982
ucugggcuuacaaucuaca

SEQ ID NO: 1115984 - RNA, 19 nt, Artificial Sequence
  Description of Artificial Sequence: Synthetic oligonucleotide
  Sense strand starting at position 2908 of SEQ ID NO: 915915
cuucgagagcucgguuaau

SEQ ID NO: 1115985 - RNA, 19 nt, Artificial Sequence
  Description of Artificial Sequence: Synthetic oligonucleotide
  Antisense strand to SEQ ID NO: 1115984
auuaaccgagcucucgaag

SEQ ID NO: 1115986 - RNA, 19 nt, Artificial Sequence
  Description of Artificial Sequence: Synthetic oligonucleotide
  Sense strand starting at position 3972 of SEQ ID NO: 915915
uaacauuuauuagguggaa

SEQ ID NO: 1115987 - RNA, 19 nt, Artificial Sequence
  Description of Artificial Sequence: Synthetic oligonucleotide
  Antisense strand to SEQ ID NO: 1115986
uuccaccuaauaaauguua

SEQ ID NO: 1115988 - RNA, 19 nt, Artificial Sequence
  Description of Artificial Sequence: Synthetic oligonucleotide
  Sense strand starting at position 53 of SEQ ID NO: 915916
gcaagcucauggguagaua

SEQ ID NO: 1115989 - RNA, 19 nt, Artificial Sequence
  Description of Artificial Sequence: Synthetic oligonucleotide
  Antisense strand to SEQ ID NO: 1115988
uaucuacccaugagcuugc

SEQ ID NO: 1115990 - RNA, 19 nt, Artificial Sequence
  Description of Artificial Sequence: Synthetic oligonucleotide
  Sense strand starting at position 145 of SEQ ID NO: 915916
cucaaaucuguugaaaguc

SEQ ID NO: 1115991 - RNA, 19 nt, Artificial Sequence
  Description of Artificial Sequence: Synthetic oligonucleotide
  Antisense strand to SEQ ID NO: 1115990
gacuuucaacagauuugag

SEQ ID NO: 1115992 - RNA, 19 nt, Artificial Sequence
  Description of Artificial Sequence: Synthetic oligonucleotide
  Sense strand starting at position 153 of SEQ ID NO: 915916
uguugaaagucaucacuaa

SEQ ID NO: 1115993 - RNA, 19 nt, Artificial Sequence
  Description of Artificial Sequence: Synthetic oligonucleotide
  Antisense strand to SEQ ID NO: 1115992
uuagugaugacuuucaaca

SEQ ID NO: 1115994 - RNA, 19 nt, Artificial Sequence
  Description of Artificial Sequence: Synthetic oligonucleotide
  Sense strand starting at position 200 of SEQ ID NO: 915916
gggugaagacugggcuuaa

SEQ ID NO: 1115995 - RNA, 19 nt, Artificial Sequence
  Description of Artificial Sequence: Synthetic oligonucleotide
  Antisense strand to SEQ ID NO: 1115994
uuaagcccagucuucaccc

SEQ ID NO: 1115996 - RNA, 19 nt, Artificial Sequence
  Description of Artificial Sequence: Synthetic oligonucleotide
  Sense strand starting at position 201 of SEQ ID NO: 915916
ggugaagacugggcuuaau

SEQ ID NO: 1115997 - RNA, 19 nt, Artificial Sequence
  Description of Artificial Sequence: Synthetic oligonucleotide
  Antisense strand to SEQ ID NO: 1115996
auuaagcccagucuucacc

SEQ ID NO: 1115998 - RNA, 19 nt, Artificial Sequence
  Description of Artificial Sequence: Synthetic oligonucleotide
  Sense strand starting at position 211 of SEQ ID NO: 915916
gggcuuaauguggacccaa

SEQ ID NO: 1115999 - RNA, 19 nt, Artificial Sequence
  Description of Artificial Sequence: Synthetic oligonucleotide
  Antisense strand to SEQ ID NO: 1115998
uuggguccacauuaagccc

SEQ ID NO: 1116000 - RNA, 19 nt, Artificial Sequence
  Description of Artificial Sequence: Synthetic oligonucleotide
  Sense strand starting at position 223 of SEQ ID NO: 915916
gacccaaaucccuggguau

SEQ ID NO: 1116001 - RNA, 19 nt, Artificial Sequence
  Description of Artificial Sequence: Synthetic oligonucleotide
  Antisense strand to SEQ ID NO: 1116000
auacccagggauuuggguc

SEQ ID NO: 1116002 - RNA, 19 nt, Artificial Sequence
  Description of Artificial Sequence: Synthetic oligonucleotide
  Sense strand starting at position 638 of SEQ ID NO: 915916
ggcccugaauuggcaagau

SEQ ID NO: 1116003 - RNA, 19 nt, Artificial Sequence
  Description of Artificial Sequence: Synthetic oligonucleotide
  Antisense strand to SEQ ID NO: 1116002
aucuugccaauucagggcc

SEQ ID NO: 1116004 - RNA, 19 nt, Artificial Sequence
  Description of Artificial Sequence: Synthetic oligonucleotide
  Sense strand starting at position 680 of SEQ ID NO: 915916
ggagguuagcucuggagca

SEQ ID NO: 1116005 - RNA, 19 nt, Artificial Sequence
  Description of Artificial Sequence: Synthetic oligonucleotide
  Antisense strand to SEQ ID NO: 1116004
ugcuccagagcuaaccucc

SEQ ID NO: 1116006 - RNA, 19 nt, Artificial Sequence
  Description of Artificial Sequence: Synthetic oligonucleotide
  Sense strand starting at position 692 of SEQ ID NO: 915916
uggagcagcucaguagauu

SEQ ID NO: 1116007 - RNA, 19 nt, Artificial Sequence
  Description of Artificial Sequence: Synthetic oligonucleotide
  Antisense strand to SEQ ID NO: 1116006
aaucuacugagcugcucca

SEQ ID NO: 1116008 - RNA, 19 nt, Artificial Sequence
  Description of Artificial Sequence: Synthetic oligonucleotide
  Sense strand starting at position 719 of SEQ ID NO: 915916
acaauuccuugggccagau

SEQ ID NO: 1116009 - RNA, 19 nt, Artificial Sequence
  Description of Artificial Sequence: Synthetic oligonucleotide
  Antisense strand to SEQ ID NO: 1116008
aucuggcccaaggaauugu

SEQ ID NO: 1116010 - RNA, 19 nt, Artificial Sequence
  Description of Artificial Sequence: Synthetic oligonucleotide
  Sense strand starting at position 816 of SEQ ID NO: 915916
acuuccuuggccugggaau

SEQ ID NO: 1116011 - RNA, 19 nt, Artificial Sequence
  Description of Artificial Sequence: Synthetic oligonucleotide
  Antisense strand to SEQ ID NO: 1116010
auucccaggccaaggaagu

SEQ ID NO: 1116012 - RNA, 19 nt, Artificial Sequence
  Description of Artificial Sequence: Synthetic oligonucleotide
  Sense strand starting at position 829 of SEQ ID NO: 915916
gggaaugagucaucacucu

SEQ ID NO: 1116013 - RNA, 19 nt, Artificial Sequence
  Description of Artificial Sequence: Synthetic oligonucleotide
  Antisense strand to SEQ ID NO: 1116012
agagugaugacucauuccc

SEQ ID NO: 1116014 - RNA, 19 nt, Artificial Sequence
  Description of Artificial Sequence: Synthetic oligonucleotide
  Sense strand starting at position 835 of SEQ ID NO: 915916
gagucaucacucugaaguc

SEQ ID NO: 1116015 - RNA, 19 nt, Artificial Sequence
  Description of Artificial Sequence: Synthetic oligonucleotide
  Antisense strand to SEQ ID NO: 1116014
gacuucagagugaugacuc

SEQ ID NO: 1116016 - RNA, 19 nt, Artificial Sequence
  Description of Artificial Sequence: Synthetic oligonucleotide
  Sense strand starting at position 845 of SEQ ID NO: 915916
ucugaagucccuugaauug

SEQ ID NO: 1116017 - RNA, 19 nt, Artificial Sequence
  Description of Artificial Sequence: Synthetic oligonucleotide
  Antisense strand to SEQ ID NO: 1116016
caauucaagggacuucaga

SEQ ID NO: 1116018 - RNA, 19 nt, Artificial Sequence
  Description of Artificial Sequence: Synthetic oligonucleotide
  Sense strand starting at position 1414 of SEQ ID NO: 915916
cccauuggucuccaggcaa

SEQ ID NO: 1116019 - RNA, 19 nt, Artificial Sequence
  Description of Artificial Sequence: Synthetic oligonucleotide
  Antisense strand to SEQ ID NO: 1116018
uugccuggagaccaauggg

SEQ ID NO: 1116020 - RNA, 19 nt, Artificial Sequence
  Description of Artificial Sequence: Synthetic oligonucleotide
  Sense strand starting at position 1599 of SEQ ID NO: 915916
uaggauaguccuggucagu

SEQ ID NO: 1116021 - RNA, 19 nt, Artificial Sequence
  Description of Artificial Sequence: Synthetic oligonucleotide
  Antisense strand to SEQ ID NO: 1116020
acugaccaggacuauccua

SEQ ID NO: 1116022 - RNA, 19 nt, Artificial Sequence
  Description of Artificial Sequence: Synthetic oligonucleotide
  Sense strand starting at position 1609 of SEQ ID NO: 915916
cuggucagucugggaguua

SEQ ID NO: 1116023 - RNA, 19 nt, Artificial Sequence
  Description of Artificial Sequence: Synthetic oligonucleotide
  Antisense strand to SEQ ID NO: 1116022
uaacucccagacugaccag

SEQ ID NO: 1116024 - RNA, 19 nt, Artificial Sequence
  Description of Artificial Sequence: Synthetic oligonucleotide
  Sense strand starting at position 1781 of SEQ ID NO: 915916
gcaugaggcucuuugaacu

SEQ ID NO: 1116025 - RNA, 19 nt, Artificial Sequence
  Description of Artificial Sequence: Synthetic oligonucleotide
  Antisense strand to SEQ ID NO: 1116024
aguucaaagagccucaugc

SEQ ID NO: 1116026 - RNA, 19 nt, Artificial Sequence
  Description of Artificial Sequence: Synthetic oligonucleotide
  Sense strand starting at position 1918 of SEQ ID NO: 915916
ggaccagaccuucgcagaa

SEQ ID NO: 1116027 - RNA, 19 nt, Artificial Sequence
  Description of Artificial Sequence: Synthetic oligonucleotide
  Antisense strand to SEQ ID NO: 1116026
uucugcgaaggucuggucc

SEQ ID NO: 1116028 - RNA, 19 nt, Artificial Sequence
  Description of Artificial Sequence: Synthetic oligonucleotide
  Sense strand starting at position 1989 of SEQ ID NO: 915916
ccaguauggcguccugcaa

SEQ ID NO: 1116029 - RNA, 19 nt, Artificial Sequence
  Description of Artificial Sequence: Synthetic oligonucleotide
  Antisense strand to SEQ ID NO: 1116028
uugcaggacgccauacugg

SEQ ID NO: 1116030 - RNA, 19 nt, Artificial Sequence
  Description of Artificial Sequence: Synthetic oligonucleotide
  Sense strand starting at position 2029 of SEQ ID NO: 915916
uuagaucucccaugugcaa

SEQ ID NO: 1116031 - RNA, 19 nt, Artificial Sequence
  Description of Artificial Sequence: Synthetic oligonucleotide
  Antisense strand to SEQ ID NO: 1116030
uugcacaugggagaucuaa

SEQ ID NO: 1116032 - RNA, 19 nt, Artificial Sequence
  Description of Artificial Sequence: Synthetic oligonucleotide
  Sense strand starting at position 2145 of SEQ ID NO: 915916
auaagaguuaacgaguuau

SEQ ID NO: 1116033 - RNA, 19 nt, Artificial Sequence
  Description of Artificial Sequence: Synthetic oligonucleotide
  Antisense strand to SEQ ID NO: 1116032
auaacucguuaacucuuau

SEQ ID NO: 1116034 - RNA, 19 nt, Artificial Sequence
  Description of Artificial Sequence: Synthetic oligonucleotide
  Sense strand starting at position 2149 of SEQ ID NO: 915916
gaguuaacgaguuauagcu

SEQ ID NO: 1116035 - RNA, 19 nt, Artificial Sequence
  Description of Artificial Sequence: Synthetic oligonucleotide
  Antisense strand to SEQ ID NO: 1116034
agcuauaacucguuaacuc

SEQ ID NO: 1116036 - RNA, 19 nt, Artificial Sequence
  Description of Artificial Sequence: Synthetic oligonucleotide
  Sense strand starting at position 2155 of SEQ ID NO: 915916
acgaguuauagcuaaggag

SEQ ID NO: 1116037 - RNA, 19 nt, Artificial Sequence
  Description of Artificial Sequence: Synthetic oligonucleotide
  Antisense strand to SEQ ID NO: 1116036
cuccuuagcuauaacucgu

SEQ ID NO: 1116038 - RNA, 19 nt, Artificial Sequence
  Description of Artificial Sequence: Synthetic oligonucleotide
  Sense strand starting at position 2159 of SEQ ID NO: 915916
guuauagcuaaggaguagu

SEQ ID NO: 1116039 - RNA, 19 nt, Artificial Sequence
  Description of Artificial Sequence: Synthetic oligonucleotide
  Antisense strand to SEQ ID NO: 1116038
acuacuccuuagcuauaac

SEQ ID NO: 1116040 - RNA, 19 nt, Artificial Sequence
  Description of Artificial Sequence: Synthetic oligonucleotide
  Sense strand starting at position 2267 of SEQ ID NO: 915916
ugaggacucuguuuccuua

SEQ ID NO: 1116041 - RNA, 19 nt, Artificial Sequence
  Description of Artificial Sequence: Synthetic oligonucleotide
  Antisense strand to SEQ ID NO: 1116040
uaaggaaacagaguccuca

SEQ ID NO: 1116042 - RNA, 19 nt, Artificial Sequence
  Description of Artificial Sequence: Synthetic oligonucleotide
  Sense strand starting at position 2284 of SEQ ID NO: 915916
uagguccuuccguauacua

SEQ ID NO: 1116043 - RNA, 19 nt, Artificial Sequence
  Description of Artificial Sequence: Synthetic oligonucleotide
  Antisense strand to SEQ ID NO: 1116042
uaguauacggaaggaccua

SEQ ID NO: 1116044 - RNA, 19 nt, Artificial Sequence
  Description of Artificial Sequence: Synthetic oligonucleotide
  Sense strand starting at position 2345 of SEQ ID NO: 915916
gggugauggccaugaaguc

SEQ ID NO: 1116045 - RNA, 19 nt, Artificial Sequence
  Description of Artificial Sequence: Synthetic oligonucleotide
  Antisense strand to SEQ ID NO: 1116044
gacuucauggccaucaccc

SEQ ID NO: 1116046 - RNA, 19 nt, Artificial Sequence
  Description of Artificial Sequence: Synthetic oligonucleotide
  Sense strand starting at position 2428 of SEQ ID NO: 915916
ccacaagcccuuuggauau

SEQ ID NO: 1116047 - RNA, 19 nt, Artificial Sequence
  Description of Artificial Sequence: Synthetic oligonucleotide
  Antisense strand to SEQ ID NO: 1116046
auauccaaagggcuugugg

SEQ ID NO: 1116048 - RNA, 19 nt, Artificial Sequence
  Description of Artificial Sequence: Synthetic oligonucleotide
  Sense strand starting at position 2742 of SEQ ID NO: 915916
gaguaagacuccuuagaca

SEQ ID NO: 1116049 - RNA, 19 nt, Artificial Sequence
  Description of Artificial Sequence: Synthetic oligonucleotide
  Antisense strand to SEQ ID NO: 1116048
ugucuaaggagucuuacuc

SEQ ID NO: 1116050 - RNA, 19 nt, Artificial Sequence
  Description of Artificial Sequence: Synthetic oligonucleotide
  Sense strand starting at position 3755 of SEQ ID NO: 915916
ggaaguggucagggaugca

SEQ ID NO: 1116051 - RNA, 19 nt, Artificial Sequence
  Description of Artificial Sequence: Synthetic oligonucleotide
  Antisense strand to SEQ ID NO: 1116050
ugcaucccugaccacuucc

SEQ ID NO: 1116052 - RNA, 19 nt, Artificial Sequence
  Description of Artificial Sequence: Synthetic oligonucleotide
  Sense strand starting at position 3875 of SEQ ID NO: 915916
ccaugugaucucugggauu

SEQ ID NO: 1116053 - RNA, 19 nt, Artificial Sequence
  Description of Artificial Sequence: Synthetic oligonucleotide
  Antisense strand to SEQ ID NO: 1116052
aaucccagagaucacaugg

SEQ ID NO: 1116054 - RNA, 19 nt, Artificial Sequence
  Description of Artificial Sequence: Synthetic oligonucleotide
  Sense strand starting at position 3894 of SEQ ID NO: 915916
ugucaaucaggccaucaau

SEQ ID NO: 1116055 - RNA, 19 nt, Artificial Sequence
  Description of Artificial Sequence: Synthetic oligonucleotide
  Antisense strand to SEQ ID NO: 1116054
auugauggccugauugaca

SEQ ID NO: 1116056 - RNA, 19 nt, Artificial Sequence
  Description of Artificial Sequence: Synthetic oligonucleotide
  Sense strand starting at position 3931 of SEQ ID NO: 915916
ccaauauuaucuguuggac

SEQ ID NO: 1116057 - RNA, 19 nt, Artificial Sequence
  Description of Artificial Sequence: Synthetic oligonucleotide
  Antisense strand to SEQ ID NO: 1116056
guccaacagauaauauugg

SEQ ID NO: 1116058 - RNA, 19 nt, Artificial Sequence
  Description of Artificial Sequence: Synthetic oligonucleotide
  Sense strand starting at position 3934 of SEQ ID NO: 915916
auauuaucuguuggacugu

SEQ ID NO: 1116059 - RNA, 19 nt, Artificial Sequence
  Description of Artificial Sequence: Synthetic oligonucleotide
  Antisense strand to SEQ ID NO: 1116058
acaguccaacagauaauau

SEQ ID NO: 1116060 - RNA, 19 nt, Artificial Sequence
  Description of Artificial Sequence: Synthetic oligonucleotide
  Sense strand starting at position 3943 of SEQ ID NO: 915916
guuggacuguuauccagga

SEQ ID NO: 1116061 - RNA, 19 nt, Artificial Sequence
  Description of Artificial Sequence: Synthetic oligonucleotide
  Antisense strand to SEQ ID NO: 1116060
uccuggauaacaguccaac

SEQ ID NO: 1116062 - RNA, 19 nt, Artificial Sequence
  Description of Artificial Sequence: Synthetic oligonucleotide
  Sense strand starting at position 3944 of SEQ ID NO: 915916
uuggacuguuauccaggaa

SEQ ID NO: 1116063 - RNA, 19 nt, Artificial Sequence
  Description of Artificial Sequence: Synthetic oligonucleotide
  Antisense strand to SEQ ID NO: 1116062
uuccuggauaacaguccaa

SEQ ID NO: 1116064 - RNA, 19 nt, Artificial Sequence
  Description of Artificial Sequence: Synthetic oligonucleotide
  Sense strand starting at position 3947 of SEQ ID NO: 915916
gacuguuauccaggaaaug

SEQ ID NO: 1116065 - RNA, 19 nt, Artificial Sequence
  Description of Artificial Sequence: Synthetic oligonucleotide
  Antisense strand to SEQ ID NO: 1116064
cauuuccuggauaacaguc

SEQ ID NO: 1116066 - RNA, 19 nt, Artificial Sequence
  Description of Artificial Sequence: Synthetic oligonucleotide
  Sense strand starting at position 3957 of SEQ ID NO: 915916
caggaaauggacuguuauc

SEQ ID NO: 1116067 - RNA, 19 nt, Artificial Sequence
  Description of Artificial Sequence: Synthetic oligonucleotide
  Antisense strand to SEQ ID NO: 1116066
gauaacaguccauuuccug

SEQ ID NO: 1116068 - RNA, 19 nt, Artificial Sequence
  Description of Artificial Sequence: Synthetic oligonucleotide
  Sense strand starting at position 94 of SEQ ID NO: 915917
gccuaagccuucugagaau

SEQ ID NO: 1116069 - RNA, 19 nt, Artificial Sequence
  Description of Artificial Sequence: Synthetic oligonucleotide
  Antisense strand to SEQ ID NO: 1116068
auucucagaaggcuuaggc

SEQ ID NO: 1116070 - RNA, 19 nt, Artificial Sequence
  Description of Artificial Sequence: Synthetic oligonucleotide
  Sense strand starting at position 245 of SEQ ID NO: 915917
uggcuccuguucuauagua

SEQ ID NO: 1116071 - RNA, 19 nt, Artificial Sequence
  Description of Artificial Sequence: Synthetic oligonucleotide
  Antisense strand to SEQ ID NO: 1116070
uacuauagaacaggagcca

SEQ ID NO: 1116072 - RNA, 19 nt, Artificial Sequence
  Description of Artificial Sequence: Synthetic oligonucleotide
  Sense strand starting at position 247 of SEQ ID NO: 915917
gcuccuguucuauaguauu

SEQ ID NO: 1116073 - RNA, 19 nt, Artificial Sequence
  Description of Artificial Sequence: Synthetic oligonucleotide
  Antisense strand to SEQ ID NO: 1116072
aauacuauagaacaggagc

SEQ ID NO: 1116074 - RNA, 19 nt, Artificial Sequence
  Description of Artificial Sequence: Synthetic oligonucleotide
  Sense strand starting at position 615 of SEQ ID NO: 915917
guaucuaccuguuccaaca

SEQ ID NO: 1116075 - RNA, 19 nt, Artificial Sequence
  Description of Artificial Sequence: Synthetic oligonucleotide
  Antisense strand to SEQ ID NO: 1116074
uguuggaacagguagauac

SEQ ID NO: 1116076 - RNA, 19 nt, Artificial Sequence
  Description of Artificial Sequence: Synthetic oligonucleotide
  Sense strand starting at position 776 of SEQ ID NO: 915917
cugacaucccacuggauca

SEQ ID NO: 1116077 - RNA, 19 nt, Artificial Sequence
  Description of Artificial Sequence: Synthetic oligonucleotide
  Antisense strand to SEQ ID NO: 1116076
ugauccagugggaugucag

SEQ ID NO: 1116078 - RNA, 19 nt, Artificial Sequence
  Description of Artificial Sequence: Synthetic oligonucleotide
  Sense strand starting at position 962 of SEQ ID NO: 915917
aagggagaucuuugagcuc

SEQ ID NO: 1116079 - RNA, 19 nt, Artificial Sequence
  Description of Artificial Sequence: Synthetic oligonucleotide
  Antisense strand to SEQ ID NO: 1116078
gagcucaaagaucucccuu

SEQ ID NO: 1116080 - RNA, 19 nt, Artificial Sequence
  Description of Artificial Sequence: Synthetic oligonucleotide
  Sense strand starting at position 965 of SEQ ID NO: 915917
ggagaucuuugagcucaaa

SEQ ID NO: 1116081 - RNA, 19 nt, Artificial Sequence
  Description of Artificial Sequence: Synthetic oligonucleotide
  Antisense strand to SEQ ID NO: 1116080
uuugagcucaaagaucucc

SEQ ID NO: 1116082 - RNA, 19 nt, Artificial Sequence
  Description of Artificial Sequence: Synthetic oligonucleotide
  Sense strand starting at position 1027 of SEQ ID NO: 915917
agcggacgcuccggaaauu

SEQ ID NO: 1116083 - RNA, 19 nt, Artificial Sequence
  Description of Artificial Sequence: Synthetic oligonucleotide
  Antisense strand to SEQ ID NO: 1116082
aauuuccggagcguccgcu

SEQ ID NO: 1116084 - RNA, 19 nt, Artificial Sequence
  Description of Artificial Sequence: Synthetic oligonucleotide
  Sense strand starting at position 1084 of SEQ ID NO: 915917
ccuguaagguugcucaauu

SEQ ID NO: 1116085 - RNA, 19 nt, Artificial Sequence
  Description of Artificial Sequence: Synthetic oligonucleotide
  Antisense strand to SEQ ID NO: 1116084
aauugagcaaccuuacagg

SEQ ID NO: 1116086 - RNA, 19 nt, Artificial Sequence
  Description of Artificial Sequence: Synthetic oligonucleotide
  Sense strand starting at position 1085 of SEQ ID NO: 915917
cuguaagguugcucaauuc

SEQ ID NO: 1116087 - RNA, 19 nt, Artificial Sequence
  Description of Artificial Sequence: Synthetic oligonucleotide
  Antisense strand to SEQ ID NO: 1116086
gaauugagcaaccuuacag

SEQ ID NO: 1116088 - RNA, 19 nt, Artificial Sequence
  Description of Artificial Sequence: Synthetic oligonucleotide
  Sense strand starting at position 1220 of SEQ ID NO: 915917
aaauaacuaugucugggau

SEQ ID NO: 1116089 - RNA, 19 nt, Artificial Sequence
  Description of Artificial Sequence: Synthetic oligonucleotide
  Antisense strand to SEQ ID NO: 1116088
aucccagacauaguuauuu

SEQ ID NO: 1116090 - RNA, 19 nt, Artificial Sequence
  Description of Artificial Sequence: Synthetic oligonucleotide
  Sense strand starting at position 1221 of SEQ ID NO: 915917
aauaacuaugucugggaua

SEQ ID NO: 1116091 - RNA, 19 nt, Artificial Sequence
  Description of Artificial Sequence: Synthetic oligonucleotide
  Antisense strand to SEQ ID NO: 1116090
uaucccagacauaguuauu

SEQ ID NO: 1116092 - RNA, 19 nt, Artificial Sequence
  Description of Artificial Sequence: Synthetic oligonucleotide
  Sense strand starting at position 1222 of SEQ ID NO: 915917
auaacuaugucugggauag

SEQ ID NO: 1116093 - RNA, 19 nt, Artificial Sequence
  Description of Artificial Sequence: Synthetic oligonucleotide
  Antisense strand to SEQ ID NO: 1116092
cuaucccagacauaguuau

SEQ ID NO: 1116094 - RNA, 19 nt, Artificial Sequence
  Description of Artificial Sequence: Synthetic oligonucleotide
  Sense strand starting at position 1223 of SEQ ID NO: 915917
uaacuaugucugggauagg

SEQ ID NO: 1116095 - RNA, 19 nt, Artificial Sequence
  Description of Artificial Sequence: Synthetic oligonucleotide
  Antisense strand to SEQ ID NO: 1116094
ccuaucccagacauaguua

SEQ ID NO: 1116096 - RNA, 19 nt, Artificial Sequence
  Description of Artificial Sequence: Synthetic oligonucleotide
  Sense strand starting at position 2865 of SEQ ID NO: 915917
ggugaagugggaggaguuu

SEQ ID NO: 1116097 - RNA, 19 nt, Artificial Sequence
  Description of Artificial Sequence: Synthetic oligonucleotide
  Antisense strand to SEQ ID NO: 1116096
aaacuccucccacuucacc

SEQ ID NO: 1116098 - RNA, 19 nt, Artificial Sequence
  Description of Artificial Sequence: Synthetic oligonucleotide
  Sense strand starting at position 2896 of SEQ ID NO: 915917
gguagagauugggauaaug

SEQ ID NO: 1116099 - RNA, 19 nt, Artificial Sequence
  Description of Artificial Sequence: Synthetic oligonucleotide
  Antisense strand to SEQ ID NO: 1116098
cauuaucccaaucucuacc

SEQ ID NO: 1116100 - RNA, 19 nt, Artificial Sequence
  Description of Artificial Sequence: Synthetic oligonucleotide
  Sense strand starting at position 2914 of SEQ ID NO: 915917
gggauuggauuggaaagau

SEQ ID NO: 1116101 - RNA, 19 nt, Artificial Sequence
  Description of Artificial Sequence: Synthetic oligonucleotide
  Antisense strand to SEQ ID NO: 1116100
aucuuuccaauccaauccc

SEQ ID NO: 1116102 - RNA, 19 nt, Artificial Sequence
  Description of Artificial Sequence: Synthetic oligonucleotide
  Sense strand starting at position 2959 of SEQ ID NO: 915917
ccuggugagaagugagaga

SEQ ID NO: 1116103 - RNA, 19 nt, Artificial Sequence
  Description of Artificial Sequence: Synthetic oligonucleotide
  Antisense strand to SEQ ID NO: 1116102
ucucucacuucucaccagg

SEQ ID NO: 1116104 - RNA, 19 nt, Artificial Sequence
  Description of Artificial Sequence: Synthetic oligonucleotide
  Sense strand starting at position 2986 of SEQ ID NO: 915917
gugagggaucuguggcaga

SEQ ID NO: 1116105 - RNA, 19 nt, Artificial Sequence
  Description of Artificial Sequence: Synthetic oligonucleotide
  Antisense strand to SEQ ID NO: 1116104
ucugccacagaucccucac

SEQ ID NO: 1116106 - RNA, 19 nt, Artificial Sequence
  Description of Artificial Sequence: Synthetic oligonucleotide
  Sense strand starting at position 2989 of SEQ ID NO: 915917
agggaucuguggcagagau

SEQ ID NO: 1116107 - RNA, 19 nt, Artificial Sequence
  Description of Artificial Sequence: Synthetic oligonucleotide
  Antisense strand to SEQ ID NO: 1116106
aucucugccacagaucccu

SEQ ID NO: 1116108 - RNA, 19 nt, Artificial Sequence
  Description of Artificial Sequence: Synthetic oligonucleotide
  Sense strand starting at position 3026 of SEQ ID NO: 915917
gggcuauuaucagagagaa

SEQ ID NO: 1116109 - RNA, 19 nt, Artificial Sequence
  Description of Artificial Sequence: Synthetic oligonucleotide
  Antisense strand to SEQ ID NO: 1116108
uucucucugauaauagccc

SEQ ID NO: 1116110 - RNA, 19 nt, Artificial Sequence
  Description of Artificial Sequence: Synthetic oligonucleotide
  Sense strand starting at position 3139 of SEQ ID NO: 915917
ggugauuaguguugacaaa

SEQ ID NO: 1116111 - RNA, 19 nt, Artificial Sequence
  Description of Artificial Sequence: Synthetic oligonucleotide
  Antisense strand to SEQ ID NO: 1116110
uuugucaacacuaaucacc

SEQ ID NO: 1116112 - RNA, 19 nt, Artificial Sequence
  Description of Artificial Sequence: Synthetic oligonucleotide
  Sense strand starting at position 3221 of SEQ ID NO: 915917
gaggaaacgucagugagga

SEQ ID NO: 1116113 - RNA, 19 nt, Artificial Sequence
  Description of Artificial Sequence: Synthetic oligonucleotide
  Antisense strand to SEQ ID NO: 1116112
uccucacugacguuuccuc

SEQ ID NO: 1116114 - RNA, 19 nt, Artificial Sequence
  Description of Artificial Sequence: Synthetic oligonucleotide
  Sense strand starting at position 3314 of SEQ ID NO: 915917
auagguucugggugagaaa

SEQ ID NO: 1116115 - RNA, 19 nt, Artificial Sequence
  Description of Artificial Sequence: Synthetic oligonucleotide
  Antisense strand to SEQ ID NO: 1116114
uuucucacccagaaccuau

SEQ ID NO: 1116116 - RNA, 19 nt, Artificial Sequence
  Description of Artificial Sequence: Synthetic oligonucleotide
  Sense strand starting at position 3607 of SEQ ID NO: 915917
ggucacuugucaggaguuc

SEQ ID NO: 1116117 - RNA, 19 nt, Artificial Sequence
  Description of Artificial Sequence: Synthetic oligonucleotide
  Antisense strand to SEQ ID NO: 1116116
gaacuccugacaagugacc

SEQ ID NO: 1116118 - RNA, 19 nt, Artificial Sequence
  Description of Artificial Sequence: Synthetic oligonucleotide
  Sense strand starting at position 3907 of SEQ ID NO: 915917
gcaagcucauggguagaua

SEQ ID NO: 1116119 - RNA, 19 nt, Artificial Sequence
  Description of Artificial Sequence: Synthetic oligonucleotide
  Antisense strand to SEQ ID NO: 1116118
uaucuacccaugagcuugc

SEQ ID NO: 1116120 - RNA, 19 nt, Artificial Sequence
  Description of Artificial Sequence: Synthetic oligonucleotide
  Sense strand starting at position 66 of SEQ ID NO: 915918
aguccaacaucaucuuagu

SEQ ID NO: 1116121 - RNA, 19 nt, Artificial Sequence
  Description of Artificial Sequence: Synthetic oligonucleotide
  Antisense strand to SEQ ID NO: 1116120
acuaagaugauguuggacu

SEQ ID NO: 1116122 - RNA, 19 nt, Artificial Sequence
  Description of Artificial Sequence: Synthetic oligonucleotide
  Sense strand starting at position 74 of SEQ ID NO: 915918
aucaucuuaguaugaucuu

SEQ ID NO: 1116123 - RNA, 19 nt, Artificial Sequence
  Description of Artificial Sequence: Synthetic oligonucleotide
  Antisense strand to SEQ ID NO: 1116122
aagaucauacuaagaugau

SEQ ID NO: 1116124 - RNA, 19 nt, Artificial Sequence
  Description of Artificial Sequence: Synthetic oligonucleotide
  Sense strand starting at position 77 of SEQ ID NO: 915918
aucuuaguaugaucuuaca

SEQ ID NO: 1116125 - RNA, 19 nt, Artificial Sequence
  Description of Artificial Sequence: Synthetic oligonucleotide
  Antisense strand to SEQ ID NO: 1116124
uguaagaucauacuaagau

SEQ ID NO: 1116126 - RNA, 19 nt, Artificial Sequence
  Description of Artificial Sequence: Synthetic oligonucleotide
  Sense strand starting at position 370 of SEQ ID NO: 915918
ugauuuaucuauggaauac

SEQ ID NO: 1116127 - RNA, 19 nt, Artificial Sequence
  Description of Artificial Sequence: Synthetic oligonucleotide
  Antisense strand to SEQ ID NO: 1116126
guauuccauagauaaauca

SEQ ID NO: 1116128 - RNA, 19 nt, Artificial Sequence
  Description of Artificial Sequence: Synthetic oligonucleotide
  Sense strand starting at position 615 of SEQ ID NO: 915918
gccgguaacucuguagaau

SEQ ID NO: 1116129 - RNA, 19 nt, Artificial Sequence
  Description of Artificial Sequence: Synthetic oligonucleotide
  Antisense strand to SEQ ID NO: 1116128
auucuacagaguuaccggc

SEQ ID NO: 1116130 - RNA, 19 nt, Artificial Sequence
  Description of Artificial Sequence: Synthetic oligonucleotide
  Sense strand starting at position 616 of SEQ ID NO: 915918
ccgguaacucuguagaaug

SEQ ID NO: 1116131 - RNA, 19 nt, Artificial Sequence
  Description of Artificial Sequence: Synthetic oligonucleotide
  Antisense strand to SEQ ID NO: 1116130
cauucuacagaguuaccgg

SEQ ID NO: 1116132 - RNA, 19 nt, Artificial Sequence
  Description of Artificial Sequence: Synthetic oligonucleotide
  Sense strand starting at position 618 of SEQ ID NO: 915918
gguaacucuguagaaugua

SEQ ID NO: 1116133 - RNA, 19 nt, Artificial Sequence
  Description of Artificial Sequence: Synthetic oligonucleotide
  Antisense strand to SEQ ID NO: 1116132
uacauucuacagaguuacc

SEQ ID NO: 1116134 - RNA, 19 nt, Artificial Sequence
  Description of Artificial Sequence: Synthetic oligonucleotide
  Sense strand starting at position 621 of SEQ ID NO: 915918
aacucuguagaauguagaa

SEQ ID NO: 1116135 - RNA, 19 nt, Artificial Sequence
  Description of Artificial Sequence: Synthetic oligonucleotide
  Antisense strand to SEQ ID NO: 1116134
uucuacauucuacagaguu

SEQ ID NO: 1116136 - RNA, 19 nt, Artificial Sequence
  Description of Artificial Sequence: Synthetic oligonucleotide
  Sense strand starting at position 633 of SEQ ID NO: 915918
uguagaaauucgucaagca

SEQ ID NO: 1116137 - RNA, 19 nt, Artificial Sequence
  Description of Artificial Sequence: Synthetic oligonucleotide
  Antisense strand to SEQ ID NO: 1116136
ugcuugacgaauuucuaca

SEQ ID NO: 1116138 - RNA, 19 nt, Artificial Sequence
  Description of Artificial Sequence: Synthetic oligonucleotide
  Sense strand starting at position 634 of SEQ ID NO: 915918
guagaaauucgucaagcaa

SEQ ID NO: 1116139 - RNA, 19 nt, Artificial Sequence
  Description of Artificial Sequence: Synthetic oligonucleotide
  Antisense strand to SEQ ID NO: 1116138
uugcuugacgaauuucuac

SEQ ID NO: 1116140 - RNA, 19 nt, Artificial Sequence
  Description of Artificial Sequence: Synthetic oligonucleotide
  Sense strand starting at position 655 of SEQ ID NO: 915918
ugucaagagggagguuaaa

SEQ ID NO: 1116141 - RNA, 19 nt, Artificial Sequence
  Description of Artificial Sequence: Synthetic oligonucleotide
  Antisense strand to SEQ ID NO: 1116140
uuuaaccucccucuugaca

SEQ ID NO: 1116142 - RNA, 19 nt, Artificial Sequence
  Description of Artificial Sequence: Synthetic oligonucleotide
  Sense strand starting at position 855 of SEQ ID NO: 915918
agcccuaagcgugaaauca

SEQ ID NO: 1116143 - RNA, 19 nt, Artificial Sequence
  Description of Artificial Sequence: Synthetic oligonucleotide
  Antisense strand to SEQ ID NO: 1116142
ugauuucacgcuuagggcu

SEQ ID NO: 1116144 - RNA, 19 nt, Artificial Sequence
  Description of Artificial Sequence: Synthetic oligonucleotide
  Sense strand starting at position 910 of SEQ ID NO: 915918
gucaucacuucugccagau

SEQ ID NO: 1116145 - RNA, 19 nt, Artificial Sequence
  Description of Artificial Sequence: Synthetic oligonucleotide
  Antisense strand to SEQ ID NO: 1116144
aucuggcagaagugaugac

SEQ ID NO: 1116146 - RNA, 19 nt, Artificial Sequence
  Description of Artificial Sequence: Synthetic oligonucleotide
  Sense strand starting at position 914 of SEQ ID NO: 915918
ucacuucugccagaugugu

SEQ ID NO: 1116147 - RNA, 19 nt, Artificial Sequence
  Description of Artificial Sequence: Synthetic oligonucleotide
  Antisense strand to SEQ ID NO: 1116146
acacaucuggcagaaguga

SEQ ID NO: 1116148 - RNA, 19 nt, Artificial Sequence
  Description of Artificial Sequence: Synthetic oligonucleotide
  Sense strand starting at position 920 of SEQ ID NO: 915918
cugccagauguguaacuuu

SEQ ID NO: 1116149 - RNA, 19 nt, Artificial Sequence
  Description of Artificial Sequence: Synthetic oligonucleotide
  Antisense strand to SEQ ID NO: 1116148
aaaguuacacaucuggcag

SEQ ID NO: 1116150 - RNA, 19 nt, Artificial Sequence
  Description of Artificial Sequence: Synthetic oligonucleotide
  Sense strand starting at position 930 of SEQ ID NO: 915918
uguaacuuuggguaggaca

SEQ ID NO: 1116151 - RNA, 19 nt, Artificial Sequence
  Description of Artificial Sequence: Synthetic oligonucleotide
  Antisense strand to SEQ ID NO: 1116150
uguccuacccaaaguuaca

SEQ ID NO: 1116152 - RNA, 19 nt, Artificial Sequence
  Description of Artificial Sequence: Synthetic oligonucleotide
  Sense strand starting at position 2431 of SEQ ID NO: 915918
cugcgcucugcauccuaau

SEQ ID NO: 1116153 - RNA, 19 nt, Artificial Sequence
  Description of Artificial Sequence: Synthetic oligonucleotide
  Antisense strand to SEQ ID NO: 1116152
auuaggaugcagagcgcag

SEQ ID NO: 1116154 - RNA, 19 nt, Artificial Sequence
  Description of Artificial Sequence: Synthetic oligonucleotide
  Sense strand starting at position 2484 of SEQ ID NO: 915918
ggaggaauuccgcaguuca

SEQ ID NO: 1116155 - RNA, 19 nt, Artificial Sequence
  Description of Artificial Sequence: Synthetic oligonucleotide
  Antisense strand to SEQ ID NO: 1116154
ugaacugcggaauuccucc

SEQ ID NO: 1116156 - RNA, 19 nt, Artificial Sequence
  Description of Artificial Sequence: Synthetic oligonucleotide
  Sense strand starting at position 2767 of SEQ ID NO: 915918
cuucgcuguggcuuucaga

SEQ ID NO: 1116157 - RNA, 19 nt, Artificial Sequence
  Description of Artificial Sequence: Synthetic oligonucleotide
  Antisense strand to SEQ ID NO: 1116156
ucugaaagccacagcgaag

SEQ ID NO: 1116158 - RNA, 19 nt, Artificial Sequence
  Description of Artificial Sequence: Synthetic oligonucleotide
  Sense strand starting at position 2768 of SEQ ID NO: 915918
uucgcuguggcuuucagau

SEQ ID NO: 1116159 - RNA, 19 nt, Artificial Sequence
  Description of Artificial Sequence: Synthetic oligonucleotide
  Antisense strand to SEQ ID NO: 1116158
aucugaaagccacagcgaa

SEQ ID NO: 1116160 - RNA, 19 nt, Artificial Sequence
  Description of Artificial Sequence: Synthetic oligonucleotide
  Sense strand starting at position 2957 of SEQ ID NO: 915918
ugggaaauugcauggaauu

SEQ ID NO: 1116161 - RNA, 19 nt, Artificial Sequence
  Description of Artificial Sequence: Synthetic oligonucleotide
  Antisense strand to SEQ ID NO: 1116160
aauuccaugcaauuuccca

SEQ ID NO: 1116162 - RNA, 19 nt, Artificial Sequence
  Description of Artificial Sequence: Synthetic oligonucleotide
  Sense strand starting at position 2958 of SEQ ID NO: 915918
gggaaauugcauggaauuc

SEQ ID NO: 1116163 - RNA, 19 nt, Artificial Sequence
  Description of Artificial Sequence: Synthetic oligonucleotide
  Antisense strand to SEQ ID NO: 1116162
gaauuccaugcaauuuccc

SEQ ID NO: 1116164 - RNA, 19 nt, Artificial Sequence
  Description of Artificial Sequence: Synthetic oligonucleotide
  Sense strand starting at position 3029 of SEQ ID NO: 915918
ggaguagguugcagaauga

SEQ ID NO: 1116165 - RNA, 19 nt, Artificial Sequence
  Description of Artificial Sequence: Synthetic oligonucleotide
  Antisense strand to SEQ ID NO: 1116164
ucauucugcaaccuacucc

SEQ ID NO: 1116166 - RNA, 19 nt, Artificial Sequence
  Description of Artificial Sequence: Synthetic oligonucleotide
  Sense strand starting at position 3065 of SEQ ID NO: 915918
uguguuuaacaauaacgca

SEQ ID NO: 1116167 - RNA, 19 nt, Artificial Sequence
  Description of Artificial Sequence: Synthetic oligonucleotide
  Antisense strand to SEQ ID NO: 1116166
ugcguuauuguuaaacaca

SEQ ID NO: 1116168 - RNA, 19 nt, Artificial Sequence
  Description of Artificial Sequence: Synthetic oligonucleotide
  Sense strand starting at position 3175 of SEQ ID NO: 915918
ugcaaauuacagugcauca

SEQ ID NO: 1116169 - RNA, 19 nt, Artificial Sequence
  Description of Artificial Sequence: Synthetic oligonucleotide
  Antisense strand to SEQ ID NO: 1116168
ugaugcacuguaauuugca

SEQ ID NO: 1116170 - RNA, 19 nt, Artificial Sequence
  Description of Artificial Sequence: Synthetic oligonucleotide
  Sense strand starting at position 3354 of SEQ ID NO: 915918
guggaaacugguuagguca

SEQ ID NO: 1116171 - RNA, 19 nt, Artificial Sequence
  Description of Artificial Sequence: Synthetic oligonucleotide
  Antisense strand to SEQ ID NO: 1116170
ugaccuaaccaguuuccac

SEQ ID NO: 1116172 - RNA, 19 nt, Artificial Sequence
  Description of Artificial Sequence: Synthetic oligonucleotide
  Sense strand starting at position 3413 of SEQ ID NO: 915918
gugggaguguggucaugga

SEQ ID NO: 1116173 - RNA, 19 nt, Artificial Sequence
  Description of Artificial Sequence: Synthetic oligonucleotide
  Antisense strand to SEQ ID NO: 1116172
uccaugaccacacucccac

SEQ ID NO: 1116174 - RNA, 19 nt, Artificial Sequence
  Description of Artificial Sequence: Synthetic oligonucleotide
  Sense strand starting at position 3535 of SEQ ID NO: 915918
gcaggagaaggaugguuua

SEQ ID NO: 1116175 - RNA, 19 nt, Artificial Sequence
  Description of Artificial Sequence: Synthetic oligonucleotide
  Antisense strand to SEQ ID NO: 1116174
uaaaccauccuucuccugc

SEQ ID NO: 1116176 - RNA, 19 nt, Artificial Sequence
  Description of Artificial Sequence: Synthetic oligonucleotide
  Sense strand starting at position 3554 of SEQ ID NO: 915918
ccuuucucagccuggaaau

SEQ ID NO: 1116177 - RNA, 19 nt, Artificial Sequence
  Description of Artificial Sequence: Synthetic oligonucleotide
  Antisense strand to SEQ ID NO: 1116176
auuuccaggcugagaaagg

SEQ ID NO: 1116178 - RNA, 19 nt, Artificial Sequence
  Description of Artificial Sequence: Synthetic oligonucleotide
  Sense strand starting at position 3555 of SEQ ID NO: 915918
cuuucucagccuggaaauu

SEQ ID NO: 1116179 - RNA, 19 nt, Artificial Sequence
  Description of Artificial Sequence: Synthetic oligonucleotide
  Antisense strand to SEQ ID NO: 1116178
aauuuccaggcugagaaag

SEQ ID NO: 1116180 - RNA, 19 nt, Artificial Sequence
  Description of Artificial Sequence: Synthetic oligonucleotide
  Sense strand starting at position 3556 of SEQ ID NO: 915918
uuucucagccuggaaauua

SEQ ID NO: 1116181 - RNA, 19 nt, Artificial Sequence
  Description of Artificial Sequence: Synthetic oligonucleotide
  Antisense strand to SEQ ID NO: 1116180
uaauuuccaggcugagaaa

SEQ ID NO: 1116182 - RNA, 19 nt, Artificial Sequence
  Description of Artificial Sequence: Synthetic oligonucleotide
  Sense strand starting at position 3566 of SEQ ID NO: 915918
uggaaauuagcuuaggcau

SEQ ID NO: 1116183 - RNA, 19 nt, Artificial Sequence
  Description of Artificial Sequence: Synthetic oligonucleotide
  Antisense strand to SEQ ID NO: 1116182
augccuaagcuaauuucca

SEQ ID NO: 1116184 - RNA, 19 nt, Artificial Sequence
  Description of Artificial Sequence: Synthetic oligonucleotide
  Sense strand starting at position 3574 of SEQ ID NO: 915918
agcuuaggcauuugauguu

SEQ ID NO: 1116185 - RNA, 19 nt, Artificial Sequence
  Description of Artificial Sequence: Synthetic oligonucleotide
  Antisense strand to SEQ ID NO: 1116184
aacaucaaaugccuaagcu

SEQ ID NO: 1116186 - RNA, 19 nt, Artificial Sequence
  Description of Artificial Sequence: Synthetic oligonucleotide
  Sense strand starting at position 3590 of SEQ ID NO: 915918
guugaauauucugugccac

SEQ ID NO: 1116187 - RNA, 19 nt, Artificial Sequence
  Description of Artificial Sequence: Synthetic oligonucleotide
  Antisense strand to SEQ ID NO: 1116186
guggcacagaauauucaac

SEQ ID NO: 1116188 - RNA, 19 nt, Artificial Sequence
  Description of Artificial Sequence: Synthetic oligonucleotide
  Sense strand starting at position 3591 of SEQ ID NO: 915918
uugaauauucugugccacu

SEQ ID NO: 1116189 - RNA, 19 nt, Artificial Sequence
  Description of Artificial Sequence: Synthetic oligonucleotide
  Antisense strand to SEQ ID NO: 1116188
aguggcacagaauauucaa

SEQ ID NO: 1116190 - RNA, 19 nt, Artificial Sequence
  Description of Artificial Sequence: Synthetic oligonucleotide
  Sense strand starting at position 3592 of SEQ ID NO: 915918
ugaauauucugugccacug

SEQ ID NO: 1116191 - RNA, 19 nt, Artificial Sequence
  Description of Artificial Sequence: Synthetic oligonucleotide
  Antisense strand to SEQ ID NO: 1116190
caguggcacagaauauuca

SEQ ID NO: 1116192 - RNA, 19 nt, Artificial Sequence
  Description of Artificial Sequence: Synthetic oligonucleotide
  Sense strand starting at position 3630 of SEQ ID NO: 915918
gcaccucuggugcaauuau

SEQ ID NO: 1116193 - RNA, 19 nt, Artificial Sequence
  Description of Artificial Sequence: Synthetic oligonucleotide
  Antisense strand to SEQ ID NO: 1116192
auaauugcaccagaggugc

SEQ ID NO: 1116194 - RNA, 19 nt, Artificial Sequence
  Description of Artificial Sequence: Synthetic oligonucleotide
  Sense strand starting at position 3684 of SEQ ID NO: 915918
auggaaugcucuucccaca

SEQ ID NO: 1116195 - RNA, 19 nt, Artificial Sequence
  Description of Artificial Sequence: Synthetic oligonucleotide
  Antisense strand to SEQ ID NO: 1116194
ugugggaagagcauuccau

SEQ ID NO: 1116196 - RNA, 19 nt, Artificial Sequence
  Description of Artificial Sequence: Synthetic oligonucleotide
  Sense strand starting at position 3764 of SEQ ID NO: 915918
agagaugucuuugcugucu

SEQ ID NO: 1116197 - RNA, 19 nt, Artificial Sequence
  Description of Artificial Sequence: Synthetic oligonucleotide
  Antisense strand to SEQ ID NO: 1116196
agacagcaaagacaucucu

SEQ ID NO: 1116198 - RNA, 19 nt, Artificial Sequence
  Description of Artificial Sequence: Synthetic oligonucleotide
  Sense strand starting at position 3770 of SEQ ID NO: 915918
gucuuugcugucuaaagug

SEQ ID NO: 1116199 - RNA, 19 nt, Artificial Sequence
  Description of Artificial Sequence: Synthetic oligonucleotide
  Antisense strand to SEQ ID NO: 1116198
cacuuuagacagcaaagac

SEQ ID NO: 1116200 - RNA, 19 nt, Artificial Sequence
  Description of Artificial Sequence: Synthetic oligonucleotide
  Sense strand starting at position 124 of SEQ ID NO: 915919
uauuaaaguccaugggaac

SEQ ID NO: 1116201 - RNA, 19 nt, Artificial Sequence
  Description of Artificial Sequence: Synthetic oligonucleotide
  Antisense strand to SEQ ID NO: 1116200
guucccauggacuuuaaua

SEQ ID NO: 1116202 - RNA, 19 nt, Artificial Sequence
  Description of Artificial Sequence: Synthetic oligonucleotide
  Sense strand starting at position 125 of SEQ ID NO: 915919
auuaaaguccaugggaacu

SEQ ID NO: 1116203 - RNA, 19 nt, Artificial Sequence
  Description of Artificial Sequence: Synthetic oligonucleotide
  Antisense strand to SEQ ID NO: 1116202
aguucccauggacuuuaau

SEQ ID NO: 1116204 - RNA, 19 nt, Artificial Sequence
  Description of Artificial Sequence: Synthetic oligonucleotide
  Sense strand starting at position 138 of SEQ ID NO: 915919
ggaacuguucccgauacuc

SEQ ID NO: 1116205 - RNA, 19 nt, Artificial Sequence
  Description of Artificial Sequence: Synthetic oligonucleotide
  Antisense strand to SEQ ID NO: 1116204
gaguaucgggaacaguucc

SEQ ID NO: 1116206 - RNA, 19 nt, Artificial Sequence
  Description of Artificial Sequence: Synthetic oligonucleotide
  Sense strand starting at position 214 of SEQ ID NO: 915919
ugggaacuguuccugauac

SEQ ID NO: 1116207 - RNA, 19 nt, Artificial Sequence
  Description of Artificial Sequence: Synthetic oligonucleotide
  Antisense strand to SEQ ID NO: 1116206
guaucaggaacaguuccca

SEQ ID NO: 1116208 - RNA, 19 nt, Artificial Sequence
  Description of Artificial Sequence: Synthetic oligonucleotide
  Sense strand starting at position 216 of SEQ ID NO: 915919
ggaacuguuccugauacuc

SEQ ID NO: 1116209 - RNA, 19 nt, Artificial Sequence
  Description of Artificial Sequence: Synthetic oligonucleotide
  Antisense strand to SEQ ID NO: 1116208
gaguaucaggaacaguucc

SEQ ID NO: 1116210 - RNA, 19 nt, Artificial Sequence
  Description of Artificial Sequence: Synthetic oligonucleotide
  Sense strand starting at position 226 of SEQ ID NO: 915919
cugauacucuuaguuauac

SEQ ID NO: 1116211 - RNA, 19 nt, Artificial Sequence
  Description of Artificial Sequence: Synthetic oligonucleotide
  Antisense strand to SEQ ID NO: 1116210
guauaacuaagaguaucag

SEQ ID NO: 1116212 - RNA, 19 nt, Artificial Sequence
  Description of Artificial Sequence: Synthetic oligonucleotide
  Sense strand starting at position 268 of SEQ ID NO: 915919
auguauuaauaguugggau

SEQ ID NO: 1116213 - RNA, 19 nt, Artificial Sequence
  Description of Artificial Sequence: Synthetic oligonucleotide
  Antisense strand to SEQ ID NO: 1116212
aucccaacuauuaauacau

SEQ ID NO: 1116214 - RNA, 19 nt, Artificial Sequence
  Description of Artificial Sequence: Synthetic oligonucleotide
  Sense strand starting at position 269 of SEQ ID NO: 915919
uguauuaauaguugggauc

SEQ ID NO: 1116215 - RNA, 19 nt, Artificial Sequence
  Description of Artificial Sequence: Synthetic oligonucleotide
  Antisense strand to SEQ ID NO: 1116214
gaucccaacuauuaauaca

SEQ ID NO: 1116216 - RNA, 19 nt, Artificial Sequence
  Description of Artificial Sequence: Synthetic oligonucleotide
  Sense strand starting at position 270 of SEQ ID NO: 915919
guauuaauaguugggauca

SEQ ID NO: 1116217 - RNA, 19 nt, Artificial Sequence
  Description of Artificial Sequence: Synthetic oligonucleotide
  Antisense strand to SEQ ID NO: 1116216
ugaucccaacuauuaauac

SEQ ID NO: 1116218 - RNA, 19 nt, Artificial Sequence
  Description of Artificial Sequence: Synthetic oligonucleotide
  Sense strand starting at position 320 of SEQ ID NO: 915919
aaugguguagcauaucuaa

SEQ ID NO: 1116219 - RNA, 19 nt, Artificial Sequence
  Description of Artificial Sequence: Synthetic oligonucleotide
  Antisense strand to SEQ ID NO: 1116218
uuagauaugcuacaccauu

SEQ ID NO: 1116220 - RNA, 19 nt, Artificial Sequence
  Description of Artificial Sequence: Synthetic oligonucleotide
  Sense strand starting at position 410 of SEQ ID NO: 915919
aggucuugcaggcaaagaa

SEQ ID NO: 1116221 - RNA, 19 nt, Artificial Sequence
  Description of Artificial Sequence: Synthetic oligonucleotide
  Antisense strand to SEQ ID NO: 1116220
uucuuugccugcaagaccu

SEQ ID NO: 1116222 - RNA, 19 nt, Artificial Sequence
  Description of Artificial Sequence: Synthetic oligonucleotide
  Sense strand starting at position 458 of SEQ ID NO: 915919
uugggacaugugugaauac

SEQ ID NO: 1116223 - RNA, 19 nt, Artificial Sequence
  Description of Artificial Sequence: Synthetic oligonucleotide
  Antisense strand to SEQ ID NO: 1116222
guauucacacaugucccaa

SEQ ID NO: 1116224 - RNA, 19 nt, Artificial Sequence
  Description of Artificial Sequence: Synthetic oligonucleotide
  Sense strand starting at position 855 of SEQ ID NO: 915919
uggaaaugcuuuccuggaa

SEQ ID NO: 1116225 - RNA, 19 nt, Artificial Sequence
  Description of Artificial Sequence: Synthetic oligonucleotide
  Antisense strand to SEQ ID NO: 1116224
uuccaggaaagcauuucca

SEQ ID NO: 1116226 - RNA, 19 nt, Artificial Sequence
  Description of Artificial Sequence: Synthetic oligonucleotide
  Sense strand starting at position 856 of SEQ ID NO: 915919
ggaaaugcuuuccuggaau

SEQ ID NO: 1116227 - RNA, 19 nt, Artificial Sequence
  Description of Artificial Sequence: Synthetic oligonucleotide
  Antisense strand to SEQ ID NO: 1116226
auuccaggaaagcauuucc

SEQ ID NO: 1116228 - RNA, 19 nt, Artificial Sequence
  Description of Artificial Sequence: Synthetic oligonucleotide
  Sense strand starting at position 859 of SEQ ID NO: 915919
aaugcuuuccuggaauguc

SEQ ID NO: 1116229 - RNA, 19 nt, Artificial Sequence
  Description of Artificial Sequence: Synthetic oligonucleotide
  Antisense strand to SEQ ID NO: 1116228
gacauuccaggaaagcauu

SEQ ID NO: 1116230 - RNA, 19 nt, Artificial Sequence
  Description of Artificial Sequence: Synthetic oligonucleotide
  Sense strand starting at position 901 of SEQ ID NO: 915919
cugauuaauuuaugaaagg

SEQ ID NO: 1116231 - RNA, 19 nt, Artificial Sequence
  Description of Artificial Sequence: Synthetic oligonucleotide
  Antisense strand to SEQ ID NO: 1116230
ccuuucauaaauuaaucag

SEQ ID NO: 1116232 - RNA, 19 nt, Artificial Sequence
  Description of Artificial Sequence: Synthetic oligonucleotide
  Sense strand starting at position 944 of SEQ ID NO: 915919
accauaaugccagaaaguu

SEQ ID NO: 1116233 - RNA, 19 nt, Artificial Sequence
  Description of Artificial Sequence: Synthetic oligonucleotide
  Antisense strand to SEQ ID NO: 1116232
aacuuucuggcauuauggu

SEQ ID NO: 1116234 - RNA, 19 nt, Artificial Sequence
  Description of Artificial Sequence: Synthetic oligonucleotide
  Sense strand starting at position 1088 of SEQ ID NO: 915919
aaaggaaaugucuguuagg

SEQ ID NO: 1116235 - RNA, 19 nt, Artificial Sequence
  Description of Artificial Sequence: Synthetic oligonucleotide
  Antisense strand to SEQ ID NO: 1116234
ccuaacagacauuuccuuu

SEQ ID NO: 1116236 - RNA, 19 nt, Artificial Sequence
  Description of Artificial Sequence: Synthetic oligonucleotide
  Sense strand starting at position 1089 of SEQ ID NO: 915919
aaggaaaugucuguuaggu

SEQ ID NO: 1116237 - RNA, 19 nt, Artificial Sequence
  Description of Artificial Sequence: Synthetic oligonucleotide
  Antisense strand to SEQ ID NO: 1116236
accuaacagacauuuccuu

SEQ ID NO: 1116238 - RNA, 19 nt, Artificial Sequence
  Description of Artificial Sequence: Synthetic oligonucleotide
  Sense strand starting at position 1146 of SEQ ID NO: 915919
aggaacuccugagcuaauu

SEQ ID NO: 1116239 - RNA, 19 nt, Artificial Sequence
  Description of Artificial Sequence: Synthetic oligonucleotide
  Antisense strand to SEQ ID NO: 1116238
aauuagcucaggaguuccu

SEQ ID NO: 1116240 - RNA, 19 nt, Artificial Sequence
  Description of Artificial Sequence: Synthetic oligonucleotide
  Sense strand starting at position 1253 of SEQ ID NO: 915919
aggauagugaucugagagu

SEQ ID NO: 1116241 - RNA, 19 nt, Artificial Sequence
  Description of Artificial Sequence: Synthetic oligonucleotide
  Antisense strand to SEQ ID NO: 1116240
acucucagaucacuauccu

SEQ ID NO: 1116242 - RNA, 19 nt, Artificial Sequence
  Description of Artificial Sequence: Synthetic oligonucleotide
  Sense strand starting at position 1513 of SEQ ID NO: 915919
aucauacaaucgccaagau

SEQ ID NO: 1116243 - RNA, 19 nt, Artificial Sequence
  Description of Artificial Sequence: Synthetic oligonucleotide
  Antisense strand to SEQ ID NO: 1116242
aucuuggcgauuguaugau

SEQ ID NO: 1116244 - RNA, 19 nt, Artificial Sequence
  Description of Artificial Sequence: Synthetic oligonucleotide
  Sense strand starting at position 1514 of SEQ ID NO: 915919
ucauacaaucgccaagaua

SEQ ID NO: 1116245 - RNA, 19 nt, Artificial Sequence
  Description of Artificial Sequence: Synthetic oligonucleotide
  Antisense strand to SEQ ID NO: 1116244
uaucuuggcgauuguauga

SEQ ID NO: 1116246 - RNA, 19 nt, Artificial Sequence
  Description of Artificial Sequence: Synthetic oligonucleotide
  Sense strand starting at position 1638 of SEQ ID NO: 915919
gugcaaauuccauagacau

SEQ ID NO: 1116247 - RNA, 19 nt, Artificial Sequence
  Description of Artificial Sequence: Synthetic oligonucleotide
  Antisense strand to SEQ ID NO: 1116246
augucuauggaauuugcac

SEQ ID NO: 1116248 - RNA, 19 nt, Artificial Sequence
  Description of Artificial Sequence: Synthetic oligonucleotide
  Sense strand starting at position 1725 of SEQ ID NO: 915919
gcgagcguaauuccaaagu

SEQ ID NO: 1116249 - RNA, 19 nt, Artificial Sequence
  Description of Artificial Sequence: Synthetic oligonucleotide
  Antisense strand to SEQ ID NO: 1116248
acuuuggaauuacgcucgc

SEQ ID NO: 1116250 - RNA, 19 nt, Artificial Sequence
  Description of Artificial Sequence: Synthetic oligonucleotide
  Sense strand starting at position 1964 of SEQ ID NO: 915919
agcaacauuucccagagaa

SEQ ID NO: 1116251 - RNA, 19 nt, Artificial Sequence
  Description of Artificial Sequence: Synthetic oligonucleotide
  Antisense strand to SEQ ID NO: 1116250
uucucugggaaauguugcu

SEQ ID NO: 1116252 - RNA, 19 nt, Artificial Sequence
  Description of Artificial Sequence: Synthetic oligonucleotide
  Sense strand starting at position 1989 of SEQ ID NO: 915919
ugaccuuuggcccaugacu

SEQ ID NO: 1116253 - RNA, 19 nt, Artificial Sequence
  Description of Artificial Sequence: Synthetic oligonucleotide
  Antisense strand to SEQ ID NO: 1116252
agucaugggccaaagguca

SEQ ID NO: 1116254 - RNA, 19 nt, Artificial Sequence
  Description of Artificial Sequence: Synthetic oligonucleotide
  Sense strand starting at position 2002 of SEQ ID NO: 915919
augacuaguuucuccauau

SEQ ID NO: 1116255 - RNA, 19 nt, Artificial Sequence
  Description of Artificial Sequence: Synthetic oligonucleotide
  Antisense strand to SEQ ID NO: 1116254
auauggagaaacuagucau

SEQ ID NO: 1116256 - RNA, 19 nt, Artificial Sequence
  Description of Artificial Sequence: Synthetic oligonucleotide
  Sense strand starting at position 2108 of SEQ ID NO: 915919
uucuaaaugucaccaggua

SEQ ID NO: 1116257 - RNA, 19 nt, Artificial Sequence
  Description of Artificial Sequence: Synthetic oligonucleotide
  Antisense strand to SEQ ID NO: 1116256
uaccuggugacauuuagaa

SEQ ID NO: 1116258 - RNA, 19 nt, Artificial Sequence
  Description of Artificial Sequence: Synthetic oligonucleotide
  Sense strand starting at position 2295 of SEQ ID NO: 915919
ugauccacucaguauuacu

SEQ ID NO: 1116259 - RNA, 19 nt, Artificial Sequence
  Description of Artificial Sequence: Synthetic oligonucleotide
  Antisense strand to SEQ ID NO: 1116258
aguaauacugaguggauca

SEQ ID NO: 1116260 - RNA, 19 nt, Artificial Sequence
  Description of Artificial Sequence: Synthetic oligonucleotide
  Sense strand starting at position 2451 of SEQ ID NO: 915919
cuaacaaauggcugaaaug

SEQ ID NO: 1116261 - RNA, 19 nt, Artificial Sequence
  Description of Artificial Sequence: Synthetic oligonucleotide
  Antisense strand to SEQ ID NO: 1116260
cauuucagccauuuguuag

SEQ ID NO: 1116262 - RNA, 19 nt, Artificial Sequence
  Description of Artificial Sequence: Synthetic oligonucleotide
  Sense strand starting at position 2866 of SEQ ID NO: 915919
guaccagacacaugguaga

SEQ ID NO: 1116263 - RNA, 19 nt, Artificial Sequence
  Description of Artificial Sequence: Synthetic oligonucleotide
  Antisense strand to SEQ ID NO: 1116262
ucuaccaugugucugguac

SEQ ID NO: 1116264 - RNA, 19 nt, Artificial Sequence
  Description of Artificial Sequence: Synthetic oligonucleotide
  Sense strand starting at position 3446 of SEQ ID NO: 915919
aauguuugaugauuagaac

SEQ ID NO: 1116265 - RNA, 19 nt, Artificial Sequence
  Description of Artificial Sequence: Synthetic oligonucleotide
  Antisense strand to SEQ ID NO: 1116264
guucuaaucaucaaacauu

SEQ ID NO: 1116266 - RNA, 19 nt, Artificial Sequence
  Description of Artificial Sequence: Synthetic oligonucleotide
  Sense strand starting at position 3480 of SEQ ID NO: 915919
uggcaaaugcaauaaaucu

SEQ ID NO: 1116267 - RNA, 19 nt, Artificial Sequence
  Description of Artificial Sequence: Synthetic oligonucleotide
  Antisense strand to SEQ ID NO: 1116266
agauuuauugcauuugcca

SEQ ID NO: 1116268 - RNA, 19 nt, Artificial Sequence
  Description of Artificial Sequence: Synthetic oligonucleotide
  Sense strand starting at position 3514 of SEQ ID NO: 915919
cuaugaagaugucuguaca

SEQ ID NO: 1116269 - RNA, 19 nt, Artificial Sequence
  Description of Artificial Sequence: Synthetic oligonucleotide
  Antisense strand to SEQ ID NO: 1116268
uguacagacaucuucauag

SEQ ID NO: 1116270 - RNA, 19 nt, Artificial Sequence
  Description of Artificial Sequence: Synthetic oligonucleotide
  Sense strand starting at position 3515 of SEQ ID NO: 915919
uaugaagaugucuguacau

SEQ ID NO: 1116271 - RNA, 19 nt, Artificial Sequence
  Description of Artificial Sequence: Synthetic oligonucleotide
  Antisense strand to SEQ ID NO: 1116270
auguacagacaucuucaua

SEQ ID NO: 1116272 - RNA, 19 nt, Artificial Sequence
  Description of Artificial Sequence: Synthetic oligonucleotide
  Sense strand starting at position 3517 of SEQ ID NO: 915919
ugaagaugucuguacauca

SEQ ID NO: 1116273 - RNA, 19 nt, Artificial Sequence
  Description of Artificial Sequence: Synthetic oligonucleotide
  Antisense strand to SEQ ID NO: 1116272
ugauguacagacaucuuca

SEQ ID NO: 1116274 - RNA, 19 nt, Artificial Sequence
  Description of Artificial Sequence: Synthetic oligonucleotide
  Sense strand starting at position 3575 of SEQ ID NO: 915919
cccagagaaucaguuagau

SEQ ID NO: 1116275 - RNA, 19 nt, Artificial Sequence
  Description of Artificial Sequence: Synthetic oligonucleotide
  Antisense strand to SEQ ID NO: 1116274
aucuaacugauucucuggg

SEQ ID NO: 1116276 - RNA, 19 nt, Artificial Sequence
  Description of Artificial Sequence: Synthetic oligonucleotide
  Sense strand starting at position 3757 of SEQ ID NO: 915919
auaugagugaguugaggau

SEQ ID NO: 1116277 - RNA, 19 nt, Artificial Sequence
  Description of Artificial Sequence: Synthetic oligonucleotide
  Antisense strand to SEQ ID NO: 1116276
auccucaacucacucauau

SEQ ID NO: 1116278 - RNA, 19 nt, Artificial Sequence
  Description of Artificial Sequence: Synthetic oligonucleotide
  Sense strand starting at position 3770 of SEQ ID NO: 915919
gaggauggcugggugagaa

SEQ ID NO: 1116279 - RNA, 19 nt, Artificial Sequence
  Description of Artificial Sequence: Synthetic oligonucleotide
  Antisense strand to SEQ ID NO: 1116278
uucucacccagccauccuc

SEQ ID NO: 1116280 - RNA, 19 nt, Artificial Sequence
  Description of Artificial Sequence: Synthetic oligonucleotide
  Sense strand starting at position 225 of SEQ ID NO: 915920
agccauaagaccgagucuu

SEQ ID NO: 1116281 - RNA, 19 nt, Artificial Sequence
  Description of Artificial Sequence: Synthetic oligonucleotide
  Antisense strand to SEQ ID NO: 1116280
aagacucggucuuauggcu

SEQ ID NO: 1116282 - RNA, 19 nt, Artificial Sequence
  Description of Artificial Sequence: Synthetic oligonucleotide
  Sense strand starting at position 482 of SEQ ID NO: 915920
gcagugagucgagagcgaa

SEQ ID NO: 1116283 - RNA, 19 nt, Artificial Sequence
  Description of Artificial Sequence: Synthetic oligonucleotide
  Antisense strand to SEQ ID NO: 1116282
uucgcucucgacucacugc

SEQ ID NO: 1116284 - RNA, 19 nt, Artificial Sequence
  Description of Artificial Sequence: Synthetic oligonucleotide
  Sense strand starting at position 575 of SEQ ID NO: 915920
gugaaacugcacuguguga

SEQ ID NO: 1116285 - RNA, 19 nt, Artificial Sequence
  Description of Artificial Sequence: Synthetic oligonucleotide
  Antisense strand to SEQ ID NO: 1116284
ucacacagugcaguuucac

SEQ ID NO: 1116286 - RNA, 19 nt, Artificial Sequence
  Description of Artificial Sequence: Synthetic oligonucleotide
  Sense strand starting at position 577 of SEQ ID NO: 915920
gaaacugcacugugugauu

SEQ ID NO: 1116287 - RNA, 19 nt, Artificial Sequence
  Description of Artificial Sequence: Synthetic oligonucleotide
  Antisense strand to SEQ ID NO: 1116286
aaucacacagugcaguuuc

SEQ ID NO: 1116288 - RNA, 19 nt, Artificial Sequence
  Description of Artificial Sequence: Synthetic oligonucleotide
  Sense strand starting at position 596 of SEQ ID NO: 915920
uuaauaaucgaacguauca

SEQ ID NO: 1116289 - RNA, 19 nt, Artificial Sequence
  Description of Artificial Sequence: Synthetic oligonucleotide
  Antisense strand to SEQ ID NO: 1116288
ugauacguucgauuauuaa

SEQ ID NO: 1116290 - RNA, 19 nt, Artificial Sequence
  Description of Artificial Sequence: Synthetic oligonucleotide
  Sense strand starting at position 673 of SEQ ID NO: 915920
agaaguuccuuugugcaua

SEQ ID NO: 1116291 - RNA, 19 nt, Artificial Sequence
  Description of Artificial Sequence: Synthetic oligonucleotide
  Antisense strand to SEQ ID NO: 1116290
uaugcacaaaggaacuucu

SEQ ID NO: 1116292 - RNA, 19 nt, Artificial Sequence
  Description of Artificial Sequence: Synthetic oligonucleotide
  Sense strand starting at position 676 of SEQ ID NO: 915920
aguuccuuugugcauagau

SEQ ID NO: 1116293 - RNA, 19 nt, Artificial Sequence
  Description of Artificial Sequence: Synthetic oligonucleotide
  Antisense strand to SEQ ID NO: 1116292
aucuaugcacaaaggaacu

SEQ ID NO: 1116294 - RNA, 19 nt, Artificial Sequence
  Description of Artificial Sequence: Synthetic oligonucleotide
  Sense strand starting at position 740 of SEQ ID NO: 915920
ucaauagguucuccaauga

SEQ ID NO: 1116295 - RNA, 19 nt, Artificial Sequence
  Description of Artificial Sequence: Synthetic oligonucleotide
  Antisense strand to SEQ ID NO: 1116294
ucauuggagaaccuauuga

SEQ ID NO: 1116296 - RNA, 19 nt, Artificial Sequence
  Description of Artificial Sequence: Synthetic oligonucleotide
  Sense strand starting at position 762 of SEQ ID NO: 915920
ucaugauucugcccaaagu

SEQ ID NO: 1116297 - RNA, 19 nt, Artificial Sequence
  Description of Artificial Sequence: Synthetic oligonucleotide
  Antisense strand to SEQ ID NO: 1116296
acuuugggcagaaucauga

SEQ ID NO: 1116298 - RNA, 19 nt, Artificial Sequence
  Description of Artificial Sequence: Synthetic oligonucleotide
  Sense strand starting at position 821 of SEQ ID NO: 915920
aguacuuucuggccucuaa

SEQ ID NO: 1116299 - RNA, 19 nt, Artificial Sequence
  Description of Artificial Sequence: Synthetic oligonucleotide
  Antisense strand to SEQ ID NO: 1116298
uuagaggccagaaaguacu

SEQ ID NO: 1116300 - RNA, 19 nt, Artificial Sequence
  Description of Artificial Sequence: Synthetic oligonucleotide
  Sense strand starting at position 921 of SEQ ID NO: 915920
aggauaaauugguaucaag

SEQ ID NO: 1116301 - RNA, 19 nt, Artificial Sequence
  Description of Artificial Sequence: Synthetic oligonucleotide
  Antisense strand to SEQ ID NO: 1116300
cuugauaccaauuuauccu

SEQ ID NO: 1116302 - RNA, 19 nt, Artificial Sequence
  Description of Artificial Sequence: Synthetic oligonucleotide
  Sense strand starting at position 1162 of SEQ ID NO: 915920
uuuagaauuggugguaguc

SEQ ID NO: 1116303 - RNA, 19 nt, Artificial Sequence
  Description of Artificial Sequence: Synthetic oligonucleotide
  Antisense strand to SEQ ID NO: 1116302
gacuaccaccaauucuaaa

SEQ ID NO: 1116304 - RNA, 19 nt, Artificial Sequence
  Description of Artificial Sequence: Synthetic oligonucleotide
  Sense strand starting at position 1172 of SEQ ID NO: 915920
gugguagucccucaucaaa

SEQ ID NO: 1116305 - RNA, 19 nt, Artificial Sequence
  Description of Artificial Sequence: Synthetic oligonucleotide
  Antisense strand to SEQ ID NO: 1116304
uuugaugagggacuaccac

SEQ ID NO: 1116306 - RNA, 19 nt, Artificial Sequence
  Description of Artificial Sequence: Synthetic oligonucleotide
  Sense strand starting at position 1174 of SEQ ID NO: 915920
gguagucccucaucaaacu

SEQ ID NO: 1116307 - RNA, 19 nt, Artificial Sequence
  Description of Artificial Sequence: Synthetic oligonucleotide
  Antisense strand to SEQ ID NO: 1116306
aguuugaugagggacuacc

SEQ ID NO: 1116308 - RNA, 19 nt, Artificial Sequence
  Description of Artificial Sequence: Synthetic oligonucleotide
  Sense strand starting at position 1261 of SEQ ID NO: 915920
gauguuugcgccgcauagu

SEQ ID NO: 1116309 - RNA, 19 nt, Artificial Sequence
  Description of Artificial Sequence: Synthetic oligonucleotide
  Antisense strand to SEQ ID NO: 1116308
acuaugcggcgcaaacauc

SEQ ID NO: 1116310 - RNA, 19 nt, Artificial Sequence
  Description of Artificial Sequence: Synthetic oligonucleotide
  Sense strand starting at position 1271 of SEQ ID NO: 915920
ccgcauagucccugacuaa

SEQ ID NO: 1116311 - RNA, 19 nt, Artificial Sequence
  Description of Artificial Sequence: Synthetic oligonucleotide
  Antisense strand to SEQ ID NO: 1116310
uuagucagggacuaugcgg

SEQ ID NO: 1116312 - RNA, 19 nt, Artificial Sequence
  Description of Artificial Sequence: Synthetic oligonucleotide
  Sense strand starting at position 1272 of SEQ ID NO: 915920
cgcauagucccugacuaac

SEQ ID NO: 1116313 - RNA, 19 nt, Artificial Sequence
  Description of Artificial Sequence: Synthetic oligonucleotide
  Antisense strand to SEQ ID NO: 1116312
guuagucagggacuaugcg

SEQ ID NO: 1116314 - RNA, 19 nt, Artificial Sequence
  Description of Artificial Sequence: Synthetic oligonucleotide
  Sense strand starting at position 1324 of SEQ ID NO: 915920
ccaguuaaaggucaucgga

SEQ ID NO: 1116315 - RNA, 19 nt, Artificial Sequence
  Description of Artificial Sequence: Synthetic oligonucleotide
  Antisense strand to SEQ ID NO: 1116314
uccgaugaccuuuaacugg

SEQ ID NO: 1116316 - RNA, 19 nt, Artificial Sequence
  Description of Artificial Sequence: Synthetic oligonucleotide
  Sense strand starting at position 1326 of SEQ ID NO: 915920
aguuaaaggucaucggaag

SEQ ID NO: 1116317 - RNA, 19 nt, Artificial Sequence
  Description of Artificial Sequence: Synthetic oligonucleotide
  Antisense strand to SEQ ID NO: 1116316
cuuccgaugaccuuuaacu

SEQ ID NO: 1116318 - RNA, 19 nt, Artificial Sequence
  Description of Artificial Sequence: Synthetic oligonucleotide
  Sense strand starting at position 1583 of SEQ ID NO: 915920
cagagcugggucgaagaaa

SEQ ID NO: 1116319 - RNA, 19 nt, Artificial Sequence
  Description of Artificial Sequence: Synthetic oligonucleotide
  Antisense strand to SEQ ID NO: 1116318
uuucuucgacccagcucug

SEQ ID NO: 1116320 - RNA, 19 nt, Artificial Sequence
  Description of Artificial Sequence: Synthetic oligonucleotide
  Sense strand starting at position 1619 of SEQ ID NO: 915920
auucuuguucuccagccau

SEQ ID NO: 1116321 - RNA, 19 nt, Artificial Sequence
  Description of Artificial Sequence: Synthetic oligonucleotide
  Antisense strand to SEQ ID NO: 1116320
auggcuggagaacaagaau

SEQ ID NO: 1116322 - RNA, 19 nt, Artificial Sequence
  Description of Artificial Sequence: Synthetic oligonucleotide
  Sense strand starting at position 1992 of SEQ ID NO: 915920
gggugaacuggcugcucau

SEQ ID NO: 1116323 - RNA, 19 nt, Artificial Sequence
  Description of Artificial Sequence: Synthetic oligonucleotide
  Antisense strand to SEQ ID NO: 1116322
augagcagccaguucaccc

SEQ ID NO: 1116324 - RNA, 19 nt, Artificial Sequence
  Description of Artificial Sequence: Synthetic oligonucleotide
  Sense strand starting at position 2024 of SEQ ID NO: 915920
gcuucuacagguuaauaca

SEQ ID NO: 1116325 - RNA, 19 nt, Artificial Sequence
  Description of Artificial Sequence: Synthetic oligonucleotide
  Antisense strand to SEQ ID NO: 1116324
uguauuaaccuguagaagc

SEQ ID NO: 1116326 - RNA, 19 nt, Artificial Sequence
  Description of Artificial Sequence: Synthetic oligonucleotide
  Sense strand starting at position 2034 of SEQ ID NO: 915920
guuaauacacgcugaucuu

SEQ ID NO: 1116327 - RNA, 19 nt, Artificial Sequence
  Description of Artificial Sequence: Synthetic oligonucleotide
  Antisense strand to SEQ ID NO: 1116326
aagaucagcguguauuaac

SEQ ID NO: 1116328 - RNA, 19 nt, Artificial Sequence
  Description of Artificial Sequence: Synthetic oligonucleotide
  Sense strand starting at position 2163 of SEQ ID NO: 915920
guccguuggacaggguaau

SEQ ID NO: 1116329 - RNA, 19 nt, Artificial Sequence
  Description of Artificial Sequence: Synthetic oligonucleotide
  Antisense strand to SEQ ID NO: 1116328
auuacccuguccaacggac

SEQ ID NO: 1116330 - RNA, 19 nt, Artificial Sequence
  Description of Artificial Sequence: Synthetic oligonucleotide
  Sense strand starting at position 2251 of SEQ ID NO: 915920
ugggcuuucuccuuagaua

SEQ ID NO: 1116331 - RNA, 19 nt, Artificial Sequence
  Description of Artificial Sequence: Synthetic oligonucleotide
  Antisense strand to SEQ ID NO: 1116330
uaucuaaggagaaagccca

SEQ ID NO: 1116332 - RNA, 19 nt, Artificial Sequence
  Description of Artificial Sequence: Synthetic oligonucleotide
  Sense strand starting at position 2252 of SEQ ID NO: 915920
gggcuuucuccuuagauag

SEQ ID NO: 1116333 - RNA, 19 nt, Artificial Sequence
  Description of Artificial Sequence: Synthetic oligonucleotide
  Antisense strand to SEQ ID NO: 1116332
cuaucuaaggagaaagccc

SEQ ID NO: 1116334 - RNA, 19 nt, Artificial Sequence
  Description of Artificial Sequence: Synthetic oligonucleotide
  Sense strand starting at position 2263 of SEQ ID NO: 915920
uuagauagguccuugaucu

SEQ ID NO: 1116335 - RNA, 19 nt, Artificial Sequence
  Description of Artificial Sequence: Synthetic oligonucleotide
  Antisense strand to SEQ ID NO: 1116334
agaucaaggaccuaucuaa

SEQ ID NO: 1116336 - RNA, 19 nt, Artificial Sequence
  Description of Artificial Sequence: Synthetic oligonucleotide
  Sense strand starting at position 2264 of SEQ ID NO: 915920
uagauagguccuugaucua

SEQ ID NO: 1116337 - RNA, 19 nt, Artificial Sequence
  Description of Artificial Sequence: Synthetic oligonucleotide
  Antisense strand to SEQ ID NO: 1116336
uagaucaaggaccuaucua

SEQ ID NO: 1116338 - RNA, 19 nt, Artificial Sequence
  Description of Artificial Sequence: Synthetic oligonucleotide
  Sense strand starting at position 2269 of SEQ ID NO: 915920
agguccuugaucuagguga

SEQ ID NO: 1116339 - RNA, 19 nt, Artificial Sequence
  Description of Artificial Sequence: Synthetic oligonucleotide
  Antisense strand to SEQ ID NO: 1116338
ucaccuagaucaaggaccu

SEQ ID NO: 1116340 - RNA, 19 nt, Artificial Sequence
  Description of Artificial Sequence: Synthetic oligonucleotide
  Sense strand starting at position 2271 of SEQ ID NO: 915920
guccuugaucuaggugaca

SEQ ID NO: 1116341 - RNA, 19 nt, Artificial Sequence
  Description of Artificial Sequence: Synthetic oligonucleotide
  Antisense strand to SEQ ID NO: 1116340
ugucaccuagaucaaggac

SEQ ID NO: 1116342 - RNA, 19 nt, Artificial Sequence
  Description of Artificial Sequence: Synthetic oligonucleotide
  Sense strand starting at position 2573 of SEQ ID NO: 915920
gugaacaaacaaugcaaua

SEQ ID NO: 1116343 - RNA, 19 nt, Artificial Sequence
  Description of Artificial Sequence: Synthetic oligonucleotide
  Antisense strand to SEQ ID NO: 1116342
uauugcauuguuuguucac

SEQ ID NO: 1116344 - RNA, 19 nt, Artificial Sequence
  Description of Artificial Sequence: Synthetic oligonucleotide
  Sense strand starting at position 2592 of SEQ ID NO: 915920
augugaugguuccugguua

SEQ ID NO: 1116345 - RNA, 19 nt, Artificial Sequence
  Description of Artificial Sequence: Synthetic oligonucleotide
  Antisense strand to SEQ ID NO: 1116344
uaaccaggaaccaucacau

SEQ ID NO: 1116346 - RNA, 19 nt, Artificial Sequence
  Description of Artificial Sequence: Synthetic oligonucleotide
  Sense strand starting at position 2596 of SEQ ID NO: 915920
gaugguuccugguuagcau

SEQ ID NO: 1116347 - RNA, 19 nt, Artificial Sequence
  Description of Artificial Sequence: Synthetic oligonucleotide
  Antisense strand to SEQ ID NO: 1116346
augcuaaccaggaaccauc

SEQ ID NO: 1116348 - RNA, 19 nt, Artificial Sequence
  Description of Artificial Sequence: Synthetic oligonucleotide
  Sense strand starting at position 2597 of SEQ ID NO: 915920
augguuccugguuagcaua

SEQ ID NO: 1116349 - RNA, 19 nt, Artificial Sequence
  Description of Artificial Sequence: Synthetic oligonucleotide
  Antisense strand to SEQ ID NO: 1116348
uaugcuaaccaggaaccau

SEQ ID NO: 1116350 - RNA, 19 nt, Artificial Sequence
  Description of Artificial Sequence: Synthetic oligonucleotide
  Sense strand starting at position 2599 of SEQ ID NO: 915920
gguuccugguuagcauaaa

SEQ ID NO: 1116351 - RNA, 19 nt, Artificial Sequence
  Description of Artificial Sequence: Synthetic oligonucleotide
  Antisense strand to SEQ ID NO: 1116350
uuuaugcuaaccaggaacc

SEQ ID NO: 1116352 - RNA, 19 nt, Artificial Sequence
  Description of Artificial Sequence: Synthetic oligonucleotide
  Sense strand starting at position 2668 of SEQ ID NO: 915920
aauuguccaccuugaagga

SEQ ID NO: 1116353 - RNA, 19 nt, Artificial Sequence
  Description of Artificial Sequence: Synthetic oligonucleotide
  Antisense strand to SEQ ID NO: 1116352
uccuucaagguggacaauu

SEQ ID NO: 1116354 - RNA, 19 nt, Artificial Sequence
  Description of Artificial Sequence: Synthetic oligonucleotide
  Sense strand starting at position 2694 of SEQ ID NO: 915920
agaccucagcuaugaaaug

SEQ ID NO: 1116355 - RNA, 19 nt, Artificial Sequence
  Description of Artificial Sequence: Synthetic oligonucleotide
  Antisense strand to SEQ ID NO: 1116354
cauuucauagcugaggucu

SEQ ID NO: 1116356 - RNA, 19 nt, Artificial Sequence
  Description of Artificial Sequence: Synthetic oligonucleotide
  Sense strand starting at position 2701 of SEQ ID NO: 915920
agcuaugaaaugugaauag

SEQ ID NO: 1116357 - RNA, 19 nt, Artificial Sequence
  Description of Artificial Sequence: Synthetic oligonucleotide
  Antisense strand to SEQ ID NO: 1116356
cuauucacauuucauagcu

SEQ ID NO: 1116358 - RNA, 19 nt, Artificial Sequence
  Description of Artificial Sequence: Synthetic oligonucleotide
  Sense strand starting at position 3907 of SEQ ID NO: 915920
gaaaucauuccauggugga

SEQ ID NO: 1116359 - RNA, 19 nt, Artificial Sequence
  Description of Artificial Sequence: Synthetic oligonucleotide
  Antisense strand to SEQ ID NO: 1116358
uccaccauggaaugauuuc

SEQ ID NO: 1116360 - RNA, 19 nt, Artificial Sequence
  Description of Artificial Sequence: Synthetic oligonucleotide
  Sense strand starting at position 143 of SEQ ID NO: 915921
ccaauaguucuuuaaggcu

SEQ ID NO: 1116361 - RNA, 19 nt, Artificial Sequence
  Description of Artificial Sequence: Synthetic oligonucleotide
  Antisense strand to SEQ ID NO: 1116360
agccuuaaagaacuauugg

SEQ ID NO: 1116362 - RNA, 19 nt, Artificial Sequence
  Description of Artificial Sequence: Synthetic oligonucleotide
  Sense strand starting at position 288 of SEQ ID NO: 915921
ggugcuggcauauaauaaa

SEQ ID NO: 1116363 - RNA, 19 nt, Artificial Sequence
  Description of Artificial Sequence: Synthetic oligonucleotide
  Antisense strand to SEQ ID NO: 1116362
uuuauuauaugccagcacc

SEQ ID NO: 1116364 - RNA, 19 nt, Artificial Sequence
  Description of Artificial Sequence: Synthetic oligonucleotide
  Sense strand starting at position 366 of SEQ ID NO: 915921
cugcaauuguuagccuaca

SEQ ID NO: 1116365 - RNA, 19 nt, Artificial Sequence
  Description of Artificial Sequence: Synthetic oligonucleotide
  Antisense strand to SEQ ID NO: 1116364
uguaggcuaacaauugcag

SEQ ID NO: 1116366 - RNA, 19 nt, Artificial Sequence
  Description of Artificial Sequence: Synthetic oligonucleotide
  Sense strand starting at position 367 of SEQ ID NO: 915921
ugcaauuguuagccuacaa

SEQ ID NO: 1116367 - RNA, 19 nt, Artificial Sequence
  Description of Artificial Sequence: Synthetic oligonucleotide
  Antisense strand to SEQ ID NO: 1116366
uuguaggcuaacaauugca

SEQ ID NO: 1116368 - RNA, 19 nt, Artificial Sequence
  Description of Artificial Sequence: Synthetic oligonucleotide
  Sense strand starting at position 836 of SEQ ID NO: 915921
ggugcugacuagagggauu

SEQ ID NO: 1116369 - RNA, 19 nt, Artificial Sequence
  Description of Artificial Sequence: Synthetic oligonucleotide
  Antisense strand to SEQ ID NO: 1116368
aaucccucuagucagcacc

SEQ ID NO: 1116370 - RNA, 19 nt, Artificial Sequence
  Description of Artificial Sequence: Synthetic oligonucleotide
  Sense strand starting at position 1064 of SEQ ID NO: 915921
gcagcacuccaggaucuaa

SEQ ID NO: 1116371 - RNA, 19 nt, Artificial Sequence
  Description of Artificial Sequence: Synthetic oligonucleotide
  Antisense strand to SEQ ID NO: 1116370
uuagauccuggagugcugc

SEQ ID NO: 1116372 - RNA, 19 nt, Artificial Sequence
  Description of Artificial Sequence: Synthetic oligonucleotide
  Sense strand starting at position 1111 of SEQ ID NO: 915921
cugcgagacauccaagaug

SEQ ID NO: 1116373 - RNA, 19 nt, Artificial Sequence
  Description of Artificial Sequence: Synthetic oligonucleotide
  Antisense strand to SEQ ID NO: 1116372
caucuuggaugucucgcag

SEQ ID NO: 1116374 - RNA, 19 nt, Artificial Sequence
  Description of Artificial Sequence: Synthetic oligonucleotide
  Sense strand starting at position 1425 of SEQ ID NO: 915921
cggauagagugauugcaac

SEQ ID NO: 1116375 - RNA, 19 nt, Artificial Sequence
  Description of Artificial Sequence: Synthetic oligonucleotide
  Antisense strand to SEQ ID NO: 1116374
guugcaaucacucuauccg

SEQ ID NO: 1116376 - RNA, 19 nt, Artificial Sequence
  Description of Artificial Sequence: Synthetic oligonucleotide
  Sense strand starting at position 1515 of SEQ ID NO: 915921
uggcguucgagaggagaaa

SEQ ID NO: 1116377 - RNA, 19 nt, Artificial Sequence
  Description of Artificial Sequence: Synthetic oligonucleotide
  Antisense strand to SEQ ID NO: 1116376
uuucuccucucgaacgcca

SEQ ID NO: 1116378 - RNA, 19 nt, Artificial Sequence
  Description of Artificial Sequence: Synthetic oligonucleotide
  Sense strand starting at position 1705 of SEQ ID NO: 915921
uuaacauacggucgggauu

SEQ ID NO: 1116379 - RNA, 19 nt, Artificial Sequence
  Description of Artificial Sequence: Synthetic oligonucleotide
  Antisense strand to SEQ ID NO: 1116378
aaucccgaccguauguuaa

SEQ ID NO: 1116380 - RNA, 19 nt, Artificial Sequence
  Description of Artificial Sequence: Synthetic oligonucleotide
  Sense strand starting at position 1895 of SEQ ID NO: 915921
uuuccauuccggugauaaa

SEQ ID NO: 1116381 - RNA, 19 nt, Artificial Sequence
  Description of Artificial Sequence: Synthetic oligonucleotide
  Antisense strand to SEQ ID NO: 1116380
uuuaucaccggaauggaaa

SEQ ID NO: 1116382 - RNA, 19 nt, Artificial Sequence
  Description of Artificial Sequence: Synthetic oligonucleotide
  Sense strand starting at position 1896 of SEQ ID NO: 915921
uuccauuccggugauaaac

SEQ ID NO: 1116383 - RNA, 19 nt, Artificial Sequence
  Description of Artificial Sequence: Synthetic oligonucleotide
  Antisense strand to SEQ ID NO: 1116382
guuuaucaccggaauggaa

SEQ ID NO: 1116384 - RNA, 19 nt, Artificial Sequence
  Description of Artificial Sequence: Synthetic oligonucleotide
  Sense strand starting at position 1950 of SEQ ID NO: 915921
gguuaaauaugauccgaau

SEQ ID NO: 1116385 - RNA, 19 nt, Artificial Sequence
  Description of Artificial Sequence: Synthetic oligonucleotide
  Antisense strand to SEQ ID NO: 1116384
auucggaucauauuuaacc

SEQ ID NO: 1116386 - RNA, 19 nt, Artificial Sequence
  Description of Artificial Sequence: Synthetic oligonucleotide
  Sense strand starting at position 1987 of SEQ ID NO: 915921
gggacagucuaggaauaac

SEQ ID NO: 1116387 - RNA, 19 nt, Artificial Sequence
  Description of Artificial Sequence: Synthetic oligonucleotide
  Antisense strand to SEQ ID NO: 1116386
guuauuccuagacuguccc

SEQ ID NO: 1116388 - RNA, 19 nt, Artificial Sequence
  Description of Artificial Sequence: Synthetic oligonucleotide
  Sense strand starting at position 2531 of SEQ ID NO: 915921
aggauaaaucacggcagca

SEQ ID NO: 1116389 - RNA, 19 nt, Artificial Sequence
  Description of Artificial Sequence: Synthetic oligonucleotide
  Antisense strand to SEQ ID NO: 1116388
ugcugccgugauuuauccu

SEQ ID NO: 1116390 - RNA, 19 nt, Artificial Sequence
  Description of Artificial Sequence: Synthetic oligonucleotide
  Sense strand starting at position 2655 of SEQ ID NO: 915921
acgccauuacaggaaugua

SEQ ID NO: 1116391 - RNA, 19 nt, Artificial Sequence
  Description of Artificial Sequence: Synthetic oligonucleotide
  Antisense strand to SEQ ID NO: 1116390
uacauuccuguaauggcgu

SEQ ID NO: 1116392 - RNA, 19 nt, Artificial Sequence
  Description of Artificial Sequence: Synthetic oligonucleotide
  Sense strand starting at position 2658 of SEQ ID NO: 915921
ccauuacaggaauguaauu

SEQ ID NO: 1116393 - RNA, 19 nt, Artificial Sequence
  Description of Artificial Sequence: Synthetic oligonucleotide
  Antisense strand to SEQ ID NO: 1116392
aauuacauuccuguaaugg

SEQ ID NO: 1116394 - RNA, 19 nt, Artificial Sequence
  Description of Artificial Sequence: Synthetic oligonucleotide
  Sense strand starting at position 2701 of SEQ ID NO: 915921
aauuauccucgcggaggaa

SEQ ID NO: 1116395 - RNA, 19 nt, Artificial Sequence
  Description of Artificial Sequence: Synthetic oligonucleotide
  Antisense strand to SEQ ID NO: 1116394
uuccuccgcgaggauaauu

SEQ ID NO: 1116396 - RNA, 19 nt, Artificial Sequence
  Description of Artificial Sequence: Synthetic oligonucleotide
  Sense strand starting at position 2702 of SEQ ID NO: 915921
auuauccucgcggaggaau

SEQ ID NO: 1116397 - RNA, 19 nt, Artificial Sequence
  Description of Artificial Sequence: Synthetic oligonucleotide
  Antisense strand to SEQ ID NO: 1116396
auuccuccgcgaggauaau

SEQ ID NO: 1116398 - RNA, 19 nt, Artificial Sequence
  Description of Artificial Sequence: Synthetic oligonucleotide
  Sense strand starting at position 2931 of SEQ ID NO: 915921
cucacagguuccucugaaa

SEQ ID NO: 1116399 - RNA, 19 nt, Artificial Sequence
  Description of Artificial Sequence: Synthetic oligonucleotide
  Antisense strand to SEQ ID NO: 1116398
uuucagaggaaccugugag

SEQ ID NO: 1116400 - RNA, 19 nt, Artificial Sequence
  Description of Artificial Sequence: Synthetic oligonucleotide
  Sense strand starting at position 3037 of SEQ ID NO: 915921
acagguauuuaucaaguac

SEQ ID NO: 1116401 - RNA, 19 nt, Artificial Sequence
  Description of Artificial Sequence: Synthetic oligonucleotide
  Antisense strand to SEQ ID NO: 1116400
guacuugauaaauaccugu

SEQ ID NO: 1116402 - RNA, 19 nt, Artificial Sequence
  Description of Artificial Sequence: Synthetic oligonucleotide
  Sense strand starting at position 3124 of SEQ ID NO: 915921
cccugaggucuccagacau

SEQ ID NO: 1116403 - RNA, 19 nt, Artificial Sequence
  Description of Artificial Sequence: Synthetic oligonucleotide
  Antisense strand to SEQ ID NO: 1116402
augucuggagaccucaggg

SEQ ID NO: 1116404 - RNA, 19 nt, Artificial Sequence
  Description of Artificial Sequence: Synthetic oligonucleotide
  Sense strand starting at position 3347 of SEQ ID NO: 915921
aguuguuacagccugcgau

SEQ ID NO: 1116405 - RNA, 19 nt, Artificial Sequence
  Description of Artificial Sequence: Synthetic oligonucleotide
  Antisense strand to SEQ ID NO: 1116404
aucgcaggcuguaacaacu

SEQ ID NO: 1116406 - RNA, 19 nt, Artificial Sequence
  Description of Artificial Sequence: Synthetic oligonucleotide
  Sense strand starting at position 3357 of SEQ ID NO: 915921
gccugcgauguuuaacacu

SEQ ID NO: 1116407 - RNA, 19 nt, Artificial Sequence
  Description of Artificial Sequence: Synthetic oligonucleotide
  Antisense strand to SEQ ID NO: 1116406
aguguuaaacaucgcaggc

SEQ ID NO: 1116408 - RNA, 19 nt, Artificial Sequence
  Description of Artificial Sequence: Synthetic oligonucleotide
  Sense strand starting at position 3397 of SEQ ID NO: 915921
ggguucugcguucagacaa

SEQ ID NO: 1116409 - RNA, 19 nt, Artificial Sequence
  Description of Artificial Sequence: Synthetic oligonucleotide
  Antisense strand to SEQ ID NO: 1116408
uugucugaacgcagaaccc

SEQ ID NO: 1116410 - RNA, 19 nt, Artificial Sequence
  Description of Artificial Sequence: Synthetic oligonucleotide
  Sense strand starting at position 3425 of SEQ ID NO: 915921
cccaaauugcugugugauc

SEQ ID NO: 1116411 - RNA, 19 nt, Artificial Sequence
  Description of Artificial Sequence: Synthetic oligonucleotide
  Antisense strand to SEQ ID NO: 1116410
gaucacacagcaauuuggg

SEQ ID NO: 1116412 - RNA, 19 nt, Artificial Sequence
  Description of Artificial Sequence: Synthetic oligonucleotide
  Sense strand starting at position 3426 of SEQ ID NO: 915921
ccaaauugcugugugaucu

SEQ ID NO: 1116413 - RNA, 19 nt, Artificial Sequence
  Description of Artificial Sequence: Synthetic oligonucleotide
  Antisense strand to SEQ ID NO: 1116412
agaucacacagcaauuugg

SEQ ID NO: 1116414 - RNA, 19 nt, Artificial Sequence
  Description of Artificial Sequence: Synthetic oligonucleotide
  Sense strand starting at position 3427 of SEQ ID NO: 915921
caaauugcugugugaucuu

SEQ ID NO: 1116415 - RNA, 19 nt, Artificial Sequence
  Description of Artificial Sequence: Synthetic oligonucleotide
  Antisense strand to SEQ ID NO: 1116414
aagaucacacagcaauuug

SEQ ID NO: 1116416 - RNA, 19 nt, Artificial Sequence
  Description of Artificial Sequence: Synthetic oligonucleotide
  Sense strand starting at position 3434 of SEQ ID NO: 915921
cugugugaucuugagcuag

SEQ ID NO: 1116417 - RNA, 19 nt, Artificial Sequence
  Description of Artificial Sequence: Synthetic oligonucleotide
  Antisense strand to SEQ ID NO: 1116416
cuagcucaagaucacacag

SEQ ID NO: 1116418 - RNA, 19 nt, Artificial Sequence
  Description of Artificial Sequence: Synthetic oligonucleotide
  Sense strand starting at position 3493 of SEQ ID NO: 915921
ugagaagaauaauaguacu

SEQ ID NO: 1116419 - RNA, 19 nt, Artificial Sequence
  Description of Artificial Sequence: Synthetic oligonucleotide
  Antisense strand to SEQ ID NO: 1116418
aguacuauuauucuucuca

SEQ ID NO: 1116420 - RNA, 19 nt, Artificial Sequence
  Description of Artificial Sequence: Synthetic oligonucleotide
  Sense strand starting at position 3520 of SEQ ID NO: 915921
agccaauauugggauaaua

SEQ ID NO: 1116421 - RNA, 19 nt, Artificial Sequence
  Description of Artificial Sequence: Synthetic oligonucleotide
  Antisense strand to SEQ ID NO: 1116420
uauuaucccaauauuggcu

SEQ ID NO: 1116422 - RNA, 19 nt, Artificial Sequence
  Description of Artificial Sequence: Synthetic oligonucleotide
  Sense strand starting at position 3558 of SEQ ID NO: 915921
gguacuugguacccaguaa

SEQ ID NO: 1116423 - RNA, 19 nt, Artificial Sequence
  Description of Artificial Sequence: Synthetic oligonucleotide
  Antisense strand to SEQ ID NO: 1116422
uuacuggguaccaaguacc

SEQ ID NO: 1116424 - RNA, 19 nt, Artificial Sequence
  Description of Artificial Sequence: Synthetic oligonucleotide
  Sense strand starting at position 3562 of SEQ ID NO: 915921
cuugguacccaguaagagu

SEQ ID NO: 1116425 - RNA, 19 nt, Artificial Sequence
  Description of Artificial Sequence: Synthetic oligonucleotide
  Antisense strand to SEQ ID NO: 1116424
acucuuacuggguaccaag

SEQ ID NO: 1116426 - RNA, 19 nt, Artificial Sequence
  Description of Artificial Sequence: Synthetic oligonucleotide
  Sense strand starting at position 3710 of SEQ ID NO: 915921
accuauauggacuguuuau

SEQ ID NO: 1116427 - RNA, 19 nt, Artificial Sequence
  Description of Artificial Sequence: Synthetic oligonucleotide
  Antisense strand to SEQ ID NO: 1116426
auaaacaguccauauaggu

SEQ ID NO: 1116428 - RNA, 19 nt, Artificial Sequence
  Description of Artificial Sequence: Synthetic oligonucleotide
  Sense strand starting at position 3727 of SEQ ID NO: 915921
auugcaagguccuugagau

SEQ ID NO: 1116429 - RNA, 19 nt, Artificial Sequence
  Description of Artificial Sequence: Synthetic oligonucleotide
  Antisense strand to SEQ ID NO: 1116428
aucucaaggaccuugcaau

SEQ ID NO: 1116430 - RNA, 19 nt, Artificial Sequence
  Description of Artificial Sequence: Synthetic oligonucleotide
  Sense strand starting at position 3728 of SEQ ID NO: 915921
uugcaagguccuugagaua

SEQ ID NO: 1116431 - RNA, 19 nt, Artificial Sequence
  Description of Artificial Sequence: Synthetic oligonucleotide
  Antisense strand to SEQ ID NO: 1116430
uaucucaaggaccuugcaa

SEQ ID NO: 1116432 - RNA, 19 nt, Artificial Sequence
  Description of Artificial Sequence: Synthetic oligonucleotide
  Sense strand starting at position 3739 of SEQ ID NO: 915921
uugagauaguaucuccuga

SEQ ID NO: 1116433 - RNA, 19 nt, Artificial Sequence
  Description of Artificial Sequence: Synthetic oligonucleotide
  Antisense strand to SEQ ID NO: 1116432
ucaggagauacuaucucaa

SEQ ID NO: 1116434 - RNA, 19 nt, Artificial Sequence
  Description of Artificial Sequence: Synthetic oligonucleotide
  Sense strand starting at position 3741 of SEQ ID NO: 915921
gagauaguaucuccugaaa

SEQ ID NO: 1116435 - RNA, 19 nt, Artificial Sequence
  Description of Artificial Sequence: Synthetic oligonucleotide
  Antisense strand to SEQ ID NO: 1116434
uuucaggagauacuaucuc

SEQ ID NO: 1116436 - RNA, 19 nt, Artificial Sequence
  Description of Artificial Sequence: Synthetic oligonucleotide
  Sense strand starting at position 3854 of SEQ ID NO: 915921
ugagaauccugggacuauu

SEQ ID NO: 1116437 - RNA, 19 nt, Artificial Sequence
  Description of Artificial Sequence: Synthetic oligonucleotide
  Antisense strand to SEQ ID NO: 1116436
aauagucccaggauucuca

SEQ ID NO: 1116438 - RNA, 19 nt, Artificial Sequence
  Description of Artificial Sequence: Synthetic oligonucleotide
  Sense strand starting at position 3865 of SEQ ID NO: 915921
ggacuauuacuacgaggcu

SEQ ID NO: 1116439 - RNA, 19 nt, Artificial Sequence
  Description of Artificial Sequence: Synthetic oligonucleotide
  Antisense strand to SEQ ID NO: 1116438
agccucguaguaauagucc

SEQ ID NO: 1116440 - RNA, 19 nt, Artificial Sequence
  Description of Artificial Sequence: Synthetic oligonucleotide
  Sense strand starting at position 29 of SEQ ID NO: 915922
aaagaucucugggaauaag

SEQ ID NO: 1116441 - RNA, 19 nt, Artificial Sequence
  Description of Artificial Sequence: Synthetic oligonucleotide
  Antisense strand to SEQ ID NO: 1116440
cuuauucccagagaucuuu

SEQ ID NO: 1116442 - RNA, 19 nt, Artificial Sequence
  Description of Artificial Sequence: Synthetic oligonucleotide
  Sense strand starting at position 48 of SEQ ID NO: 915922
gcucaagugcccuguauuu

SEQ ID NO: 1116443 - RNA, 19 nt, Artificial Sequence
  Description of Artificial Sequence: Synthetic oligonucleotide
  Antisense strand to SEQ ID NO: 1116442
aaauacagggcacuugagc

SEQ ID NO: 1116444 - RNA, 19 nt, Artificial Sequence
  Description of Artificial Sequence: Synthetic oligonucleotide
  Sense strand starting at position 73 of SEQ ID NO: 915922
aguuucccagaugauuauu

SEQ ID NO: 1116445 - RNA, 19 nt, Artificial Sequence
  Description of Artificial Sequence: Synthetic oligonucleotide
  Antisense strand to SEQ ID NO: 1116444
aauaaucaucugggaaacu

SEQ ID NO: 1116446 - RNA, 19 nt, Artificial Sequence
  Description of Artificial Sequence: Synthetic oligonucleotide
  Sense strand starting at position 78 of SEQ ID NO: 915922
cccagaugauuauuaggua

SEQ ID NO: 1116447 - RNA, 19 nt, Artificial Sequence
  Description of Artificial Sequence: Synthetic oligonucleotide
  Antisense strand to SEQ ID NO: 1116446
uaccuaauaaucaucuggg

SEQ ID NO: 1116448 - RNA, 19 nt, Artificial Sequence
  Description of Artificial Sequence: Synthetic oligonucleotide
  Sense strand starting at position 82 of SEQ ID NO: 915922
gaugauuauuagguauacu

SEQ ID NO: 1116449 - RNA, 19 nt, Artificial Sequence
  Description of Artificial Sequence: Synthetic oligonucleotide
  Antisense strand to SEQ ID NO: 1116448
aguauaccuaauaaucauc

SEQ ID NO: 1116450 - RNA, 19 nt, Artificial Sequence
  Description of Artificial Sequence: Synthetic oligonucleotide
  Sense strand starting at position 139 of SEQ ID NO: 915922
gugguagugguagaggaua

SEQ ID NO: 1116451 - RNA, 19 nt, Artificial Sequence
  Description of Artificial Sequence: Synthetic oligonucleotide
  Antisense strand to SEQ ID NO: 1116450
uauccucuaccacuaccac

SEQ ID NO: 1116452 - RNA, 19 nt, Artificial Sequence
  Description of Artificial Sequence: Synthetic oligonucleotide
  Sense strand starting at position 141 of SEQ ID NO: 915922
gguagugguagaggauaga

SEQ ID NO: 1116453 - RNA, 19 nt, Artificial Sequence
  Description of Artificial Sequence: Synthetic oligonucleotide
  Antisense strand to SEQ ID NO: 1116452
ucuauccucuaccacuacc

SEQ ID NO: 1116454 - RNA, 19 nt, Artificial Sequence
  Description of Artificial Sequence: Synthetic oligonucleotide
  Sense strand starting at position 196 of SEQ ID NO: 915922
uaugucacaggcugaaaua

SEQ ID NO: 1116455 - RNA, 19 nt, Artificial Sequence
  Description of Artificial Sequence: Synthetic oligonucleotide
  Antisense strand to SEQ ID NO: 1116454
uauuucagccugugacaua

SEQ ID NO: 1116456 - RNA, 19 nt, Artificial Sequence
  Description of Artificial Sequence: Synthetic oligonucleotide
  Sense strand starting at position 207 of SEQ ID NO: 915922
cugaaauacucagugaaug

SEQ ID NO: 1116457 - RNA, 19 nt, Artificial Sequence
  Description of Artificial Sequence: Synthetic oligonucleotide
  Antisense strand to SEQ ID NO: 1116456
cauucacugaguauuucag

SEQ ID NO: 1116458 - RNA, 19 nt, Artificial Sequence
  Description of Artificial Sequence: Synthetic oligonucleotide
  Sense strand starting at position 208 of SEQ ID NO: 915922
ugaaauacucagugaaugc

SEQ ID NO: 1116459 - RNA, 19 nt, Artificial Sequence
  Description of Artificial Sequence: Synthetic oligonucleotide
  Antisense strand to SEQ ID NO: 1116458
gcauucacugaguauuuca

SEQ ID NO: 1116460 - RNA, 19 nt, Artificial Sequence
  Description of Artificial Sequence: Synthetic oligonucleotide
  Sense strand starting at position 267 of SEQ ID NO: 915922
cagauugucccagguuaaa

SEQ ID NO: 1116461 - RNA, 19 nt, Artificial Sequence
  Description of Artificial Sequence: Synthetic oligonucleotide
  Antisense strand to SEQ ID NO: 1116460
uuuaaccugggacaaucug

SEQ ID NO: 1116462 - RNA, 19 nt, Artificial Sequence
  Description of Artificial Sequence: Synthetic oligonucleotide
  Sense strand starting at position 341 of SEQ ID NO: 915922
uguggaacuccuggcauca

SEQ ID NO: 1116463 - RNA, 19 nt, Artificial Sequence
  Description of Artificial Sequence: Synthetic oligonucleotide
  Antisense strand to SEQ ID NO: 1116462
ugaugccaggaguuccaca

SEQ ID NO: 1116464 - RNA, 19 nt, Artificial Sequence
  Description of Artificial Sequence: Synthetic oligonucleotide
  Sense strand starting at position 546 of SEQ ID NO: 915922
ccaauaguucuuuaaggcu

SEQ ID NO: 1116465 - RNA, 19 nt, Artificial Sequence
  Description of Artificial Sequence: Synthetic oligonucleotide
  Antisense strand to SEQ ID NO: 1116464
agccuuaaagaacuauugg

SEQ ID NO: 1116466 - RNA, 19 nt, Artificial Sequence
  Description of Artificial Sequence: Synthetic oligonucleotide
  Sense strand starting at position 691 of SEQ ID NO: 915922
ggugcuggcauauaauaaa

SEQ ID NO: 1116467 - RNA, 19 nt, Artificial Sequence
  Description of Artificial Sequence: Synthetic oligonucleotide
  Antisense strand to SEQ ID NO: 1116466
uuuauuauaugccagcacc

SEQ ID NO: 1116468 - RNA, 19 nt, Artificial Sequence
  Description of Artificial Sequence: Synthetic oligonucleotide
  Sense strand starting at position 770 of SEQ ID NO: 915922
ugcaauuguuagccuacaa

SEQ ID NO: 1116469 - RNA, 19 nt, Artificial Sequence
  Description of Artificial Sequence: Synthetic oligonucleotide
  Antisense strand to SEQ ID NO: 1116468
uuguaggcuaacaauugca

SEQ ID NO: 1116470 - RNA, 19 nt, Artificial Sequence
  Description of Artificial Sequence: Synthetic oligonucleotide
  Sense strand starting at position 1239 of SEQ ID NO: 915922
ggugcugacuagagggauu

SEQ ID NO: 1116471 - RNA, 19 nt, Artificial Sequence
  Description of Artificial Sequence: Synthetic oligonucleotide
  Antisense strand to SEQ ID NO: 1116470
aaucccucuagucagcacc

SEQ ID NO: 1116472 - RNA, 19 nt, Artificial Sequence
  Description of Artificial Sequence: Synthetic oligonucleotide
  Sense strand starting at position 1467 of SEQ ID NO: 915922
gcagcacuccaggaucuaa

SEQ ID NO: 1116473 - RNA, 19 nt, Artificial Sequence
  Description of Artificial Sequence: Synthetic oligonucleotide
  Antisense strand to SEQ ID NO: 1116472
uuagauccuggagugcugc

SEQ ID NO: 1116474 - RNA, 19 nt, Artificial Sequence
  Description of Artificial Sequence: Synthetic oligonucleotide
  Sense strand starting at position 1514 of SEQ ID NO: 915922
cugcgagacauccaagaug

SEQ ID NO: 1116475 - RNA, 19 nt, Artificial Sequence
  Description of Artificial Sequence: Synthetic oligonucleotide
  Antisense strand to SEQ ID NO: 1116474
caucuuggaugucucgcag

SEQ ID NO: 1116476 - RNA, 19 nt, Artificial Sequence
  Description of Artificial Sequence: Synthetic oligonucleotide
  Sense strand starting at position 1828 of SEQ ID NO: 915922
cggauagagugauugcaac

SEQ ID NO: 1116477 - RNA, 19 nt, Artificial Sequence
  Description of Artificial Sequence: Synthetic oligonucleotide
  Antisense strand to SEQ ID NO: 1116476
guugcaaucacucuauccg

SEQ ID NO: 1116478 - RNA, 19 nt, Artificial Sequence
  Description of Artificial Sequence: Synthetic oligonucleotide
  Sense strand starting at position 1918 of SEQ ID NO: 915922
uggcguucgagaggagaaa

SEQ ID NO: 1116479 - RNA, 19 nt, Artificial Sequence
  Description of Artificial Sequence: Synthetic oligonucleotide
  Antisense strand to SEQ ID NO: 1116478
uuucuccucucgaacgcca

SEQ ID NO: 1116480 - RNA, 19 nt, Artificial Sequence
  Description of Artificial Sequence: Synthetic oligonucleotide
  Sense strand starting at position 2108 of SEQ ID NO: 915922
uuaacauacggucgggauu

SEQ ID NO: 1116481 - RNA, 19 nt, Artificial Sequence
  Description of Artificial Sequence: Synthetic oligonucleotide
  Antisense strand to SEQ ID NO: 1116480
aaucccgaccguauguuaa

SEQ ID NO: 1116482 - RNA, 19 nt, Artificial Sequence
  Description of Artificial Sequence: Synthetic oligonucleotide
  Sense strand starting at position 2298 of SEQ ID NO: 915922
uuuccauuccggugauaaa

SEQ ID NO: 1116483 - RNA, 19 nt, Artificial Sequence
  Description of Artificial Sequence: Synthetic oligonucleotide
  Antisense strand to SEQ ID NO: 1116482
uuuaucaccggaauggaaa

SEQ ID NO: 1116484 - RNA, 19 nt, Artificial Sequence
  Description of Artificial Sequence: Synthetic oligonucleotide
  Sense strand starting at position 2299 of SEQ ID NO: 915922
uuccauuccggugauaaac

SEQ ID NO: 1116485 - RNA, 19 nt, Artificial Sequence
  Description of Artificial Sequence: Synthetic oligonucleotide
  Antisense strand to SEQ ID NO: 1116484
guuuaucaccggaauggaa

SEQ ID NO: 1116486 - RNA, 19 nt, Artificial Sequence
  Description of Artificial Sequence: Synthetic oligonucleotide
  Sense strand starting at position 2353 of SEQ ID NO: 915922
gguuaaauaugauccgaau

SEQ ID NO: 1116487 - RNA, 19 nt, Artificial Sequence
  Description of Artificial Sequence: Synthetic oligonucleotide
  Antisense strand to SEQ ID NO: 1116486
auucggaucauauuuaacc

SEQ ID NO: 1116488 - RNA, 19 nt, Artificial Sequence
  Description of Artificial Sequence: Synthetic oligonucleotide
  Sense strand starting at position 2390 of SEQ ID NO: 915922
gggacagucuaggaauaac

SEQ ID NO: 1116489 - RNA, 19 nt, Artificial Sequence
  Description of Artificial Sequence: Synthetic oligonucleotide
  Antisense strand to SEQ ID NO: 1116488
guuauuccuagacuguccc

SEQ ID NO: 1116490 - RNA, 19 nt, Artificial Sequence
  Description of Artificial Sequence: Synthetic oligonucleotide
  Sense strand starting at position 2934 of SEQ ID NO: 915922
aggauaaaucacggcagca

SEQ ID NO: 1116491 - RNA, 19 nt, Artificial Sequence
  Description of Artificial Sequence: Synthetic oligonucleotide
  Antisense strand to SEQ ID NO: 1116490
ugcugccgugauuuauccu

SEQ ID NO: 1116492 - RNA, 19 nt, Artificial Sequence
  Description of Artificial Sequence: Synthetic oligonucleotide
  Sense strand starting at position 3058 of SEQ ID NO: 915922
acgccauuacaggaaugua

SEQ ID NO: 1116493 - RNA, 19 nt, Artificial Sequence
  Description of Artificial Sequence: Synthetic oligonucleotide
  Antisense strand to SEQ ID NO: 1116492
uacauuccuguaauggcgu

SEQ ID NO: 1116494 - RNA, 19 nt, Artificial Sequence
  Description of Artificial Sequence: Synthetic oligonucleotide
  Sense strand starting at position 3061 of SEQ ID NO: 915922
ccauuacaggaauguaauu

SEQ ID NO: 1116495 - RNA, 19 nt, Artificial Sequence
  Description of Artificial Sequence: Synthetic oligonucleotide
  Antisense strand to SEQ ID NO: 1116494
aauuacauuccuguaaugg

SEQ ID NO: 1116496 - RNA, 19 nt, Artificial Sequence
  Description of Artificial Sequence: Synthetic oligonucleotide
  Sense strand starting at position 3104 of SEQ ID NO: 915922
aauuauccucgcggaggaa

SEQ ID NO: 1116497 - RNA, 19 nt, Artificial Sequence
  Description of Artificial Sequence: Synthetic oligonucleotide
  Antisense strand to SEQ ID NO: 1116496
uuccuccgcgaggauaauu

SEQ ID NO: 1116498 - RNA, 19 nt, Artificial Sequence
  Description of Artificial Sequence: Synthetic oligonucleotide
  Sense strand starting at position 3105 of SEQ ID NO: 915922
auuauccucgcggaggaau

SEQ ID NO: 1116499 - RNA, 19 nt, Artificial Sequence
  Description of Artificial Sequence: Synthetic oligonucleotide
  Antisense strand to SEQ ID NO: 1116498
auuccuccgcgaggauaau

SEQ ID NO: 1116500 - RNA, 19 nt, Artificial Sequence
  Description of Artificial Sequence: Synthetic oligonucleotide
  Sense strand starting at position 3334 of SEQ ID NO: 915922
cucacagguuccucugaaa

SEQ ID NO: 1116501 - RNA, 19 nt, Artificial Sequence
  Description of Artificial Sequence: Synthetic oligonucleotide
  Antisense strand to SEQ ID NO: 1116500
uuucagaggaaccugugag

SEQ ID NO: 1116502 - RNA, 19 nt, Artificial Sequence
  Description of Artificial Sequence: Synthetic oligonucleotide
  Sense strand starting at position 3440 of SEQ ID NO: 915922
acagguauuuaucaaguac

SEQ ID NO: 1116503 - RNA, 19 nt, Artificial Sequence
  Description of Artificial Sequence: Synthetic oligonucleotide
  Antisense strand to SEQ ID NO: 1116502
guacuugauaaauaccugu

SEQ ID NO: 1116504 - RNA, 19 nt, Artificial Sequence
  Description of Artificial Sequence: Synthetic oligonucleotide
  Sense strand starting at position 3527 of SEQ ID NO: 915922
cccugaggucuccagacau

SEQ ID NO: 1116505 - RNA, 19 nt, Artificial Sequence
  Description of Artificial Sequence: Synthetic oligonucleotide
  Antisense strand to SEQ ID NO: 1116504
augucuggagaccucaggg

SEQ ID NO: 1116506 - RNA, 19 nt, Artificial Sequence
  Description of Artificial Sequence: Synthetic oligonucleotide
  Sense strand starting at position 3750 of SEQ ID NO: 915922
aguuguuacagccugcgau

SEQ ID NO: 1116507 - RNA, 19 nt, Artificial Sequence
  Description of Artificial Sequence: Synthetic oligonucleotide
  Antisense strand to SEQ ID NO: 1116506
aucgcaggcuguaacaacu

SEQ ID NO: 1116508 - RNA, 19 nt, Artificial Sequence
  Description of Artificial Sequence: Synthetic oligonucleotide
  Sense strand starting at position 3800 of SEQ ID NO: 915922
ggguucugcguucagacaa

SEQ ID NO: 1116509 - RNA, 19 nt, Artificial Sequence
  Description of Artificial Sequence: Synthetic oligonucleotide
  Antisense strand to SEQ ID NO: 1116508
uugucugaacgcagaaccc

SEQ ID NO: 1116510 - RNA, 19 nt, Artificial Sequence
  Description of Artificial Sequence: Synthetic oligonucleotide
  Sense strand starting at position 3829 of SEQ ID NO: 915922
ccaaauugcugugugaucu

SEQ ID NO: 1116511 - RNA, 19 nt, Artificial Sequence
  Description of Artificial Sequence: Synthetic oligonucleotide
  Antisense strand to SEQ ID NO: 1116510
agaucacacagcaauuugg

SEQ ID NO: 1116512 - RNA, 19 nt, Artificial Sequence
  Description of Artificial Sequence: Synthetic oligonucleotide
  Sense strand starting at position 3837 of SEQ ID NO: 915922
cugugugaucuugagcuag

SEQ ID NO: 1116513 - RNA, 19 nt, Artificial Sequence
  Description of Artificial Sequence: Synthetic oligonucleotide
  Antisense strand to SEQ ID NO: 1116512
cuagcucaagaucacacag

SEQ ID NO: 1116514 - RNA, 19 nt, Artificial Sequence
  Description of Artificial Sequence: Synthetic oligonucleotide
  Sense strand starting at position 3896 of SEQ ID NO: 915922
ugagaagaauaauaguacu

SEQ ID NO: 1116515 - RNA, 19 nt, Artificial Sequence
  Description of Artificial Sequence: Synthetic oligonucleotide
  Antisense strand to SEQ ID NO: 1116514
aguacuauuauucuucuca

SEQ ID NO: 1116516 - RNA, 19 nt, Artificial Sequence
  Description of Artificial Sequence: Synthetic oligonucleotide
  Sense strand starting at position 3961 of SEQ ID NO: 915922
gguacuugguacccaguaa

SEQ ID NO: 1116517 - RNA, 19 nt, Artificial Sequence
  Description of Artificial Sequence: Synthetic oligonucleotide
  Antisense strand to SEQ ID NO: 1116516
uuacuggguaccaaguacc

SEQ ID NO: 1116518 - RNA, 19 nt, Artificial Sequence
  Description of Artificial Sequence: Synthetic oligonucleotide
  Sense strand starting at position 3965 of SEQ ID NO: 915922
cuugguacccaguaagagu

SEQ ID NO: 1116519 - RNA, 19 nt, Artificial Sequence
  Description of Artificial Sequence: Synthetic oligonucleotide
  Antisense strand to SEQ ID NO: 1116518
acucuuacuggguaccaag

SEQ ID NO: 1116520 - RNA, 19 nt, Artificial Sequence
  Description of Artificial Sequence: Synthetic oligonucleotide
  Sense strand starting at position 74 of SEQ ID NO: 915923
ccagguacacucuaugacu

SEQ ID NO: 1116521 - RNA, 19 nt, Artificial Sequence
  Description of Artificial Sequence: Synthetic oligonucleotide
  Antisense strand to SEQ ID NO: 1116520
agucauagaguguaccugg

SEQ ID NO: 1116522 - RNA, 19 nt, Artificial Sequence
  Description of Artificial Sequence: Synthetic oligonucleotide
  Sense strand starting at position 96 of SEQ ID NO: 915923
gguaguggcgcuuauugaa

SEQ ID NO: 1116523 - RNA, 19 nt, Artificial Sequence
  Description of Artificial Sequence: Synthetic oligonucleotide
  Antisense strand to SEQ ID NO: 1116522
uucaauaagcgccacuacc

SEQ ID NO: 1116524 - RNA, 19 nt, Artificial Sequence
  Description of Artificial Sequence: Synthetic oligonucleotide
  Sense strand starting at position 130 of SEQ ID NO: 915923
gugauuaguacguuugcuc

SEQ ID NO: 1116525 - RNA, 19 nt, Artificial Sequence
  Description of Artificial Sequence: Synthetic oligonucleotide
  Antisense strand to SEQ ID NO: 1116524
gagcaaacguacuaaucac

SEQ ID NO: 1116526 - RNA, 19 nt, Artificial Sequence
  Description of Artificial Sequence: Synthetic oligonucleotide
  Sense strand starting at position 133 of SEQ ID NO: 915923
auuaguacguuugcucaaa

SEQ ID NO: 1116527 - RNA, 19 nt, Artificial Sequence
  Description of Artificial Sequence: Synthetic oligonucleotide
  Antisense strand to SEQ ID NO: 1116526
uuugagcaaacguacuaau

SEQ ID NO: 1116528 - RNA, 19 nt, Artificial Sequence
  Description of Artificial Sequence: Synthetic oligonucleotide
  Sense strand starting at position 144 of SEQ ID NO: 915923
ugcucaaaccuguaagacu

SEQ ID NO: 1116529 - RNA, 19 nt, Artificial Sequence
  Description of Artificial Sequence: Synthetic oligonucleotide
  Antisense strand to SEQ ID NO: 1116528
agucuuacagguuugagca

SEQ ID NO: 1116530 - RNA, 19 nt, Artificial Sequence
  Description of Artificial Sequence: Synthetic oligonucleotide
  Sense strand starting at position 151 of SEQ ID NO: 915923
accuguaagacugaagugu

SEQ ID NO: 1116531 - RNA, 19 nt, Artificial Sequence
  Description of Artificial Sequence: Synthetic oligonucleotide
  Antisense strand to SEQ ID NO: 1116530
acacuucagucuuacaggu

SEQ ID NO: 1116532 - RNA, 19 nt, Artificial Sequence
  Description of Artificial Sequence: Synthetic oligonucleotide
  Sense strand starting at position 155 of SEQ ID NO: 915923
guaagacugaagugugaua

SEQ ID NO: 1116533 - RNA, 19 nt, Artificial Sequence
  Description of Artificial Sequence: Synthetic oligonucleotide
  Antisense strand to SEQ ID NO: 1116532
uaucacacuucagucuuac

SEQ ID NO: 1116534 - RNA, 19 nt, Artificial Sequence
  Description of Artificial Sequence: Synthetic oligonucleotide
  Sense strand starting at position 175 of SEQ ID NO: 915923
gugucuuggcuugaguacu

SEQ ID NO: 1116535 - RNA, 19 nt, Artificial Sequence
  Description of Artificial Sequence: Synthetic oligonucleotide
  Antisense strand to SEQ ID NO: 1116534
aguacucaagccaagacac

SEQ ID NO: 1116536 - RNA, 19 nt, Artificial Sequence
  Description of Artificial Sequence: Synthetic oligonucleotide
  Sense strand starting at position 186 of SEQ ID NO: 915923
ugaguacuaaccggaagga

SEQ ID NO: 1116537 - RNA, 19 nt, Artificial Sequence
  Description of Artificial Sequence: Synthetic oligonucleotide
  Antisense strand to SEQ ID NO: 1116536
uccuuccgguuaguacuca

SEQ ID NO: 1116538 - RNA, 19 nt, Artificial Sequence
  Description of Artificial Sequence: Synthetic oligonucleotide
  Sense strand starting at position 379 of SEQ ID NO: 915923
ucaggagucucuccaugac

SEQ ID NO: 1116539 - RNA, 19 nt, Artificial Sequence
  Description of Artificial Sequence: Synthetic oligonucleotide
  Antisense strand to SEQ ID NO: 1116538
gucauggagagacuccuga

SEQ ID NO: 1116540 - RNA, 19 nt, Artificial Sequence
  Description of Artificial Sequence: Synthetic oligonucleotide
  Sense strand starting at position 382 of SEQ ID NO: 915923
ggagucucuccaugacuuu

SEQ ID NO: 1116541 - RNA, 19 nt, Artificial Sequence
  Description of Artificial Sequence: Synthetic oligonucleotide
  Antisense strand to SEQ ID NO: 1116540
aaagucauggagagacucc

SEQ ID NO: 1116542 - RNA, 19 nt, Artificial Sequence
  Description of Artificial Sequence: Synthetic oligonucleotide
  Sense strand starting at position 425 of SEQ ID NO: 915923
gguauuagauaucugauau

SEQ ID NO: 1116543 - RNA, 19 nt, Artificial Sequence
  Description of Artificial Sequence: Synthetic oligonucleotide
  Antisense strand to SEQ ID NO: 1116542
auaucagauaucuaauacc

SEQ ID NO: 1116544 - RNA, 19 nt, Artificial Sequence
  Description of Artificial Sequence: Synthetic oligonucleotide
  Sense strand starting at position 489 of SEQ ID NO: 915923
aggacaccuuaggaagauu

SEQ ID NO: 1116545 - RNA, 19 nt, Artificial Sequence
  Description of Artificial Sequence: Synthetic oligonucleotide
  Antisense strand to SEQ ID NO: 1116544
aaucuuccuaagguguccu

SEQ ID NO: 1116546 - RNA, 19 nt, Artificial Sequence
  Description of Artificial Sequence: Synthetic oligonucleotide
  Sense strand starting at position 531 of SEQ ID NO: 915923
agugguggccaggaaauaa

SEQ ID NO: 1116547 - RNA, 19 nt, Artificial Sequence
  Description of Artificial Sequence: Synthetic oligonucleotide
  Antisense strand to SEQ ID NO: 1116546
uuauuuccuggccaccacu

SEQ ID NO: 1116548 - RNA, 19 nt, Artificial Sequence
  Description of Artificial Sequence: Synthetic oligonucleotide
  Sense strand starting at position 549 of SEQ ID NO: 915923
aaauguucgccugagugga

SEQ ID NO: 1116549 - RNA, 19 nt, Artificial Sequence
  Description of Artificial Sequence: Synthetic oligonucleotide
  Antisense strand to SEQ ID NO: 1116548
uccacucaggcgaacauuu

SEQ ID NO: 1116550 - RNA, 19 nt, Artificial Sequence
  Description of Artificial Sequence: Synthetic oligonucleotide
  Sense strand starting at position 648 of SEQ ID NO: 915923
ucauaaucagaguguguuu

SEQ ID NO: 1116551 - RNA, 19 nt, Artificial Sequence
  Description of Artificial Sequence: Synthetic oligonucleotide
  Antisense strand to SEQ ID NO: 1116550
aaacacacucugauuauga

SEQ ID NO: 1116552 - RNA, 19 nt, Artificial Sequence
  Description of Artificial Sequence: Synthetic oligonucleotide
  Sense strand starting at position 650 of SEQ ID NO: 915923
auaaucagaguguguuuaa

SEQ ID NO: 1116553 - RNA, 19 nt, Artificial Sequence
  Description of Artificial Sequence: Synthetic oligonucleotide
  Antisense strand to SEQ ID NO: 1116552
uuaaacacacucugauuau

SEQ ID NO: 1116554 - RNA, 19 nt, Artificial Sequence
  Description of Artificial Sequence: Synthetic oligonucleotide
  Sense strand starting at position 651 of SEQ ID NO: 915923
uaaucagaguguguuuaau

SEQ ID NO: 1116555 - RNA, 19 nt, Artificial Sequence
  Description of Artificial Sequence: Synthetic oligonucleotide
  Antisense strand to SEQ ID NO: 1116554
auuaaacacacucugauua

SEQ ID NO: 1116556 - RNA, 19 nt, Artificial Sequence
  Description of Artificial Sequence: Synthetic oligonucleotide
  Sense strand starting at position 653 of SEQ ID NO: 915923
aucagaguguguuuaaucu

SEQ ID NO: 1116557 - RNA, 19 nt, Artificial Sequence
  Description of Artificial Sequence: Synthetic oligonucleotide
  Antisense strand to SEQ ID NO: 1116556
agauuaaacacacucugau

SEQ ID NO: 1116558 - RNA, 19 nt, Artificial Sequence
  Description of Artificial Sequence: Synthetic oligonucleotide
  Sense strand starting at position 730 of SEQ ID NO: 915923
ccgagucuccagcaccaaa

SEQ ID NO: 1116559 - RNA, 19 nt, Artificial Sequence
  Description of Artificial Sequence: Synthetic oligonucleotide
  Antisense strand to SEQ ID NO: 1116558
uuuggugcuggagacucgg

SEQ ID NO: 1116560 - RNA, 19 nt, Artificial Sequence
  Description of Artificial Sequence: Synthetic oligonucleotide
  Sense strand starting at position 797 of SEQ ID NO: 915923
ucaacaaaugccuaucgau

SEQ ID NO: 1116561 - RNA, 19 nt, Artificial Sequence
  Description of Artificial Sequence: Synthetic oligonucleotide
  Antisense strand to SEQ ID NO: 1116560
aucgauaggcauuuguuga

SEQ ID NO: 1116562 - RNA, 19 nt, Artificial Sequence
  Description of Artificial Sequence: Synthetic oligonucleotide
  Sense strand starting at position 828 of SEQ ID NO: 915923
caaggacugcguuaaggua

SEQ ID NO: 1116563 - RNA, 19 nt, Artificial Sequence
  Description of Artificial Sequence: Synthetic oligonucleotide
  Antisense strand to SEQ ID NO: 1116562
uaccuuaacgcaguccuug

SEQ ID NO: 1116564 - RNA, 19 nt, Artificial Sequence
  Description of Artificial Sequence: Synthetic oligonucleotide
  Sense strand starting at position 860 of SEQ ID NO: 915923
guugacaguccuuggugga

SEQ ID NO: 1116565 - RNA, 19 nt, Artificial Sequence
  Description of Artificial Sequence: Synthetic oligonucleotide
  Antisense strand to SEQ ID NO: 1116564
uccaccaaggacugucaac

SEQ ID NO: 1116566 - RNA, 19 nt, Artificial Sequence
  Description of Artificial Sequence: Synthetic oligonucleotide
  Sense strand starting at position 957 of SEQ ID NO: 915923
augacugaguucuuaaguc

SEQ ID NO: 1116567 - RNA, 19 nt, Artificial Sequence
  Description of Artificial Sequence: Synthetic oligonucleotide
  Antisense strand to SEQ ID NO: 1116566
gacuuaagaacucagucau

SEQ ID NO: 1116568 - RNA, 19 nt, Artificial Sequence
  Description of Artificial Sequence: Synthetic oligonucleotide
  Sense strand starting at position 961 of SEQ ID NO: 915923
cugaguucuuaaguccuua

SEQ ID NO: 1116569 - RNA, 19 nt, Artificial Sequence
  Description of Artificial Sequence: Synthetic oligonucleotide
  Antisense strand to SEQ ID NO: 1116568
uaaggacuuaagaacucag

SEQ ID NO: 1116570 - RNA, 19 nt, Artificial Sequence
  Description of Artificial Sequence: Synthetic oligonucleotide
  Sense strand starting at position 965 of SEQ ID NO: 915923
guucuuaaguccuuacaca

SEQ ID NO: 1116571 - RNA, 19 nt, Artificial Sequence
  Description of Artificial Sequence: Synthetic oligonucleotide
  Antisense strand to SEQ ID NO: 1116570
uguguaaggacuuaagaac

SEQ ID NO: 1116572 - RNA, 19 nt, Artificial Sequence
  Description of Artificial Sequence: Synthetic oligonucleotide
  Sense strand starting at position 1150 of SEQ ID NO: 915923
uugggucucagcugaaaua

SEQ ID NO: 1116573 - RNA, 19 nt, Artificial Sequence
  Description of Artificial Sequence: Synthetic oligonucleotide
  Antisense strand to SEQ ID NO: 1116572
uauuucagcugagacccaa

SEQ ID NO: 1116574 - RNA, 19 nt, Artificial Sequence
  Description of Artificial Sequence: Synthetic oligonucleotide
  Sense strand starting at position 1151 of SEQ ID NO: 915923
ugggucucagcugaaauau

SEQ ID NO: 1116575 - RNA, 19 nt, Artificial Sequence
  Description of Artificial Sequence: Synthetic oligonucleotide
  Antisense strand to SEQ ID NO: 1116574
auauuucagcugagaccca

SEQ ID NO: 1116576 - RNA, 19 nt, Artificial Sequence
  Description of Artificial Sequence: Synthetic oligonucleotide
  Sense strand starting at position 1181 of SEQ ID NO: 915923
ggaggcuuccucgacaauc

SEQ ID NO: 1116577 - RNA, 19 nt, Artificial Sequence
  Description of Artificial Sequence: Synthetic oligonucleotide
  Antisense strand to SEQ ID NO: 1116576
gauugucgaggaagccucc

SEQ ID NO: 1116578 - RNA, 19 nt, Artificial Sequence
  Description of Artificial Sequence: Synthetic oligonucleotide
  Sense strand starting at position 2155 of SEQ ID NO: 915923
ccggcuuuccuggaggagu

SEQ ID NO: 1116579 - RNA, 19 nt, Artificial Sequence
  Description of Artificial Sequence: Synthetic oligonucleotide
  Antisense strand to SEQ ID NO: 1116578
acuccuccaggaaagccgg

SEQ ID NO: 1116580 - RNA, 19 nt, Artificial Sequence
  Description of Artificial Sequence: Synthetic oligonucleotide
  Sense strand starting at position 2856 of SEQ ID NO: 915923
gagggauccuaggcuucuu

SEQ ID NO: 1116581 - RNA, 19 nt, Artificial Sequence
  Description of Artificial Sequence: Synthetic oligonucleotide
  Antisense strand to SEQ ID NO: 1116580
aagaagccuaggaucccuc

SEQ ID NO: 1116582 - RNA, 19 nt, Artificial Sequence
  Description of Artificial Sequence: Synthetic oligonucleotide
  Sense strand starting at position 2866 of SEQ ID NO: 915923
aggcuucuucgugaaguug

SEQ ID NO: 1116583 - RNA, 19 nt, Artificial Sequence
  Description of Artificial Sequence: Synthetic oligonucleotide
  Antisense strand to SEQ ID NO: 1116582
caacuucacgaagaagccu

SEQ ID NO: 1116584 - RNA, 19 nt, Artificial Sequence
  Description of Artificial Sequence: Synthetic oligonucleotide
  Sense strand starting at position 3029 of SEQ ID NO: 915923
gcuuguccugucgauggaa

SEQ ID NO: 1116585 - RNA, 19 nt, Artificial Sequence
  Description of Artificial Sequence: Synthetic oligonucleotide
  Antisense strand to SEQ ID NO: 1116584
uuccaucgacaggacaagc

SEQ ID NO: 1116586 - RNA, 19 nt, Artificial Sequence
  Description of Artificial Sequence: Synthetic oligonucleotide
  Sense strand starting at position 3032 of SEQ ID NO: 915923
uguccugucgauggaauca

SEQ ID NO: 1116587 - RNA, 19 nt, Artificial Sequence
  Description of Artificial Sequence: Synthetic oligonucleotide
  Antisense strand to SEQ ID NO: 1116586
ugauuccaucgacaggaca

SEQ ID NO: 1116588 - RNA, 19 nt, Artificial Sequence
  Description of Artificial Sequence: Synthetic oligonucleotide
  Sense strand starting at position 3134 of SEQ ID NO: 915923
cgagucucugcuuacauau

SEQ ID NO: 1116589 - RNA, 19 nt, Artificial Sequence
  Description of Artificial Sequence: Synthetic oligonucleotide
  Antisense strand to SEQ ID NO: 1116588
auauguaagcagagacucg

SEQ ID NO: 1116590 - RNA, 19 nt, Artificial Sequence
  Description of Artificial Sequence: Synthetic oligonucleotide
  Sense strand starting at position 3163 of SEQ ID NO: 915923
gagacugucccuggaguca

SEQ ID NO: 1116591 - RNA, 19 nt, Artificial Sequence
  Description of Artificial Sequence: Synthetic oligonucleotide
  Antisense strand to SEQ ID NO: 1116590
ugacuccagggacagucuc

SEQ ID NO: 1116592 - RNA, 19 nt, Artificial Sequence
  Description of Artificial Sequence: Synthetic oligonucleotide
  Sense strand starting at position 3178 of SEQ ID NO: 915923
gucacauccuuguucuauu

SEQ ID NO: 1116593 - RNA, 19 nt, Artificial Sequence
  Description of Artificial Sequence: Synthetic oligonucleotide
  Antisense strand to SEQ ID NO: 1116592
aauagaacaaggaugugac

SEQ ID NO: 1116594 - RNA, 19 nt, Artificial Sequence
  Description of Artificial Sequence: Synthetic oligonucleotide
  Sense strand starting at position 3222 of SEQ ID NO: 915923
gaaauuaucuugucugugu

SEQ ID NO: 1116595 - RNA, 19 nt, Artificial Sequence
  Description of Artificial Sequence: Synthetic oligonucleotide
  Antisense strand to SEQ ID NO: 1116594
acacagacaagauaauuuc

SEQ ID NO: 1116596 - RNA, 19 nt, Artificial Sequence
  Description of Artificial Sequence: Synthetic oligonucleotide
  Sense strand starting at position 3492 of SEQ ID NO: 915923
accugucauuuggaaguuu

SEQ ID NO: 1116597 - RNA, 19 nt, Artificial Sequence
  Description of Artificial Sequence: Synthetic oligonucleotide
  Antisense strand to SEQ ID NO: 1116596
aaacuuccaaaugacaggu

SEQ ID NO: 1116598 - RNA, 19 nt, Artificial Sequence
  Description of Artificial Sequence: Synthetic oligonucleotide
  Sense strand starting at position 3869 of SEQ ID NO: 915923
caguaagaacugugaaggu

SEQ ID NO: 1116599 - RNA, 19 nt, Artificial Sequence
  Description of Artificial Sequence: Synthetic oligonucleotide
  Antisense strand to SEQ ID NO: 1116598
accuucacaguucuuacug

SEQ ID NO: 1116600 - RNA, 19 nt, Artificial Sequence
  Description of Artificial Sequence: Synthetic oligonucleotide
  Sense strand starting at position 122 of SEQ ID NO: 915924
ccuagcauuuccgaaauug

SEQ ID NO: 1116601 - RNA, 19 nt, Artificial Sequence
  Description of Artificial Sequence: Synthetic oligonucleotide
  Antisense strand to SEQ ID NO: 1116600
caauuucggaaaugcuagg

SEQ ID NO: 1116602 - RNA, 19 nt, Artificial Sequence
  Description of Artificial Sequence: Synthetic oligonucleotide
  Sense strand starting at position 517 of SEQ ID NO: 915924
uccgaucuuucccaggacu

SEQ ID NO: 1116603 - RNA, 19 nt, Artificial Sequence
  Description of Artificial Sequence: Synthetic oligonucleotide
  Antisense strand to SEQ ID NO: 1116602
aguccugggaaagaucgga

SEQ ID NO: 1116604 - RNA, 19 nt, Artificial Sequence
  Description of Artificial Sequence: Synthetic oligonucleotide
  Sense strand starting at position 566 of SEQ ID NO: 915924
cccugaugauuccggagga

SEQ ID NO: 1116605 - RNA, 19 nt, Artificial Sequence
  Description of Artificial Sequence: Synthetic oligonucleotide
  Antisense strand to SEQ ID NO: 1116604
uccuccggaaucaucaggg

SEQ ID NO: 1116606 - RNA, 19 nt, Artificial Sequence
  Description of Artificial Sequence: Synthetic oligonucleotide
  Sense strand starting at position 901 of SEQ ID NO: 915924
gcuggacaggccugacaau

SEQ ID NO: 1116607 - RNA, 19 nt, Artificial Sequence
  Description of Artificial Sequence: Synthetic oligonucleotide
  Antisense strand to SEQ ID NO: 1116606
auugucaggccuguccagc

SEQ ID NO: 1116608 - RNA, 19 nt, Artificial Sequence
  Description of Artificial Sequence: Synthetic oligonucleotide
  Sense strand starting at position 1887 of SEQ ID NO: 915924
gggacucuuuaccggaagu

SEQ ID NO: 1116609 - RNA, 19 nt, Artificial Sequence
  Description of Artificial Sequence: Synthetic oligonucleotide
  Antisense strand to SEQ ID NO: 1116608
acuuccgguaaagaguccc

SEQ ID NO: 1116610 - RNA, 19 nt, Artificial Sequence
  Description of Artificial Sequence: Synthetic oligonucleotide
  Sense strand starting at position 1888 of SEQ ID NO: 915924
ggacucuuuaccggaaguc

SEQ ID NO: 1116611 - RNA, 19 nt, Artificial Sequence
  Description of Artificial Sequence: Synthetic oligonucleotide
  Antisense strand to SEQ ID NO: 1116610
gacuuccgguaaagagucc

SEQ ID NO: 1116612 - RNA, 19 nt, Artificial Sequence
  Description of Artificial Sequence: Synthetic oligonucleotide
  Sense strand starting at position 2231 of SEQ ID NO: 915924
cggagaaugugucuugcua

SEQ ID NO: 1116613 - RNA, 19 nt, Artificial Sequence
  Description of Artificial Sequence: Synthetic oligonucleotide
  Antisense strand to SEQ ID NO: 1116612
uagcaagacacauucuccg

SEQ ID NO: 1116614 - RNA, 19 nt, Artificial Sequence
  Description of Artificial Sequence: Synthetic oligonucleotide
  Sense strand starting at position 2238 of SEQ ID NO: 915924
ugugucuugcuacguguaa

SEQ ID NO: 1116615 - RNA, 19 nt, Artificial Sequence
  Description of Artificial Sequence: Synthetic oligonucleotide
  Antisense strand to SEQ ID NO: 1116614
uuacacguagcaagacaca

SEQ ID NO: 1116616 - RNA, 19 nt, Artificial Sequence
  Description of Artificial Sequence: Synthetic oligonucleotide
  Sense strand starting at position 2239 of SEQ ID NO: 915924
gugucuugcuacguguaaa

SEQ ID NO: 1116617 - RNA, 19 nt, Artificial Sequence
  Description of Artificial Sequence: Synthetic oligonucleotide
  Antisense strand to SEQ ID NO: 1116616
uuuacacguagcaagacac

SEQ ID NO: 1116618 - RNA, 19 nt, Artificial Sequence
  Description of Artificial Sequence: Synthetic oligonucleotide
  Sense strand starting at position 2240 of SEQ ID NO: 915924
ugucuugcuacguguaaag

SEQ ID NO: 1116619 - RNA, 19 nt, Artificial Sequence
  Description of Artificial Sequence: Synthetic oligonucleotide
  Antisense strand to SEQ ID NO: 1116618
cuuuacacguagcaagaca

SEQ ID NO: 1116620 - RNA, 19 nt, Artificial Sequence
  Description of Artificial Sequence: Synthetic oligonucleotide
  Sense strand starting at position 2242 of SEQ ID NO: 915924
ucuugcuacguguaaagca

SEQ ID NO: 1116621 - RNA, 19 nt, Artificial Sequence
  Description of Artificial Sequence: Synthetic oligonucleotide
  Antisense strand to SEQ ID NO: 1116620
ugcuuuacacguagcaaga

SEQ ID NO: 1116622 - RNA, 19 nt, Artificial Sequence
  Description of Artificial Sequence: Synthetic oligonucleotide
  Sense strand starting at position 2580 of SEQ ID NO: 915924
cugguagaacuacggauaa

SEQ ID NO: 1116623 - RNA, 19 nt, Artificial Sequence
  Description of Artificial Sequence: Synthetic oligonucleotide
  Antisense strand to SEQ ID NO: 1116622
uuauccguaguucuaccag

SEQ ID NO: 1116624 - RNA, 19 nt, Artificial Sequence
  Description of Artificial Sequence: Synthetic oligonucleotide
  Sense strand starting at position 2599 of SEQ ID NO: 915924
ugggaucucccucgguaga

SEQ ID NO: 1116625 - RNA, 19 nt, Artificial Sequence
  Description of Artificial Sequence: Synthetic oligonucleotide
  Antisense strand to SEQ ID NO: 1116624
ucuaccgagggagauccca

SEQ ID NO: 1116626 - RNA, 19 nt, Artificial Sequence
  Description of Artificial Sequence: Synthetic oligonucleotide
  Sense strand starting at position 2601 of SEQ ID NO: 915924
ggaucucccucgguagaga

SEQ ID NO: 1116627 - RNA, 19 nt, Artificial Sequence
  Description of Artificial Sequence: Synthetic oligonucleotide
  Antisense strand to SEQ ID NO: 1116626
ucucuaccgagggagaucc

SEQ ID NO: 1116628 - RNA, 19 nt, Artificial Sequence
  Description of Artificial Sequence: Synthetic oligonucleotide
  Sense strand starting at position 2717 of SEQ ID NO: 915924
auguguugcaguuaaacug

SEQ ID NO: 1116629 - RNA, 19 nt, Artificial Sequence
  Description of Artificial Sequence: Synthetic oligonucleotide
  Antisense strand to SEQ ID NO: 1116628
caguuuaacugcaacacau

SEQ ID NO: 1116630 - RNA, 19 nt, Artificial Sequence
  Description of Artificial Sequence: Synthetic oligonucleotide
  Sense strand starting at position 2743 of SEQ ID NO: 915924
guagaaaguagguaacuuu

SEQ ID NO: 1116631 - RNA, 19 nt, Artificial Sequence
  Description of Artificial Sequence: Synthetic oligonucleotide
  Antisense strand to SEQ ID NO: 1116630
aaaguuaccuacuuucuac

SEQ ID NO: 1116632 - RNA, 19 nt, Artificial Sequence
  Description of Artificial Sequence: Synthetic oligonucleotide
  Sense strand starting at position 2848 of SEQ ID NO: 915924
cucaauguccuagaacugu

SEQ ID NO: 1116633 - RNA, 19 nt, Artificial Sequence
  Description of Artificial Sequence: Synthetic oligonucleotide
  Antisense strand to SEQ ID NO: 1116632
acaguucuaggacauugag

SEQ ID NO: 1116634 - RNA, 19 nt, Artificial Sequence
  Description of Artificial Sequence: Synthetic oligonucleotide
  Sense strand starting at position 2876 of SEQ ID NO: 915924
gguaaagacuuagauaaac

SEQ ID NO: 1116635 - RNA, 19 nt, Artificial Sequence
  Description of Artificial Sequence: Synthetic oligonucleotide
  Antisense strand to SEQ ID NO: 1116634
guuuaucuaagucuuuacc

SEQ ID NO: 1116636 - RNA, 19 nt, Artificial Sequence
  Description of Artificial Sequence: Synthetic oligonucleotide
  Sense strand starting at position 2884 of SEQ ID NO: 915924
cuuagauaaacguggagaa

SEQ ID NO: 1116637 - RNA, 19 nt, Artificial Sequence
  Description of Artificial Sequence: Synthetic oligonucleotide
  Antisense strand to SEQ ID NO: 1116636
uucuccacguuuaucuaag

SEQ ID NO: 1116638 - RNA, 19 nt, Artificial Sequence
  Description of Artificial Sequence: Synthetic oligonucleotide
  Sense strand starting at position 2885 of SEQ ID NO: 915924
uuagauaaacguggagaau

SEQ ID NO: 1116639 - RNA, 19 nt, Artificial Sequence
  Description of Artificial Sequence: Synthetic oligonucleotide
  Antisense strand to SEQ ID NO: 1116638
auucuccacguuuaucuaa

SEQ ID NO: 1116640 - RNA, 19 nt, Artificial Sequence
  Description of Artificial Sequence: Synthetic oligonucleotide
  Sense strand starting at position 2967 of SEQ ID NO: 915924
ugaucauuguauucugcca

SEQ ID NO: 1116641 - RNA, 19 nt, Artificial Sequence
  Description of Artificial Sequence: Synthetic oligonucleotide
  Antisense strand to SEQ ID NO: 1116640
uggcagaauacaaugauca

SEQ ID NO: 1116642 - RNA, 19 nt, Artificial Sequence
  Description of Artificial Sequence: Synthetic oligonucleotide
  Sense strand starting at position 2972 of SEQ ID NO: 915924
auuguauucugccaaugua

SEQ ID NO: 1116643 - RNA, 19 nt, Artificial Sequence
  Description of Artificial Sequence: Synthetic oligonucleotide
  Antisense strand to SEQ ID NO: 1116642
uacauuggcagaauacaau

SEQ ID NO: 1116644 - RNA, 19 nt, Artificial Sequence
  Description of Artificial Sequence: Synthetic oligonucleotide
  Sense strand starting at position 2975 of SEQ ID NO: 915924
guauucugccaauguagga

SEQ ID NO: 1116645 - RNA, 19 nt, Artificial Sequence
  Description of Artificial Sequence: Synthetic oligonucleotide
  Antisense strand to SEQ ID NO: 1116644
uccuacauuggcagaauac

SEQ ID NO: 1116646 - RNA, 19 nt, Artificial Sequence
  Description of Artificial Sequence: Synthetic oligonucleotide
  Sense strand starting at position 3531 of SEQ ID NO: 915924
cgucaauggugucccguua

SEQ ID NO: 1116647 - RNA, 19 nt, Artificial Sequence
  Description of Artificial Sequence: Synthetic oligonucleotide
  Antisense strand to SEQ ID NO: 1116646
uaacgggacaccauugacg

SEQ ID NO: 1116648 - RNA, 19 nt, Artificial Sequence
  Description of Artificial Sequence: Synthetic oligonucleotide
  Sense strand starting at position 3543 of SEQ ID NO: 915924
cccguuauauucuuucuuu

SEQ ID NO: 1116649 - RNA, 19 nt, Artificial Sequence
  Description of Artificial Sequence: Synthetic oligonucleotide
  Antisense strand to SEQ ID NO: 1116648
aaagaaagaauauaacggg

SEQ ID NO: 1116650 - RNA, 19 nt, Artificial Sequence
  Description of Artificial Sequence: Synthetic oligonucleotide
  Sense strand starting at position 3544 of SEQ ID NO: 915924
ccguuauauucuuucuuua

SEQ ID NO: 1116651 - RNA, 19 nt, Artificial Sequence
  Description of Artificial Sequence: Synthetic oligonucleotide
  Antisense strand to SEQ ID NO: 1116650
uaaagaaagaauauaacgg

SEQ ID NO: 1116652 - RNA, 19 nt, Artificial Sequence
  Description of Artificial Sequence: Synthetic oligonucleotide
  Sense strand starting at position 3897 of SEQ ID NO: 915924
uuucucugauuggaaucaa

SEQ ID NO: 1116653 - RNA, 19 nt, Artificial Sequence
  Description of Artificial Sequence: Synthetic oligonucleotide
  Antisense strand to SEQ ID NO: 1116652
uugauuccaaucagagaaa

SEQ ID NO: 1116654 - RNA, 19 nt, Artificial Sequence
  Description of Artificial Sequence: Synthetic oligonucleotide
  Sense strand starting at position 2046 of SEQ ID NO: 915925
cugcuuugagagcguuuga

SEQ ID NO: 1116655 - RNA, 19 nt, Artificial Sequence
  Description of Artificial Sequence: Synthetic oligonucleotide
  Antisense strand to SEQ ID NO: 1116654
ucaaacgcucucaaagcag

SEQ ID NO: 1116656 - RNA, 19 nt, Artificial Sequence
  Description of Artificial Sequence: Synthetic oligonucleotide
  Sense strand starting at position 2051 of SEQ ID NO: 915925
uugagagcguuugaguuua

SEQ ID NO: 1116657 - RNA, 19 nt, Artificial Sequence
  Description of Artificial Sequence: Synthetic oligonucleotide
  Antisense strand to SEQ ID NO: 1116656
uaaacucaaacgcucucaa

SEQ ID NO: 1116658 - RNA, 19 nt, Artificial Sequence
  Description of Artificial Sequence: Synthetic oligonucleotide
  Sense strand starting at position 2056 of SEQ ID NO: 915925
agcguuugaguuuaugaaa

SEQ ID NO: 1116659 - RNA, 19 nt, Artificial Sequence
  Description of Artificial Sequence: Synthetic oligonucleotide
  Antisense strand to SEQ ID NO: 1116658
uuucauaaacucaaacgcu

SEQ ID NO: 1116660 - RNA, 19 nt, Artificial Sequence
  Description of Artificial Sequence: Synthetic oligonucleotide
  Sense strand starting at position 2082 of SEQ ID NO: 915925
ggaugaacuuaguguauga

SEQ ID NO: 1116661 - RNA, 19 nt, Artificial Sequence
  Description of Artificial Sequence: Synthetic oligonucleotide
  Antisense strand to SEQ ID NO: 1116660
ucauacacuaaguucaucc

SEQ ID NO: 1116662 - RNA, 19 nt, Artificial Sequence
  Description of Artificial Sequence: Synthetic oligonucleotide
  Sense strand starting at position 2084 of SEQ ID NO: 915925
augaacuuaguguaugacu

SEQ ID NO: 1116663 - RNA, 19 nt, Artificial Sequence
  Description of Artificial Sequence: Synthetic oligonucleotide
  Antisense strand to SEQ ID NO: 1116662
agucauacacuaaguucau

SEQ ID NO: 1116664 - RNA, 19 nt, Artificial Sequence
  Description of Artificial Sequence: Synthetic oligonucleotide
  Sense strand starting at position 2093 of SEQ ID NO: 915925
guguaugacuuccauuauc

SEQ ID NO: 1116665 - RNA, 19 nt, Artificial Sequence
  Description of Artificial Sequence: Synthetic oligonucleotide
  Antisense strand to SEQ ID NO: 1116664
gauaauggaagucauacac

SEQ ID NO: 1116666 - RNA, 19 nt, Artificial Sequence
  Description of Artificial Sequence: Synthetic oligonucleotide
  Sense strand starting at position 2165 of SEQ ID NO: 915925
uuuaaacauucgcuaauga

SEQ ID NO: 1116667 - RNA, 19 nt, Artificial Sequence
  Description of Artificial Sequence: Synthetic oligonucleotide
  Antisense strand to SEQ ID NO: 1116666
ucauuagcgaauguuuaaa

SEQ ID NO: 1116668 - RNA, 19 nt, Artificial Sequence
  Description of Artificial Sequence: Synthetic oligonucleotide
  Sense strand starting at position 2166 of SEQ ID NO: 915925
uuaaacauucgcuaaugaa

SEQ ID NO: 1116669 - RNA, 19 nt, Artificial Sequence
  Description of Artificial Sequence: Synthetic oligonucleotide
  Antisense strand to SEQ ID NO: 1116668
uucauuagcgaauguuuaa

SEQ ID NO: 1116670 - RNA, 19 nt, Artificial Sequence
  Description of Artificial Sequence: Synthetic oligonucleotide
  Sense strand starting at position 2250 of SEQ ID NO: 915925
uguggugugauucgaaaca

SEQ ID NO: 1116671 - RNA, 19 nt, Artificial Sequence
  Description of Artificial Sequence: Synthetic oligonucleotide
  Antisense strand to SEQ ID NO: 1116670
uguuucgaaucacaccaca

SEQ ID NO: 1116672 - RNA, 19 nt, Artificial Sequence
  Description of Artificial Sequence: Synthetic oligonucleotide
  Sense strand starting at position 2277 of SEQ ID NO: 915925
ggaacaguucuccggaggu

SEQ ID NO: 1116673 - RNA, 19 nt, Artificial Sequence
  Description of Artificial Sequence: Synthetic oligonucleotide
  Antisense strand to SEQ ID NO: 1116672
accuccggagaacuguucc

SEQ ID NO: 1116674 - RNA, 19 nt, Artificial Sequence
  Description of Artificial Sequence: Synthetic oligonucleotide
  Sense strand starting at position 2279 of SEQ ID NO: 915925
aacaguucuccggaggugu

SEQ ID NO: 1116675 - RNA, 19 nt, Artificial Sequence
  Description of Artificial Sequence: Synthetic oligonucleotide
  Antisense strand to SEQ ID NO: 1116674
acaccuccggagaacuguu

SEQ ID NO: 1116676 - RNA, 19 nt, Artificial Sequence
  Description of Artificial Sequence: Synthetic oligonucleotide
  Sense strand starting at position 2281 of SEQ ID NO: 915925
caguucuccggagguguuu

SEQ ID NO: 1116677 - RNA, 19 nt, Artificial Sequence
  Description of Artificial Sequence: Synthetic oligonucleotide
  Antisense strand to SEQ ID NO: 1116676
aaacaccuccggagaacug

SEQ ID NO: 1116678 - RNA, 19 nt, Artificial Sequence
  Description of Artificial Sequence: Synthetic oligonucleotide
  Sense strand starting at position 2313 of SEQ ID NO: 915925
acaugauugacuggugaau

SEQ ID NO: 1116679 - RNA, 19 nt, Artificial Sequence
  Description of Artificial Sequence: Synthetic oligonucleotide
  Antisense strand to SEQ ID NO: 1116678
auucaccagucaaucaugu

SEQ ID NO: 1116680 - RNA, 19 nt, Artificial Sequence
  Description of Artificial Sequence: Synthetic oligonucleotide
  Sense strand starting at position 2322 of SEQ ID NO: 915925
acuggugaaucguuuauag

SEQ ID NO: 1116681 - RNA, 19 nt, Artificial Sequence
  Description of Artificial Sequence: Synthetic oligonucleotide
  Antisense strand to SEQ ID NO: 1116680
cuauaaacgauucaccagu

SEQ ID NO: 1116682 - RNA, 19 nt, Artificial Sequence
  Description of Artificial Sequence: Synthetic oligonucleotide
  Sense strand starting at position 2324 of SEQ ID NO: 915925
uggugaaucguuuauagca

SEQ ID NO: 1116683 - RNA, 19 nt, Artificial Sequence
  Description of Artificial Sequence: Synthetic oligonucleotide
  Antisense strand to SEQ ID NO: 1116682
ugcuauaaacgauucacca

SEQ ID NO: 1116684 - RNA, 19 nt, Artificial Sequence
  Description of Artificial Sequence: Synthetic oligonucleotide
  Sense strand starting at position 2326 of SEQ ID NO: 915925
gugaaucguuuauagcaau

SEQ ID NO: 1116685 - RNA, 19 nt, Artificial Sequence
  Description of Artificial Sequence: Synthetic oligonucleotide
  Antisense strand to SEQ ID NO: 1116684
auugcuauaaacgauucac

SEQ ID NO: 1116686 - RNA, 19 nt, Artificial Sequence
  Description of Artificial Sequence: Synthetic oligonucleotide
  Sense strand starting at position 2332 of SEQ ID NO: 915925
cguuuauagcaaugcugca

SEQ ID NO: 1116687 - RNA, 19 nt, Artificial Sequence
  Description of Artificial Sequence: Synthetic oligonucleotide
  Antisense strand to SEQ ID NO: 1116686
ugcagcauugcuauaaacg

SEQ ID NO: 1116688 - RNA, 19 nt, Artificial Sequence
  Description of Artificial Sequence: Synthetic oligonucleotide
  Sense strand starting at position 2344 of SEQ ID NO: 915925
ugcugcaguugucauuuaa

SEQ ID NO: 1116689 - RNA, 19 nt, Artificial Sequence
  Description of Artificial Sequence: Synthetic oligonucleotide
  Antisense strand to SEQ ID NO: 1116688
uuaaaugacaacugcagca

SEQ ID NO: 1116690 - RNA, 19 nt, Artificial Sequence
  Description of Artificial Sequence: Synthetic oligonucleotide
  Sense strand starting at position 2381 of SEQ ID NO: 915925
ggaaacaaauuacaguaua

SEQ ID NO: 1116691 - RNA, 19 nt, Artificial Sequence
  Description of Artificial Sequence: Synthetic oligonucleotide
  Antisense strand to SEQ ID NO: 1116690
uauacuguaauuuguuucc

SEQ ID NO: 1116692 - RNA, 19 nt, Artificial Sequence
  Description of Artificial Sequence: Synthetic oligonucleotide
  Sense strand starting at position 2432 of SEQ ID NO: 915925
acuggaaacuugguacuaa

SEQ ID NO: 1116693 - RNA, 19 nt, Artificial Sequence
  Description of Artificial Sequence: Synthetic oligonucleotide
  Antisense strand to SEQ ID NO: 1116692
uuaguaccaaguuuccagu

SEQ ID NO: 1116694 - RNA, 19 nt, Artificial Sequence
  Description of Artificial Sequence: Synthetic oligonucleotide
  Sense strand starting at position 2433 of SEQ ID NO: 915925
cuggaaacuugguacuaaa

SEQ ID NO: 1116695 - RNA, 19 nt, Artificial Sequence
  Description of Artificial Sequence: Synthetic oligonucleotide
  Antisense strand to SEQ ID NO: 1116694
uuuaguaccaaguuuccag

SEQ ID NO: 1116696 - RNA, 19 nt, Artificial Sequence
  Description of Artificial Sequence: Synthetic oligonucleotide
  Sense strand starting at position 2436 of SEQ ID NO: 915925
gaaacuugguacuaaaguc

SEQ ID NO: 1116697 - RNA, 19 nt, Artificial Sequence
  Description of Artificial Sequence: Synthetic oligonucleotide
  Antisense strand to SEQ ID NO: 1116696
gacuuuaguaccaaguuuc

SEQ ID NO: 1116698 - RNA, 19 nt, Artificial Sequence
  Description of Artificial Sequence: Synthetic oligonucleotide
  Sense strand starting at position 2509 of SEQ ID NO: 915925
ucauuaaggcaaugugacu

SEQ ID NO: 1116699 - RNA, 19 nt, Artificial Sequence
  Description of Artificial Sequence: Synthetic oligonucleotide
  Antisense strand to SEQ ID NO: 1116698
agucacauugccuuaauga

SEQ ID NO: 1116700 - RNA, 19 nt, Artificial Sequence
  Description of Artificial Sequence: Synthetic oligonucleotide
  Sense strand starting at position 2617 of SEQ ID NO: 915925
uguuaaauauauugggaga

SEQ ID NO: 1116701 - RNA, 19 nt, Artificial Sequence
  Description of Artificial Sequence: Synthetic oligonucleotide
  Antisense strand to SEQ ID NO: 1116700
ucucccaauauauuuaaca

SEQ ID NO: 1116702 - RNA, 19 nt, Artificial Sequence
  Description of Artificial Sequence: Synthetic oligonucleotide
  Sense strand starting at position 2657 of SEQ ID NO: 915925
augcaugauuugugagaac

SEQ ID NO: 1116703 - RNA, 19 nt, Artificial Sequence
  Description of Artificial Sequence: Synthetic oligonucleotide
  Antisense strand to SEQ ID NO: 1116702
guucucacaaaucaugcau

SEQ ID NO: 1116704 - RNA, 19 nt, Artificial Sequence
  Description of Artificial Sequence: Synthetic oligonucleotide
  Sense strand starting at position 2678 of SEQ ID NO: 915925
gagccagucuaccuaaguu

SEQ ID NO: 1116705 - RNA, 19 nt, Artificial Sequence
  Description of Artificial Sequence: Synthetic oligonucleotide
  Antisense strand to SEQ ID NO: 1116704
aacuuagguagacuggcuc

SEQ ID NO: 1116706 - RNA, 19 nt, Artificial Sequence
  Description of Artificial Sequence: Synthetic oligonucleotide
  Sense strand starting at position 2693 of SEQ ID NO: 915925
aguuuaaauccugaagcca

SEQ ID NO: 1116707 - RNA, 19 nt, Artificial Sequence
  Description of Artificial Sequence: Synthetic oligonucleotide
  Antisense strand to SEQ ID NO: 1116706
uggcuucaggauuuaaacu

SEQ ID NO: 1116708 - RNA, 19 nt, Artificial Sequence
  Description of Artificial Sequence: Synthetic oligonucleotide
  Sense strand starting at position 2721 of SEQ ID NO: 915925
aguuuaguguuuccucauc

SEQ ID NO: 1116709 - RNA, 19 nt, Artificial Sequence
  Description of Artificial Sequence: Synthetic oligonucleotide
  Antisense strand to SEQ ID NO: 1116708
gaugaggaaacacuaaacu

SEQ ID NO: 1116710 - RNA, 19 nt, Artificial Sequence
  Description of Artificial Sequence: Synthetic oligonucleotide
  Sense strand starting at position 2726 of SEQ ID NO: 915925
aguguuuccucaucugaaa

SEQ ID NO: 1116711 - RNA, 19 nt, Artificial Sequence
  Description of Artificial Sequence: Synthetic oligonucleotide
  Antisense strand to SEQ ID NO: 1116710
uuucagaugaggaaacacu

SEQ ID NO: 1116712 - RNA, 19 nt, Artificial Sequence
  Description of Artificial Sequence: Synthetic oligonucleotide
  Sense strand starting at position 3128 of SEQ ID NO: 915925
gcgacagugccuuacaugu

SEQ ID NO: 1116713 - RNA, 19 nt, Artificial Sequence
  Description of Artificial Sequence: Synthetic oligonucleotide
  Antisense strand to SEQ ID NO: 1116712
acauguaaggcacugucgc

SEQ ID NO: 1116714 - RNA, 19 nt, Artificial Sequence
  Description of Artificial Sequence: Synthetic oligonucleotide
  Sense strand starting at position 3130 of SEQ ID NO: 915925
gacagugccuuacauguaa

SEQ ID NO: 1116715 - RNA, 19 nt, Artificial Sequence
  Description of Artificial Sequence: Synthetic oligonucleotide
  Antisense strand to SEQ ID NO: 1116714
uuacauguaaggcacuguc

SEQ ID NO: 1116716 - RNA, 19 nt, Artificial Sequence
  Description of Artificial Sequence: Synthetic oligonucleotide
  Sense strand starting at position 3216 of SEQ ID NO: 915925
gcuguaguauauccuuuau

SEQ ID NO: 1116717 - RNA, 19 nt, Artificial Sequence
  Description of Artificial Sequence: Synthetic oligonucleotide
  Antisense strand to SEQ ID NO: 1116716
auaaaggauauacuacagc

SEQ ID NO: 1116718 - RNA, 19 nt, Artificial Sequence
  Description of Artificial Sequence: Synthetic oligonucleotide
  Sense strand starting at position 3256 of SEQ ID NO: 915925
ccagaacugcugugaaaua

SEQ ID NO: 1116719 - RNA, 19 nt, Artificial Sequence
  Description of Artificial Sequence: Synthetic oligonucleotide
  Antisense strand to SEQ ID NO: 1116718
uauuucacagcaguucugg

SEQ ID NO: 1116720 - RNA, 19 nt, Artificial Sequence
  Description of Artificial Sequence: Synthetic oligonucleotide
  Sense strand starting at position 3271 of SEQ ID NO: 915925
aauagagcagccuguauua

SEQ ID NO: 1116721 - RNA, 19 nt, Artificial Sequence
  Description of Artificial Sequence: Synthetic oligonucleotide
  Antisense strand to SEQ ID NO: 1116720
uaauacaggcugcucuauu

SEQ ID NO: 1116722 - RNA, 19 nt, Artificial Sequence
  Description of Artificial Sequence: Synthetic oligonucleotide
  Sense strand starting at position 3349 of SEQ ID NO: 915925
uuuauaucugucugauucu

SEQ ID NO: 1116723 - RNA, 19 nt, Artificial Sequence
  Description of Artificial Sequence: Synthetic oligonucleotide
  Antisense strand to SEQ ID NO: 1116722
agaaucagacagauauaaa

SEQ ID NO: 1116724 - RNA, 19 nt, Artificial Sequence
  Description of Artificial Sequence: Synthetic oligonucleotide
  Sense strand starting at position 3355 of SEQ ID NO: 915925
ucugucugauucuguacuu

SEQ ID NO: 1116725 - RNA, 19 nt, Artificial Sequence
  Description of Artificial Sequence: Synthetic oligonucleotide
  Antisense strand to SEQ ID NO: 1116724
aaguacagaaucagacaga

SEQ ID NO: 1116726 - RNA, 19 nt, Artificial Sequence
  Description of Artificial Sequence: Synthetic oligonucleotide
  Sense strand starting at position 3436 of SEQ ID NO: 915925
uguauaagaucaucugaac

SEQ ID NO: 1116727 - RNA, 19 nt, Artificial Sequence
  Description of Artificial Sequence: Synthetic oligonucleotide
  Antisense strand to SEQ ID NO: 1116726
guucagaugaucuuauaca

SEQ ID NO: 1116728 - RNA, 19 nt, Artificial Sequence
  Description of Artificial Sequence: Synthetic oligonucleotide
  Sense strand starting at position 3881 of SEQ ID NO: 915925
uugggcaauuugugaagaa

SEQ ID NO: 1116729 - RNA, 19 nt, Artificial Sequence
  Description of Artificial Sequence: Synthetic oligonucleotide
  Antisense strand to SEQ ID NO: 1116728
uucuucacaaauugcccaa

SEQ ID NO: 1116730 - RNA, 19 nt, Artificial Sequence
  Description of Artificial Sequence: Synthetic oligonucleotide
  Sense strand starting at position 3882 of SEQ ID NO: 915925
ugggcaauuugugaagaaa

SEQ ID NO: 1116731 - RNA, 19 nt, Artificial Sequence
  Description of Artificial Sequence: Synthetic oligonucleotide
  Antisense strand to SEQ ID NO: 1116730
uuucuucacaaauugccca

SEQ ID NO: 1116732 - RNA, 19 nt, Artificial Sequence
  Description of Artificial Sequence: Synthetic oligonucleotide
  Sense strand starting at position 3929 of SEQ ID NO: 915925
cgcuuaaugggaggcauga

SEQ ID NO: 1116733 - RNA, 19 nt, Artificial Sequence
  Description of Artificial Sequence: Synthetic oligonucleotide
  Antisense strand to SEQ ID NO: 1116732
ucaugccucccauuaagcg

SEQ ID NO: 1116734 - RNA, 19 nt, Artificial Sequence
  Description of Artificial Sequence: Synthetic oligonucleotide
  Sense strand starting at position 266 of SEQ ID NO: 915926
agauguucucaaugaccuu

SEQ ID NO: 1116735 - RNA, 19 nt, Artificial Sequence
  Description of Artificial Sequence: Synthetic oligonucleotide
  Antisense strand to SEQ ID NO: 1116734
aaggucauugagaacaucu

SEQ ID NO: 1116736 - RNA, 19 nt, Artificial Sequence
  Description of Artificial Sequence: Synthetic oligonucleotide
  Sense strand starting at position 333 of SEQ ID NO: 915926
gcuucugugagcucugcuu

SEQ ID NO: 1116737 - RNA, 19 nt, Artificial Sequence
  Description of Artificial Sequence: Synthetic oligonucleotide
  Antisense strand to SEQ ID NO: 1116736
aagcagagcucacagaagc

SEQ ID NO: 1116738 - RNA, 19 nt, Artificial Sequence
  Description of Artificial Sequence: Synthetic oligonucleotide
  Sense strand starting at position 337 of SEQ ID NO: 915926
cugugagcucugcuugcau

SEQ ID NO: 1116739 - RNA, 19 nt, Artificial Sequence
  Description of Artificial Sequence: Synthetic oligonucleotide
  Antisense strand to SEQ ID NO: 1116738
augcaagcagagcucacag

SEQ ID NO: 1116740 - RNA, 19 nt, Artificial Sequence
  Description of Artificial Sequence: Synthetic oligonucleotide
  Sense strand starting at position 444 of SEQ ID NO: 915926
gugggaaaccugugaacca

SEQ ID NO: 1116741 - RNA, 19 nt, Artificial Sequence
  Description of Artificial Sequence: Synthetic oligonucleotide
  Antisense strand to SEQ ID NO: 1116740
ugguucacagguuucccac

SEQ ID NO: 1116742 - RNA, 19 nt, Artificial Sequence
  Description of Artificial Sequence: Synthetic oligonucleotide
  Sense strand starting at position 468 of SEQ ID NO: 915926
agcccuuugcuggauauaa

SEQ ID NO: 1116743 - RNA, 19 nt, Artificial Sequence
  Description of Artificial Sequence: Synthetic oligonucleotide
  Antisense strand to SEQ ID NO: 1116742
uuauauccagcaaagggcu

SEQ ID NO: 1116744 - RNA, 19 nt, Artificial Sequence
  Description of Artificial Sequence: Synthetic oligonucleotide
  Sense strand starting at position 470 of SEQ ID NO: 915926
cccuuugcuggauauaaac

SEQ ID NO: 1116745 - RNA, 19 nt, Artificial Sequence
  Description of Artificial Sequence: Synthetic oligonucleotide
  Antisense strand to SEQ ID NO: 1116744
guuuauauccagcaaaggg

SEQ ID NO: 1116746 - RNA, 19 nt, Artificial Sequence
  Description of Artificial Sequence: Synthetic oligonucleotide
  Sense strand starting at position 620 of SEQ ID NO: 915926
aggauaacauuuggagagu

SEQ ID NO: 1116747 - RNA, 19 nt, Artificial Sequence
  Description of Artificial Sequence: Synthetic oligonucleotide
  Antisense strand to SEQ ID NO: 1116746
acucuccaaauguuauccu

SEQ ID NO: 1116748 - RNA, 19 nt, Artificial Sequence
  Description of Artificial Sequence: Synthetic oligonucleotide
  Sense strand starting at position 667 of SEQ ID NO: 915926
gugucuuauauuuggaguc

SEQ ID NO: 1116749 - RNA, 19 nt, Artificial Sequence
  Description of Artificial Sequence: Synthetic oligonucleotide
  Antisense strand to SEQ ID NO: 1116748
gacuccaaauauaagacac

SEQ ID NO: 1116750 - RNA, 19 nt, Artificial Sequence
  Description of Artificial Sequence: Synthetic oligonucleotide
  Sense strand starting at position 698 of SEQ ID NO: 915926
cugauuuaucacugcaugu

SEQ ID NO: 1116751 - RNA, 19 nt, Artificial Sequence
  Description of Artificial Sequence: Synthetic oligonucleotide
  Antisense strand to SEQ ID NO: 1116750
acaugcagugauaaaucag

SEQ ID NO: 1116752 - RNA, 19 nt, Artificial Sequence
  Description of Artificial Sequence: Synthetic oligonucleotide
  Sense strand starting at position 1178 of SEQ ID NO: 915926
ccgccaguaccuguuaguu

SEQ ID NO: 1116753 - RNA, 19 nt, Artificial Sequence
  Description of Artificial Sequence: Synthetic oligonucleotide
  Antisense strand to SEQ ID NO: 1116752
aacuaacagguacuggcgg

SEQ ID NO: 1116754 - RNA, 19 nt, Artificial Sequence
  Description of Artificial Sequence: Synthetic oligonucleotide
  Sense strand starting at position 1226 of SEQ ID NO: 915926
ggaagugaccugggacuca

SEQ ID NO: 1116755 - RNA, 19 nt, Artificial Sequence
  Description of Artificial Sequence: Synthetic oligonucleotide
  Antisense strand to SEQ ID NO: 1116754
ugagucccaggucacuucc

SEQ ID NO: 1116756 - RNA, 19 nt, Artificial Sequence
  Description of Artificial Sequence: Synthetic oligonucleotide
  Sense strand starting at position 1405 of SEQ ID NO: 915926
gugguucccagcuauggau

SEQ ID NO: 1116757 - RNA, 19 nt, Artificial Sequence
  Description of Artificial Sequence: Synthetic oligonucleotide
  Antisense strand to SEQ ID NO: 1116756
auccauagcugggaaccac

SEQ ID NO: 1116758 - RNA, 19 nt, Artificial Sequence
  Description of Artificial Sequence: Synthetic oligonucleotide
  Sense strand starting at position 1417 of SEQ ID NO: 915926
uauggauugcuggagcuca

SEQ ID NO: 1116759 - RNA, 19 nt, Artificial Sequence
  Description of Artificial Sequence: Synthetic oligonucleotide
  Antisense strand to SEQ ID NO: 1116758
ugagcuccagcaauccaua

SEQ ID NO: 1116760 - RNA, 19 nt, Artificial Sequence
  Description of Artificial Sequence: Synthetic oligonucleotide
  Sense strand starting at position 1555 of SEQ ID NO: 915926
uuccauuucucugauggaa

SEQ ID NO: 1116761 - RNA, 19 nt, Artificial Sequence
  Description of Artificial Sequence: Synthetic oligonucleotide
  Antisense strand to SEQ ID NO: 1116760
uuccaucagagaaauggaa

SEQ ID NO: 1116762 - RNA, 19 nt, Artificial Sequence
  Description of Artificial Sequence: Synthetic oligonucleotide
  Sense strand starting at position 1976 of SEQ ID NO: 915926
cuugucuuuccaggacuga

SEQ ID NO: 1116763 - RNA, 19 nt, Artificial Sequence
  Description of Artificial Sequence: Synthetic oligonucleotide
  Antisense strand to SEQ ID NO: 1116762
ucaguccuggaaagacaag

SEQ ID NO: 1116764 - RNA, 19 nt, Artificial Sequence
  Description of Artificial Sequence: Synthetic oligonucleotide
  Sense strand starting at position 1977 of SEQ ID NO: 915926
uugucuuuccaggacugaa

SEQ ID NO: 1116765 - RNA, 19 nt, Artificial Sequence
  Description of Artificial Sequence: Synthetic oligonucleotide
  Antisense strand to SEQ ID NO: 1116764
uucaguccuggaaagacaa

SEQ ID NO: 1116766 - RNA, 19 nt, Artificial Sequence
  Description of Artificial Sequence: Synthetic oligonucleotide
  Sense strand starting at position 2029 of SEQ ID NO: 915926
ugccauagugggcaucaau

SEQ ID NO: 1116767 - RNA, 19 nt, Artificial Sequence
  Description of Artificial Sequence: Synthetic oligonucleotide
  Antisense strand to SEQ ID NO: 1116766
auugaugcccacuauggca

SEQ ID NO: 1116768 - RNA, 19 nt, Artificial Sequence
  Description of Artificial Sequence: Synthetic oligonucleotide
  Sense strand starting at position 2242 of SEQ ID NO: 915926
ucgucaugguuauuuacca

SEQ ID NO: 1116769 - RNA, 19 nt, Artificial Sequence
  Description of Artificial Sequence: Synthetic oligonucleotide
  Antisense strand to SEQ ID NO: 1116768
ugguaaauaaccaugacga

SEQ ID NO: 1116770 - RNA, 19 nt, Artificial Sequence
  Description of Artificial Sequence: Synthetic oligonucleotide
  Sense strand starting at position 2243 of SEQ ID NO: 915926
cgucaugguuauuuaccaa

SEQ ID NO: 1116771 - RNA, 19 nt, Artificial Sequence
  Description of Artificial Sequence: Synthetic oligonucleotide
  Antisense strand to SEQ ID NO: 1116770
uugguaaauaaccaugacg

SEQ ID NO: 1116772 - RNA, 19 nt, Artificial Sequence
  Description of Artificial Sequence: Synthetic oligonucleotide
  Sense strand starting at position 2264 of SEQ ID NO: 915926
gggugauaaauauguuaag

SEQ ID NO: 1116773 - RNA, 19 nt, Artificial Sequence
  Description of Artificial Sequence: Synthetic oligonucleotide
  Antisense strand to SEQ ID NO: 1116772
cuuaacauauuuaucaccc

SEQ ID NO: 1116774 - RNA, 19 nt, Artificial Sequence
  Description of Artificial Sequence: Synthetic oligonucleotide
  Sense strand starting at position 2341 of SEQ ID NO: 915926
aucuuacauugugugaauc

SEQ ID NO: 1116775 - RNA, 19 nt, Artificial Sequence
  Description of Artificial Sequence: Synthetic oligonucleotide
  Antisense strand to SEQ ID NO: 1116774
gauucacacaauguaagau

SEQ ID NO: 1116776 - RNA, 19 nt, Artificial Sequence
  Description of Artificial Sequence: Synthetic oligonucleotide
  Sense strand starting at position 2355 of SEQ ID NO: 915926
gaaucugagguuugcaaag

SEQ ID NO: 1116777 - RNA, 19 nt, Artificial Sequence
  Description of Artificial Sequence: Synthetic oligonucleotide
  Antisense strand to SEQ ID NO: 1116776
cuuugcaaaccucagauuc

SEQ ID NO: 1116778 - RNA, 19 nt, Artificial Sequence
  Description of Artificial Sequence: Synthetic oligonucleotide
  Sense strand starting at position 2361 of SEQ ID NO: 915926
gagguuugcaaaggcugaa

SEQ ID NO: 1116779 - RNA, 19 nt, Artificial Sequence
  Description of Artificial Sequence: Synthetic oligonucleotide
  Antisense strand to SEQ ID NO: 1116778
uucagccuuugcaaaccuc

SEQ ID NO: 1116780 - RNA, 19 nt, Artificial Sequence
  Description of Artificial Sequence: Synthetic oligonucleotide
  Sense strand starting at position 2586 of SEQ ID NO: 915926
aggccuucuccacagucaa

SEQ ID NO: 1116781 - RNA, 19 nt, Artificial Sequence
  Description of Artificial Sequence: Synthetic oligonucleotide
  Antisense strand to SEQ ID NO: 1116780
uugacuguggagaaggccu

SEQ ID NO: 1116782 - RNA, 19 nt, Artificial Sequence
  Description of Artificial Sequence: Synthetic oligonucleotide
  Sense strand starting at position 2936 of SEQ ID NO: 915926
gugguaaagaucuaagucu

SEQ ID NO: 1116783 - RNA, 19 nt, Artificial Sequence
  Description of Artificial Sequence: Synthetic oligonucleotide
  Antisense strand to SEQ ID NO: 1116782
agacuuagaucuuuaccac

SEQ ID NO: 1116784 - RNA, 19 nt, Artificial Sequence
  Description of Artificial Sequence: Synthetic oligonucleotide
  Sense strand starting at position 2954 of SEQ ID NO: 915926
uguguaggucguguaccau

SEQ ID NO: 1116785 - RNA, 19 nt, Artificial Sequence
  Description of Artificial Sequence: Synthetic oligonucleotide
  Antisense strand to SEQ ID NO: 1116784
augguacacgaccuacaca

SEQ ID NO: 1116786 - RNA, 19 nt, Artificial Sequence
  Description of Artificial Sequence: Synthetic oligonucleotide
  Sense strand starting at position 2983 of SEQ ID NO: 915926
ggagcaucuuggguaauua

SEQ ID NO: 1116787 - RNA, 19 nt, Artificial Sequence
  Description of Artificial Sequence: Synthetic oligonucleotide
  Antisense strand to SEQ ID NO: 1116786
uaauuacccaagaugcucc

SEQ ID NO: 1116788 - RNA, 19 nt, Artificial Sequence
  Description of Artificial Sequence: Synthetic oligonucleotide
  Sense strand starting at position 2984 of SEQ ID NO: 915926
gagcaucuuggguaauuaa

SEQ ID NO: 1116789 - RNA, 19 nt, Artificial Sequence
  Description of Artificial Sequence: Synthetic oligonucleotide
  Antisense strand to SEQ ID NO: 1116788
uuaauuacccaagaugcuc

SEQ ID NO: 1116790 - RNA, 19 nt, Artificial Sequence
  Description of Artificial Sequence: Synthetic oligonucleotide
  Sense strand starting at position 3057 of SEQ ID NO: 915926
ucucaaggagcuugaaauc

SEQ ID NO: 1116791 - RNA, 19 nt, Artificial Sequence
  Description of Artificial Sequence: Synthetic oligonucleotide
  Antisense strand to SEQ ID NO: 1116790
gauuucaagcuccuugaga

SEQ ID NO: 1116792 - RNA, 19 nt, Artificial Sequence
  Description of Artificial Sequence: Synthetic oligonucleotide
  Sense strand starting at position 3208 of SEQ ID NO: 915926
gggacauacuguuuguuaa

SEQ ID NO: 1116793 - RNA, 19 nt, Artificial Sequence
  Description of Artificial Sequence: Synthetic oligonucleotide
  Antisense strand to SEQ ID NO: 1116792
uuaacaaacaguauguccc

SEQ ID NO: 1116794 - RNA, 19 nt, Artificial Sequence
  Description of Artificial Sequence: Synthetic oligonucleotide
  Sense strand starting at position 3209 of SEQ ID NO: 915926
ggacauacuguuuguuaag

SEQ ID NO: 1116795 - RNA, 19 nt, Artificial Sequence
  Description of Artificial Sequence: Synthetic oligonucleotide
  Antisense strand to SEQ ID NO: 1116794
cuuaacaaacaguaugucc

SEQ ID NO: 1116796 - RNA, 19 nt, Artificial Sequence
  Description of Artificial Sequence: Synthetic oligonucleotide
  Sense strand starting at position 3210 of SEQ ID NO: 915926
gacauacuguuuguuaaga

SEQ ID NO: 1116797 - RNA, 19 nt, Artificial Sequence
  Description of Artificial Sequence: Synthetic oligonucleotide
  Antisense strand to SEQ ID NO: 1116796
ucuuaacaaacaguauguc

SEQ ID NO: 1116798 - RNA, 19 nt, Artificial Sequence
  Description of Artificial Sequence: Synthetic oligonucleotide
  Sense strand starting at position 3227 of SEQ ID NO: 915926
gaggaacaugucugaccau

SEQ ID NO: 1116799 - RNA, 19 nt, Artificial Sequence
  Description of Artificial Sequence: Synthetic oligonucleotide
  Antisense strand to SEQ ID NO: 1116798
auggucagacauguuccuc

SEQ ID NO: 1116800 - RNA, 19 nt, Artificial Sequence
  Description of Artificial Sequence: Synthetic oligonucleotide
  Sense strand starting at position 3230 of SEQ ID NO: 915926
gaacaugucugaccauugu

SEQ ID NO: 1116801 - RNA, 19 nt, Artificial Sequence
  Description of Artificial Sequence: Synthetic oligonucleotide
  Antisense strand to SEQ ID NO: 1116800
acaauggucagacauguuc

SEQ ID NO: 1116802 - RNA, 19 nt, Artificial Sequence
  Description of Artificial Sequence: Synthetic oligonucleotide
  Sense strand starting at position 3249 of SEQ ID NO: 915926
uuucuugaaccuugaugga

SEQ ID NO: 1116803 - RNA, 19 nt, Artificial Sequence
  Description of Artificial Sequence: Synthetic oligonucleotide
  Antisense strand to SEQ ID NO: 1116802
uccaucaagguucaagaaa

SEQ ID NO: 1116804 - RNA, 19 nt, Artificial Sequence
  Description of Artificial Sequence: Synthetic oligonucleotide
  Sense strand starting at position 3284 of SEQ ID NO: 915926
gagcaugcgccaucuagua

SEQ ID NO: 1116805 - RNA, 19 nt, Artificial Sequence
  Description of Artificial Sequence: Synthetic oligonucleotide
  Antisense strand to SEQ ID NO: 1116804
uacuagauggcgcaugcuc

SEQ ID NO: 1116806 - RNA, 19 nt, Artificial Sequence
  Description of Artificial Sequence: Synthetic oligonucleotide
  Sense strand starting at position 3298 of SEQ ID NO: 915926
uaguauggacuuuggcaaa

SEQ ID NO: 1116807 - RNA, 19 nt, Artificial Sequence
  Description of Artificial Sequence: Synthetic oligonucleotide
  Antisense strand to SEQ ID NO: 1116806
uuugccaaaguccauacua

SEQ ID NO: 1116808 - RNA, 19 nt, Artificial Sequence
  Description of Artificial Sequence: Synthetic oligonucleotide
  Sense strand starting at position 3445 of SEQ ID NO: 915926
ucagaauugccaggaaaua

SEQ ID NO: 1116809 - RNA, 19 nt, Artificial Sequence
  Description of Artificial Sequence: Synthetic oligonucleotide
  Antisense strand to SEQ ID NO: 1116808
uauuuccuggcaauucuga

SEQ ID NO: 1116810 - RNA, 19 nt, Artificial Sequence
  Description of Artificial Sequence: Synthetic oligonucleotide
  Sense strand starting at position 3458 of SEQ ID NO: 915926
gaaauaugguguuuggguu

SEQ ID NO: 1116811 - RNA, 19 nt, Artificial Sequence
  Description of Artificial Sequence: Synthetic oligonucleotide
  Antisense strand to SEQ ID NO: 1116810
aacccaaacaccauauuuc

SEQ ID NO: 1116812 - RNA, 19 nt, Artificial Sequence
  Description of Artificial Sequence: Synthetic oligonucleotide
  Sense strand starting at position 3657 of SEQ ID NO: 915926
gcaggaauuuaggaaucaa

SEQ ID NO: 1116813 - RNA, 19 nt, Artificial Sequence
  Description of Artificial Sequence: Synthetic oligonucleotide
  Antisense strand to SEQ ID NO: 1116812
uugauuccuaaauuccugc

SEQ ID NO: 1116814 - RNA, 19 nt, Artificial Sequence
  Description of Artificial Sequence: Synthetic oligonucleotide
  Sense strand starting at position 439 of SEQ ID NO: 915927
gguguuuguccucugcauc

SEQ ID NO: 1116815 - RNA, 19 nt, Artificial Sequence
  Description of Artificial Sequence: Synthetic oligonucleotide
  Antisense strand to SEQ ID NO: 1116814
gaugcagaggacaaacacc

SEQ ID NO: 1116816 - RNA, 19 nt, Artificial Sequence
  Description of Artificial Sequence: Synthetic oligonucleotide
  Sense strand starting at position 580 of SEQ ID NO: 915927
gcucguagccguuuccaca

SEQ ID NO: 1116817 - RNA, 19 nt, Artificial Sequence
  Description of Artificial Sequence: Synthetic oligonucleotide
  Antisense strand to SEQ ID NO: 1116816
uguggaaacggcuacgagc

SEQ ID NO: 1116818 - RNA, 19 nt, Artificial Sequence
  Description of Artificial Sequence: Synthetic oligonucleotide
  Sense strand starting at position 853 of SEQ ID NO: 915927
ucgugacuuaaagagcuau

SEQ ID NO: 1116819 - RNA, 19 nt, Artificial Sequence
  Description of Artificial Sequence: Synthetic oligonucleotide
  Antisense strand to SEQ ID NO: 1116818
auagcucuuuaagucacga

SEQ ID NO: 1116820 - RNA, 19 nt, Artificial Sequence
  Description of Artificial Sequence: Synthetic oligonucleotide
  Sense strand starting at position 899 of SEQ ID NO: 915927
gcuauuuauuacccuaugu

SEQ ID NO: 1116821 - RNA, 19 nt, Artificial Sequence
  Description of Artificial Sequence: Synthetic oligonucleotide
  Antisense strand to SEQ ID NO: 1116820
acauaggguaauaaauagc

SEQ ID NO: 1116822 - RNA, 19 nt, Artificial Sequence
  Description of Artificial Sequence: Synthetic oligonucleotide
  Sense strand starting at position 1244 of SEQ ID NO: 915927
uccugugcucaggaguaag

SEQ ID NO: 1116823 - RNA, 19 nt, Artificial Sequence
  Description of Artificial Sequence: Synthetic oligonucleotide
  Antisense strand to SEQ ID NO: 1116822
cuuacuccugagcacagga

SEQ ID NO: 1116824 - RNA, 19 nt, Artificial Sequence
  Description of Artificial Sequence: Synthetic oligonucleotide
  Sense strand starting at position 1247 of SEQ ID NO: 915927
ugugcucaggaguaagaaa

SEQ ID NO: 1116825 - RNA, 19 nt, Artificial Sequence
  Description of Artificial Sequence: Synthetic oligonucleotide
  Antisense strand to SEQ ID NO: 1116824
uuucuuacuccugagcaca

SEQ ID NO: 1116826 - RNA, 19 nt, Artificial Sequence
  Description of Artificial Sequence: Synthetic oligonucleotide
  Sense strand starting at position 1404 of SEQ ID NO: 915927
uuuaacguuggugaagaua

SEQ ID NO: 1116827 - RNA, 19 nt, Artificial Sequence
  Description of Artificial Sequence: Synthetic oligonucleotide
  Antisense strand to SEQ ID NO: 1116826
uaucuucaccaacguuaaa

SEQ ID NO: 1116828 - RNA, 19 nt, Artificial Sequence
  Description of Artificial Sequence: Synthetic oligonucleotide
  Sense strand starting at position 1482 of SEQ ID NO: 915927
gccguuucugcaguuaucu

SEQ ID NO: 1116829 - RNA, 19 nt, Artificial Sequence
  Description of Artificial Sequence: Synthetic oligonucleotide
  Antisense strand to SEQ ID NO: 1116828
agauaacugcagaaacggc

SEQ ID NO: 1116830 - RNA, 19 nt, Artificial Sequence
  Description of Artificial Sequence: Synthetic oligonucleotide
  Sense strand starting at position 1490 of SEQ ID NO: 915927
ugcaguuaucugcugugua

SEQ ID NO: 1116831 - RNA, 19 nt, Artificial Sequence
  Description of Artificial Sequence: Synthetic oligonucleotide
  Antisense strand to SEQ ID NO: 1116830
uacacagcagauaacugca

SEQ ID NO: 1116832 - RNA, 19 nt, Artificial Sequence
  Description of Artificial Sequence: Synthetic oligonucleotide
  Sense strand starting at position 1520 of SEQ ID NO: 915927
augacuuuguuggucagaa

SEQ ID NO: 1116833 - RNA, 19 nt, Artificial Sequence
  Description of Artificial Sequence: Synthetic oligonucleotide
  Antisense strand to SEQ ID NO: 1116832
uucugaccaacaaagucau

SEQ ID NO: 1116834 - RNA, 19 nt, Artificial Sequence
  Description of Artificial Sequence: Synthetic oligonucleotide
  Sense strand starting at position 1545 of SEQ ID NO: 915927
aguauuguggccgugguau

SEQ ID NO: 1116835 - RNA, 19 nt, Artificial Sequence
  Description of Artificial Sequence: Synthetic oligonucleotide
  Antisense strand to SEQ ID NO: 1116834
auaccacggccacaauacu

SEQ ID NO: 1116836 - RNA, 19 nt, Artificial Sequence
  Description of Artificial Sequence: Synthetic oligonucleotide
  Sense strand starting at position 1551 of SEQ ID NO: 915927
guggccgugguauaaauuu

SEQ ID NO: 1116837 - RNA, 19 nt, Artificial Sequence
  Description of Artificial Sequence: Synthetic oligonucleotide
  Antisense strand to SEQ ID NO: 1116836
aaauuuauaccacggccac

SEQ ID NO: 1116838 - RNA, 19 nt, Artificial Sequence
  Description of Artificial Sequence: Synthetic oligonucleotide
  Sense strand starting at position 1635 of SEQ ID NO: 915927
ugcaguucucaguaauaau

SEQ ID NO: 1116839 - RNA, 19 nt, Artificial Sequence
  Description of Artificial Sequence: Synthetic oligonucleotide
  Antisense strand to SEQ ID NO: 1116838
auuauuacugagaacugca

SEQ ID NO: 1116840 - RNA, 19 nt, Artificial Sequence
  Description of Artificial Sequence: Synthetic oligonucleotide
  Sense strand starting at position 1706 of SEQ ID NO: 915927
agaugcuggacuugaaauc

SEQ ID NO: 1116841 - RNA, 19 nt, Artificial Sequence
  Description of Artificial Sequence: Synthetic oligonucleotide
  Antisense strand to SEQ ID NO: 1116840
gauuucaaguccagcaucu

SEQ ID NO: 1116842 - RNA, 19 nt, Artificial Sequence
  Description of Artificial Sequence: Synthetic oligonucleotide
  Sense strand starting at position 1713 of SEQ ID NO: 915927
ggacuugaaaucuggaguc

SEQ ID NO: 1116843 - RNA, 19 nt, Artificial Sequence
  Description of Artificial Sequence: Synthetic oligonucleotide
  Antisense strand to SEQ ID NO: 1116842
gacuccagauuucaagucc

SEQ ID NO: 1116844 - RNA, 19 nt, Artificial Sequence
  Description of Artificial Sequence: Synthetic oligonucleotide
  Sense strand starting at position 1756 of SEQ ID NO: 915927
ugggucugugcgucuuaua

SEQ ID NO: 1116845 - RNA, 19 nt, Artificial Sequence
  Description of Artificial Sequence: Synthetic oligonucleotide
  Antisense strand to SEQ ID NO: 1116844
uauaagacgcacagaccca

SEQ ID NO: 1116846 - RNA, 19 nt, Artificial Sequence
  Description of Artificial Sequence: Synthetic oligonucleotide
  Sense strand starting at position 1766 of SEQ ID NO: 915927
cgucuuauaaauggaaaug

SEQ ID NO: 1116847 - RNA, 19 nt, Artificial Sequence
  Description of Artificial Sequence: Synthetic oligonucleotide
  Antisense strand to SEQ ID NO: 1116846
cauuuccauuuauaagacg

SEQ ID NO: 1116848 - RNA, 19 nt, Artificial Sequence
  Description of Artificial Sequence: Synthetic oligonucleotide
  Sense strand starting at position 1898 of SEQ ID NO: 915927
ccaagauauccaggaggca

SEQ ID NO: 1116849 - RNA, 19 nt, Artificial Sequence
  Description of Artificial Sequence: Synthetic oligonucleotide
  Antisense strand to SEQ ID NO: 1116848
ugccuccuggauaucuugg

SEQ ID NO: 1116850 - RNA, 19 nt, Artificial Sequence
  Description of Artificial Sequence: Synthetic oligonucleotide
  Sense strand starting at position 2001 of SEQ ID NO: 915927
gguaauagucacugacuca

SEQ ID NO: 1116851 - RNA, 19 nt, Artificial Sequence
  Description of Artificial Sequence: Synthetic oligonucleotide
  Antisense strand to SEQ ID NO: 1116850
ugagucagugacuauuacc

SEQ ID NO: 1116852 - RNA, 19 nt, Artificial Sequence
  Description of Artificial Sequence: Synthetic oligonucleotide
  Sense strand starting at position 2055 of SEQ ID NO: 915927
auuagugcuccugaugaga

SEQ ID NO: 1116853 - RNA, 19 nt, Artificial Sequence
  Description of Artificial Sequence: Synthetic oligonucleotide
  Antisense strand to SEQ ID NO: 1116852
ucucaucaggagcacuaau

SEQ ID NO: 1116854 - RNA, 19 nt, Artificial Sequence
  Description of Artificial Sequence: Synthetic oligonucleotide
  Sense strand starting at position 2210 of SEQ ID NO: 915927
ucaccaauaucucugugga

SEQ ID NO: 1116855 - RNA, 19 nt, Artificial Sequence
  Description of Artificial Sequence: Synthetic oligonucleotide
  Antisense strand to SEQ ID NO: 1116854
uccacagagauauugguga

SEQ ID NO: 1116856 - RNA, 19 nt, Artificial Sequence
  Description of Artificial Sequence: Synthetic oligonucleotide
  Sense strand starting at position 2211 of SEQ ID NO: 915927
caccaauaucucuguggag

SEQ ID NO: 1116857 - RNA, 19 nt, Artificial Sequence
  Description of Artificial Sequence: Synthetic oligonucleotide
  Antisense strand to SEQ ID NO: 1116856
cuccacagagauauuggug

SEQ ID NO: 1116858 - RNA, 19 nt, Artificial Sequence
  Description of Artificial Sequence: Synthetic oligonucleotide
  Sense strand starting at position 2226 of SEQ ID NO: 915927
ggagguucuuauuccagga

SEQ ID NO: 1116859 - RNA, 19 nt, Artificial Sequence
  Description of Artificial Sequence: Synthetic oligonucleotide
  Antisense strand to SEQ ID NO: 1116858
uccuggaauaagaaccucc

SEQ ID NO: 1116860 - RNA, 19 nt, Artificial Sequence
  Description of Artificial Sequence: Synthetic oligonucleotide
  Sense strand starting at position 2230 of SEQ ID NO: 915927
guucuuauuccaggagaua

SEQ ID NO: 1116861 - RNA, 19 nt, Artificial Sequence
  Description of Artificial Sequence: Synthetic oligonucleotide
  Antisense strand to SEQ ID NO: 1116860
uaucuccuggaauaagaac

SEQ ID NO: 1116862 - RNA, 19 nt, Artificial Sequence
  Description of Artificial Sequence: Synthetic oligonucleotide
  Sense strand starting at position 2254 of SEQ ID NO: 915927
guggccucucaggaaauca

SEQ ID NO: 1116863 - RNA, 19 nt, Artificial Sequence
  Description of Artificial Sequence: Synthetic oligonucleotide
  Antisense strand to SEQ ID NO: 1116862
ugauuuccugagaggccac

SEQ ID NO: 1116864 - RNA, 19 nt, Artificial Sequence
  Description of Artificial Sequence: Synthetic oligonucleotide
  Sense strand starting at position 2264 of SEQ ID NO: 915927
aggaaaucaucugugucag

SEQ ID NO: 1116865 - RNA, 19 nt, Artificial Sequence
  Description of Artificial Sequence: Synthetic oligonucleotide
  Antisense strand to SEQ ID NO: 1116864
cugacacagaugauuuccu

SEQ ID NO: 1116866 - RNA, 19 nt, Artificial Sequence
  Description of Artificial Sequence: Synthetic oligonucleotide
  Sense strand starting at position 2265 of SEQ ID NO: 915927
ggaaaucaucugugucaga

SEQ ID NO: 1116867 - RNA, 19 nt, Artificial Sequence
  Description of Artificial Sequence: Synthetic oligonucleotide
  Antisense strand to SEQ ID NO: 1116866
ucugacacagaugauuucc

SEQ ID NO: 1116868 - RNA, 19 nt, Artificial Sequence
  Description of Artificial Sequence: Synthetic oligonucleotide
  Sense strand starting at position 2266 of SEQ ID NO: 915927
gaaaucaucugugucagac

SEQ ID NO: 1116869 - RNA, 19 nt, Artificial Sequence
  Description of Artificial Sequence: Synthetic oligonucleotide
  Antisense strand to SEQ ID NO: 1116868
gucugacacagaugauuuc

SEQ ID NO: 1116870 - RNA, 19 nt, Artificial Sequence
  Description of Artificial Sequence: Synthetic oligonucleotide
  Sense strand starting at position 2418 of SEQ ID NO: 915927
guauauaugcuugauacau

SEQ ID NO: 1116871 - RNA, 19 nt, Artificial Sequence
  Description of Artificial Sequence: Synthetic oligonucleotide
  Antisense strand to SEQ ID NO: 1116870
auguaucaagcauauauac

SEQ ID NO: 1116872 - RNA, 19 nt, Artificial Sequence
  Description of Artificial Sequence: Synthetic oligonucleotide
  Sense strand starting at position 2969 of SEQ ID NO: 915927
aaggaaguugugcauacau

SEQ ID NO: 1116873 - RNA, 19 nt, Artificial Sequence
  Description of Artificial Sequence: Synthetic oligonucleotide
  Antisense strand to SEQ ID NO: 1116872
auguaugcacaacuuccuu

SEQ ID NO: 1116874 - RNA, 19 nt, Artificial Sequence
  Description of Artificial Sequence: Synthetic oligonucleotide
  Sense strand starting at position 2971 of SEQ ID NO: 915927
ggaaguugugcauacauau

SEQ ID NO: 1116875 - RNA, 19 nt, Artificial Sequence
  Description of Artificial Sequence: Synthetic oligonucleotide
  Antisense strand to SEQ ID NO: 1116874
auauguaugcacaacuucc

SEQ ID NO: 1116876 - RNA, 19 nt, Artificial Sequence
  Description of Artificial Sequence: Synthetic oligonucleotide
  Sense strand starting at position 2978 of SEQ ID NO: 915927
gugcauacauauccuggaa

SEQ ID NO: 1116877 - RNA, 19 nt, Artificial Sequence
  Description of Artificial Sequence: Synthetic oligonucleotide
  Antisense strand to SEQ ID NO: 1116876
uuccaggauauguaugcac

SEQ ID NO: 1116878 - RNA, 19 nt, Artificial Sequence
  Description of Artificial Sequence: Synthetic oligonucleotide
  Sense strand starting at position 3046 of SEQ ID NO: 915927
ccagauauuugagaaguac

SEQ ID NO: 1116879 - RNA, 19 nt, Artificial Sequence
  Description of Artificial Sequence: Synthetic oligonucleotide
  Antisense strand to SEQ ID NO: 1116878
guacuucucaaauaucugg

SEQ ID NO: 1116880 - RNA, 19 nt, Artificial Sequence
  Description of Artificial Sequence: Synthetic oligonucleotide
  Sense strand starting at position 3094 of SEQ ID NO: 915927
acuuacuagcaguaagacu

SEQ ID NO: 1116881 - RNA, 19 nt, Artificial Sequence
  Description of Artificial Sequence: Synthetic oligonucleotide
  Antisense strand to SEQ ID NO: 1116880
agucuuacugcuaguaagu

SEQ ID NO: 1116882 - RNA, 19 nt, Artificial Sequence
  Description of Artificial Sequence: Synthetic oligonucleotide
  Sense strand starting at position 3177 of SEQ ID NO: 915927
ugcugcaaagauuauauaa

SEQ ID NO: 1116883 - RNA, 19 nt, Artificial Sequence
  Description of Artificial Sequence: Synthetic oligonucleotide
  Antisense strand to SEQ ID NO: 1116882
uuauauaaucuuugcagca

SEQ ID NO: 1116884 - RNA, 19 nt, Artificial Sequence
  Description of Artificial Sequence: Synthetic oligonucleotide
  Sense strand starting at position 3331 of SEQ ID NO: 915927
acauaugugcaaugagaag

SEQ ID NO: 1116885 - RNA, 19 nt, Artificial Sequence
  Description of Artificial Sequence: Synthetic oligonucleotide
  Antisense strand to SEQ ID NO: 1116884
cuucucauugcacauaugu

SEQ ID NO: 1116886 - RNA, 19 nt, Artificial Sequence
  Description of Artificial Sequence: Synthetic oligonucleotide
  Sense strand starting at position 3359 of SEQ ID NO: 915927
guuaaauauguuggagaag

SEQ ID NO: 1116887 - RNA, 19 nt, Artificial Sequence
  Description of Artificial Sequence: Synthetic oligonucleotide
  Antisense strand to SEQ ID NO: 1116886
cuucuccaacauauuuaac

SEQ ID NO: 1116888 - RNA, 19 nt, Artificial Sequence
  Description of Artificial Sequence: Synthetic oligonucleotide
  Sense strand starting at position 3530 of SEQ ID NO: 915927
uggugaugaacaugucaca

SEQ ID NO: 1116889 - RNA, 19 nt, Artificial Sequence
  Description of Artificial Sequence: Synthetic oligonucleotide
  Antisense strand to SEQ ID NO: 1116888
ugugacauguucaucacca

SEQ ID NO: 1116890 - RNA, 19 nt, Artificial Sequence
  Description of Artificial Sequence: Synthetic oligonucleotide
  Sense strand starting at position 3774 of SEQ ID NO: 915927
ugacuucuccguuauacag

SEQ ID NO: 1116891 - RNA, 19 nt, Artificial Sequence
  Description of Artificial Sequence: Synthetic oligonucleotide
  Antisense strand to SEQ ID NO: 1116890
cuguauaacggagaaguca

SEQ ID NO: 1116892 - RNA, 19 nt, Artificial Sequence
  Description of Artificial Sequence: Synthetic oligonucleotide
  Sense strand starting at position 3848 of SEQ ID NO: 915927
gucuguaacagagaaugcu

SEQ ID NO: 1116893 - RNA, 19 nt, Artificial Sequence
  Description of Artificial Sequence: Synthetic oligonucleotide
  Antisense strand to SEQ ID NO: 1116892
agcauucucuguuacagac

SEQ ID NO: 1116894 - RNA, 19 nt, Artificial Sequence
  Description of Artificial Sequence: Synthetic oligonucleotide
  Sense strand starting at position 36 of SEQ ID NO: 915928
ccacguucuaagugcugau

SEQ ID NO: 1116895 - RNA, 19 nt, Artificial Sequence
  Description of Artificial Sequence: Synthetic oligonucleotide
  Antisense strand to SEQ ID NO: 1116894
aucagcacuuagaacgugg

SEQ ID NO: 1116896 - RNA, 19 nt, Artificial Sequence
  Description of Artificial Sequence: Synthetic oligonucleotide
  Sense strand starting at position 375 of SEQ ID NO: 915928
gaaguuacagucuaaugca

SEQ ID NO: 1116897 - RNA, 19 nt, Artificial Sequence
  Description of Artificial Sequence: Synthetic oligonucleotide
  Antisense strand to SEQ ID NO: 1116896
ugcauuagacuguaacuuc

SEQ ID NO: 1116898 - RNA, 19 nt, Artificial Sequence
  Description of Artificial Sequence: Synthetic oligonucleotide
  Sense strand starting at position 382 of SEQ ID NO: 915928
cagucuaaugcagagaauu

SEQ ID NO: 1116899 - RNA, 19 nt, Artificial Sequence
  Description of Artificial Sequence: Synthetic oligonucleotide
  Antisense strand to SEQ ID NO: 1116898
aauucucugcauuagacug

SEQ ID NO: 1116900 - RNA, 19 nt, Artificial Sequence
  Description of Artificial Sequence: Synthetic oligonucleotide
  Sense strand starting at position 459 of SEQ ID NO: 915928
agggacguuugagcaagaa

SEQ ID NO: 1116901 - RNA, 19 nt, Artificial Sequence
  Description of Artificial Sequence: Synthetic oligonucleotide
  Antisense strand to SEQ ID NO: 1116900
uucuugcucaaacgucccu

SEQ ID NO: 1116902 - RNA, 19 nt, Artificial Sequence
  Description of Artificial Sequence: Synthetic oligonucleotide
  Sense strand starting at position 463 of SEQ ID NO: 915928
acguuugagcaagaacuga

SEQ ID NO: 1116903 - RNA, 19 nt, Artificial Sequence
  Description of Artificial Sequence: Synthetic oligonucleotide
  Antisense strand to SEQ ID NO: 1116902
ucaguucuugcucaaacgu

SEQ ID NO: 1116904 - RNA, 19 nt, Artificial Sequence
  Description of Artificial Sequence: Synthetic oligonucleotide
  Sense strand starting at position 590 of SEQ ID NO: 915928
gcagguuuacaguaggaag

SEQ ID NO: 1116905 - RNA, 19 nt, Artificial Sequence
  Description of Artificial Sequence: Synthetic oligonucleotide
  Antisense strand to SEQ ID NO: 1116904
cuuccuacuguaaaccugc

SEQ ID NO: 1116906 - RNA, 19 nt, Artificial Sequence
  Description of Artificial Sequence: Synthetic oligonucleotide
  Sense strand starting at position 804 of SEQ ID NO: 915928
uuuguagagaugugguauc

SEQ ID NO: 1116907 - RNA, 19 nt, Artificial Sequence
  Description of Artificial Sequence: Synthetic oligonucleotide
  Antisense strand to SEQ ID NO: 1116906
gauaccacaucucuacaaa

SEQ ID NO: 1116908 - RNA, 19 nt, Artificial Sequence
  Description of Artificial Sequence: Synthetic oligonucleotide
  Sense strand starting at position 982 of SEQ ID NO: 915928
ggugaaagaaucugaccuu

SEQ ID NO: 1116909 - RNA, 19 nt, Artificial Sequence
  Description of Artificial Sequence: Synthetic oligonucleotide
  Antisense strand to SEQ ID NO: 1116908
aaggucagauucuuucacc

SEQ ID NO: 1116910 - RNA, 19 nt, Artificial Sequence
  Description of Artificial Sequence: Synthetic oligonucleotide
  Sense strand starting at position 983 of SEQ ID NO: 915928
gugaaagaaucugaccuuu

SEQ ID NO: 1116911 - RNA, 19 nt, Artificial Sequence
  Description of Artificial Sequence: Synthetic oligonucleotide
  Antisense strand to SEQ ID NO: 1116910
aaaggucagauucuuucac

SEQ ID NO: 1116912 - RNA, 19 nt, Artificial Sequence
  Description of Artificial Sequence: Synthetic oligonucleotide
  Sense strand starting at position 989 of SEQ ID NO: 915928
gaaucugaccuuugguaaa

SEQ ID NO: 1116913 - RNA, 19 nt, Artificial Sequence
  Description of Artificial Sequence: Synthetic oligonucleotide
  Antisense strand to SEQ ID NO: 1116912
uuuaccaaaggucagauuc

SEQ ID NO: 1116914 - RNA, 19 nt, Artificial Sequence
  Description of Artificial Sequence: Synthetic oligonucleotide
  Sense strand starting at position 1495 of SEQ ID NO: 915928
ggcgaacucugguucauuc

SEQ ID NO: 1116915 - RNA, 19 nt, Artificial Sequence
  Description of Artificial Sequence: Synthetic oligonucleotide
  Antisense strand to SEQ ID NO: 1116914
gaaugaaccagaguucgcc

SEQ ID NO: 1116916 - RNA, 19 nt, Artificial Sequence
  Description of Artificial Sequence: Synthetic oligonucleotide
  Sense strand starting at position 2492 of SEQ ID NO: 915928
ggguguuaacaguaauaag

SEQ ID NO: 1116917 - RNA, 19 nt, Artificial Sequence
  Description of Artificial Sequence: Synthetic oligonucleotide
  Antisense strand to SEQ ID NO: 1116916
cuuauuacuguuaacaccc

SEQ ID NO: 1116918 - RNA, 19 nt, Artificial Sequence
  Description of Artificial Sequence: Synthetic oligonucleotide
  Sense strand starting at position 2555 of SEQ ID NO: 915928
agcuguuugaguugcaaga

SEQ ID NO: 1116919 - RNA, 19 nt, Artificial Sequence
  Description of Artificial Sequence: Synthetic oligonucleotide
  Antisense strand to SEQ ID NO: 1116918
ucuugcaacucaaacagcu

SEQ ID NO: 1116920 - RNA, 19 nt, Artificial Sequence
  Description of Artificial Sequence: Synthetic oligonucleotide
  Sense strand starting at position 2963 of SEQ ID NO: 915928
augagacaacauuguaucu

SEQ ID NO: 1116921 - RNA, 19 nt, Artificial Sequence
  Description of Artificial Sequence: Synthetic oligonucleotide
  Antisense strand to SEQ ID NO: 1116920
agauacaauguugucucau

SEQ ID NO: 1116922 - RNA, 19 nt, Artificial Sequence
  Description of Artificial Sequence: Synthetic oligonucleotide
  Sense strand starting at position 2975 of SEQ ID NO: 915928
uguaucugccaccaugaau

SEQ ID NO: 1116923 - RNA, 19 nt, Artificial Sequence
  Description of Artificial Sequence: Synthetic oligonucleotide
  Antisense strand to SEQ ID NO: 1116922
auucaugguggcagauaca

SEQ ID NO: 1116924 - RNA, 19 nt, Artificial Sequence
  Description of Artificial Sequence: Synthetic oligonucleotide
  Sense strand starting at position 3025 of SEQ ID NO: 915928
uaaugauguggguggugau

SEQ ID NO: 1116925 - RNA, 19 nt, Artificial Sequence
  Description of Artificial Sequence: Synthetic oligonucleotide
  Antisense strand to SEQ ID NO: 1116924
aucaccacccacaucauua

SEQ ID NO: 1116926 - RNA, 19 nt, Artificial Sequence
  Description of Artificial Sequence: Synthetic oligonucleotide
  Sense strand starting at position 3026 of SEQ ID NO: 915928
aaugauguggguggugaua

SEQ ID NO: 1116927 - RNA, 19 nt, Artificial Sequence
  Description of Artificial Sequence: Synthetic oligonucleotide
  Antisense strand to SEQ ID NO: 1116926
uaucaccacccacaucauu

SEQ ID NO: 1116928 - RNA, 19 nt, Artificial Sequence
  Description of Artificial Sequence: Synthetic oligonucleotide
  Sense strand starting at position 3044 of SEQ ID NO: 915928
aguaaagaacgugaucuuu

SEQ ID NO: 1116929 - RNA, 19 nt, Artificial Sequence
  Description of Artificial Sequence: Synthetic oligonucleotide
  Antisense strand to SEQ ID NO: 1116928
aaagaucacguucuuuacu

SEQ ID NO: 1116930 - RNA, 19 nt, Artificial Sequence
  Description of Artificial Sequence: Synthetic oligonucleotide
  Sense strand starting at position 3078 of SEQ ID NO: 915928
acaggugucaacuguugga

SEQ ID NO: 1116931 - RNA, 19 nt, Artificial Sequence
  Description of Artificial Sequence: Synthetic oligonucleotide
  Antisense strand to SEQ ID NO: 1116930
uccaacaguugacaccugu

SEQ ID NO: 1116932 - RNA, 19 nt, Artificial Sequence
  Description of Artificial Sequence: Synthetic oligonucleotide
  Sense strand starting at position 3082 of SEQ ID NO: 915928
gugucaacuguuggaauau

SEQ ID NO: 1116933 - RNA, 19 nt, Artificial Sequence
  Description of Artificial Sequence: Synthetic oligonucleotide
  Antisense strand to SEQ ID NO: 1116932
auauuccaacaguugacac

SEQ ID NO: 1116934 - RNA, 19 nt, Artificial Sequence
  Description of Artificial Sequence: Synthetic oligonucleotide
  Sense strand starting at position 3091 of SEQ ID NO: 915928
guuggaauaucugcauaag

SEQ ID NO: 1116935 - RNA, 19 nt, Artificial Sequence
  Description of Artificial Sequence: Synthetic oligonucleotide
  Antisense strand to SEQ ID NO: 1116934
cuuaugcagauauuccaac

SEQ ID NO: 1116936 - RNA, 19 nt, Artificial Sequence
  Description of Artificial Sequence: Synthetic oligonucleotide
  Sense strand starting at position 3092 of SEQ ID NO: 915928
uuggaauaucugcauaagu

SEQ ID NO: 1116937 - RNA, 19 nt, Artificial Sequence
  Description of Artificial Sequence: Synthetic oligonucleotide
  Antisense strand to SEQ ID NO: 1116936
acuuaugcagauauuccaa

SEQ ID NO: 1116938 - RNA, 19 nt, Artificial Sequence
  Description of Artificial Sequence: Synthetic oligonucleotide
  Sense strand starting at position 3094 of SEQ ID NO: 915928
ggaauaucugcauaagucu

SEQ ID NO: 1116939 - RNA, 19 nt, Artificial Sequence
  Description of Artificial Sequence: Synthetic oligonucleotide
  Antisense strand to SEQ ID NO: 1116938
agacuuaugcagauauucc

SEQ ID NO: 1116940 - RNA, 19 nt, Artificial Sequence
  Description of Artificial Sequence: Synthetic oligonucleotide
  Sense strand starting at position 3100 of SEQ ID NO: 915928
ucugcauaagucuguuaac

SEQ ID NO: 1116941 - RNA, 19 nt, Artificial Sequence
  Description of Artificial Sequence: Synthetic oligonucleotide
  Antisense strand to SEQ ID NO: 1116940
guuaacagacuuaugcaga

SEQ ID NO: 1116942 - RNA, 19 nt, Artificial Sequence
  Description of Artificial Sequence: Synthetic oligonucleotide
  Sense strand starting at position 3110 of SEQ ID NO: 915928
ucuguuaaccuguaguuua

SEQ ID NO: 1116943 - RNA, 19 nt, Artificial Sequence
  Description of Artificial Sequence: Synthetic oligonucleotide
  Antisense strand to SEQ ID NO: 1116942
uaaacuacagguuaacaga

SEQ ID NO: 1116944 - RNA, 19 nt, Artificial Sequence
  Description of Artificial Sequence: Synthetic oligonucleotide
  Sense strand starting at position 3113 of SEQ ID NO: 915928
guuaaccuguaguuuacaa

SEQ ID NO: 1116945 - RNA, 19 nt, Artificial Sequence
  Description of Artificial Sequence: Synthetic oligonucleotide
  Antisense strand to SEQ ID NO: 1116944
uuguaaacuacagguuaac

SEQ ID NO: 1116946 - RNA, 19 nt, Artificial Sequence
  Description of Artificial Sequence: Synthetic oligonucleotide
  Sense strand starting at position 3132 of SEQ ID NO: 915928
guaacucaugcauguuaca

SEQ ID NO: 1116947 - RNA, 19 nt, Artificial Sequence
  Description of Artificial Sequence: Synthetic oligonucleotide
  Antisense strand to SEQ ID NO: 1116946
uguaacaugcaugaguuac

SEQ ID NO: 1116948 - RNA, 19 nt, Artificial Sequence
  Description of Artificial Sequence: Synthetic oligonucleotide
  Sense strand starting at position 3146 of SEQ ID NO: 915928
uuacaaacugcaugguaaa

SEQ ID NO: 1116949 - RNA, 19 nt, Artificial Sequence
  Description of Artificial Sequence: Synthetic oligonucleotide
  Antisense strand to SEQ ID NO: 1116948
uuuaccaugcaguuuguaa

SEQ ID NO: 1116950 - RNA, 19 nt, Artificial Sequence
  Description of Artificial Sequence: Synthetic oligonucleotide
  Sense strand starting at position 3267 of SEQ ID NO: 915928
cuugucaaauuugguguaa

SEQ ID NO: 1116951 - RNA, 19 nt, Artificial Sequence
  Description of Artificial Sequence: Synthetic oligonucleotide
  Antisense strand to SEQ ID NO: 1116950
uuacaccaaauuugacaag

SEQ ID NO: 1116952 - RNA, 19 nt, Artificial Sequence
  Description of Artificial Sequence: Synthetic oligonucleotide
  Sense strand starting at position 3269 of SEQ ID NO: 915928
ugucaaauuugguguaaua

SEQ ID NO: 1116953 - RNA, 19 nt, Artificial Sequence
  Description of Artificial Sequence: Synthetic oligonucleotide
  Antisense strand to SEQ ID NO: 1116952
uauuacaccaaauuugaca

SEQ ID NO: 1116954 - RNA, 19 nt, Artificial Sequence
  Description of Artificial Sequence: Synthetic oligonucleotide
  Sense strand starting at position 3337 of SEQ ID NO: 915928
caauuaugggccugagguu

SEQ ID NO: 1116955 - RNA, 19 nt, Artificial Sequence
  Description of Artificial Sequence: Synthetic oligonucleotide
  Antisense strand to SEQ ID NO: 1116954
aaccucaggcccauaauug

SEQ ID NO: 1116956 - RNA, 19 nt, Artificial Sequence
  Description of Artificial Sequence: Synthetic oligonucleotide
  Sense strand starting at position 3372 of SEQ ID NO: 915928
cgucaauuacagcaacaua

SEQ ID NO: 1116957 - RNA, 19 nt, Artificial Sequence
  Description of Artificial Sequence: Synthetic oligonucleotide
  Antisense strand to SEQ ID NO: 1116956
uauguugcuguaauugacg

SEQ ID NO: 1116958 - RNA, 19 nt, Artificial Sequence
  Description of Artificial Sequence: Synthetic oligonucleotide
  Sense strand starting at position 3396 of SEQ ID NO: 915928
agcaguugacugcagaagu

SEQ ID NO: 1116959 - RNA, 19 nt, Artificial Sequence
  Description of Artificial Sequence: Synthetic oligonucleotide
  Antisense strand to SEQ ID NO: 1116958
acuucugcagucaacugcu

SEQ ID NO: 1116960 - RNA, 19 nt, Artificial Sequence
  Description of Artificial Sequence: Synthetic oligonucleotide
  Sense strand starting at position 3406 of SEQ ID NO: 915928
ugcagaaguagcuguaaga

SEQ ID NO: 1116961 - RNA, 19 nt, Artificial Sequence
  Description of Artificial Sequence: Synthetic oligonucleotide
  Antisense strand to SEQ ID NO: 1116960
ucuuacagcuacuucugca

SEQ ID NO: 1116962 - RNA, 19 nt, Artificial Sequence
  Description of Artificial Sequence: Synthetic oligonucleotide
  Sense strand starting at position 3416 of SEQ ID NO: 915928
gcuguaagaauccagcugu

SEQ ID NO: 1116963 - RNA, 19 nt, Artificial Sequence
  Description of Artificial Sequence: Synthetic oligonucleotide
  Antisense strand to SEQ ID NO: 1116962
acagcuggauucuuacagc

SEQ ID NO: 1116964 - RNA, 19 nt, Artificial Sequence
  Description of Artificial Sequence: Synthetic oligonucleotide
  Sense strand starting at position 3542 of SEQ ID NO: 915928
uuugaaguccagcagcaua

SEQ ID NO: 1116965 - RNA, 19 nt, Artificial Sequence
  Description of Artificial Sequence: Synthetic oligonucleotide
  Antisense strand to SEQ ID NO: 1116964
uaugcugcuggacuucaaa

SEQ ID NO: 1116966 - RNA, 19 nt, Artificial Sequence
  Description of Artificial Sequence: Synthetic oligonucleotide
  Sense strand starting at position 3556 of SEQ ID NO: 915928
gcauaugcccuccaacguu

SEQ ID NO: 1116967 - RNA, 19 nt, Artificial Sequence
  Description of Artificial Sequence: Synthetic oligonucleotide
  Antisense strand to SEQ ID NO: 1116966
aacguuggagggcauaugc

SEQ ID NO: 1116968 - RNA, 19 nt, Artificial Sequence
  Description of Artificial Sequence: Synthetic oligonucleotide
  Sense strand starting at position 3775 of SEQ ID NO: 915928
aggugauccgcacgccaaa

SEQ ID NO: 1116969 - RNA, 19 nt, Artificial Sequence
  Description of Artificial Sequence: Synthetic oligonucleotide
  Antisense strand to SEQ ID NO: 1116968
uuuggcgugcggaucaccu

SEQ ID NO: 1116970 - RNA, 19 nt, Artificial Sequence
  Description of Artificial Sequence: Synthetic oligonucleotide
  Sense strand starting at position 3857 of SEQ ID NO: 915928
auggguugcucugcuauga

SEQ ID NO: 1116971 - RNA, 19 nt, Artificial Sequence
  Description of Artificial Sequence: Synthetic oligonucleotide
  Antisense strand to SEQ ID NO: 1116970
ucauagcagagcaacccau

SEQ ID NO: 1116972 - RNA, 19 nt, Artificial Sequence
  Description of Artificial Sequence: Synthetic oligonucleotide
  Sense strand starting at position 3940 of SEQ ID NO: 915928
guugguuguucuuucugaa

SEQ ID NO: 1116973 - RNA, 19 nt, Artificial Sequence
  Description of Artificial Sequence: Synthetic oligonucleotide
  Antisense strand to SEQ ID NO: 1116972
uucagaaagaacaaccaac

SEQ ID NO: 1116974 - RNA, 19 nt, Artificial Sequence
  Description of Artificial Sequence: Synthetic oligonucleotide
  Sense strand starting at position 54 of SEQ ID NO: 915929
accaaugguuagucagcaa

SEQ ID NO: 1116975 - RNA, 19 nt, Artificial Sequence
  Description of Artificial Sequence: Synthetic oligonucleotide
  Antisense strand to SEQ ID NO: 1116974
uugcugacuaaccauuggu

SEQ ID NO: 1116976 - RNA, 19 nt, Artificial Sequence
  Description of Artificial Sequence: Synthetic oligonucleotide
  Sense strand starting at position 57 of SEQ ID NO: 915929
aaugguuagucagcaaaga

SEQ ID NO: 1116977 - RNA, 19 nt, Artificial Sequence
  Description of Artificial Sequence: Synthetic oligonucleotide
  Antisense strand to SEQ ID NO: 1116976
ucuuugcugacuaaccauu

SEQ ID NO: 1116978 - RNA, 19 nt, Artificial Sequence
  Description of Artificial Sequence: Synthetic oligonucleotide
  Sense strand starting at position 58 of SEQ ID NO: 915929
augguuagucagcaaagaa

SEQ ID NO: 1116979 - RNA, 19 nt, Artificial Sequence
  Description of Artificial Sequence: Synthetic oligonucleotide
  Antisense strand to SEQ ID NO: 1116978
uucuuugcugacuaaccau

SEQ ID NO: 1116980 - RNA, 19 nt, Artificial Sequence
  Description of Artificial Sequence: Synthetic oligonucleotide
  Sense strand starting at position 103 of SEQ ID NO: 915929
guuacagucuucugaaauu

SEQ ID NO: 1116981 - RNA, 19 nt, Artificial Sequence
  Description of Artificial Sequence: Synthetic oligonucleotide
  Antisense strand to SEQ ID NO: 1116980
aauuucagaagacuguaac

SEQ ID NO: 1116982 - RNA, 19 nt, Artificial Sequence
  Description of Artificial Sequence: Synthetic oligonucleotide
  Sense strand starting at position 112 of SEQ ID NO: 915929
uucugaaauuccuagaguc

SEQ ID NO: 1116983 - RNA, 19 nt, Artificial Sequence
  Description of Artificial Sequence: Synthetic oligonucleotide
  Antisense strand to SEQ ID NO: 1116982
gacucuaggaauuucagaa

SEQ ID NO: 1116984 - RNA, 19 nt, Artificial Sequence
  Description of Artificial Sequence: Synthetic oligonucleotide
  Sense strand starting at position 487 of SEQ ID NO: 915929
ugaggagucaugcgcuucu

SEQ ID NO: 1116985 - RNA, 19 nt, Artificial Sequence
  Description of Artificial Sequence: Synthetic oligonucleotide
  Antisense strand to SEQ ID NO: 1116984
agaagcgcaugacuccuca

SEQ ID NO: 1116986 - RNA, 19 nt, Artificial Sequence
  Description of Artificial Sequence: Synthetic oligonucleotide
  Sense strand starting at position 597 of SEQ ID NO: 915929
aggucaauagcucggacuu

SEQ ID NO: 1116987 - RNA, 19 nt, Artificial Sequence
  Description of Artificial Sequence: Synthetic oligonucleotide
  Antisense strand to SEQ ID NO: 1116986
aaguccgagcuauugaccu

SEQ ID NO: 1116988 - RNA, 19 nt, Artificial Sequence
  Description of Artificial Sequence: Synthetic oligonucleotide
  Sense strand starting at position 598 of SEQ ID NO: 915929
ggucaauagcucggacuug

SEQ ID NO: 1116989 - RNA, 19 nt, Artificial Sequence
  Description of Artificial Sequence: Synthetic oligonucleotide
  Antisense strand to SEQ ID NO: 1116988
caaguccgagcuauugacc

SEQ ID NO: 1116990 - RNA, 19 nt, Artificial Sequence
  Description of Artificial Sequence: Synthetic oligonucleotide
  Sense strand starting at position 696 of SEQ ID NO: 915929
gguagugagggucaucaga

SEQ ID NO: 1116991 - RNA, 19 nt, Artificial Sequence
  Description of Artificial Sequence: Synthetic oligonucleotide
  Antisense strand to SEQ ID NO: 1116990
ucugaugacccucacuacc

SEQ ID NO: 1116992 - RNA, 19 nt, Artificial Sequence
  Description of Artificial Sequence: Synthetic oligonucleotide
  Sense strand starting at position 775 of SEQ ID NO: 915929
cugcaauucugucugucua

SEQ ID NO: 1116993 - RNA, 19 nt, Artificial Sequence
  Description of Artificial Sequence: Synthetic oligonucleotide
  Antisense strand to SEQ ID NO: 1116992
uagacagacagaauugcag

SEQ ID NO: 1116994 - RNA, 19 nt, Artificial Sequence
  Description of Artificial Sequence: Synthetic oligonucleotide
  Sense strand starting at position 949 of SEQ ID NO: 915929
ggagucucuucucauaccu

SEQ ID NO: 1116995 - RNA, 19 nt, Artificial Sequence
  Description of Artificial Sequence: Synthetic oligonucleotide
  Antisense strand to SEQ ID NO: 1116994
agguaugagaagagacucc

SEQ ID NO: 1116996 - RNA, 19 nt, Artificial Sequence
  Description of Artificial Sequence: Synthetic oligonucleotide
  Sense strand starting at position 951 of SEQ ID NO: 915929
agucucuucucauaccuga

SEQ ID NO: 1116997 - RNA, 19 nt, Artificial Sequence
  Description of Artificial Sequence: Synthetic oligonucleotide
  Antisense strand to SEQ ID NO: 1116996
ucagguaugagaagagacu

SEQ ID NO: 1116998 - RNA, 19 nt, Artificial Sequence
  Description of Artificial Sequence: Synthetic oligonucleotide
  Sense strand starting at position 1047 of SEQ ID NO: 915929
uggcaagguucagggagaa

SEQ ID NO: 1116999 - RNA, 19 nt, Artificial Sequence
  Description of Artificial Sequence: Synthetic oligonucleotide
  Antisense strand to SEQ ID NO: 1116998
uucucccugaaccuugcca

SEQ ID NO: 1117000 - RNA, 19 nt, Artificial Sequence
  Description of Artificial Sequence: Synthetic oligonucleotide
  Sense strand starting at position 1137 of SEQ ID NO: 915929
ggagaaugcaggcaucuga

SEQ ID NO: 1117001 - RNA, 19 nt, Artificial Sequence
  Description of Artificial Sequence: Synthetic oligonucleotide
  Antisense strand to SEQ ID NO: 1117000
ucagaugccugcauucucc

SEQ ID NO: 1117002 - RNA, 19 nt, Artificial Sequence
  Description of Artificial Sequence: Synthetic oligonucleotide
  Sense strand starting at position 1247 of SEQ ID NO: 915929
ccuugauccugaccgggau

SEQ ID NO: 1117003 - RNA, 19 nt, Artificial Sequence
  Description of Artificial Sequence: Synthetic oligonucleotide
  Antisense strand to SEQ ID NO: 1117002
aucccggucaggaucaagg

SEQ ID NO: 1117004 - RNA, 19 nt, Artificial Sequence
  Description of Artificial Sequence: Synthetic oligonucleotide
  Sense strand starting at position 1711 of SEQ ID NO: 915929
gcaucuuaaugcugaagac

SEQ ID NO: 1117005 - RNA, 19 nt, Artificial Sequence
  Description of Artificial Sequence: Synthetic oligonucleotide
  Antisense strand to SEQ ID NO: 1117004
gucuucagcauuaagaugc

SEQ ID NO: 1117006 - RNA, 19 nt, Artificial Sequence
  Description of Artificial Sequence: Synthetic oligonucleotide
  Sense strand starting at position 1838 of SEQ ID NO: 915929
gacuccucagucugagcau

SEQ ID NO: 1117007 - RNA, 19 nt, Artificial Sequence
  Description of Artificial Sequence: Synthetic oligonucleotide
  Antisense strand to SEQ ID NO: 1117006
augcucagacugaggaguc

SEQ ID NO: 1117008 - RNA, 19 nt, Artificial Sequence
  Description of Artificial Sequence: Synthetic oligonucleotide
  Sense strand starting at position 1893 of SEQ ID NO: 915929
caccuagccugucaggaaa

SEQ ID NO: 1117009 - RNA, 19 nt, Artificial Sequence
  Description of Artificial Sequence: Synthetic oligonucleotide
  Antisense strand to SEQ ID NO: 1117008
uuuccugacaggcuaggug

SEQ ID NO: 1117010 - RNA, 19 nt, Artificial Sequence
  Description of Artificial Sequence: Synthetic oligonucleotide
  Sense strand starting at position 1950 of SEQ ID NO: 915929
cggaggugacccgaugagu

SEQ ID NO: 1117011 - RNA, 19 nt, Artificial Sequence
  Description of Artificial Sequence: Synthetic oligonucleotide
  Antisense strand to SEQ ID NO: 1117010
acucaucgggucaccuccg

SEQ ID NO: 1117012 - RNA, 19 nt, Artificial Sequence
  Description of Artificial Sequence: Synthetic oligonucleotide
  Sense strand starting at position 2349 of SEQ ID NO: 915929
aaguuaagagucuguugca

SEQ ID NO: 1117013 - RNA, 19 nt, Artificial Sequence
  Description of Artificial Sequence: Synthetic oligonucleotide
  Antisense strand to SEQ ID NO: 1117012
ugcaacagacucuuaacuu

SEQ ID NO: 1117014 - RNA, 19 nt, Artificial Sequence
  Description of Artificial Sequence: Synthetic oligonucleotide
  Sense strand starting at position 2677 of SEQ ID NO: 915929
ugagcuuguaggcaaggau

SEQ ID NO: 1117015 - RNA, 19 nt, Artificial Sequence
  Description of Artificial Sequence: Synthetic oligonucleotide
  Antisense strand to SEQ ID NO: 1117014
auccuugccuacaagcuca

SEQ ID NO: 1117016 - RNA, 19 nt, Artificial Sequence
  Description of Artificial Sequence: Synthetic oligonucleotide
  Sense strand starting at position 2744 of SEQ ID NO: 915929
ucaagucaaguuugaaugu

SEQ ID NO: 1117017 - RNA, 19 nt, Artificial Sequence
  Description of Artificial Sequence: Synthetic oligonucleotide
  Antisense strand to SEQ ID NO: 1117016
acauucaaacuugacuuga

SEQ ID NO: 1117018 - RNA, 19 nt, Artificial Sequence
  Description of Artificial Sequence: Synthetic oligonucleotide
  Sense strand starting at position 2753 of SEQ ID NO: 915929
guuugaauguuaggaugaa

SEQ ID NO: 1117019 - RNA, 19 nt, Artificial Sequence
  Description of Artificial Sequence: Synthetic oligonucleotide
  Antisense strand to SEQ ID NO: 1117018
uucauccuaacauucaaac

SEQ ID NO: 1117020 - RNA, 19 nt, Artificial Sequence
  Description of Artificial Sequence: Synthetic oligonucleotide
  Sense strand starting at position 2889 of SEQ ID NO: 915929
agauacacacuggguaauu

SEQ ID NO: 1117021 - RNA, 19 nt, Artificial Sequence
  Description of Artificial Sequence: Synthetic oligonucleotide
  Antisense strand to SEQ ID NO: 1117020
aauuacccaguguguaucu

SEQ ID NO: 1117022 - RNA, 19 nt, Artificial Sequence
  Description of Artificial Sequence: Synthetic oligonucleotide
  Sense strand starting at position 2981 of SEQ ID NO: 915929
ggcgguaguucugcuugca

SEQ ID NO: 1117023 - RNA, 19 nt, Artificial Sequence
  Description of Artificial Sequence: Synthetic oligonucleotide
  Antisense strand to SEQ ID NO: 1117022
ugcaagcagaacuaccgcc

SEQ ID NO: 1117024 - RNA, 19 nt, Artificial Sequence
  Description of Artificial Sequence: Synthetic oligonucleotide
  Sense strand starting at position 2982 of SEQ ID NO: 915929
gcgguaguucugcuugcaa

SEQ ID NO: 1117025 - RNA, 19 nt, Artificial Sequence
  Description of Artificial Sequence: Synthetic oligonucleotide
  Antisense strand to SEQ ID NO: 1117024
uugcaagcagaacuaccgc

SEQ ID NO: 1117026 - RNA, 19 nt, Artificial Sequence
  Description of Artificial Sequence: Synthetic oligonucleotide
  Sense strand starting at position 2984 of SEQ ID NO: 915929
gguaguucugcuugcaagc

SEQ ID NO: 1117027 - RNA, 19 nt, Artificial Sequence
  Description of Artificial Sequence: Synthetic oligonucleotide
  Antisense strand to SEQ ID NO: 1117026
gcuugcaagcagaacuacc

SEQ ID NO: 1117028 - RNA, 19 nt, Artificial Sequence
  Description of Artificial Sequence: Synthetic oligonucleotide
  Sense strand starting at position 3006 of SEQ ID NO: 915929
aggucauagccugauaccu

SEQ ID NO: 1117029 - RNA, 19 nt, Artificial Sequence
  Description of Artificial Sequence: Synthetic oligonucleotide
  Antisense strand to SEQ ID NO: 1117028
agguaucaggcuaugaccu

SEQ ID NO: 1117030 - RNA, 19 nt, Artificial Sequence
  Description of Artificial Sequence: Synthetic oligonucleotide
  Sense strand starting at position 3008 of SEQ ID NO: 915929
gucauagccugauaccuca

SEQ ID NO: 1117031 - RNA, 19 nt, Artificial Sequence
  Description of Artificial Sequence: Synthetic oligonucleotide
  Antisense strand to SEQ ID NO: 1117030
ugagguaucaggcuaugac

SEQ ID NO: 1117032 - RNA, 19 nt, Artificial Sequence
  Description of Artificial Sequence: Synthetic oligonucleotide
  Sense strand starting at position 3021 of SEQ ID NO: 915929
accucacauugccgagaau

SEQ ID NO: 1117033 - RNA, 19 nt, Artificial Sequence
  Description of Artificial Sequence: Synthetic oligonucleotide
  Antisense strand to SEQ ID NO: 1117032
auucucggcaaugugaggu

SEQ ID NO: 1117034 - RNA, 19 nt, Artificial Sequence
  Description of Artificial Sequence: Synthetic oligonucleotide
  Sense strand starting at position 3049 of SEQ ID NO: 915929
guggcuccgugguucuaau

SEQ ID NO: 1117035 - RNA, 19 nt, Artificial Sequence
  Description of Artificial Sequence: Synthetic oligonucleotide
  Antisense strand to SEQ ID NO: 1117034
auuagaaccacggagccac

SEQ ID NO: 1117036 - RNA, 19 nt, Artificial Sequence
  Description of Artificial Sequence: Synthetic oligonucleotide
  Sense strand starting at position 3212 of SEQ ID NO: 915929
guggaaucucuacacuucu

SEQ ID NO: 1117037 - RNA, 19 nt, Artificial Sequence
  Description of Artificial Sequence: Synthetic oligonucleotide
  Antisense strand to SEQ ID NO: 1117036
agaaguguagagauuccac

SEQ ID NO: 1117038 - RNA, 19 nt, Artificial Sequence
  Description of Artificial Sequence: Synthetic oligonucleotide
  Sense strand starting at position 3615 of SEQ ID NO: 915929
uguuuaugaucuuggagua

SEQ ID NO: 1117039 - RNA, 19 nt, Artificial Sequence
  Description of Artificial Sequence: Synthetic oligonucleotide
  Antisense strand to SEQ ID NO: 1117038
uacuccaagaucauaaaca

SEQ ID NO: 1117040 - RNA, 19 nt, Artificial Sequence
  Description of Artificial Sequence: Synthetic oligonucleotide
  Sense strand starting at position 3616 of SEQ ID NO: 915929
guuuaugaucuuggaguag

SEQ ID NO: 1117041 - RNA, 19 nt, Artificial Sequence
  Description of Artificial Sequence: Synthetic oligonucleotide
  Antisense strand to SEQ ID NO: 1117040
cuacuccaagaucauaaac

SEQ ID NO: 1117042 - RNA, 19 nt, Artificial Sequence
  Description of Artificial Sequence: Synthetic oligonucleotide
  Sense strand starting at position 3638 of SEQ ID NO: 915929
agagaucucuaagccagau

SEQ ID NO: 1117043 - RNA, 19 nt, Artificial Sequence
  Description of Artificial Sequence: Synthetic oligonucleotide
  Antisense strand to SEQ ID NO: 1117042
aucuggcuuagagaucucu

SEQ ID NO: 1117044 - RNA, 19 nt, Artificial Sequence
  Description of Artificial Sequence: Synthetic oligonucleotide
  Sense strand starting at position 3642 of SEQ ID NO: 915929
aucucuaagccagauguaa

SEQ ID NO: 1117045 - RNA, 19 nt, Artificial Sequence
  Description of Artificial Sequence: Synthetic oligonucleotide
  Antisense strand to SEQ ID NO: 1117044
uuacaucuggcuuagagau

SEQ ID NO: 1117046 - RNA, 19 nt, Artificial Sequence
  Description of Artificial Sequence: Synthetic oligonucleotide
  Sense strand starting at position 3650 of SEQ ID NO: 915929
gccagauguaaagggaaau

SEQ ID NO: 1117047 - RNA, 19 nt, Artificial Sequence
  Description of Artificial Sequence: Synthetic oligonucleotide
  Antisense strand to SEQ ID NO: 1117046
auuucccuuuacaucuggc

SEQ ID NO: 1117048 - RNA, 19 nt, Artificial Sequence
  Description of Artificial Sequence: Synthetic oligonucleotide
  Sense strand starting at position 3774 of SEQ ID NO: 915929
agguauacuuuaucugguu

SEQ ID NO: 1117049 - RNA, 19 nt, Artificial Sequence
  Description of Artificial Sequence: Synthetic oligonucleotide
  Antisense strand to SEQ ID NO: 1117048
aaccagauaaaguauaccu

SEQ ID NO: 1117050 - RNA, 19 nt, Artificial Sequence
  Description of Artificial Sequence: Synthetic oligonucleotide
  Sense strand starting at position 3815 of SEQ ID NO: 915929
aggaaugaauuaugaacca

SEQ ID NO: 1117051 - RNA, 19 nt, Artificial Sequence
  Description of Artificial Sequence: Synthetic oligonucleotide
  Antisense strand to SEQ ID NO: 1117050
ugguucauaauucauuccu

SEQ ID NO: 1117052 - RNA, 19 nt, Artificial Sequence
  Description of Artificial Sequence: Synthetic oligonucleotide
  Sense strand starting at position 3914 of SEQ ID NO: 915929
aagggagaaugccaauuaa

SEQ ID NO: 1117053 - RNA, 19 nt, Artificial Sequence
  Description of Artificial Sequence: Synthetic oligonucleotide
  Antisense strand to SEQ ID NO: 1117052
uuaauuggcauucucccuu

SEQ ID NO: 1117054 - RNA, 19 nt, Artificial Sequence
  Description of Artificial Sequence: Synthetic oligonucleotide
  Sense strand starting at position 39 of SEQ ID NO: 915930
aggucaauagcucggacuu

SEQ ID NO: 1117055 - RNA, 19 nt, Artificial Sequence
  Description of Artificial Sequence: Synthetic oligonucleotide
  Antisense strand to SEQ ID NO: 1117054
aaguccgagcuauugaccu

SEQ ID NO: 1117056 - RNA, 19 nt, Artificial Sequence
  Description of Artificial Sequence: Synthetic oligonucleotide
  Sense strand starting at position 40 of SEQ ID NO: 915930
ggucaauagcucggacuug

SEQ ID NO: 1117057 - RNA, 19 nt, Artificial Sequence
  Description of Artificial Sequence: Synthetic oligonucleotide
  Antisense strand to SEQ ID NO: 1117056
caaguccgagcuauugacc

SEQ ID NO: 1117058 - RNA, 19 nt, Artificial Sequence
  Description of Artificial Sequence: Synthetic oligonucleotide
  Sense strand starting at position 138 of SEQ ID NO: 915930
gguagugagggucaucaga

SEQ ID NO: 1117059 - RNA, 19 nt, Artificial Sequence
  Description of Artificial Sequence: Synthetic oligonucleotide
  Antisense strand to SEQ ID NO: 1117058
ucugaugacccucacuacc

SEQ ID NO: 1117060 - RNA, 19 nt, Artificial Sequence
  Description of Artificial Sequence: Synthetic oligonucleotide
  Sense strand starting at position 217 of SEQ ID NO: 915930
cugcaauucugucugucua

SEQ ID NO: 1117061 - RNA, 19 nt, Artificial Sequence
  Description of Artificial Sequence: Synthetic oligonucleotide
  Antisense strand to SEQ ID NO: 1117060
uagacagacagaauugcag

SEQ ID NO: 1117062 - RNA, 19 nt, Artificial Sequence
  Description of Artificial Sequence: Synthetic oligonucleotide
  Sense strand starting at position 393 of SEQ ID NO: 915930
agucucuucucauaccuga

SEQ ID NO: 1117063 - RNA, 19 nt, Artificial Sequence
  Description of Artificial Sequence: Synthetic oligonucleotide
  Antisense strand to SEQ ID NO: 1117062
ucagguaugagaagagacu

SEQ ID NO: 1117064 - RNA, 19 nt, Artificial Sequence
  Description of Artificial Sequence: Synthetic oligonucleotide
  Sense strand starting at position 489 of SEQ ID NO: 915930
uggcaagguucagggagaa

SEQ ID NO: 1117065 - RNA, 19 nt, Artificial Sequence
  Description of Artificial Sequence: Synthetic oligonucleotide
  Antisense strand to SEQ ID NO: 1117064
uucucccugaaccuugcca

SEQ ID NO: 1117066 - RNA, 19 nt, Artificial Sequence
  Description of Artificial Sequence: Synthetic oligonucleotide
  Sense strand starting at position 579 of SEQ ID NO: 915930
ggagaaugcaggcaucuga

SEQ ID NO: 1117067 - RNA, 19 nt, Artificial Sequence
  Description of Artificial Sequence: Synthetic oligonucleotide
  Antisense strand to SEQ ID NO: 1117066
ucagaugccugcauucucc

SEQ ID NO: 1117068 - RNA, 19 nt, Artificial Sequence
  Description of Artificial Sequence: Synthetic oligonucleotide
  Sense strand starting at position 689 of SEQ ID NO: 915930
ccuugauccugaccgggau

SEQ ID NO: 1117069 - RNA, 19 nt, Artificial Sequence
  Description of Artificial Sequence: Synthetic oligonucleotide
  Antisense strand to SEQ ID NO: 1117068
aucccggucaggaucaagg

SEQ ID NO: 1117070 - RNA, 19 nt, Artificial Sequence
  Description of Artificial Sequence: Synthetic oligonucleotide
  Sense strand starting at position 1280 of SEQ ID NO: 915930
gacuccucagucugagcau

SEQ ID NO: 1117071 - RNA, 19 nt, Artificial Sequence
  Description of Artificial Sequence: Synthetic oligonucleotide
  Antisense strand to SEQ ID NO: 1117070
augcucagacugaggaguc

SEQ ID NO: 1117072 - RNA, 19 nt, Artificial Sequence
  Description of Artificial Sequence: Synthetic oligonucleotide
  Sense strand starting at position 1335 of SEQ ID NO: 915930
caccuagccugucaggaaa

SEQ ID NO: 1117073 - RNA, 19 nt, Artificial Sequence
  Description of Artificial Sequence: Synthetic oligonucleotide
  Antisense strand to SEQ ID NO: 1117072
uuuccugacaggcuaggug

SEQ ID NO: 1117074 - RNA, 19 nt, Artificial Sequence
  Description of Artificial Sequence: Synthetic oligonucleotide
  Sense strand starting at position 1392 of SEQ ID NO: 915930
cggaggugacccgaugagu

SEQ ID NO: 1117075 - RNA, 19 nt, Artificial Sequence
  Description of Artificial Sequence: Synthetic oligonucleotide
  Antisense strand to SEQ ID NO: 1117074
acucaucgggucaccuccg

SEQ ID NO: 1117076 - RNA, 19 nt, Artificial Sequence
  Description of Artificial Sequence: Synthetic oligonucleotide
  Sense strand starting at position 1791 of SEQ ID NO: 915930
aaguuaagagucuguugca

SEQ ID NO: 1117077 - RNA, 19 nt, Artificial Sequence
  Description of Artificial Sequence: Synthetic oligonucleotide
  Antisense strand to SEQ ID NO: 1117076
ugcaacagacucuuaacuu

SEQ ID NO: 1117078 - RNA, 19 nt, Artificial Sequence
  Description of Artificial Sequence: Synthetic oligonucleotide
  Sense strand starting at position 2119 of SEQ ID NO: 915930
ugagcuuguaggcaaggau

SEQ ID NO: 1117079 - RNA, 19 nt, Artificial Sequence
  Description of Artificial Sequence: Synthetic oligonucleotide
  Antisense strand to SEQ ID NO: 1117078
auccuugccuacaagcuca

SEQ ID NO: 1117080 - RNA, 19 nt, Artificial Sequence
  Description of Artificial Sequence: Synthetic oligonucleotide
  Sense strand starting at position 2186 of SEQ ID NO: 915930
ucaagucaaguuugaaugu

SEQ ID NO: 1117081 - RNA, 19 nt, Artificial Sequence
  Description of Artificial Sequence: Synthetic oligonucleotide
  Antisense strand to SEQ ID NO: 1117080
acauucaaacuugacuuga

SEQ ID NO: 1117082 - RNA, 19 nt, Artificial Sequence
  Description of Artificial Sequence: Synthetic oligonucleotide
  Sense strand starting at position 2195 of SEQ ID NO: 915930
guuugaauguuaggaugaa

SEQ ID NO: 1117083 - RNA, 19 nt, Artificial Sequence
  Description of Artificial Sequence: Synthetic oligonucleotide
  Antisense strand to SEQ ID NO: 1117082
uucauccuaacauucaaac

SEQ ID NO: 1117084 - RNA, 19 nt, Artificial Sequence
  Description of Artificial Sequence: Synthetic oligonucleotide
  Sense strand starting at position 2331 of SEQ ID NO: 915930
agauacacacuggguaauu

SEQ ID NO: 1117085 - RNA, 19 nt, Artificial Sequence
  Description of Artificial Sequence: Synthetic oligonucleotide
  Antisense strand to SEQ ID NO: 1117084
aauuacccaguguguaucu

SEQ ID NO: 1117086 - RNA, 19 nt, Artificial Sequence
  Description of Artificial Sequence: Synthetic oligonucleotide
  Sense strand starting at position 2424 of SEQ ID NO: 915930
gcgguaguucugcuugcaa

SEQ ID NO: 1117087 - RNA, 19 nt, Artificial Sequence
  Description of Artificial Sequence: Synthetic oligonucleotide
  Antisense strand to SEQ ID NO: 1117086
uugcaagcagaacuaccgc

SEQ ID NO: 1117088 - RNA, 19 nt, Artificial Sequence
  Description of Artificial Sequence: Synthetic oligonucleotide
  Sense strand starting at position 2426 of SEQ ID NO: 915930
gguaguucugcuugcaagc

SEQ ID NO: 1117089 - RNA, 19 nt, Artificial Sequence
  Description of Artificial Sequence: Synthetic oligonucleotide
  Antisense strand to SEQ ID NO: 1117088
gcuugcaagcagaacuacc

SEQ ID NO: 1117090 - RNA, 19 nt, Artificial Sequence
  Description of Artificial Sequence: Synthetic oligonucleotide
  Sense strand starting at position 2448 of SEQ ID NO: 915930
aggucauagccugauaccu

SEQ ID NO: 1117091 - RNA, 19 nt, Artificial Sequence
  Description of Artificial Sequence: Synthetic oligonucleotide
  Antisense strand to SEQ ID NO: 1117090
agguaucaggcuaugaccu

SEQ ID NO: 1117092 - RNA, 19 nt, Artificial Sequence
  Description of Artificial Sequence: Synthetic oligonucleotide
  Sense strand starting at position 2491 of SEQ ID NO: 915930
guggcuccgugguucuaau

SEQ ID NO: 1117093 - RNA, 19 nt, Artificial Sequence
  Description of Artificial Sequence: Synthetic oligonucleotide
  Antisense strand to SEQ ID NO: 1117092
auuagaaccacggagccac

SEQ ID NO: 1117094 - RNA, 19 nt, Artificial Sequence
  Description of Artificial Sequence: Synthetic oligonucleotide
  Sense strand starting at position 2654 of SEQ ID NO: 915930
guggaaucucuacacuucu

SEQ ID NO: 1117095 - RNA, 19 nt, Artificial Sequence
  Description of Artificial Sequence: Synthetic oligonucleotide
  Antisense strand to SEQ ID NO: 1117094
agaaguguagagauuccac

SEQ ID NO: 1117096 - RNA, 19 nt, Artificial Sequence
  Description of Artificial Sequence: Synthetic oligonucleotide
  Sense strand starting at position 3058 of SEQ ID NO: 915930
guuuaugaucuuggaguag

SEQ ID NO: 1117097 - RNA, 19 nt, Artificial Sequence
  Description of Artificial Sequence: Synthetic oligonucleotide
  Antisense strand to SEQ ID NO: 1117096
cuacuccaagaucauaaac

SEQ ID NO: 1117098 - RNA, 19 nt, Artificial Sequence
  Description of Artificial Sequence: Synthetic oligonucleotide
  Sense strand starting at position 3080 of SEQ ID NO: 915930
agagaucucuaagccagau

SEQ ID NO: 1117099 - RNA, 19 nt, Artificial Sequence
  Description of Artificial Sequence: Synthetic oligonucleotide
  Antisense strand to SEQ ID NO: 1117098
aucuggcuuagagaucucu

SEQ ID NO: 1117100 - RNA, 19 nt, Artificial Sequence
  Description of Artificial Sequence: Synthetic oligonucleotide
  Sense strand starting at position 3084 of SEQ ID NO: 915930
aucucuaagccagauguaa

SEQ ID NO: 1117101 - RNA, 19 nt, Artificial Sequence
  Description of Artificial Sequence: Synthetic oligonucleotide
  Antisense strand to SEQ ID NO: 1117100
uuacaucuggcuuagagau

SEQ ID NO: 1117102 - RNA, 19 nt, Artificial Sequence
  Description of Artificial Sequence: Synthetic oligonucleotide
  Sense strand starting at position 3092 of SEQ ID NO: 915930
gccagauguaaagggaaau

SEQ ID NO: 1117103 - RNA, 19 nt, Artificial Sequence
  Description of Artificial Sequence: Synthetic oligonucleotide
  Antisense strand to SEQ ID NO: 1117102
auuucccuuuacaucuggc

SEQ ID NO: 1117104 - RNA, 19 nt, Artificial Sequence
  Description of Artificial Sequence: Synthetic oligonucleotide
  Sense strand starting at position 3216 of SEQ ID NO: 915930
agguauacuuuaucugguu

SEQ ID NO: 1117105 - RNA, 19 nt, Artificial Sequence
  Description of Artificial Sequence: Synthetic oligonucleotide
  Antisense strand to SEQ ID NO: 1117104
aaccagauaaaguauaccu

SEQ ID NO: 1117106 - RNA, 19 nt, Artificial Sequence
  Description of Artificial Sequence: Synthetic oligonucleotide
  Sense strand starting at position 3257 of SEQ ID NO: 915930
aggaaugaauuaugaacca

SEQ ID NO: 1117107 - RNA, 19 nt, Artificial Sequence
  Description of Artificial Sequence: Synthetic oligonucleotide
  Antisense strand to SEQ ID NO: 1117106
ugguucauaauucauuccu

SEQ ID NO: 1117108 - RNA, 19 nt, Artificial Sequence
  Description of Artificial Sequence: Synthetic oligonucleotide
  Sense strand starting at position 3356 of SEQ ID NO: 915930
aagggagaaugccaauuaa

SEQ ID NO: 1117109 - RNA, 19 nt, Artificial Sequence
  Description of Artificial Sequence: Synthetic oligonucleotide
  Antisense strand to SEQ ID NO: 1117108
uuaauuggcauucucccuu

SEQ ID NO: 1117110 - RNA, 19 nt, Artificial Sequence
  Description of Artificial Sequence: Synthetic oligonucleotide
  Sense strand starting at position 3598 of SEQ ID NO: 915930
uugcaaccaucagaguaaa

SEQ ID NO: 1117111 - RNA, 19 nt, Artificial Sequence
  Description of Artificial Sequence: Synthetic oligonucleotide
  Antisense strand to SEQ ID NO: 1117110
uuuacucugaugguugcaa

SEQ ID NO: 1117112 - RNA, 19 nt, Artificial Sequence
  Description of Artificial Sequence: Synthetic oligonucleotide
  Sense strand starting at position 3620 of SEQ ID NO: 915930
ugguuugggcaagaauuau

SEQ ID NO: 1117113 - RNA, 19 nt, Artificial Sequence
  Description of Artificial Sequence: Synthetic oligonucleotide
  Antisense strand to SEQ ID NO: 1117112
auaauucuugcccaaacca

SEQ ID NO: 1117114 - RNA, 19 nt, Artificial Sequence
  Description of Artificial Sequence: Synthetic oligonucleotide
  Sense strand starting at position 3678 of SEQ ID NO: 915930
agcuuauguacguagcuua

SEQ ID NO: 1117115 - RNA, 19 nt, Artificial Sequence
  Description of Artificial Sequence: Synthetic oligonucleotide
  Antisense strand to SEQ ID NO: 1117114
uaagcuacguacauaagcu

SEQ ID NO: 1117116 - RNA, 19 nt, Artificial Sequence
  Description of Artificial Sequence: Synthetic oligonucleotide
  Sense strand starting at position 3683 of SEQ ID NO: 915930
auguacguagcuuaaagua

SEQ ID NO: 1117117 - RNA, 19 nt, Artificial Sequence
  Description of Artificial Sequence: Synthetic oligonucleotide
  Antisense strand to SEQ ID NO: 1117116
uacuuuaagcuacguacau

SEQ ID NO: 1117118 - RNA, 19 nt, Artificial Sequence
  Description of Artificial Sequence: Synthetic oligonucleotide
  Sense strand starting at position 3712 of SEQ ID NO: 915930
guuggcuuauucguugcaa

SEQ ID NO: 1117119 - RNA, 19 nt, Artificial Sequence
  Description of Artificial Sequence: Synthetic oligonucleotide
  Antisense strand to SEQ ID NO: 1117118
uugcaacgaauaagccaac

SEQ ID NO: 1117120 - RNA, 19 nt, Artificial Sequence
  Description of Artificial Sequence: Synthetic oligonucleotide
  Sense strand starting at position 3713 of SEQ ID NO: 915930
uuggcuuauucguugcaag

SEQ ID NO: 1117121 - RNA, 19 nt, Artificial Sequence
  Description of Artificial Sequence: Synthetic oligonucleotide
  Antisense strand to SEQ ID NO: 1117120
cuugcaacgaauaagccaa

SEQ ID NO: 1117122 - RNA, 19 nt, Artificial Sequence
  Description of Artificial Sequence: Synthetic oligonucleotide
  Sense strand starting at position 3714 of SEQ ID NO: 915930
uggcuuauucguugcaaga

SEQ ID NO: 1117123 - RNA, 19 nt, Artificial Sequence
  Description of Artificial Sequence: Synthetic oligonucleotide
  Antisense strand to SEQ ID NO: 1117122
ucuugcaacgaauaagcca

SEQ ID NO: 1117124 - RNA, 19 nt, Artificial Sequence
  Description of Artificial Sequence: Synthetic oligonucleotide
  Sense strand starting at position 3772 of SEQ ID NO: 915930
ccuugacuugcuggccaaa

SEQ ID NO: 1117125 - RNA, 19 nt, Artificial Sequence
  Description of Artificial Sequence: Synthetic oligonucleotide
  Antisense strand to SEQ ID NO: 1117124
uuuggccagcaagucaagg

SEQ ID NO: 1117126 - RNA, 19 nt, Artificial Sequence
  Description of Artificial Sequence: Synthetic oligonucleotide
  Sense strand starting at position 3870 of SEQ ID NO: 915930
guagugauguggcugggaa

SEQ ID NO: 1117127 - RNA, 19 nt, Artificial Sequence
  Description of Artificial Sequence: Synthetic oligonucleotide
  Antisense strand to SEQ ID NO: 1117126
uucccagccacaucacuac

SEQ ID NO: 1117128 - RNA, 19 nt, Artificial Sequence
  Description of Artificial Sequence: Synthetic oligonucleotide
  Sense strand starting at position 3871 of SEQ ID NO: 915930
uagugauguggcugggaau

SEQ ID NO: 1117129 - RNA, 19 nt, Artificial Sequence
  Description of Artificial Sequence: Synthetic oligonucleotide
  Antisense strand to SEQ ID NO: 1117128
auucccagccacaucacua

SEQ ID NO: 1117130 - RNA, 19 nt, Artificial Sequence
  Description of Artificial Sequence: Synthetic oligonucleotide
  Sense strand starting at position 3872 of SEQ ID NO: 915930
agugauguggcugggaaua

SEQ ID NO: 1117131 - RNA, 19 nt, Artificial Sequence
  Description of Artificial Sequence: Synthetic oligonucleotide
  Antisense strand to SEQ ID NO: 1117130
uauucccagccacaucacu

SEQ ID NO: 1117132 - RNA, 19 nt, Artificial Sequence
  Description of Artificial Sequence: Synthetic oligonucleotide
  Sense strand starting at position 3874 of SEQ ID NO: 915930
ugauguggcugggaauaca

SEQ ID NO: 1117133 - RNA, 19 nt, Artificial Sequence
  Description of Artificial Sequence: Synthetic oligonucleotide
  Antisense strand to SEQ ID NO: 1117132
uguauucccagccacauca

SEQ ID NO: 1117134 - RNA, 19 nt, Artificial Sequence
  Description of Artificial Sequence: Synthetic oligonucleotide
  Sense strand starting at position 45 of SEQ ID NO: 915931
ggagguuacugauuccaag

SEQ ID NO: 1117135 - RNA, 19 nt, Artificial Sequence
  Description of Artificial Sequence: Synthetic oligonucleotide
  Antisense strand to SEQ ID NO: 1117134
cuuggaaucaguaaccucc

SEQ ID NO: 1117136 - RNA, 19 nt, Artificial Sequence
  Description of Artificial Sequence: Synthetic oligonucleotide
  Sense strand starting at position 105 of SEQ ID NO: 915931
acaagaucccacuggcuaa

SEQ ID NO: 1117137 - RNA, 19 nt, Artificial Sequence
  Description of Artificial Sequence: Synthetic oligonucleotide
  Antisense strand to SEQ ID NO: 1117136
uuagccagugggaucuugu

SEQ ID NO: 1117138 - RNA, 19 nt, Artificial Sequence
  Description of Artificial Sequence: Synthetic oligonucleotide
  Sense strand starting at position 413 of SEQ ID NO: 915931
gcagaucagucuucguauc

SEQ ID NO: 1117139 - RNA, 19 nt, Artificial Sequence
  Description of Artificial Sequence: Synthetic oligonucleotide
  Antisense strand to SEQ ID NO: 1117138
gauacgaagacugaucugc

SEQ ID NO: 1117140 - RNA, 19 nt, Artificial Sequence
  Description of Artificial Sequence: Synthetic oligonucleotide
  Sense strand starting at position 415 of SEQ ID NO: 915931
agaucagucuucguaucca

SEQ ID NO: 1117141 - RNA, 19 nt, Artificial Sequence
  Description of Artificial Sequence: Synthetic oligonucleotide
  Antisense strand to SEQ ID NO: 1117140
uggauacgaagacugaucu

SEQ ID NO: 1117142 - RNA, 19 nt, Artificial Sequence
  Description of Artificial Sequence: Synthetic oligonucleotide
  Sense strand starting at position 419 of SEQ ID NO: 915931
cagucuucguauccagacu

SEQ ID NO: 1117143 - RNA, 19 nt, Artificial Sequence
  Description of Artificial Sequence: Synthetic oligonucleotide
  Antisense strand to SEQ ID NO: 1117142
agucuggauacgaagacug

SEQ ID NO: 1117144 - RNA, 19 nt, Artificial Sequence
  Description of Artificial Sequence: Synthetic oligonucleotide
  Sense strand starting at position 425 of SEQ ID NO: 915931
ucguauccagacugaaaga

SEQ ID NO: 1117145 - RNA, 19 nt, Artificial Sequence
  Description of Artificial Sequence: Synthetic oligonucleotide
  Antisense strand to SEQ ID NO: 1117144
ucuuucagucuggauacga

SEQ ID NO: 1117146 - RNA, 19 nt, Artificial Sequence
  Description of Artificial Sequence: Synthetic oligonucleotide
  Sense strand starting at position 449 of SEQ ID NO: 915931
uggagaucauuuggaccaa

SEQ ID NO: 1117147 - RNA, 19 nt, Artificial Sequence
  Description of Artificial Sequence: Synthetic oligonucleotide
  Antisense strand to SEQ ID NO: 1117146
uugguccaaaugaucucca

SEQ ID NO: 1117148 - RNA, 19 nt, Artificial Sequence
  Description of Artificial Sequence: Synthetic oligonucleotide
  Sense strand starting at position 574 of SEQ ID NO: 915931
acagaaagguuaggccaua

SEQ ID NO: 1117149 - RNA, 19 nt, Artificial Sequence
  Description of Artificial Sequence: Synthetic oligonucleotide
  Antisense strand to SEQ ID NO: 1117148
uauggccuaaccuuucugu

SEQ ID NO: 1117150 - RNA, 19 nt, Artificial Sequence
  Description of Artificial Sequence: Synthetic oligonucleotide
  Sense strand starting at position 575 of SEQ ID NO: 915931
cagaaagguuaggccauaa

SEQ ID NO: 1117151 - RNA, 19 nt, Artificial Sequence
  Description of Artificial Sequence: Synthetic oligonucleotide
  Antisense strand to SEQ ID NO: 1117150
uuauggccuaaccuuucug

SEQ ID NO: 1117152 - RNA, 19 nt, Artificial Sequence
  Description of Artificial Sequence: Synthetic oligonucleotide
  Sense strand starting at position 620 of SEQ ID NO: 915931
cagcgacugucccuaguaa

SEQ ID NO: 1117153 - RNA, 19 nt, Artificial Sequence
  Description of Artificial Sequence: Synthetic oligonucleotide
  Antisense strand to SEQ ID NO: 1117152
uuacuagggacagucgcug

SEQ ID NO: 1117154 - RNA, 19 nt, Artificial Sequence
  Description of Artificial Sequence: Synthetic oligonucleotide
  Sense strand starting at position 621 of SEQ ID NO: 915931
agcgacugucccuaguaau

SEQ ID NO: 1117155 - RNA, 19 nt, Artificial Sequence
  Description of Artificial Sequence: Synthetic oligonucleotide
  Antisense strand to SEQ ID NO: 1117154
auuacuagggacagucgcu

SEQ ID NO: 1117156 - RNA, 19 nt, Artificial Sequence
  Description of Artificial Sequence: Synthetic oligonucleotide
  Sense strand starting at position 642 of SEQ ID NO: 915931
ucucucuuuggccacaaga

SEQ ID NO: 1117157 - RNA, 19 nt, Artificial Sequence
  Description of Artificial Sequence: Synthetic oligonucleotide
  Antisense strand to SEQ ID NO: 1117156
ucuuguggccaaagagaga

SEQ ID NO: 1117158 - RNA, 19 nt, Artificial Sequence
  Description of Artificial Sequence: Synthetic oligonucleotide
  Sense strand starting at position 644 of SEQ ID NO: 915931
ucucuuuggccacaagaga

SEQ ID NO: 1117159 - RNA, 19 nt, Artificial Sequence
  Description of Artificial Sequence: Synthetic oligonucleotide
  Antisense strand to SEQ ID NO: 1117158
ucucuuguggccaaagaga

SEQ ID NO: 1117160 - RNA, 19 nt, Artificial Sequence
  Description of Artificial Sequence: Synthetic oligonucleotide
  Sense strand starting at position 709 of SEQ ID NO: 915931
acaggucagagucagagua

SEQ ID NO: 1117161 - RNA, 19 nt, Artificial Sequence
  Description of Artificial Sequence: Synthetic oligonucleotide
  Antisense strand to SEQ ID NO: 1117160
uacucugacucugaccugu

SEQ ID NO: 1117162 - RNA, 19 nt, Artificial Sequence
  Description of Artificial Sequence: Synthetic oligonucleotide
  Sense strand starting at position 717 of SEQ ID NO: 915931
gagucagaguaucuucuca

SEQ ID NO: 1117163 - RNA, 19 nt, Artificial Sequence
  Description of Artificial Sequence: Synthetic oligonucleotide
  Antisense strand to SEQ ID NO: 1117162
ugagaagauacucugacuc

SEQ ID NO: 1117164 - RNA, 19 nt, Artificial Sequence
  Description of Artificial Sequence: Synthetic oligonucleotide
  Sense strand starting at position 849 of SEQ ID NO: 915931
cugguaguaacgggaguuu

SEQ ID NO: 1117165 - RNA, 19 nt, Artificial Sequence
  Description of Artificial Sequence: Synthetic oligonucleotide
  Antisense strand to SEQ ID NO: 1117164
aaacucccguuacuaccag

SEQ ID NO: 1117166 - RNA, 19 nt, Artificial Sequence
  Description of Artificial Sequence: Synthetic oligonucleotide
  Sense strand starting at position 1041 of SEQ ID NO: 915931
cggaaauauuaaguggcuu

SEQ ID NO: 1117167 - RNA, 19 nt, Artificial Sequence
  Description of Artificial Sequence: Synthetic oligonucleotide
  Antisense strand to SEQ ID NO: 1117166
aagccacuuaauauuuccg

SEQ ID NO: 1117168 - RNA, 19 nt, Artificial Sequence
  Description of Artificial Sequence: Synthetic oligonucleotide
  Sense strand starting at position 1042 of SEQ ID NO: 915931
ggaaauauuaaguggcuuu

SEQ ID NO: 1117169 - RNA, 19 nt, Artificial Sequence
  Description of Artificial Sequence: Synthetic oligonucleotide
  Antisense strand to SEQ ID NO: 1117168
aaagccacuuaauauuucc

SEQ ID NO: 1117170 - RNA, 19 nt, Artificial Sequence
  Description of Artificial Sequence: Synthetic oligonucleotide
  Sense strand starting at position 1052 of SEQ ID NO: 915931
aguggcuuuggcuaaguua

SEQ ID NO: 1117171 - RNA, 19 nt, Artificial Sequence
  Description of Artificial Sequence: Synthetic oligonucleotide
  Antisense strand to SEQ ID NO: 1117170
uaacuuagccaaagccacu

SEQ ID NO: 1117172 - RNA, 19 nt, Artificial Sequence
  Description of Artificial Sequence: Synthetic oligonucleotide
  Sense strand starting at position 1287 of SEQ ID NO: 915931
gacucuccgagguauggua

SEQ ID NO: 1117173 - RNA, 19 nt, Artificial Sequence
  Description of Artificial Sequence: Synthetic oligonucleotide
  Antisense strand to SEQ ID NO: 1117172
uaccauaccucggagaguc

SEQ ID NO: 1117174 - RNA, 19 nt, Artificial Sequence
  Description of Artificial Sequence: Synthetic oligonucleotide
  Sense strand starting at position 1289 of SEQ ID NO: 915931
cucuccgagguaugguaaa

SEQ ID NO: 1117175 - RNA, 19 nt, Artificial Sequence
  Description of Artificial Sequence: Synthetic oligonucleotide
  Antisense strand to SEQ ID NO: 1117174
uuuaccauaccucggagag

SEQ ID NO: 1117176 - RNA, 19 nt, Artificial Sequence
  Description of Artificial Sequence: Synthetic oligonucleotide
  Sense strand starting at position 1730 of SEQ ID NO: 915931
ggaaaucgggucugaggau

SEQ ID NO: 1117177 - RNA, 19 nt, Artificial Sequence
  Description of Artificial Sequence: Synthetic oligonucleotide
  Antisense strand to SEQ ID NO: 1117176
auccucagacccgauuucc

SEQ ID NO: 1117178 - RNA, 19 nt, Artificial Sequence
  Description of Artificial Sequence: Synthetic oligonucleotide
  Sense strand starting at position 2737 of SEQ ID NO: 915931
gagccuuucgucgccaaca

SEQ ID NO: 1117179 - RNA, 19 nt, Artificial Sequence
  Description of Artificial Sequence: Synthetic oligonucleotide
  Antisense strand to SEQ ID NO: 1117178
uguuggcgacgaaaggcuc

SEQ ID NO: 1117180 - RNA, 19 nt, Artificial Sequence
  Description of Artificial Sequence: Synthetic oligonucleotide
  Sense strand starting at position 2784 of SEQ ID NO: 915931
accaguaggcgugaaauau

SEQ ID NO: 1117181 - RNA, 19 nt, Artificial Sequence
  Description of Artificial Sequence: Synthetic oligonucleotide
  Antisense strand to SEQ ID NO: 1117180
auauuucacgccuacuggu

SEQ ID NO: 1117182 - RNA, 19 nt, Artificial Sequence
  Description of Artificial Sequence: Synthetic oligonucleotide
  Sense strand starting at position 2795 of SEQ ID NO: 915931
ugaaauaucacgggagcca

SEQ ID NO: 1117183 - RNA, 19 nt, Artificial Sequence
  Description of Artificial Sequence: Synthetic oligonucleotide
  Antisense strand to SEQ ID NO: 1117182
uggcucccgugauauuuca

SEQ ID NO: 1117184 - RNA, 19 nt, Artificial Sequence
  Description of Artificial Sequence: Synthetic oligonucleotide
  Sense strand starting at position 2816 of SEQ ID NO: 915931
ggacgcuuaacgcagacau

SEQ ID NO: 1117185 - RNA, 19 nt, Artificial Sequence
  Description of Artificial Sequence: Synthetic oligonucleotide
  Antisense strand to SEQ ID NO: 1117184
augucugcguuaagcgucc

SEQ ID NO: 1117186 - RNA, 19 nt, Artificial Sequence
  Description of Artificial Sequence: Synthetic oligonucleotide
  Sense strand starting at position 2826 of SEQ ID NO: 915931
cgcagacauagcuucguuu

SEQ ID NO: 1117187 - RNA, 19 nt, Artificial Sequence
  Description of Artificial Sequence: Synthetic oligonucleotide
  Antisense strand to SEQ ID NO: 1117186
aaacgaagcuaugucugcg

SEQ ID NO: 1117188 - RNA, 19 nt, Artificial Sequence
  Description of Artificial Sequence: Synthetic oligonucleotide
  Sense strand starting at position 2961 of SEQ ID NO: 915931
uggaauggcuguuugaaga

SEQ ID NO: 1117189 - RNA, 19 nt, Artificial Sequence
  Description of Artificial Sequence: Synthetic oligonucleotide
  Antisense strand to SEQ ID NO: 1117188
ucuucaaacagccauucca

SEQ ID NO: 1117190 - RNA, 19 nt, Artificial Sequence
  Description of Artificial Sequence: Synthetic oligonucleotide
  Sense strand starting at position 3125 of SEQ ID NO: 915931
ucucuugaucucuggaggu

SEQ ID NO: 1117191 - RNA, 19 nt, Artificial Sequence
  Description of Artificial Sequence: Synthetic oligonucleotide
  Antisense strand to SEQ ID NO: 1117190
accuccagagaucaagaga

SEQ ID NO: 1117192 - RNA, 19 nt, Artificial Sequence
  Description of Artificial Sequence: Synthetic oligonucleotide
  Sense strand starting at position 3127 of SEQ ID NO: 915931
ucuugaucucuggagguca

SEQ ID NO: 1117193 - RNA, 19 nt, Artificial Sequence
  Description of Artificial Sequence: Synthetic oligonucleotide
  Antisense strand to SEQ ID NO: 1117192
ugaccuccagagaucaaga

SEQ ID NO: 1117194 - RNA, 19 nt, Artificial Sequence
  Description of Artificial Sequence: Synthetic oligonucleotide
  Sense strand starting at position 3349 of SEQ ID NO: 915931
uccauuaucucuucuggga

SEQ ID NO: 1117195 - RNA, 19 nt, Artificial Sequence
  Description of Artificial Sequence: Synthetic oligonucleotide
  Antisense strand to SEQ ID NO: 1117194
ucccagaagagauaaugga

SEQ ID NO: 1117196 - RNA, 19 nt, Artificial Sequence
  Description of Artificial Sequence: Synthetic oligonucleotide
  Sense strand starting at position 3399 of SEQ ID NO: 915931
ggaucaaaguguuccugga

SEQ ID NO: 1117197 - RNA, 19 nt, Artificial Sequence
  Description of Artificial Sequence: Synthetic oligonucleotide
  Antisense strand to SEQ ID NO: 1117196
uccaggaacacuuugaucc

SEQ ID NO: 1117198 - RNA, 19 nt, Artificial Sequence
  Description of Artificial Sequence: Synthetic oligonucleotide
  Sense strand starting at position 3401 of SEQ ID NO: 915931
aucaaaguguuccuggaca

SEQ ID NO: 1117199 - RNA, 19 nt, Artificial Sequence
  Description of Artificial Sequence: Synthetic oligonucleotide
  Antisense strand to SEQ ID NO: 1117198
uguccaggaacacuuugau

SEQ ID NO: 1117200 - RNA, 19 nt, Artificial Sequence
  Description of Artificial Sequence: Synthetic oligonucleotide
  Sense strand starting at position 3403 of SEQ ID NO: 915931
caaaguguuccuggacauu

SEQ ID NO: 1117201 - RNA, 19 nt, Artificial Sequence
  Description of Artificial Sequence: Synthetic oligonucleotide
  Antisense strand to SEQ ID NO: 1117200
aauguccaggaacacuuug

SEQ ID NO: 1117202 - RNA, 19 nt, Artificial Sequence
  Description of Artificial Sequence: Synthetic oligonucleotide
  Sense strand starting at position 3459 of SEQ ID NO: 915931
gacagagguucucacagaa

SEQ ID NO: 1117203 - RNA, 19 nt, Artificial Sequence
  Description of Artificial Sequence: Synthetic oligonucleotide
  Antisense strand to SEQ ID NO: 1117202
uucugugagaaccucuguc

SEQ ID NO: 1117204 - RNA, 19 nt, Artificial Sequence
  Description of Artificial Sequence: Synthetic oligonucleotide
  Sense strand starting at position 3479 of SEQ ID NO: 915931
ugagaacuauguuucccuu

SEQ ID NO: 1117205 - RNA, 19 nt, Artificial Sequence
  Description of Artificial Sequence: Synthetic oligonucleotide
  Antisense strand to SEQ ID NO: 1117204
aagggaaacauaguucuca

SEQ ID NO: 1117206 - RNA, 19 nt, Artificial Sequence
  Description of Artificial Sequence: Synthetic oligonucleotide
  Sense strand starting at position 3776 of SEQ ID NO: 915931
ucccguauguagucacaca

SEQ ID NO: 1117207 - RNA, 19 nt, Artificial Sequence
  Description of Artificial Sequence: Synthetic oligonucleotide
  Antisense strand to SEQ ID NO: 1117206
ugugugacuacauacggga

SEQ ID NO: 1117208 - RNA, 19 nt, Artificial Sequence
  Description of Artificial Sequence: Synthetic oligonucleotide
  Sense strand starting at position 3815 of SEQ ID NO: 915931
ggcuuccaaugcuuauuga

SEQ ID NO: 1117209 - RNA, 19 nt, Artificial Sequence
  Description of Artificial Sequence: Synthetic oligonucleotide
  Antisense strand to SEQ ID NO: 1117208
ucaauaagcauuggaagcc

SEQ ID NO: 1117210 - RNA, 19 nt, Artificial Sequence
  Description of Artificial Sequence: Synthetic oligonucleotide
  Sense strand starting at position 3816 of SEQ ID NO: 915931
gcuuccaaugcuuauugau

SEQ ID NO: 1117211 - RNA, 19 nt, Artificial Sequence
  Description of Artificial Sequence: Synthetic oligonucleotide
  Antisense strand to SEQ ID NO: 1117210
aucaauaagcauuggaagc

SEQ ID NO: 1117212 - RNA, 19 nt, Artificial Sequence
  Description of Artificial Sequence: Synthetic oligonucleotide
  Sense strand starting at position 3966 of SEQ ID NO: 915931
gucaacuuguacccuuuau

SEQ ID NO: 1117213 - RNA, 19 nt, Artificial Sequence
  Description of Artificial Sequence: Synthetic oligonucleotide
  Antisense strand to SEQ ID NO: 1117212
auaaaggguacaaguugac

SEQ ID NO: 1117214 - RNA, 19 nt, Artificial Sequence
  Description of Artificial Sequence: Synthetic oligonucleotide
  Sense strand starting at position 162 of SEQ ID NO: 915932
guacuauucuaauuaguug

SEQ ID NO: 1117215 - RNA, 19 nt, Artificial Sequence
  Description of Artificial Sequence: Synthetic oligonucleotide
  Antisense strand to SEQ ID NO: 1117214
caacuaauuagaauaguac

SEQ ID NO: 1117216 - RNA, 19 nt, Artificial Sequence
  Description of Artificial Sequence: Synthetic oligonucleotide
  Sense strand starting at position 170 of SEQ ID NO: 915932
cuaauuaguugauucugca

SEQ ID NO: 1117217 - RNA, 19 nt, Artificial Sequence
  Description of Artificial Sequence: Synthetic oligonucleotide
  Antisense strand to SEQ ID NO: 1117216
ugcagaaucaacuaauuag

SEQ ID NO: 1117218 - RNA, 19 nt, Artificial Sequence
  Description of Artificial Sequence: Synthetic oligonucleotide
  Sense strand starting at position 174 of SEQ ID NO: 915932
uuaguugauucugcagaag

SEQ ID NO: 1117219 - RNA, 19 nt, Artificial Sequence
  Description of Artificial Sequence: Synthetic oligonucleotide
  Antisense strand to SEQ ID NO: 1117218
cuucugcagaaucaacuaa

SEQ ID NO: 1117220 - RNA, 19 nt, Artificial Sequence
  Description of Artificial Sequence: Synthetic oligonucleotide
  Sense strand starting at position 177 of SEQ ID NO: 915932
guugauucugcagaaggua

SEQ ID NO: 1117221 - RNA, 19 nt, Artificial Sequence
  Description of Artificial Sequence: Synthetic oligonucleotide
  Antisense strand to SEQ ID NO: 1117220
uaccuucugcagaaucaac

SEQ ID NO: 1117222 - RNA, 19 nt, Artificial Sequence
  Description of Artificial Sequence: Synthetic oligonucleotide
  Sense strand starting at position 280 of SEQ ID NO: 915932
ccaaucucagucuguuaau

SEQ ID NO: 1117223 - RNA, 19 nt, Artificial Sequence
  Description of Artificial Sequence: Synthetic oligonucleotide
  Antisense strand to SEQ ID NO: 1117222
auuaacagacugagauugg

SEQ ID NO: 1117224 - RNA, 19 nt, Artificial Sequence
  Description of Artificial Sequence: Synthetic oligonucleotide
  Sense strand starting at position 401 of SEQ ID NO: 915932
ugcucaggugcucugcaau

SEQ ID NO: 1117225 - RNA, 19 nt, Artificial Sequence
  Description of Artificial Sequence: Synthetic oligonucleotide
  Antisense strand to SEQ ID NO: 1117224
auugcagagcaccugagca

SEQ ID NO: 1117226 - RNA, 19 nt, Artificial Sequence
  Description of Artificial Sequence: Synthetic oligonucleotide
  Sense strand starting at position 404 of SEQ ID NO: 915932
ucaggugcucugcaauaua

SEQ ID NO: 1117227 - RNA, 19 nt, Artificial Sequence
  Description of Artificial Sequence: Synthetic oligonucleotide
  Antisense strand to SEQ ID NO: 1117226
uauauugcagagcaccuga

SEQ ID NO: 1117228 - RNA, 19 nt, Artificial Sequence
  Description of Artificial Sequence: Synthetic oligonucleotide
  Sense strand starting at position 407 of SEQ ID NO: 915932
ggugcucugcaauauagaa

SEQ ID NO: 1117229 - RNA, 19 nt, Artificial Sequence
  Description of Artificial Sequence: Synthetic oligonucleotide
  Antisense strand to SEQ ID NO: 1117228
uucuauauugcagagcacc

SEQ ID NO: 1117230 - RNA, 19 nt, Artificial Sequence
  Description of Artificial Sequence: Synthetic oligonucleotide
  Sense strand starting at position 502 of SEQ ID NO: 915932
gcucucuaugcugagggaa

SEQ ID NO: 1117231 - RNA, 19 nt, Artificial Sequence
  Description of Artificial Sequence: Synthetic oligonucleotide
  Antisense strand to SEQ ID NO: 1117230
uucccucagcauagagagc

SEQ ID NO: 1117232 - RNA, 19 nt, Artificial Sequence
  Description of Artificial Sequence: Synthetic oligonucleotide
  Sense strand starting at position 550 of SEQ ID NO: 915932
cugguagauaacugaguuu

SEQ ID NO: 1117233 - RNA, 19 nt, Artificial Sequence
  Description of Artificial Sequence: Synthetic oligonucleotide
  Antisense strand to SEQ ID NO: 1117232
aaacucaguuaucuaccag

SEQ ID NO: 1117234 - RNA, 19 nt, Artificial Sequence
  Description of Artificial Sequence: Synthetic oligonucleotide
  Sense strand starting at position 646 of SEQ ID NO: 915932
ugggauacgugagucaacu

SEQ ID NO: 1117235 - RNA, 19 nt, Artificial Sequence
  Description of Artificial Sequence: Synthetic oligonucleotide
  Antisense strand to SEQ ID NO: 1117234
aguugacucacguauccca

SEQ ID NO: 1117236 - RNA, 19 nt, Artificial Sequence
  Description of Artificial Sequence: Synthetic oligonucleotide
  Sense strand starting at position 648 of SEQ ID NO: 915932
ggauacgugagucaacuga

SEQ ID NO: 1117237 - RNA, 19 nt, Artificial Sequence
  Description of Artificial Sequence: Synthetic oligonucleotide
  Antisense strand to SEQ ID NO: 1117236
ucaguugacucacguaucc

SEQ ID NO: 1117238 - RNA, 19 nt, Artificial Sequence
  Description of Artificial Sequence: Synthetic oligonucleotide
  Sense strand starting at position 665 of SEQ ID NO: 915932
gaaguugacuacuuccagu

SEQ ID NO: 1117239 - RNA, 19 nt, Artificial Sequence
  Description of Artificial Sequence: Synthetic oligonucleotide
  Antisense strand to SEQ ID NO: 1117238
acuggaaguagucaacuuc

SEQ ID NO: 1117240 - RNA, 19 nt, Artificial Sequence
  Description of Artificial Sequence: Synthetic oligonucleotide
  Sense strand starting at position 734 of SEQ ID NO: 915932
caugguuggcaagauccaa

SEQ ID NO: 1117241 - RNA, 19 nt, Artificial Sequence
  Description of Artificial Sequence: Synthetic oligonucleotide
  Antisense strand to SEQ ID NO: 1117240
uuggaucuugccaaccaug

SEQ ID NO: 1117242 - RNA, 19 nt, Artificial Sequence
  Description of Artificial Sequence: Synthetic oligonucleotide
  Sense strand starting at position 1649 of SEQ ID NO: 915932
uggauccucgcaggaaaua

SEQ ID NO: 1117243 - RNA, 19 nt, Artificial Sequence
  Description of Artificial Sequence: Synthetic oligonucleotide
  Antisense strand to SEQ ID NO: 1117242
uauuuccugcgaggaucca

SEQ ID NO: 1117244 - RNA, 19 nt, Artificial Sequence
  Description of Artificial Sequence: Synthetic oligonucleotide
  Sense strand starting at position 1728 of SEQ ID NO: 915932
gagggaagccucggaugaa

SEQ ID NO: 1117245 - RNA, 19 nt, Artificial Sequence
  Description of Artificial Sequence: Synthetic oligonucleotide
  Antisense strand to SEQ ID NO: 1117244
uucauccgaggcuucccuc

SEQ ID NO: 1117246 - RNA, 19 nt, Artificial Sequence
  Description of Artificial Sequence: Synthetic oligonucleotide
  Sense strand starting at position 2281 of SEQ ID NO: 915932
aggugccacuucucuaaca

SEQ ID NO: 1117247 - RNA, 19 nt, Artificial Sequence
  Description of Artificial Sequence: Synthetic oligonucleotide
  Antisense strand to SEQ ID NO: 1117246
uguuagagaaguggcaccu

SEQ ID NO: 1117248 - RNA, 19 nt, Artificial Sequence
  Description of Artificial Sequence: Synthetic oligonucleotide
  Sense strand starting at position 2334 of SEQ ID NO: 915932
ggcaguuauuucccaggua

SEQ ID NO: 1117249 - RNA, 19 nt, Artificial Sequence
  Description of Artificial Sequence: Synthetic oligonucleotide
  Antisense strand to SEQ ID NO: 1117248
uaccugggaaauaacugcc

SEQ ID NO: 1117250 - RNA, 19 nt, Artificial Sequence
  Description of Artificial Sequence: Synthetic oligonucleotide
  Sense strand starting at position 2353 of SEQ ID NO: 915932
ggguaauggaaacguggaa

SEQ ID NO: 1117251 - RNA, 19 nt, Artificial Sequence
  Description of Artificial Sequence: Synthetic oligonucleotide
  Antisense strand to SEQ ID NO: 1117250
uuccacguuuccauuaccc

SEQ ID NO: 1117252 - RNA, 19 nt, Artificial Sequence
  Description of Artificial Sequence: Synthetic oligonucleotide
  Sense strand starting at position 2373 of SEQ ID NO: 915932
uagaaagguuagucacuca

SEQ ID NO: 1117253 - RNA, 19 nt, Artificial Sequence
  Description of Artificial Sequence: Synthetic oligonucleotide
  Antisense strand to SEQ ID NO: 1117252
ugagugacuaaccuuucua

SEQ ID NO: 1117254 - RNA, 19 nt, Artificial Sequence
  Description of Artificial Sequence: Synthetic oligonucleotide
  Sense strand starting at position 2574 of SEQ ID NO: 915932
cagcaaagaccugagugua

SEQ ID NO: 1117255 - RNA, 19 nt, Artificial Sequence
  Description of Artificial Sequence: Synthetic oligonucleotide
  Antisense strand to SEQ ID NO: 1117254
uacacucaggucuuugcug

SEQ ID NO: 1117256 - RNA, 19 nt, Artificial Sequence
  Description of Artificial Sequence: Synthetic oligonucleotide
  Sense strand starting at position 2582 of SEQ ID NO: 915932
accugaguguagccuaaau

SEQ ID NO: 1117257 - RNA, 19 nt, Artificial Sequence
  Description of Artificial Sequence: Synthetic oligonucleotide
  Antisense strand to SEQ ID NO: 1117256
auuuaggcuacacucaggu

SEQ ID NO: 1117258 - RNA, 19 nt, Artificial Sequence
  Description of Artificial Sequence: Synthetic oligonucleotide
  Sense strand starting at position 2699 of SEQ ID NO: 915932
gcuacauaacugugugaaa

SEQ ID NO: 1117259 - RNA, 19 nt, Artificial Sequence
  Description of Artificial Sequence: Synthetic oligonucleotide
  Antisense strand to SEQ ID NO: 1117258
uuucacacaguuauguagc

SEQ ID NO: 1117260 - RNA, 19 nt, Artificial Sequence
  Description of Artificial Sequence: Synthetic oligonucleotide
  Sense strand starting at position 2790 of SEQ ID NO: 915932
gaugaagaacagugucaua

SEQ ID NO: 1117261 - RNA, 19 nt, Artificial Sequence
  Description of Artificial Sequence: Synthetic oligonucleotide
  Antisense strand to SEQ ID NO: 1117260
uaugacacuguucuucauc

SEQ ID NO: 1117262 - RNA, 19 nt, Artificial Sequence
  Description of Artificial Sequence: Synthetic oligonucleotide
  Sense strand starting at position 3171 of SEQ ID NO: 915932
ugaagaaauuaagacccaa

SEQ ID NO: 1117263 - RNA, 19 nt, Artificial Sequence
  Description of Artificial Sequence: Synthetic oligonucleotide
  Antisense strand to SEQ ID NO: 1117262
uugggucuuaauuucuuca

SEQ ID NO: 1117264 - RNA, 19 nt, Artificial Sequence
  Description of Artificial Sequence: Synthetic oligonucleotide
  Sense strand starting at position 3210 of SEQ ID NO: 915932
aaugucaaacaguggauaa

SEQ ID NO: 1117265 - RNA, 19 nt, Artificial Sequence
  Description of Artificial Sequence: Synthetic oligonucleotide
  Antisense strand to SEQ ID NO: 1117264
uuauccacuguuugacauu

SEQ ID NO: 1117266 - RNA, 19 nt, Artificial Sequence
  Description of Artificial Sequence: Synthetic oligonucleotide
  Sense strand starting at position 3279 of SEQ ID NO: 915932
ugcagccuugaagauaauu

SEQ ID NO: 1117267 - RNA, 19 nt, Artificial Sequence
  Description of Artificial Sequence: Synthetic oligonucleotide
  Antisense strand to SEQ ID NO: 1117266
aauuaucuucaaggcugca

SEQ ID NO: 1117268 - RNA, 19 nt, Artificial Sequence
  Description of Artificial Sequence: Synthetic oligonucleotide
  Sense strand starting at position 3327 of SEQ ID NO: 915932
gaaacaguugccuaaacug

SEQ ID NO: 1117269 - RNA, 19 nt, Artificial Sequence
  Description of Artificial Sequence: Synthetic oligonucleotide
  Antisense strand to SEQ ID NO: 1117268
caguuuaggcaacuguuuc

SEQ ID NO: 1117270 - RNA, 19 nt, Artificial Sequence
  Description of Artificial Sequence: Synthetic oligonucleotide
  Sense strand starting at position 3489 of SEQ ID NO: 915932
ugagauccaucagucuaca

SEQ ID NO: 1117271 - RNA, 19 nt, Artificial Sequence
  Description of Artificial Sequence: Synthetic oligonucleotide
  Antisense strand to SEQ ID NO: 1117270
uguagacugauggaucuca

SEQ ID NO: 1117272 - RNA, 19 nt, Artificial Sequence
  Description of Artificial Sequence: Synthetic oligonucleotide
  Sense strand starting at position 3610 of SEQ ID NO: 915932
ggaagcuagcuuuagcaaa

SEQ ID NO: 1117273 - RNA, 19 nt, Artificial Sequence
  Description of Artificial Sequence: Synthetic oligonucleotide
  Antisense strand to SEQ ID NO: 1117272
uuugcuaaagcuagcuucc

SEQ ID NO: 1117274 - RNA, 19 nt, Artificial Sequence
  Description of Artificial Sequence: Synthetic oligonucleotide
  Sense strand starting at position 3677 of SEQ ID NO: 915932
ucuuccucucucgagauaa

SEQ ID NO: 1117275 - RNA, 19 nt, Artificial Sequence
  Description of Artificial Sequence: Synthetic oligonucleotide
  Antisense strand to SEQ ID NO: 1117274
uuaucucgagagaggaaga

SEQ ID NO: 1117276 - RNA, 19 nt, Artificial Sequence
  Description of Artificial Sequence: Synthetic oligonucleotide
  Sense strand starting at position 3679 of SEQ ID NO: 915932
uuccucucucgagauaagu

SEQ ID NO: 1117277 - RNA, 19 nt, Artificial Sequence
  Description of Artificial Sequence: Synthetic oligonucleotide
  Antisense strand to SEQ ID NO: 1117276
acuuaucucgagagaggaa

SEQ ID NO: 1117278 - RNA, 19 nt, Artificial Sequence
  Description of Artificial Sequence: Synthetic oligonucleotide
  Sense strand starting at position 3681 of SEQ ID NO: 915932
ccucucucgagauaaguag

SEQ ID NO: 1117279 - RNA, 19 nt, Artificial Sequence
  Description of Artificial Sequence: Synthetic oligonucleotide
  Antisense strand to SEQ ID NO: 1117278
cuacuuaucucgagagagg

SEQ ID NO: 1117280 - RNA, 19 nt, Artificial Sequence
  Description of Artificial Sequence: Synthetic oligonucleotide
  Sense strand starting at position 3815 of SEQ ID NO: 915932
gaccucaagucccugagua

SEQ ID NO: 1117281 - RNA, 19 nt, Artificial Sequence
  Description of Artificial Sequence: Synthetic oligonucleotide
  Antisense strand to SEQ ID NO: 1117280
uacucagggacuugagguc

SEQ ID NO: 1117282 - RNA, 19 nt, Artificial Sequence
  Description of Artificial Sequence: Synthetic oligonucleotide
  Sense strand starting at position 3816 of SEQ ID NO: 915932
accucaagucccugaguaa

SEQ ID NO: 1117283 - RNA, 19 nt, Artificial Sequence
  Description of Artificial Sequence: Synthetic oligonucleotide
  Antisense strand to SEQ ID NO: 1117282
uuacucagggacuugaggu

SEQ ID NO: 1117284 - RNA, 19 nt, Artificial Sequence
  Description of Artificial Sequence: Synthetic oligonucleotide
  Sense strand starting at position 3817 of SEQ ID NO: 915932
ccucaagucccugaguaag

SEQ ID NO: 1117285 - RNA, 19 nt, Artificial Sequence
  Description of Artificial Sequence: Synthetic oligonucleotide
  Antisense strand to SEQ ID NO: 1117284
cuuacucagggacuugagg

SEQ ID NO: 1117286 - RNA, 19 nt, Artificial Sequence
  Description of Artificial Sequence: Synthetic oligonucleotide
  Sense strand starting at position 3819 of SEQ ID NO: 915932
ucaagucccugaguaagua

SEQ ID NO: 1117287 - RNA, 19 nt, Artificial Sequence
  Description of Artificial Sequence: Synthetic oligonucleotide
  Antisense strand to SEQ ID NO: 1117286
uacuuacucagggacuuga

SEQ ID NO: 1117288 - RNA, 19 nt, Artificial Sequence
  Description of Artificial Sequence: Synthetic oligonucleotide
  Sense strand starting at position 3828 of SEQ ID NO: 915932
ugaguaaguagaggucaca

SEQ ID NO: 1117289 - RNA, 19 nt, Artificial Sequence
  Description of Artificial Sequence: Synthetic oligonucleotide
  Antisense strand to SEQ ID NO: 1117288
ugugaccucuacuuacuca

SEQ ID NO: 1117290 - RNA, 19 nt, Artificial Sequence
  Description of Artificial Sequence: Synthetic oligonucleotide
  Sense strand starting at position 3877 of SEQ ID NO: 915932
aaaggagggcucuggcaaa

SEQ ID NO: 1117291 - RNA, 19 nt, Artificial Sequence
  Description of Artificial Sequence: Synthetic oligonucleotide
  Antisense strand to SEQ ID NO: 1117290
uuugccagagcccuccuuu

SEQ ID NO: 1117292 - RNA, 19 nt, Artificial Sequence
  Description of Artificial Sequence: Synthetic oligonucleotide
  Sense strand starting at position 3889 of SEQ ID NO: 915932
uggcaaacuucugcuaaga

SEQ ID NO: 1117293 - RNA, 19 nt, Artificial Sequence
  Description of Artificial Sequence: Synthetic oligonucleotide
  Antisense strand to SEQ ID NO: 1117292
ucuuagcagaaguuugcca

SEQ ID NO: 1117294 - RNA, 19 nt, Artificial Sequence
  Description of Artificial Sequence: Synthetic oligonucleotide
  Sense strand starting at position 94 of SEQ ID NO: 915933
augggacuuagcugaacuu

SEQ ID NO: 1117295 - RNA, 19 nt, Artificial Sequence
  Description of Artificial Sequence: Synthetic oligonucleotide
  Antisense strand to SEQ ID NO: 1117294
aaguucagcuaagucccau

SEQ ID NO: 1117296 - RNA, 19 nt, Artificial Sequence
  Description of Artificial Sequence: Synthetic oligonucleotide
  Sense strand starting at position 232 of SEQ ID NO: 915933
gugggaaagcgcuaguuca

SEQ ID NO: 1117297 - RNA, 19 nt, Artificial Sequence
  Description of Artificial Sequence: Synthetic oligonucleotide
  Antisense strand to SEQ ID NO: 1117296
ugaacuagcgcuuucccac

SEQ ID NO: 1117298 - RNA, 19 nt, Artificial Sequence
  Description of Artificial Sequence: Synthetic oligonucleotide
  Sense strand starting at position 368 of SEQ ID NO: 915933
gugagaagccuccggauuc

SEQ ID NO: 1117299 - RNA, 19 nt, Artificial Sequence
  Description of Artificial Sequence: Synthetic oligonucleotide
  Antisense strand to SEQ ID NO: 1117298
gaauccggaggcuucucac

SEQ ID NO: 1117300 - RNA, 19 nt, Artificial Sequence
  Description of Artificial Sequence: Synthetic oligonucleotide
  Sense strand starting at position 731 of SEQ ID NO: 915933
gagagcagucgcgaaggau

SEQ ID NO: 1117301 - RNA, 19 nt, Artificial Sequence
  Description of Artificial Sequence: Synthetic oligonucleotide
  Antisense strand to SEQ ID NO: 1117300
auccuucgcgacugcucuc

SEQ ID NO: 1117302 - RNA, 19 nt, Artificial Sequence
  Description of Artificial Sequence: Synthetic oligonucleotide
  Sense strand starting at position 843 of SEQ ID NO: 915933
cagaaacuucugcggugaa

SEQ ID NO: 1117303 - RNA, 19 nt, Artificial Sequence
  Description of Artificial Sequence: Synthetic oligonucleotide
  Antisense strand to SEQ ID NO: 1117302
uucaccgcagaaguuucug

SEQ ID NO: 1117304 - RNA, 19 nt, Artificial Sequence
  Description of Artificial Sequence: Synthetic oligonucleotide
  Sense strand starting at position 846 of SEQ ID NO: 915933
aaacuucugcggugaagug

SEQ ID NO: 1117305 - RNA, 19 nt, Artificial Sequence
  Description of Artificial Sequence: Synthetic oligonucleotide
  Antisense strand to SEQ ID NO: 1117304
cacuucaccgcagaaguuu

SEQ ID NO: 1117306 - RNA, 19 nt, Artificial Sequence
  Description of Artificial Sequence: Synthetic oligonucleotide
  Sense strand starting at position 871 of SEQ ID NO: 915933
ggugguagguccgaaagga

SEQ ID NO: 1117307 - RNA, 19 nt, Artificial Sequence
  Description of Artificial Sequence: Synthetic oligonucleotide
  Antisense strand to SEQ ID NO: 1117306
uccuuucggaccuaccacc

SEQ ID NO: 1117308 - RNA, 19 nt, Artificial Sequence
  Description of Artificial Sequence: Synthetic oligonucleotide
  Sense strand starting at position 1882 of SEQ ID NO: 915933
gguguuggauccucccaaa

SEQ ID NO: 1117309 - RNA, 19 nt, Artificial Sequence
  Description of Artificial Sequence: Synthetic oligonucleotide
  Antisense strand to SEQ ID NO: 1117308
uuugggaggauccaacacc

SEQ ID NO: 1117310 - RNA, 19 nt, Artificial Sequence
  Description of Artificial Sequence: Synthetic oligonucleotide
  Sense strand starting at position 1885 of SEQ ID NO: 915933
guuggauccucccaaacug

SEQ ID NO: 1117311 - RNA, 19 nt, Artificial Sequence
  Description of Artificial Sequence: Synthetic oligonucleotide
  Antisense strand to SEQ ID NO: 1117310
caguuugggaggauccaac

SEQ ID NO: 1117312 - RNA, 19 nt, Artificial Sequence
  Description of Artificial Sequence: Synthetic oligonucleotide
  Sense strand starting at position 1899 of SEQ ID NO: 915933
aacugugagcugggaacua

SEQ ID NO: 1117313 - RNA, 19 nt, Artificial Sequence
  Description of Artificial Sequence: Synthetic oligonucleotide
  Antisense strand to SEQ ID NO: 1117312
uaguucccagcucacaguu

SEQ ID NO: 1117314 - RNA, 19 nt, Artificial Sequence
  Description of Artificial Sequence: Synthetic oligonucleotide
  Sense strand starting at position 1934 of SEQ ID NO: 915933
caguguaugcuuccugcga

SEQ ID NO: 1117315 - RNA, 19 nt, Artificial Sequence
  Description of Artificial Sequence: Synthetic oligonucleotide
  Antisense strand to SEQ ID NO: 1117314
ucgcaggaagcauacacug

SEQ ID NO: 1117316 - RNA, 19 nt, Artificial Sequence
  Description of Artificial Sequence: Synthetic oligonucleotide
  Sense strand starting at position 1935 of SEQ ID NO: 915933
aguguaugcuuccugcgaa

SEQ ID NO: 1117317 - RNA, 19 nt, Artificial Sequence
  Description of Artificial Sequence: Synthetic oligonucleotide
  Antisense strand to SEQ ID NO: 1117316
uucgcaggaagcauacacu

SEQ ID NO: 1117318 - RNA, 19 nt, Artificial Sequence
  Description of Artificial Sequence: Synthetic oligonucleotide
  Sense strand starting at position 1938 of SEQ ID NO: 915933
guaugcuuccugcgaacca

SEQ ID NO: 1117319 - RNA, 19 nt, Artificial Sequence
  Description of Artificial Sequence: Synthetic oligonucleotide
  Antisense strand to SEQ ID NO: 1117318
ugguucgcaggaagcauac

SEQ ID NO: 1117320 - RNA, 19 nt, Artificial Sequence
  Description of Artificial Sequence: Synthetic oligonucleotide
  Sense strand starting at position 1976 of SEQ ID NO: 915933
gggugaugucccuguguga

SEQ ID NO: 1117321 - RNA, 19 nt, Artificial Sequence
  Description of Artificial Sequence: Synthetic oligonucleotide
  Antisense strand to SEQ ID NO: 1117320
ucacacagggacaucaccc

SEQ ID NO: 1117322 - RNA, 19 nt, Artificial Sequence
  Description of Artificial Sequence: Synthetic oligonucleotide
  Sense strand starting at position 2029 of SEQ ID NO: 915933
ggcuuucucuggguggaga

SEQ ID NO: 1117323 - RNA, 19 nt, Artificial Sequence
  Description of Artificial Sequence: Synthetic oligonucleotide
  Antisense strand to SEQ ID NO: 1117322
ucuccacccagagaaagcc

SEQ ID NO: 1117324 - RNA, 19 nt, Artificial Sequence
  Description of Artificial Sequence: Synthetic oligonucleotide
  Sense strand starting at position 2095 of SEQ ID NO: 915933
guuagagagcuguguugac

SEQ ID NO: 1117325 - RNA, 19 nt, Artificial Sequence
  Description of Artificial Sequence: Synthetic oligonucleotide
  Antisense strand to SEQ ID NO: 1117324
gucaacacagcucucuaac

SEQ ID NO: 1117326 - RNA, 19 nt, Artificial Sequence
  Description of Artificial Sequence: Synthetic oligonucleotide
  Sense strand starting at position 2180 of SEQ ID NO: 915933
gggagaagguucucgauaa

SEQ ID NO: 1117327 - RNA, 19 nt, Artificial Sequence
  Description of Artificial Sequence: Synthetic oligonucleotide
  Antisense strand to SEQ ID NO: 1117326
uuaucgagaaccuucuccc

SEQ ID NO: 1117328 - RNA, 19 nt, Artificial Sequence
  Description of Artificial Sequence: Synthetic oligonucleotide
  Sense strand starting at position 2181 of SEQ ID NO: 915933
ggagaagguucucgauaaa

SEQ ID NO: 1117329 - RNA, 19 nt, Artificial Sequence
  Description of Artificial Sequence: Synthetic oligonucleotide
  Antisense strand to SEQ ID NO: 1117328
uuuaucgagaaccuucucc

SEQ ID NO: 1117330 - RNA, 19 nt, Artificial Sequence
  Description of Artificial Sequence: Synthetic oligonucleotide
  Sense strand starting at position 2184 of SEQ ID NO: 915933
gaagguucucgauaaacgc

SEQ ID NO: 1117331 - RNA, 19 nt, Artificial Sequence
  Description of Artificial Sequence: Synthetic oligonucleotide
  Antisense strand to SEQ ID NO: 1117330
gcguuuaucgagaaccuuc

SEQ ID NO: 1117332 - RNA, 19 nt, Artificial Sequence
  Description of Artificial Sequence: Synthetic oligonucleotide
  Sense strand starting at position 2191 of SEQ ID NO: 915933
cucgauaaacgcugaagga

SEQ ID NO: 1117333 - RNA, 19 nt, Artificial Sequence
  Description of Artificial Sequence: Synthetic oligonucleotide
  Antisense strand to SEQ ID NO: 1117332
uccuucagcguuuaucgag

SEQ ID NO: 1117334 - RNA, 19 nt, Artificial Sequence
  Description of Artificial Sequence: Synthetic oligonucleotide
  Sense strand starting at position 2200 of SEQ ID NO: 915933
cgcugaaggacgugaacau

SEQ ID NO: 1117335 - RNA, 19 nt, Artificial Sequence
  Description of Artificial Sequence: Synthetic oligonucleotide
  Antisense strand to SEQ ID NO: 1117334
auguucacguccuucagcg

SEQ ID NO: 1117336 - RNA, 19 nt, Artificial Sequence
  Description of Artificial Sequence: Synthetic oligonucleotide
  Sense strand starting at position 2460 of SEQ ID NO: 915933
ccaccuucuguccagauca

SEQ ID NO: 1117337 - RNA, 19 nt, Artificial Sequence
  Description of Artificial Sequence: Synthetic oligonucleotide
  Antisense strand to SEQ ID NO: 1117336
ugaucuggacagaaggugg

SEQ ID NO: 1117338 - RNA, 19 nt, Artificial Sequence
  Description of Artificial Sequence: Synthetic oligonucleotide
  Sense strand starting at position 2667 of SEQ ID NO: 915933
gcggguggagcuuauagau

SEQ ID NO: 1117339 - RNA, 19 nt, Artificial Sequence
  Description of Artificial Sequence: Synthetic oligonucleotide
  Antisense strand to SEQ ID NO: 1117338
aucuauaagcuccacccgc

SEQ ID NO: 1117340 - RNA, 19 nt, Artificial Sequence
  Description of Artificial Sequence: Synthetic oligonucleotide
  Sense strand starting at position 2711 of SEQ ID NO: 915933
cccagcuggucuguaaaca

SEQ ID NO: 1117341 - RNA, 19 nt, Artificial Sequence
  Description of Artificial Sequence: Synthetic oligonucleotide
  Antisense strand to SEQ ID NO: 1117340
uguuuacagaccagcuggg

SEQ ID NO: 1117342 - RNA, 19 nt, Artificial Sequence
  Description of Artificial Sequence: Synthetic oligonucleotide
  Sense strand starting at position 2722 of SEQ ID NO: 915933
uguaaacagucuuuaacug

SEQ ID NO: 1117343 - RNA, 19 nt, Artificial Sequence
  Description of Artificial Sequence: Synthetic oligonucleotide
  Antisense strand to SEQ ID NO: 1117342
caguuaaagacuguuuaca

SEQ ID NO: 1117344 - RNA, 19 nt, Artificial Sequence
  Description of Artificial Sequence: Synthetic oligonucleotide
  Sense strand starting at position 2723 of SEQ ID NO: 915933
guaaacagucuuuaacuga

SEQ ID NO: 1117345 - RNA, 19 nt, Artificial Sequence
  Description of Artificial Sequence: Synthetic oligonucleotide
  Antisense strand to SEQ ID NO: 1117344
ucaguuaaagacuguuuac

SEQ ID NO: 1117346 - RNA, 19 nt, Artificial Sequence
  Description of Artificial Sequence: Synthetic oligonucleotide
  Sense strand starting at position 2783 of SEQ ID NO: 915933
ggaucagaguucuugcaga

SEQ ID NO: 1117347 - RNA, 19 nt, Artificial Sequence
  Description of Artificial Sequence: Synthetic oligonucleotide
  Antisense strand to SEQ ID NO: 1117346
ucugcaagaacucugaucc

SEQ ID NO: 1117348 - RNA, 19 nt, Artificial Sequence
  Description of Artificial Sequence: Synthetic oligonucleotide
  Sense strand starting at position 3006 of SEQ ID NO: 915933
uugcuauucccuuguaaga

SEQ ID NO: 1117349 - RNA, 19 nt, Artificial Sequence
  Description of Artificial Sequence: Synthetic oligonucleotide
  Antisense strand to SEQ ID NO: 1117348
ucuuacaagggaauagcaa

SEQ ID NO: 1117350 - RNA, 19 nt, Artificial Sequence
  Description of Artificial Sequence: Synthetic oligonucleotide
  Sense strand starting at position 3066 of SEQ ID NO: 915933
uggacuaggccuuauggua

SEQ ID NO: 1117351 - RNA, 19 nt, Artificial Sequence
  Description of Artificial Sequence: Synthetic oligonucleotide
  Antisense strand to SEQ ID NO: 1117350
uaccauaaggccuagucca

SEQ ID NO: 1117352 - RNA, 19 nt, Artificial Sequence
  Description of Artificial Sequence: Synthetic oligonucleotide
  Sense strand starting at position 3081 of SEQ ID NO: 915933
gguauuauaugccucugca

SEQ ID NO: 1117353 - RNA, 19 nt, Artificial Sequence
  Description of Artificial Sequence: Synthetic oligonucleotide
  Antisense strand to SEQ ID NO: 1117352
ugcagaggcauauaauacc

SEQ ID NO: 1117354 - RNA, 19 nt, Artificial Sequence
  Description of Artificial Sequence: Synthetic oligonucleotide
  Sense strand starting at position 3084 of SEQ ID NO: 915933
auuauaugccucugcauag

SEQ ID NO: 1117355 - RNA, 19 nt, Artificial Sequence
  Description of Artificial Sequence: Synthetic oligonucleotide
  Antisense strand to SEQ ID NO: 1117354
cuaugcagaggcauauaau

SEQ ID NO: 1117356 - RNA, 19 nt, Artificial Sequence
  Description of Artificial Sequence: Synthetic oligonucleotide
  Sense strand starting at position 3094 of SEQ ID NO: 915933
ucugcauagccucaaggaa

SEQ ID NO: 1117357 - RNA, 19 nt, Artificial Sequence
  Description of Artificial Sequence: Synthetic oligonucleotide
  Antisense strand to SEQ ID NO: 1117356
uuccuugaggcuaugcaga

SEQ ID NO: 1117358 - RNA, 19 nt, Artificial Sequence
  Description of Artificial Sequence: Synthetic oligonucleotide
  Sense strand starting at position 3125 of SEQ ID NO: 915933
uuuauuuaggcuugcccaa

SEQ ID NO: 1117359 - RNA, 19 nt, Artificial Sequence
  Description of Artificial Sequence: Synthetic oligonucleotide
  Antisense strand to SEQ ID NO: 1117358
uugggcaagccuaaauaaa

SEQ ID NO: 1117360 - RNA, 19 nt, Artificial Sequence
  Description of Artificial Sequence: Synthetic oligonucleotide
  Sense strand starting at position 3151 of SEQ ID NO: 915933
ggaaguaguuaaguacacu

SEQ ID NO: 1117361 - RNA, 19 nt, Artificial Sequence
  Description of Artificial Sequence: Synthetic oligonucleotide
  Antisense strand to SEQ ID NO: 1117360
aguguacuuaacuacuucc

SEQ ID NO: 1117362 - RNA, 19 nt, Artificial Sequence
  Description of Artificial Sequence: Synthetic oligonucleotide
  Sense strand starting at position 3162 of SEQ ID NO: 915933
aguacacuuucugaagaca

SEQ ID NO: 1117363 - RNA, 19 nt, Artificial Sequence
  Description of Artificial Sequence: Synthetic oligonucleotide
  Antisense strand to SEQ ID NO: 1117362
ugucuucagaaaguguacu

SEQ ID NO: 1117364 - RNA, 19 nt, Artificial Sequence
  Description of Artificial Sequence: Synthetic oligonucleotide
  Sense strand starting at position 3367 of SEQ ID NO: 915933
ggaugugccacauggaaua

SEQ ID NO: 1117365 - RNA, 19 nt, Artificial Sequence
  Description of Artificial Sequence: Synthetic oligonucleotide
  Antisense strand to SEQ ID NO: 1117364
uauuccauguggcacaucc

SEQ ID NO: 1117366 - RNA, 19 nt, Artificial Sequence
  Description of Artificial Sequence: Synthetic oligonucleotide
  Sense strand starting at position 3487 of SEQ ID NO: 915933
acgguuguccaucaacaaa

SEQ ID NO: 1117367 - RNA, 19 nt, Artificial Sequence
  Description of Artificial Sequence: Synthetic oligonucleotide
  Antisense strand to SEQ ID NO: 1117366
uuuguugauggacaaccgu

SEQ ID NO: 1117368 - RNA, 19 nt, Artificial Sequence
  Description of Artificial Sequence: Synthetic oligonucleotide
  Sense strand starting at position 3557 of SEQ ID NO: 915933
ugcugaaacugcuucuuau

SEQ ID NO: 1117369 - RNA, 19 nt, Artificial Sequence
  Description of Artificial Sequence: Synthetic oligonucleotide
  Antisense strand to SEQ ID NO: 1117368
auaagaagcaguuucagca

SEQ ID NO: 1117370 - RNA, 19 nt, Artificial Sequence
  Description of Artificial Sequence: Synthetic oligonucleotide
  Sense strand starting at position 3712 of SEQ ID NO: 915933
cagacaccgugucucuaaa

SEQ ID NO: 1117371 - RNA, 19 nt, Artificial Sequence
  Description of Artificial Sequence: Synthetic oligonucleotide
  Antisense strand to SEQ ID NO: 1117370
uuuagagacacggugucug

SEQ ID NO: 1117372 - RNA, 19 nt, Artificial Sequence
  Description of Artificial Sequence: Synthetic oligonucleotide
  Sense strand starting at position 3760 of SEQ ID NO: 915933
uugacuauguugucagaac

SEQ ID NO: 1117373 - RNA, 19 nt, Artificial Sequence
  Description of Artificial Sequence: Synthetic oligonucleotide
  Antisense strand to SEQ ID NO: 1117372
guucugacaacauagucaa

SEQ ID NO: 1117374 - RNA, 19 nt, Artificial Sequence
  Description of Artificial Sequence: Synthetic oligonucleotide
  Sense strand starting at position 26 of SEQ ID NO: 915934
uacggaauauauguuucua

SEQ ID NO: 1117375 - RNA, 19 nt, Artificial Sequence
  Description of Artificial Sequence: Synthetic oligonucleotide
  Antisense strand to SEQ ID NO: 1117374
uagaaacauauauuccgua

SEQ ID NO: 1117376 - RNA, 19 nt, Artificial Sequence
  Description of Artificial Sequence: Synthetic oligonucleotide
  Sense strand starting at position 28 of SEQ ID NO: 915934
cggaauauauguuucuaau

SEQ ID NO: 1117377 - RNA, 19 nt, Artificial Sequence
  Description of Artificial Sequence: Synthetic oligonucleotide
  Antisense strand to SEQ ID NO: 1117376
auuagaaacauauauuccg

SEQ ID NO: 1117378 - RNA, 19 nt, Artificial Sequence
  Description of Artificial Sequence: Synthetic oligonucleotide
  Sense strand starting at position 163 of SEQ ID NO: 915934
aggaucuggugcuugauaa

SEQ ID NO: 1117379 - RNA, 19 nt, Artificial Sequence
  Description of Artificial Sequence: Synthetic oligonucleotide
  Antisense strand to SEQ ID NO: 1117378
uuaucaagcaccagauccu

SEQ ID NO: 1117380 - RNA, 19 nt, Artificial Sequence
  Description of Artificial Sequence: Synthetic oligonucleotide
  Sense strand starting at position 164 of SEQ ID NO: 915934
ggaucuggugcuugauaac

SEQ ID NO: 1117381 - RNA, 19 nt, Artificial Sequence
  Description of Artificial Sequence: Synthetic oligonucleotide
  Antisense strand to SEQ ID NO: 1117380
guuaucaagcaccagaucc

SEQ ID NO: 1117382 - RNA, 19 nt, Artificial Sequence
  Description of Artificial Sequence: Synthetic oligonucleotide
  Sense strand starting at position 243 of SEQ ID NO: 915934
ucauguaauuuagaucaag

SEQ ID NO: 1117383 - RNA, 19 nt, Artificial Sequence
  Description of Artificial Sequence: Synthetic oligonucleotide
  Antisense strand to SEQ ID NO: 1117382
cuugaucuaaauuacauga

SEQ ID NO: 1117384 - RNA, 19 nt, Artificial Sequence
  Description of Artificial Sequence: Synthetic oligonucleotide
  Sense strand starting at position 332 of SEQ ID NO: 915934
ugcacugguccacaaagaa

SEQ ID NO: 1117385 - RNA, 19 nt, Artificial Sequence
  Description of Artificial Sequence: Synthetic oligonucleotide
  Antisense strand to SEQ ID NO: 1117384
uucuuuguggaccagugca

SEQ ID NO: 1117386 - RNA, 19 nt, Artificial Sequence
  Description of Artificial Sequence: Synthetic oligonucleotide
  Sense strand starting at position 347 of SEQ ID NO: 915934
agaacuauagaguguggua

SEQ ID NO: 1117387 - RNA, 19 nt, Artificial Sequence
  Description of Artificial Sequence: Synthetic oligonucleotide
  Antisense strand to SEQ ID NO: 1117386
uaccacacucuauaguucu

SEQ ID NO: 1117388 - RNA, 19 nt, Artificial Sequence
  Description of Artificial Sequence: Synthetic oligonucleotide
  Sense strand starting at position 349 of SEQ ID NO: 915934
aacuauagagugugguaua

SEQ ID NO: 1117389 - RNA, 19 nt, Artificial Sequence
  Description of Artificial Sequence: Synthetic oligonucleotide
  Antisense strand to SEQ ID NO: 1117388
uauaccacacucuauaguu

SEQ ID NO: 1117390 - RNA, 19 nt, Artificial Sequence
  Description of Artificial Sequence: Synthetic oligonucleotide
  Sense strand starting at position 370 of SEQ ID NO: 915934
ugcacaugugcuuaucaag

SEQ ID NO: 1117391 - RNA, 19 nt, Artificial Sequence
  Description of Artificial Sequence: Synthetic oligonucleotide
  Antisense strand to SEQ ID NO: 1117390
cuugauaagcacaugugca

SEQ ID NO: 1117392 - RNA, 19 nt, Artificial Sequence
  Description of Artificial Sequence: Synthetic oligonucleotide
  Sense strand starting at position 379 of SEQ ID NO: 915934
gcuuaucaagccuagauga

SEQ ID NO: 1117393 - RNA, 19 nt, Artificial Sequence
  Description of Artificial Sequence: Synthetic oligonucleotide
  Antisense strand to SEQ ID NO: 1117392
ucaucuaggcuugauaagc

SEQ ID NO: 1117394 - RNA, 19 nt, Artificial Sequence
  Description of Artificial Sequence: Synthetic oligonucleotide
  Sense strand starting at position 501 of SEQ ID NO: 915934
gaccaaugauccuccggau

SEQ ID NO: 1117395 - RNA, 19 nt, Artificial Sequence
  Description of Artificial Sequence: Synthetic oligonucleotide
  Antisense strand to SEQ ID NO: 1117394
auccggaggaucauugguc

SEQ ID NO: 1117396 - RNA, 19 nt, Artificial Sequence
  Description of Artificial Sequence: Synthetic oligonucleotide
  Sense strand starting at position 623 of SEQ ID NO: 915934
uuuacauucugacuaugua

SEQ ID NO: 1117397 - RNA, 19 nt, Artificial Sequence
  Description of Artificial Sequence: Synthetic oligonucleotide
  Antisense strand to SEQ ID NO: 1117396
uacauagucagaauguaaa

SEQ ID NO: 1117398 - RNA, 19 nt, Artificial Sequence
  Description of Artificial Sequence: Synthetic oligonucleotide
  Sense strand starting at position 626 of SEQ ID NO: 915934
acauucugacuauguagau

SEQ ID NO: 1117399 - RNA, 19 nt, Artificial Sequence
  Description of Artificial Sequence: Synthetic oligonucleotide
  Antisense strand to SEQ ID NO: 1117398
aucuacauagucagaaugu

SEQ ID NO: 1117400 - RNA, 19 nt, Artificial Sequence
  Description of Artificial Sequence: Synthetic oligonucleotide
  Sense strand starting at position 680 of SEQ ID NO: 915934
aauugagaugucugaaacu

SEQ ID NO: 1117401 - RNA, 19 nt, Artificial Sequence
  Description of Artificial Sequence: Synthetic oligonucleotide
  Antisense strand to SEQ ID NO: 1117400
aguuucagacaucucaauu

SEQ ID NO: 1117402 - RNA, 19 nt, Artificial Sequence
  Description of Artificial Sequence: Synthetic oligonucleotide
  Sense strand starting at position 691 of SEQ ID NO: 915934
cugaaacugugcuucugaa

SEQ ID NO: 1117403 - RNA, 19 nt, Artificial Sequence
  Description of Artificial Sequence: Synthetic oligonucleotide
  Antisense strand to SEQ ID NO: 1117402
uucagaagcacaguuucag

SEQ ID NO: 1117404 - RNA, 19 nt, Artificial Sequence
  Description of Artificial Sequence: Synthetic oligonucleotide
  Sense strand starting at position 832 of SEQ ID NO: 915934
agcuaugauccuggaaucu

SEQ ID NO: 1117405 - RNA, 19 nt, Artificial Sequence
  Description of Artificial Sequence: Synthetic oligonucleotide
  Antisense strand to SEQ ID NO: 1117404
agauuccaggaucauagcu

SEQ ID NO: 1117406 - RNA, 19 nt, Artificial Sequence
  Description of Artificial Sequence: Synthetic oligonucleotide
  Sense strand starting at position 1050 of SEQ ID NO: 915934
auguucucucuuuagcaga

SEQ ID NO: 1117407 - RNA, 19 nt, Artificial Sequence
  Description of Artificial Sequence: Synthetic oligonucleotide
  Antisense strand to SEQ ID NO: 1117406
ucugcuaaagagagaacau

SEQ ID NO: 1117408 - RNA, 19 nt, Artificial Sequence
  Description of Artificial Sequence: Synthetic oligonucleotide
  Sense strand starting at position 1055 of SEQ ID NO: 915934
cucucuuuagcagacgaaa

SEQ ID NO: 1117409 - RNA, 19 nt, Artificial Sequence
  Description of Artificial Sequence: Synthetic oligonucleotide
  Antisense strand to SEQ ID NO: 1117408
uuucgucugcuaaagagag

SEQ ID NO: 1117410 - RNA, 19 nt, Artificial Sequence
  Description of Artificial Sequence: Synthetic oligonucleotide
  Sense strand starting at position 1140 of SEQ ID NO: 915934
uuaggagagccugggaaau

SEQ ID NO: 1117411 - RNA, 19 nt, Artificial Sequence
  Description of Artificial Sequence: Synthetic oligonucleotide
  Antisense strand to SEQ ID NO: 1117410
auuucccaggcucuccuaa

SEQ ID NO: 1117412 - RNA, 19 nt, Artificial Sequence
  Description of Artificial Sequence: Synthetic oligonucleotide
  Sense strand starting at position 1436 of SEQ ID NO: 915934
agaauauuguuccuuggau

SEQ ID NO: 1117413 - RNA, 19 nt, Artificial Sequence
  Description of Artificial Sequence: Synthetic oligonucleotide
  Antisense strand to SEQ ID NO: 1117412
auccaaggaacaauauucu

SEQ ID NO: 1117414 - RNA, 19 nt, Artificial Sequence
  Description of Artificial Sequence: Synthetic oligonucleotide
  Sense strand starting at position 1437 of SEQ ID NO: 915934
gaauauuguuccuuggaua

SEQ ID NO: 1117415 - RNA, 19 nt, Artificial Sequence
  Description of Artificial Sequence: Synthetic oligonucleotide
  Antisense strand to SEQ ID NO: 1117414
uauccaaggaacaauauuc

SEQ ID NO: 1117416 - RNA, 19 nt, Artificial Sequence
  Description of Artificial Sequence: Synthetic oligonucleotide
  Sense strand starting at position 1449 of SEQ ID NO: 915934
uuggauacauccuuaguuu

SEQ ID NO: 1117417 - RNA, 19 nt, Artificial Sequence
  Description of Artificial Sequence: Synthetic oligonucleotide
  Antisense strand to SEQ ID NO: 1117416
aaacuaaggauguauccaa

SEQ ID NO: 1117418 - RNA, 19 nt, Artificial Sequence
  Description of Artificial Sequence: Synthetic oligonucleotide
  Sense strand starting at position 1534 of SEQ ID NO: 915934
ggucuugagaauugguaag

SEQ ID NO: 1117419 - RNA, 19 nt, Artificial Sequence
  Description of Artificial Sequence: Synthetic oligonucleotide
  Antisense strand to SEQ ID NO: 1117418
cuuaccaauucucaagacc

SEQ ID NO: 1117420 - RNA, 19 nt, Artificial Sequence
  Description of Artificial Sequence: Synthetic oligonucleotide
  Sense strand starting at position 1536 of SEQ ID NO: 915934
ucuugagaauugguaagau

SEQ ID NO: 1117421 - RNA, 19 nt, Artificial Sequence
  Description of Artificial Sequence: Synthetic oligonucleotide
  Antisense strand to SEQ ID NO: 1117420
aucuuaccaauucucaaga

SEQ ID NO: 1117422 - RNA, 19 nt, Artificial Sequence
  Description of Artificial Sequence: Synthetic oligonucleotide
  Sense strand starting at position 1634 of SEQ ID NO: 915934
guacgcaucgccucaggau

SEQ ID NO: 1117423 - RNA, 19 nt, Artificial Sequence
  Description of Artificial Sequence: Synthetic oligonucleotide
  Antisense strand to SEQ ID NO: 1117422
auccugaggcgaugcguac

SEQ ID NO: 1117424 - RNA, 19 nt, Artificial Sequence
  Description of Artificial Sequence: Synthetic oligonucleotide
  Sense strand starting at position 2272 of SEQ ID NO: 915934
ccgagaaacuuucuuccua

SEQ ID NO: 1117425 - RNA, 19 nt, Artificial Sequence
  Description of Artificial Sequence: Synthetic oligonucleotide
  Antisense strand to SEQ ID NO: 1117424
uaggaagaaaguuucucgg

SEQ ID NO: 1117426 - RNA, 19 nt, Artificial Sequence
  Description of Artificial Sequence: Synthetic oligonucleotide
  Sense strand starting at position 2273 of SEQ ID NO: 915934
cgagaaacuuucuuccuaa

SEQ ID NO: 1117427 - RNA, 19 nt, Artificial Sequence
  Description of Artificial Sequence: Synthetic oligonucleotide
  Antisense strand to SEQ ID NO: 1117426
uuaggaagaaaguuucucg

SEQ ID NO: 1117428 - RNA, 19 nt, Artificial Sequence
  Description of Artificial Sequence: Synthetic oligonucleotide
  Sense strand starting at position 2435 of SEQ ID NO: 915934
aguugcucuccuuaccaua

SEQ ID NO: 1117429 - RNA, 19 nt, Artificial Sequence
  Description of Artificial Sequence: Synthetic oligonucleotide
  Antisense strand to SEQ ID NO: 1117428
uaugguaaggagagcaacu

SEQ ID NO: 1117430 - RNA, 19 nt, Artificial Sequence
  Description of Artificial Sequence: Synthetic oligonucleotide
  Sense strand starting at position 2516 of SEQ ID NO: 915934
gcuuuaugucugcugcaga

SEQ ID NO: 1117431 - RNA, 19 nt, Artificial Sequence
  Description of Artificial Sequence: Synthetic oligonucleotide
  Antisense strand to SEQ ID NO: 1117430
ucugcagcagacauaaagc

SEQ ID NO: 1117432 - RNA, 19 nt, Artificial Sequence
  Description of Artificial Sequence: Synthetic oligonucleotide
  Sense strand starting at position 2829 of SEQ ID NO: 915934
ucgaacucaugaccugaau

SEQ ID NO: 1117433 - RNA, 19 nt, Artificial Sequence
  Description of Artificial Sequence: Synthetic oligonucleotide
  Antisense strand to SEQ ID NO: 1117432
auucaggucaugaguucga

SEQ ID NO: 1117434 - RNA, 19 nt, Artificial Sequence
  Description of Artificial Sequence: Synthetic oligonucleotide
  Sense strand starting at position 2893 of SEQ ID NO: 915934
agccgcugugcagauuuaa

SEQ ID NO: 1117435 - RNA, 19 nt, Artificial Sequence
  Description of Artificial Sequence: Synthetic oligonucleotide
  Antisense strand to SEQ ID NO: 1117434
uuaaaucugcacagcggcu

SEQ ID NO: 1117436 - RNA, 19 nt, Artificial Sequence
  Description of Artificial Sequence: Synthetic oligonucleotide
  Sense strand starting at position 2925 of SEQ ID NO: 915934
gucggugaucaacaguaug

SEQ ID NO: 1117437 - RNA, 19 nt, Artificial Sequence
  Description of Artificial Sequence: Synthetic oligonucleotide
  Antisense strand to SEQ ID NO: 1117436
cauacuguugaucaccgac

SEQ ID NO: 1117438 - RNA, 19 nt, Artificial Sequence
  Description of Artificial Sequence: Synthetic oligonucleotide
  Sense strand starting at position 2928 of SEQ ID NO: 915934
ggugaucaacaguaugcuu

SEQ ID NO: 1117439 - RNA, 19 nt, Artificial Sequence
  Description of Artificial Sequence: Synthetic oligonucleotide
  Antisense strand to SEQ ID NO: 1117438
aagcauacuguugaucacc

SEQ ID NO: 1117440 - RNA, 19 nt, Artificial Sequence
  Description of Artificial Sequence: Synthetic oligonucleotide
  Sense strand starting at position 2930 of SEQ ID NO: 915934
ugaucaacaguaugcuuua

SEQ ID NO: 1117441 - RNA, 19 nt, Artificial Sequence
  Description of Artificial Sequence: Synthetic oligonucleotide
  Antisense strand to SEQ ID NO: 1117440
uaaagcauacuguugauca

SEQ ID NO: 1117442 - RNA, 19 nt, Artificial Sequence
  Description of Artificial Sequence: Synthetic oligonucleotide
  Sense strand starting at position 2951 of SEQ ID NO: 915934
acacauggccaaggauuau

SEQ ID NO: 1117443 - RNA, 19 nt, Artificial Sequence
  Description of Artificial Sequence: Synthetic oligonucleotide
  Antisense strand to SEQ ID NO: 1117442
auaauccuuggccaugugu

SEQ ID NO: 1117444 - RNA, 19 nt, Artificial Sequence
  Description of Artificial Sequence: Synthetic oligonucleotide
  Sense strand starting at position 2957 of SEQ ID NO: 915934
ggccaaggauuauuguaua

SEQ ID NO: 1117445 - RNA, 19 nt, Artificial Sequence
  Description of Artificial Sequence: Synthetic oligonucleotide
  Antisense strand to SEQ ID NO: 1117444
uauacaauaauccuuggcc

SEQ ID NO: 1117446 - RNA, 19 nt, Artificial Sequence
  Description of Artificial Sequence: Synthetic oligonucleotide
  Sense strand starting at position 3335 of SEQ ID NO: 915934
cuggauuugcucugucauu

SEQ ID NO: 1117447 - RNA, 19 nt, Artificial Sequence
  Description of Artificial Sequence: Synthetic oligonucleotide
  Antisense strand to SEQ ID NO: 1117446
aaugacagagcaaauccag

SEQ ID NO: 1117448 - RNA, 19 nt, Artificial Sequence
  Description of Artificial Sequence: Synthetic oligonucleotide
  Sense strand starting at position 3770 of SEQ ID NO: 915934
ugaguagguggagaauguu

SEQ ID NO: 1117449 - RNA, 19 nt, Artificial Sequence
  Description of Artificial Sequence: Synthetic oligonucleotide
  Antisense strand to SEQ ID NO: 1117448
aacauucuccaccuacuca

SEQ ID NO: 1117450 - RNA, 19 nt, Artificial Sequence
  Description of Artificial Sequence: Synthetic oligonucleotide
  Sense strand starting at position 3776 of SEQ ID NO: 915934
gguggagaauguucacuaa

SEQ ID NO: 1117451 - RNA, 19 nt, Artificial Sequence
  Description of Artificial Sequence: Synthetic oligonucleotide
  Antisense strand to SEQ ID NO: 1117450
uuagugaacauucuccacc

SEQ ID NO: 1117452 - RNA, 19 nt, Artificial Sequence
  Description of Artificial Sequence: Synthetic oligonucleotide
  Sense strand starting at position 3819 of SEQ ID NO: 915934
guuagcacucaacagauau

SEQ ID NO: 1117453 - RNA, 19 nt, Artificial Sequence
  Description of Artificial Sequence: Synthetic oligonucleotide
  Antisense strand to SEQ ID NO: 1117452
auaucuguugagugcuaac

SEQ ID NO: 1117454 - RNA, 19 nt, Artificial Sequence
  Description of Artificial Sequence: Synthetic oligonucleotide
  Sense strand starting at position 14 of SEQ ID NO: 915935
uugugauagcaauacauau

SEQ ID NO: 1117455 - RNA, 19 nt, Artificial Sequence
  Description of Artificial Sequence: Synthetic oligonucleotide
  Antisense strand to SEQ ID NO: 1117454
auauguauugcuaucacaa

SEQ ID NO: 1117456 - RNA, 19 nt, Artificial Sequence
  Description of Artificial Sequence: Synthetic oligonucleotide
  Sense strand starting at position 44 of SEQ ID NO: 915935
guggaaagauguuugaaau

SEQ ID NO: 1117457 - RNA, 19 nt, Artificial Sequence
  Description of Artificial Sequence: Synthetic oligonucleotide
  Antisense strand to SEQ ID NO: 1117456
auuucaaacaucuuuccac

SEQ ID NO: 1117458 - RNA, 19 nt, Artificial Sequence
  Description of Artificial Sequence: Synthetic oligonucleotide
  Sense strand starting at position 101 of SEQ ID NO: 915935
cuucgaucauaccuagaau

SEQ ID NO: 1117459 - RNA, 19 nt, Artificial Sequence
  Description of Artificial Sequence: Synthetic oligonucleotide
  Antisense strand to SEQ ID NO: 1117458
auucuagguaugaucgaag

SEQ ID NO: 1117460 - RNA, 19 nt, Artificial Sequence
  Description of Artificial Sequence: Synthetic oligonucleotide
  Sense strand starting at position 176 of SEQ ID NO: 915935
guagauaucuuaccuaguu

SEQ ID NO: 1117461 - RNA, 19 nt, Artificial Sequence
  Description of Artificial Sequence: Synthetic oligonucleotide
  Antisense strand to SEQ ID NO: 1117460
aacuagguaagauaucuac

SEQ ID NO: 1117462 - RNA, 19 nt, Artificial Sequence
  Description of Artificial Sequence: Synthetic oligonucleotide
  Sense strand starting at position 430 of SEQ ID NO: 915935
gugaucucuguugaauaca

SEQ ID NO: 1117463 - RNA, 19 nt, Artificial Sequence
  Description of Artificial Sequence: Synthetic oligonucleotide
  Antisense strand to SEQ ID NO: 1117462
uguauucaacagagaucac

SEQ ID NO: 1117464 - RNA, 19 nt, Artificial Sequence
  Description of Artificial Sequence: Synthetic oligonucleotide
  Sense strand starting at position 540 of SEQ ID NO: 915935
gugaaacuauggucuggga

SEQ ID NO: 1117465 - RNA, 19 nt, Artificial Sequence
  Description of Artificial Sequence: Synthetic oligonucleotide
  Antisense strand to SEQ ID NO: 1117464
ucccagaccauaguuucac

SEQ ID NO: 1117466 - RNA, 19 nt, Artificial Sequence
  Description of Artificial Sequence: Synthetic oligonucleotide
  Sense strand starting at position 542 of SEQ ID NO: 915935
gaaacuauggucugggaug

SEQ ID NO: 1117467 - RNA, 19 nt, Artificial Sequence
  Description of Artificial Sequence: Synthetic oligonucleotide
  Antisense strand to SEQ ID NO: 1117466
caucccagaccauaguuuc

SEQ ID NO: 1117468 - RNA, 19 nt, Artificial Sequence
  Description of Artificial Sequence: Synthetic oligonucleotide
  Sense strand starting at position 649 of SEQ ID NO: 915935
uugcauuauggucaucuca

SEQ ID NO: 1117469 - RNA, 19 nt, Artificial Sequence
  Description of Artificial Sequence: Synthetic oligonucleotide
  Antisense strand to SEQ ID NO: 1117468
ugagaugaccauaaugcaa

SEQ ID NO: 1117470 - RNA, 19 nt, Artificial Sequence
  Description of Artificial Sequence: Synthetic oligonucleotide
  Sense strand starting at position 840 of SEQ ID NO: 915935
ggcuaauuauccuugauua

SEQ ID NO: 1117471 - RNA, 19 nt, Artificial Sequence
  Description of Artificial Sequence: Synthetic oligonucleotide
  Antisense strand to SEQ ID NO: 1117470
uaaucaaggauaauuagcc

SEQ ID NO: 1117472 - RNA, 19 nt, Artificial Sequence
  Description of Artificial Sequence: Synthetic oligonucleotide
  Sense strand starting at position 841 of SEQ ID NO: 915935
gcuaauuauccuugauuag

SEQ ID NO: 1117473 - RNA, 19 nt, Artificial Sequence
  Description of Artificial Sequence: Synthetic oligonucleotide
  Antisense strand to SEQ ID NO: 1117472
cuaaucaaggauaauuagc

SEQ ID NO: 1117474 - RNA, 19 nt, Artificial Sequence
  Description of Artificial Sequence: Synthetic oligonucleotide
  Sense strand starting at position 880 of SEQ ID NO: 915935
ugcucacugguuuaacaaa

SEQ ID NO: 1117475 - RNA, 19 nt, Artificial Sequence
  Description of Artificial Sequence: Synthetic oligonucleotide
  Antisense strand to SEQ ID NO: 1117474
uuuguuaaaccagugagca

SEQ ID NO: 1117476 - RNA, 19 nt, Artificial Sequence
  Description of Artificial Sequence: Synthetic oligonucleotide
  Sense strand starting at position 903 of SEQ ID NO: 915935
ugcccuuaggcgucuauca

SEQ ID NO: 1117477 - RNA, 19 nt, Artificial Sequence
  Description of Artificial Sequence: Synthetic oligonucleotide
  Antisense strand to SEQ ID NO: 1117476
ugauagacgccuaagggca

SEQ ID NO: 1117478 - RNA, 19 nt, Artificial Sequence
  Description of Artificial Sequence: Synthetic oligonucleotide
  Sense strand starting at position 904 of SEQ ID NO: 915935
gcccuuaggcgucuaucau

SEQ ID NO: 1117479 - RNA, 19 nt, Artificial Sequence
  Description of Artificial Sequence: Synthetic oligonucleotide
  Antisense strand to SEQ ID NO: 1117478
augauagacgccuaagggc

SEQ ID NO: 1117480 - RNA, 19 nt, Artificial Sequence
  Description of Artificial Sequence: Synthetic oligonucleotide
  Sense strand starting at position 910 of SEQ ID NO: 915935
aggcgucuaucauuuguaa

SEQ ID NO: 1117481 - RNA, 19 nt, Artificial Sequence
  Description of Artificial Sequence: Synthetic oligonucleotide
  Antisense strand to SEQ ID NO: 1117480
uuacaaaugauagacgccu

SEQ ID NO: 1117482 - RNA, 19 nt, Artificial Sequence
  Description of Artificial Sequence: Synthetic oligonucleotide
  Sense strand starting at position 923 of SEQ ID NO: 915935
uuguaacuccuagaagcuu

SEQ ID NO: 1117483 - RNA, 19 nt, Artificial Sequence
  Description of Artificial Sequence: Synthetic oligonucleotide
  Antisense strand to SEQ ID NO: 1117482
aagcuucuaggaguuacaa

SEQ ID NO: 1117484 - RNA, 19 nt, Artificial Sequence
  Description of Artificial Sequence: Synthetic oligonucleotide
  Sense strand starting at position 1304 of SEQ ID NO: 915935
gcaaacuacgauugauaaa

SEQ ID NO: 1117485 - RNA, 19 nt, Artificial Sequence
  Description of Artificial Sequence: Synthetic oligonucleotide
  Antisense strand to SEQ ID NO: 1117484
uuuaucaaucguaguuugc

SEQ ID NO: 1117486 - RNA, 19 nt, Artificial Sequence
  Description of Artificial Sequence: Synthetic oligonucleotide
  Sense strand starting at position 1387 of SEQ ID NO: 915935
caacuauguuucuuggaga

SEQ ID NO: 1117487 - RNA, 19 nt, Artificial Sequence
  Description of Artificial Sequence: Synthetic oligonucleotide
  Antisense strand to SEQ ID NO: 1117486
ucuccaagaaacauaguug

SEQ ID NO: 1117488 - RNA, 19 nt, Artificial Sequence
  Description of Artificial Sequence: Synthetic oligonucleotide
  Sense strand starting at position 1898 of SEQ ID NO: 915935
guguaacauuuauauggag

SEQ ID NO: 1117489 - RNA, 19 nt, Artificial Sequence
  Description of Artificial Sequence: Synthetic oligonucleotide
  Antisense strand to SEQ ID NO: 1117488
cuccauauaaauguuacac

SEQ ID NO: 1117490 - RNA, 19 nt, Artificial Sequence
  Description of Artificial Sequence: Synthetic oligonucleotide
  Sense strand starting at position 1906 of SEQ ID NO: 915935
uuuauauggagacgucaag

SEQ ID NO: 1117491 - RNA, 19 nt, Artificial Sequence
  Description of Artificial Sequence: Synthetic oligonucleotide
  Antisense strand to SEQ ID NO: 1117490
cuugacgucuccauauaaa

SEQ ID NO: 1117492 - RNA, 19 nt, Artificial Sequence
  Description of Artificial Sequence: Synthetic oligonucleotide
  Sense strand starting at position 2097 of SEQ ID NO: 915935
ugcaguagucaagaacaug

SEQ ID NO: 1117493 - RNA, 19 nt, Artificial Sequence
  Description of Artificial Sequence: Synthetic oligonucleotide
  Antisense strand to SEQ ID NO: 1117492
cauguucuugacuacugca

SEQ ID NO: 1117494 - RNA, 19 nt, Artificial Sequence
  Description of Artificial Sequence: Synthetic oligonucleotide
  Sense strand starting at position 2138 of SEQ ID NO: 915935
cccagaguuccuuagucac

SEQ ID NO: 1117495 - RNA, 19 nt, Artificial Sequence
  Description of Artificial Sequence: Synthetic oligonucleotide
  Antisense strand to SEQ ID NO: 1117494
gugacuaaggaacucuggg

SEQ ID NO: 1117496 - RNA, 19 nt, Artificial Sequence
  Description of Artificial Sequence: Synthetic oligonucleotide
  Sense strand starting at position 2248 of SEQ ID NO: 915935
gaaauugcccaguagccua

SEQ ID NO: 1117497 - RNA, 19 nt, Artificial Sequence
  Description of Artificial Sequence: Synthetic oligonucleotide
  Antisense strand to SEQ ID NO: 1117496
uaggcuacugggcaauuuc

SEQ ID NO: 1117498 - RNA, 19 nt, Artificial Sequence
  Description of Artificial Sequence: Synthetic oligonucleotide
  Sense strand starting at position 2489 of SEQ ID NO: 915935
ggucuaugugcugcacuuu

SEQ ID NO: 1117499 - RNA, 19 nt, Artificial Sequence
  Description of Artificial Sequence: Synthetic oligonucleotide
  Antisense strand to SEQ ID NO: 1117498
aaagugcagcacauagacc

SEQ ID NO: 1117500 - RNA, 19 nt, Artificial Sequence
  Description of Artificial Sequence: Synthetic oligonucleotide
  Sense strand starting at position 2661 of SEQ ID NO: 915935
gugcccagcuucuuaauuu

SEQ ID NO: 1117501 - RNA, 19 nt, Artificial Sequence
  Description of Artificial Sequence: Synthetic oligonucleotide
  Antisense strand to SEQ ID NO: 1117500
aaauuaagaagcugggcac

SEQ ID NO: 1117502 - RNA, 19 nt, Artificial Sequence
  Description of Artificial Sequence: Synthetic oligonucleotide
  Sense strand starting at position 2718 of SEQ ID NO: 915935
gauuaugagauucguaagg

SEQ ID NO: 1117503 - RNA, 19 nt, Artificial Sequence
  Description of Artificial Sequence: Synthetic oligonucleotide
  Antisense strand to SEQ ID NO: 1117502
ccuuacgaaucucauaauc

SEQ ID NO: 1117504 - RNA, 19 nt, Artificial Sequence
  Description of Artificial Sequence: Synthetic oligonucleotide
  Sense strand starting at position 2724 of SEQ ID NO: 915935
gagauucguaagggcagau

SEQ ID NO: 1117505 - RNA, 19 nt, Artificial Sequence
  Description of Artificial Sequence: Synthetic oligonucleotide
  Antisense strand to SEQ ID NO: 1117504
aucugcccuuacgaaucuc

SEQ ID NO: 1117506 - RNA, 19 nt, Artificial Sequence
  Description of Artificial Sequence: Synthetic oligonucleotide
  Sense strand starting at position 2733 of SEQ ID NO: 915935
aagggcagauccuuuguca

SEQ ID NO: 1117507 - RNA, 19 nt, Artificial Sequence
  Description of Artificial Sequence: Synthetic oligonucleotide
  Antisense strand to SEQ ID NO: 1117506
ugacaaaggaucugcccuu

SEQ ID NO: 1117508 - RNA, 19 nt, Artificial Sequence
  Description of Artificial Sequence: Synthetic oligonucleotide
  Sense strand starting at position 2838 of SEQ ID NO: 915935
gugaaugaaugguuaaauu

SEQ ID NO: 1117509 - RNA, 19 nt, Artificial Sequence
  Description of Artificial Sequence: Synthetic oligonucleotide
  Antisense strand to SEQ ID NO: 1117508
aauuuaaccauucauucac

SEQ ID NO: 1117510 - RNA, 19 nt, Artificial Sequence
  Description of Artificial Sequence: Synthetic oligonucleotide
  Sense strand starting at position 2900 of SEQ ID NO: 915935
gguauauaacagugguuug

SEQ ID NO: 1117511 - RNA, 19 nt, Artificial Sequence
  Description of Artificial Sequence: Synthetic oligonucleotide
  Antisense strand to SEQ ID NO: 1117510
caaaccacuguuauauacc

SEQ ID NO: 1117512 - RNA, 19 nt, Artificial Sequence
  Description of Artificial Sequence: Synthetic oligonucleotide
  Sense strand starting at position 2903 of SEQ ID NO: 915935
auauaacagugguuuguaa

SEQ ID NO: 1117513 - RNA, 19 nt, Artificial Sequence
  Description of Artificial Sequence: Synthetic oligonucleotide
  Antisense strand to SEQ ID NO: 1117512
uuacaaaccacuguuauau

SEQ ID NO: 1117514 - RNA, 19 nt, Artificial Sequence
  Description of Artificial Sequence: Synthetic oligonucleotide
  Sense strand starting at position 2910 of SEQ ID NO: 915935
agugguuuguaaucugaaa

SEQ ID NO: 1117515 - RNA, 19 nt, Artificial Sequence
  Description of Artificial Sequence: Synthetic oligonucleotide
  Antisense strand to SEQ ID NO: 1117514
uuucagauuacaaaccacu

SEQ ID NO: 1117516 - RNA, 19 nt, Artificial Sequence
  Description of Artificial Sequence: Synthetic oligonucleotide
  Sense strand starting at position 2912 of SEQ ID NO: 915935
ugguuuguaaucugaaaug

SEQ ID NO: 1117517 - RNA, 19 nt, Artificial Sequence
  Description of Artificial Sequence: Synthetic oligonucleotide
  Antisense strand to SEQ ID NO: 1117516
cauuucagauuacaaacca

SEQ ID NO: 1117518 - RNA, 19 nt, Artificial Sequence
  Description of Artificial Sequence: Synthetic oligonucleotide
  Sense strand starting at position 3175 of SEQ ID NO: 915935
gaaguucugcccugagaaa

SEQ ID NO: 1117519 - RNA, 19 nt, Artificial Sequence
  Description of Artificial Sequence: Synthetic oligonucleotide
  Antisense strand to SEQ ID NO: 1117518
uuucucagggcagaacuuc

SEQ ID NO: 1117520 - RNA, 19 nt, Artificial Sequence
  Description of Artificial Sequence: Synthetic oligonucleotide
  Sense strand starting at position 3186 of SEQ ID NO: 915935
cugagaaaucuguaucugu

SEQ ID NO: 1117521 - RNA, 19 nt, Artificial Sequence
  Description of Artificial Sequence: Synthetic oligonucleotide
  Antisense strand to SEQ ID NO: 1117520
acagauacagauuucucag

SEQ ID NO: 1117522 - RNA, 19 nt, Artificial Sequence
  Description of Artificial Sequence: Synthetic oligonucleotide
  Sense strand starting at position 3189 of SEQ ID NO: 915935
agaaaucuguaucuguaag

SEQ ID NO: 1117523 - RNA, 19 nt, Artificial Sequence
  Description of Artificial Sequence: Synthetic oligonucleotide
  Antisense strand to SEQ ID NO: 1117522
cuuacagauacagauuucu

SEQ ID NO: 1117524 - RNA, 19 nt, Artificial Sequence
  Description of Artificial Sequence: Synthetic oligonucleotide
  Sense strand starting at position 3195 of SEQ ID NO: 915935
cuguaucuguaagcauuua

SEQ ID NO: 1117525 - RNA, 19 nt, Artificial Sequence
  Description of Artificial Sequence: Synthetic oligonucleotide
  Antisense strand to SEQ ID NO: 1117524
uaaaugcuuacagauacag

SEQ ID NO: 1117526 - RNA, 19 nt, Artificial Sequence
  Description of Artificial Sequence: Synthetic oligonucleotide
  Sense strand starting at position 3367 of SEQ ID NO: 915935
cauauacuagugugagaaa

SEQ ID NO: 1117527 - RNA, 19 nt, Artificial Sequence
  Description of Artificial Sequence: Synthetic oligonucleotide
  Antisense strand to SEQ ID NO: 1117526
uuucucacacuaguauaug

SEQ ID NO: 1117528 - RNA, 19 nt, Artificial Sequence
  Description of Artificial Sequence: Synthetic oligonucleotide
  Sense strand starting at position 3688 of SEQ ID NO: 915935
guucaugggcguuggauuu

SEQ ID NO: 1117529 - RNA, 19 nt, Artificial Sequence
  Description of Artificial Sequence: Synthetic oligonucleotide
  Antisense strand to SEQ ID NO: 1117528
aaauccaacgcccaugaac

SEQ ID NO: 1117530 - RNA, 19 nt, Artificial Sequence
  Description of Artificial Sequence: Synthetic oligonucleotide
  Sense strand starting at position 3730 of SEQ ID NO: 915935
cucaaauuagauuguggua

SEQ ID NO: 1117531 - RNA, 19 nt, Artificial Sequence
  Description of Artificial Sequence: Synthetic oligonucleotide
  Antisense strand to SEQ ID NO: 1117530
uaccacaaucuaauuugag

SEQ ID NO: 1117532 - RNA, 19 nt, Artificial Sequence
  Description of Artificial Sequence: Synthetic oligonucleotide
  Sense strand starting at position 3794 of SEQ ID NO: 915935
cccuuuaaauaggugaauu

SEQ ID NO: 1117533 - RNA, 19 nt, Artificial Sequence
  Description of Artificial Sequence: Synthetic oligonucleotide
  Antisense strand to SEQ ID NO: 1117532
aauucaccuauuuaaaggg

SEQ ID NO: 1117534 - RNA, 19 nt, Artificial Sequence
  Description of Artificial Sequence: Synthetic oligonucleotide
  Sense strand starting at position 29 of SEQ ID NO: 915936
gagagagcucaauguguga

SEQ ID NO: 1117535 - RNA, 19 nt, Artificial Sequence
  Description of Artificial Sequence: Synthetic oligonucleotide
  Antisense strand to SEQ ID NO: 1117534
ucacacauugagcucucuc

SEQ ID NO: 1117536 - RNA, 19 nt, Artificial Sequence
  Description of Artificial Sequence: Synthetic oligonucleotide
  Sense strand starting at position 31 of SEQ ID NO: 915936
gagagcucaaugugugaga

SEQ ID NO: 1117537 - RNA, 19 nt, Artificial Sequence
  Description of Artificial Sequence: Synthetic oligonucleotide
  Antisense strand to SEQ ID NO: 1117536
ucucacacauugagcucuc

SEQ ID NO: 1117538 - RNA, 19 nt, Artificial Sequence
  Description of Artificial Sequence: Synthetic oligonucleotide
  Sense strand starting at position 32 of SEQ ID NO: 915936
agagcucaaugugugagaa

SEQ ID NO: 1117539 - RNA, 19 nt, Artificial Sequence
  Description of Artificial Sequence: Synthetic oligonucleotide
  Antisense strand to SEQ ID NO: 1117538
uucucacacauugagcucu

SEQ ID NO: 1117540 - RNA, 19 nt, Artificial Sequence
  Description of Artificial Sequence: Synthetic oligonucleotide
  Sense strand starting at position 33 of SEQ ID NO: 915936
gagcucaaugugugagaaa

SEQ ID NO: 1117541 - RNA, 19 nt, Artificial Sequence
  Description of Artificial Sequence: Synthetic oligonucleotide
  Antisense strand to SEQ ID NO: 1117540
uuucucacacauugagcuc

SEQ ID NO: 1117542 - RNA, 19 nt, Artificial Sequence
  Description of Artificial Sequence: Synthetic oligonucleotide
  Sense strand starting at position 42 of SEQ ID NO: 915936
gugugagaaacugaugagu

SEQ ID NO: 1117543 - RNA, 19 nt, Artificial Sequence
  Description of Artificial Sequence: Synthetic oligonucleotide
  Antisense strand to SEQ ID NO: 1117542
acucaucaguuucucacac

SEQ ID NO: 1117544 - RNA, 19 nt, Artificial Sequence
  Description of Artificial Sequence: Synthetic oligonucleotide
  Sense strand starting at position 102 of SEQ ID NO: 915936
uuaggacacucugugucaa

SEQ ID NO: 1117545 - RNA, 19 nt, Artificial Sequence
  Description of Artificial Sequence: Synthetic oligonucleotide
  Antisense strand to SEQ ID NO: 1117544
uugacacagaguguccuaa

SEQ ID NO: 1117546 - RNA, 19 nt, Artificial Sequence
  Description of Artificial Sequence: Synthetic oligonucleotide
  Sense strand starting at position 103 of SEQ ID NO: 915936
uaggacacucugugucaau

SEQ ID NO: 1117547 - RNA, 19 nt, Artificial Sequence
  Description of Artificial Sequence: Synthetic oligonucleotide
  Antisense strand to SEQ ID NO: 1117546
auugacacagaguguccua

SEQ ID NO: 1117548 - RNA, 19 nt, Artificial Sequence
  Description of Artificial Sequence: Synthetic oligonucleotide
  Sense strand starting at position 104 of SEQ ID NO: 915936
aggacacucugugucaauu

SEQ ID NO: 1117549 - RNA, 19 nt, Artificial Sequence
  Description of Artificial Sequence: Synthetic oligonucleotide
  Antisense strand to SEQ ID NO: 1117548
aauugacacagaguguccu

SEQ ID NO: 1117550 - RNA, 19 nt, Artificial Sequence
  Description of Artificial Sequence: Synthetic oligonucleotide
  Sense strand starting at position 130 of SEQ ID NO: 915936
gacaauugacagugacuca

SEQ ID NO: 1117551 - RNA, 19 nt, Artificial Sequence
  Description of Artificial Sequence: Synthetic oligonucleotide
  Antisense strand to SEQ ID NO: 1117550
ugagucacugucaauuguc

SEQ ID NO: 1117552 - RNA, 19 nt, Artificial Sequence
  Description of Artificial Sequence: Synthetic oligonucleotide
  Sense strand starting at position 285 of SEQ ID NO: 915936
uuucucacuguuugaagua

SEQ ID NO: 1117553 - RNA, 19 nt, Artificial Sequence
  Description of Artificial Sequence: Synthetic oligonucleotide
  Antisense strand to SEQ ID NO: 1117552
uacuucaaacagugagaaa

SEQ ID NO: 1117554 - RNA, 19 nt, Artificial Sequence
  Description of Artificial Sequence: Synthetic oligonucleotide
  Sense strand starting at position 431 of SEQ ID NO: 915936
aagguuuguacguauuaug

SEQ ID NO: 1117555 - RNA, 19 nt, Artificial Sequence
  Description of Artificial Sequence: Synthetic oligonucleotide
  Antisense strand to SEQ ID NO: 1117554
cauaauacguacaaaccuu

SEQ ID NO: 1117556 - RNA, 19 nt, Artificial Sequence
  Description of Artificial Sequence: Synthetic oligonucleotide
  Sense strand starting at position 590 of SEQ ID NO: 915936
uuccucuaagaguggaauu

SEQ ID NO: 1117557 - RNA, 19 nt, Artificial Sequence
  Description of Artificial Sequence: Synthetic oligonucleotide
  Antisense strand to SEQ ID NO: 1117556
aauuccacucuuagaggaa

SEQ ID NO: 1117558 - RNA, 19 nt, Artificial Sequence
  Description of Artificial Sequence: Synthetic oligonucleotide
  Sense strand starting at position 1093 of SEQ ID NO: 915936
aggguucgccggcaaagaa

SEQ ID NO: 1117559 - RNA, 19 nt, Artificial Sequence
  Description of Artificial Sequence: Synthetic oligonucleotide
  Antisense strand to SEQ ID NO: 1117558
uucuuugccggcgaacccu

SEQ ID NO: 1117560 - RNA, 19 nt, Artificial Sequence
  Description of Artificial Sequence: Synthetic oligonucleotide
  Sense strand starting at position 1131 of SEQ ID NO: 915936
cuuauauccgagcaaauag

SEQ ID NO: 1117561 - RNA, 19 nt, Artificial Sequence
  Description of Artificial Sequence: Synthetic oligonucleotide
  Antisense strand to SEQ ID NO: 1117560
cuauuugcucggauauaag

SEQ ID NO: 1117562 - RNA, 19 nt, Artificial Sequence
  Description of Artificial Sequence: Synthetic oligonucleotide
  Sense strand starting at position 1329 of SEQ ID NO: 915936
caugguauuagugggcaau

SEQ ID NO: 1117563 - RNA, 19 nt, Artificial Sequence
  Description of Artificial Sequence: Synthetic oligonucleotide
  Antisense strand to SEQ ID NO: 1117562
auugcccacuaauaccaug

SEQ ID NO: 1117564 - RNA, 19 nt, Artificial Sequence
  Description of Artificial Sequence: Synthetic oligonucleotide
  Sense strand starting at position 1330 of SEQ ID NO: 915936
augguauuagugggcaauu

SEQ ID NO: 1117565 - RNA, 19 nt, Artificial Sequence
  Description of Artificial Sequence: Synthetic oligonucleotide
  Antisense strand to SEQ ID NO: 1117564
aauugcccacuaauaccau

SEQ ID NO: 1117566 - RNA, 19 nt, Artificial Sequence
  Description of Artificial Sequence: Synthetic oligonucleotide
  Sense strand starting at position 1499 of SEQ ID NO: 915936
ggcagagucacguaggaug

SEQ ID NO: 1117567 - RNA, 19 nt, Artificial Sequence
  Description of Artificial Sequence: Synthetic oligonucleotide
  Antisense strand to SEQ ID NO: 1117566
cauccuacgugacucugcc

SEQ ID NO: 1117568 - RNA, 19 nt, Artificial Sequence
  Description of Artificial Sequence: Synthetic oligonucleotide
  Sense strand starting at position 1664 of SEQ ID NO: 915936
ccucgaagagguggagauu

SEQ ID NO: 1117569 - RNA, 19 nt, Artificial Sequence
  Description of Artificial Sequence: Synthetic oligonucleotide
  Antisense strand to SEQ ID NO: 1117568
aaucuccaccucuucgagg

SEQ ID NO: 1117570 - RNA, 19 nt, Artificial Sequence
  Description of Artificial Sequence: Synthetic oligonucleotide
  Sense strand starting at position 2188 of SEQ ID NO: 915936
cgagaaugcgcgccacgaa

SEQ ID NO: 1117571 - RNA, 19 nt, Artificial Sequence
  Description of Artificial Sequence: Synthetic oligonucleotide
  Antisense strand to SEQ ID NO: 1117570
uucguggcgcgcauucucg

SEQ ID NO: 1117572 - RNA, 19 nt, Artificial Sequence
  Description of Artificial Sequence: Synthetic oligonucleotide
  Sense strand starting at position 2225 of SEQ ID NO: 915936
cagauauuucgcgagcauc

SEQ ID NO: 1117573 - RNA, 19 nt, Artificial Sequence
  Description of Artificial Sequence: Synthetic oligonucleotide
  Antisense strand to SEQ ID NO: 1117572
gaugcucgcgaaauaucug

SEQ ID NO: 1117574 - RNA, 19 nt, Artificial Sequence
  Description of Artificial Sequence: Synthetic oligonucleotide
  Sense strand starting at position 2235 of SEQ ID NO: 915936
gcgagcauccuuguuuauu

SEQ ID NO: 1117575 - RNA, 19 nt, Artificial Sequence
  Description of Artificial Sequence: Synthetic oligonucleotide
  Antisense strand to SEQ ID NO: 1117574
aauaaacaaggaugcucgc

SEQ ID NO: 1117576 - RNA, 19 nt, Artificial Sequence
  Description of Artificial Sequence: Synthetic oligonucleotide
  Sense strand starting at position 2397 of SEQ ID NO: 915936
gggauugacauuugugcgu

SEQ ID NO: 1117577 - RNA, 19 nt, Artificial Sequence
  Description of Artificial Sequence: Synthetic oligonucleotide
  Antisense strand to SEQ ID NO: 1117576
acgcacaaaugucaauccc

SEQ ID NO: 1117578 - RNA, 19 nt, Artificial Sequence
  Description of Artificial Sequence: Synthetic oligonucleotide
  Sense strand starting at position 2477 of SEQ ID NO: 915936
uuuagauuucccugcgcca

SEQ ID NO: 1117579 - RNA, 19 nt, Artificial Sequence
  Description of Artificial Sequence: Synthetic oligonucleotide
  Antisense strand to SEQ ID NO: 1117578
uggcgcagggaaaucuaaa

SEQ ID NO: 1117580 - RNA, 19 nt, Artificial Sequence
  Description of Artificial Sequence: Synthetic oligonucleotide
  Sense strand starting at position 2666 of SEQ ID NO: 915936
ucgcaauauuuagaaagag

SEQ ID NO: 1117581 - RNA, 19 nt, Artificial Sequence
  Description of Artificial Sequence: Synthetic oligonucleotide
  Antisense strand to SEQ ID NO: 1117580
cucuuucuaaauauugcga

SEQ ID NO: 1117582 - RNA, 19 nt, Artificial Sequence
  Description of Artificial Sequence: Synthetic oligonucleotide
  Sense strand starting at position 2703 of SEQ ID NO: 915936
agaaguacuauucgguuua

SEQ ID NO: 1117583 - RNA, 19 nt, Artificial Sequence
  Description of Artificial Sequence: Synthetic oligonucleotide
  Antisense strand to SEQ ID NO: 1117582
uaaaccgaauaguacuucu

SEQ ID NO: 1117584 - RNA, 19 nt, Artificial Sequence
  Description of Artificial Sequence: Synthetic oligonucleotide
  Sense strand starting at position 2705 of SEQ ID NO: 915936
aaguacuauucgguuuaga

SEQ ID NO: 1117585 - RNA, 19 nt, Artificial Sequence
  Description of Artificial Sequence: Synthetic oligonucleotide
  Antisense strand to SEQ ID NO: 1117584
ucuaaaccgaauaguacuu

SEQ ID NO: 1117586 - RNA, 19 nt, Artificial Sequence
  Description of Artificial Sequence: Synthetic oligonucleotide
  Sense strand starting at position 2708 of SEQ ID NO: 915936
uacuauucgguuuagaaag

SEQ ID NO: 1117587 - RNA, 19 nt, Artificial Sequence
  Description of Artificial Sequence: Synthetic oligonucleotide
  Antisense strand to SEQ ID NO: 1117586
cuuucuaaaccgaauagua

SEQ ID NO: 1117588 - RNA, 19 nt, Artificial Sequence
  Description of Artificial Sequence: Synthetic oligonucleotide
  Sense strand starting at position 2869 of SEQ ID NO: 915936
caguuuauucugggugaaa

SEQ ID NO: 1117589 - RNA, 19 nt, Artificial Sequence
  Description of Artificial Sequence: Synthetic oligonucleotide
  Antisense strand to SEQ ID NO: 1117588
uuucacccagaauaaacug

SEQ ID NO: 1117590 - RNA, 19 nt, Artificial Sequence
  Description of Artificial Sequence: Synthetic oligonucleotide
  Sense strand starting at position 2870 of SEQ ID NO: 915936
aguuuauucugggugaaag

SEQ ID NO: 1117591 - RNA, 19 nt, Artificial Sequence
  Description of Artificial Sequence: Synthetic oligonucleotide
  Antisense strand to SEQ ID NO: 1117590
cuuucacccagaauaaacu

SEQ ID NO: 1117592 - RNA, 19 nt, Artificial Sequence
  Description of Artificial Sequence: Synthetic oligonucleotide
  Sense strand starting at position 2878 of SEQ ID NO: 915936
cugggugaaagcgguuaaa

SEQ ID NO: 1117593 - RNA, 19 nt, Artificial Sequence
  Description of Artificial Sequence: Synthetic oligonucleotide
  Antisense strand to SEQ ID NO: 1117592
uuuaaccgcuuucacccag

SEQ ID NO: 1117594 - RNA, 19 nt, Artificial Sequence
  Description of Artificial Sequence: Synthetic oligonucleotide
  Sense strand starting at position 3185 of SEQ ID NO: 915936
uggcgcgaucucgucuaau

SEQ ID NO: 1117595 - RNA, 19 nt, Artificial Sequence
  Description of Artificial Sequence: Synthetic oligonucleotide
  Antisense strand to SEQ ID NO: 1117594
auuagacgagaucgcgcca

SEQ ID NO: 1117596 - RNA, 19 nt, Artificial Sequence
  Description of Artificial Sequence: Synthetic oligonucleotide
  Sense strand starting at position 3187 of SEQ ID NO: 915936
gcgcgaucucgucuaauug

SEQ ID NO: 1117597 - RNA, 19 nt, Artificial Sequence
  Description of Artificial Sequence: Synthetic oligonucleotide
  Antisense strand to SEQ ID NO: 1117596
caauuagacgagaucgcgc

SEQ ID NO: 1117598 - RNA, 19 nt, Artificial Sequence
  Description of Artificial Sequence: Synthetic oligonucleotide
  Sense strand starting at position 3424 of SEQ ID NO: 915936
ggccuccaucuguauuaac

SEQ ID NO: 1117599 - RNA, 19 nt, Artificial Sequence
  Description of Artificial Sequence: Synthetic oligonucleotide
  Antisense strand to SEQ ID NO: 1117598
guuaauacagauggaggcc

SEQ ID NO: 1117600 - RNA, 19 nt, Artificial Sequence
  Description of Artificial Sequence: Synthetic oligonucleotide
  Sense strand starting at position 3464 of SEQ ID NO: 915936
aagggcuucuguccaauua

SEQ ID NO: 1117601 - RNA, 19 nt, Artificial Sequence
  Description of Artificial Sequence: Synthetic oligonucleotide
  Antisense strand to SEQ ID NO: 1117600
uaauuggacagaagcccuu

SEQ ID NO: 1117602 - RNA, 19 nt, Artificial Sequence
  Description of Artificial Sequence: Synthetic oligonucleotide
  Sense strand starting at position 3465 of SEQ ID NO: 915936
agggcuucuguccaauuau

SEQ ID NO: 1117603 - RNA, 19 nt, Artificial Sequence
  Description of Artificial Sequence: Synthetic oligonucleotide
  Antisense strand to SEQ ID NO: 1117602
auaauuggacagaagcccu

SEQ ID NO: 1117604 - RNA, 19 nt, Artificial Sequence
  Description of Artificial Sequence: Synthetic oligonucleotide
  Sense strand starting at position 3771 of SEQ ID NO: 915936
uguguuagaaaguguuaag

SEQ ID NO: 1117605 - RNA, 19 nt, Artificial Sequence
  Description of Artificial Sequence: Synthetic oligonucleotide
  Antisense strand to SEQ ID NO: 1117604
cuuaacacuuucuaacaca

SEQ ID NO: 1117606 - RNA, 19 nt, Artificial Sequence
  Description of Artificial Sequence: Synthetic oligonucleotide
  Sense strand starting at position 3846 of SEQ ID NO: 915936
cuaauaauggauuguauug

SEQ ID NO: 1117607 - RNA, 19 nt, Artificial Sequence
  Description of Artificial Sequence: Synthetic oligonucleotide
  Antisense strand to SEQ ID NO: 1117606
caauacaauccauuauuag

SEQ ID NO: 1117608 - RNA, 19 nt, Artificial Sequence
  Description of Artificial Sequence: Synthetic oligonucleotide
  Sense strand starting at position 3895 of SEQ ID NO: 915936
agugauccuugagcagaaa

SEQ ID NO: 1117609 - RNA, 19 nt, Artificial Sequence
  Description of Artificial Sequence: Synthetic oligonucleotide
  Antisense strand to SEQ ID NO: 1117608
uuucugcucaaggaucacu

SEQ ID NO: 1117610 - RNA, 19 nt, Artificial Sequence
  Description of Artificial Sequence: Synthetic oligonucleotide
  Sense strand starting at position 3896 of SEQ ID NO: 915936
gugauccuugagcagaaau

SEQ ID NO: 1117611 - RNA, 19 nt, Artificial Sequence
  Description of Artificial Sequence: Synthetic oligonucleotide
  Antisense strand to SEQ ID NO: 1117610
auuucugcucaaggaucac

SEQ ID NO: 1117612 - RNA, 19 nt, Artificial Sequence
  Description of Artificial Sequence: Synthetic oligonucleotide
  Sense strand starting at position 3971 of SEQ ID NO: 915936
aagugaguuccaggacaaa

SEQ ID NO: 1117613 - RNA, 19 nt, Artificial Sequence
  Description of Artificial Sequence: Synthetic oligonucleotide
  Antisense strand to SEQ ID NO: 1117612
uuuguccuggaacucacuu

SEQ ID NO: 1117614 - RNA, 19 nt, Artificial Sequence
  Description of Artificial Sequence: Synthetic oligonucleotide
  Sense strand starting at position 45 of SEQ ID NO: 915937
gaaauuaguugggccugau

SEQ ID NO: 1117615 - RNA, 19 nt, Artificial Sequence
  Description of Artificial Sequence: Synthetic oligonucleotide
  Antisense strand to SEQ ID NO: 1117614
aucaggcccaacuaauuuc

SEQ ID NO: 1117616 - RNA, 19 nt, Artificial Sequence
  Description of Artificial Sequence: Synthetic oligonucleotide
  Sense strand starting at position 99 of SEQ ID NO: 915937
cuaagaggaucacuugagu

SEQ ID NO: 1117617 - RNA, 19 nt, Artificial Sequence
  Description of Artificial Sequence: Synthetic oligonucleotide
  Antisense strand to SEQ ID NO: 1117616
acucaagugauccucuuag

SEQ ID NO: 1117618 - RNA, 19 nt, Artificial Sequence
  Description of Artificial Sequence: Synthetic oligonucleotide
  Sense strand starting at position 121 of SEQ ID NO: 915937
agagaucaaggcugaaagu

SEQ ID NO: 1117619 - RNA, 19 nt, Artificial Sequence
  Description of Artificial Sequence: Synthetic oligonucleotide
  Antisense strand to SEQ ID NO: 1117618
acuuucagccuugaucucu

SEQ ID NO: 1117620 - RNA, 19 nt, Artificial Sequence
  Description of Artificial Sequence: Synthetic oligonucleotide
  Sense strand starting at position 138 of SEQ ID NO: 915937
gugauaccuaauugauggu

SEQ ID NO: 1117621 - RNA, 19 nt, Artificial Sequence
  Description of Artificial Sequence: Synthetic oligonucleotide
  Antisense strand to SEQ ID NO: 1117620
accaucaauuagguaucac

SEQ ID NO: 1117622 - RNA, 19 nt, Artificial Sequence
  Description of Artificial Sequence: Synthetic oligonucleotide
  Sense strand starting at position 716 of SEQ ID NO: 915937
gagagagcucaauguguga

SEQ ID NO: 1117623 - RNA, 19 nt, Artificial Sequence
  Description of Artificial Sequence: Synthetic oligonucleotide
  Antisense strand to SEQ ID NO: 1117622
ucacacauugagcucucuc

SEQ ID NO: 1117624 - RNA, 19 nt, Artificial Sequence
  Description of Artificial Sequence: Synthetic oligonucleotide
  Sense strand starting at position 718 of SEQ ID NO: 915937
gagagcucaaugugugaga

SEQ ID NO: 1117625 - RNA, 19 nt, Artificial Sequence
  Description of Artificial Sequence: Synthetic oligonucleotide
  Antisense strand to SEQ ID NO: 1117624
ucucacacauugagcucuc

SEQ ID NO: 1117626 - RNA, 19 nt, Artificial Sequence
  Description of Artificial Sequence: Synthetic oligonucleotide
  Sense strand starting at position 719 of SEQ ID NO: 915937
agagcucaaugugugagaa

SEQ ID NO: 1117627 - RNA, 19 nt, Artificial Sequence
  Description of Artificial Sequence: Synthetic oligonucleotide
  Antisense strand to SEQ ID NO: 1117626
uucucacacauugagcucu

SEQ ID NO: 1117628 - RNA, 19 nt, Artificial Sequence
  Description of Artificial Sequence: Synthetic oligonucleotide
  Sense strand starting at position 720 of SEQ ID NO: 915937
gagcucaaugugugagaaa

SEQ ID NO: 1117629 - RNA, 19 nt, Artificial Sequence
  Description of Artificial Sequence: Synthetic oligonucleotide
  Antisense strand to SEQ ID NO: 1117628
uuucucacacauugagcuc

SEQ ID NO: 1117630 - RNA, 19 nt, Artificial Sequence
  Description of Artificial Sequence: Synthetic oligonucleotide
  Sense strand starting at position 729 of SEQ ID NO: 915937
gugugagaaacugaugagu

SEQ ID NO: 1117631 - RNA, 19 nt, Artificial Sequence
  Description of Artificial Sequence: Synthetic oligonucleotide
  Antisense strand to SEQ ID NO: 1117630
acucaucaguuucucacac

SEQ ID NO: 1117632 - RNA, 19 nt, Artificial Sequence
  Description of Artificial Sequence: Synthetic oligonucleotide
  Sense strand starting at position 789 of SEQ ID NO: 915937
uuaggacacucugugucaa

SEQ ID NO: 1117633 - RNA, 19 nt, Artificial Sequence
  Description of Artificial Sequence: Synthetic oligonucleotide
  Antisense strand to SEQ ID NO: 1117632
uugacacagaguguccuaa

SEQ ID NO: 1117634 - RNA, 19 nt, Artificial Sequence
  Description of Artificial Sequence: Synthetic oligonucleotide
  Sense strand starting at position 790 of SEQ ID NO: 915937
uaggacacucugugucaau

SEQ ID NO: 1117635 - RNA, 19 nt, Artificial Sequence
  Description of Artificial Sequence: Synthetic oligonucleotide
  Antisense strand to SEQ ID NO: 1117634
auugacacagaguguccua

SEQ ID NO: 1117636 - RNA, 19 nt, Artificial Sequence
  Description of Artificial Sequence: Synthetic oligonucleotide
  Sense strand starting at position 791 of SEQ ID NO: 915937
aggacacucugugucaauu

SEQ ID NO: 1117637 - RNA, 19 nt, Artificial Sequence
  Description of Artificial Sequence: Synthetic oligonucleotide
  Antisense strand to SEQ ID NO: 1117636
aauugacacagaguguccu

SEQ ID NO: 1117638 - RNA, 19 nt, Artificial Sequence
  Description of Artificial Sequence: Synthetic oligonucleotide
  Sense strand starting at position 800 of SEQ ID NO: 915937
ugugucaauugucugauga

SEQ ID NO: 1117639 - RNA, 19 nt, Artificial Sequence
  Description of Artificial Sequence: Synthetic oligonucleotide
  Antisense strand to SEQ ID NO: 1117638
ucaucagacaauugacaca

SEQ ID NO: 1117640 - RNA, 19 nt, Artificial Sequence
  Description of Artificial Sequence: Synthetic oligonucleotide
  Sense strand starting at position 817 of SEQ ID NO: 915937
gacaauugacagugacuca

SEQ ID NO: 1117641 - RNA, 19 nt, Artificial Sequence
  Description of Artificial Sequence: Synthetic oligonucleotide
  Antisense strand to SEQ ID NO: 1117640
ugagucacugucaauuguc

SEQ ID NO: 1117642 - RNA, 19 nt, Artificial Sequence
  Description of Artificial Sequence: Synthetic oligonucleotide
  Sense strand starting at position 972 of SEQ ID NO: 915937
uuucucacuguuugaagua

SEQ ID NO: 1117643 - RNA, 19 nt, Artificial Sequence
  Description of Artificial Sequence: Synthetic oligonucleotide
  Antisense strand to SEQ ID NO: 1117642
uacuucaaacagugagaaa

SEQ ID NO: 1117644 - RNA, 19 nt, Artificial Sequence
  Description of Artificial Sequence: Synthetic oligonucleotide
  Sense strand starting at position 979 of SEQ ID NO: 915937
cuguuugaaguaugagcua

SEQ ID NO: 1117645 - RNA, 19 nt, Artificial Sequence
  Description of Artificial Sequence: Synthetic oligonucleotide
  Antisense strand to SEQ ID NO: 1117644
uagcucauacuucaaacag

SEQ ID NO: 1117646 - RNA, 19 nt, Artificial Sequence
  Description of Artificial Sequence: Synthetic oligonucleotide
  Sense strand starting at position 1118 of SEQ ID NO: 915937
aagguuuguacguauuaug

SEQ ID NO: 1117647 - RNA, 19 nt, Artificial Sequence
  Description of Artificial Sequence: Synthetic oligonucleotide
  Antisense strand to SEQ ID NO: 1117646
cauaauacguacaaaccuu

SEQ ID NO: 1117648 - RNA, 19 nt, Artificial Sequence
  Description of Artificial Sequence: Synthetic oligonucleotide
  Sense strand starting at position 1277 of SEQ ID NO: 915937
uuccucuaagaguggaauu

SEQ ID NO: 1117649 - RNA, 19 nt, Artificial Sequence
  Description of Artificial Sequence: Synthetic oligonucleotide
  Antisense strand to SEQ ID NO: 1117648
aauuccacucuuagaggaa

SEQ ID NO: 1117650 - RNA, 19 nt, Artificial Sequence
  Description of Artificial Sequence: Synthetic oligonucleotide
  Sense strand starting at position 1563 of SEQ ID NO: 915937
cgugacgcucaccaugaua

SEQ ID NO: 1117651 - RNA, 19 nt, Artificial Sequence
  Description of Artificial Sequence: Synthetic oligonucleotide
  Antisense strand to SEQ ID NO: 1117650
uaucauggugagcgucacg

SEQ ID NO: 1117652 - RNA, 19 nt, Artificial Sequence
  Description of Artificial Sequence: Synthetic oligonucleotide
  Sense strand starting at position 1780 of SEQ ID NO: 915937
aggguucgccggcaaagaa

SEQ ID NO: 1117653 - RNA, 19 nt, Artificial Sequence
  Description of Artificial Sequence: Synthetic oligonucleotide
  Antisense strand to SEQ ID NO: 1117652
uucuuugccggcgaacccu

SEQ ID NO: 1117654 - RNA, 19 nt, Artificial Sequence
  Description of Artificial Sequence: Synthetic oligonucleotide
  Sense strand starting at position 1818 of SEQ ID NO: 915937
cuuauauccgagcaaauag

SEQ ID NO: 1117655 - RNA, 19 nt, Artificial Sequence
  Description of Artificial Sequence: Synthetic oligonucleotide
  Antisense strand to SEQ ID NO: 1117654
cuauuugcucggauauaag

SEQ ID NO: 1117656 - RNA, 19 nt, Artificial Sequence
  Description of Artificial Sequence: Synthetic oligonucleotide
  Sense strand starting at position 2016 of SEQ ID NO: 915937
caugguauuagugggcaau

SEQ ID NO: 1117657 - RNA, 19 nt, Artificial Sequence
  Description of Artificial Sequence: Synthetic oligonucleotide
  Antisense strand to SEQ ID NO: 1117656
auugcccacuaauaccaug

SEQ ID NO: 1117658 - RNA, 19 nt, Artificial Sequence
  Description of Artificial Sequence: Synthetic oligonucleotide
  Sense strand starting at position 2017 of SEQ ID NO: 915937
augguauuagugggcaauu

SEQ ID NO: 1117659 - RNA, 19 nt, Artificial Sequence
  Description of Artificial Sequence: Synthetic oligonucleotide
  Antisense strand to SEQ ID NO: 1117658
aauugcccacuaauaccau

SEQ ID NO: 1117660 - RNA, 19 nt, Artificial Sequence
  Description of Artificial Sequence: Synthetic oligonucleotide
  Sense strand starting at position 2186 of SEQ ID NO: 915937
ggcagagucacguaggaug

SEQ ID NO: 1117661 - RNA, 19 nt, Artificial Sequence
  Description of Artificial Sequence: Synthetic oligonucleotide
  Antisense strand to SEQ ID NO: 1117660
cauccuacgugacucugcc

SEQ ID NO: 1117662 - RNA, 19 nt, Artificial Sequence
  Description of Artificial Sequence: Synthetic oligonucleotide
  Sense strand starting at position 2351 of SEQ ID NO: 915937
ccucgaagagguggagauu

SEQ ID NO: 1117663 - RNA, 19 nt, Artificial Sequence
  Description of Artificial Sequence: Synthetic oligonucleotide
  Antisense strand to SEQ ID NO: 1117662
aaucuccaccucuucgagg

SEQ ID NO: 1117664 - RNA, 19 nt, Artificial Sequence
  Description of Artificial Sequence: Synthetic oligonucleotide
  Sense strand starting at position 2875 of SEQ ID NO: 915937
cgagaaugcgcgccacgaa

SEQ ID NO: 1117665 - RNA, 19 nt, Artificial Sequence
  Description of Artificial Sequence: Synthetic oligonucleotide
  Antisense strand to SEQ ID NO: 1117664
uucguggcgcgcauucucg

SEQ ID NO: 1117666 - RNA, 19 nt, Artificial Sequence
  Description of Artificial Sequence: Synthetic oligonucleotide
  Sense strand starting at position 2912 of SEQ ID NO: 915937
cagauauuucgcgagcauc

SEQ ID NO: 1117667 - RNA, 19 nt, Artificial Sequence
  Description of Artificial Sequence: Synthetic oligonucleotide
  Antisense strand to SEQ ID NO: 1117666
gaugcucgcgaaauaucug

SEQ ID NO: 1117668 - RNA, 19 nt, Artificial Sequence
  Description of Artificial Sequence: Synthetic oligonucleotide
  Sense strand starting at position 2922 of SEQ ID NO: 915937
gcgagcauccuuguuuauu

SEQ ID NO: 1117669 - RNA, 19 nt, Artificial Sequence
  Description of Artificial Sequence: Synthetic oligonucleotide
  Antisense strand to SEQ ID NO: 1117668
aauaaacaaggaugcucgc

SEQ ID NO: 1117670 - RNA, 19 nt, Artificial Sequence
  Description of Artificial Sequence: Synthetic oligonucleotide
  Sense strand starting at position 2988 of SEQ ID NO: 915937
aaggaaaccucggagaaac

SEQ ID NO: 1117671 - RNA, 19 nt, Artificial Sequence
  Description of Artificial Sequence: Synthetic oligonucleotide
  Antisense strand to SEQ ID NO: 1117670
guuucuccgagguuuccuu

SEQ ID NO: 1117672 - RNA, 19 nt, Artificial Sequence
  Description of Artificial Sequence: Synthetic oligonucleotide
  Sense strand starting at position 3084 of SEQ ID NO: 915937
gggauugacauuugugcgu

SEQ ID NO: 1117673 - RNA, 19 nt, Artificial Sequence
  Description of Artificial Sequence: Synthetic oligonucleotide
  Antisense strand to SEQ ID NO: 1117672
acgcacaaaugucaauccc

SEQ ID NO: 1117674 - RNA, 19 nt, Artificial Sequence
  Description of Artificial Sequence: Synthetic oligonucleotide
  Sense strand starting at position 3164 of SEQ ID NO: 915937
uuuagauuucccugcgcca

SEQ ID NO: 1117675 - RNA, 19 nt, Artificial Sequence
  Description of Artificial Sequence: Synthetic oligonucleotide
  Antisense strand to SEQ ID NO: 1117674
uggcgcagggaaaucuaaa

SEQ ID NO: 1117676 - RNA, 19 nt, Artificial Sequence
  Description of Artificial Sequence: Synthetic oligonucleotide
  Sense strand starting at position 3353 of SEQ ID NO: 915937
ucgcaauauuuagaaagag

SEQ ID NO: 1117677 - RNA, 19 nt, Artificial Sequence
  Description of Artificial Sequence: Synthetic oligonucleotide
  Antisense strand to SEQ ID NO: 1117676
cucuuucuaaauauugcga

SEQ ID NO: 1117678 - RNA, 19 nt, Artificial Sequence
  Description of Artificial Sequence: Synthetic oligonucleotide
  Sense strand starting at position 3390 of SEQ ID NO: 915937
agaaguacuauucgguuua

SEQ ID NO: 1117679 - RNA, 19 nt, Artificial Sequence
  Description of Artificial Sequence: Synthetic oligonucleotide
  Antisense strand to SEQ ID NO: 1117678
uaaaccgaauaguacuucu

SEQ ID NO: 1117680 - RNA, 19 nt, Artificial Sequence
  Description of Artificial Sequence: Synthetic oligonucleotide
  Sense strand starting at position 3392 of SEQ ID NO: 915937
aaguacuauucgguuuaga

SEQ ID NO: 1117681 - RNA, 19 nt, Artificial Sequence
  Description of Artificial Sequence: Synthetic oligonucleotide
  Antisense strand to SEQ ID NO: 1117680
ucuaaaccgaauaguacuu

SEQ ID NO: 1117682 - RNA, 19 nt, Artificial Sequence
  Description of Artificial Sequence: Synthetic oligonucleotide
  Sense strand starting at position 3395 of SEQ ID NO: 915937
uacuauucgguuuagaaag

SEQ ID NO: 1117683 - RNA, 19 nt, Artificial Sequence
  Description of Artificial Sequence: Synthetic oligonucleotide
  Antisense strand to SEQ ID NO: 1117682
cuuucuaaaccgaauagua

SEQ ID NO: 1117684 - RNA, 19 nt, Artificial Sequence
  Description of Artificial Sequence: Synthetic oligonucleotide
  Sense strand starting at position 3556 of SEQ ID NO: 915937
caguuuauucugggugaaa

SEQ ID NO: 1117685 - RNA, 19 nt, Artificial Sequence
  Description of Artificial Sequence: Synthetic oligonucleotide
  Antisense strand to SEQ ID NO: 1117684
uuucacccagaauaaacug

SEQ ID NO: 1117686 - RNA, 19 nt, Artificial Sequence
  Description of Artificial Sequence: Synthetic oligonucleotide
  Sense strand starting at position 3557 of SEQ ID NO: 915937
aguuuauucugggugaaag

SEQ ID NO: 1117687 - RNA, 19 nt, Artificial Sequence
  Description of Artificial Sequence: Synthetic oligonucleotide
  Antisense strand to SEQ ID NO: 1117686
cuuucacccagaauaaacu

SEQ ID NO: 1117688 - RNA, 19 nt, Artificial Sequence
  Description of Artificial Sequence: Synthetic oligonucleotide
  Sense strand starting at position 3565 of SEQ ID NO: 915937
cugggugaaagcgguuaaa

SEQ ID NO: 1117689 - RNA, 19 nt, Artificial Sequence
  Description of Artificial Sequence: Synthetic oligonucleotide
  Antisense strand to SEQ ID NO: 1117688
uuuaaccgcuuucacccag

SEQ ID NO: 1117690 - RNA, 19 nt, Artificial Sequence
  Description of Artificial Sequence: Synthetic oligonucleotide
  Sense strand starting at position 3872 of SEQ ID NO: 915937
uggcgcgaucucgucuaau

SEQ ID NO: 1117691 - RNA, 19 nt, Artificial Sequence
  Description of Artificial Sequence: Synthetic oligonucleotide
  Antisense strand to SEQ ID NO: 1117690
auuagacgagaucgcgcca

SEQ ID NO: 1117692 - RNA, 19 nt, Artificial Sequence
  Description of Artificial Sequence: Synthetic oligonucleotide
  Sense strand starting at position 3874 of SEQ ID NO: 915937
gcgcgaucucgucuaauug

SEQ ID NO: 1117693 - RNA, 19 nt, Artificial Sequence
  Description of Artificial Sequence: Synthetic oligonucleotide
  Antisense strand to SEQ ID NO: 1117692
caauuagacgagaucgcgc

SEQ ID NO: 1117694 - RNA, 19 nt, Artificial Sequence
  Description of Artificial Sequence: Synthetic oligonucleotide
  Sense strand starting at position 62 of SEQ ID NO: 915938
gguacuuauauguacguaa

SEQ ID NO: 1117695 - RNA, 19 nt, Artificial Sequence
  Description of Artificial Sequence: Synthetic oligonucleotide
  Antisense strand to SEQ ID NO: 1117694
uuacguacauauaaguacc

SEQ ID NO: 1117696 - RNA, 19 nt, Artificial Sequence
  Description of Artificial Sequence: Synthetic oligonucleotide
  Sense strand starting at position 65 of SEQ ID NO: 915938
acuuauauguacguaaaug

SEQ ID NO: 1117697 - RNA, 19 nt, Artificial Sequence
  Description of Artificial Sequence: Synthetic oligonucleotide
  Antisense strand to SEQ ID NO: 1117696
cauuuacguacauauaagu

SEQ ID NO: 1117698 - RNA, 19 nt, Artificial Sequence
  Description of Artificial Sequence: Synthetic oligonucleotide
  Sense strand starting at position 194 of SEQ ID NO: 915938
cccuuuguaguuugaauuu

SEQ ID NO: 1117699 - RNA, 19 nt, Artificial Sequence
  Description of Artificial Sequence: Synthetic oligonucleotide
  Antisense strand to SEQ ID NO: 1117698
aaauucaaacuacaaaggg

SEQ ID NO: 1117700 - RNA, 19 nt, Artificial Sequence
  Description of Artificial Sequence: Synthetic oligonucleotide
  Sense strand starting at position 299 of SEQ ID NO: 915938
cagaaagcuccauaaacgu

SEQ ID NO: 1117701 - RNA, 19 nt, Artificial Sequence
  Description of Artificial Sequence: Synthetic oligonucleotide
  Antisense strand to SEQ ID NO: 1117700
acguuuauggagcuuucug

SEQ ID NO: 1117702 - RNA, 19 nt, Artificial Sequence
  Description of Artificial Sequence: Synthetic oligonucleotide
  Sense strand starting at position 376 of SEQ ID NO: 915938
uguguauacuacucucaac

SEQ ID NO: 1117703 - RNA, 19 nt, Artificial Sequence
  Description of Artificial Sequence: Synthetic oligonucleotide
  Antisense strand to SEQ ID NO: 1117702
guugagaguaguauacaca

SEQ ID NO: 1117704 - RNA, 19 nt, Artificial Sequence
  Description of Artificial Sequence: Synthetic oligonucleotide
  Sense strand starting at position 478 of SEQ ID NO: 915938
ucugacuucccguaucauc

SEQ ID NO: 1117705 - RNA, 19 nt, Artificial Sequence
  Description of Artificial Sequence: Synthetic oligonucleotide
  Antisense strand to SEQ ID NO: 1117704
gaugauacgggaagucaga

SEQ ID NO: 1117706 - RNA, 19 nt, Artificial Sequence
  Description of Artificial Sequence: Synthetic oligonucleotide
  Sense strand starting at position 489 of SEQ ID NO: 915938
guaucaucacagcggagaa

SEQ ID NO: 1117707 - RNA, 19 nt, Artificial Sequence
  Description of Artificial Sequence: Synthetic oligonucleotide
  Antisense strand to SEQ ID NO: 1117706
uucuccgcugugaugauac

SEQ ID NO: 1117708 - RNA, 19 nt, Artificial Sequence
  Description of Artificial Sequence: Synthetic oligonucleotide
  Sense strand starting at position 555 of SEQ ID NO: 915938
uugagacuguauccaaaug

SEQ ID NO: 1117709 - RNA, 19 nt, Artificial Sequence
  Description of Artificial Sequence: Synthetic oligonucleotide
  Antisense strand to SEQ ID NO: 1117708
cauuuggauacagucucaa

SEQ ID NO: 1117710 - RNA, 19 nt, Artificial Sequence
  Description of Artificial Sequence: Synthetic oligonucleotide
  Sense strand starting at position 579 of SEQ ID NO: 915938
uuccuacuaucaucugagu

SEQ ID NO: 1117711 - RNA, 19 nt, Artificial Sequence
  Description of Artificial Sequence: Synthetic oligonucleotide
  Antisense strand to SEQ ID NO: 1117710
acucagaugauaguaggaa

SEQ ID NO: 1117712 - RNA, 19 nt, Artificial Sequence
  Description of Artificial Sequence: Synthetic oligonucleotide
  Sense strand starting at position 727 of SEQ ID NO: 915938
aagcauuugccgugguaag

SEQ ID NO: 1117713 - RNA, 19 nt, Artificial Sequence
  Description of Artificial Sequence: Synthetic oligonucleotide
  Antisense strand to SEQ ID NO: 1117712
cuuaccacggcaaaugcuu

SEQ ID NO: 1117714 - RNA, 19 nt, Artificial Sequence
  Description of Artificial Sequence: Synthetic oligonucleotide
  Sense strand starting at position 782 of SEQ ID NO: 915938
uacaaauaggugugggaga

SEQ ID NO: 1117715 - RNA, 19 nt, Artificial Sequence
  Description of Artificial Sequence: Synthetic oligonucleotide
  Antisense strand to SEQ ID NO: 1117714
ucucccacaccuauuugua

SEQ ID NO: 1117716 - RNA, 19 nt, Artificial Sequence
  Description of Artificial Sequence: Synthetic oligonucleotide
  Sense strand starting at position 844 of SEQ ID NO: 915938
cuaagaauaguuugcagca

SEQ ID NO: 1117717 - RNA, 19 nt, Artificial Sequence
  Description of Artificial Sequence: Synthetic oligonucleotide
  Antisense strand to SEQ ID NO: 1117716
ugcugcaaacuauucuuag

SEQ ID NO: 1117718 - RNA, 19 nt, Artificial Sequence
  Description of Artificial Sequence: Synthetic oligonucleotide
  Sense strand starting at position 849 of SEQ ID NO: 915938
aauaguuugcagcaagaag

SEQ ID NO: 1117719 - RNA, 19 nt, Artificial Sequence
  Description of Artificial Sequence: Synthetic oligonucleotide
  Antisense strand to SEQ ID NO: 1117718
cuucuugcugcaaacuauu

SEQ ID NO: 1117720 - RNA, 19 nt, Artificial Sequence
  Description of Artificial Sequence: Synthetic oligonucleotide
  Sense strand starting at position 886 of SEQ ID NO: 915938
cuccauucccuugggcaaa

SEQ ID NO: 1117721 - RNA, 19 nt, Artificial Sequence
  Description of Artificial Sequence: Synthetic oligonucleotide
  Antisense strand to SEQ ID NO: 1117720
uuugcccaagggaauggag

SEQ ID NO: 1117722 - RNA, 19 nt, Artificial Sequence
  Description of Artificial Sequence: Synthetic oligonucleotide
  Sense strand starting at position 906 of SEQ ID NO: 915938
ugcuuuauuugcuucucga

SEQ ID NO: 1117723 - RNA, 19 nt, Artificial Sequence
  Description of Artificial Sequence: Synthetic oligonucleotide
  Antisense strand to SEQ ID NO: 1117722
ucgagaagcaaauaaagca

SEQ ID NO: 1117724 - RNA, 19 nt, Artificial Sequence
  Description of Artificial Sequence: Synthetic oligonucleotide
  Sense strand starting at position 1482 of SEQ ID NO: 915938
gggucuggcccugaaagaa

SEQ ID NO: 1117725 - RNA, 19 nt, Artificial Sequence
  Description of Artificial Sequence: Synthetic oligonucleotide
  Antisense strand to SEQ ID NO: 1117724
uucuuucagggccagaccc

SEQ ID NO: 1117726 - RNA, 19 nt, Artificial Sequence
  Description of Artificial Sequence: Synthetic oligonucleotide
  Sense strand starting at position 1537 of SEQ ID NO: 915938
agagauuccuaagacagau

SEQ ID NO: 1117727 - RNA, 19 nt, Artificial Sequence
  Description of Artificial Sequence: Synthetic oligonucleotide
  Antisense strand to SEQ ID NO: 1117726
aucugucuuaggaaucucu

SEQ ID NO: 1117728 - RNA, 19 nt, Artificial Sequence
  Description of Artificial Sequence: Synthetic oligonucleotide
  Sense strand starting at position 1624 of SEQ ID NO: 915938
ggaaaguuucgaugggugu

SEQ ID NO: 1117729 - RNA, 19 nt, Artificial Sequence
  Description of Artificial Sequence: Synthetic oligonucleotide
  Antisense strand to SEQ ID NO: 1117728
acacccaucgaaacuuucc

SEQ ID NO: 1117730 - RNA, 19 nt, Artificial Sequence
  Description of Artificial Sequence: Synthetic oligonucleotide
  Sense strand starting at position 1777 of SEQ ID NO: 915938
ucaggaaagagcugucgaa

SEQ ID NO: 1117731 - RNA, 19 nt, Artificial Sequence
  Description of Artificial Sequence: Synthetic oligonucleotide
  Antisense strand to SEQ ID NO: 1117730
uucgacagcucuuuccuga

SEQ ID NO: 1117732 - RNA, 19 nt, Artificial Sequence
  Description of Artificial Sequence: Synthetic oligonucleotide
  Sense strand starting at position 1953 of SEQ ID NO: 915938
cgccauuagccucaacaca

SEQ ID NO: 1117733 - RNA, 19 nt, Artificial Sequence
  Description of Artificial Sequence: Synthetic oligonucleotide
  Antisense strand to SEQ ID NO: 1117732
uguguugaggcuaauggcg

SEQ ID NO: 1117734 - RNA, 19 nt, Artificial Sequence
  Description of Artificial Sequence: Synthetic oligonucleotide
  Sense strand starting at position 2071 of SEQ ID NO: 915938
agaauucugcggugaauca

SEQ ID NO: 1117735 - RNA, 19 nt, Artificial Sequence
  Description of Artificial Sequence: Synthetic oligonucleotide
  Antisense strand to SEQ ID NO: 1117734
ugauucaccgcagaauucu

SEQ ID NO: 1117736 - RNA, 19 nt, Artificial Sequence
  Description of Artificial Sequence: Synthetic oligonucleotide
  Sense strand starting at position 2103 of SEQ ID NO: 915938
gauuuccucucgcuguaua

SEQ ID NO: 1117737 - RNA, 19 nt, Artificial Sequence
  Description of Artificial Sequence: Synthetic oligonucleotide
  Antisense strand to SEQ ID NO: 1117736
uauacagcgagaggaaauc

SEQ ID NO: 1117738 - RNA, 19 nt, Artificial Sequence
  Description of Artificial Sequence: Synthetic oligonucleotide
  Sense strand starting at position 2254 of SEQ ID NO: 915938
gcugacauaguuugaaacu

SEQ ID NO: 1117739 - RNA, 19 nt, Artificial Sequence
  Description of Artificial Sequence: Synthetic oligonucleotide
  Antisense strand to SEQ ID NO: 1117738
aguuucaaacuaugucagc

SEQ ID NO: 1117740 - RNA, 19 nt, Artificial Sequence
  Description of Artificial Sequence: Synthetic oligonucleotide
  Sense strand starting at position 2296 of SEQ ID NO: 915938
uauacuaguuuguugggau

SEQ ID NO: 1117741 - RNA, 19 nt, Artificial Sequence
  Description of Artificial Sequence: Synthetic oligonucleotide
  Antisense strand to SEQ ID NO: 1117740
aucccaacaaacuaguaua

SEQ ID NO: 1117742 - RNA, 19 nt, Artificial Sequence
  Description of Artificial Sequence: Synthetic oligonucleotide
  Sense strand starting at position 2371 of SEQ ID NO: 915938
gagagaacuuacuugucug

SEQ ID NO: 1117743 - RNA, 19 nt, Artificial Sequence
  Description of Artificial Sequence: Synthetic oligonucleotide
  Antisense strand to SEQ ID NO: 1117742
cagacaaguaaguucucuc

SEQ ID NO: 1117744 - RNA, 19 nt, Artificial Sequence
  Description of Artificial Sequence: Synthetic oligonucleotide
  Sense strand starting at position 2588 of SEQ ID NO: 915938
uuguaagcuccuuagucaa

SEQ ID NO: 1117745 - RNA, 19 nt, Artificial Sequence
  Description of Artificial Sequence: Synthetic oligonucleotide
  Antisense strand to SEQ ID NO: 1117744
uugacuaaggagcuuacaa

SEQ ID NO: 1117746 - RNA, 19 nt, Artificial Sequence
  Description of Artificial Sequence: Synthetic oligonucleotide
  Sense strand starting at position 2702 of SEQ ID NO: 915938
guuagaaaugaugguacua

SEQ ID NO: 1117747 - RNA, 19 nt, Artificial Sequence
  Description of Artificial Sequence: Synthetic oligonucleotide
  Antisense strand to SEQ ID NO: 1117746
uaguaccaucauuucuaac

SEQ ID NO: 1117748 - RNA, 19 nt, Artificial Sequence
  Description of Artificial Sequence: Synthetic oligonucleotide
  Sense strand starting at position 2757 of SEQ ID NO: 915938
gcuugcaacgguguguuau

SEQ ID NO: 1117749 - RNA, 19 nt, Artificial Sequence
  Description of Artificial Sequence: Synthetic oligonucleotide
  Antisense strand to SEQ ID NO: 1117748
auaacacaccguugcaagc

SEQ ID NO: 1117750 - RNA, 19 nt, Artificial Sequence
  Description of Artificial Sequence: Synthetic oligonucleotide
  Sense strand starting at position 2813 of SEQ ID NO: 915938
gcacaaagaugcucaacaa

SEQ ID NO: 1117751 - RNA, 19 nt, Artificial Sequence
  Description of Artificial Sequence: Synthetic oligonucleotide
  Antisense strand to SEQ ID NO: 1117750
uuguugagcaucuuugugc

SEQ ID NO: 1117752 - RNA, 19 nt, Artificial Sequence
  Description of Artificial Sequence: Synthetic oligonucleotide
  Sense strand starting at position 2826 of SEQ ID NO: 915938
caacaaauguuguugaaug

SEQ ID NO: 1117753 - RNA, 19 nt, Artificial Sequence
  Description of Artificial Sequence: Synthetic oligonucleotide
  Antisense strand to SEQ ID NO: 1117752
cauucaacaacauuuguug

SEQ ID NO: 1117754 - RNA, 19 nt, Artificial Sequence
  Description of Artificial Sequence: Synthetic oligonucleotide
  Sense strand starting at position 2862 of SEQ ID NO: 915938
acaauaaggccagaucugu

SEQ ID NO: 1117755 - RNA, 19 nt, Artificial Sequence
  Description of Artificial Sequence: Synthetic oligonucleotide
  Antisense strand to SEQ ID NO: 1117754
acagaucuggccuuauugu

SEQ ID NO: 1117756 - RNA, 19 nt, Artificial Sequence
  Description of Artificial Sequence: Synthetic oligonucleotide
  Sense strand starting at position 2927 of SEQ ID NO: 915938
gacauaguggaauggaguu

SEQ ID NO: 1117757 - RNA, 19 nt, Artificial Sequence
  Description of Artificial Sequence: Synthetic oligonucleotide
  Antisense strand to SEQ ID NO: 1117756
aacuccauuccacuauguc

SEQ ID NO: 1117758 - RNA, 19 nt, Artificial Sequence
  Description of Artificial Sequence: Synthetic oligonucleotide
  Sense strand starting at position 3155 of SEQ ID NO: 915938
cuggcaguucgguaaacuu

SEQ ID NO: 1117759 - RNA, 19 nt, Artificial Sequence
  Description of Artificial Sequence: Synthetic oligonucleotide
  Antisense strand to SEQ ID NO: 1117758
aaguuuaccgaacugccag

SEQ ID NO: 1117760 - RNA, 19 nt, Artificial Sequence
  Description of Artificial Sequence: Synthetic oligonucleotide
  Sense strand starting at position 3163 of SEQ ID NO: 915938
ucgguaaacuucuuauaag

SEQ ID NO: 1117761 - RNA, 19 nt, Artificial Sequence
  Description of Artificial Sequence: Synthetic oligonucleotide
  Antisense strand to SEQ ID NO: 1117760
cuuauaagaaguuuaccga

SEQ ID NO: 1117762 - RNA, 19 nt, Artificial Sequence
  Description of Artificial Sequence: Synthetic oligonucleotide
  Sense strand starting at position 3190 of SEQ ID NO: 915938
gcaugacuccugcaaacag

SEQ ID NO: 1117763 - RNA, 19 nt, Artificial Sequence
  Description of Artificial Sequence: Synthetic oligonucleotide
  Antisense strand to SEQ ID NO: 1117762
cuguuugcaggagucaugc

SEQ ID NO: 1117764 - RNA, 19 nt, Artificial Sequence
  Description of Artificial Sequence: Synthetic oligonucleotide
  Sense strand starting at position 3610 of SEQ ID NO: 915938
ucacuuauuugaggacaca

SEQ ID NO: 1117765 - RNA, 19 nt, Artificial Sequence
  Description of Artificial Sequence: Synthetic oligonucleotide
  Antisense strand to SEQ ID NO: 1117764
uguguccucaaauaaguga

SEQ ID NO: 1117766 - RNA, 19 nt, Artificial Sequence
  Description of Artificial Sequence: Synthetic oligonucleotide
  Sense strand starting at position 3645 of SEQ ID NO: 915938
ucuggaauuuaguaaacca

SEQ ID NO: 1117767 - RNA, 19 nt, Artificial Sequence
  Description of Artificial Sequence: Synthetic oligonucleotide
  Antisense strand to SEQ ID NO: 1117766
ugguuuacuaaauuccaga

SEQ ID NO: 1117768 - RNA, 19 nt, Artificial Sequence
  Description of Artificial Sequence: Synthetic oligonucleotide
  Sense strand starting at position 3863 of SEQ ID NO: 915938
aagauaggcccucguaaca

SEQ ID NO: 1117769 - RNA, 19 nt, Artificial Sequence
  Description of Artificial Sequence: Synthetic oligonucleotide
  Antisense strand to SEQ ID NO: 1117768
uguuacgagggccuaucuu

SEQ ID NO: 1117770 - RNA, 19 nt, Artificial Sequence
  Description of Artificial Sequence: Synthetic oligonucleotide
  Sense strand starting at position 3873 of SEQ ID NO: 915938
cucguaacauuacugguaa

SEQ ID NO: 1117771 - RNA, 19 nt, Artificial Sequence
  Description of Artificial Sequence: Synthetic oligonucleotide
  Antisense strand to SEQ ID NO: 1117770
uuaccaguaauguuacgag

SEQ ID NO: 1117772 - RNA, 19 nt, Artificial Sequence
  Description of Artificial Sequence: Synthetic oligonucleotide
  Sense strand starting at position 3901 of SEQ ID NO: 915938
ccugacaggugaccucaua

SEQ ID NO: 1117773 - RNA, 19 nt, Artificial Sequence
  Description of Artificial Sequence: Synthetic oligonucleotide
  Antisense strand to SEQ ID NO: 1117772
uaugaggucaccugucagg

SEQ ID NO: 1117774 - RNA, 19 nt, Artificial Sequence
  Description of Artificial Sequence: Synthetic oligonucleotide
  Sense strand starting at position 21 of SEQ ID NO: 915939
aguacuuaguccuuccauu

SEQ ID NO: 1117775 - RNA, 19 nt, Artificial Sequence
  Description of Artificial Sequence: Synthetic oligonucleotide
  Antisense strand to SEQ ID NO: 1117774
aauggaaggacuaaguacu

SEQ ID NO: 1117776 - RNA, 19 nt, Artificial Sequence
  Description of Artificial Sequence: Synthetic oligonucleotide
  Sense strand starting at position 59 of SEQ ID NO: 915939
uguugucuuacaggccaga

SEQ ID NO: 1117777 - RNA, 19 nt, Artificial Sequence
  Description of Artificial Sequence: Synthetic oligonucleotide
  Antisense strand to SEQ ID NO: 1117776
ucuggccuguaagacaaca

SEQ ID NO: 1117778 - RNA, 19 nt, Artificial Sequence
  Description of Artificial Sequence: Synthetic oligonucleotide
  Sense strand starting at position 776 of SEQ ID NO: 915939
gguuuauggaaagguaaac

SEQ ID NO: 1117779 - RNA, 19 nt, Artificial Sequence
  Description of Artificial Sequence: Synthetic oligonucleotide
  Antisense strand to SEQ ID NO: 1117778
guuuaccuuuccauaaacc

SEQ ID NO: 1117780 - RNA, 19 nt, Artificial Sequence
  Description of Artificial Sequence: Synthetic oligonucleotide
  Sense strand starting at position 804 of SEQ ID NO: 915939
uaugcuuauguugacagaa

SEQ ID NO: 1117781 - RNA, 19 nt, Artificial Sequence
  Description of Artificial Sequence: Synthetic oligonucleotide
  Antisense strand to SEQ ID NO: 1117780
uucugucaacauaagcaua

SEQ ID NO: 1117782 - RNA, 19 nt, Artificial Sequence
  Description of Artificial Sequence: Synthetic oligonucleotide
  Sense strand starting at position 888 of SEQ ID NO: 915939
accugugaggcuuauucua

SEQ ID NO: 1117783 - RNA, 19 nt, Artificial Sequence
  Description of Artificial Sequence: Synthetic oligonucleotide
  Antisense strand to SEQ ID NO: 1117782
uagaauaagccucacaggu

SEQ ID NO: 1117784 - RNA, 19 nt, Artificial Sequence
  Description of Artificial Sequence: Synthetic oligonucleotide
  Sense strand starting at position 890 of SEQ ID NO: 915939
cugugaggcuuauucuaau

SEQ ID NO: 1117785 - RNA, 19 nt, Artificial Sequence
  Description of Artificial Sequence: Synthetic oligonucleotide
  Antisense strand to SEQ ID NO: 1117784
auuagaauaagccucacag

SEQ ID NO: 1117786 - RNA, 19 nt, Artificial Sequence
  Description of Artificial Sequence: Synthetic oligonucleotide
  Sense strand starting at position 1382 of SEQ ID NO: 915939
ggagaaucccuugguggcu

SEQ ID NO: 1117787 - RNA, 19 nt, Artificial Sequence
  Description of Artificial Sequence: Synthetic oligonucleotide
  Antisense strand to SEQ ID NO: 1117786
agccaccaagggauucucc

SEQ ID NO: 1117788 - RNA, 19 nt, Artificial Sequence
  Description of Artificial Sequence: Synthetic oligonucleotide
  Sense strand starting at position 1601 of SEQ ID NO: 915939
ccuggacuguucuuuaaua

SEQ ID NO: 1117789 - RNA, 19 nt, Artificial Sequence
  Description of Artificial Sequence: Synthetic oligonucleotide
  Antisense strand to SEQ ID NO: 1117788
uauuaaagaacaguccagg

SEQ ID NO: 1117790 - RNA, 19 nt, Artificial Sequence
  Description of Artificial Sequence: Synthetic oligonucleotide
  Sense strand starting at position 1602 of SEQ ID NO: 915939
cuggacuguucuuuaauac

SEQ ID NO: 1117791 - RNA, 19 nt, Artificial Sequence
  Description of Artificial Sequence: Synthetic oligonucleotide
  Antisense strand to SEQ ID NO: 1117790
guauuaaagaacaguccag

SEQ ID NO: 1117792 - RNA, 19 nt, Artificial Sequence
  Description of Artificial Sequence: Synthetic oligonucleotide
  Sense strand starting at position 1603 of SEQ ID NO: 915939
uggacuguucuuuaauacu

SEQ ID NO: 1117793 - RNA, 19 nt, Artificial Sequence
  Description of Artificial Sequence: Synthetic oligonucleotide
  Antisense strand to SEQ ID NO: 1117792
aguauuaaagaacagucca

SEQ ID NO: 1117794 - RNA, 19 nt, Artificial Sequence
  Description of Artificial Sequence: Synthetic oligonucleotide
  Sense strand starting at position 1640 of SEQ ID NO: 915939
gagagaaagugccuuaacu

SEQ ID NO: 1117795 - RNA, 19 nt, Artificial Sequence
  Description of Artificial Sequence: Synthetic oligonucleotide
  Antisense strand to SEQ ID NO: 1117794
aguuaaggcacuuucucuc

SEQ ID NO: 1117796 - RNA, 19 nt, Artificial Sequence
  Description of Artificial Sequence: Synthetic oligonucleotide
  Sense strand starting at position 1642 of SEQ ID NO: 915939
gagaaagugccuuaacuuc

SEQ ID NO: 1117797 - RNA, 19 nt, Artificial Sequence
  Description of Artificial Sequence: Synthetic oligonucleotide
  Antisense strand to SEQ ID NO: 1117796
gaaguuaaggcacuuucuc

SEQ ID NO: 1117798 - RNA, 19 nt, Artificial Sequence
  Description of Artificial Sequence: Synthetic oligonucleotide
  Sense strand starting at position 1720 of SEQ ID NO: 915939
cgaggcucugauuguggaa

SEQ ID NO: 1117799 - RNA, 19 nt, Artificial Sequence
  Description of Artificial Sequence: Synthetic oligonucleotide
  Antisense strand to SEQ ID NO: 1117798
uuccacaaucagagccucg

SEQ ID NO: 1117800 - RNA, 19 nt, Artificial Sequence
  Description of Artificial Sequence: Synthetic oligonucleotide
  Sense strand starting at position 1805 of SEQ ID NO: 915939
uccauuuaccugugccuua

SEQ ID NO: 1117801 - RNA, 19 nt, Artificial Sequence
  Description of Artificial Sequence: Synthetic oligonucleotide
  Antisense strand to SEQ ID NO: 1117800
uaaggcacagguaaaugga

SEQ ID NO: 1117802 - RNA, 19 nt, Artificial Sequence
  Description of Artificial Sequence: Synthetic oligonucleotide
  Sense strand starting at position 1989 of SEQ ID NO: 915939
cugucaugucauugcauac

SEQ ID NO: 1117803 - RNA, 19 nt, Artificial Sequence
  Description of Artificial Sequence: Synthetic oligonucleotide
  Antisense strand to SEQ ID NO: 1117802
guaugcaaugacaugacag

SEQ ID NO: 1117804 - RNA, 19 nt, Artificial Sequence
  Description of Artificial Sequence: Synthetic oligonucleotide
  Sense strand starting at position 2057 of SEQ ID NO: 915939
ccaguaauguguucuuaac

SEQ ID NO: 1117805 - RNA, 19 nt, Artificial Sequence
  Description of Artificial Sequence: Synthetic oligonucleotide
  Antisense strand to SEQ ID NO: 1117804
guuaagaacacauuacugg

SEQ ID NO: 1117806 - RNA, 19 nt, Artificial Sequence
  Description of Artificial Sequence: Synthetic oligonucleotide
  Sense strand starting at position 2063 of SEQ ID NO: 915939
auguguucuuaacugaaug

SEQ ID NO: 1117807 - RNA, 19 nt, Artificial Sequence
  Description of Artificial Sequence: Synthetic oligonucleotide
  Antisense strand to SEQ ID NO: 1117806
cauucaguuaagaacacau

SEQ ID NO: 1117808 - RNA, 19 nt, Artificial Sequence
  Description of Artificial Sequence: Synthetic oligonucleotide
  Sense strand starting at position 2187 of SEQ ID NO: 915939
uccugagacuuacaugaua

SEQ ID NO: 1117809 - RNA, 19 nt, Artificial Sequence
  Description of Artificial Sequence: Synthetic oligonucleotide
  Antisense strand to SEQ ID NO: 1117808
uaucauguaagucucagga

SEQ ID NO: 1117810 - RNA, 19 nt, Artificial Sequence
  Description of Artificial Sequence: Synthetic oligonucleotide
  Sense strand starting at position 2192 of SEQ ID NO: 915939
agacuuacaugauaagaac

SEQ ID NO: 1117811 - RNA, 19 nt, Artificial Sequence
  Description of Artificial Sequence: Synthetic oligonucleotide
  Antisense strand to SEQ ID NO: 1117810
guucuuaucauguaagucu

SEQ ID NO: 1117812 - RNA, 19 nt, Artificial Sequence
  Description of Artificial Sequence: Synthetic oligonucleotide
  Sense strand starting at position 2237 of SEQ ID NO: 915939
ccugaauuagacugccuca

SEQ ID NO: 1117813 - RNA, 19 nt, Artificial Sequence
  Description of Artificial Sequence: Synthetic oligonucleotide
  Antisense strand to SEQ ID NO: 1117812
ugaggcagucuaauucagg

SEQ ID NO: 1117814 - RNA, 19 nt, Artificial Sequence
  Description of Artificial Sequence: Synthetic oligonucleotide
  Sense strand starting at position 2324 of SEQ ID NO: 915939
gguguuaccuggucuggaa

SEQ ID NO: 1117815 - RNA, 19 nt, Artificial Sequence
  Description of Artificial Sequence: Synthetic oligonucleotide
  Antisense strand to SEQ ID NO: 1117814
uuccagaccagguaacacc

SEQ ID NO: 1117816 - RNA, 19 nt, Artificial Sequence
  Description of Artificial Sequence: Synthetic oligonucleotide
  Sense strand starting at position 2654 of SEQ ID NO: 915939
cuuccugcccuuugggaua

SEQ ID NO: 1117817 - RNA, 19 nt, Artificial Sequence
  Description of Artificial Sequence: Synthetic oligonucleotide
  Antisense strand to SEQ ID NO: 1117816
uaucccaaagggcaggaag

SEQ ID NO: 1117818 - RNA, 19 nt, Artificial Sequence
  Description of Artificial Sequence: Synthetic oligonucleotide
  Sense strand starting at position 2674 of SEQ ID NO: 915939
cuagguggguguucugaua

SEQ ID NO: 1117819 - RNA, 19 nt, Artificial Sequence
  Description of Artificial Sequence: Synthetic oligonucleotide
  Antisense strand to SEQ ID NO: 1117818
uaucagaacacccaccuag

SEQ ID NO: 1117820 - RNA, 19 nt, Artificial Sequence
  Description of Artificial Sequence: Synthetic oligonucleotide
  Sense strand starting at position 2682 of SEQ ID NO: 915939
guguucugauacuucuuua

SEQ ID NO: 1117821 - RNA, 19 nt, Artificial Sequence
  Description of Artificial Sequence: Synthetic oligonucleotide
  Antisense strand to SEQ ID NO: 1117820
uaaagaaguaucagaacac

SEQ ID NO: 1117822 - RNA, 19 nt, Artificial Sequence
  Description of Artificial Sequence: Synthetic oligonucleotide
  Sense strand starting at position 2698 of SEQ ID NO: 915939
uuacuauccuuaucaguug

SEQ ID NO: 1117823 - RNA, 19 nt, Artificial Sequence
  Description of Artificial Sequence: Synthetic oligonucleotide
  Antisense strand to SEQ ID NO: 1117822
caacugauaaggauaguaa

SEQ ID NO: 1117824 - RNA, 19 nt, Artificial Sequence
  Description of Artificial Sequence: Synthetic oligonucleotide
  Sense strand starting at position 2701 of SEQ ID NO: 915939
cuauccuuaucaguuguua

SEQ ID NO: 1117825 - RNA, 19 nt, Artificial Sequence
  Description of Artificial Sequence: Synthetic oligonucleotide
  Antisense strand to SEQ ID NO: 1117824
uaacaacugauaaggauag

SEQ ID NO: 1117826 - RNA, 19 nt, Artificial Sequence
  Description of Artificial Sequence: Synthetic oligonucleotide
  Sense strand starting at position 2705 of SEQ ID NO: 915939
ccuuaucaguuguuaguua

SEQ ID NO: 1117827 - RNA, 19 nt, Artificial Sequence
  Description of Artificial Sequence: Synthetic oligonucleotide
  Antisense strand to SEQ ID NO: 1117826
uaacuaacaacugauaagg

SEQ ID NO: 1117828 - RNA, 19 nt, Artificial Sequence
  Description of Artificial Sequence: Synthetic oligonucleotide
  Sense strand starting at position 2709 of SEQ ID NO: 915939
aucaguuguuaguuaaaca

SEQ ID NO: 1117829 - RNA, 19 nt, Artificial Sequence
  Description of Artificial Sequence: Synthetic oligonucleotide
  Antisense strand to SEQ ID NO: 1117828
uguuuaacuaacaacugau

SEQ ID NO: 1117830 - RNA, 19 nt, Artificial Sequence
  Description of Artificial Sequence: Synthetic oligonucleotide
  Sense strand starting at position 3148 of SEQ ID NO: 915939
ugaaguaucuugcuacgga

SEQ ID NO: 1117831 - RNA, 19 nt, Artificial Sequence
  Description of Artificial Sequence: Synthetic oligonucleotide
  Antisense strand to SEQ ID NO: 1117830
uccguagcaagauacuuca

SEQ ID NO: 1117832 - RNA, 19 nt, Artificial Sequence
  Description of Artificial Sequence: Synthetic oligonucleotide
  Sense strand starting at position 3360 of SEQ ID NO: 915939
ggaauucccuauuauauga

SEQ ID NO: 1117833 - RNA, 19 nt, Artificial Sequence
  Description of Artificial Sequence: Synthetic oligonucleotide
  Antisense strand to SEQ ID NO: 1117832
ucauauaauagggaauucc

SEQ ID NO: 1117834 - RNA, 19 nt, Artificial Sequence
  Description of Artificial Sequence: Synthetic oligonucleotide
  Sense strand starting at position 3405 of SEQ ID NO: 915939
augcucuuuccagagucuu

SEQ ID NO: 1117835 - RNA, 19 nt, Artificial Sequence
  Description of Artificial Sequence: Synthetic oligonucleotide
  Antisense strand to SEQ ID NO: 1117834
aagacucuggaaagagcau

SEQ ID NO: 1117836 - RNA, 19 nt, Artificial Sequence
  Description of Artificial Sequence: Synthetic oligonucleotide
  Sense strand starting at position 3436 of SEQ ID NO: 915939
uauauauggccaugcuuga

SEQ ID NO: 1117837 - RNA, 19 nt, Artificial Sequence
  Description of Artificial Sequence: Synthetic oligonucleotide
  Antisense strand to SEQ ID NO: 1117836
ucaagcauggccauauaua

SEQ ID NO: 1117838 - RNA, 19 nt, Artificial Sequence
  Description of Artificial Sequence: Synthetic oligonucleotide
  Sense strand starting at position 3489 of SEQ ID NO: 915939
cgaugaaggaagugugaau

SEQ ID NO: 1117839 - RNA, 19 nt, Artificial Sequence
  Description of Artificial Sequence: Synthetic oligonucleotide
  Antisense strand to SEQ ID NO: 1117838
auucacacuuccuucaucg

SEQ ID NO: 1117840 - RNA, 19 nt, Artificial Sequence
  Description of Artificial Sequence: Synthetic oligonucleotide
  Sense strand starting at position 3598 of SEQ ID NO: 915939
augguaguuaugggaaagu

SEQ ID NO: 1117841 - RNA, 19 nt, Artificial Sequence
  Description of Artificial Sequence: Synthetic oligonucleotide
  Antisense strand to SEQ ID NO: 1117840
acuuucccauaacuaccau

SEQ ID NO: 1117842 - RNA, 19 nt, Artificial Sequence
  Description of Artificial Sequence: Synthetic oligonucleotide
  Sense strand starting at position 3607 of SEQ ID NO: 915939
augggaaaguuagauauuu

SEQ ID NO: 1117843 - RNA, 19 nt, Artificial Sequence
  Description of Artificial Sequence: Synthetic oligonucleotide
  Antisense strand to SEQ ID NO: 1117842
aaauaucuaacuuucccau

SEQ ID NO: 1117844 - RNA, 19 nt, Artificial Sequence
  Description of Artificial Sequence: Synthetic oligonucleotide
  Sense strand starting at position 3624 of SEQ ID NO: 915939
uuaguaacucgaggugaau

SEQ ID NO: 1117845 - RNA, 19 nt, Artificial Sequence
  Description of Artificial Sequence: Synthetic oligonucleotide
  Antisense strand to SEQ ID NO: 1117844
auucaccucgaguuacuaa

SEQ ID NO: 1117846 - RNA, 19 nt, Artificial Sequence
  Description of Artificial Sequence: Synthetic oligonucleotide
  Sense strand starting at position 3672 of SEQ ID NO: 915939
cagugaggucaauguagag

SEQ ID NO: 1117847 - RNA, 19 nt, Artificial Sequence
  Description of Artificial Sequence: Synthetic oligonucleotide
  Antisense strand to SEQ ID NO: 1117846
cucuacauugaccucacug

SEQ ID NO: 1117848 - RNA, 19 nt, Artificial Sequence
  Description of Artificial Sequence: Synthetic oligonucleotide
  Sense strand starting at position 3678 of SEQ ID NO: 915939
ggucaauguagaggguauu

SEQ ID NO: 1117849 - RNA, 19 nt, Artificial Sequence
  Description of Artificial Sequence: Synthetic oligonucleotide
  Antisense strand to SEQ ID NO: 1117848
aauacccucuacauugacc

SEQ ID NO: 1117850 - RNA, 19 nt, Artificial Sequence
  Description of Artificial Sequence: Synthetic oligonucleotide
  Sense strand starting at position 3679 of SEQ ID NO: 915939
gucaauguagaggguauua

SEQ ID NO: 1117851 - RNA, 19 nt, Artificial Sequence
  Description of Artificial Sequence: Synthetic oligonucleotide
  Antisense strand to SEQ ID NO: 1117850
uaauacccucuacauugac

SEQ ID NO: 1117852 - RNA, 19 nt, Artificial Sequence
  Description of Artificial Sequence: Synthetic oligonucleotide
  Sense strand starting at position 3684 of SEQ ID NO: 915939
uguagaggguauuaaagaa

SEQ ID NO: 1117853 - RNA, 19 nt, Artificial Sequence
  Description of Artificial Sequence: Synthetic oligonucleotide
  Antisense strand to SEQ ID NO: 1117852
uucuuuaauacccucuaca

SEQ ID NO: 1117854 - RNA, 19 nt, Artificial Sequence
  Description of Artificial Sequence: Synthetic oligonucleotide
  Sense strand starting at position 252 of SEQ ID NO: 915940
gguuuauggaaagguaaac

SEQ ID NO: 1117855 - RNA, 19 nt, Artificial Sequence
  Description of Artificial Sequence: Synthetic oligonucleotide
  Antisense strand to SEQ ID NO: 1117854
guuuaccuuuccauaaacc

SEQ ID NO: 1117856 - RNA, 19 nt, Artificial Sequence
  Description of Artificial Sequence: Synthetic oligonucleotide
  Sense strand starting at position 280 of SEQ ID NO: 915940
uaugcuuauguugacagaa

SEQ ID NO: 1117857 - RNA, 19 nt, Artificial Sequence
  Description of Artificial Sequence: Synthetic oligonucleotide
  Antisense strand to SEQ ID NO: 1117856
uucugucaacauaagcaua

SEQ ID NO: 1117858 - RNA, 19 nt, Artificial Sequence
  Description of Artificial Sequence: Synthetic oligonucleotide
  Sense strand starting at position 364 of SEQ ID NO: 915940
accugugaggcuuauucua

SEQ ID NO: 1117859 - RNA, 19 nt, Artificial Sequence
  Description of Artificial Sequence: Synthetic oligonucleotide
  Antisense strand to SEQ ID NO: 1117858
uagaauaagccucacaggu

SEQ ID NO: 1117860 - RNA, 19 nt, Artificial Sequence
  Description of Artificial Sequence: Synthetic oligonucleotide
  Sense strand starting at position 366 of SEQ ID NO: 915940
cugugaggcuuauucuaau

SEQ ID NO: 1117861 - RNA, 19 nt, Artificial Sequence
  Description of Artificial Sequence: Synthetic oligonucleotide
  Antisense strand to SEQ ID NO: 1117860
auuagaauaagccucacag

SEQ ID NO: 1117862 - RNA, 19 nt, Artificial Sequence
  Description of Artificial Sequence: Synthetic oligonucleotide
  Sense strand starting at position 858 of SEQ ID NO: 915940
ggagaaucccuugguggcu

SEQ ID NO: 1117863 - RNA, 19 nt, Artificial Sequence
  Description of Artificial Sequence: Synthetic oligonucleotide
  Antisense strand to SEQ ID NO: 1117862
agccaccaagggauucucc

SEQ ID NO: 1117864 - RNA, 19 nt, Artificial Sequence
  Description of Artificial Sequence: Synthetic oligonucleotide
  Sense strand starting at position 1077 of SEQ ID NO: 915940
ccuggacuguucuuuaaua

SEQ ID NO: 1117865 - RNA, 19 nt, Artificial Sequence
  Description of Artificial Sequence: Synthetic oligonucleotide
  Antisense strand to SEQ ID NO: 1117864
uauuaaagaacaguccagg

SEQ ID NO: 1117866 - RNA, 19 nt, Artificial Sequence
  Description of Artificial Sequence: Synthetic oligonucleotide
  Sense strand starting at position 1078 of SEQ ID NO: 915940
cuggacuguucuuuaauac

SEQ ID NO: 1117867 - RNA, 19 nt, Artificial Sequence
  Description of Artificial Sequence: Synthetic oligonucleotide
  Antisense strand to SEQ ID NO: 1117866
guauuaaagaacaguccag

SEQ ID NO: 1117868 - RNA, 19 nt, Artificial Sequence
  Description of Artificial Sequence: Synthetic oligonucleotide
  Sense strand starting at position 1079 of SEQ ID NO: 915940
uggacuguucuuuaauacu

SEQ ID NO: 1117869 - RNA, 19 nt, Artificial Sequence
  Description of Artificial Sequence: Synthetic oligonucleotide
  Antisense strand to SEQ ID NO: 1117868
aguauuaaagaacagucca

SEQ ID NO: 1117870 - RNA, 19 nt, Artificial Sequence
  Description of Artificial Sequence: Synthetic oligonucleotide
  Sense strand starting at position 1116 of SEQ ID NO: 915940
gagagaaagugccuuaacu

SEQ ID NO: 1117871 - RNA, 19 nt, Artificial Sequence
  Description of Artificial Sequence: Synthetic oligonucleotide
  Antisense strand to SEQ ID NO: 1117870
aguuaaggcacuuucucuc

SEQ ID NO: 1117872 - RNA, 19 nt, Artificial Sequence
  Description of Artificial Sequence: Synthetic oligonucleotide
  Sense strand starting at position 1118 of SEQ ID NO: 915940
gagaaagugccuuaacuuc

SEQ ID NO: 1117873 - RNA, 19 nt, Artificial Sequence
  Description of Artificial Sequence: Synthetic oligonucleotide
  Antisense strand to SEQ ID NO: 1117872
gaaguuaaggcacuuucuc

SEQ ID NO: 1117874 - RNA, 19 nt, Artificial Sequence
  Description of Artificial Sequence: Synthetic oligonucleotide
  Sense strand starting at position 1196 of SEQ ID NO: 915940
cgaggcucugauuguggaa

SEQ ID NO: 1117875 - RNA, 19 nt, Artificial Sequence
  Description of Artificial Sequence: Synthetic oligonucleotide
  Antisense strand to SEQ ID NO: 1117874
uuccacaaucagagccucg

SEQ ID NO: 1117876 - RNA, 19 nt, Artificial Sequence
  Description of Artificial Sequence: Synthetic oligonucleotide
  Sense strand starting at position 1281 of SEQ ID NO: 915940
uccauuuaccugugccuua

SEQ ID NO: 1117877 - RNA, 19 nt, Artificial Sequence
  Description of Artificial Sequence: Synthetic oligonucleotide
  Antisense strand to SEQ ID NO: 1117876
uaaggcacagguaaaugga

SEQ ID NO: 1117878 - RNA, 19 nt, Artificial Sequence
  Description of Artificial Sequence: Synthetic oligonucleotide
  Sense strand starting at position 1465 of SEQ ID NO: 915940
cugucaugucauugcauac

SEQ ID NO: 1117879 - RNA, 19 nt, Artificial Sequence
  Description of Artificial Sequence: Synthetic oligonucleotide
  Antisense strand to SEQ ID NO: 1117878
guaugcaaugacaugacag

SEQ ID NO: 1117880 - RNA, 19 nt, Artificial Sequence
  Description of Artificial Sequence: Synthetic oligonucleotide
  Sense strand starting at position 1533 of SEQ ID NO: 915940
ccaguaauguguucuuaac

SEQ ID NO: 1117881 - RNA, 19 nt, Artificial Sequence
  Description of Artificial Sequence: Synthetic oligonucleotide
  Antisense strand to SEQ ID NO: 1117880
guuaagaacacauuacugg

SEQ ID NO: 1117882 - RNA, 19 nt, Artificial Sequence
  Description of Artificial Sequence: Synthetic oligonucleotide
  Sense strand starting at position 1539 of SEQ ID NO: 915940
auguguucuuaacugaaug

SEQ ID NO: 1117883 - RNA, 19 nt, Artificial Sequence
  Description of Artificial Sequence: Synthetic oligonucleotide
  Antisense strand to SEQ ID NO: 1117882
cauucaguuaagaacacau

SEQ ID NO: 1117884 - RNA, 19 nt, Artificial Sequence
  Description of Artificial Sequence: Synthetic oligonucleotide
  Sense strand starting at position 1668 of SEQ ID NO: 915940
agacuuacaugauaagaac

SEQ ID NO: 1117885 - RNA, 19 nt, Artificial Sequence
  Description of Artificial Sequence: Synthetic oligonucleotide
  Antisense strand to SEQ ID NO: 1117884
guucuuaucauguaagucu

SEQ ID NO: 1117886 - RNA, 19 nt, Artificial Sequence
  Description of Artificial Sequence: Synthetic oligonucleotide
  Sense strand starting at position 1713 of SEQ ID NO: 915940
ccugaauuagacugccuca

SEQ ID NO: 1117887 - RNA, 19 nt, Artificial Sequence
  Description of Artificial Sequence: Synthetic oligonucleotide
  Antisense strand to SEQ ID NO: 1117886
ugaggcagucuaauucagg

SEQ ID NO: 1117888 - RNA, 19 nt, Artificial Sequence
  Description of Artificial Sequence: Synthetic oligonucleotide
  Sense strand starting at position 1800 of SEQ ID NO: 915940
gguguuaccuggucuggaa

SEQ ID NO: 1117889 - RNA, 19 nt, Artificial Sequence
  Description of Artificial Sequence: Synthetic oligonucleotide
  Antisense strand to SEQ ID NO: 1117888
uuccagaccagguaacacc

SEQ ID NO: 1117890 - RNA, 19 nt, Artificial Sequence
  Description of Artificial Sequence: Synthetic oligonucleotide
  Sense strand starting at position 2130 of SEQ ID NO: 915940
cuuccugcccuuugggaua

SEQ ID NO: 1117891 - RNA, 19 nt, Artificial Sequence
  Description of Artificial Sequence: Synthetic oligonucleotide
  Antisense strand to SEQ ID NO: 1117890
uaucccaaagggcaggaag

SEQ ID NO: 1117892 - RNA, 19 nt, Artificial Sequence
  Description of Artificial Sequence: Synthetic oligonucleotide
  Sense strand starting at position 2150 of SEQ ID NO: 915940
cuagguggguguucugaua

SEQ ID NO: 1117893 - RNA, 19 nt, Artificial Sequence
  Description of Artificial Sequence: Synthetic oligonucleotide
  Antisense strand to SEQ ID NO: 1117892
uaucagaacacccaccuag

SEQ ID NO: 1117894 - RNA, 19 nt, Artificial Sequence
  Description of Artificial Sequence: Synthetic oligonucleotide
  Sense strand starting at position 2158 of SEQ ID NO: 915940
guguucugauacuucuuua

SEQ ID NO: 1117895 - RNA, 19 nt, Artificial Sequence
  Description of Artificial Sequence: Synthetic oligonucleotide
  Antisense strand to SEQ ID NO: 1117894
uaaagaaguaucagaacac

SEQ ID NO: 1117896 - RNA, 19 nt, Artificial Sequence
  Description of Artificial Sequence: Synthetic oligonucleotide
  Sense strand starting at position 2174 of SEQ ID NO: 915940
uuacuauccuuaucaguug

SEQ ID NO: 1117897 - RNA, 19 nt, Artificial Sequence
  Description of Artificial Sequence: Synthetic oligonucleotide
  Antisense strand to SEQ ID NO: 1117896
caacugauaaggauaguaa

SEQ ID NO: 1117898 - RNA, 19 nt, Artificial Sequence
  Description of Artificial Sequence: Synthetic oligonucleotide
  Sense strand starting at position 2177 of SEQ ID NO: 915940
cuauccuuaucaguuguua

SEQ ID NO: 1117899 - RNA, 19 nt, Artificial Sequence
  Description of Artificial Sequence: Synthetic oligonucleotide
  Antisense strand to SEQ ID NO: 1117898
uaacaacugauaaggauag

SEQ ID NO: 1117900 - RNA, 19 nt, Artificial Sequence
  Description of Artificial Sequence: Synthetic oligonucleotide
  Sense strand starting at position 2181 of SEQ ID NO: 915940
ccuuaucaguuguuaguua

SEQ ID NO: 1117901 - RNA, 19 nt, Artificial Sequence
  Description of Artificial Sequence: Synthetic oligonucleotide
  Antisense strand to SEQ ID NO: 1117900
uaacuaacaacugauaagg

SEQ ID NO: 1117902 - RNA, 19 nt, Artificial Sequence
  Description of Artificial Sequence: Synthetic oligonucleotide
  Sense strand starting at position 2185 of SEQ ID NO: 915940
aucaguuguuaguuaaaca

SEQ ID NO: 1117903 - RNA, 19 nt, Artificial Sequence
  Description of Artificial Sequence: Synthetic oligonucleotide
  Antisense strand to SEQ ID NO: 1117902
uguuuaacuaacaacugau

SEQ ID NO: 1117904 - RNA, 19 nt, Artificial Sequence
  Description of Artificial Sequence: Synthetic oligonucleotide
  Sense strand starting at position 2624 of SEQ ID NO: 915940
ugaaguaucuugcuacgga

SEQ ID NO: 1117905 - RNA, 19 nt, Artificial Sequence
  Description of Artificial Sequence: Synthetic oligonucleotide
  Antisense strand to SEQ ID NO: 1117904
uccguagcaagauacuuca

SEQ ID NO: 1117906 - RNA, 19 nt, Artificial Sequence
  Description of Artificial Sequence: Synthetic oligonucleotide
  Sense strand starting at position 2836 of SEQ ID NO: 915940
ggaauucccuauuauauga

SEQ ID NO: 1117907 - RNA, 19 nt, Artificial Sequence
  Description of Artificial Sequence: Synthetic oligonucleotide
  Antisense strand to SEQ ID NO: 1117906
ucauauaauagggaauucc

SEQ ID NO: 1117908 - RNA, 19 nt, Artificial Sequence
  Description of Artificial Sequence: Synthetic oligonucleotide
  Sense strand starting at position 2881 of SEQ ID NO: 915940
augcucuuuccagagucuu

SEQ ID NO: 1117909 - RNA, 19 nt, Artificial Sequence
  Description of Artificial Sequence: Synthetic oligonucleotide
  Antisense strand to SEQ ID NO: 1117908
aagacucuggaaagagcau

SEQ ID NO: 1117910 - RNA, 19 nt, Artificial Sequence
  Description of Artificial Sequence: Synthetic oligonucleotide
  Sense strand starting at position 2912 of SEQ ID NO: 915940
uauauauggccaugcuuga

SEQ ID NO: 1117911 - RNA, 19 nt, Artificial Sequence
  Description of Artificial Sequence: Synthetic oligonucleotide
  Antisense strand to SEQ ID NO: 1117910
ucaagcauggccauauaua

SEQ ID NO: 1117912 - RNA, 19 nt, Artificial Sequence
  Description of Artificial Sequence: Synthetic oligonucleotide
  Sense strand starting at position 2965 of SEQ ID NO: 915940
cgaugaaggaagugugaau

SEQ ID NO: 1117913 - RNA, 19 nt, Artificial Sequence
  Description of Artificial Sequence: Synthetic oligonucleotide
  Antisense strand to SEQ ID NO: 1117912
auucacacuuccuucaucg

SEQ ID NO: 1117914 - RNA, 19 nt, Artificial Sequence
  Description of Artificial Sequence: Synthetic oligonucleotide
  Sense strand starting at position 3074 of SEQ ID NO: 915940
augguaguuaugggaaagu

SEQ ID NO: 1117915 - RNA, 19 nt, Artificial Sequence
  Description of Artificial Sequence: Synthetic oligonucleotide
  Antisense strand to SEQ ID NO: 1117914
acuuucccauaacuaccau

SEQ ID NO: 1117916 - RNA, 19 nt, Artificial Sequence
  Description of Artificial Sequence: Synthetic oligonucleotide
  Sense strand starting at position 3083 of SEQ ID NO: 915940
augggaaaguuagauauuu

SEQ ID NO: 1117917 - RNA, 19 nt, Artificial Sequence
  Description of Artificial Sequence: Synthetic oligonucleotide
  Antisense strand to SEQ ID NO: 1117916
aaauaucuaacuuucccau

SEQ ID NO: 1117918 - RNA, 19 nt, Artificial Sequence
  Description of Artificial Sequence: Synthetic oligonucleotide
  Sense strand starting at position 3100 of SEQ ID NO: 915940
uuaguaacucgaggugaau

SEQ ID NO: 1117919 - RNA, 19 nt, Artificial Sequence
  Description of Artificial Sequence: Synthetic oligonucleotide
  Antisense strand to SEQ ID NO: 1117918
auucaccucgaguuacuaa

SEQ ID NO: 1117920 - RNA, 19 nt, Artificial Sequence
  Description of Artificial Sequence: Synthetic oligonucleotide
  Sense strand starting at position 3148 of SEQ ID NO: 915940
cagugaggucaauguagag

SEQ ID NO: 1117921 - RNA, 19 nt, Artificial Sequence
  Description of Artificial Sequence: Synthetic oligonucleotide
  Antisense strand to SEQ ID NO: 1117920
cucuacauugaccucacug

SEQ ID NO: 1117922 - RNA, 19 nt, Artificial Sequence
  Description of Artificial Sequence: Synthetic oligonucleotide
  Sense strand starting at position 3154 of SEQ ID NO: 915940
ggucaauguagaggguauu

SEQ ID NO: 1117923 - RNA, 19 nt, Artificial Sequence
  Description of Artificial Sequence: Synthetic oligonucleotide
  Antisense strand to SEQ ID NO: 1117922
aauacccucuacauugacc

SEQ ID NO: 1117924 - RNA, 19 nt, Artificial Sequence
  Description of Artificial Sequence: Synthetic oligonucleotide
  Sense strand starting at position 3155 of SEQ ID NO: 915940
gucaauguagaggguauua

SEQ ID NO: 1117925 - RNA, 19 nt, Artificial Sequence
  Description of Artificial Sequence: Synthetic oligonucleotide
  Antisense strand to SEQ ID NO: 1117924
uaauacccucuacauugac

SEQ ID NO: 1117926 - RNA, 19 nt, Artificial Sequence
  Description of Artificial Sequence: Synthetic oligonucleotide
  Sense strand starting at position 3160 of SEQ ID NO: 915940
uguagaggguauuaaagaa

SEQ ID NO: 1117927 - RNA, 19 nt, Artificial Sequence
  Description of Artificial Sequence: Synthetic oligonucleotide
  Antisense strand to SEQ ID NO: 1117926
uucuuuaauacccucuaca

SEQ ID NO: 1117928 - RNA, 19 nt, Artificial Sequence
  Description of Artificial Sequence: Synthetic oligonucleotide
  Sense strand starting at position 3552 of SEQ ID NO: 915940
gggagacgaugagauauau

SEQ ID NO: 1117929 - RNA, 19 nt, Artificial Sequence
  Description of Artificial Sequence: Synthetic oligonucleotide
  Antisense strand to SEQ ID NO: 1117928
auauaucucaucgucuccc

SEQ ID NO: 1117930 - RNA, 19 nt, Artificial Sequence
  Description of Artificial Sequence: Synthetic oligonucleotide
  Sense strand starting at position 3808 of SEQ ID NO: 915940
aaaccaagaugcgaugaaa

SEQ ID NO: 1117931 - RNA, 19 nt, Artificial Sequence
  Description of Artificial Sequence: Synthetic oligonucleotide
  Antisense strand to SEQ ID NO: 1117930
uuucaucgcaucuugguuu

SEQ ID NO: 1117932 - RNA, 19 nt, Artificial Sequence
  Description of Artificial Sequence: Synthetic oligonucleotide
  Sense strand starting at position 3950 of SEQ ID NO: 915940
cccuauauugucugaaaug

SEQ ID NO: 1117933 - RNA, 19 nt, Artificial Sequence
  Description of Artificial Sequence: Synthetic oligonucleotide
  Antisense strand to SEQ ID NO: 1117932
cauuucagacaauauaggg

SEQ ID NO: 1117934 - RNA, 19 nt, Artificial Sequence
  Description of Artificial Sequence: Synthetic oligonucleotide
  Sense strand starting at position 89 of SEQ ID NO: 915941
ccaguucuuucuuugcaca

SEQ ID NO: 1117935 - RNA, 19 nt, Artificial Sequence
  Description of Artificial Sequence: Synthetic oligonucleotide
  Antisense strand to SEQ ID NO: 1117934
ugugcaaagaaagaacugg

SEQ ID NO: 1117936 - RNA, 19 nt, Artificial Sequence
  Description of Artificial Sequence: Synthetic oligonucleotide
  Sense strand starting at position 206 of SEQ ID NO: 915941
gcagcuguuucugccauuu

SEQ ID NO: 1117937 - RNA, 19 nt, Artificial Sequence
  Description of Artificial Sequence: Synthetic oligonucleotide
  Antisense strand to SEQ ID NO: 1117936
aaauggcagaaacagcugc

SEQ ID NO: 1117938 - RNA, 19 nt, Artificial Sequence
  Description of Artificial Sequence: Synthetic oligonucleotide
  Sense strand starting at position 286 of SEQ ID NO: 915941
cgacuuggaucucaacuuu

SEQ ID NO: 1117939 - RNA, 19 nt, Artificial Sequence
  Description of Artificial Sequence: Synthetic oligonucleotide
  Antisense strand to SEQ ID NO: 1117938
aaaguugagauccaagucg

SEQ ID NO: 1117940 - RNA, 19 nt, Artificial Sequence
  Description of Artificial Sequence: Synthetic oligonucleotide
  Sense strand starting at position 419 of SEQ ID NO: 915941
gcacguggacuuuauugau

SEQ ID NO: 1117941 - RNA, 19 nt, Artificial Sequence
  Description of Artificial Sequence: Synthetic oligonucleotide
  Antisense strand to SEQ ID NO: 1117940
aucaauaaaguccacgugc

SEQ ID NO: 1117942 - RNA, 19 nt, Artificial Sequence
  Description of Artificial Sequence: Synthetic oligonucleotide
  Sense strand starting at position 459 of SEQ ID NO: 915941
ggguuugacucagaaagga

SEQ ID NO: 1117943 - RNA, 19 nt, Artificial Sequence
  Description of Artificial Sequence: Synthetic oligonucleotide
  Antisense strand to SEQ ID NO: 1117942
uccuuucugagucaaaccc

SEQ ID NO: 1117944 - RNA, 19 nt, Artificial Sequence
  Description of Artificial Sequence: Synthetic oligonucleotide
  Sense strand starting at position 537 of SEQ ID NO: 915941
ggcgcuacucgagaaacga

SEQ ID NO: 1117945 - RNA, 19 nt, Artificial Sequence
  Description of Artificial Sequence: Synthetic oligonucleotide
  Antisense strand to SEQ ID NO: 1117944
ucguuucucgaguagcgcc

SEQ ID NO: 1117946 - RNA, 19 nt, Artificial Sequence
  Description of Artificial Sequence: Synthetic oligonucleotide
  Sense strand starting at position 596 of SEQ ID NO: 915941
agcuuccaggcucgaaaua

SEQ ID NO: 1117947 - RNA, 19 nt, Artificial Sequence
  Description of Artificial Sequence: Synthetic oligonucleotide
  Antisense strand to SEQ ID NO: 1117946
uauuucgagccuggaagcu

SEQ ID NO: 1117948 - RNA, 19 nt, Artificial Sequence
  Description of Artificial Sequence: Synthetic oligonucleotide
  Sense strand starting at position 597 of SEQ ID NO: 915941
gcuuccaggcucgaaauaa

SEQ ID NO: 1117949 - RNA, 19 nt, Artificial Sequence
  Description of Artificial Sequence: Synthetic oligonucleotide
  Antisense strand to SEQ ID NO: 1117948
uuauuucgagccuggaagc

SEQ ID NO: 1117950 - RNA, 19 nt, Artificial Sequence
  Description of Artificial Sequence: Synthetic oligonucleotide
  Sense strand starting at position 873 of SEQ ID NO: 915941
acgcuaaugugaucccgaa

SEQ ID NO: 1117951 - RNA, 19 nt, Artificial Sequence
  Description of Artificial Sequence: Synthetic oligonucleotide
  Antisense strand to SEQ ID NO: 1117950
uucgggaucacauuagcgu

SEQ ID NO: 1117952 - RNA, 19 nt, Artificial Sequence
  Description of Artificial Sequence: Synthetic oligonucleotide
  Sense strand starting at position 1163 of SEQ ID NO: 915941
agcccaaagcgcuaaauuu

SEQ ID NO: 1117953 - RNA, 19 nt, Artificial Sequence
  Description of Artificial Sequence: Synthetic oligonucleotide
  Antisense strand to SEQ ID NO: 1117952
aaauuuagcgcuuugggcu

SEQ ID NO: 1117954 - RNA, 19 nt, Artificial Sequence
  Description of Artificial Sequence: Synthetic oligonucleotide
  Sense strand starting at position 1389 of SEQ ID NO: 915941
gcgggaagccgcuuucaug

SEQ ID NO: 1117955 - RNA, 19 nt, Artificial Sequence
  Description of Artificial Sequence: Synthetic oligonucleotide
  Antisense strand to SEQ ID NO: 1117954
caugaaagcggcuucccgc

SEQ ID NO: 1117956 - RNA, 19 nt, Artificial Sequence
  Description of Artificial Sequence: Synthetic oligonucleotide
  Sense strand starting at position 2419 of SEQ ID NO: 915941
gggugcagucgugcaaguu

SEQ ID NO: 1117957 - RNA, 19 nt, Artificial Sequence
  Description of Artificial Sequence: Synthetic oligonucleotide
  Antisense strand to SEQ ID NO: 1117956
aacuugcacgacugcaccc

SEQ ID NO: 1117958 - RNA, 19 nt, Artificial Sequence
  Description of Artificial Sequence: Synthetic oligonucleotide
  Sense strand starting at position 2420 of SEQ ID NO: 915941
ggugcagucgugcaaguuu

SEQ ID NO: 1117959 - RNA, 19 nt, Artificial Sequence
  Description of Artificial Sequence: Synthetic oligonucleotide
  Antisense strand to SEQ ID NO: 1117958
aaacuugcacgacugcacc

SEQ ID NO: 1117960 - RNA, 19 nt, Artificial Sequence
  Description of Artificial Sequence: Synthetic oligonucleotide
  Sense strand starting at position 2447 of SEQ ID NO: 915941
ucucuugacuucuccgagu

SEQ ID NO: 1117961 - RNA, 19 nt, Artificial Sequence
  Description of Artificial Sequence: Synthetic oligonucleotide
  Antisense strand to SEQ ID NO: 1117960
acucggagaagucaagaga

SEQ ID NO: 1117962 - RNA, 19 nt, Artificial Sequence
  Description of Artificial Sequence: Synthetic oligonucleotide
  Sense strand starting at position 2449 of SEQ ID NO: 915941
ucuugacuucuccgaguug

SEQ ID NO: 1117963 - RNA, 19 nt, Artificial Sequence
  Description of Artificial Sequence: Synthetic oligonucleotide
  Antisense strand to SEQ ID NO: 1117962
caacucggagaagucaaga

SEQ ID NO: 1117964 - RNA, 19 nt, Artificial Sequence
  Description of Artificial Sequence: Synthetic oligonucleotide
  Sense strand starting at position 2450 of SEQ ID NO: 915941
cuugacuucuccgaguuga

SEQ ID NO: 1117965 - RNA, 19 nt, Artificial Sequence
  Description of Artificial Sequence: Synthetic oligonucleotide
  Antisense strand to SEQ ID NO: 1117964
ucaacucggagaagucaag

SEQ ID NO: 1117966 - RNA, 19 nt, Artificial Sequence
  Description of Artificial Sequence: Synthetic oligonucleotide
  Sense strand starting at position 2487 of SEQ ID NO: 915941
cgaggugcucuuggaaaga

SEQ ID NO: 1117967 - RNA, 19 nt, Artificial Sequence
  Description of Artificial Sequence: Synthetic oligonucleotide
  Antisense strand to SEQ ID NO: 1117966
ucuuuccaagagcaccucg

SEQ ID NO: 1117968 - RNA, 19 nt, Artificial Sequence
  Description of Artificial Sequence: Synthetic oligonucleotide
  Sense strand starting at position 2496 of SEQ ID NO: 915941
cuuggaaagaguugggcau

SEQ ID NO: 1117969 - RNA, 19 nt, Artificial Sequence
  Description of Artificial Sequence: Synthetic oligonucleotide
  Antisense strand to SEQ ID NO: 1117968
augcccaacucuuuccaag

SEQ ID NO: 1117970 - RNA, 19 nt, Artificial Sequence
  Description of Artificial Sequence: Synthetic oligonucleotide
  Sense strand starting at position 2641 of SEQ ID NO: 915941
ucucgaccuugaguacuaa

SEQ ID NO: 1117971 - RNA, 19 nt, Artificial Sequence
  Description of Artificial Sequence: Synthetic oligonucleotide
  Antisense strand to SEQ ID NO: 1117970
uuaguacucaaggucgaga

SEQ ID NO: 1117972 - RNA, 19 nt, Artificial Sequence
  Description of Artificial Sequence: Synthetic oligonucleotide
  Sense strand starting at position 2642 of SEQ ID NO: 915941
cucgaccuugaguacuaaa

SEQ ID NO: 1117973 - RNA, 19 nt, Artificial Sequence
  Description of Artificial Sequence: Synthetic oligonucleotide
  Antisense strand to SEQ ID NO: 1117972
uuuaguacucaaggucgag

SEQ ID NO: 1117974 - RNA, 19 nt, Artificial Sequence
  Description of Artificial Sequence: Synthetic oligonucleotide
  Sense strand starting at position 2645 of SEQ ID NO: 915941
gaccuugaguacuaaagag

SEQ ID NO: 1117975 - RNA, 19 nt, Artificial Sequence
  Description of Artificial Sequence: Synthetic oligonucleotide
  Antisense strand to SEQ ID NO: 1117974
cucuuuaguacucaagguc

SEQ ID NO: 1117976 - RNA, 19 nt, Artificial Sequence
  Description of Artificial Sequence: Synthetic oligonucleotide
  Sense strand starting at position 2685 of SEQ ID NO: 915941
aaugaugaucagcaucgua

SEQ ID NO: 1117977 - RNA, 19 nt, Artificial Sequence
  Description of Artificial Sequence: Synthetic oligonucleotide
  Antisense strand to SEQ ID NO: 1117976
uacgaugcugaucaucauu

SEQ ID NO: 1117978 - RNA, 19 nt, Artificial Sequence
  Description of Artificial Sequence: Synthetic oligonucleotide
  Sense strand starting at position 2688 of SEQ ID NO: 915941
gaugaucagcaucguaaca

SEQ ID NO: 1117979 - RNA, 19 nt, Artificial Sequence
  Description of Artificial Sequence: Synthetic oligonucleotide
  Antisense strand to SEQ ID NO: 1117978
uguuacgaugcugaucauc

SEQ ID NO: 1117980 - RNA, 19 nt, Artificial Sequence
  Description of Artificial Sequence: Synthetic oligonucleotide
  Sense strand starting at position 2725 of SEQ ID NO: 915941
cccagaaguucucuuguca

SEQ ID NO: 1117981 - RNA, 19 nt, Artificial Sequence
  Description of Artificial Sequence: Synthetic oligonucleotide
  Antisense strand to SEQ ID NO: 1117980
ugacaagagaacuucuggg

SEQ ID NO: 1117982 - RNA, 19 nt, Artificial Sequence
  Description of Artificial Sequence: Synthetic oligonucleotide
  Sense strand starting at position 2732 of SEQ ID NO: 915941
guucucuugucauaaacaa

SEQ ID NO: 1117983 - RNA, 19 nt, Artificial Sequence
  Description of Artificial Sequence: Synthetic oligonucleotide
  Antisense strand to SEQ ID NO: 1117982
uuguuuaugacaagagaac

SEQ ID NO: 1117984 - RNA, 19 nt, Artificial Sequence
  Description of Artificial Sequence: Synthetic oligonucleotide
  Sense strand starting at position 2909 of SEQ ID NO: 915941
gggagaaaucugcgaugau

SEQ ID NO: 1117985 - RNA, 19 nt, Artificial Sequence
  Description of Artificial Sequence: Synthetic oligonucleotide
  Antisense strand to SEQ ID NO: 1117984
aucaucgcagauuucuccc

SEQ ID NO: 1117986 - RNA, 19 nt, Artificial Sequence
  Description of Artificial Sequence: Synthetic oligonucleotide
  Sense strand starting at position 2910 of SEQ ID NO: 915941
ggagaaaucugcgaugauc

SEQ ID NO: 1117987 - RNA, 19 nt, Artificial Sequence
  Description of Artificial Sequence: Synthetic oligonucleotide
  Antisense strand to SEQ ID NO: 1117986
gaucaucgcagauuucucc

SEQ ID NO: 1117988 - RNA, 19 nt, Artificial Sequence
  Description of Artificial Sequence: Synthetic oligonucleotide
  Sense strand starting at position 2912 of SEQ ID NO: 915941
agaaaucugcgaugaucag

SEQ ID NO: 1117989 - RNA, 19 nt, Artificial Sequence
  Description of Artificial Sequence: Synthetic oligonucleotide
  Antisense strand to SEQ ID NO: 1117988
cugaucaucgcagauuucu

SEQ ID NO: 1117990 - RNA, 19 nt, Artificial Sequence
  Description of Artificial Sequence: Synthetic oligonucleotide
  Sense strand starting at position 2987 of SEQ ID NO: 915941
gcuaaugcgcgcccagaau

SEQ ID NO: 1117991 - RNA, 19 nt, Artificial Sequence
  Description of Artificial Sequence: Synthetic oligonucleotide
  Antisense strand to SEQ ID NO: 1117990
auucugggcgcgcauuagc

SEQ ID NO: 1117992 - RNA, 19 nt, Artificial Sequence
  Description of Artificial Sequence: Synthetic oligonucleotide
  Sense strand starting at position 3017 of SEQ ID NO: 915941
ccgagaguggcccaaaugu

SEQ ID NO: 1117993 - RNA, 19 nt, Artificial Sequence
  Description of Artificial Sequence: Synthetic oligonucleotide
  Antisense strand to SEQ ID NO: 1117992
acauuugggccacucucgg

SEQ ID NO: 1117994 - RNA, 19 nt, Artificial Sequence
  Description of Artificial Sequence: Synthetic oligonucleotide
  Sense strand starting at position 3089 of SEQ ID NO: 915941
gaaacugaguccugggaaa

SEQ ID NO: 1117995 - RNA, 19 nt, Artificial Sequence
  Description of Artificial Sequence: Synthetic oligonucleotide
  Antisense strand to SEQ ID NO: 1117994
uuucccaggacucaguuuc

SEQ ID NO: 1117996 - RNA, 19 nt, Artificial Sequence
  Description of Artificial Sequence: Synthetic oligonucleotide
  Sense strand starting at position 3102 of SEQ ID NO: 915941
gggaaaguuuaagguugca

SEQ ID NO: 1117997 - RNA, 19 nt, Artificial Sequence
  Description of Artificial Sequence: Synthetic oligonucleotide
  Antisense strand to SEQ ID NO: 1117996
ugcaaccuuaaacuuuccc

SEQ ID NO: 1117998 - RNA, 19 nt, Artificial Sequence
  Description of Artificial Sequence: Synthetic oligonucleotide
  Sense strand starting at position 3120 of SEQ ID NO: 915941
agccuuaaguuguuacuca

SEQ ID NO: 1117999 - RNA, 19 nt, Artificial Sequence
  Description of Artificial Sequence: Synthetic oligonucleotide
  Antisense strand to SEQ ID NO: 1117998
ugaguaacaacuuaaggcu

SEQ ID NO: 1118000 - RNA, 19 nt, Artificial Sequence
  Description of Artificial Sequence: Synthetic oligonucleotide
  Sense strand starting at position 3121 of SEQ ID NO: 915941
gccuuaaguuguuacucau

SEQ ID NO: 1118001 - RNA, 19 nt, Artificial Sequence
  Description of Artificial Sequence: Synthetic oligonucleotide
  Antisense strand to SEQ ID NO: 1118000
augaguaacaacuuaaggc

SEQ ID NO: 1118002 - RNA, 19 nt, Artificial Sequence
  Description of Artificial Sequence: Synthetic oligonucleotide
  Sense strand starting at position 3124 of SEQ ID NO: 915941
uuaaguuguuacucauucu

SEQ ID NO: 1118003 - RNA, 19 nt, Artificial Sequence
  Description of Artificial Sequence: Synthetic oligonucleotide
  Antisense strand to SEQ ID NO: 1118002
agaaugaguaacaacuuaa

SEQ ID NO: 1118004 - RNA, 19 nt, Artificial Sequence
  Description of Artificial Sequence: Synthetic oligonucleotide
  Sense strand starting at position 3127 of SEQ ID NO: 915941
aguuguuacucauucuaga

SEQ ID NO: 1118005 - RNA, 19 nt, Artificial Sequence
  Description of Artificial Sequence: Synthetic oligonucleotide
  Antisense strand to SEQ ID NO: 1118004
ucuagaaugaguaacaacu

SEQ ID NO: 1118006 - RNA, 19 nt, Artificial Sequence
  Description of Artificial Sequence: Synthetic oligonucleotide
  Sense strand starting at position 3132 of SEQ ID NO: 915941
uuacucauucuagacguuu

SEQ ID NO: 1118007 - RNA, 19 nt, Artificial Sequence
  Description of Artificial Sequence: Synthetic oligonucleotide
  Antisense strand to SEQ ID NO: 1118006
aaacgucuagaaugaguaa

SEQ ID NO: 1118008 - RNA, 19 nt, Artificial Sequence
  Description of Artificial Sequence: Synthetic oligonucleotide
  Sense strand starting at position 3353 of SEQ ID NO: 915941
gguuaagaguucgauacca

SEQ ID NO: 1118009 - RNA, 19 nt, Artificial Sequence
  Description of Artificial Sequence: Synthetic oligonucleotide
  Antisense strand to SEQ ID NO: 1118008
ugguaucgaacucuuaacc

SEQ ID NO: 1118010 - RNA, 19 nt, Artificial Sequence
  Description of Artificial Sequence: Synthetic oligonucleotide
  Sense strand starting at position 3949 of SEQ ID NO: 915941
agagaaucguuccgagaau

SEQ ID NO: 1118011 - RNA, 19 nt, Artificial Sequence
  Description of Artificial Sequence: Synthetic oligonucleotide
  Antisense strand to SEQ ID NO: 1118010
auucucggaacgauucucu

SEQ ID NO: 1118012 - RNA, 19 nt, Artificial Sequence
  Description of Artificial Sequence: Synthetic oligonucleotide
  Sense strand starting at position 3950 of SEQ ID NO: 915941
gagaaucguuccgagaauu

SEQ ID NO: 1118013 - RNA, 19 nt, Artificial Sequence
  Description of Artificial Sequence: Synthetic oligonucleotide
  Antisense strand to SEQ ID NO: 1118012
aauucucggaacgauucuc

SEQ ID NO: 1118014 - RNA, 19 nt, Artificial Sequence
  Description of Artificial Sequence: Synthetic oligonucleotide
  Sense strand starting at position 21 of SEQ ID NO: 915942
gaaucuuaacagugagggu

SEQ ID NO: 1118015 - RNA, 19 nt, Artificial Sequence
  Description of Artificial Sequence: Synthetic oligonucleotide
  Antisense strand to SEQ ID NO: 1118014
acccucacuguuaagauuc

SEQ ID NO: 1118016 - RNA, 19 nt, Artificial Sequence
  Description of Artificial Sequence: Synthetic oligonucleotide
  Sense strand starting at position 58 of SEQ ID NO: 915942
augguuagugguggauuaa

SEQ ID NO: 1118017 - RNA, 19 nt, Artificial Sequence
  Description of Artificial Sequence: Synthetic oligonucleotide
  Antisense strand to SEQ ID NO: 1118016
uuaauccaccacuaaccau

SEQ ID NO: 1118018 - RNA, 19 nt, Artificial Sequence
  Description of Artificial Sequence: Synthetic oligonucleotide
  Sense strand starting at position 59 of SEQ ID NO: 915942
ugguuagugguggauuaaa

SEQ ID NO: 1118019 - RNA, 19 nt, Artificial Sequence
  Description of Artificial Sequence: Synthetic oligonucleotide
  Antisense strand to SEQ ID NO: 1118018
uuuaauccaccacuaacca

SEQ ID NO: 1118020 - RNA, 19 nt, Artificial Sequence
  Description of Artificial Sequence: Synthetic oligonucleotide
  Sense strand starting at position 187 of SEQ ID NO: 915942
acaauaucugauggccauu

SEQ ID NO: 1118021 - RNA, 19 nt, Artificial Sequence
  Description of Artificial Sequence: Synthetic oligonucleotide
  Antisense strand to SEQ ID NO: 1118020
aauggccaucagauauugu

SEQ ID NO: 1118022 - RNA, 19 nt, Artificial Sequence
  Description of Artificial Sequence: Synthetic oligonucleotide
  Sense strand starting at position 243 of SEQ ID NO: 915942
cuuauugcuguauaaagaa

SEQ ID NO: 1118023 - RNA, 19 nt, Artificial Sequence
  Description of Artificial Sequence: Synthetic oligonucleotide
  Antisense strand to SEQ ID NO: 1118022
uucuuuauacagcaauaag

SEQ ID NO: 1118024 - RNA, 19 nt, Artificial Sequence
  Description of Artificial Sequence: Synthetic oligonucleotide
  Sense strand starting at position 273 of SEQ ID NO: 915942
auaaauucccuguacagua

SEQ ID NO: 1118025 - RNA, 19 nt, Artificial Sequence
  Description of Artificial Sequence: Synthetic oligonucleotide
  Antisense strand to SEQ ID NO: 1118024
uacuguacagggaauuuau

SEQ ID NO: 1118026 - RNA, 19 nt, Artificial Sequence
  Description of Artificial Sequence: Synthetic oligonucleotide
  Sense strand starting at position 354 of SEQ ID NO: 915942
gcuacuuuacuggaguaag

SEQ ID NO: 1118027 - RNA, 19 nt, Artificial Sequence
  Description of Artificial Sequence: Synthetic oligonucleotide
  Antisense strand to SEQ ID NO: 1118026
cuuacuccaguaaaguagc

SEQ ID NO: 1118028 - RNA, 19 nt, Artificial Sequence
  Description of Artificial Sequence: Synthetic oligonucleotide
  Sense strand starting at position 368 of SEQ ID NO: 915942
guaagugacagucaucuug

SEQ ID NO: 1118029 - RNA, 19 nt, Artificial Sequence
  Description of Artificial Sequence: Synthetic oligonucleotide
  Antisense strand to SEQ ID NO: 1118028
caagaugacugucacuuac

SEQ ID NO: 1118030 - RNA, 19 nt, Artificial Sequence
  Description of Artificial Sequence: Synthetic oligonucleotide
  Sense strand starting at position 370 of SEQ ID NO: 915942
aagugacagucaucuugga

SEQ ID NO: 1118031 - RNA, 19 nt, Artificial Sequence
  Description of Artificial Sequence: Synthetic oligonucleotide
  Antisense strand to SEQ ID NO: 1118030
uccaagaugacugucacuu

SEQ ID NO: 1118032 - RNA, 19 nt, Artificial Sequence
  Description of Artificial Sequence: Synthetic oligonucleotide
  Sense strand starting at position 374 of SEQ ID NO: 915942
gacagucaucuuggauagu

SEQ ID NO: 1118033 - RNA, 19 nt, Artificial Sequence
  Description of Artificial Sequence: Synthetic oligonucleotide
  Antisense strand to SEQ ID NO: 1118032
acuauccaagaugacuguc

SEQ ID NO: 1118034 - RNA, 19 nt, Artificial Sequence
  Description of Artificial Sequence: Synthetic oligonucleotide
  Sense strand starting at position 448 of SEQ ID NO: 915942
ggcauaaaucuguaugucu

SEQ ID NO: 1118035 - RNA, 19 nt, Artificial Sequence
  Description of Artificial Sequence: Synthetic oligonucleotide
  Antisense strand to SEQ ID NO: 1118034
agacauacagauuuaugcc

SEQ ID NO: 1118036 - RNA, 19 nt, Artificial Sequence
  Description of Artificial Sequence: Synthetic oligonucleotide
  Sense strand starting at position 464 of SEQ ID NO: 915942
ucuguauaucaaggaaauu

SEQ ID NO: 1118037 - RNA, 19 nt, Artificial Sequence
  Description of Artificial Sequence: Synthetic oligonucleotide
  Antisense strand to SEQ ID NO: 1118036
aauuuccuugauauacaga

SEQ ID NO: 1118038 - RNA, 19 nt, Artificial Sequence
  Description of Artificial Sequence: Synthetic oligonucleotide
  Sense strand starting at position 525 of SEQ ID NO: 915942
uaguuucuauaauucggaa

SEQ ID NO: 1118039 - RNA, 19 nt, Artificial Sequence
  Description of Artificial Sequence: Synthetic oligonucleotide
  Antisense strand to SEQ ID NO: 1118038
uuccgaauuauagaaacua

SEQ ID NO: 1118040 - RNA, 19 nt, Artificial Sequence
  Description of Artificial Sequence: Synthetic oligonucleotide
  Sense strand starting at position 562 of SEQ ID NO: 915942
cucaguuuagcagaaagca

SEQ ID NO: 1118041 - RNA, 19 nt, Artificial Sequence
  Description of Artificial Sequence: Synthetic oligonucleotide
  Antisense strand to SEQ ID NO: 1118040
ugcuuucugcuaaacugag

SEQ ID NO: 1118042 - RNA, 19 nt, Artificial Sequence
  Description of Artificial Sequence: Synthetic oligonucleotide
  Sense strand starting at position 660 of SEQ ID NO: 915942
auagccauuggccaauaua

SEQ ID NO: 1118043 - RNA, 19 nt, Artificial Sequence
  Description of Artificial Sequence: Synthetic oligonucleotide
  Antisense strand to SEQ ID NO: 1118042
uauauuggccaauggcuau

SEQ ID NO: 1118044 - RNA, 19 nt, Artificial Sequence
  Description of Artificial Sequence: Synthetic oligonucleotide
  Sense strand starting at position 704 of SEQ ID NO: 915942
caaggcccucgugagaauu

SEQ ID NO: 1118045 - RNA, 19 nt, Artificial Sequence
  Description of Artificial Sequence: Synthetic oligonucleotide
  Antisense strand to SEQ ID NO: 1118044
aauucucacgagggccuug

SEQ ID NO: 1118046 - RNA, 19 nt, Artificial Sequence
  Description of Artificial Sequence: Synthetic oligonucleotide
  Sense strand starting at position 748 of SEQ ID NO: 915942
uuugauugcauguagaugu

SEQ ID NO: 1118047 - RNA, 19 nt, Artificial Sequence
  Description of Artificial Sequence: Synthetic oligonucleotide
  Antisense strand to SEQ ID NO: 1118046
acaucuacaugcaaucaaa

SEQ ID NO: 1118048 - RNA, 19 nt, Artificial Sequence
  Description of Artificial Sequence: Synthetic oligonucleotide
  Sense strand starting at position 793 of SEQ ID NO: 915942
guuagcacucauugcauuu

SEQ ID NO: 1118049 - RNA, 19 nt, Artificial Sequence
  Description of Artificial Sequence: Synthetic oligonucleotide
  Antisense strand to SEQ ID NO: 1118048
aaaugcaaugagugcuaac

SEQ ID NO: 1118050 - RNA, 19 nt, Artificial Sequence
  Description of Artificial Sequence: Synthetic oligonucleotide
  Sense strand starting at position 879 of SEQ ID NO: 915942
guacauaaaugcuuaggga

SEQ ID NO: 1118051 - RNA, 19 nt, Artificial Sequence
  Description of Artificial Sequence: Synthetic oligonucleotide
  Antisense strand to SEQ ID NO: 1118050
ucccuaagcauuuauguac

SEQ ID NO: 1118052 - RNA, 19 nt, Artificial Sequence
  Description of Artificial Sequence: Synthetic oligonucleotide
  Sense strand starting at position 968 of SEQ ID NO: 915942
ucaugaaugugguuaggau

SEQ ID NO: 1118053 - RNA, 19 nt, Artificial Sequence
  Description of Artificial Sequence: Synthetic oligonucleotide
  Antisense strand to SEQ ID NO: 1118052
auccuaaccacauucauga

SEQ ID NO: 1118054 - RNA, 19 nt, Artificial Sequence
  Description of Artificial Sequence: Synthetic oligonucleotide
  Sense strand starting at position 1012 of SEQ ID NO: 915942
uuuggugaguucuuuggaa

SEQ ID NO: 1118055 - RNA, 19 nt, Artificial Sequence
  Description of Artificial Sequence: Synthetic oligonucleotide
  Antisense strand to SEQ ID NO: 1118054
uuccaaagaacucaccaaa

SEQ ID NO: 1118056 - RNA, 19 nt, Artificial Sequence
  Description of Artificial Sequence: Synthetic oligonucleotide
  Sense strand starting at position 1112 of SEQ ID NO: 915942
auuucuggcuaagauagaa

SEQ ID NO: 1118057 - RNA, 19 nt, Artificial Sequence
  Description of Artificial Sequence: Synthetic oligonucleotide
  Antisense strand to SEQ ID NO: 1118056
uucuaucuuagccagaaau

SEQ ID NO: 1118058 - RNA, 19 nt, Artificial Sequence
  Description of Artificial Sequence: Synthetic oligonucleotide
  Sense strand starting at position 1203 of SEQ ID NO: 915942
agcuacuuagacugaaauc

SEQ ID NO: 1118059 - RNA, 19 nt, Artificial Sequence
  Description of Artificial Sequence: Synthetic oligonucleotide
  Antisense strand to SEQ ID NO: 1118058
gauuucagucuaaguagcu

SEQ ID NO: 1118060 - RNA, 19 nt, Artificial Sequence
  Description of Artificial Sequence: Synthetic oligonucleotide
  Sense strand starting at position 1334 of SEQ ID NO: 915942
cuuuacucauugcuggaaa

SEQ ID NO: 1118061 - RNA, 19 nt, Artificial Sequence
  Description of Artificial Sequence: Synthetic oligonucleotide
  Antisense strand to SEQ ID NO: 1118060
uuuccagcaaugaguaaag

SEQ ID NO: 1118062 - RNA, 19 nt, Artificial Sequence
  Description of Artificial Sequence: Synthetic oligonucleotide
  Sense strand starting at position 1740 of SEQ ID NO: 915942
gcaaguagaggucagaauu

SEQ ID NO: 1118063 - RNA, 19 nt, Artificial Sequence
  Description of Artificial Sequence: Synthetic oligonucleotide
  Antisense strand to SEQ ID NO: 1118062
aauucugaccucuacuugc

SEQ ID NO: 1118064 - RNA, 19 nt, Artificial Sequence
  Description of Artificial Sequence: Synthetic oligonucleotide
  Sense strand starting at position 1803 of SEQ ID NO: 915942
uguagucuccgacaggaaa

SEQ ID NO: 1118065 - RNA, 19 nt, Artificial Sequence
  Description of Artificial Sequence: Synthetic oligonucleotide
  Antisense strand to SEQ ID NO: 1118064
uuuccugucggagacuaca

SEQ ID NO: 1118066 - RNA, 19 nt, Artificial Sequence
  Description of Artificial Sequence: Synthetic oligonucleotide
  Sense strand starting at position 1895 of SEQ ID NO: 915942
gcucgugcacagucagauu

SEQ ID NO: 1118067 - RNA, 19 nt, Artificial Sequence
  Description of Artificial Sequence: Synthetic oligonucleotide
  Antisense strand to SEQ ID NO: 1118066
aaucugacugugcacgagc

SEQ ID NO: 1118068 - RNA, 19 nt, Artificial Sequence
  Description of Artificial Sequence: Synthetic oligonucleotide
  Sense strand starting at position 2020 of SEQ ID NO: 915942
acaguuauagcugggaaca

SEQ ID NO: 1118069 - RNA, 19 nt, Artificial Sequence
  Description of Artificial Sequence: Synthetic oligonucleotide
  Antisense strand to SEQ ID NO: 1118068
uguucccagcuauaacugu

SEQ ID NO: 1118070 - RNA, 19 nt, Artificial Sequence
  Description of Artificial Sequence: Synthetic oligonucleotide
  Sense strand starting at position 2021 of SEQ ID NO: 915942
caguuauagcugggaacaa

SEQ ID NO: 1118071 - RNA, 19 nt, Artificial Sequence
  Description of Artificial Sequence: Synthetic oligonucleotide
  Antisense strand to SEQ ID NO: 1118070
uuguucccagcuauaacug

SEQ ID NO: 1118072 - RNA, 19 nt, Artificial Sequence
  Description of Artificial Sequence: Synthetic oligonucleotide
  Sense strand starting at position 2122 of SEQ ID NO: 915942
agaaguuggcagugacaug

SEQ ID NO: 1118073 - RNA, 19 nt, Artificial Sequence
  Description of Artificial Sequence: Synthetic oligonucleotide
  Antisense strand to SEQ ID NO: 1118072
caugucacugccaacuucu

SEQ ID NO: 1118074 - RNA, 19 nt, Artificial Sequence
  Description of Artificial Sequence: Synthetic oligonucleotide
  Sense strand starting at position 2152 of SEQ ID NO: 915942
gccguuugucuguuagauu

SEQ ID NO: 1118075 - RNA, 19 nt, Artificial Sequence
  Description of Artificial Sequence: Synthetic oligonucleotide
  Antisense strand to SEQ ID NO: 1118074
aaucuaacagacaaacggc

SEQ ID NO: 1118076 - RNA, 19 nt, Artificial Sequence
  Description of Artificial Sequence: Synthetic oligonucleotide
  Sense strand starting at position 2271 of SEQ ID NO: 915942
uugugcuugaaaugaagau

SEQ ID NO: 1118077 - RNA, 19 nt, Artificial Sequence
  Description of Artificial Sequence: Synthetic oligonucleotide
  Antisense strand to SEQ ID NO: 1118076
aucuucauuucaagcacaa

SEQ ID NO: 1118078 - RNA, 19 nt, Artificial Sequence
  Description of Artificial Sequence: Synthetic oligonucleotide
  Sense strand starting at position 2272 of SEQ ID NO: 915942
ugugcuugaaaugaagauu

SEQ ID NO: 1118079 - RNA, 19 nt, Artificial Sequence
  Description of Artificial Sequence: Synthetic oligonucleotide
  Antisense strand to SEQ ID NO: 1118078
aaucuucauuucaagcaca

SEQ ID NO: 1118080 - RNA, 19 nt, Artificial Sequence
  Description of Artificial Sequence: Synthetic oligonucleotide
  Sense strand starting at position 2484 of SEQ ID NO: 915942
gagguuaaggcuggagaau

SEQ ID NO: 1118081 - RNA, 19 nt, Artificial Sequence
  Description of Artificial Sequence: Synthetic oligonucleotide
  Antisense strand to SEQ ID NO: 1118080
auucuccagccuuaaccuc

SEQ ID NO: 1118082 - RNA, 19 nt, Artificial Sequence
  Description of Artificial Sequence: Synthetic oligonucleotide
  Sense strand starting at position 2658 of SEQ ID NO: 915942
ccacuugagagguguugaa

SEQ ID NO: 1118083 - RNA, 19 nt, Artificial Sequence
  Description of Artificial Sequence: Synthetic oligonucleotide
  Antisense strand to SEQ ID NO: 1118082
uucaacaccucucaagugg

SEQ ID NO: 1118084 - RNA, 19 nt, Artificial Sequence
  Description of Artificial Sequence: Synthetic oligonucleotide
  Sense strand starting at position 2699 of SEQ ID NO: 915942
cgauuauguguuagugugu

SEQ ID NO: 1118085 - RNA, 19 nt, Artificial Sequence
  Description of Artificial Sequence: Synthetic oligonucleotide
  Antisense strand to SEQ ID NO: 1118084
acacacuaacacauaaucg

SEQ ID NO: 1118086 - RNA, 19 nt, Artificial Sequence
  Description of Artificial Sequence: Synthetic oligonucleotide
  Sense strand starting at position 2775 of SEQ ID NO: 915942
cuuaguguagugggaaaua

SEQ ID NO: 1118087 - RNA, 19 nt, Artificial Sequence
  Description of Artificial Sequence: Synthetic oligonucleotide
  Antisense strand to SEQ ID NO: 1118086
uauuucccacuacacuaag

SEQ ID NO: 1118088 - RNA, 19 nt, Artificial Sequence
  Description of Artificial Sequence: Synthetic oligonucleotide
  Sense strand starting at position 3134 of SEQ ID NO: 915942
cauggucagcuaggaaauu

SEQ ID NO: 1118089 - RNA, 19 nt, Artificial Sequence
  Description of Artificial Sequence: Synthetic oligonucleotide
  Antisense strand to SEQ ID NO: 1118088
aauuuccuagcugaccaug

SEQ ID NO: 1118090 - RNA, 19 nt, Artificial Sequence
  Description of Artificial Sequence: Synthetic oligonucleotide
  Sense strand starting at position 3972 of SEQ ID NO: 915942
gggccaauuccugggacuu

SEQ ID NO: 1118091 - RNA, 19 nt, Artificial Sequence
  Description of Artificial Sequence: Synthetic oligonucleotide
  Antisense strand to SEQ ID NO: 1118090
aagucccaggaauuggccc

SEQ ID NO: 1118092 - RNA, 19 nt, Artificial Sequence
  Description of Artificial Sequence: Synthetic oligonucleotide
  Sense strand starting at position 3973 of SEQ ID NO: 915942
ggccaauuccugggacuuu

SEQ ID NO: 1118093 - RNA, 19 nt, Artificial Sequence
  Description of Artificial Sequence: Synthetic oligonucleotide
  Antisense strand to SEQ ID NO: 1118092
aaagucccaggaauuggcc

SEQ ID NO: 1118094 - RNA, 19 nt, Artificial Sequence
  Description of Artificial Sequence: Synthetic oligonucleotide
  Sense strand starting at position 313 of SEQ ID NO: 915943
gaaguuugagguuacugua

SEQ ID NO: 1118095 - RNA, 19 nt, Artificial Sequence
  Description of Artificial Sequence: Synthetic oligonucleotide
  Antisense strand to SEQ ID NO: 1118094
uacaguaaccucaaacuuc

SEQ ID NO: 1118096 - RNA, 19 nt, Artificial Sequence
  Description of Artificial Sequence: Synthetic oligonucleotide
  Sense strand starting at position 446 of SEQ ID NO: 915943
agagguuacugucuuauaa

SEQ ID NO: 1118097 - RNA, 19 nt, Artificial Sequence
  Description of Artificial Sequence: Synthetic oligonucleotide
  Antisense strand to SEQ ID NO: 1118096
uuauaagacaguaaccucu

SEQ ID NO: 1118098 - RNA, 19 nt, Artificial Sequence
  Description of Artificial Sequence: Synthetic oligonucleotide
  Sense strand starting at position 515 of SEQ ID NO: 915943
agagaauugcaaugcagag

SEQ ID NO: 1118099 - RNA, 19 nt, Artificial Sequence
  Description of Artificial Sequence: Synthetic oligonucleotide
  Antisense strand to SEQ ID NO: 1118098
cucugcauugcaauucucu

SEQ ID NO: 1118100 - RNA, 19 nt, Artificial Sequence
  Description of Artificial Sequence: Synthetic oligonucleotide
  Sense strand starting at position 532 of SEQ ID NO: 915943
agauguaaaguuuaacugu

SEQ ID NO: 1118101 - RNA, 19 nt, Artificial Sequence
  Description of Artificial Sequence: Synthetic oligonucleotide
  Antisense strand to SEQ ID NO: 1118100
acaguuaaacuuuacaucu

SEQ ID NO: 1118102 - RNA, 19 nt, Artificial Sequence
  Description of Artificial Sequence: Synthetic oligonucleotide
  Sense strand starting at position 610 of SEQ ID NO: 915943
uuacuaauccuugaguaug

SEQ ID NO: 1118103 - RNA, 19 nt, Artificial Sequence
  Description of Artificial Sequence: Synthetic oligonucleotide
  Antisense strand to SEQ ID NO: 1118102
cauacucaaggauuaguaa

SEQ ID NO: 1118104 - RNA, 19 nt, Artificial Sequence
  Description of Artificial Sequence: Synthetic oligonucleotide
  Sense strand starting at position 718 of SEQ ID NO: 915943
ugagcaaaggcguaauagu

SEQ ID NO: 1118105 - RNA, 19 nt, Artificial Sequence
  Description of Artificial Sequence: Synthetic oligonucleotide
  Antisense strand to SEQ ID NO: 1118104
acuauuacgccuuugcuca

SEQ ID NO: 1118106 - RNA, 19 nt, Artificial Sequence
  Description of Artificial Sequence: Synthetic oligonucleotide
  Sense strand starting at position 749 of SEQ ID NO: 915943
uugguaauguuucuuuaag

SEQ ID NO: 1118107 - RNA, 19 nt, Artificial Sequence
  Description of Artificial Sequence: Synthetic oligonucleotide
  Antisense strand to SEQ ID NO: 1118106
cuuaaagaaacauuaccaa

SEQ ID NO: 1118108 - RNA, 19 nt, Artificial Sequence
  Description of Artificial Sequence: Synthetic oligonucleotide
  Sense strand starting at position 750 of SEQ ID NO: 915943
ugguaauguuucuuuaaga

SEQ ID NO: 1118109 - RNA, 19 nt, Artificial Sequence
  Description of Artificial Sequence: Synthetic oligonucleotide
  Antisense strand to SEQ ID NO: 1118108
ucuuaaagaaacauuacca

SEQ ID NO: 1118110 - RNA, 19 nt, Artificial Sequence
  Description of Artificial Sequence: Synthetic oligonucleotide
  Sense strand starting at position 751 of SEQ ID NO: 915943
gguaauguuucuuuaagag

SEQ ID NO: 1118111 - RNA, 19 nt, Artificial Sequence
  Description of Artificial Sequence: Synthetic oligonucleotide
  Antisense strand to SEQ ID NO: 1118110
cucuuaaagaaacauuacc

SEQ ID NO: 1118112 - RNA, 19 nt, Artificial Sequence
  Description of Artificial Sequence: Synthetic oligonucleotide
  Sense strand starting at position 757 of SEQ ID NO: 915943
guuucuuuaagaggaaugu

SEQ ID NO: 1118113 - RNA, 19 nt, Artificial Sequence
  Description of Artificial Sequence: Synthetic oligonucleotide
  Antisense strand to SEQ ID NO: 1118112
acauuccucuuaaagaaac

SEQ ID NO: 1118114 - RNA, 19 nt, Artificial Sequence
  Description of Artificial Sequence: Synthetic oligonucleotide
  Sense strand starting at position 761 of SEQ ID NO: 915943
cuuuaagaggaauguauau

SEQ ID NO: 1118115 - RNA, 19 nt, Artificial Sequence
  Description of Artificial Sequence: Synthetic oligonucleotide
  Antisense strand to SEQ ID NO: 1118114
auauacauuccucuuaaag

SEQ ID NO: 1118116 - RNA, 19 nt, Artificial Sequence
  Description of Artificial Sequence: Synthetic oligonucleotide
  Sense strand starting at position 802 of SEQ ID NO: 915943
ugcuucugguaaguaauuu

SEQ ID NO: 1118117 - RNA, 19 nt, Artificial Sequence
  Description of Artificial Sequence: Synthetic oligonucleotide
  Antisense strand to SEQ ID NO: 1118116
aaauuacuuaccagaagca

SEQ ID NO: 1118118 - RNA, 19 nt, Artificial Sequence
  Description of Artificial Sequence: Synthetic oligonucleotide
  Sense strand starting at position 1268 of SEQ ID NO: 915943
auguaacuugacuguccaa

SEQ ID NO: 1118119 - RNA, 19 nt, Artificial Sequence
  Description of Artificial Sequence: Synthetic oligonucleotide
  Antisense strand to SEQ ID NO: 1118118
uuggacagucaaguuacau

SEQ ID NO: 1118120 - RNA, 19 nt, Artificial Sequence
  Description of Artificial Sequence: Synthetic oligonucleotide
  Sense strand starting at position 1474 of SEQ ID NO: 915943
ggaaacugauugccucaaa

SEQ ID NO: 1118121 - RNA, 19 nt, Artificial Sequence
  Description of Artificial Sequence: Synthetic oligonucleotide
  Antisense strand to SEQ ID NO: 1118120
uuugaggcaaucaguuucc

SEQ ID NO: 1118122 - RNA, 19 nt, Artificial Sequence
  Description of Artificial Sequence: Synthetic oligonucleotide
  Sense strand starting at position 1560 of SEQ ID NO: 915943
cauugauuccuggagccca

SEQ ID NO: 1118123 - RNA, 19 nt, Artificial Sequence
  Description of Artificial Sequence: Synthetic oligonucleotide
  Antisense strand to SEQ ID NO: 1118122
ugggcuccaggaaucaaug

SEQ ID NO: 1118124 - RNA, 19 nt, Artificial Sequence
  Description of Artificial Sequence: Synthetic oligonucleotide
  Sense strand starting at position 1828 of SEQ ID NO: 915943
cggcuuuggacucagggaa

SEQ ID NO: 1118125 - RNA, 19 nt, Artificial Sequence
  Description of Artificial Sequence: Synthetic oligonucleotide
  Antisense strand to SEQ ID NO: 1118124
uucccugaguccaaagccg

SEQ ID NO: 1118126 - RNA, 19 nt, Artificial Sequence
  Description of Artificial Sequence: Synthetic oligonucleotide
  Sense strand starting at position 2089 of SEQ ID NO: 915943
gcgucucuccuggcuuaga

SEQ ID NO: 1118127 - RNA, 19 nt, Artificial Sequence
  Description of Artificial Sequence: Synthetic oligonucleotide
  Antisense strand to SEQ ID NO: 1118126
ucuaagccaggagagacgc

SEQ ID NO: 1118128 - RNA, 19 nt, Artificial Sequence
  Description of Artificial Sequence: Synthetic oligonucleotide
  Sense strand starting at position 2105 of SEQ ID NO: 915943
agaggauaguggcuuggaa

SEQ ID NO: 1118129 - RNA, 19 nt, Artificial Sequence
  Description of Artificial Sequence: Synthetic oligonucleotide
  Antisense strand to SEQ ID NO: 1118128
uuccaagccacuauccucu

SEQ ID NO: 1118130 - RNA, 19 nt, Artificial Sequence
  Description of Artificial Sequence: Synthetic oligonucleotide
  Sense strand starting at position 2215 of SEQ ID NO: 915943
agaagaaaguaguuaucuu

SEQ ID NO: 1118131 - RNA, 19 nt, Artificial Sequence
  Description of Artificial Sequence: Synthetic oligonucleotide
  Antisense strand to SEQ ID NO: 1118130
aagauaacuacuuucuucu

SEQ ID NO: 1118132 - RNA, 19 nt, Artificial Sequence
  Description of Artificial Sequence: Synthetic oligonucleotide
  Sense strand starting at position 2351 of SEQ ID NO: 915943
cugagauaaucagugauug

SEQ ID NO: 1118133 - RNA, 19 nt, Artificial Sequence
  Description of Artificial Sequence: Synthetic oligonucleotide
  Antisense strand to SEQ ID NO: 1118132
caaucacugauuaucucag

SEQ ID NO: 1118134 - RNA, 19 nt, Artificial Sequence
  Description of Artificial Sequence: Synthetic oligonucleotide
  Sense strand starting at position 2356 of SEQ ID NO: 915943
auaaucagugauuguguca

SEQ ID NO: 1118135 - RNA, 19 nt, Artificial Sequence
  Description of Artificial Sequence: Synthetic oligonucleotide
  Antisense strand to SEQ ID NO: 1118134
ugacacaaucacugauuau

SEQ ID NO: 1118136 - RNA, 19 nt, Artificial Sequence
  Description of Artificial Sequence: Synthetic oligonucleotide
  Sense strand starting at position 2578 of SEQ ID NO: 915943
agcugaaaccucgaaucca

SEQ ID NO: 1118137 - RNA, 19 nt, Artificial Sequence
  Description of Artificial Sequence: Synthetic oligonucleotide
  Antisense strand to SEQ ID NO: 1118136
uggauucgagguuucagcu

SEQ ID NO: 1118138 - RNA, 19 nt, Artificial Sequence
  Description of Artificial Sequence: Synthetic oligonucleotide
  Sense strand starting at position 2617 of SEQ ID NO: 915943
cuuuguuaucaguaaugag

SEQ ID NO: 1118139 - RNA, 19 nt, Artificial Sequence
  Description of Artificial Sequence: Synthetic oligonucleotide
  Antisense strand to SEQ ID NO: 1118138
cucauuacugauaacaaag

SEQ ID NO: 1118140 - RNA, 19 nt, Artificial Sequence
  Description of Artificial Sequence: Synthetic oligonucleotide
  Sense strand starting at position 2914 of SEQ ID NO: 915943
ccuagagacuaguuuaaau

SEQ ID NO: 1118141 - RNA, 19 nt, Artificial Sequence
  Description of Artificial Sequence: Synthetic oligonucleotide
  Antisense strand to SEQ ID NO: 1118140
auuuaaacuagucucuagg

SEQ ID NO: 1118142 - RNA, 19 nt, Artificial Sequence
  Description of Artificial Sequence: Synthetic oligonucleotide
  Sense strand starting at position 2959 of SEQ ID NO: 915943
uugagauucccuuggaaug

SEQ ID NO: 1118143 - RNA, 19 nt, Artificial Sequence
  Description of Artificial Sequence: Synthetic oligonucleotide
  Antisense strand to SEQ ID NO: 1118142
cauuccaagggaaucucaa

SEQ ID NO: 1118144 - RNA, 19 nt, Artificial Sequence
  Description of Artificial Sequence: Synthetic oligonucleotide
  Sense strand starting at position 2977 of SEQ ID NO: 915943
ggcagaaacauugguagcu

SEQ ID NO: 1118145 - RNA, 19 nt, Artificial Sequence
  Description of Artificial Sequence: Synthetic oligonucleotide
  Antisense strand to SEQ ID NO: 1118144
agcuaccaauguuucugcc

SEQ ID NO: 1118146 - RNA, 19 nt, Artificial Sequence
  Description of Artificial Sequence: Synthetic oligonucleotide
  Sense strand starting at position 2986 of SEQ ID NO: 915943
auugguagcugagcagaua

SEQ ID NO: 1118147 - RNA, 19 nt, Artificial Sequence
  Description of Artificial Sequence: Synthetic oligonucleotide
  Antisense strand to SEQ ID NO: 1118146
uaucugcucagcuaccaau

SEQ ID NO: 1118148 - RNA, 19 nt, Artificial Sequence
  Description of Artificial Sequence: Synthetic oligonucleotide
  Sense strand starting at position 3062 of SEQ ID NO: 915943
ggcagacaucuguacaauu

SEQ ID NO: 1118149 - RNA, 19 nt, Artificial Sequence
  Description of Artificial Sequence: Synthetic oligonucleotide
  Antisense strand to SEQ ID NO: 1118148
aauuguacagaugucugcc

SEQ ID NO: 1118150 - RNA, 19 nt, Artificial Sequence
  Description of Artificial Sequence: Synthetic oligonucleotide
  Sense strand starting at position 3093 of SEQ ID NO: 915943
gggccuuuguauucugaaa

SEQ ID NO: 1118151 - RNA, 19 nt, Artificial Sequence
  Description of Artificial Sequence: Synthetic oligonucleotide
  Antisense strand to SEQ ID NO: 1118150
uuucagaauacaaaggccc

SEQ ID NO: 1118152 - RNA, 19 nt, Artificial Sequence
  Description of Artificial Sequence: Synthetic oligonucleotide
  Sense strand starting at position 3302 of SEQ ID NO: 915943
gagauuugcuuugaggauu

SEQ ID NO: 1118153 - RNA, 19 nt, Artificial Sequence
  Description of Artificial Sequence: Synthetic oligonucleotide
  Antisense strand to SEQ ID NO: 1118152
aauccucaaagcaaaucuc

SEQ ID NO: 1118154 - RNA, 19 nt, Artificial Sequence
  Description of Artificial Sequence: Synthetic oligonucleotide
  Sense strand starting at position 3369 of SEQ ID NO: 915943
augcgucagaacuagagaa

SEQ ID NO: 1118155 - RNA, 19 nt, Artificial Sequence
  Description of Artificial Sequence: Synthetic oligonucleotide
  Antisense strand to SEQ ID NO: 1118154
uucucuaguucugacgcau

SEQ ID NO: 1118156 - RNA, 19 nt, Artificial Sequence
  Description of Artificial Sequence: Synthetic oligonucleotide
  Sense strand starting at position 3371 of SEQ ID NO: 915943
gcgucagaacuagagaaau

SEQ ID NO: 1118157 - RNA, 19 nt, Artificial Sequence
  Description of Artificial Sequence: Synthetic oligonucleotide
  Antisense strand to SEQ ID NO: 1118156
auuucucuaguucugacgc

SEQ ID NO: 1118158 - RNA, 19 nt, Artificial Sequence
  Description of Artificial Sequence: Synthetic oligonucleotide
  Sense strand starting at position 3382 of SEQ ID NO: 915943
agagaaauaucaccucugu

SEQ ID NO: 1118159 - RNA, 19 nt, Artificial Sequence
  Description of Artificial Sequence: Synthetic oligonucleotide
  Antisense strand to SEQ ID NO: 1118158
acagaggugauauuucucu

SEQ ID NO: 1118160 - RNA, 19 nt, Artificial Sequence
  Description of Artificial Sequence: Synthetic oligonucleotide
  Sense strand starting at position 3464 of SEQ ID NO: 915943
gucuuucuuagagacggua

SEQ ID NO: 1118161 - RNA, 19 nt, Artificial Sequence
  Description of Artificial Sequence: Synthetic oligonucleotide
  Antisense strand to SEQ ID NO: 1118160
uaccgucucuaagaaagac

SEQ ID NO: 1118162 - RNA, 19 nt, Artificial Sequence
  Description of Artificial Sequence: Synthetic oligonucleotide
  Sense strand starting at position 3466 of SEQ ID NO: 915943
cuuucuuagagacgguaau

SEQ ID NO: 1118163 - RNA, 19 nt, Artificial Sequence
  Description of Artificial Sequence: Synthetic oligonucleotide
  Antisense strand to SEQ ID NO: 1118162
auuaccgucucuaagaaag

SEQ ID NO: 1118164 - RNA, 19 nt, Artificial Sequence
  Description of Artificial Sequence: Synthetic oligonucleotide
  Sense strand starting at position 3467 of SEQ ID NO: 915943
uuucuuagagacgguaauu

SEQ ID NO: 1118165 - RNA, 19 nt, Artificial Sequence
  Description of Artificial Sequence: Synthetic oligonucleotide
  Antisense strand to SEQ ID NO: 1118164
aauuaccgucucuaagaaa

SEQ ID NO: 1118166 - RNA, 19 nt, Artificial Sequence
  Description of Artificial Sequence: Synthetic oligonucleotide
  Sense strand starting at position 3472 of SEQ ID NO: 915943
uagagacgguaauucuuaa

SEQ ID NO: 1118167 - RNA, 19 nt, Artificial Sequence
  Description of Artificial Sequence: Synthetic oligonucleotide
  Antisense strand to SEQ ID NO: 1118166
uuaagaauuaccgucucua

SEQ ID NO: 1118168 - RNA, 19 nt, Artificial Sequence
  Description of Artificial Sequence: Synthetic oligonucleotide
  Sense strand starting at position 3495 of SEQ ID NO: 915943
uuuguuccuggagacauua

SEQ ID NO: 1118169 - RNA, 19 nt, Artificial Sequence
  Description of Artificial Sequence: Synthetic oligonucleotide
  Antisense strand to SEQ ID NO: 1118168
uaaugucuccaggaacaaa

SEQ ID NO: 1118170 - RNA, 19 nt, Artificial Sequence
  Description of Artificial Sequence: Synthetic oligonucleotide
  Sense strand starting at position 3548 of SEQ ID NO: 915943
uuaacuaggucauucugaa

SEQ ID NO: 1118171 - RNA, 19 nt, Artificial Sequence
  Description of Artificial Sequence: Synthetic oligonucleotide
  Antisense strand to SEQ ID NO: 1118170
uucagaaugaccuaguuaa

SEQ ID NO: 1118172 - RNA, 19 nt, Artificial Sequence
  Description of Artificial Sequence: Synthetic oligonucleotide
  Sense strand starting at position 3641 of SEQ ID NO: 915943
aucauauaccuguacaugu

SEQ ID NO: 1118173 - RNA, 19 nt, Artificial Sequence
  Description of Artificial Sequence: Synthetic oligonucleotide
  Antisense strand to SEQ ID NO: 1118172
acauguacagguauaugau

SEQ ID NO: 1118174 - RNA, 19 nt, Artificial Sequence
  Description of Artificial Sequence: Synthetic oligonucleotide
  Sense strand starting at position 7 of SEQ ID NO: 915944
gagguauugcaagacuucu

SEQ ID NO: 1118175 - RNA, 19 nt, Artificial Sequence
  Description of Artificial Sequence: Synthetic oligonucleotide
  Antisense strand to SEQ ID NO: 1118174
agaagucuugcaauaccuc

SEQ ID NO: 1118176 - RNA, 19 nt, Artificial Sequence
  Description of Artificial Sequence: Synthetic oligonucleotide
  Sense strand starting at position 35 of SEQ ID NO: 915944
guuugaaaucccgagugga

SEQ ID NO: 1118177 - RNA, 19 nt, Artificial Sequence
  Description of Artificial Sequence: Synthetic oligonucleotide
  Antisense strand to SEQ ID NO: 1118176
uccacucgggauuucaaac

SEQ ID NO: 1118178 - RNA, 19 nt, Artificial Sequence
  Description of Artificial Sequence: Synthetic oligonucleotide
  Sense strand starting at position 346 of SEQ ID NO: 915944
aauccugauuccuccgagu

SEQ ID NO: 1118179 - RNA, 19 nt, Artificial Sequence
  Description of Artificial Sequence: Synthetic oligonucleotide
  Antisense strand to SEQ ID NO: 1118178
acucggaggaaucaggauu

SEQ ID NO: 1118180 - RNA, 19 nt, Artificial Sequence
  Description of Artificial Sequence: Synthetic oligonucleotide
  Sense strand starting at position 368 of SEQ ID NO: 915944
gcugaaagccucuaggaug

SEQ ID NO: 1118181 - RNA, 19 nt, Artificial Sequence
  Description of Artificial Sequence: Synthetic oligonucleotide
  Antisense strand to SEQ ID NO: 1118180
cauccuagaggcuuucagc

SEQ ID NO: 1118182 - RNA, 19 nt, Artificial Sequence
  Description of Artificial Sequence: Synthetic oligonucleotide
  Sense strand starting at position 391 of SEQ ID NO: 915944
gggaaaugggcucguucca

SEQ ID NO: 1118183 - RNA, 19 nt, Artificial Sequence
  Description of Artificial Sequence: Synthetic oligonucleotide
  Antisense strand to SEQ ID NO: 1118182
uggaacgagcccauuuccc

SEQ ID NO: 1118184 - RNA, 19 nt, Artificial Sequence
  Description of Artificial Sequence: Synthetic oligonucleotide
  Sense strand starting at position 400 of SEQ ID NO: 915944
gcucguuccaaugaaggga

SEQ ID NO: 1118185 - RNA, 19 nt, Artificial Sequence
  Description of Artificial Sequence: Synthetic oligonucleotide
  Antisense strand to SEQ ID NO: 1118184
ucccuucauuggaacgagc

SEQ ID NO: 1118186 - RNA, 19 nt, Artificial Sequence
  Description of Artificial Sequence: Synthetic oligonucleotide
  Sense strand starting at position 694 of SEQ ID NO: 915944
cgggcacuugguuacuuaa

SEQ ID NO: 1118187 - RNA, 19 nt, Artificial Sequence
  Description of Artificial Sequence: Synthetic oligonucleotide
  Antisense strand to SEQ ID NO: 1118186
uuaaguaaccaagugcccg

SEQ ID NO: 1118188 - RNA, 19 nt, Artificial Sequence
  Description of Artificial Sequence: Synthetic oligonucleotide
  Sense strand starting at position 797 of SEQ ID NO: 915944
uugagcuuuccacaagaca

SEQ ID NO: 1118189 - RNA, 19 nt, Artificial Sequence
  Description of Artificial Sequence: Synthetic oligonucleotide
  Antisense strand to SEQ ID NO: 1118188
ugucuuguggaaagcucaa

SEQ ID NO: 1118190 - RNA, 19 nt, Artificial Sequence
  Description of Artificial Sequence: Synthetic oligonucleotide
  Sense strand starting at position 865 of SEQ ID NO: 915944
cgggaaacucuguacggua

SEQ ID NO: 1118191 - RNA, 19 nt, Artificial Sequence
  Description of Artificial Sequence: Synthetic oligonucleotide
  Antisense strand to SEQ ID NO: 1118190
uaccguacagaguuucccg

SEQ ID NO: 1118192 - RNA, 19 nt, Artificial Sequence
  Description of Artificial Sequence: Synthetic oligonucleotide
  Sense strand starting at position 867 of SEQ ID NO: 915944
ggaaacucuguacgguaua

SEQ ID NO: 1118193 - RNA, 19 nt, Artificial Sequence
  Description of Artificial Sequence: Synthetic oligonucleotide
  Antisense strand to SEQ ID NO: 1118192
uauaccguacagaguuucc

SEQ ID NO: 1118194 - RNA, 19 nt, Artificial Sequence
  Description of Artificial Sequence: Synthetic oligonucleotide
  Sense strand starting at position 938 of SEQ ID NO: 915944
ggagucgcaccagacuauu

SEQ ID NO: 1118195 - RNA, 19 nt, Artificial Sequence
  Description of Artificial Sequence: Synthetic oligonucleotide
  Antisense strand to SEQ ID NO: 1118194
aauagucuggugcgacucc

SEQ ID NO: 1118196 - RNA, 19 nt, Artificial Sequence
  Description of Artificial Sequence: Synthetic oligonucleotide
  Sense strand starting at position 1083 of SEQ ID NO: 915944
uaaucugugcgguaauuug

SEQ ID NO: 1118197 - RNA, 19 nt, Artificial Sequence
  Description of Artificial Sequence: Synthetic oligonucleotide
  Antisense strand to SEQ ID NO: 1118196
caaauuaccgcacagauua

SEQ ID NO: 1118198 - RNA, 19 nt, Artificial Sequence
  Description of Artificial Sequence: Synthetic oligonucleotide
  Sense strand starting at position 1250 of SEQ ID NO: 915944
uggacuguucugcaaugca

SEQ ID NO: 1118199 - RNA, 19 nt, Artificial Sequence
  Description of Artificial Sequence: Synthetic oligonucleotide
  Antisense strand to SEQ ID NO: 1118198
ugcauugcagaacagucca

SEQ ID NO: 1118200 - RNA, 19 nt, Artificial Sequence
  Description of Artificial Sequence: Synthetic oligonucleotide
  Sense strand starting at position 1278 of SEQ ID NO: 915944
cagguaugauguuuaauau

SEQ ID NO: 1118201 - RNA, 19 nt, Artificial Sequence
  Description of Artificial Sequence: Synthetic oligonucleotide
  Antisense strand to SEQ ID NO: 1118200
auauuaaacaucauaccug

SEQ ID NO: 1118202 - RNA, 19 nt, Artificial Sequence
  Description of Artificial Sequence: Synthetic oligonucleotide
  Sense strand starting at position 1279 of SEQ ID NO: 915944
agguaugauguuuaauauc

SEQ ID NO: 1118203 - RNA, 19 nt, Artificial Sequence
  Description of Artificial Sequence: Synthetic oligonucleotide
  Antisense strand to SEQ ID NO: 1118202
gauauuaaacaucauaccu

SEQ ID NO: 1118204 - RNA, 19 nt, Artificial Sequence
  Description of Artificial Sequence: Synthetic oligonucleotide
  Sense strand starting at position 1381 of SEQ ID NO: 915944
cugugaaaucaauggcucu

SEQ ID NO: 1118205 - RNA, 19 nt, Artificial Sequence
  Description of Artificial Sequence: Synthetic oligonucleotide
  Antisense strand to SEQ ID NO: 1118204
agagccauugauuucacag

SEQ ID NO: 1118206 - RNA, 19 nt, Artificial Sequence
  Description of Artificial Sequence: Synthetic oligonucleotide
  Sense strand starting at position 1384 of SEQ ID NO: 915944
ugaaaucaauggcucuaau

SEQ ID NO: 1118207 - RNA, 19 nt, Artificial Sequence
  Description of Artificial Sequence: Synthetic oligonucleotide
  Antisense strand to SEQ ID NO: 1118206
auuagagccauugauuuca

SEQ ID NO: 1118208 - RNA, 19 nt, Artificial Sequence
  Description of Artificial Sequence: Synthetic oligonucleotide
  Sense strand starting at position 1451 of SEQ ID NO: 915944
uggugucgucucguuucau

SEQ ID NO: 1118209 - RNA, 19 nt, Artificial Sequence
  Description of Artificial Sequence: Synthetic oligonucleotide
  Antisense strand to SEQ ID NO: 1118208
augaaacgagacgacacca

SEQ ID NO: 1118210 - RNA, 19 nt, Artificial Sequence
  Description of Artificial Sequence: Synthetic oligonucleotide
  Sense strand starting at position 1691 of SEQ ID NO: 915944
gaggaauuccuucguccau

SEQ ID NO: 1118211 - RNA, 19 nt, Artificial Sequence
  Description of Artificial Sequence: Synthetic oligonucleotide
  Antisense strand to SEQ ID NO: 1118210
auggacgaaggaauuccuc

SEQ ID NO: 1118212 - RNA, 19 nt, Artificial Sequence
  Description of Artificial Sequence: Synthetic oligonucleotide
  Sense strand starting at position 1753 of SEQ ID NO: 915944
uguacaauaaucuguggga

SEQ ID NO: 1118213 - RNA, 19 nt, Artificial Sequence
  Description of Artificial Sequence: Synthetic oligonucleotide
  Antisense strand to SEQ ID NO: 1118212
ucccacagauuauuguaca

SEQ ID NO: 1118214 - RNA, 19 nt, Artificial Sequence
  Description of Artificial Sequence: Synthetic oligonucleotide
  Sense strand starting at position 1757 of SEQ ID NO: 915944
caauaaucugugggacggu

SEQ ID NO: 1118215 - RNA, 19 nt, Artificial Sequence
  Description of Artificial Sequence: Synthetic oligonucleotide
  Antisense strand to SEQ ID NO: 1118214
accgucccacagauuauug

SEQ ID NO: 1118216 - RNA, 19 nt, Artificial Sequence
  Description of Artificial Sequence: Synthetic oligonucleotide
  Sense strand starting at position 1839 of SEQ ID NO: 915944
ugcaguguugaaaguguga

SEQ ID NO: 1118217 - RNA, 19 nt, Artificial Sequence
  Description of Artificial Sequence: Synthetic oligonucleotide
  Antisense strand to SEQ ID NO: 1118216
ucacacuuucaacacugca

SEQ ID NO: 1118218 - RNA, 19 nt, Artificial Sequence
  Description of Artificial Sequence: Synthetic oligonucleotide
  Sense strand starting at position 1841 of SEQ ID NO: 915944
caguguugaaagugugaag

SEQ ID NO: 1118219 - RNA, 19 nt, Artificial Sequence
  Description of Artificial Sequence: Synthetic oligonucleotide
  Antisense strand to SEQ ID NO: 1118218
cuucacacuuucaacacug

SEQ ID NO: 1118220 - RNA, 19 nt, Artificial Sequence
  Description of Artificial Sequence: Synthetic oligonucleotide
  Sense strand starting at position 2389 of SEQ ID NO: 915944
ggguaaacuugagucccaa

SEQ ID NO: 1118221 - RNA, 19 nt, Artificial Sequence
  Description of Artificial Sequence: Synthetic oligonucleotide
  Antisense strand to SEQ ID NO: 1118220
uugggacucaaguuuaccc

SEQ ID NO: 1118222 - RNA, 19 nt, Artificial Sequence
  Description of Artificial Sequence: Synthetic oligonucleotide
  Sense strand starting at position 2418 of SEQ ID NO: 915944
ggagacuuguuugcucacu

SEQ ID NO: 1118223 - RNA, 19 nt, Artificial Sequence
  Description of Artificial Sequence: Synthetic oligonucleotide
  Antisense strand to SEQ ID NO: 1118222
agugagcaaacaagucucc

SEQ ID NO: 1118224 - RNA, 19 nt, Artificial Sequence
  Description of Artificial Sequence: Synthetic oligonucleotide
  Sense strand starting at position 2420 of SEQ ID NO: 915944
agacuuguuugcucacuga

SEQ ID NO: 1118225 - RNA, 19 nt, Artificial Sequence
  Description of Artificial Sequence: Synthetic oligonucleotide
  Antisense strand to SEQ ID NO: 1118224
ucagugagcaaacaagucu

SEQ ID NO: 1118226 - RNA, 19 nt, Artificial Sequence
  Description of Artificial Sequence: Synthetic oligonucleotide
  Sense strand starting at position 2471 of SEQ ID NO: 915944
uggagagguugccucgaga

SEQ ID NO: 1118227 - RNA, 19 nt, Artificial Sequence
  Description of Artificial Sequence: Synthetic oligonucleotide
  Antisense strand to SEQ ID NO: 1118226
ucucgaggcaaccucucca

SEQ ID NO: 1118228 - RNA, 19 nt, Artificial Sequence
  Description of Artificial Sequence: Synthetic oligonucleotide
  Sense strand starting at position 2474 of SEQ ID NO: 915944
agagguugccucgagaaga

SEQ ID NO: 1118229 - RNA, 19 nt, Artificial Sequence
  Description of Artificial Sequence: Synthetic oligonucleotide
  Antisense strand to SEQ ID NO: 1118228
ucuucucgaggcaaccucu

SEQ ID NO: 1118230 - RNA, 19 nt, Artificial Sequence
  Description of Artificial Sequence: Synthetic oligonucleotide
  Sense strand starting at position 2558 of SEQ ID NO: 915944
gucgcaauccaagugucuu

SEQ ID NO: 1118231 - RNA, 19 nt, Artificial Sequence
  Description of Artificial Sequence: Synthetic oligonucleotide
  Antisense strand to SEQ ID NO: 1118230
aagacacuuggauugcgac

SEQ ID NO: 1118232 - RNA, 19 nt, Artificial Sequence
  Description of Artificial Sequence: Synthetic oligonucleotide
  Sense strand starting at position 3136 of SEQ ID NO: 915944
cucacugcuagugagaguu

SEQ ID NO: 1118233 - RNA, 19 nt, Artificial Sequence
  Description of Artificial Sequence: Synthetic oligonucleotide
  Antisense strand to SEQ ID NO: 1118232
aacucucacuagcagugag

SEQ ID NO: 1118234 - RNA, 19 nt, Artificial Sequence
  Description of Artificial Sequence: Synthetic oligonucleotide
  Sense strand starting at position 3146 of SEQ ID NO: 915944
gugagaguuaccgggaggu

SEQ ID NO: 1118235 - RNA, 19 nt, Artificial Sequence
  Description of Artificial Sequence: Synthetic oligonucleotide
  Antisense strand to SEQ ID NO: 1118234
accucccgguaacucucac

SEQ ID NO: 1118236 - RNA, 19 nt, Artificial Sequence
  Description of Artificial Sequence: Synthetic oligonucleotide
  Sense strand starting at position 3316 of SEQ ID NO: 915944
gagggauauuuacauucuc

SEQ ID NO: 1118237 - RNA, 19 nt, Artificial Sequence
  Description of Artificial Sequence: Synthetic oligonucleotide
  Antisense strand to SEQ ID NO: 1118236
gagaauguaaauaucccuc

SEQ ID NO: 1118238 - RNA, 19 nt, Artificial Sequence
  Description of Artificial Sequence: Synthetic oligonucleotide
  Sense strand starting at position 3342 of SEQ ID NO: 915944
ugaucucugaaacguugau

SEQ ID NO: 1118239 - RNA, 19 nt, Artificial Sequence
  Description of Artificial Sequence: Synthetic oligonucleotide
  Antisense strand to SEQ ID NO: 1118238
aucaacguuucagagauca

SEQ ID NO: 1118240 - RNA, 19 nt, Artificial Sequence
  Description of Artificial Sequence: Synthetic oligonucleotide
  Sense strand starting at position 3346 of SEQ ID NO: 915944
cucugaaacguugauuauu

SEQ ID NO: 1118241 - RNA, 19 nt, Artificial Sequence
  Description of Artificial Sequence: Synthetic oligonucleotide
  Antisense strand to SEQ ID NO: 1118240
aauaaucaacguuucagag

SEQ ID NO: 1118242 - RNA, 19 nt, Artificial Sequence
  Description of Artificial Sequence: Synthetic oligonucleotide
  Sense strand starting at position 3358 of SEQ ID NO: 915944
gauuauugccggugauaag

SEQ ID NO: 1118243 - RNA, 19 nt, Artificial Sequence
  Description of Artificial Sequence: Synthetic oligonucleotide
  Antisense strand to SEQ ID NO: 1118242
cuuaucaccggcaauaauc

SEQ ID NO: 1118244 - RNA, 19 nt, Artificial Sequence
  Description of Artificial Sequence: Synthetic oligonucleotide
  Sense strand starting at position 3359 of SEQ ID NO: 915944
auuauugccggugauaagu

SEQ ID NO: 1118245 - RNA, 19 nt, Artificial Sequence
  Description of Artificial Sequence: Synthetic oligonucleotide
  Antisense strand to SEQ ID NO: 1118244
acuuaucaccggcaauaau

SEQ ID NO: 1118246 - RNA, 19 nt, Artificial Sequence
  Description of Artificial Sequence: Synthetic oligonucleotide
  Sense strand starting at position 3739 of SEQ ID NO: 915944
ucucgacuuccucaaauag

SEQ ID NO: 1118247 - RNA, 19 nt, Artificial Sequence
  Description of Artificial Sequence: Synthetic oligonucleotide
  Antisense strand to SEQ ID NO: 1118246
cuauuugaggaagucgaga

SEQ ID NO: 1118248 - RNA, 19 nt, Artificial Sequence
  Description of Artificial Sequence: Synthetic oligonucleotide
  Sense strand starting at position 3788 of SEQ ID NO: 915944
uaaucacgaugguucuuaa

SEQ ID NO: 1118249 - RNA, 19 nt, Artificial Sequence
  Description of Artificial Sequence: Synthetic oligonucleotide
  Antisense strand to SEQ ID NO: 1118248
uuaagaaccaucgugauua

SEQ ID NO: 1118250 - RNA, 19 nt, Artificial Sequence
  Description of Artificial Sequence: Synthetic oligonucleotide
  Sense strand starting at position 3937 of SEQ ID NO: 915944
ccugcaguacuguaucauu

SEQ ID NO: 1118251 - RNA, 19 nt, Artificial Sequence
  Description of Artificial Sequence: Synthetic oligonucleotide
  Antisense strand to SEQ ID NO: 1118250
aaugauacaguacugcagg

SEQ ID NO: 1118252 - RNA, 19 nt, Artificial Sequence
  Description of Artificial Sequence: Synthetic oligonucleotide
  Sense strand starting at position 3982 of SEQ ID NO: 915944
ugggaaugccguuagguga

SEQ ID NO: 1118253 - RNA, 19 nt, Artificial Sequence
  Description of Artificial Sequence: Synthetic oligonucleotide
  Antisense strand to SEQ ID NO: 1118252
ucaccuaacggcauuccca

SEQ ID NO: 1118254 - RNA, 19 nt, Artificial Sequence
  Description of Artificial Sequence: Synthetic oligonucleotide
  Sense strand starting at position 3 of SEQ ID NO: 915945
guguuaaagacuugggaug

SEQ ID NO: 1118255 - RNA, 19 nt, Artificial Sequence
  Description of Artificial Sequence: Synthetic oligonucleotide
  Antisense strand to SEQ ID NO: 1118254
caucccaagucuuuaacac

SEQ ID NO: 1118256 - RNA, 19 nt, Artificial Sequence
  Description of Artificial Sequence: Synthetic oligonucleotide
  Sense strand starting at position 49 of SEQ ID NO: 915945
acacaauugcauuaagguu

SEQ ID NO: 1118257 - RNA, 19 nt, Artificial Sequence
  Description of Artificial Sequence: Synthetic oligonucleotide
  Antisense strand to SEQ ID NO: 1118256
aaccuuaaugcaauugugu

SEQ ID NO: 1118258 - RNA, 19 nt, Artificial Sequence
  Description of Artificial Sequence: Synthetic oligonucleotide
  Sense strand starting at position 77 of SEQ ID NO: 915945
agguaagugcaaugacaga

SEQ ID NO: 1118259 - RNA, 19 nt, Artificial Sequence
  Description of Artificial Sequence: Synthetic oligonucleotide
  Antisense strand to SEQ ID NO: 1118258
ucugucauugcacuuaccu

SEQ ID NO: 1118260 - RNA, 19 nt, Artificial Sequence
  Description of Artificial Sequence: Synthetic oligonucleotide
  Sense strand starting at position 103 of SEQ ID NO: 915945
cuagaaggauuguuuaaau

SEQ ID NO: 1118261 - RNA, 19 nt, Artificial Sequence
  Description of Artificial Sequence: Synthetic oligonucleotide
  Antisense strand to SEQ ID NO: 1118260
auuuaaacaauccuucuag

SEQ ID NO: 1118262 - RNA, 19 nt, Artificial Sequence
  Description of Artificial Sequence: Synthetic oligonucleotide
  Sense strand starting at position 232 of SEQ ID NO: 915945
caguguugauagguauaga

SEQ ID NO: 1118263 - RNA, 19 nt, Artificial Sequence
  Description of Artificial Sequence: Synthetic oligonucleotide
  Antisense strand to SEQ ID NO: 1118262
ucuauaccuaucaacacug

SEQ ID NO: 1118264 - RNA, 19 nt, Artificial Sequence
  Description of Artificial Sequence: Synthetic oligonucleotide
  Sense strand starting at position 233 of SEQ ID NO: 915945
aguguugauagguauagac

SEQ ID NO: 1118265 - RNA, 19 nt, Artificial Sequence
  Description of Artificial Sequence: Synthetic oligonucleotide
  Antisense strand to SEQ ID NO: 1118264
gucuauaccuaucaacacu

SEQ ID NO: 1118266 - RNA, 19 nt, Artificial Sequence
  Description of Artificial Sequence: Synthetic oligonucleotide
  Sense strand starting at position 262 of SEQ ID NO: 915945
caucucugagaaugacagu

SEQ ID NO: 1118267 - RNA, 19 nt, Artificial Sequence
  Description of Artificial Sequence: Synthetic oligonucleotide
  Antisense strand to SEQ ID NO: 1118266
acugucauucucagagaug

SEQ ID NO: 1118268 - RNA, 19 nt, Artificial Sequence
  Description of Artificial Sequence: Synthetic oligonucleotide
  Sense strand starting at position 336 of SEQ ID NO: 915945
agccuaaucuaaguuggaa

SEQ ID NO: 1118269 - RNA, 19 nt, Artificial Sequence
  Description of Artificial Sequence: Synthetic oligonucleotide
  Antisense strand to SEQ ID NO: 1118268
uuccaacuuagauuaggcu

SEQ ID NO: 1118270 - RNA, 19 nt, Artificial Sequence
  Description of Artificial Sequence: Synthetic oligonucleotide
  Sense strand starting at position 444 of SEQ ID NO: 915945
uuagauuccuaguugggau

SEQ ID NO: 1118271 - RNA, 19 nt, Artificial Sequence
  Description of Artificial Sequence: Synthetic oligonucleotide
  Antisense strand to SEQ ID NO: 1118270
aucccaacuaggaaucuaa

SEQ ID NO: 1118272 - RNA, 19 nt, Artificial Sequence
  Description of Artificial Sequence: Synthetic oligonucleotide
  Sense strand starting at position 743 of SEQ ID NO: 915945
agugguuauuugcuaccca

SEQ ID NO: 1118273 - RNA, 19 nt, Artificial Sequence
  Description of Artificial Sequence: Synthetic oligonucleotide
  Antisense strand to SEQ ID NO: 1118272
uggguagcaaauaaccacu

SEQ ID NO: 1118274 - RNA, 19 nt, Artificial Sequence
  Description of Artificial Sequence: Synthetic oligonucleotide
  Sense strand starting at position 747 of SEQ ID NO: 915945
guuauuugcuacccauagu

SEQ ID NO: 1118275 - RNA, 19 nt, Artificial Sequence
  Description of Artificial Sequence: Synthetic oligonucleotide
  Antisense strand to SEQ ID NO: 1118274
acuauggguagcaaauaac

SEQ ID NO: 1118276 - RNA, 19 nt, Artificial Sequence
  Description of Artificial Sequence: Synthetic oligonucleotide
  Sense strand starting at position 758 of SEQ ID NO: 915945
cccauagugccucaagaau

SEQ ID NO: 1118277 - RNA, 19 nt, Artificial Sequence
  Description of Artificial Sequence: Synthetic oligonucleotide
  Antisense strand to SEQ ID NO: 1118276
auucuugaggcacuauggg

SEQ ID NO: 1118278 - RNA, 19 nt, Artificial Sequence
  Description of Artificial Sequence: Synthetic oligonucleotide
  Sense strand starting at position 806 of SEQ ID NO: 915945
auauguauguucuuaagag

SEQ ID NO: 1118279 - RNA, 19 nt, Artificial Sequence
  Description of Artificial Sequence: Synthetic oligonucleotide
  Antisense strand to SEQ ID NO: 1118278
cucuuaagaacauacauau

SEQ ID NO: 1118280 - RNA, 19 nt, Artificial Sequence
  Description of Artificial Sequence: Synthetic oligonucleotide
  Sense strand starting at position 813 of SEQ ID NO: 915945
uguucuuaagagugacuga

SEQ ID NO: 1118281 - RNA, 19 nt, Artificial Sequence
  Description of Artificial Sequence: Synthetic oligonucleotide
  Antisense strand to SEQ ID NO: 1118280
ucagucacucuuaagaaca

SEQ ID NO: 1118282 - RNA, 19 nt, Artificial Sequence
  Description of Artificial Sequence: Synthetic oligonucleotide
  Sense strand starting at position 814 of SEQ ID NO: 915945
guucuuaagagugacugau

SEQ ID NO: 1118283 - RNA, 19 nt, Artificial Sequence
  Description of Artificial Sequence: Synthetic oligonucleotide
  Antisense strand to SEQ ID NO: 1118282
aucagucacucuuaagaac

SEQ ID NO: 1118284 - RNA, 19 nt, Artificial Sequence
  Description of Artificial Sequence: Synthetic oligonucleotide
  Sense strand starting at position 1030 of SEQ ID NO: 915945
acuauuuguaggugaguuc

SEQ ID NO: 1118285 - RNA, 19 nt, Artificial Sequence
  Description of Artificial Sequence: Synthetic oligonucleotide
  Antisense strand to SEQ ID NO: 1118284
gaacucaccuacaaauagu

SEQ ID NO: 1118286 - RNA, 19 nt, Artificial Sequence
  Description of Artificial Sequence: Synthetic oligonucleotide
  Sense strand starting at position 1124 of SEQ ID NO: 915945
gggaucacccagcaaaguu

SEQ ID NO: 1118287 - RNA, 19 nt, Artificial Sequence
  Description of Artificial Sequence: Synthetic oligonucleotide
  Antisense strand to SEQ ID NO: 1118286
aacuuugcugggugauccc

SEQ ID NO: 1118288 - RNA, 19 nt, Artificial Sequence
  Description of Artificial Sequence: Synthetic oligonucleotide
  Sense strand starting at position 1296 of SEQ ID NO: 915945
cugaaauuguggguccuca

SEQ ID NO: 1118289 - RNA, 19 nt, Artificial Sequence
  Description of Artificial Sequence: Synthetic oligonucleotide
  Antisense strand to SEQ ID NO: 1118288
ugaggacccacaauuucag

SEQ ID NO: 1118290 - RNA, 19 nt, Artificial Sequence
  Description of Artificial Sequence: Synthetic oligonucleotide
  Sense strand starting at position 1345 of SEQ ID NO: 915945
gaaauugucgcugaaaccu

SEQ ID NO: 1118291 - RNA, 19 nt, Artificial Sequence
  Description of Artificial Sequence: Synthetic oligonucleotide
  Antisense strand to SEQ ID NO: 1118290
agguuucagcgacaauuuc

SEQ ID NO: 1118292 - RNA, 19 nt, Artificial Sequence
  Description of Artificial Sequence: Synthetic oligonucleotide
  Sense strand starting at position 1354 of SEQ ID NO: 915945
gcugaaaccuggguuugag

SEQ ID NO: 1118293 - RNA, 19 nt, Artificial Sequence
  Description of Artificial Sequence: Synthetic oligonucleotide
  Antisense strand to SEQ ID NO: 1118292
cucaaacccagguuucagc

SEQ ID NO: 1118294 - RNA, 19 nt, Artificial Sequence
  Description of Artificial Sequence: Synthetic oligonucleotide
  Sense strand starting at position 1627 of SEQ ID NO: 915945
augacuucuugaucaugau

SEQ ID NO: 1118295 - RNA, 19 nt, Artificial Sequence
  Description of Artificial Sequence: Synthetic oligonucleotide
  Antisense strand to SEQ ID NO: 1118294
aucaugaucaagaagucau

SEQ ID NO: 1118296 - RNA, 19 nt, Artificial Sequence
  Description of Artificial Sequence: Synthetic oligonucleotide
  Sense strand starting at position 3014 of SEQ ID NO: 915945
aggacaguccgcuaaauau

SEQ ID NO: 1118297 - RNA, 19 nt, Artificial Sequence
  Description of Artificial Sequence: Synthetic oligonucleotide
  Antisense strand to SEQ ID NO: 1118296
auauuuagcggacuguccu

SEQ ID NO: 1118298 - RNA, 19 nt, Artificial Sequence
  Description of Artificial Sequence: Synthetic oligonucleotide
  Sense strand starting at position 3108 of SEQ ID NO: 915945
ggaaaccucuagcuaggua

SEQ ID NO: 1118299 - RNA, 19 nt, Artificial Sequence
  Description of Artificial Sequence: Synthetic oligonucleotide
  Antisense strand to SEQ ID NO: 1118298
uaccuagcuagagguuucc

SEQ ID NO: 1118300 - RNA, 19 nt, Artificial Sequence
  Description of Artificial Sequence: Synthetic oligonucleotide
  Sense strand starting at position 3219 of SEQ ID NO: 915945
aacgaugcccuguaauaag

SEQ ID NO: 1118301 - RNA, 19 nt, Artificial Sequence
  Description of Artificial Sequence: Synthetic oligonucleotide
  Antisense strand to SEQ ID NO: 1118300
cuuauuacagggcaucguu

SEQ ID NO: 1118302 - RNA, 19 nt, Artificial Sequence
  Description of Artificial Sequence: Synthetic oligonucleotide
  Sense strand starting at position 3256 of SEQ ID NO: 915945
agcuaagaguucuugagac

SEQ ID NO: 1118303 - RNA, 19 nt, Artificial Sequence
  Description of Artificial Sequence: Synthetic oligonucleotide
  Antisense strand to SEQ ID NO: 1118302
gucucaagaacucuuagcu

SEQ ID NO: 1118304 - RNA, 19 nt, Artificial Sequence
  Description of Artificial Sequence: Synthetic oligonucleotide
  Sense strand starting at position 3287 of SEQ ID NO: 915945
uucuucuaaguauguaaca

SEQ ID NO: 1118305 - RNA, 19 nt, Artificial Sequence
  Description of Artificial Sequence: Synthetic oligonucleotide
  Antisense strand to SEQ ID NO: 1118304
uguuacauacuuagaagaa

SEQ ID NO: 1118306 - RNA, 19 nt, Artificial Sequence
  Description of Artificial Sequence: Synthetic oligonucleotide
  Sense strand starting at position 3288 of SEQ ID NO: 915945
ucuucuaaguauguaacau

SEQ ID NO: 1118307 - RNA, 19 nt, Artificial Sequence
  Description of Artificial Sequence: Synthetic oligonucleotide
  Antisense strand to SEQ ID NO: 1118306
auguuacauacuuagaaga

SEQ ID NO: 1118308 - RNA, 19 nt, Artificial Sequence
  Description of Artificial Sequence: Synthetic oligonucleotide
  Sense strand starting at position 3322 of SEQ ID NO: 915945
cuaacaaugcuuugaggua

SEQ ID NO: 1118309 - RNA, 19 nt, Artificial Sequence
  Description of Artificial Sequence: Synthetic oligonucleotide
  Antisense strand to SEQ ID NO: 1118308
uaccucaaagcauuguuag

SEQ ID NO: 1118310 - RNA, 19 nt, Artificial Sequence
  Description of Artificial Sequence: Synthetic oligonucleotide
  Sense strand starting at position 3334 of SEQ ID NO: 915945
ugagguaagagccauuauc

SEQ ID NO: 1118311 - RNA, 19 nt, Artificial Sequence
  Description of Artificial Sequence: Synthetic oligonucleotide
  Antisense strand to SEQ ID NO: 1118310
gauaauggcucuuaccuca

SEQ ID NO: 1118312 - RNA, 19 nt, Artificial Sequence
  Description of Artificial Sequence: Synthetic oligonucleotide
  Sense strand starting at position 3343 of SEQ ID NO: 915945
agccauuauccucaguuua

SEQ ID NO: 1118313 - RNA, 19 nt, Artificial Sequence
  Description of Artificial Sequence: Synthetic oligonucleotide
  Antisense strand to SEQ ID NO: 1118312
uaaacugaggauaauggcu

SEQ ID NO: 1118314 - RNA, 19 nt, Artificial Sequence
  Description of Artificial Sequence: Synthetic oligonucleotide
  Sense strand starting at position 3374 of SEQ ID NO: 915945
ggcaaagggagaugugauu

SEQ ID NO: 1118315 - RNA, 19 nt, Artificial Sequence
  Description of Artificial Sequence: Synthetic oligonucleotide
  Antisense strand to SEQ ID NO: 1118314
aaucacaucucccuuugcc

SEQ ID NO: 1118316 - RNA, 19 nt, Artificial Sequence
  Description of Artificial Sequence: Synthetic oligonucleotide
  Sense strand starting at position 3415 of SEQ ID NO: 915945
gaaucuuaacucgggagca

SEQ ID NO: 1118317 - RNA, 19 nt, Artificial Sequence
  Description of Artificial Sequence: Synthetic oligonucleotide
  Antisense strand to SEQ ID NO: 1118316
ugcucccgaguuaagauuc

SEQ ID NO: 1118318 - RNA, 19 nt, Artificial Sequence
  Description of Artificial Sequence: Synthetic oligonucleotide
  Sense strand starting at position 3430 of SEQ ID NO: 915945
agcacuaaacgggaucauu

SEQ ID NO: 1118319 - RNA, 19 nt, Artificial Sequence
  Description of Artificial Sequence: Synthetic oligonucleotide
  Antisense strand to SEQ ID NO: 1118318
aaugaucccguuuagugcu

SEQ ID NO: 1118320 - RNA, 19 nt, Artificial Sequence
  Description of Artificial Sequence: Synthetic oligonucleotide
  Sense strand starting at position 3572 of SEQ ID NO: 915945
caaaguaagaguggaguaa

SEQ ID NO: 1118321 - RNA, 19 nt, Artificial Sequence
  Description of Artificial Sequence: Synthetic oligonucleotide
  Antisense strand to SEQ ID NO: 1118320
uuacuccacucuuacuuug

SEQ ID NO: 1118322 - RNA, 19 nt, Artificial Sequence
  Description of Artificial Sequence: Synthetic oligonucleotide
  Sense strand starting at position 3599 of SEQ ID NO: 915945
guggagaagggucgagaau

SEQ ID NO: 1118323 - RNA, 19 nt, Artificial Sequence
  Description of Artificial Sequence: Synthetic oligonucleotide
  Antisense strand to SEQ ID NO: 1118322
auucucgacccuucuccac

SEQ ID NO: 1118324 - RNA, 19 nt, Artificial Sequence
  Description of Artificial Sequence: Synthetic oligonucleotide
  Sense strand starting at position 3601 of SEQ ID NO: 915945
ggagaagggucgagaauca

SEQ ID NO: 1118325 - RNA, 19 nt, Artificial Sequence
  Description of Artificial Sequence: Synthetic oligonucleotide
  Antisense strand to SEQ ID NO: 1118324
ugauucucgacccuucucc

SEQ ID NO: 1118326 - RNA, 19 nt, Artificial Sequence
  Description of Artificial Sequence: Synthetic oligonucleotide
  Sense strand starting at position 3648 of SEQ ID NO: 915945
aagcaauuucuguguaacg

SEQ ID NO: 1118327 - RNA, 19 nt, Artificial Sequence
  Description of Artificial Sequence: Synthetic oligonucleotide
  Antisense strand to SEQ ID NO: 1118326
cguuacacagaaauugcuu

SEQ ID NO: 1118328 - RNA, 19 nt, Artificial Sequence
  Description of Artificial Sequence: Synthetic oligonucleotide
  Sense strand starting at position 3670 of SEQ ID NO: 915945
ggcugugagacccacagau

SEQ ID NO: 1118329 - RNA, 19 nt, Artificial Sequence
  Description of Artificial Sequence: Synthetic oligonucleotide
  Antisense strand to SEQ ID NO: 1118328
aucugugggucucacagcc

SEQ ID NO: 1118330 - RNA, 19 nt, Artificial Sequence
  Description of Artificial Sequence: Synthetic oligonucleotide
  Sense strand starting at position 3682 of SEQ ID NO: 915945
cacagaucagugggucuuu

SEQ ID NO: 1118331 - RNA, 19 nt, Artificial Sequence
  Description of Artificial Sequence: Synthetic oligonucleotide
  Antisense strand to SEQ ID NO: 1118330
aaagacccacugaucugug

SEQ ID NO: 1118332 - RNA, 19 nt, Artificial Sequence
  Description of Artificial Sequence: Synthetic oligonucleotide
  Sense strand starting at position 3907 of SEQ ID NO: 915945
gcagaaguggauggaucau

SEQ ID NO: 1118333 - RNA, 19 nt, Artificial Sequence
  Description of Artificial Sequence: Synthetic oligonucleotide
  Antisense strand to SEQ ID NO: 1118332
augauccauccacuucugc

SEQ ID NO: 1118334 - RNA, 19 nt, Artificial Sequence
  Description of Artificial Sequence: Synthetic oligonucleotide
  Sense strand starting at position 27 of SEQ ID NO: 915946
cuaccagauuuguaagucu

SEQ ID NO: 1118335 - RNA, 19 nt, Artificial Sequence
  Description of Artificial Sequence: Synthetic oligonucleotide
  Antisense strand to SEQ ID NO: 1118334
agacuuacaaaucugguag

SEQ ID NO: 1118336 - RNA, 19 nt, Artificial Sequence
  Description of Artificial Sequence: Synthetic oligonucleotide
  Sense strand starting at position 61 of SEQ ID NO: 915946
cuaggaucaaggugaaguu

SEQ ID NO: 1118337 - RNA, 19 nt, Artificial Sequence
  Description of Artificial Sequence: Synthetic oligonucleotide
  Antisense strand to SEQ ID NO: 1118336
aacuucaccuugauccuag

SEQ ID NO: 1118338 - RNA, 19 nt, Artificial Sequence
  Description of Artificial Sequence: Synthetic oligonucleotide
  Sense strand starting at position 81 of SEQ ID NO: 915946
ggguaagugaaguaacgaa

SEQ ID NO: 1118339 - RNA, 19 nt, Artificial Sequence
  Description of Artificial Sequence: Synthetic oligonucleotide
  Antisense strand to SEQ ID NO: 1118338
uucguuacuucacuuaccc

SEQ ID NO: 1118340 - RNA, 19 nt, Artificial Sequence
  Description of Artificial Sequence: Synthetic oligonucleotide
  Sense strand starting at position 172 of SEQ ID NO: 915946
cuuccauuguggucucuua

SEQ ID NO: 1118341 - RNA, 19 nt, Artificial Sequence
  Description of Artificial Sequence: Synthetic oligonucleotide
  Antisense strand to SEQ ID NO: 1118340
uaagagaccacaauggaag

SEQ ID NO: 1118342 - RNA, 19 nt, Artificial Sequence
  Description of Artificial Sequence: Synthetic oligonucleotide
  Sense strand starting at position 243 of SEQ ID NO: 915946
gggagagcugguugccuuu

SEQ ID NO: 1118343 - RNA, 19 nt, Artificial Sequence
  Description of Artificial Sequence: Synthetic oligonucleotide
  Antisense strand to SEQ ID NO: 1118342
aaaggcaaccagcucuccc

SEQ ID NO: 1118344 - RNA, 19 nt, Artificial Sequence
  Description of Artificial Sequence: Synthetic oligonucleotide
  Sense strand starting at position 245 of SEQ ID NO: 915946
gagagcugguugccuuuaa

SEQ ID NO: 1118345 - RNA, 19 nt, Artificial Sequence
  Description of Artificial Sequence: Synthetic oligonucleotide
  Antisense strand to SEQ ID NO: 1118344
uuaaaggcaaccagcucuc

SEQ ID NO: 1118346 - RNA, 19 nt, Artificial Sequence
  Description of Artificial Sequence: Synthetic oligonucleotide
  Sense strand starting at position 298 of SEQ ID NO: 915946
agaagauaauagggauauu

SEQ ID NO: 1118347 - RNA, 19 nt, Artificial Sequence
  Description of Artificial Sequence: Synthetic oligonucleotide
  Antisense strand to SEQ ID NO: 1118346
aauaucccuauuaucuucu

SEQ ID NO: 1118348 - RNA, 19 nt, Artificial Sequence
  Description of Artificial Sequence: Synthetic oligonucleotide
  Sense strand starting at position 379 of SEQ ID NO: 915946
aaacuucuccguuguagaa

SEQ ID NO: 1118349 - RNA, 19 nt, Artificial Sequence
  Description of Artificial Sequence: Synthetic oligonucleotide
  Antisense strand to SEQ ID NO: 1118348
uucuacaacggagaaguuu

SEQ ID NO: 1118350 - RNA, 19 nt, Artificial Sequence
  Description of Artificial Sequence: Synthetic oligonucleotide
  Sense strand starting at position 399 of SEQ ID NO: 915946
gcagguugggcuuaauaaa

SEQ ID NO: 1118351 - RNA, 19 nt, Artificial Sequence
  Description of Artificial Sequence: Synthetic oligonucleotide
  Antisense strand to SEQ ID NO: 1118350
uuuauuaagcccaaccugc

SEQ ID NO: 1118352 - RNA, 19 nt, Artificial Sequence
  Description of Artificial Sequence: Synthetic oligonucleotide
  Sense strand starting at position 482 of SEQ ID NO: 915946
ucuuucuucuggcugacau

SEQ ID NO: 1118353 - RNA, 19 nt, Artificial Sequence
  Description of Artificial Sequence: Synthetic oligonucleotide
  Antisense strand to SEQ ID NO: 1118352
augucagccagaagaaaga

SEQ ID NO: 1118354 - RNA, 19 nt, Artificial Sequence
  Description of Artificial Sequence: Synthetic oligonucleotide
  Sense strand starting at position 493 of SEQ ID NO: 915946
gcugacaugucuucccaaa

SEQ ID NO: 1118355 - RNA, 19 nt, Artificial Sequence
  Description of Artificial Sequence: Synthetic oligonucleotide
  Antisense strand to SEQ ID NO: 1118354
uuugggaagacaugucagc

SEQ ID NO: 1118356 - RNA, 19 nt, Artificial Sequence
  Description of Artificial Sequence: Synthetic oligonucleotide
  Sense strand starting at position 515 of SEQ ID NO: 915946
ccuugucuacuagaggguu

SEQ ID NO: 1118357 - RNA, 19 nt, Artificial Sequence
  Description of Artificial Sequence: Synthetic oligonucleotide
  Antisense strand to SEQ ID NO: 1118356
aacccucuaguagacaagg

SEQ ID NO: 1118358 - RNA, 19 nt, Artificial Sequence
  Description of Artificial Sequence: Synthetic oligonucleotide
  Sense strand starting at position 804 of SEQ ID NO: 915946
gcuuacgucagcugaaaca

SEQ ID NO: 1118359 - RNA, 19 nt, Artificial Sequence
  Description of Artificial Sequence: Synthetic oligonucleotide
  Antisense strand to SEQ ID NO: 1118358
uguuucagcugacguaagc

SEQ ID NO: 1118360 - RNA, 19 nt, Artificial Sequence
  Description of Artificial Sequence: Synthetic oligonucleotide
  Sense strand starting at position 855 of SEQ ID NO: 915946
gagaacuaugcaggauuau

SEQ ID NO: 1118361 - RNA, 19 nt, Artificial Sequence
  Description of Artificial Sequence: Synthetic oligonucleotide
  Antisense strand to SEQ ID NO: 1118360
auaauccugcauaguucuc

SEQ ID NO: 1118362 - RNA, 19 nt, Artificial Sequence
  Description of Artificial Sequence: Synthetic oligonucleotide
  Sense strand starting at position 867 of SEQ ID NO: 915946
ggauuauucuaagccuuug

SEQ ID NO: 1118363 - RNA, 19 nt, Artificial Sequence
  Description of Artificial Sequence: Synthetic oligonucleotide
  Antisense strand to SEQ ID NO: 1118362
caaaggcuuagaauaaucc

SEQ ID NO: 1118364 - RNA, 19 nt, Artificial Sequence
  Description of Artificial Sequence: Synthetic oligonucleotide
  Sense strand starting at position 1059 of SEQ ID NO: 915946
cagccugaggguugucgaa

SEQ ID NO: 1118365 - RNA, 19 nt, Artificial Sequence
  Description of Artificial Sequence: Synthetic oligonucleotide
  Antisense strand to SEQ ID NO: 1118364
uucgacaacccucaggcug

SEQ ID NO: 1118366 - RNA, 19 nt, Artificial Sequence
  Description of Artificial Sequence: Synthetic oligonucleotide
  Sense strand starting at position 1075 of SEQ ID NO: 915946
gaagguucugcccagagac

SEQ ID NO: 1118367 - RNA, 19 nt, Artificial Sequence
  Description of Artificial Sequence: Synthetic oligonucleotide
  Antisense strand to SEQ ID NO: 1118366
gucucugggcagaaccuuc

SEQ ID NO: 1118368 - RNA, 19 nt, Artificial Sequence
  Description of Artificial Sequence: Synthetic oligonucleotide
  Sense strand starting at position 1850 of SEQ ID NO: 915946
uagguucucugaguaugca

SEQ ID NO: 1118369 - RNA, 19 nt, Artificial Sequence
  Description of Artificial Sequence: Synthetic oligonucleotide
  Antisense strand to SEQ ID NO: 1118368
ugcauacucagagaaccua

SEQ ID NO: 1118370 - RNA, 19 nt, Artificial Sequence
  Description of Artificial Sequence: Synthetic oligonucleotide
  Sense strand starting at position 1851 of SEQ ID NO: 915946
agguucucugaguaugcau

SEQ ID NO: 1118371 - RNA, 19 nt, Artificial Sequence
  Description of Artificial Sequence: Synthetic oligonucleotide
  Antisense strand to SEQ ID NO: 1118370
augcauacucagagaaccu

SEQ ID NO: 1118372 - RNA, 19 nt, Artificial Sequence
  Description of Artificial Sequence: Synthetic oligonucleotide
  Sense strand starting at position 1890 of SEQ ID NO: 915946
gcguuucuugcuccaggua

SEQ ID NO: 1118373 - RNA, 19 nt, Artificial Sequence
  Description of Artificial Sequence: Synthetic oligonucleotide
  Antisense strand to SEQ ID NO: 1118372
uaccuggagcaagaaacgc

SEQ ID NO: 1118374 - RNA, 19 nt, Artificial Sequence
  Description of Artificial Sequence: Synthetic oligonucleotide
  Sense strand starting at position 2343 of SEQ ID NO: 915946
cugguucuuaggcaagaga

SEQ ID NO: 1118375 - RNA, 19 nt, Artificial Sequence
  Description of Artificial Sequence: Synthetic oligonucleotide
  Antisense strand to SEQ ID NO: 1118374
ucucuugccuaagaaccag

SEQ ID NO: 1118376 - RNA, 19 nt, Artificial Sequence
  Description of Artificial Sequence: Synthetic oligonucleotide
  Sense strand starting at position 2477 of SEQ ID NO: 915946
gacacagauugugcaaauu

SEQ ID NO: 1118377 - RNA, 19 nt, Artificial Sequence
  Description of Artificial Sequence: Synthetic oligonucleotide
  Antisense strand to SEQ ID NO: 1118376
aauuugcacaaucuguguc

SEQ ID NO: 1118378 - RNA, 19 nt, Artificial Sequence
  Description of Artificial Sequence: Synthetic oligonucleotide
  Sense strand starting at position 2503 of SEQ ID NO: 915946
ggcuguugagaugacaacu

SEQ ID NO: 1118379 - RNA, 19 nt, Artificial Sequence
  Description of Artificial Sequence: Synthetic oligonucleotide
  Antisense strand to SEQ ID NO: 1118378
aguugucaucucaacagcc

SEQ ID NO: 1118380 - RNA, 19 nt, Artificial Sequence
  Description of Artificial Sequence: Synthetic oligonucleotide
  Sense strand starting at position 2519 of SEQ ID NO: 915946
acuauuguuucuuuaggga

SEQ ID NO: 1118381 - RNA, 19 nt, Artificial Sequence
  Description of Artificial Sequence: Synthetic oligonucleotide
  Antisense strand to SEQ ID NO: 1118380
ucccuaaagaaacaauagu

SEQ ID NO: 1118382 - RNA, 19 nt, Artificial Sequence
  Description of Artificial Sequence: Synthetic oligonucleotide
  Sense strand starting at position 2608 of SEQ ID NO: 915946
ggaaccacguacucagauu

SEQ ID NO: 1118383 - RNA, 19 nt, Artificial Sequence
  Description of Artificial Sequence: Synthetic oligonucleotide
  Antisense strand to SEQ ID NO: 1118382
aaucugaguacgugguucc

SEQ ID NO: 1118384 - RNA, 19 nt, Artificial Sequence
  Description of Artificial Sequence: Synthetic oligonucleotide
  Sense strand starting at position 2804 of SEQ ID NO: 915946
auugcuggguguucugaaa

SEQ ID NO: 1118385 - RNA, 19 nt, Artificial Sequence
  Description of Artificial Sequence: Synthetic oligonucleotide
  Antisense strand to SEQ ID NO: 1118384
uuucagaacacccagcaau

SEQ ID NO: 1118386 - RNA, 19 nt, Artificial Sequence
  Description of Artificial Sequence: Synthetic oligonucleotide
  Sense strand starting at position 2849 of SEQ ID NO: 915946
accuuaagaugcuuaauga

SEQ ID NO: 1118387 - RNA, 19 nt, Artificial Sequence
  Description of Artificial Sequence: Synthetic oligonucleotide
  Antisense strand to SEQ ID NO: 1118386
ucauuaagcaucuuaaggu

SEQ ID NO: 1118388 - RNA, 19 nt, Artificial Sequence
  Description of Artificial Sequence: Synthetic oligonucleotide
  Sense strand starting at position 3199 of SEQ ID NO: 915946
augcuuaaagucuggaagu

SEQ ID NO: 1118389 - RNA, 19 nt, Artificial Sequence
  Description of Artificial Sequence: Synthetic oligonucleotide
  Antisense strand to SEQ ID NO: 1118388
acuuccagacuuuaagcau

SEQ ID NO: 1118390 - RNA, 19 nt, Artificial Sequence
  Description of Artificial Sequence: Synthetic oligonucleotide
  Sense strand starting at position 3216 of SEQ ID NO: 915946
guggagauagguggguaau

SEQ ID NO: 1118391 - RNA, 19 nt, Artificial Sequence
  Description of Artificial Sequence: Synthetic oligonucleotide
  Antisense strand to SEQ ID NO: 1118390
auuacccaccuaucuccac

SEQ ID NO: 1118392 - RNA, 19 nt, Artificial Sequence
  Description of Artificial Sequence: Synthetic oligonucleotide
  Sense strand starting at position 3217 of SEQ ID NO: 915946
uggagauagguggguaauc

SEQ ID NO: 1118393 - RNA, 19 nt, Artificial Sequence
  Description of Artificial Sequence: Synthetic oligonucleotide
  Antisense strand to SEQ ID NO: 1118392
gauuacccaccuaucucca

SEQ ID NO: 1118394 - RNA, 19 nt, Artificial Sequence
  Description of Artificial Sequence: Synthetic oligonucleotide
  Sense strand starting at position 3218 of SEQ ID NO: 915946
ggagauagguggguaauca

SEQ ID NO: 1118395 - RNA, 19 nt, Artificial Sequence
  Description of Artificial Sequence: Synthetic oligonucleotide
  Antisense strand to SEQ ID NO: 1118394
ugauuacccaccuaucucc

SEQ ID NO: 1118396 - RNA, 19 nt, Artificial Sequence
  Description of Artificial Sequence: Synthetic oligonucleotide
  Sense strand starting at position 3230 of SEQ ID NO: 915946
guaaucaggugauucuaau

SEQ ID NO: 1118397 - RNA, 19 nt, Artificial Sequence
  Description of Artificial Sequence: Synthetic oligonucleotide
  Antisense strand to SEQ ID NO: 1118396
auuagaaucaccugauuac

SEQ ID NO: 1118398 - RNA, 19 nt, Artificial Sequence
  Description of Artificial Sequence: Synthetic oligonucleotide
  Sense strand starting at position 3293 of SEQ ID NO: 915946
gggaauaggugauuagggu

SEQ ID NO: 1118399 - RNA, 19 nt, Artificial Sequence
  Description of Artificial Sequence: Synthetic oligonucleotide
  Antisense strand to SEQ ID NO: 1118398
acccuaaucaccuauuccc

SEQ ID NO: 1118400 - RNA, 19 nt, Artificial Sequence
  Description of Artificial Sequence: Synthetic oligonucleotide
  Sense strand starting at position 3302 of SEQ ID NO: 915946
ugauuaggguuuguuuguu

SEQ ID NO: 1118401 - RNA, 19 nt, Artificial Sequence
  Description of Artificial Sequence: Synthetic oligonucleotide
  Antisense strand to SEQ ID NO: 1118400
aacaaacaaacccuaauca

SEQ ID NO: 1118402 - RNA, 19 nt, Artificial Sequence
  Description of Artificial Sequence: Synthetic oligonucleotide
  Sense strand starting at position 3588 of SEQ ID NO: 915946
ggguuuauucuggauguua

SEQ ID NO: 1118403 - RNA, 19 nt, Artificial Sequence
  Description of Artificial Sequence: Synthetic oligonucleotide
  Antisense strand to SEQ ID NO: 1118402
uaacauccagaauaaaccc

SEQ ID NO: 1118404 - RNA, 19 nt, Artificial Sequence
  Description of Artificial Sequence: Synthetic oligonucleotide
  Sense strand starting at position 3599 of SEQ ID NO: 915946
ggauguuagcuuuggugau

SEQ ID NO: 1118405 - RNA, 19 nt, Artificial Sequence
  Description of Artificial Sequence: Synthetic oligonucleotide
  Antisense strand to SEQ ID NO: 1118404
aucaccaaagcuaacaucc

SEQ ID NO: 1118406 - RNA, 19 nt, Artificial Sequence
  Description of Artificial Sequence: Synthetic oligonucleotide
  Sense strand starting at position 3611 of SEQ ID NO: 915946
uggugaugcccuggaagag

SEQ ID NO: 1118407 - RNA, 19 nt, Artificial Sequence
  Description of Artificial Sequence: Synthetic oligonucleotide
  Antisense strand to SEQ ID NO: 1118406
cucuuccagggcaucacca

SEQ ID NO: 1118408 - RNA, 19 nt, Artificial Sequence
  Description of Artificial Sequence: Synthetic oligonucleotide
  Sense strand starting at position 3737 of SEQ ID NO: 915946
aggugugucacuggcagaa

SEQ ID NO: 1118409 - RNA, 19 nt, Artificial Sequence
  Description of Artificial Sequence: Synthetic oligonucleotide
  Antisense strand to SEQ ID NO: 1118408
uucugccagugacacaccu

SEQ ID NO: 1118410 - RNA, 19 nt, Artificial Sequence
  Description of Artificial Sequence: Synthetic oligonucleotide
  Sense strand starting at position 3825 of SEQ ID NO: 915946
cuaagaaacucuguuuagu

SEQ ID NO: 1118411 - RNA, 19 nt, Artificial Sequence
  Description of Artificial Sequence: Synthetic oligonucleotide
  Antisense strand to SEQ ID NO: 1118410
acuaaacagaguuucuuag

SEQ ID NO: 1118412 - RNA, 19 nt, Artificial Sequence
  Description of Artificial Sequence: Synthetic oligonucleotide
  Sense strand starting at position 3861 of SEQ ID NO: 915946
ugaaauugauggucaccaa

SEQ ID NO: 1118413 - RNA, 19 nt, Artificial Sequence
  Description of Artificial Sequence: Synthetic oligonucleotide
  Antisense strand to SEQ ID NO: 1118412
uuggugaccaucaauuuca

SEQ ID NO: 1118414 - RNA, 19 nt, Artificial Sequence
  Description of Artificial Sequence: Synthetic oligonucleotide
  Sense strand starting at position 77 of SEQ ID NO: 915947
uuuggagucuaugcuuaca

SEQ ID NO: 1118415 - RNA, 19 nt, Artificial Sequence
  Description of Artificial Sequence: Synthetic oligonucleotide
  Antisense strand to SEQ ID NO: 1118414
uguaagcauagacuccaaa

SEQ ID NO: 1118416 - RNA, 19 nt, Artificial Sequence
  Description of Artificial Sequence: Synthetic oligonucleotide
  Sense strand starting at position 80 of SEQ ID NO: 915947
ggagucuaugcuuacaaag

SEQ ID NO: 1118417 - RNA, 19 nt, Artificial Sequence
  Description of Artificial Sequence: Synthetic oligonucleotide
  Antisense strand to SEQ ID NO: 1118416
cuuuguaagcauagacucc

SEQ ID NO: 1118418 - RNA, 19 nt, Artificial Sequence
  Description of Artificial Sequence: Synthetic oligonucleotide
  Sense strand starting at position 123 of SEQ ID NO: 915947
uaguguugacgagaggcua

SEQ ID NO: 1118419 - RNA, 19 nt, Artificial Sequence
  Description of Artificial Sequence: Synthetic oligonucleotide
  Antisense strand to SEQ ID NO: 1118418
uagccucucgucaacacua

SEQ ID NO: 1118420 - RNA, 19 nt, Artificial Sequence
  Description of Artificial Sequence: Synthetic oligonucleotide
  Sense strand starting at position 509 of SEQ ID NO: 915947
cuaccagauuuguaagucu

SEQ ID NO: 1118421 - RNA, 19 nt, Artificial Sequence
  Description of Artificial Sequence: Synthetic oligonucleotide
  Antisense strand to SEQ ID NO: 1118420
agacuuacaaaucugguag

SEQ ID NO: 1118422 - RNA, 19 nt, Artificial Sequence
  Description of Artificial Sequence: Synthetic oligonucleotide
  Sense strand starting at position 543 of SEQ ID NO: 915947
cuaggaucaaggugaaguu

SEQ ID NO: 1118423 - RNA, 19 nt, Artificial Sequence
  Description of Artificial Sequence: Synthetic oligonucleotide
  Antisense strand to SEQ ID NO: 1118422
aacuucaccuugauccuag

SEQ ID NO: 1118424 - RNA, 19 nt, Artificial Sequence
  Description of Artificial Sequence: Synthetic oligonucleotide
  Sense strand starting at position 563 of SEQ ID NO: 915947
ggguaagugaaguaacgaa

SEQ ID NO: 1118425 - RNA, 19 nt, Artificial Sequence
  Description of Artificial Sequence: Synthetic oligonucleotide
  Antisense strand to SEQ ID NO: 1118424
uucguuacuucacuuaccc

SEQ ID NO: 1118426 - RNA, 19 nt, Artificial Sequence
  Description of Artificial Sequence: Synthetic oligonucleotide
  Sense strand starting at position 654 of SEQ ID NO: 915947
cuuccauuguggucucuua

SEQ ID NO: 1118427 - RNA, 19 nt, Artificial Sequence
  Description of Artificial Sequence: Synthetic oligonucleotide
  Antisense strand to SEQ ID NO: 1118426
uaagagaccacaauggaag

SEQ ID NO: 1118428 - RNA, 19 nt, Artificial Sequence
  Description of Artificial Sequence: Synthetic oligonucleotide
  Sense strand starting at position 725 of SEQ ID NO: 915947
gggagagcugguugccuuu

SEQ ID NO: 1118429 - RNA, 19 nt, Artificial Sequence
  Description of Artificial Sequence: Synthetic oligonucleotide
  Antisense strand to SEQ ID NO: 1118428
aaaggcaaccagcucuccc

SEQ ID NO: 1118430 - RNA, 19 nt, Artificial Sequence
  Description of Artificial Sequence: Synthetic oligonucleotide
  Sense strand starting at position 727 of SEQ ID NO: 915947
gagagcugguugccuuuaa

SEQ ID NO: 1118431 - RNA, 19 nt, Artificial Sequence
  Description of Artificial Sequence: Synthetic oligonucleotide
  Antisense strand to SEQ ID NO: 1118430
uuaaaggcaaccagcucuc

SEQ ID NO: 1118432 - RNA, 19 nt, Artificial Sequence
  Description of Artificial Sequence: Synthetic oligonucleotide
  Sense strand starting at position 780 of SEQ ID NO: 915947
agaagauaauagggauauu

SEQ ID NO: 1118433 - RNA, 19 nt, Artificial Sequence
  Description of Artificial Sequence: Synthetic oligonucleotide
  Antisense strand to SEQ ID NO: 1118432
aauaucccuauuaucuucu

SEQ ID NO: 1118434 - RNA, 19 nt, Artificial Sequence
  Description of Artificial Sequence: Synthetic oligonucleotide
  Sense strand starting at position 861 of SEQ ID NO: 915947
aaacuucuccguuguagaa

SEQ ID NO: 1118435 - RNA, 19 nt, Artificial Sequence
  Description of Artificial Sequence: Synthetic oligonucleotide
  Antisense strand to SEQ ID NO: 1118434
uucuacaacggagaaguuu

SEQ ID NO: 1118436 - RNA, 19 nt, Artificial Sequence
  Description of Artificial Sequence: Synthetic oligonucleotide
  Sense strand starting at position 881 of SEQ ID NO: 915947
gcagguugggcuuaauaaa

SEQ ID NO: 1118437 - RNA, 19 nt, Artificial Sequence
  Description of Artificial Sequence: Synthetic oligonucleotide
  Antisense strand to SEQ ID NO: 1118436
uuuauuaagcccaaccugc

SEQ ID NO: 1118438 - RNA, 19 nt, Artificial Sequence
  Description of Artificial Sequence: Synthetic oligonucleotide
  Sense strand starting at position 964 of SEQ ID NO: 915947
ucuuucuucuggcugacau

SEQ ID NO: 1118439 - RNA, 19 nt, Artificial Sequence
  Description of Artificial Sequence: Synthetic oligonucleotide
  Antisense strand to SEQ ID NO: 1118438
augucagccagaagaaaga

SEQ ID NO: 1118440 - RNA, 19 nt, Artificial Sequence
  Description of Artificial Sequence: Synthetic oligonucleotide
  Sense strand starting at position 975 of SEQ ID NO: 915947
gcugacaugucuucccaaa

SEQ ID NO: 1118441 - RNA, 19 nt, Artificial Sequence
  Description of Artificial Sequence: Synthetic oligonucleotide
  Antisense strand to SEQ ID NO: 1118440
uuugggaagacaugucagc

SEQ ID NO: 1118442 - RNA, 19 nt, Artificial Sequence
  Description of Artificial Sequence: Synthetic oligonucleotide
  Sense strand starting at position 997 of SEQ ID NO: 915947
ccuugucuacuagaggguu

SEQ ID NO: 1118443 - RNA, 19 nt, Artificial Sequence
  Description of Artificial Sequence: Synthetic oligonucleotide
  Antisense strand to SEQ ID NO: 1118442
aacccucuaguagacaagg

SEQ ID NO: 1118444 - RNA, 19 nt, Artificial Sequence
  Description of Artificial Sequence: Synthetic oligonucleotide
  Sense strand starting at position 1286 of SEQ ID NO: 915947
gcuuacgucagcugaaaca

SEQ ID NO: 1118445 - RNA, 19 nt, Artificial Sequence
  Description of Artificial Sequence: Synthetic oligonucleotide
  Antisense strand to SEQ ID NO: 1118444
uguuucagcugacguaagc

SEQ ID NO: 1118446 - RNA, 19 nt, Artificial Sequence
  Description of Artificial Sequence: Synthetic oligonucleotide
  Sense strand starting at position 1337 of SEQ ID NO: 915947
gagaacuaugcaggauuau

SEQ ID NO: 1118447 - RNA, 19 nt, Artificial Sequence
  Description of Artificial Sequence: Synthetic oligonucleotide
  Antisense strand to SEQ ID NO: 1118446
auaauccugcauaguucuc

SEQ ID NO: 1118448 - RNA, 19 nt, Artificial Sequence
  Description of Artificial Sequence: Synthetic oligonucleotide
  Sense strand starting at position 1349 of SEQ ID NO: 915947
ggauuauucuaagccuuug

SEQ ID NO: 1118449 - RNA, 19 nt, Artificial Sequence
  Description of Artificial Sequence: Synthetic oligonucleotide
  Antisense strand to SEQ ID NO: 1118448
caaaggcuuagaauaaucc

SEQ ID NO: 1118450 - RNA, 19 nt, Artificial Sequence
  Description of Artificial Sequence: Synthetic oligonucleotide
  Sense strand starting at position 1541 of SEQ ID NO: 915947
cagccugaggguugucgaa

SEQ ID NO: 1118451 - RNA, 19 nt, Artificial Sequence
  Description of Artificial Sequence: Synthetic oligonucleotide
  Antisense strand to SEQ ID NO: 1118450
uucgacaacccucaggcug

SEQ ID NO: 1118452 - RNA, 19 nt, Artificial Sequence
  Description of Artificial Sequence: Synthetic oligonucleotide
  Sense strand starting at position 1557 of SEQ ID NO: 915947
gaagguucugcccagagac

SEQ ID NO: 1118453 - RNA, 19 nt, Artificial Sequence
  Description of Artificial Sequence: Synthetic oligonucleotide
  Antisense strand to SEQ ID NO: 1118452
gucucugggcagaaccuuc

SEQ ID NO: 1118454 - RNA, 19 nt, Artificial Sequence
  Description of Artificial Sequence: Synthetic oligonucleotide
  Sense strand starting at position 2327 of SEQ ID NO: 915947
acguuuagguucucugagu

SEQ ID NO: 1118455 - RNA, 19 nt, Artificial Sequence
  Description of Artificial Sequence: Synthetic oligonucleotide
  Antisense strand to SEQ ID NO: 1118454
acucagagaaccuaaacgu

SEQ ID NO: 1118456 - RNA, 19 nt, Artificial Sequence
  Description of Artificial Sequence: Synthetic oligonucleotide
  Sense strand starting at position 2328 of SEQ ID NO: 915947
cguuuagguucucugagua

SEQ ID NO: 1118457 - RNA, 19 nt, Artificial Sequence
  Description of Artificial Sequence: Synthetic oligonucleotide
  Antisense strand to SEQ ID NO: 1118456
uacucagagaaccuaaacg

SEQ ID NO: 1118458 - RNA, 19 nt, Artificial Sequence
  Description of Artificial Sequence: Synthetic oligonucleotide
  Sense strand starting at position 2332 of SEQ ID NO: 915947
uagguucucugaguaugca

SEQ ID NO: 1118459 - RNA, 19 nt, Artificial Sequence
  Description of Artificial Sequence: Synthetic oligonucleotide
  Antisense strand to SEQ ID NO: 1118458
ugcauacucagagaaccua

SEQ ID NO: 1118460 - RNA, 19 nt, Artificial Sequence
  Description of Artificial Sequence: Synthetic oligonucleotide
  Sense strand starting at position 2333 of SEQ ID NO: 915947
agguucucugaguaugcau

SEQ ID NO: 1118461 - RNA, 19 nt, Artificial Sequence
  Description of Artificial Sequence: Synthetic oligonucleotide
  Antisense strand to SEQ ID NO: 1118460
augcauacucagagaaccu

SEQ ID NO: 1118462 - RNA, 19 nt, Artificial Sequence
  Description of Artificial Sequence: Synthetic oligonucleotide
  Sense strand starting at position 2372 of SEQ ID NO: 915947
gcguuucuugcuccaggua

SEQ ID NO: 1118463 - RNA, 19 nt, Artificial Sequence
  Description of Artificial Sequence: Synthetic oligonucleotide
  Antisense strand to SEQ ID NO: 1118462
uaccuggagcaagaaacgc

SEQ ID NO: 1118464 - RNA, 19 nt, Artificial Sequence
  Description of Artificial Sequence: Synthetic oligonucleotide
  Sense strand starting at position 2825 of SEQ ID NO: 915947
cugguucuuaggcaagaga

SEQ ID NO: 1118465 - RNA, 19 nt, Artificial Sequence
  Description of Artificial Sequence: Synthetic oligonucleotide
  Antisense strand to SEQ ID NO: 1118464
ucucuugccuaagaaccag

SEQ ID NO: 1118466 - RNA, 19 nt, Artificial Sequence
  Description of Artificial Sequence: Synthetic oligonucleotide
  Sense strand starting at position 2959 of SEQ ID NO: 915947
gacacagauugugcaaauu

SEQ ID NO: 1118467 - RNA, 19 nt, Artificial Sequence
  Description of Artificial Sequence: Synthetic oligonucleotide
  Antisense strand to SEQ ID NO: 1118466
aauuugcacaaucuguguc

SEQ ID NO: 1118468 - RNA, 19 nt, Artificial Sequence
  Description of Artificial Sequence: Synthetic oligonucleotide
  Sense strand starting at position 2985 of SEQ ID NO: 915947
ggcuguugagaugacaacu

SEQ ID NO: 1118469 - RNA, 19 nt, Artificial Sequence
  Description of Artificial Sequence: Synthetic oligonucleotide
  Antisense strand to SEQ ID NO: 1118468
aguugucaucucaacagcc

SEQ ID NO: 1118470 - RNA, 19 nt, Artificial Sequence
  Description of Artificial Sequence: Synthetic oligonucleotide
  Sense strand starting at position 3001 of SEQ ID NO: 915947
acuauuguuucuuuaggga

SEQ ID NO: 1118471 - RNA, 19 nt, Artificial Sequence
  Description of Artificial Sequence: Synthetic oligonucleotide
  Antisense strand to SEQ ID NO: 1118470
ucccuaaagaaacaauagu

SEQ ID NO: 1118472 - RNA, 19 nt, Artificial Sequence
  Description of Artificial Sequence: Synthetic oligonucleotide
  Sense strand starting at position 3090 of SEQ ID NO: 915947
ggaaccacguacucagauu

SEQ ID NO: 1118473 - RNA, 19 nt, Artificial Sequence
  Description of Artificial Sequence: Synthetic oligonucleotide
  Antisense strand to SEQ ID NO: 1118472
aaucugaguacgugguucc

SEQ ID NO: 1118474 - RNA, 19 nt, Artificial Sequence
  Description of Artificial Sequence: Synthetic oligonucleotide
  Sense strand starting at position 3286 of SEQ ID NO: 915947
auugcuggguguucugaaa

SEQ ID NO: 1118475 - RNA, 19 nt, Artificial Sequence
  Description of Artificial Sequence: Synthetic oligonucleotide
  Antisense strand to SEQ ID NO: 1118474
uuucagaacacccagcaau

SEQ ID NO: 1118476 - RNA, 19 nt, Artificial Sequence
  Description of Artificial Sequence: Synthetic oligonucleotide
  Sense strand starting at position 3331 of SEQ ID NO: 915947
accuuaagaugcuuaauga

SEQ ID NO: 1118477 - RNA, 19 nt, Artificial Sequence
  Description of Artificial Sequence: Synthetic oligonucleotide
  Antisense strand to SEQ ID NO: 1118476
ucauuaagcaucuuaaggu

SEQ ID NO: 1118478 - RNA, 19 nt, Artificial Sequence
  Description of Artificial Sequence: Synthetic oligonucleotide
  Sense strand starting at position 3681 of SEQ ID NO: 915947
augcuuaaagucuggaagu

SEQ ID NO: 1118479 - RNA, 19 nt, Artificial Sequence
  Description of Artificial Sequence: Synthetic oligonucleotide
  Antisense strand to SEQ ID NO: 1118478
acuuccagacuuuaagcau

SEQ ID NO: 1118480 - RNA, 19 nt, Artificial Sequence
  Description of Artificial Sequence: Synthetic oligonucleotide
  Sense strand starting at position 3698 of SEQ ID NO: 915947
guggagauagguggguaau

SEQ ID NO: 1118481 - RNA, 19 nt, Artificial Sequence
  Description of Artificial Sequence: Synthetic oligonucleotide
  Antisense strand to SEQ ID NO: 1118480
auuacccaccuaucuccac

SEQ ID NO: 1118482 - RNA, 19 nt, Artificial Sequence
  Description of Artificial Sequence: Synthetic oligonucleotide
  Sense strand starting at position 3699 of SEQ ID NO: 915947
uggagauagguggguaauc

SEQ ID NO: 1118483 - RNA, 19 nt, Artificial Sequence
  Description of Artificial Sequence: Synthetic oligonucleotide
  Antisense strand to SEQ ID NO: 1118482
gauuacccaccuaucucca

SEQ ID NO: 1118484 - RNA, 19 nt, Artificial Sequence
  Description of Artificial Sequence: Synthetic oligonucleotide
  Sense strand starting at position 3700 of SEQ ID NO: 915947
ggagauagguggguaauca

SEQ ID NO: 1118485 - RNA, 19 nt, Artificial Sequence
  Description of Artificial Sequence: Synthetic oligonucleotide
  Antisense strand to SEQ ID NO: 1118484
ugauuacccaccuaucucc

SEQ ID NO: 1118486 - RNA, 19 nt, Artificial Sequence
  Description of Artificial Sequence: Synthetic oligonucleotide
  Sense strand starting at position 3712 of SEQ ID NO: 915947
guaaucaggugauucuaau

SEQ ID NO: 1118487 - RNA, 19 nt, Artificial Sequence
  Description of Artificial Sequence: Synthetic oligonucleotide
  Antisense strand to SEQ ID NO: 1118486
auuagaaucaccugauuac

SEQ ID NO: 1118488 - RNA, 19 nt, Artificial Sequence
  Description of Artificial Sequence: Synthetic oligonucleotide
  Sense strand starting at position 3775 of SEQ ID NO: 915947
gggaauaggugauuagggu

SEQ ID NO: 1118489 - RNA, 19 nt, Artificial Sequence
  Description of Artificial Sequence: Synthetic oligonucleotide
  Antisense strand to SEQ ID NO: 1118488
acccuaaucaccuauuccc

SEQ ID NO: 1118490 - RNA, 19 nt, Artificial Sequence
  Description of Artificial Sequence: Synthetic oligonucleotide
  Sense strand starting at position 3783 of SEQ ID NO: 915947
gugauuaggguuuguuugu

SEQ ID NO: 1118491 - RNA, 19 nt, Artificial Sequence
  Description of Artificial Sequence: Synthetic oligonucleotide
  Antisense strand to SEQ ID NO: 1118490
acaaacaaacccuaaucac

SEQ ID NO: 1118492 - RNA, 19 nt, Artificial Sequence
  Description of Artificial Sequence: Synthetic oligonucleotide
  Sense strand starting at position 3784 of SEQ ID NO: 915947
ugauuaggguuuguuuguu

SEQ ID NO: 1118493 - RNA, 19 nt, Artificial Sequence
  Description of Artificial Sequence: Synthetic oligonucleotide
  Antisense strand to SEQ ID NO: 1118492
aacaaacaaacccuaauca

SEQ ID NO: 1118494 - RNA, 19 nt, Artificial Sequence
  Description of Artificial Sequence: Synthetic oligonucleotide
  Sense strand starting at position 140 of SEQ ID NO: 915948
cccugagaauuccugaacu

SEQ ID NO: 1118495 - RNA, 19 nt, Artificial Sequence
  Description of Artificial Sequence: Synthetic oligonucleotide
  Antisense strand to SEQ ID NO: 1118494
aguucaggaauucucaggg

SEQ ID NO: 1118496 - RNA, 19 nt, Artificial Sequence
  Description of Artificial Sequence: Synthetic oligonucleotide
  Sense strand starting at position 321 of SEQ ID NO: 915948
augacucagucucuggauu

SEQ ID NO: 1118497 - RNA, 19 nt, Artificial Sequence
  Description of Artificial Sequence: Synthetic oligonucleotide
  Antisense strand to SEQ ID NO: 1118496
aauccagagacugagucau

SEQ ID NO: 1118498 - RNA, 19 nt, Artificial Sequence
  Description of Artificial Sequence: Synthetic oligonucleotide
  Sense strand starting at position 452 of SEQ ID NO: 915948
gagacaauguucuuugcuu

SEQ ID NO: 1118499 - RNA, 19 nt, Artificial Sequence
  Description of Artificial Sequence: Synthetic oligonucleotide
  Antisense strand to SEQ ID NO: 1118498
aagcaaagaacauugucuc

SEQ ID NO: 1118500 - RNA, 19 nt, Artificial Sequence
  Description of Artificial Sequence: Synthetic oligonucleotide
  Sense strand starting at position 453 of SEQ ID NO: 915948
agacaauguucuuugcuuu

SEQ ID NO: 1118501 - RNA, 19 nt, Artificial Sequence
  Description of Artificial Sequence: Synthetic oligonucleotide
  Antisense strand to SEQ ID NO: 1118500
aaagcaaagaacauugucu

SEQ ID NO: 1118502 - RNA, 19 nt, Artificial Sequence
  Description of Artificial Sequence: Synthetic oligonucleotide
  Sense strand starting at position 520 of SEQ ID NO: 915948
ggguguggucccuagagac

SEQ ID NO: 1118503 - RNA, 19 nt, Artificial Sequence
  Description of Artificial Sequence: Synthetic oligonucleotide
  Antisense strand to SEQ ID NO: 1118502
gucucuagggaccacaccc

SEQ ID NO: 1118504 - RNA, 19 nt, Artificial Sequence
  Description of Artificial Sequence: Synthetic oligonucleotide
  Sense strand starting at position 675 of SEQ ID NO: 915948
ggugguaagcuguaaugaa

SEQ ID NO: 1118505 - RNA, 19 nt, Artificial Sequence
  Description of Artificial Sequence: Synthetic oligonucleotide
  Antisense strand to SEQ ID NO: 1118504
uucauuacagcuuaccacc

SEQ ID NO: 1118506 - RNA, 19 nt, Artificial Sequence
  Description of Artificial Sequence: Synthetic oligonucleotide
  Sense strand starting at position 715 of SEQ ID NO: 915948
ugaagugacagcuggacuu

SEQ ID NO: 1118507 - RNA, 19 nt, Artificial Sequence
  Description of Artificial Sequence: Synthetic oligonucleotide
  Antisense strand to SEQ ID NO: 1118506
aaguccagcugucacuuca

SEQ ID NO: 1118508 - RNA, 19 nt, Artificial Sequence
  Description of Artificial Sequence: Synthetic oligonucleotide
  Sense strand starting at position 769 of SEQ ID NO: 915948
uuguaaaugccagggaagu

SEQ ID NO: 1118509 - RNA, 19 nt, Artificial Sequence
  Description of Artificial Sequence: Synthetic oligonucleotide
  Antisense strand to SEQ ID NO: 1118508
acuucccuggcauuuacaa

SEQ ID NO: 1118510 - RNA, 19 nt, Artificial Sequence
  Description of Artificial Sequence: Synthetic oligonucleotide
  Sense strand starting at position 770 of SEQ ID NO: 915948
uguaaaugccagggaaguu

SEQ ID NO: 1118511 - RNA, 19 nt, Artificial Sequence
  Description of Artificial Sequence: Synthetic oligonucleotide
  Antisense strand to SEQ ID NO: 1118510
aacuucccuggcauuuaca

SEQ ID NO: 1118512 - RNA, 19 nt, Artificial Sequence
  Description of Artificial Sequence: Synthetic oligonucleotide
  Sense strand starting at position 771 of SEQ ID NO: 915948
guaaaugccagggaaguua

SEQ ID NO: 1118513 - RNA, 19 nt, Artificial Sequence
  Description of Artificial Sequence: Synthetic oligonucleotide
  Antisense strand to SEQ ID NO: 1118512
uaacuucccuggcauuuac

SEQ ID NO: 1118514 - RNA, 19 nt, Artificial Sequence
  Description of Artificial Sequence: Synthetic oligonucleotide
  Sense strand starting at position 850 of SEQ ID NO: 915948
agugcuaggacucagaguu

SEQ ID NO: 1118515 - RNA, 19 nt, Artificial Sequence
  Description of Artificial Sequence: Synthetic oligonucleotide
  Antisense strand to SEQ ID NO: 1118514
aacucugaguccuagcacu

SEQ ID NO: 1118516 - RNA, 19 nt, Artificial Sequence
  Description of Artificial Sequence: Synthetic oligonucleotide
  Sense strand starting at position 1189 of SEQ ID NO: 915948
cugcuaguugccgaaauuu

SEQ ID NO: 1118517 - RNA, 19 nt, Artificial Sequence
  Description of Artificial Sequence: Synthetic oligonucleotide
  Antisense strand to SEQ ID NO: 1118516
aaauuucggcaacuagcag

SEQ ID NO: 1118518 - RNA, 19 nt, Artificial Sequence
  Description of Artificial Sequence: Synthetic oligonucleotide
  Sense strand starting at position 1748 of SEQ ID NO: 915948
ccuggauaugguuaguuac

SEQ ID NO: 1118519 - RNA, 19 nt, Artificial Sequence
  Description of Artificial Sequence: Synthetic oligonucleotide
  Antisense strand to SEQ ID NO: 1118518
guaacuaaccauauccagg

SEQ ID NO: 1118520 - RNA, 19 nt, Artificial Sequence
  Description of Artificial Sequence: Synthetic oligonucleotide
  Sense strand starting at position 1754 of SEQ ID NO: 915948
uaugguuaguuacucgaga

SEQ ID NO: 1118521 - RNA, 19 nt, Artificial Sequence
  Description of Artificial Sequence: Synthetic oligonucleotide
  Antisense strand to SEQ ID NO: 1118520
ucucgaguaacuaaccaua

SEQ ID NO: 1118522 - RNA, 19 nt, Artificial Sequence
  Description of Artificial Sequence: Synthetic oligonucleotide
  Sense strand starting at position 1755 of SEQ ID NO: 915948
augguuaguuacucgagau

SEQ ID NO: 1118523 - RNA, 19 nt, Artificial Sequence
  Description of Artificial Sequence: Synthetic oligonucleotide
  Antisense strand to SEQ ID NO: 1118522
aucucgaguaacuaaccau

SEQ ID NO: 1118524 - RNA, 19 nt, Artificial Sequence
  Description of Artificial Sequence: Synthetic oligonucleotide
  Sense strand starting at position 2024 of SEQ ID NO: 915948
ucuugagaccuugggugaa

SEQ ID NO: 1118525 - RNA, 19 nt, Artificial Sequence
  Description of Artificial Sequence: Synthetic oligonucleotide
  Antisense strand to SEQ ID NO: 1118524
uucacccaaggucucaaga

SEQ ID NO: 1118526 - RNA, 19 nt, Artificial Sequence
  Description of Artificial Sequence: Synthetic oligonucleotide
  Sense strand starting at position 2027 of SEQ ID NO: 915948
ugagaccuugggugaagau

SEQ ID NO: 1118527 - RNA, 19 nt, Artificial Sequence
  Description of Artificial Sequence: Synthetic oligonucleotide
  Antisense strand to SEQ ID NO: 1118526
aucuucacccaaggucuca

SEQ ID NO: 1118528 - RNA, 19 nt, Artificial Sequence
  Description of Artificial Sequence: Synthetic oligonucleotide
  Sense strand starting at position 2217 of SEQ ID NO: 915948
ucuaucaccguuuaauuga

SEQ ID NO: 1118529 - RNA, 19 nt, Artificial Sequence
  Description of Artificial Sequence: Synthetic oligonucleotide
  Antisense strand to SEQ ID NO: 1118528
ucaauuaaacggugauaga

SEQ ID NO: 1118530 - RNA, 19 nt, Artificial Sequence
  Description of Artificial Sequence: Synthetic oligonucleotide
  Sense strand starting at position 2400 of SEQ ID NO: 915948
cucagcucugggugaucau

SEQ ID NO: 1118531 - RNA, 19 nt, Artificial Sequence
  Description of Artificial Sequence: Synthetic oligonucleotide
  Antisense strand to SEQ ID NO: 1118530
augaucacccagagcugag

SEQ ID NO: 1118532 - RNA, 19 nt, Artificial Sequence
  Description of Artificial Sequence: Synthetic oligonucleotide
  Sense strand starting at position 2401 of SEQ ID NO: 915948
ucagcucugggugaucauu

SEQ ID NO: 1118533 - RNA, 19 nt, Artificial Sequence
  Description of Artificial Sequence: Synthetic oligonucleotide
  Antisense strand to SEQ ID NO: 1118532
aaugaucacccagagcuga

SEQ ID NO: 1118534 - RNA, 19 nt, Artificial Sequence
  Description of Artificial Sequence: Synthetic oligonucleotide
  Sense strand starting at position 2407 of SEQ ID NO: 915948
cugggugaucauuguagag

SEQ ID NO: 1118535 - RNA, 19 nt, Artificial Sequence
  Description of Artificial Sequence: Synthetic oligonucleotide
  Antisense strand to SEQ ID NO: 1118534
cucuacaaugaucacccag

SEQ ID NO: 1118536 - RNA, 19 nt, Artificial Sequence
  Description of Artificial Sequence: Synthetic oligonucleotide
  Sense strand starting at position 2476 of SEQ ID NO: 915948
cgggcugugugaauguaga

SEQ ID NO: 1118537 - RNA, 19 nt, Artificial Sequence
  Description of Artificial Sequence: Synthetic oligonucleotide
  Antisense strand to SEQ ID NO: 1118536
ucuacauucacacagcccg

SEQ ID NO: 1118538 - RNA, 19 nt, Artificial Sequence
  Description of Artificial Sequence: Synthetic oligonucleotide
  Sense strand starting at position 2551 of SEQ ID NO: 915948
agcguaagugcugugccaa

SEQ ID NO: 1118539 - RNA, 19 nt, Artificial Sequence
  Description of Artificial Sequence: Synthetic oligonucleotide
  Antisense strand to SEQ ID NO: 1118538
uuggcacagcacuuacgcu

SEQ ID NO: 1118540 - RNA, 19 nt, Artificial Sequence
  Description of Artificial Sequence: Synthetic oligonucleotide
  Sense strand starting at position 2554 of SEQ ID NO: 915948
guaagugcugugccaaagu

SEQ ID NO: 1118541 - RNA, 19 nt, Artificial Sequence
  Description of Artificial Sequence: Synthetic oligonucleotide
  Antisense strand to SEQ ID NO: 1118540
acuuuggcacagcacuuac

SEQ ID NO: 1118542 - RNA, 19 nt, Artificial Sequence
  Description of Artificial Sequence: Synthetic oligonucleotide
  Sense strand starting at position 2585 of SEQ ID NO: 915948
auauaaggccucugugaac

SEQ ID NO: 1118543 - RNA, 19 nt, Artificial Sequence
  Description of Artificial Sequence: Synthetic oligonucleotide
  Antisense strand to SEQ ID NO: 1118542
guucacagaggccuuauau

SEQ ID NO: 1118544 - RNA, 19 nt, Artificial Sequence
  Description of Artificial Sequence: Synthetic oligonucleotide
  Sense strand starting at position 2611 of SEQ ID NO: 915948
aaaugcuuccgggauuaac

SEQ ID NO: 1118545 - RNA, 19 nt, Artificial Sequence
  Description of Artificial Sequence: Synthetic oligonucleotide
  Antisense strand to SEQ ID NO: 1118544
guuaaucccggaagcauuu

SEQ ID NO: 1118546 - RNA, 19 nt, Artificial Sequence
  Description of Artificial Sequence: Synthetic oligonucleotide
  Sense strand starting at position 2623 of SEQ ID NO: 915948
gauuaacuccagcgagaac

SEQ ID NO: 1118547 - RNA, 19 nt, Artificial Sequence
  Description of Artificial Sequence: Synthetic oligonucleotide
  Antisense strand to SEQ ID NO: 1118546
guucucgcuggaguuaauc

SEQ ID NO: 1118548 - RNA, 19 nt, Artificial Sequence
  Description of Artificial Sequence: Synthetic oligonucleotide
  Sense strand starting at position 2704 of SEQ ID NO: 915948
uaacauguugggugacuuu

SEQ ID NO: 1118549 - RNA, 19 nt, Artificial Sequence
  Description of Artificial Sequence: Synthetic oligonucleotide
  Antisense strand to SEQ ID NO: 1118548
aaagucacccaacauguua

SEQ ID NO: 1118550 - RNA, 19 nt, Artificial Sequence
  Description of Artificial Sequence: Synthetic oligonucleotide
  Sense strand starting at position 2723 of SEQ ID NO: 915948
gggcaaguugcucaccauu

SEQ ID NO: 1118551 - RNA, 19 nt, Artificial Sequence
  Description of Artificial Sequence: Synthetic oligonucleotide
  Antisense strand to SEQ ID NO: 1118550
aauggugagcaacuugccc

SEQ ID NO: 1118552 - RNA, 19 nt, Artificial Sequence
  Description of Artificial Sequence: Synthetic oligonucleotide
  Sense strand starting at position 2733 of SEQ ID NO: 915948
cucaccauucuagguuaua

SEQ ID NO: 1118553 - RNA, 19 nt, Artificial Sequence
  Description of Artificial Sequence: Synthetic oligonucleotide
  Antisense strand to SEQ ID NO: 1118552
uauaaccuagaauggugag

SEQ ID NO: 1118554 - RNA, 19 nt, Artificial Sequence
  Description of Artificial Sequence: Synthetic oligonucleotide
  Sense strand starting at position 2734 of SEQ ID NO: 915948
ucaccauucuagguuauag

SEQ ID NO: 1118555 - RNA, 19 nt, Artificial Sequence
  Description of Artificial Sequence: Synthetic oligonucleotide
  Antisense strand to SEQ ID NO: 1118554
cuauaaccuagaaugguga

SEQ ID NO: 1118556 - RNA, 19 nt, Artificial Sequence
  Description of Artificial Sequence: Synthetic oligonucleotide
  Sense strand starting at position 2736 of SEQ ID NO: 915948
accauucuagguuauaguu

SEQ ID NO: 1118557 - RNA, 19 nt, Artificial Sequence
  Description of Artificial Sequence: Synthetic oligonucleotide
  Antisense strand to SEQ ID NO: 1118556
aacuauaaccuagaauggu

SEQ ID NO: 1118558 - RNA, 19 nt, Artificial Sequence
  Description of Artificial Sequence: Synthetic oligonucleotide
  Sense strand starting at position 2785 of SEQ ID NO: 915948
ggauuaaaucggugguucu

SEQ ID NO: 1118559 - RNA, 19 nt, Artificial Sequence
  Description of Artificial Sequence: Synthetic oligonucleotide
  Antisense strand to SEQ ID NO: 1118558
agaaccaccgauuuaaucc

SEQ ID NO: 1118560 - RNA, 19 nt, Artificial Sequence
  Description of Artificial Sequence: Synthetic oligonucleotide
  Sense strand starting at position 2786 of SEQ ID NO: 915948
gauuaaaucggugguucuc

SEQ ID NO: 1118561 - RNA, 19 nt, Artificial Sequence
  Description of Artificial Sequence: Synthetic oligonucleotide
  Antisense strand to SEQ ID NO: 1118560
gagaaccaccgauuuaauc

SEQ ID NO: 1118562 - RNA, 19 nt, Artificial Sequence
  Description of Artificial Sequence: Synthetic oligonucleotide
  Sense strand starting at position 2798 of SEQ ID NO: 915948
gguucucaacccuggcuaa

SEQ ID NO: 1118563 - RNA, 19 nt, Artificial Sequence
  Description of Artificial Sequence: Synthetic oligonucleotide
  Antisense strand to SEQ ID NO: 1118562
uuagccaggguugagaacc

SEQ ID NO: 1118564 - RNA, 19 nt, Artificial Sequence
  Description of Artificial Sequence: Synthetic oligonucleotide
  Sense strand starting at position 2809 of SEQ ID NO: 915948
cuggcuaagcauuagaauc

SEQ ID NO: 1118565 - RNA, 19 nt, Artificial Sequence
  Description of Artificial Sequence: Synthetic oligonucleotide
  Antisense strand to SEQ ID NO: 1118564
gauucuaaugcuuagccag

SEQ ID NO: 1118566 - RNA, 19 nt, Artificial Sequence
  Description of Artificial Sequence: Synthetic oligonucleotide
  Sense strand starting at position 3935 of SEQ ID NO: 915948
cuggccuuaucaguauauu

SEQ ID NO: 1118567 - RNA, 19 nt, Artificial Sequence
  Description of Artificial Sequence: Synthetic oligonucleotide
  Antisense strand to SEQ ID NO: 1118566
aauauacugauaaggccag

SEQ ID NO: 1118568 - RNA, 19 nt, Artificial Sequence
  Description of Artificial Sequence: Synthetic oligonucleotide
  Sense strand starting at position 3959 of SEQ ID NO: 915948
agcuguucuggugauucua

SEQ ID NO: 1118569 - RNA, 19 nt, Artificial Sequence
  Description of Artificial Sequence: Synthetic oligonucleotide
  Antisense strand to SEQ ID NO: 1118568
uagaaucaccagaacagcu

SEQ ID NO: 1118570 - RNA, 19 nt, Artificial Sequence
  Description of Artificial Sequence: Synthetic oligonucleotide
  Sense strand starting at position 3961 of SEQ ID NO: 915948
cuguucuggugauucuaau

SEQ ID NO: 1118571 - RNA, 19 nt, Artificial Sequence
  Description of Artificial Sequence: Synthetic oligonucleotide
  Antisense strand to SEQ ID NO: 1118570
auuagaaucaccagaacag

SEQ ID NO: 1118572 - RNA, 19 nt, Artificial Sequence
  Description of Artificial Sequence: Synthetic oligonucleotide
  Sense strand starting at position 3978 of SEQ ID NO: 915948
auguguauccaggguugaa

SEQ ID NO: 1118573 - RNA, 19 nt, Artificial Sequence
  Description of Artificial Sequence: Synthetic oligonucleotide
  Antisense strand to SEQ ID NO: 1118572
uucaacccuggauacacau

SEQ ID NO: 1118574 - RNA, 19 nt, Artificial Sequence
  Description of Artificial Sequence: Synthetic oligonucleotide
  Sense strand starting at position 64 of SEQ ID NO: 915949
ccaugaacaucugugauua

SEQ ID NO: 1118575 - RNA, 19 nt, Artificial Sequence
  Description of Artificial Sequence: Synthetic oligonucleotide
  Antisense strand to SEQ ID NO: 1118574
uaaucacagauguucaugg

SEQ ID NO: 1118576 - RNA, 19 nt, Artificial Sequence
  Description of Artificial Sequence: Synthetic oligonucleotide
  Sense strand starting at position 234 of SEQ ID NO: 915949
gaggaagcccucuaaaugu

SEQ ID NO: 1118577 - RNA, 19 nt, Artificial Sequence
  Description of Artificial Sequence: Synthetic oligonucleotide
  Antisense strand to SEQ ID NO: 1118576
acauuuagagggcuuccuc

SEQ ID NO: 1118578 - RNA, 19 nt, Artificial Sequence
  Description of Artificial Sequence: Synthetic oligonucleotide
  Sense strand starting at position 241 of SEQ ID NO: 915949
cccucuaaauguuugauga

SEQ ID NO: 1118579 - RNA, 19 nt, Artificial Sequence
  Description of Artificial Sequence: Synthetic oligonucleotide
  Antisense strand to SEQ ID NO: 1118578
ucaucaaacauuuagaggg

SEQ ID NO: 1118580 - RNA, 19 nt, Artificial Sequence
  Description of Artificial Sequence: Synthetic oligonucleotide
  Sense strand starting at position 242 of SEQ ID NO: 915949
ccucuaaauguuugaugaa

SEQ ID NO: 1118581 - RNA, 19 nt, Artificial Sequence
  Description of Artificial Sequence: Synthetic oligonucleotide
  Antisense strand to SEQ ID NO: 1118580
uucaucaaacauuuagagg

SEQ ID NO: 1118582 - RNA, 19 nt, Artificial Sequence
  Description of Artificial Sequence: Synthetic oligonucleotide
  Sense strand starting at position 272 of SEQ ID NO: 915949
augacugacccaugcagau

SEQ ID NO: 1118583 - RNA, 19 nt, Artificial Sequence
  Description of Artificial Sequence: Synthetic oligonucleotide
  Antisense strand to SEQ ID NO: 1118582
aucugcaugggucagucau

SEQ ID NO: 1118584 - RNA, 19 nt, Artificial Sequence
  Description of Artificial Sequence: Synthetic oligonucleotide
  Sense strand starting at position 352 of SEQ ID NO: 915949
uuggaaaggugcucauaag

SEQ ID NO: 1118585 - RNA, 19 nt, Artificial Sequence
  Description of Artificial Sequence: Synthetic oligonucleotide
  Antisense strand to SEQ ID NO: 1118584
cuuaugagcaccuuuccaa

SEQ ID NO: 1118586 - RNA, 19 nt, Artificial Sequence
  Description of Artificial Sequence: Synthetic oligonucleotide
  Sense strand starting at position 362 of SEQ ID NO: 915949
gcucauaagcuauaaaguc

SEQ ID NO: 1118587 - RNA, 19 nt, Artificial Sequence
  Description of Artificial Sequence: Synthetic oligonucleotide
  Antisense strand to SEQ ID NO: 1118586
gacuuuauagcuuaugagc

SEQ ID NO: 1118588 - RNA, 19 nt, Artificial Sequence
  Description of Artificial Sequence: Synthetic oligonucleotide
  Sense strand starting at position 538 of SEQ ID NO: 915949
guuguaauucuacacauau

SEQ ID NO: 1118589 - RNA, 19 nt, Artificial Sequence
  Description of Artificial Sequence: Synthetic oligonucleotide
  Antisense strand to SEQ ID NO: 1118588
auauguguagaauuacaac

SEQ ID NO: 1118590 - RNA, 19 nt, Artificial Sequence
  Description of Artificial Sequence: Synthetic oligonucleotide
  Sense strand starting at position 575 of SEQ ID NO: 915949
aucuguuuccuccaugaua

SEQ ID NO: 1118591 - RNA, 19 nt, Artificial Sequence
  Description of Artificial Sequence: Synthetic oligonucleotide
  Antisense strand to SEQ ID NO: 1118590
uaucauggaggaaacagau

SEQ ID NO: 1118592 - RNA, 19 nt, Artificial Sequence
  Description of Artificial Sequence: Synthetic oligonucleotide
  Sense strand starting at position 650 of SEQ ID NO: 915949
agcagauaugagcauaagu

SEQ ID NO: 1118593 - RNA, 19 nt, Artificial Sequence
  Description of Artificial Sequence: Synthetic oligonucleotide
  Antisense strand to SEQ ID NO: 1118592
acuuaugcucauaucugcu

SEQ ID NO: 1118594 - RNA, 19 nt, Artificial Sequence
  Description of Artificial Sequence: Synthetic oligonucleotide
  Sense strand starting at position 652 of SEQ ID NO: 915949
cagauaugagcauaaguuu

SEQ ID NO: 1118595 - RNA, 19 nt, Artificial Sequence
  Description of Artificial Sequence: Synthetic oligonucleotide
  Antisense strand to SEQ ID NO: 1118594
aaacuuaugcucauaucug

SEQ ID NO: 1118596 - RNA, 19 nt, Artificial Sequence
  Description of Artificial Sequence: Synthetic oligonucleotide
  Sense strand starting at position 993 of SEQ ID NO: 915949
uuaguuaauuaucugagga

SEQ ID NO: 1118597 - RNA, 19 nt, Artificial Sequence
  Description of Artificial Sequence: Synthetic oligonucleotide
  Antisense strand to SEQ ID NO: 1118596
uccucagauaauuaacuaa

SEQ ID NO: 1118598 - RNA, 19 nt, Artificial Sequence
  Description of Artificial Sequence: Synthetic oligonucleotide
  Sense strand starting at position 1094 of SEQ ID NO: 915949
ccagcucacugaguuagaa

SEQ ID NO: 1118599 - RNA, 19 nt, Artificial Sequence
  Description of Artificial Sequence: Synthetic oligonucleotide
  Antisense strand to SEQ ID NO: 1118598
uucuaacucagugagcugg

SEQ ID NO: 1118600 - RNA, 19 nt, Artificial Sequence
  Description of Artificial Sequence: Synthetic oligonucleotide
  Sense strand starting at position 1130 of SEQ ID NO: 915949
acagauaaccuugggcaaa

SEQ ID NO: 1118601 - RNA, 19 nt, Artificial Sequence
  Description of Artificial Sequence: Synthetic oligonucleotide
  Antisense strand to SEQ ID NO: 1118600
uuugcccaagguuaucugu

SEQ ID NO: 1118602 - RNA, 19 nt, Artificial Sequence
  Description of Artificial Sequence: Synthetic oligonucleotide
  Sense strand starting at position 1182 of SEQ ID NO: 915949
guaagagguacaugucaca

SEQ ID NO: 1118603 - RNA, 19 nt, Artificial Sequence
  Description of Artificial Sequence: Synthetic oligonucleotide
  Antisense strand to SEQ ID NO: 1118602
ugugacauguaccucuuac

SEQ ID NO: 1118604 - RNA, 19 nt, Artificial Sequence
  Description of Artificial Sequence: Synthetic oligonucleotide
  Sense strand starting at position 1217 of SEQ ID NO: 915949
ggcuguugcaaagauaauu

SEQ ID NO: 1118605 - RNA, 19 nt, Artificial Sequence
  Description of Artificial Sequence: Synthetic oligonucleotide
  Antisense strand to SEQ ID NO: 1118604
aauuaucuuugcaacagcc

SEQ ID NO: 1118606 - RNA, 19 nt, Artificial Sequence
  Description of Artificial Sequence: Synthetic oligonucleotide
  Sense strand starting at position 1275 of SEQ ID NO: 915949
ggauauaggaaguguccaa

SEQ ID NO: 1118607 - RNA, 19 nt, Artificial Sequence
  Description of Artificial Sequence: Synthetic oligonucleotide
  Antisense strand to SEQ ID NO: 1118606
uuggacacuuccuauaucc

SEQ ID NO: 1118608 - RNA, 19 nt, Artificial Sequence
  Description of Artificial Sequence: Synthetic oligonucleotide
  Sense strand starting at position 1296 of SEQ ID NO: 915949
uuuaguuaugacuaugguu

SEQ ID NO: 1118609 - RNA, 19 nt, Artificial Sequence
  Description of Artificial Sequence: Synthetic oligonucleotide
  Antisense strand to SEQ ID NO: 1118608
aaccauagucauaacuaaa

SEQ ID NO: 1118610 - RNA, 19 nt, Artificial Sequence
  Description of Artificial Sequence: Synthetic oligonucleotide
  Sense strand starting at position 1298 of SEQ ID NO: 915949
uaguuaugacuaugguuag

SEQ ID NO: 1118611 - RNA, 19 nt, Artificial Sequence
  Description of Artificial Sequence: Synthetic oligonucleotide
  Antisense strand to SEQ ID NO: 1118610
cuaaccauagucauaacua

SEQ ID NO: 1118612 - RNA, 19 nt, Artificial Sequence
  Description of Artificial Sequence: Synthetic oligonucleotide
  Sense strand starting at position 1461 of SEQ ID NO: 915949
gggagacgcgccagguaua

SEQ ID NO: 1118613 - RNA, 19 nt, Artificial Sequence
  Description of Artificial Sequence: Synthetic oligonucleotide
  Antisense strand to SEQ ID NO: 1118612
uauaccuggcgcgucuccc

SEQ ID NO: 1118614 - RNA, 19 nt, Artificial Sequence
  Description of Artificial Sequence: Synthetic oligonucleotide
  Sense strand starting at position 1763 of SEQ ID NO: 915949
gcuccaaucggauaacaac

SEQ ID NO: 1118615 - RNA, 19 nt, Artificial Sequence
  Description of Artificial Sequence: Synthetic oligonucleotide
  Antisense strand to SEQ ID NO: 1118614
guuguuauccgauuggagc

SEQ ID NO: 1118616 - RNA, 19 nt, Artificial Sequence
  Description of Artificial Sequence: Synthetic oligonucleotide
  Sense strand starting at position 2377 of SEQ ID NO: 915949
aggugaaguuccuucuaag

SEQ ID NO: 1118617 - RNA, 19 nt, Artificial Sequence
  Description of Artificial Sequence: Synthetic oligonucleotide
  Antisense strand to SEQ ID NO: 1118616
cuuagaaggaacuucaccu

SEQ ID NO: 1118618 - RNA, 19 nt, Artificial Sequence
  Description of Artificial Sequence: Synthetic oligonucleotide
  Sense strand starting at position 2845 of SEQ ID NO: 915949
gcuugagauacguuggcgu

SEQ ID NO: 1118619 - RNA, 19 nt, Artificial Sequence
  Description of Artificial Sequence: Synthetic oligonucleotide
  Antisense strand to SEQ ID NO: 1118618
acgccaacguaucucaagc

SEQ ID NO: 1118620 - RNA, 19 nt, Artificial Sequence
  Description of Artificial Sequence: Synthetic oligonucleotide
  Sense strand starting at position 2888 of SEQ ID NO: 915949
guacuaugagguugaccua

SEQ ID NO: 1118621 - RNA, 19 nt, Artificial Sequence
  Description of Artificial Sequence: Synthetic oligonucleotide
  Antisense strand to SEQ ID NO: 1118620
uaggucaaccucauaguac

SEQ ID NO: 1118622 - RNA, 19 nt, Artificial Sequence
  Description of Artificial Sequence: Synthetic oligonucleotide
  Sense strand starting at position 2891 of SEQ ID NO: 915949
cuaugagguugaccuacau

SEQ ID NO: 1118623 - RNA, 19 nt, Artificial Sequence
  Description of Artificial Sequence: Synthetic oligonucleotide
  Antisense strand to SEQ ID NO: 1118622
auguaggucaaccucauag

SEQ ID NO: 1118624 - RNA, 19 nt, Artificial Sequence
  Description of Artificial Sequence: Synthetic oligonucleotide
  Sense strand starting at position 2925 of SEQ ID NO: 915949
cuugaacuaguauagucau

SEQ ID NO: 1118625 - RNA, 19 nt, Artificial Sequence
  Description of Artificial Sequence: Synthetic oligonucleotide
  Antisense strand to SEQ ID NO: 1118624
augacuauacuaguucaag

SEQ ID NO: 1118626 - RNA, 19 nt, Artificial Sequence
  Description of Artificial Sequence: Synthetic oligonucleotide
  Sense strand starting at position 2936 of SEQ ID NO: 915949
auagucauugcauaaaguu

SEQ ID NO: 1118627 - RNA, 19 nt, Artificial Sequence
  Description of Artificial Sequence: Synthetic oligonucleotide
  Antisense strand to SEQ ID NO: 1118626
aacuuuaugcaaugacuau

SEQ ID NO: 1118628 - RNA, 19 nt, Artificial Sequence
  Description of Artificial Sequence: Synthetic oligonucleotide
  Sense strand starting at position 2948 of SEQ ID NO: 915949
uaaaguuggcaugauauca

SEQ ID NO: 1118629 - RNA, 19 nt, Artificial Sequence
  Description of Artificial Sequence: Synthetic oligonucleotide
  Antisense strand to SEQ ID NO: 1118628
ugauaucaugccaacuuua

SEQ ID NO: 1118630 - RNA, 19 nt, Artificial Sequence
  Description of Artificial Sequence: Synthetic oligonucleotide
  Sense strand starting at position 2958 of SEQ ID NO: 915949
augauaucauguccucaug

SEQ ID NO: 1118631 - RNA, 19 nt, Artificial Sequence
  Description of Artificial Sequence: Synthetic oligonucleotide
  Antisense strand to SEQ ID NO: 1118630
caugaggacaugauaucau

SEQ ID NO: 1118632 - RNA, 19 nt, Artificial Sequence
  Description of Artificial Sequence: Synthetic oligonucleotide
  Sense strand starting at position 2975 of SEQ ID NO: 915949
ugcaguugugaggaugaaa

SEQ ID NO: 1118633 - RNA, 19 nt, Artificial Sequence
  Description of Artificial Sequence: Synthetic oligonucleotide
  Antisense strand to SEQ ID NO: 1118632
uuucauccucacaacugca

SEQ ID NO: 1118634 - RNA, 19 nt, Artificial Sequence
  Description of Artificial Sequence: Synthetic oligonucleotide
  Sense strand starting at position 3163 of SEQ ID NO: 915949
uaguacauucuagaugugu

SEQ ID NO: 1118635 - RNA, 19 nt, Artificial Sequence
  Description of Artificial Sequence: Synthetic oligonucleotide
  Antisense strand to SEQ ID NO: 1118634
acacaucuagaauguacua

SEQ ID NO: 1118636 - RNA, 19 nt, Artificial Sequence
  Description of Artificial Sequence: Synthetic oligonucleotide
  Sense strand starting at position 3214 of SEQ ID NO: 915949
guguaucuggacuaugaca

SEQ ID NO: 1118637 - RNA, 19 nt, Artificial Sequence
  Description of Artificial Sequence: Synthetic oligonucleotide
  Antisense strand to SEQ ID NO: 1118636
ugucauaguccagauacac

SEQ ID NO: 1118638 - RNA, 19 nt, Artificial Sequence
  Description of Artificial Sequence: Synthetic oligonucleotide
  Sense strand starting at position 3240 of SEQ ID NO: 915949
aagauacaugcguauauag

SEQ ID NO: 1118639 - RNA, 19 nt, Artificial Sequence
  Description of Artificial Sequence: Synthetic oligonucleotide
  Antisense strand to SEQ ID NO: 1118638
cuauauacgcauguaucuu

SEQ ID NO: 1118640 - RNA, 19 nt, Artificial Sequence
  Description of Artificial Sequence: Synthetic oligonucleotide
  Sense strand starting at position 3242 of SEQ ID NO: 915949
gauacaugcguauauagau

SEQ ID NO: 1118641 - RNA, 19 nt, Artificial Sequence
  Description of Artificial Sequence: Synthetic oligonucleotide
  Antisense strand to SEQ ID NO: 1118640
aucuauauacgcauguauc

SEQ ID NO: 1118642 - RNA, 19 nt, Artificial Sequence
  Description of Artificial Sequence: Synthetic oligonucleotide
  Sense strand starting at position 3278 of SEQ ID NO: 915949
ugaaauacguuuccauaug

SEQ ID NO: 1118643 - RNA, 19 nt, Artificial Sequence
  Description of Artificial Sequence: Synthetic oligonucleotide
  Antisense strand to SEQ ID NO: 1118642
cauauggaaacguauuuca

SEQ ID NO: 1118644 - RNA, 19 nt, Artificial Sequence
  Description of Artificial Sequence: Synthetic oligonucleotide
  Sense strand starting at position 3481 of SEQ ID NO: 915949
uggaccuuuccagaugucu

SEQ ID NO: 1118645 - RNA, 19 nt, Artificial Sequence
  Description of Artificial Sequence: Synthetic oligonucleotide
  Antisense strand to SEQ ID NO: 1118644
agacaucuggaaaggucca

SEQ ID NO: 1118646 - RNA, 19 nt, Artificial Sequence
  Description of Artificial Sequence: Synthetic oligonucleotide
  Sense strand starting at position 3655 of SEQ ID NO: 915949
guacuaauuugaguguuuc

SEQ ID NO: 1118647 - RNA, 19 nt, Artificial Sequence
  Description of Artificial Sequence: Synthetic oligonucleotide
  Antisense strand to SEQ ID NO: 1118646
gaaacacucaaauuaguac

SEQ ID NO: 1118648 - RNA, 19 nt, Artificial Sequence
  Description of Artificial Sequence: Synthetic oligonucleotide
  Sense strand starting at position 3726 of SEQ ID NO: 915949
gucccuguucuacagagga

SEQ ID NO: 1118649 - RNA, 19 nt, Artificial Sequence
  Description of Artificial Sequence: Synthetic oligonucleotide
  Antisense strand to SEQ ID NO: 1118648
uccucuguagaacagggac

SEQ ID NO: 1118650 - RNA, 19 nt, Artificial Sequence
  Description of Artificial Sequence: Synthetic oligonucleotide
  Sense strand starting at position 3728 of SEQ ID NO: 915949
cccuguucuacagaggagu

SEQ ID NO: 1118651 - RNA, 19 nt, Artificial Sequence
  Description of Artificial Sequence: Synthetic oligonucleotide
  Antisense strand to SEQ ID NO: 1118650
acuccucuguagaacaggg

SEQ ID NO: 1118652 - RNA, 19 nt, Artificial Sequence
  Description of Artificial Sequence: Synthetic oligonucleotide
  Sense strand starting at position 3730 of SEQ ID NO: 915949
cuguucuacagaggaguaa

SEQ ID NO: 1118653 - RNA, 19 nt, Artificial Sequence
  Description of Artificial Sequence: Synthetic oligonucleotide
  Antisense strand to SEQ ID NO: 1118652
uuacuccucuguagaacag

SEQ ID NO: 1118654 - RNA, 19 nt, Artificial Sequence
  Description of Artificial Sequence: Synthetic oligonucleotide
  Sense strand starting at position 4 of SEQ ID NO: 915950
cuuaguaaucauuaguauc

SEQ ID NO: 1118655 - RNA, 19 nt, Artificial Sequence
  Description of Artificial Sequence: Synthetic oligonucleotide
  Antisense strand to SEQ ID NO: 1118654
gauacuaaugauuacuaag

SEQ ID NO: 1118656 - RNA, 19 nt, Artificial Sequence
  Description of Artificial Sequence: Synthetic oligonucleotide
  Sense strand starting at position 78 of SEQ ID NO: 915950
cggagaugcucugccagaa

SEQ ID NO: 1118657 - RNA, 19 nt, Artificial Sequence
  Description of Artificial Sequence: Synthetic oligonucleotide
  Antisense strand to SEQ ID NO: 1118656
uucuggcagagcaucuccg

SEQ ID NO: 1118658 - RNA, 19 nt, Artificial Sequence
  Description of Artificial Sequence: Synthetic oligonucleotide
  Sense strand starting at position 145 of SEQ ID NO: 915950
cauguuuguuggccuuaga

SEQ ID NO: 1118659 - RNA, 19 nt, Artificial Sequence
  Description of Artificial Sequence: Synthetic oligonucleotide
  Antisense strand to SEQ ID NO: 1118658
ucuaaggccaacaaacaug

SEQ ID NO: 1118660 - RNA, 19 nt, Artificial Sequence
  Description of Artificial Sequence: Synthetic oligonucleotide
  Sense strand starting at position 148 of SEQ ID NO: 915950
guuuguuggccuuagauug

SEQ ID NO: 1118661 - RNA, 19 nt, Artificial Sequence
  Description of Artificial Sequence: Synthetic oligonucleotide
  Antisense strand to SEQ ID NO: 1118660
caaucuaaggccaacaaac

SEQ ID NO: 1118662 - RNA, 19 nt, Artificial Sequence
  Description of Artificial Sequence: Synthetic oligonucleotide
  Sense strand starting at position 155 of SEQ ID NO: 915950
ggccuuagauugucacaug

SEQ ID NO: 1118663 - RNA, 19 nt, Artificial Sequence
  Description of Artificial Sequence: Synthetic oligonucleotide
  Antisense strand to SEQ ID NO: 1118662
caugugacaaucuaaggcc

SEQ ID NO: 1118664 - RNA, 19 nt, Artificial Sequence
  Description of Artificial Sequence: Synthetic oligonucleotide
  Sense strand starting at position 158 of SEQ ID NO: 915950
cuuagauugucacauggaa

SEQ ID NO: 1118665 - RNA, 19 nt, Artificial Sequence
  Description of Artificial Sequence: Synthetic oligonucleotide
  Antisense strand to SEQ ID NO: 1118664
uuccaugugacaaucuaag

SEQ ID NO: 1118666 - RNA, 19 nt, Artificial Sequence
  Description of Artificial Sequence: Synthetic oligonucleotide
  Sense strand starting at position 205 of SEQ ID NO: 915950
guggucacccugcgugaaa

SEQ ID NO: 1118667 - RNA, 19 nt, Artificial Sequence
  Description of Artificial Sequence: Synthetic oligonucleotide
  Antisense strand to SEQ ID NO: 1118666
uuucacgcagggugaccac

SEQ ID NO: 1118668 - RNA, 19 nt, Artificial Sequence
  Description of Artificial Sequence: Synthetic oligonucleotide
  Sense strand starting at position 327 of SEQ ID NO: 915950
gauccuuucccgcgccaga

SEQ ID NO: 1118669 - RNA, 19 nt, Artificial Sequence
  Description of Artificial Sequence: Synthetic oligonucleotide
  Antisense strand to SEQ ID NO: 1118668
ucuggcgcgggaaaggauc

SEQ ID NO: 1118670 - RNA, 19 nt, Artificial Sequence
  Description of Artificial Sequence: Synthetic oligonucleotide
  Sense strand starting at position 592 of SEQ ID NO: 915950
cccucucaaugagcagaaa

SEQ ID NO: 1118671 - RNA, 19 nt, Artificial Sequence
  Description of Artificial Sequence: Synthetic oligonucleotide
  Antisense strand to SEQ ID NO: 1118670
uuucugcucauugagaggg

SEQ ID NO: 1118672 - RNA, 19 nt, Artificial Sequence
  Description of Artificial Sequence: Synthetic oligonucleotide
  Sense strand starting at position 626 of SEQ ID NO: 915950
ccaugauucugggccagga

SEQ ID NO: 1118673 - RNA, 19 nt, Artificial Sequence
  Description of Artificial Sequence: Synthetic oligonucleotide
  Antisense strand to SEQ ID NO: 1118672
uccuggcccagaaucaugg

SEQ ID NO: 1118674 - RNA, 19 nt, Artificial Sequence
  Description of Artificial Sequence: Synthetic oligonucleotide
  Sense strand starting at position 646 of SEQ ID NO: 915950
gguaccaacuagucauaau

SEQ ID NO: 1118675 - RNA, 19 nt, Artificial Sequence
  Description of Artificial Sequence: Synthetic oligonucleotide
  Antisense strand to SEQ ID NO: 1118674
auuaugacuaguugguacc

SEQ ID NO: 1118676 - RNA, 19 nt, Artificial Sequence
  Description of Artificial Sequence: Synthetic oligonucleotide
  Sense strand starting at position 663 of SEQ ID NO: 915950
auuacaaccucgcaaugaa

SEQ ID NO: 1118677 - RNA, 19 nt, Artificial Sequence
  Description of Artificial Sequence: Synthetic oligonucleotide
  Antisense strand to SEQ ID NO: 1118676
uucauugcgagguuguaau

SEQ ID NO: 1118678 - RNA, 19 nt, Artificial Sequence
  Description of Artificial Sequence: Synthetic oligonucleotide
  Sense strand starting at position 988 of SEQ ID NO: 915950
cugcgauccuccugggacu

SEQ ID NO: 1118679 - RNA, 19 nt, Artificial Sequence
  Description of Artificial Sequence: Synthetic oligonucleotide
  Antisense strand to SEQ ID NO: 1118678
agucccaggaggaucgcag

SEQ ID NO: 1118680 - RNA, 19 nt, Artificial Sequence
  Description of Artificial Sequence: Synthetic oligonucleotide
  Sense strand starting at position 1315 of SEQ ID NO: 915950
ccauucaaacgcggugaau

SEQ ID NO: 1118681 - RNA, 19 nt, Artificial Sequence
  Description of Artificial Sequence: Synthetic oligonucleotide
  Antisense strand to SEQ ID NO: 1118680
auucaccgcguuugaaugg

SEQ ID NO: 1118682 - RNA, 19 nt, Artificial Sequence
  Description of Artificial Sequence: Synthetic oligonucleotide
  Sense strand starting at position 1317 of SEQ ID NO: 915950
auucaaacgcggugaauga

SEQ ID NO: 1118683 - RNA, 19 nt, Artificial Sequence
  Description of Artificial Sequence: Synthetic oligonucleotide
  Antisense strand to SEQ ID NO: 1118682
ucauucaccgcguuugaau

SEQ ID NO: 1118684 - RNA, 19 nt, Artificial Sequence
  Description of Artificial Sequence: Synthetic oligonucleotide
  Sense strand starting at position 2128 of SEQ ID NO: 915950
ugcggcuucucaucauuua

SEQ ID NO: 1118685 - RNA, 19 nt, Artificial Sequence
  Description of Artificial Sequence: Synthetic oligonucleotide
  Antisense strand to SEQ ID NO: 1118684
uaaaugaugagaagccgca

SEQ ID NO: 1118686 - RNA, 19 nt, Artificial Sequence
  Description of Artificial Sequence: Synthetic oligonucleotide
  Sense strand starting at position 2129 of SEQ ID NO: 915950
gcggcuucucaucauuuaa

SEQ ID NO: 1118687 - RNA, 19 nt, Artificial Sequence
  Description of Artificial Sequence: Synthetic oligonucleotide
  Antisense strand to SEQ ID NO: 1118686
uuaaaugaugagaagccgc

SEQ ID NO: 1118688 - RNA, 19 nt, Artificial Sequence
  Description of Artificial Sequence: Synthetic oligonucleotide
  Sense strand starting at position 2226 of SEQ ID NO: 915950
gugacugcaacugauugaa

SEQ ID NO: 1118689 - RNA, 19 nt, Artificial Sequence
  Description of Artificial Sequence: Synthetic oligonucleotide
  Antisense strand to SEQ ID NO: 1118688
uucaaucaguugcagucac

SEQ ID NO: 1118690 - RNA, 19 nt, Artificial Sequence
  Description of Artificial Sequence: Synthetic oligonucleotide
  Sense strand starting at position 2264 of SEQ ID NO: 915950
auguaaucucccugaaugu

SEQ ID NO: 1118691 - RNA, 19 nt, Artificial Sequence
  Description of Artificial Sequence: Synthetic oligonucleotide
  Antisense strand to SEQ ID NO: 1118690
acauucagggagauuacau

SEQ ID NO: 1118692 - RNA, 19 nt, Artificial Sequence
  Description of Artificial Sequence: Synthetic oligonucleotide
  Sense strand starting at position 2265 of SEQ ID NO: 915950
uguaaucucccugaaugua

SEQ ID NO: 1118693 - RNA, 19 nt, Artificial Sequence
  Description of Artificial Sequence: Synthetic oligonucleotide
  Antisense strand to SEQ ID NO: 1118692
uacauucagggagauuaca

SEQ ID NO: 1118694 - RNA, 19 nt, Artificial Sequence
  Description of Artificial Sequence: Synthetic oligonucleotide
  Sense strand starting at position 2273 of SEQ ID NO: 915950
cccugaauguauuauaaug

SEQ ID NO: 1118695 - RNA, 19 nt, Artificial Sequence
  Description of Artificial Sequence: Synthetic oligonucleotide
  Antisense strand to SEQ ID NO: 1118694
cauuauaauacauucaggg

SEQ ID NO: 1118696 - RNA, 19 nt, Artificial Sequence
  Description of Artificial Sequence: Synthetic oligonucleotide
  Sense strand starting at position 2444 of SEQ ID NO: 915950
gcuaauacaugaggaugaa

SEQ ID NO: 1118697 - RNA, 19 nt, Artificial Sequence
  Description of Artificial Sequence: Synthetic oligonucleotide
  Antisense strand to SEQ ID NO: 1118696
uucauccucauguauuagc

SEQ ID NO: 1118698 - RNA, 19 nt, Artificial Sequence
  Description of Artificial Sequence: Synthetic oligonucleotide
  Sense strand starting at position 2493 of SEQ ID NO: 915950
ucaauagaaugauggauuc

SEQ ID NO: 1118699 - RNA, 19 nt, Artificial Sequence
  Description of Artificial Sequence: Synthetic oligonucleotide
  Antisense strand to SEQ ID NO: 1118698
gaauccaucauucuauuga

SEQ ID NO: 1118700 - RNA, 19 nt, Artificial Sequence
  Description of Artificial Sequence: Synthetic oligonucleotide
  Sense strand starting at position 2504 of SEQ ID NO: 915950
auggauucacgcgaugauc

SEQ ID NO: 1118701 - RNA, 19 nt, Artificial Sequence
  Description of Artificial Sequence: Synthetic oligonucleotide
  Antisense strand to SEQ ID NO: 1118700
gaucaucgcgugaauccau

SEQ ID NO: 1118702 - RNA, 19 nt, Artificial Sequence
  Description of Artificial Sequence: Synthetic oligonucleotide
  Sense strand starting at position 2506 of SEQ ID NO: 915950
ggauucacgcgaugaucau

SEQ ID NO: 1118703 - RNA, 19 nt, Artificial Sequence
  Description of Artificial Sequence: Synthetic oligonucleotide
  Antisense strand to SEQ ID NO: 1118702
augaucaucgcgugaaucc

SEQ ID NO: 1118704 - RNA, 19 nt, Artificial Sequence
  Description of Artificial Sequence: Synthetic oligonucleotide
  Sense strand starting at position 2512 of SEQ ID NO: 915950
acgcgaugaucaucagaaa

SEQ ID NO: 1118705 - RNA, 19 nt, Artificial Sequence
  Description of Artificial Sequence: Synthetic oligonucleotide
  Antisense strand to SEQ ID NO: 1118704
uuucugaugaucaucgcgu

SEQ ID NO: 1118706 - RNA, 19 nt, Artificial Sequence
  Description of Artificial Sequence: Synthetic oligonucleotide
  Sense strand starting at position 2513 of SEQ ID NO: 915950
cgcgaugaucaucagaaau

SEQ ID NO: 1118707 - RNA, 19 nt, Artificial Sequence
  Description of Artificial Sequence: Synthetic oligonucleotide
  Antisense strand to SEQ ID NO: 1118706
auuucugaugaucaucgcg

SEQ ID NO: 1118708 - RNA, 19 nt, Artificial Sequence
  Description of Artificial Sequence: Synthetic oligonucleotide
  Sense strand starting at position 2613 of SEQ ID NO: 915950
aucuuagugccaggaagua

SEQ ID NO: 1118709 - RNA, 19 nt, Artificial Sequence
  Description of Artificial Sequence: Synthetic oligonucleotide
  Antisense strand to SEQ ID NO: 1118708
uacuuccuggcacuaagau

SEQ ID NO: 1118710 - RNA, 19 nt, Artificial Sequence
  Description of Artificial Sequence: Synthetic oligonucleotide
  Sense strand starting at position 2643 of SEQ ID NO: 915950
ugcgauggauucuugccaa

SEQ ID NO: 1118711 - RNA, 19 nt, Artificial Sequence
  Description of Artificial Sequence: Synthetic oligonucleotide
  Antisense strand to SEQ ID NO: 1118710
uuggcaagaauccaucgca

SEQ ID NO: 1118712 - RNA, 19 nt, Artificial Sequence
  Description of Artificial Sequence: Synthetic oligonucleotide
  Sense strand starting at position 2646 of SEQ ID NO: 915950
gauggauucuugccaagac

SEQ ID NO: 1118713 - RNA, 19 nt, Artificial Sequence
  Description of Artificial Sequence: Synthetic oligonucleotide
  Antisense strand to SEQ ID NO: 1118712
gucuuggcaagaauccauc

SEQ ID NO: 1118714 - RNA, 19 nt, Artificial Sequence
  Description of Artificial Sequence: Synthetic oligonucleotide
  Sense strand starting at position 2647 of SEQ ID NO: 915950
auggauucuugccaagaca

SEQ ID NO: 1118715 - RNA, 19 nt, Artificial Sequence
  Description of Artificial Sequence: Synthetic oligonucleotide
  Antisense strand to SEQ ID NO: 1118714
ugucuuggcaagaauccau

SEQ ID NO: 1118716 - RNA, 19 nt, Artificial Sequence
  Description of Artificial Sequence: Synthetic oligonucleotide
  Sense strand starting at position 2650 of SEQ ID NO: 915950
gauucuugccaagacaagu

SEQ ID NO: 1118717 - RNA, 19 nt, Artificial Sequence
  Description of Artificial Sequence: Synthetic oligonucleotide
  Antisense strand to SEQ ID NO: 1118716
acuugucuuggcaagaauc

SEQ ID NO: 1118718 - RNA, 19 nt, Artificial Sequence
  Description of Artificial Sequence: Synthetic oligonucleotide
  Sense strand starting at position 2713 of SEQ ID NO: 915950
caggaaauauggcagauaa

SEQ ID NO: 1118719 - RNA, 19 nt, Artificial Sequence
  Description of Artificial Sequence: Synthetic oligonucleotide
  Antisense strand to SEQ ID NO: 1118718
uuaucugccauauuuccug

SEQ ID NO: 1118720 - RNA, 19 nt, Artificial Sequence
  Description of Artificial Sequence: Synthetic oligonucleotide
  Sense strand starting at position 3028 of SEQ ID NO: 915950
cuggauuccuaguaagauu

SEQ ID NO: 1118721 - RNA, 19 nt, Artificial Sequence
  Description of Artificial Sequence: Synthetic oligonucleotide
  Antisense strand to SEQ ID NO: 1118720
aaucuuacuaggaauccag

SEQ ID NO: 1118722 - RNA, 19 nt, Artificial Sequence
  Description of Artificial Sequence: Synthetic oligonucleotide
  Sense strand starting at position 3067 of SEQ ID NO: 915950
uugaauuacuucucuguga

SEQ ID NO: 1118723 - RNA, 19 nt, Artificial Sequence
  Description of Artificial Sequence: Synthetic oligonucleotide
  Antisense strand to SEQ ID NO: 1118722
ucacagagaaguaauucaa

SEQ ID NO: 1118724 - RNA, 19 nt, Artificial Sequence
  Description of Artificial Sequence: Synthetic oligonucleotide
  Sense strand starting at position 3068 of SEQ ID NO: 915950
ugaauuacuucucugugaa

SEQ ID NO: 1118725 - RNA, 19 nt, Artificial Sequence
  Description of Artificial Sequence: Synthetic oligonucleotide
  Antisense strand to SEQ ID NO: 1118724
uucacagagaaguaauuca

SEQ ID NO: 1118726 - RNA, 19 nt, Artificial Sequence
  Description of Artificial Sequence: Synthetic oligonucleotide
  Sense strand starting at position 3116 of SEQ ID NO: 915950
uccuguauuguuuaucuuu

SEQ ID NO: 1118727 - RNA, 19 nt, Artificial Sequence
  Description of Artificial Sequence: Synthetic oligonucleotide
  Antisense strand to SEQ ID NO: 1118726
aaagauaaacaauacagga

SEQ ID NO: 1118728 - RNA, 19 nt, Artificial Sequence
  Description of Artificial Sequence: Synthetic oligonucleotide
  Sense strand starting at position 3163 of SEQ ID NO: 915950
gugguuaacgccugugauu

SEQ ID NO: 1118729 - RNA, 19 nt, Artificial Sequence
  Description of Artificial Sequence: Synthetic oligonucleotide
  Antisense strand to SEQ ID NO: 1118728
aaucacaggcguuaaccac

SEQ ID NO: 1118730 - RNA, 19 nt, Artificial Sequence
  Description of Artificial Sequence: Synthetic oligonucleotide
  Sense strand starting at position 3249 of SEQ ID NO: 915950
gagaaaucccuccgucucu

SEQ ID NO: 1118731 - RNA, 19 nt, Artificial Sequence
  Description of Artificial Sequence: Synthetic oligonucleotide
  Antisense strand to SEQ ID NO: 1118730
agagacggagggauuucuc

SEQ ID NO: 1118732 - RNA, 19 nt, Artificial Sequence
  Description of Artificial Sequence: Synthetic oligonucleotide
  Sense strand starting at position 3250 of SEQ ID NO: 915950
agaaaucccuccgucucua

SEQ ID NO: 1118733 - RNA, 19 nt, Artificial Sequence
  Description of Artificial Sequence: Synthetic oligonucleotide
  Antisense strand to SEQ ID NO: 1118732
uagagacggagggauuucu

SEQ ID NO: 1118734 - RNA, 19 nt, Artificial Sequence
  Description of Artificial Sequence: Synthetic oligonucleotide
  Sense strand starting at position 321 of SEQ ID NO: 915951
cuguuauuguaggugacaa

SEQ ID NO: 1118735 - RNA, 19 nt, Artificial Sequence
  Description of Artificial Sequence: Synthetic oligonucleotide
  Antisense strand to SEQ ID NO: 1118734
uugucaccuacaauaacag

SEQ ID NO: 1118736 - RNA, 19 nt, Artificial Sequence
  Description of Artificial Sequence: Synthetic oligonucleotide
  Sense strand starting at position 322 of SEQ ID NO: 915951
uguuauuguaggugacaag

SEQ ID NO: 1118737 - RNA, 19 nt, Artificial Sequence
  Description of Artificial Sequence: Synthetic oligonucleotide
  Antisense strand to SEQ ID NO: 1118736
cuugucaccuacaauaaca

SEQ ID NO: 1118738 - RNA, 19 nt, Artificial Sequence
  Description of Artificial Sequence: Synthetic oligonucleotide
  Sense strand starting at position 393 of SEQ ID NO: 915951
aggaaagcgcucagugguu

SEQ ID NO: 1118739 - RNA, 19 nt, Artificial Sequence
  Description of Artificial Sequence: Synthetic oligonucleotide
  Antisense strand to SEQ ID NO: 1118738
aaccacugagcgcuuuccu

SEQ ID NO: 1118740 - RNA, 19 nt, Artificial Sequence
  Description of Artificial Sequence: Synthetic oligonucleotide
  Sense strand starting at position 467 of SEQ ID NO: 915951
uuacuacuccagugacuuu

SEQ ID NO: 1118741 - RNA, 19 nt, Artificial Sequence
  Description of Artificial Sequence: Synthetic oligonucleotide
  Antisense strand to SEQ ID NO: 1118740
aaagucacuggaguaguaa

SEQ ID NO: 1118742 - RNA, 19 nt, Artificial Sequence
  Description of Artificial Sequence: Synthetic oligonucleotide
  Sense strand starting at position 477 of SEQ ID NO: 915951
agugacuuugagcauggua

SEQ ID NO: 1118743 - RNA, 19 nt, Artificial Sequence
  Description of Artificial Sequence: Synthetic oligonucleotide
  Antisense strand to SEQ ID NO: 1118742
uaccaugcucaaagucacu

SEQ ID NO: 1118744 - RNA, 19 nt, Artificial Sequence
  Description of Artificial Sequence: Synthetic oligonucleotide
  Sense strand starting at position 479 of SEQ ID NO: 915951
ugacuuugagcaugguauu

SEQ ID NO: 1118745 - RNA, 19 nt, Artificial Sequence
  Description of Artificial Sequence: Synthetic oligonucleotide
  Antisense strand to SEQ ID NO: 1118744
aauaccaugcucaaaguca

SEQ ID NO: 1118746 - RNA, 19 nt, Artificial Sequence
  Description of Artificial Sequence: Synthetic oligonucleotide
  Sense strand starting at position 526 of SEQ ID NO: 915951
cuuugaagugagcauaauc

SEQ ID NO: 1118747 - RNA, 19 nt, Artificial Sequence
  Description of Artificial Sequence: Synthetic oligonucleotide
  Antisense strand to SEQ ID NO: 1118746
gauuaugcucacuucaaag

SEQ ID NO: 1118748 - RNA, 19 nt, Artificial Sequence
  Description of Artificial Sequence: Synthetic oligonucleotide
  Sense strand starting at position 554 of SEQ ID NO: 915951
acuuuacacuguuugggaa

SEQ ID NO: 1118749 - RNA, 19 nt, Artificial Sequence
  Description of Artificial Sequence: Synthetic oligonucleotide
  Antisense strand to SEQ ID NO: 1118748
uucccaaacaguguaaagu

SEQ ID NO: 1118750 - RNA, 19 nt, Artificial Sequence
  Description of Artificial Sequence: Synthetic oligonucleotide
  Sense strand starting at position 555 of SEQ ID NO: 915951
cuuuacacuguuugggaaa

SEQ ID NO: 1118751 - RNA, 19 nt, Artificial Sequence
  Description of Artificial Sequence: Synthetic oligonucleotide
  Antisense strand to SEQ ID NO: 1118750
uuucccaaacaguguaaag

SEQ ID NO: 1118752 - RNA, 19 nt, Artificial Sequence
  Description of Artificial Sequence: Synthetic oligonucleotide
  Sense strand starting at position 984 of SEQ ID NO: 915951
gccagauuaugacucaccu

SEQ ID NO: 1118753 - RNA, 19 nt, Artificial Sequence
  Description of Artificial Sequence: Synthetic oligonucleotide
  Antisense strand to SEQ ID NO: 1118752
aggugagucauaaucuggc

SEQ ID NO: 1118754 - RNA, 19 nt, Artificial Sequence
  Description of Artificial Sequence: Synthetic oligonucleotide
  Sense strand starting at position 988 of SEQ ID NO: 915951
gauuaugacucaccugagu

SEQ ID NO: 1118755 - RNA, 19 nt, Artificial Sequence
  Description of Artificial Sequence: Synthetic oligonucleotide
  Antisense strand to SEQ ID NO: 1118754
acucaggugagucauaauc

SEQ ID NO: 1118756 - RNA, 19 nt, Artificial Sequence
  Description of Artificial Sequence: Synthetic oligonucleotide
  Sense strand starting at position 993 of SEQ ID NO: 915951
ugacucaccugagugaguu

SEQ ID NO: 1118757 - RNA, 19 nt, Artificial Sequence
  Description of Artificial Sequence: Synthetic oligonucleotide
  Antisense strand to SEQ ID NO: 1118756
aacucacucaggugaguca

SEQ ID NO: 1118758 - RNA, 19 nt, Artificial Sequence
  Description of Artificial Sequence: Synthetic oligonucleotide
  Sense strand starting at position 1309 of SEQ ID NO: 915951
cgacaucuguaaucuaaga

SEQ ID NO: 1118759 - RNA, 19 nt, Artificial Sequence
  Description of Artificial Sequence: Synthetic oligonucleotide
  Antisense strand to SEQ ID NO: 1118758
ucuuagauuacagaugucg

SEQ ID NO: 1118760 - RNA, 19 nt, Artificial Sequence
  Description of Artificial Sequence: Synthetic oligonucleotide
  Sense strand starting at position 1991 of SEQ ID NO: 915951
guaacugaucugggaauau

SEQ ID NO: 1118761 - RNA, 19 nt, Artificial Sequence
  Description of Artificial Sequence: Synthetic oligonucleotide
  Antisense strand to SEQ ID NO: 1118760
auauucccagaucaguuac

SEQ ID NO: 1118762 - RNA, 19 nt, Artificial Sequence
  Description of Artificial Sequence: Synthetic oligonucleotide
  Sense strand starting at position 2039 of SEQ ID NO: 915951
ggaugagucacuugaagca

SEQ ID NO: 1118763 - RNA, 19 nt, Artificial Sequence
  Description of Artificial Sequence: Synthetic oligonucleotide
  Antisense strand to SEQ ID NO: 1118762
ugcuucaagugacucaucc

SEQ ID NO: 1118764 - RNA, 19 nt, Artificial Sequence
  Description of Artificial Sequence: Synthetic oligonucleotide
  Sense strand starting at position 2408 of SEQ ID NO: 915951
ugcuaaugggaucauggua

SEQ ID NO: 1118765 - RNA, 19 nt, Artificial Sequence
  Description of Artificial Sequence: Synthetic oligonucleotide
  Antisense strand to SEQ ID NO: 1118764
uaccaugaucccauuagca

SEQ ID NO: 1118766 - RNA, 19 nt, Artificial Sequence
  Description of Artificial Sequence: Synthetic oligonucleotide
  Sense strand starting at position 2538 of SEQ ID NO: 915951
cuguccucacauuaggauu

SEQ ID NO: 1118767 - RNA, 19 nt, Artificial Sequence
  Description of Artificial Sequence: Synthetic oligonucleotide
  Antisense strand to SEQ ID NO: 1118766
aauccuaaugugaggacag

SEQ ID NO: 1118768 - RNA, 19 nt, Artificial Sequence
  Description of Artificial Sequence: Synthetic oligonucleotide
  Sense strand starting at position 2724 of SEQ ID NO: 915951
gucucauucccagaguuuc

SEQ ID NO: 1118769 - RNA, 19 nt, Artificial Sequence
  Description of Artificial Sequence: Synthetic oligonucleotide
  Antisense strand to SEQ ID NO: 1118768
gaaacucugggaaugagac

SEQ ID NO: 1118770 - RNA, 19 nt, Artificial Sequence
  Description of Artificial Sequence: Synthetic oligonucleotide
  Sense strand starting at position 2771 of SEQ ID NO: 915951
ggaaaugcauuccuaacca

SEQ ID NO: 1118771 - RNA, 19 nt, Artificial Sequence
  Description of Artificial Sequence: Synthetic oligonucleotide
  Antisense strand to SEQ ID NO: 1118770
ugguuaggaaugcauuucc

SEQ ID NO: 1118772 - RNA, 19 nt, Artificial Sequence
  Description of Artificial Sequence: Synthetic oligonucleotide
  Sense strand starting at position 2790 of SEQ ID NO: 915951
guuccugauacggaugcua

SEQ ID NO: 1118773 - RNA, 19 nt, Artificial Sequence
  Description of Artificial Sequence: Synthetic oligonucleotide
  Antisense strand to SEQ ID NO: 1118772
uagcauccguaucaggaac

SEQ ID NO: 1118774 - RNA, 19 nt, Artificial Sequence
  Description of Artificial Sequence: Synthetic oligonucleotide
  Sense strand starting at position 2842 of SEQ ID NO: 915951
gcucuaaagucaucaugag

SEQ ID NO: 1118775 - RNA, 19 nt, Artificial Sequence
  Description of Artificial Sequence: Synthetic oligonucleotide
  Antisense strand to SEQ ID NO: 1118774
cucaugaugacuuuagagc

SEQ ID NO: 1118776 - RNA, 19 nt, Artificial Sequence
  Description of Artificial Sequence: Synthetic oligonucleotide
  Sense strand starting at position 2866 of SEQ ID NO: 915951
cugggaaucaucuggcucu

SEQ ID NO: 1118777 - RNA, 19 nt, Artificial Sequence
  Description of Artificial Sequence: Synthetic oligonucleotide
  Antisense strand to SEQ ID NO: 1118776
agagccagaugauucccag

SEQ ID NO: 1118778 - RNA, 19 nt, Artificial Sequence
  Description of Artificial Sequence: Synthetic oligonucleotide
  Sense strand starting at position 2869 of SEQ ID NO: 915951
ggaaucaucuggcucuaua

SEQ ID NO: 1118779 - RNA, 19 nt, Artificial Sequence
  Description of Artificial Sequence: Synthetic oligonucleotide
  Antisense strand to SEQ ID NO: 1118778
uauagagccagaugauucc

SEQ ID NO: 1118780 - RNA, 19 nt, Artificial Sequence
  Description of Artificial Sequence: Synthetic oligonucleotide
  Sense strand starting at position 2890 of SEQ ID NO: 915951
cagagauggugauuguguu

SEQ ID NO: 1118781 - RNA, 19 nt, Artificial Sequence
  Description of Artificial Sequence: Synthetic oligonucleotide
  Antisense strand to SEQ ID NO: 1118780
aacacaaucaccaucucug

SEQ ID NO: 1118782 - RNA, 19 nt, Artificial Sequence
  Description of Artificial Sequence: Synthetic oligonucleotide
  Sense strand starting at position 2891 of SEQ ID NO: 915951
agagauggugauuguguua

SEQ ID NO: 1118783 - RNA, 19 nt, Artificial Sequence
  Description of Artificial Sequence: Synthetic oligonucleotide
  Antisense strand to SEQ ID NO: 1118782
uaacacaaucaccaucucu

SEQ ID NO: 1118784 - RNA, 19 nt, Artificial Sequence
  Description of Artificial Sequence: Synthetic oligonucleotide
  Sense strand starting at position 2894 of SEQ ID NO: 915951
gauggugauuguguuagag

SEQ ID NO: 1118785 - RNA, 19 nt, Artificial Sequence
  Description of Artificial Sequence: Synthetic oligonucleotide
  Antisense strand to SEQ ID NO: 1118784
cucuaacacaaucaccauc

SEQ ID NO: 1118786 - RNA, 19 nt, Artificial Sequence
  Description of Artificial Sequence: Synthetic oligonucleotide
  Sense strand starting at position 2903 of SEQ ID NO: 915951
uguguuagaguccaagaag

SEQ ID NO: 1118787 - RNA, 19 nt, Artificial Sequence
  Description of Artificial Sequence: Synthetic oligonucleotide
  Antisense strand to SEQ ID NO: 1118786
cuucuuggacucuaacaca

SEQ ID NO: 1118788 - RNA, 19 nt, Artificial Sequence
  Description of Artificial Sequence: Synthetic oligonucleotide
  Sense strand starting at position 2979 of SEQ ID NO: 915951
ugagaaaugcacuacguag

SEQ ID NO: 1118789 - RNA, 19 nt, Artificial Sequence
  Description of Artificial Sequence: Synthetic oligonucleotide
  Antisense strand to SEQ ID NO: 1118788
cuacguagugcauuucuca

SEQ ID NO: 1118790 - RNA, 19 nt, Artificial Sequence
  Description of Artificial Sequence: Synthetic oligonucleotide
  Sense strand starting at position 2981 of SEQ ID NO: 915951
agaaaugcacuacguagau

SEQ ID NO: 1118791 - RNA, 19 nt, Artificial Sequence
  Description of Artificial Sequence: Synthetic oligonucleotide
  Antisense strand to SEQ ID NO: 1118790
aucuacguagugcauuucu

SEQ ID NO: 1118792 - RNA, 19 nt, Artificial Sequence
  Description of Artificial Sequence: Synthetic oligonucleotide
  Sense strand starting at position 3155 of SEQ ID NO: 915951
ccaccauggcauugagaag

SEQ ID NO: 1118793 - RNA, 19 nt, Artificial Sequence
  Description of Artificial Sequence: Synthetic oligonucleotide
  Antisense strand to SEQ ID NO: 1118792
cuucucaaugccauggugg

SEQ ID NO: 1118794 - RNA, 19 nt, Artificial Sequence
  Description of Artificial Sequence: Synthetic oligonucleotide
  Sense strand starting at position 3232 of SEQ ID NO: 915951
augagcuucccagaaaguu

SEQ ID NO: 1118795 - RNA, 19 nt, Artificial Sequence
  Description of Artificial Sequence: Synthetic oligonucleotide
  Antisense strand to SEQ ID NO: 1118794
aacuuucugggaagcucau

SEQ ID NO: 1118796 - RNA, 19 nt, Artificial Sequence
  Description of Artificial Sequence: Synthetic oligonucleotide
  Sense strand starting at position 3408 of SEQ ID NO: 915951
gaaugauguugauccaggu

SEQ ID NO: 1118797 - RNA, 19 nt, Artificial Sequence
  Description of Artificial Sequence: Synthetic oligonucleotide
  Antisense strand to SEQ ID NO: 1118796
accuggaucaacaucauuc

SEQ ID NO: 1118798 - RNA, 19 nt, Artificial Sequence
  Description of Artificial Sequence: Synthetic oligonucleotide
  Sense strand starting at position 3415 of SEQ ID NO: 915951
guugauccagguuagguau

SEQ ID NO: 1118799 - RNA, 19 nt, Artificial Sequence
  Description of Artificial Sequence: Synthetic oligonucleotide
  Antisense strand to SEQ ID NO: 1118798
auaccuaaccuggaucaac

SEQ ID NO: 1118800 - RNA, 19 nt, Artificial Sequence
  Description of Artificial Sequence: Synthetic oligonucleotide
  Sense strand starting at position 3418 of SEQ ID NO: 915951
gauccagguuagguaucau

SEQ ID NO: 1118801 - RNA, 19 nt, Artificial Sequence
  Description of Artificial Sequence: Synthetic oligonucleotide
  Antisense strand to SEQ ID NO: 1118800
augauaccuaaccuggauc

SEQ ID NO: 1118802 - RNA, 19 nt, Artificial Sequence
  Description of Artificial Sequence: Synthetic oligonucleotide
  Sense strand starting at position 3480 of SEQ ID NO: 915951
guuacuugacuauauagca

SEQ ID NO: 1118803 - RNA, 19 nt, Artificial Sequence
  Description of Artificial Sequence: Synthetic oligonucleotide
  Antisense strand to SEQ ID NO: 1118802
ugcuauauagucaaguaac

SEQ ID NO: 1118804 - RNA, 19 nt, Artificial Sequence
  Description of Artificial Sequence: Synthetic oligonucleotide
  Sense strand starting at position 3489 of SEQ ID NO: 915951
cuauauagcauguguagag

SEQ ID NO: 1118805 - RNA, 19 nt, Artificial Sequence
  Description of Artificial Sequence: Synthetic oligonucleotide
  Antisense strand to SEQ ID NO: 1118804
cucuacacaugcuauauag

SEQ ID NO: 1118806 - RNA, 19 nt, Artificial Sequence
  Description of Artificial Sequence: Synthetic oligonucleotide
  Sense strand starting at position 3490 of SEQ ID NO: 915951
uauauagcauguguagaga

SEQ ID NO: 1118807 - RNA, 19 nt, Artificial Sequence
  Description of Artificial Sequence: Synthetic oligonucleotide
  Antisense strand to SEQ ID NO: 1118806
ucucuacacaugcuauaua

SEQ ID NO: 1118808 - RNA, 19 nt, Artificial Sequence
  Description of Artificial Sequence: Synthetic oligonucleotide
  Sense strand starting at position 3545 of SEQ ID NO: 915951
cguagcaugcacucuguua

SEQ ID NO: 1118809 - RNA, 19 nt, Artificial Sequence
  Description of Artificial Sequence: Synthetic oligonucleotide
  Antisense strand to SEQ ID NO: 1118808
uaacagagugcaugcuacg

SEQ ID NO: 1118810 - RNA, 19 nt, Artificial Sequence
  Description of Artificial Sequence: Synthetic oligonucleotide
  Sense strand starting at position 3739 of SEQ ID NO: 915951
gacguuccuccugacuuua

SEQ ID NO: 1118811 - RNA, 19 nt, Artificial Sequence
  Description of Artificial Sequence: Synthetic oligonucleotide
  Antisense strand to SEQ ID NO: 1118810
uaaagucaggaggaacguc

SEQ ID NO: 1118812 - RNA, 19 nt, Artificial Sequence
  Description of Artificial Sequence: Synthetic oligonucleotide
  Sense strand starting at position 3974 of SEQ ID NO: 915951
uuucuuacugggugaaacu

SEQ ID NO: 1118813 - RNA, 19 nt, Artificial Sequence
  Description of Artificial Sequence: Synthetic oligonucleotide
  Antisense strand to SEQ ID NO: 1118812
aguuucacccaguaagaaa

SEQ ID NO: 1118814 - RNA, 19 nt, Artificial Sequence
  Description of Artificial Sequence: Synthetic oligonucleotide
  Sense strand starting at position 1 of SEQ ID NO: 915952
gguggaguauauguacuaa

SEQ ID NO: 1118815 - RNA, 19 nt, Artificial Sequence
  Description of Artificial Sequence: Synthetic oligonucleotide
  Antisense strand to SEQ ID NO: 1118814
uuaguacauauacuccacc

SEQ ID NO: 1118816 - RNA, 19 nt, Artificial Sequence
  Description of Artificial Sequence: Synthetic oligonucleotide
  Sense strand starting at position 141 of SEQ ID NO: 915952
gcaccagcagcgugaaaua

SEQ ID NO: 1118817 - RNA, 19 nt, Artificial Sequence
  Description of Artificial Sequence: Synthetic oligonucleotide
  Antisense strand to SEQ ID NO: 1118816
uauuucacgcugcuggugc

SEQ ID NO: 1118818 - RNA, 19 nt, Artificial Sequence
  Description of Artificial Sequence: Synthetic oligonucleotide
  Sense strand starting at position 282 of SEQ ID NO: 915952
gcaaacuugcgccaagagu

SEQ ID NO: 1118819 - RNA, 19 nt, Artificial Sequence
  Description of Artificial Sequence: Synthetic oligonucleotide
  Antisense strand to SEQ ID NO: 1118818
acucuuggcgcaaguuugc

SEQ ID NO: 1118820 - RNA, 19 nt, Artificial Sequence
  Description of Artificial Sequence: Synthetic oligonucleotide
  Sense strand starting at position 293 of SEQ ID NO: 915952
ccaagaguuggccagguua

SEQ ID NO: 1118821 - RNA, 19 nt, Artificial Sequence
  Description of Artificial Sequence: Synthetic oligonucleotide
  Antisense strand to SEQ ID NO: 1118820
uaaccuggccaacucuugg

SEQ ID NO: 1118822 - RNA, 19 nt, Artificial Sequence
  Description of Artificial Sequence: Synthetic oligonucleotide
  Sense strand starting at position 2066 of SEQ ID NO: 915952
gccaguggaaucggagaau

SEQ ID NO: 1118823 - RNA, 19 nt, Artificial Sequence
  Description of Artificial Sequence: Synthetic oligonucleotide
  Antisense strand to SEQ ID NO: 1118822
auucuccgauuccacuggc

SEQ ID NO: 1118824 - RNA, 19 nt, Artificial Sequence
  Description of Artificial Sequence: Synthetic oligonucleotide
  Sense strand starting at position 2069 of SEQ ID NO: 915952
aguggaaucggagaaugcu

SEQ ID NO: 1118825 - RNA, 19 nt, Artificial Sequence
  Description of Artificial Sequence: Synthetic oligonucleotide
  Antisense strand to SEQ ID NO: 1118824
agcauucuccgauuccacu

SEQ ID NO: 1118826 - RNA, 19 nt, Artificial Sequence
  Description of Artificial Sequence: Synthetic oligonucleotide
  Sense strand starting at position 2072 of SEQ ID NO: 915952
ggaaucggagaaugcuaau

SEQ ID NO: 1118827 - RNA, 19 nt, Artificial Sequence
  Description of Artificial Sequence: Synthetic oligonucleotide
  Antisense strand to SEQ ID NO: 1118826
auuagcauucuccgauucc

SEQ ID NO: 1118828 - RNA, 19 nt, Artificial Sequence
  Description of Artificial Sequence: Synthetic oligonucleotide
  Sense strand starting at position 2078 of SEQ ID NO: 915952
ggagaaugcuaauuaccuc

SEQ ID NO: 1118829 - RNA, 19 nt, Artificial Sequence
  Description of Artificial Sequence: Synthetic oligonucleotide
  Antisense strand to SEQ ID NO: 1118828
gagguaauuagcauucucc

SEQ ID NO: 1118830 - RNA, 19 nt, Artificial Sequence
  Description of Artificial Sequence: Synthetic oligonucleotide
  Sense strand starting at position 2392 of SEQ ID NO: 915952
cccguaacaccugaaacau

SEQ ID NO: 1118831 - RNA, 19 nt, Artificial Sequence
  Description of Artificial Sequence: Synthetic oligonucleotide
  Antisense strand to SEQ ID NO: 1118830
auguuucagguguuacggg

SEQ ID NO: 1118832 - RNA, 19 nt, Artificial Sequence
  Description of Artificial Sequence: Synthetic oligonucleotide
  Sense strand starting at position 2496 of SEQ ID NO: 915952
gggaaauaagccugucgag

SEQ ID NO: 1118833 - RNA, 19 nt, Artificial Sequence
  Description of Artificial Sequence: Synthetic oligonucleotide
  Antisense strand to SEQ ID NO: 1118832
cucgacaggcuuauuuccc

SEQ ID NO: 1118834 - RNA, 19 nt, Artificial Sequence
  Description of Artificial Sequence: Synthetic oligonucleotide
  Sense strand starting at position 2582 of SEQ ID NO: 915952
gcgcguuaacucgauuccu

SEQ ID NO: 1118835 - RNA, 19 nt, Artificial Sequence
  Description of Artificial Sequence: Synthetic oligonucleotide
  Antisense strand to SEQ ID NO: 1118834
aggaaucgaguuaacgcgc

SEQ ID NO: 1118836 - RNA, 19 nt, Artificial Sequence
  Description of Artificial Sequence: Synthetic oligonucleotide
  Sense strand starting at position 2686 of SEQ ID NO: 915952
gugggcaucuuuccaaaua

SEQ ID NO: 1118837 - RNA, 19 nt, Artificial Sequence
  Description of Artificial Sequence: Synthetic oligonucleotide
  Antisense strand to SEQ ID NO: 1118836
uauuuggaaagaugcccac

SEQ ID NO: 1118838 - RNA, 19 nt, Artificial Sequence
  Description of Artificial Sequence: Synthetic oligonucleotide
  Sense strand starting at position 2687 of SEQ ID NO: 915952
ugggcaucuuuccaaauag

SEQ ID NO: 1118839 - RNA, 19 nt, Artificial Sequence
  Description of Artificial Sequence: Synthetic oligonucleotide
  Antisense strand to SEQ ID NO: 1118838
cuauuuggaaagaugccca

SEQ ID NO: 1118840 - RNA, 19 nt, Artificial Sequence
  Description of Artificial Sequence: Synthetic oligonucleotide
  Sense strand starting at position 2739 of SEQ ID NO: 915952
aggagaaucuucuuuccug

SEQ ID NO: 1118841 - RNA, 19 nt, Artificial Sequence
  Description of Artificial Sequence: Synthetic oligonucleotide
  Antisense strand to SEQ ID NO: 1118840
caggaaagaagauucuccu

SEQ ID NO: 1118842 - RNA, 19 nt, Artificial Sequence
  Description of Artificial Sequence: Synthetic oligonucleotide
  Sense strand starting at position 2740 of SEQ ID NO: 915952
ggagaaucuucuuuccuga

SEQ ID NO: 1118843 - RNA, 19 nt, Artificial Sequence
  Description of Artificial Sequence: Synthetic oligonucleotide
  Antisense strand to SEQ ID NO: 1118842
ucaggaaagaagauucucc

SEQ ID NO: 1118844 - RNA, 19 nt, Artificial Sequence
  Description of Artificial Sequence: Synthetic oligonucleotide
  Sense strand starting at position 2794 of SEQ ID NO: 915952
gcugcauuccugugucaaa

SEQ ID NO: 1118845 - RNA, 19 nt, Artificial Sequence
  Description of Artificial Sequence: Synthetic oligonucleotide
  Antisense strand to SEQ ID NO: 1118844
uuugacacaggaaugcagc

SEQ ID NO: 1118846 - RNA, 19 nt, Artificial Sequence
  Description of Artificial Sequence: Synthetic oligonucleotide
  Sense strand starting at position 2795 of SEQ ID NO: 915952
cugcauuccugugucaaau

SEQ ID NO: 1118847 - RNA, 19 nt, Artificial Sequence
  Description of Artificial Sequence: Synthetic oligonucleotide
  Antisense strand to SEQ ID NO: 1118846
auuugacacaggaaugcag

SEQ ID NO: 1118848 - RNA, 19 nt, Artificial Sequence
  Description of Artificial Sequence: Synthetic oligonucleotide
  Sense strand starting at position 2807 of SEQ ID NO: 915952
gucaaauagcaucguguca

SEQ ID NO: 1118849 - RNA, 19 nt, Artificial Sequence
  Description of Artificial Sequence: Synthetic oligonucleotide
  Antisense strand to SEQ ID NO: 1118848
ugacacgaugcuauuugac

SEQ ID NO: 1118850 - RNA, 19 nt, Artificial Sequence
  Description of Artificial Sequence: Synthetic oligonucleotide
  Sense strand starting at position 2814 of SEQ ID NO: 915952
agcaucgugucaucuacuu

SEQ ID NO: 1118851 - RNA, 19 nt, Artificial Sequence
  Description of Artificial Sequence: Synthetic oligonucleotide
  Antisense strand to SEQ ID NO: 1118850
aaguagaugacacgaugcu

SEQ ID NO: 1118852 - RNA, 19 nt, Artificial Sequence
  Description of Artificial Sequence: Synthetic oligonucleotide
  Sense strand starting at position 2820 of SEQ ID NO: 915952
gugucaucuacuugucugu

SEQ ID NO: 1118853 - RNA, 19 nt, Artificial Sequence
  Description of Artificial Sequence: Synthetic oligonucleotide
  Antisense strand to SEQ ID NO: 1118852
acagacaaguagaugacac

SEQ ID NO: 1118854 - RNA, 19 nt, Artificial Sequence
  Description of Artificial Sequence: Synthetic oligonucleotide
  Sense strand starting at position 2898 of SEQ ID NO: 915952
cugugucucucagcuuaga

SEQ ID NO: 1118855 - RNA, 19 nt, Artificial Sequence
  Description of Artificial Sequence: Synthetic oligonucleotide
  Antisense strand to SEQ ID NO: 1118854
ucuaagcugagagacacag

SEQ ID NO: 1118856 - RNA, 19 nt, Artificial Sequence
  Description of Artificial Sequence: Synthetic oligonucleotide
  Sense strand starting at position 2901 of SEQ ID NO: 915952
ugucucucagcuuagaauc

SEQ ID NO: 1118857 - RNA, 19 nt, Artificial Sequence
  Description of Artificial Sequence: Synthetic oligonucleotide
  Antisense strand to SEQ ID NO: 1118856
gauucuaagcugagagaca

SEQ ID NO: 1118858 - RNA, 19 nt, Artificial Sequence
  Description of Artificial Sequence: Synthetic oligonucleotide
  Sense strand starting at position 2996 of SEQ ID NO: 915952
ugcugauuucugggcccuu

SEQ ID NO: 1118859 - RNA, 19 nt, Artificial Sequence
  Description of Artificial Sequence: Synthetic oligonucleotide
  Antisense strand to SEQ ID NO: 1118858
aagggcccagaaaucagca

SEQ ID NO: 1118860 - RNA, 19 nt, Artificial Sequence
  Description of Artificial Sequence: Synthetic oligonucleotide
  Sense strand starting at position 3035 of SEQ ID NO: 915952
ccugguuacuugucuggau

SEQ ID NO: 1118861 - RNA, 19 nt, Artificial Sequence
  Description of Artificial Sequence: Synthetic oligonucleotide
  Antisense strand to SEQ ID NO: 1118860
auccagacaaguaaccagg

SEQ ID NO: 1118862 - RNA, 19 nt, Artificial Sequence
  Description of Artificial Sequence: Synthetic oligonucleotide
  Sense strand starting at position 3036 of SEQ ID NO: 915952
cugguuacuugucuggauu

SEQ ID NO: 1118863 - RNA, 19 nt, Artificial Sequence
  Description of Artificial Sequence: Synthetic oligonucleotide
  Antisense strand to SEQ ID NO: 1118862
aauccagacaaguaaccag

SEQ ID NO: 1118864 - RNA, 19 nt, Artificial Sequence
  Description of Artificial Sequence: Synthetic oligonucleotide
  Sense strand starting at position 3037 of SEQ ID NO: 915952
ugguuacuugucuggauuc

SEQ ID NO: 1118865 - RNA, 19 nt, Artificial Sequence
  Description of Artificial Sequence: Synthetic oligonucleotide
  Antisense strand to SEQ ID NO: 1118864
gaauccagacaaguaacca

SEQ ID NO: 1118866 - RNA, 19 nt, Artificial Sequence
  Description of Artificial Sequence: Synthetic oligonucleotide
  Sense strand starting at position 3039 of SEQ ID NO: 915952
guuacuugucuggauucua

SEQ ID NO: 1118867 - RNA, 19 nt, Artificial Sequence
  Description of Artificial Sequence: Synthetic oligonucleotide
  Antisense strand to SEQ ID NO: 1118866
uagaauccagacaaguaac

SEQ ID NO: 1118868 - RNA, 19 nt, Artificial Sequence
  Description of Artificial Sequence: Synthetic oligonucleotide
  Sense strand starting at position 3081 of SEQ ID NO: 915952
auaguccuggcacaguaua

SEQ ID NO: 1118869 - RNA, 19 nt, Artificial Sequence
  Description of Artificial Sequence: Synthetic oligonucleotide
  Antisense strand to SEQ ID NO: 1118868
uauacugugccaggacuau

SEQ ID NO: 1118870 - RNA, 19 nt, Artificial Sequence
  Description of Artificial Sequence: Synthetic oligonucleotide
  Sense strand starting at position 3093 of SEQ ID NO: 915952
caguauaagugcucaguaa

SEQ ID NO: 1118871 - RNA, 19 nt, Artificial Sequence
  Description of Artificial Sequence: Synthetic oligonucleotide
  Antisense strand to SEQ ID NO: 1118870
uuacugagcacuuauacug

SEQ ID NO: 1118872 - RNA, 19 nt, Artificial Sequence
  Description of Artificial Sequence: Synthetic oligonucleotide
  Sense strand starting at position 3094 of SEQ ID NO: 915952
aguauaagugcucaguaaa

SEQ ID NO: 1118873 - RNA, 19 nt, Artificial Sequence
  Description of Artificial Sequence: Synthetic oligonucleotide
  Antisense strand to SEQ ID NO: 1118872
uuuacugagcacuuauacu

SEQ ID NO: 1118874 - RNA, 19 nt, Artificial Sequence
  Description of Artificial Sequence: Synthetic oligonucleotide
  Sense strand starting at position 3118 of SEQ ID NO: 915952
guuguaaauugaugaagga

SEQ ID NO: 1118875 - RNA, 19 nt, Artificial Sequence
  Description of Artificial Sequence: Synthetic oligonucleotide
  Antisense strand to SEQ ID NO: 1118874
uccuucaucaauuuacaac

SEQ ID NO: 1118876 - RNA, 19 nt, Artificial Sequence
  Description of Artificial Sequence: Synthetic oligonucleotide
  Sense strand starting at position 3122 of SEQ ID NO: 915952
uaaauugaugaaggacgua

SEQ ID NO: 1118877 - RNA, 19 nt, Artificial Sequence
  Description of Artificial Sequence: Synthetic oligonucleotide
  Antisense strand to SEQ ID NO: 1118876
uacguccuucaucaauuua

SEQ ID NO: 1118878 - RNA, 19 nt, Artificial Sequence
  Description of Artificial Sequence: Synthetic oligonucleotide
  Sense strand starting at position 3212 of SEQ ID NO: 915952
ucacuaaucauucgggaga

SEQ ID NO: 1118879 - RNA, 19 nt, Artificial Sequence
  Description of Artificial Sequence: Synthetic oligonucleotide
  Antisense strand to SEQ ID NO: 1118878
ucucccgaaugauuaguga

SEQ ID NO: 1118880 - RNA, 19 nt, Artificial Sequence
  Description of Artificial Sequence: Synthetic oligonucleotide
  Sense strand starting at position 3213 of SEQ ID NO: 915952
cacuaaucauucgggagau

SEQ ID NO: 1118881 - RNA, 19 nt, Artificial Sequence
  Description of Artificial Sequence: Synthetic oligonucleotide
  Antisense strand to SEQ ID NO: 1118880
aucucccgaaugauuagug

SEQ ID NO: 1118882 - RNA, 19 nt, Artificial Sequence
  Description of Artificial Sequence: Synthetic oligonucleotide
  Sense strand starting at position 3214 of SEQ ID NO: 915952
acuaaucauucgggagaug

SEQ ID NO: 1118883 - RNA, 19 nt, Artificial Sequence
  Description of Artificial Sequence: Synthetic oligonucleotide
  Antisense strand to SEQ ID NO: 1118882
caucucccgaaugauuagu

SEQ ID NO: 1118884 - RNA, 19 nt, Artificial Sequence
  Description of Artificial Sequence: Synthetic oligonucleotide
  Sense strand starting at position 3783 of SEQ ID NO: 915952
gaacaucucugucuugaag

SEQ ID NO: 1118885 - RNA, 19 nt, Artificial Sequence
  Description of Artificial Sequence: Synthetic oligonucleotide
  Antisense strand to SEQ ID NO: 1118884
cuucaagacagagauguuc

SEQ ID NO: 1118886 - RNA, 19 nt, Artificial Sequence
  Description of Artificial Sequence: Synthetic oligonucleotide
  Sense strand starting at position 3790 of SEQ ID NO: 915952
ucugucuugaagggagaga

SEQ ID NO: 1118887 - RNA, 19 nt, Artificial Sequence
  Description of Artificial Sequence: Synthetic oligonucleotide
  Antisense strand to SEQ ID NO: 1118886
ucucucccuucaagacaga

SEQ ID NO: 1118888 - RNA, 19 nt, Artificial Sequence
  Description of Artificial Sequence: Synthetic oligonucleotide
  Sense strand starting at position 3852 of SEQ ID NO: 915952
guggaaacauaucuaagug

SEQ ID NO: 1118889 - RNA, 19 nt, Artificial Sequence
  Description of Artificial Sequence: Synthetic oligonucleotide
  Antisense strand to SEQ ID NO: 1118888
cacuuagauauguuuccac

SEQ ID NO: 1118890 - RNA, 19 nt, Artificial Sequence
  Description of Artificial Sequence: Synthetic oligonucleotide
  Sense strand starting at position 3904 of SEQ ID NO: 915952
guguguauauaucugcaau

SEQ ID NO: 1118891 - RNA, 19 nt, Artificial Sequence
  Description of Artificial Sequence: Synthetic oligonucleotide
  Antisense strand to SEQ ID NO: 1118890
auugcagauauauacacac

SEQ ID NO: 1118892 - RNA, 19 nt, Artificial Sequence
  Description of Artificial Sequence: Synthetic oligonucleotide
  Sense strand starting at position 3982 of SEQ ID NO: 915952
cuuggagaauauuauccua

SEQ ID NO: 1118893 - RNA, 19 nt, Artificial Sequence
  Description of Artificial Sequence: Synthetic oligonucleotide
  Antisense strand to SEQ ID NO: 1118892
uaggauaauauucuccaag

SEQ ID NO: 1118894 - RNA, 19 nt, Artificial Sequence
  Description of Artificial Sequence: Synthetic oligonucleotide
  Sense strand starting at position 51 of SEQ ID NO: 915953
auucuaucuugugccagau

SEQ ID NO: 1118895 - RNA, 19 nt, Artificial Sequence
  Description of Artificial Sequence: Synthetic oligonucleotide
  Antisense strand to SEQ ID NO: 1118894
aucuggcacaagauagaau

SEQ ID NO: 1118896 - RNA, 19 nt, Artificial Sequence
  Description of Artificial Sequence: Synthetic oligonucleotide
  Sense strand starting at position 74 of SEQ ID NO: 915953
acagcugugacaugguuua

SEQ ID NO: 1118897 - RNA, 19 nt, Artificial Sequence
  Description of Artificial Sequence: Synthetic oligonucleotide
  Antisense strand to SEQ ID NO: 1118896
uaaaccaugucacagcugu

SEQ ID NO: 1118898 - RNA, 19 nt, Artificial Sequence
  Description of Artificial Sequence: Synthetic oligonucleotide
  Sense strand starting at position 188 of SEQ ID NO: 915953
cugauacagucaucauauu

SEQ ID NO: 1118899 - RNA, 19 nt, Artificial Sequence
  Description of Artificial Sequence: Synthetic oligonucleotide
  Antisense strand to SEQ ID NO: 1118898
aauaugaugacuguaucag

SEQ ID NO: 1118900 - RNA, 19 nt, Artificial Sequence
  Description of Artificial Sequence: Synthetic oligonucleotide
  Sense strand starting at position 222 of SEQ ID NO: 915953
gcucguucugcccaagaga

SEQ ID NO: 1118901 - RNA, 19 nt, Artificial Sequence
  Description of Artificial Sequence: Synthetic oligonucleotide
  Antisense strand to SEQ ID NO: 1118900
ucucuugggcagaacgagc

SEQ ID NO: 1118902 - RNA, 19 nt, Artificial Sequence
  Description of Artificial Sequence: Synthetic oligonucleotide
  Sense strand starting at position 225 of SEQ ID NO: 915953
cguucugcccaagagaagu

SEQ ID NO: 1118903 - RNA, 19 nt, Artificial Sequence
  Description of Artificial Sequence: Synthetic oligonucleotide
  Antisense strand to SEQ ID NO: 1118902
acuucucuugggcagaacg

SEQ ID NO: 1118904 - RNA, 19 nt, Artificial Sequence
  Description of Artificial Sequence: Synthetic oligonucleotide
  Sense strand starting at position 391 of SEQ ID NO: 915953
gugaguucacuugggagaa

SEQ ID NO: 1118905 - RNA, 19 nt, Artificial Sequence
  Description of Artificial Sequence: Synthetic oligonucleotide
  Antisense strand to SEQ ID NO: 1118904
uucucccaagugaacucac

SEQ ID NO: 1118906 - RNA, 19 nt, Artificial Sequence
  Description of Artificial Sequence: Synthetic oligonucleotide
  Sense strand starting at position 422 of SEQ ID NO: 915953
ccugacugcucaguccaau

SEQ ID NO: 1118907 - RNA, 19 nt, Artificial Sequence
  Description of Artificial Sequence: Synthetic oligonucleotide
  Antisense strand to SEQ ID NO: 1118906
auuggacugagcagucagg

SEQ ID NO: 1118908 - RNA, 19 nt, Artificial Sequence
  Description of Artificial Sequence: Synthetic oligonucleotide
  Sense strand starting at position 524 of SEQ ID NO: 915953
cugggaaccagugauguuu

SEQ ID NO: 1118909 - RNA, 19 nt, Artificial Sequence
  Description of Artificial Sequence: Synthetic oligonucleotide
  Antisense strand to SEQ ID NO: 1118908
aaacaucacugguucccag

SEQ ID NO: 1118910 - RNA, 19 nt, Artificial Sequence
  Description of Artificial Sequence: Synthetic oligonucleotide
  Sense strand starting at position 530 of SEQ ID NO: 915953
accagugauguuuauaaug

SEQ ID NO: 1118911 - RNA, 19 nt, Artificial Sequence
  Description of Artificial Sequence: Synthetic oligonucleotide
  Antisense strand to SEQ ID NO: 1118910
cauuauaaacaucacuggu

SEQ ID NO: 1118912 - RNA, 19 nt, Artificial Sequence
  Description of Artificial Sequence: Synthetic oligonucleotide
  Sense strand starting at position 847 of SEQ ID NO: 915953
gcgagaaacuguuuacuuu

SEQ ID NO: 1118913 - RNA, 19 nt, Artificial Sequence
  Description of Artificial Sequence: Synthetic oligonucleotide
  Antisense strand to SEQ ID NO: 1118912
aaaguaaacaguuucucgc

SEQ ID NO: 1118914 - RNA, 19 nt, Artificial Sequence
  Description of Artificial Sequence: Synthetic oligonucleotide
  Sense strand starting at position 848 of SEQ ID NO: 915953
cgagaaacuguuuacuuuc

SEQ ID NO: 1118915 - RNA, 19 nt, Artificial Sequence
  Description of Artificial Sequence: Synthetic oligonucleotide
  Antisense strand to SEQ ID NO: 1118914
gaaaguaaacaguuucucg

SEQ ID NO: 1118916 - RNA, 19 nt, Artificial Sequence
  Description of Artificial Sequence: Synthetic oligonucleotide
  Sense strand starting at position 892 of SEQ ID NO: 915953
uggaguugauggcuuugga

SEQ ID NO: 1118917 - RNA, 19 nt, Artificial Sequence
  Description of Artificial Sequence: Synthetic oligonucleotide
  Antisense strand to SEQ ID NO: 1118916
uccaaagccaucaacucca

SEQ ID NO: 1118918 - RNA, 19 nt, Artificial Sequence
  Description of Artificial Sequence: Synthetic oligonucleotide
  Sense strand starting at position 901 of SEQ ID NO: 915953
uggcuuuggagaugagaag

SEQ ID NO: 1118919 - RNA, 19 nt, Artificial Sequence
  Description of Artificial Sequence: Synthetic oligonucleotide
  Antisense strand to SEQ ID NO: 1118918
cuucucaucuccaaagcca

SEQ ID NO: 1118920 - RNA, 19 nt, Artificial Sequence
  Description of Artificial Sequence: Synthetic oligonucleotide
  Sense strand starting at position 991 of SEQ ID NO: 915953
aauugugccggugacaaau

SEQ ID NO: 1118921 - RNA, 19 nt, Artificial Sequence
  Description of Artificial Sequence: Synthetic oligonucleotide
  Antisense strand to SEQ ID NO: 1118920
auuugucaccggcacaauu

SEQ ID NO: 1118922 - RNA, 19 nt, Artificial Sequence
  Description of Artificial Sequence: Synthetic oligonucleotide
  Sense strand starting at position 999 of SEQ ID NO: 915953
cggugacaaauccgaugau

SEQ ID NO: 1118923 - RNA, 19 nt, Artificial Sequence
  Description of Artificial Sequence: Synthetic oligonucleotide
  Antisense strand to SEQ ID NO: 1118922
aucaucggauuugucaccg

SEQ ID NO: 1118924 - RNA, 19 nt, Artificial Sequence
  Description of Artificial Sequence: Synthetic oligonucleotide
  Sense strand starting at position 1557 of SEQ ID NO: 915953
ugcggagaaacuuggagau

SEQ ID NO: 1118925 - RNA, 19 nt, Artificial Sequence
  Description of Artificial Sequence: Synthetic oligonucleotide
  Antisense strand to SEQ ID NO: 1118924
aucuccaaguuucuccgca

SEQ ID NO: 1118926 - RNA, 19 nt, Artificial Sequence
  Description of Artificial Sequence: Synthetic oligonucleotide
  Sense strand starting at position 1559 of SEQ ID NO: 915953
cggagaaacuuggagauga

SEQ ID NO: 1118927 - RNA, 19 nt, Artificial Sequence
  Description of Artificial Sequence: Synthetic oligonucleotide
  Antisense strand to SEQ ID NO: 1118926
ucaucuccaaguuucuccg

SEQ ID NO: 1118928 - RNA, 19 nt, Artificial Sequence
  Description of Artificial Sequence: Synthetic oligonucleotide
  Sense strand starting at position 1590 of SEQ ID NO: 915953
cggcgaucucgccuaucau

SEQ ID NO: 1118929 - RNA, 19 nt, Artificial Sequence
  Description of Artificial Sequence: Synthetic oligonucleotide
  Antisense strand to SEQ ID NO: 1118928
augauaggcgagaucgccg

SEQ ID NO: 1118930 - RNA, 19 nt, Artificial Sequence
  Description of Artificial Sequence: Synthetic oligonucleotide
  Sense strand starting at position 1775 of SEQ ID NO: 915953
uugucuuucuuucuuuaga

SEQ ID NO: 1118931 - RNA, 19 nt, Artificial Sequence
  Description of Artificial Sequence: Synthetic oligonucleotide
  Antisense strand to SEQ ID NO: 1118930
ucuaaagaaagaaagacaa

SEQ ID NO: 1118932 - RNA, 19 nt, Artificial Sequence
  Description of Artificial Sequence: Synthetic oligonucleotide
  Sense strand starting at position 1777 of SEQ ID NO: 915953
gucuuucuuucuuuagacu

SEQ ID NO: 1118933 - RNA, 19 nt, Artificial Sequence
  Description of Artificial Sequence: Synthetic oligonucleotide
  Antisense strand to SEQ ID NO: 1118932
agucuaaagaaagaaagac

SEQ ID NO: 1118934 - RNA, 19 nt, Artificial Sequence
  Description of Artificial Sequence: Synthetic oligonucleotide
  Sense strand starting at position 1903 of SEQ ID NO: 915953
gcagcauucgaagaucuca

SEQ ID NO: 1118935 - RNA, 19 nt, Artificial Sequence
  Description of Artificial Sequence: Synthetic oligonucleotide
  Antisense strand to SEQ ID NO: 1118934
ugagaucuucgaaugcugc

SEQ ID NO: 1118936 - RNA, 19 nt, Artificial Sequence
  Description of Artificial Sequence: Synthetic oligonucleotide
  Sense strand starting at position 2100 of SEQ ID NO: 915953
ggaggcggguccagagaua

SEQ ID NO: 1118937 - RNA, 19 nt, Artificial Sequence
  Description of Artificial Sequence: Synthetic oligonucleotide
  Antisense strand to SEQ ID NO: 1118936
uaucucuggacccgccucc

SEQ ID NO: 1118938 - RNA, 19 nt, Artificial Sequence
  Description of Artificial Sequence: Synthetic oligonucleotide
  Sense strand starting at position 2297 of SEQ ID NO: 915953
agugcauccuucuccaaga

SEQ ID NO: 1118939 - RNA, 19 nt, Artificial Sequence
  Description of Artificial Sequence: Synthetic oligonucleotide
  Antisense strand to SEQ ID NO: 1118938
ucuuggagaaggaugcacu

SEQ ID NO: 1118940 - RNA, 19 nt, Artificial Sequence
  Description of Artificial Sequence: Synthetic oligonucleotide
  Sense strand starting at position 2299 of SEQ ID NO: 915953
ugcauccuucuccaagagu

SEQ ID NO: 1118941 - RNA, 19 nt, Artificial Sequence
  Description of Artificial Sequence: Synthetic oligonucleotide
  Antisense strand to SEQ ID NO: 1118940
acucuuggagaaggaugca

SEQ ID NO: 1118942 - RNA, 19 nt, Artificial Sequence
  Description of Artificial Sequence: Synthetic oligonucleotide
  Sense strand starting at position 2347 of SEQ ID NO: 915953
guaagugcuggguaaauaa

SEQ ID NO: 1118943 - RNA, 19 nt, Artificial Sequence
  Description of Artificial Sequence: Synthetic oligonucleotide
  Antisense strand to SEQ ID NO: 1118942
uuauuuacccagcacuuac

SEQ ID NO: 1118944 - RNA, 19 nt, Artificial Sequence
  Description of Artificial Sequence: Synthetic oligonucleotide
  Sense strand starting at position 2585 of SEQ ID NO: 915953
gggcguucuguccaagaaa

SEQ ID NO: 1118945 - RNA, 19 nt, Artificial Sequence
  Description of Artificial Sequence: Synthetic oligonucleotide
  Antisense strand to SEQ ID NO: 1118944
uuucuuggacagaacgccc

SEQ ID NO: 1118946 - RNA, 19 nt, Artificial Sequence
  Description of Artificial Sequence: Synthetic oligonucleotide
  Sense strand starting at position 2859 of SEQ ID NO: 915953
aagagugguguguauccaa

SEQ ID NO: 1118947 - RNA, 19 nt, Artificial Sequence
  Description of Artificial Sequence: Synthetic oligonucleotide
  Antisense strand to SEQ ID NO: 1118946
uuggauacacaccacucuu

SEQ ID NO: 1118948 - RNA, 19 nt, Artificial Sequence
  Description of Artificial Sequence: Synthetic oligonucleotide
  Sense strand starting at position 3017 of SEQ ID NO: 915953
aaguauuaaguguagacau

SEQ ID NO: 1118949 - RNA, 19 nt, Artificial Sequence
  Description of Artificial Sequence: Synthetic oligonucleotide
  Antisense strand to SEQ ID NO: 1118948
augucuacacuuaauacuu

SEQ ID NO: 1118950 - RNA, 19 nt, Artificial Sequence
  Description of Artificial Sequence: Synthetic oligonucleotide
  Sense strand starting at position 3019 of SEQ ID NO: 915953
guauuaaguguagacauuc

SEQ ID NO: 1118951 - RNA, 19 nt, Artificial Sequence
  Description of Artificial Sequence: Synthetic oligonucleotide
  Antisense strand to SEQ ID NO: 1118950
gaaugucuacacuuaauac

SEQ ID NO: 1118952 - RNA, 19 nt, Artificial Sequence
  Description of Artificial Sequence: Synthetic oligonucleotide
  Sense strand starting at position 3124 of SEQ ID NO: 915953
aggccuaagacaggguuaa

SEQ ID NO: 1118953 - RNA, 19 nt, Artificial Sequence
  Description of Artificial Sequence: Synthetic oligonucleotide
  Antisense strand to SEQ ID NO: 1118952
uuaacccugucuuaggccu

SEQ ID NO: 1118954 - RNA, 19 nt, Artificial Sequence
  Description of Artificial Sequence: Synthetic oligonucleotide
  Sense strand starting at position 3269 of SEQ ID NO: 915953
guugaucaucaauauugca

SEQ ID NO: 1118955 - RNA, 19 nt, Artificial Sequence
  Description of Artificial Sequence: Synthetic oligonucleotide
  Antisense strand to SEQ ID NO: 1118954
ugcaauauugaugaucaac

SEQ ID NO: 1118956 - RNA, 19 nt, Artificial Sequence
  Description of Artificial Sequence: Synthetic oligonucleotide
  Sense strand starting at position 3455 of SEQ ID NO: 915953
acacauaacuaaguaguua

SEQ ID NO: 1118957 - RNA, 19 nt, Artificial Sequence
  Description of Artificial Sequence: Synthetic oligonucleotide
  Antisense strand to SEQ ID NO: 1118956
uaacuacuuaguuaugugu

SEQ ID NO: 1118958 - RNA, 19 nt, Artificial Sequence
  Description of Artificial Sequence: Synthetic oligonucleotide
  Sense strand starting at position 3689 of SEQ ID NO: 915953
ucacuuacauugucguuaa

SEQ ID NO: 1118959 - RNA, 19 nt, Artificial Sequence
  Description of Artificial Sequence: Synthetic oligonucleotide
  Antisense strand to SEQ ID NO: 1118958
uuaacgacaauguaaguga

SEQ ID NO: 1118960 - RNA, 19 nt, Artificial Sequence
  Description of Artificial Sequence: Synthetic oligonucleotide
  Sense strand starting at position 3703 of SEQ ID NO: 915953
guuaaugugucacugagua

SEQ ID NO: 1118961 - RNA, 19 nt, Artificial Sequence
  Description of Artificial Sequence: Synthetic oligonucleotide
  Antisense strand to SEQ ID NO: 1118960
uacucagugacacauuaac

SEQ ID NO: 1118962 - RNA, 19 nt, Artificial Sequence
  Description of Artificial Sequence: Synthetic oligonucleotide
  Sense strand starting at position 3707 of SEQ ID NO: 915953
augugucacugaguacaaa

SEQ ID NO: 1118963 - RNA, 19 nt, Artificial Sequence
  Description of Artificial Sequence: Synthetic oligonucleotide
  Antisense strand to SEQ ID NO: 1118962
uuuguacucagugacacau

SEQ ID NO: 1118964 - RNA, 19 nt, Artificial Sequence
  Description of Artificial Sequence: Synthetic oligonucleotide
  Sense strand starting at position 3710 of SEQ ID NO: 915953
ugucacugaguacaaauua

SEQ ID NO: 1118965 - RNA, 19 nt, Artificial Sequence
  Description of Artificial Sequence: Synthetic oligonucleotide
  Antisense strand to SEQ ID NO: 1118964
uaauuuguacucagugaca

SEQ ID NO: 1118966 - RNA, 19 nt, Artificial Sequence
  Description of Artificial Sequence: Synthetic oligonucleotide
  Sense strand starting at position 3726 of SEQ ID NO: 915953
uuaggagucaagugaaagu

SEQ ID NO: 1118967 - RNA, 19 nt, Artificial Sequence
  Description of Artificial Sequence: Synthetic oligonucleotide
  Antisense strand to SEQ ID NO: 1118966
acuuucacuugacuccuaa

SEQ ID NO: 1118968 - RNA, 19 nt, Artificial Sequence
  Description of Artificial Sequence: Synthetic oligonucleotide
  Sense strand starting at position 3781 of SEQ ID NO: 915953
cggucaugugcuuaaauug

SEQ ID NO: 1118969 - RNA, 19 nt, Artificial Sequence
  Description of Artificial Sequence: Synthetic oligonucleotide
  Antisense strand to SEQ ID NO: 1118968
caauuuaagcacaugaccg

SEQ ID NO: 1118970 - RNA, 19 nt, Artificial Sequence
  Description of Artificial Sequence: Synthetic oligonucleotide
  Sense strand starting at position 3865 of SEQ ID NO: 915953
gcccuuguucuccauacua

SEQ ID NO: 1118971 - RNA, 19 nt, Artificial Sequence
  Description of Artificial Sequence: Synthetic oligonucleotide
  Antisense strand to SEQ ID NO: 1118970
uaguauggagaacaagggc

SEQ ID NO: 1118972 - RNA, 19 nt, Artificial Sequence
  Description of Artificial Sequence: Synthetic oligonucleotide
  Sense strand starting at position 3937 of SEQ ID NO: 915953
accaguugaacaggguuaa

SEQ ID NO: 1118973 - RNA, 19 nt, Artificial Sequence
  Description of Artificial Sequence: Synthetic oligonucleotide
  Antisense strand to SEQ ID NO: 1118972
uuaacccuguucaacuggu

SEQ ID NO: 1118974 - RNA, 19 nt, Artificial Sequence
  Description of Artificial Sequence: Synthetic oligonucleotide
  Sense strand starting at position 57 of SEQ ID NO: 915954
ugguuuggugcugagguaa

SEQ ID NO: 1118975 - RNA, 19 nt, Artificial Sequence
  Description of Artificial Sequence: Synthetic oligonucleotide
  Antisense strand to SEQ ID NO: 1118974
uuaccucagcaccaaacca

SEQ ID NO: 1118976 - RNA, 19 nt, Artificial Sequence
  Description of Artificial Sequence: Synthetic oligonucleotide
  Sense strand starting at position 91 of SEQ ID NO: 915954
cgagcaguuccagagaaga

SEQ ID NO: 1118977 - RNA, 19 nt, Artificial Sequence
  Description of Artificial Sequence: Synthetic oligonucleotide
  Antisense strand to SEQ ID NO: 1118976
ucuucucuggaacugcucg

SEQ ID NO: 1118978 - RNA, 19 nt, Artificial Sequence
  Description of Artificial Sequence: Synthetic oligonucleotide
  Sense strand starting at position 205 of SEQ ID NO: 915954
gagcuuaggcuguaaauau

SEQ ID NO: 1118979 - RNA, 19 nt, Artificial Sequence
  Description of Artificial Sequence: Synthetic oligonucleotide
  Antisense strand to SEQ ID NO: 1118978
auauuuacagccuaagcuc

SEQ ID NO: 1118980 - RNA, 19 nt, Artificial Sequence
  Description of Artificial Sequence: Synthetic oligonucleotide
  Sense strand starting at position 227 of SEQ ID NO: 915954
gaggguuucuuccugacau

SEQ ID NO: 1118981 - RNA, 19 nt, Artificial Sequence
  Description of Artificial Sequence: Synthetic oligonucleotide
  Antisense strand to SEQ ID NO: 1118980
augucaggaagaaacccuc

SEQ ID NO: 1118982 - RNA, 19 nt, Artificial Sequence
  Description of Artificial Sequence: Synthetic oligonucleotide
  Sense strand starting at position 229 of SEQ ID NO: 915954
ggguuucuuccugacauca

SEQ ID NO: 1118983 - RNA, 19 nt, Artificial Sequence
  Description of Artificial Sequence: Synthetic oligonucleotide
  Antisense strand to SEQ ID NO: 1118982
ugaugucaggaagaaaccc

SEQ ID NO: 1118984 - RNA, 19 nt, Artificial Sequence
  Description of Artificial Sequence: Synthetic oligonucleotide
  Sense strand starting at position 329 of SEQ ID NO: 915954
cguggugugguauaauuga

SEQ ID NO: 1118985 - RNA, 19 nt, Artificial Sequence
  Description of Artificial Sequence: Synthetic oligonucleotide
  Antisense strand to SEQ ID NO: 1118984
ucaauuauaccacaccacg

SEQ ID NO: 1118986 - RNA, 19 nt, Artificial Sequence
  Description of Artificial Sequence: Synthetic oligonucleotide
  Sense strand starting at position 337 of SEQ ID NO: 915954
gguauaauugagggagggu

SEQ ID NO: 1118987 - RNA, 19 nt, Artificial Sequence
  Description of Artificial Sequence: Synthetic oligonucleotide
  Antisense strand to SEQ ID NO: 1118986
acccucccucaauuauacc

SEQ ID NO: 1118988 - RNA, 19 nt, Artificial Sequence
  Description of Artificial Sequence: Synthetic oligonucleotide
  Sense strand starting at position 865 of SEQ ID NO: 915954
gggagcugaggauguuuga

SEQ ID NO: 1118989 - RNA, 19 nt, Artificial Sequence
  Description of Artificial Sequence: Synthetic oligonucleotide
  Antisense strand to SEQ ID NO: 1118988
ucaaacauccucagcuccc

SEQ ID NO: 1118990 - RNA, 19 nt, Artificial Sequence
  Description of Artificial Sequence: Synthetic oligonucleotide
  Sense strand starting at position 874 of SEQ ID NO: 915954
ggauguuugaggugggaga

SEQ ID NO: 1118991 - RNA, 19 nt, Artificial Sequence
  Description of Artificial Sequence: Synthetic oligonucleotide
  Antisense strand to SEQ ID NO: 1118990
ucucccaccucaaacaucc

SEQ ID NO: 1118992 - RNA, 19 nt, Artificial Sequence
  Description of Artificial Sequence: Synthetic oligonucleotide
  Sense strand starting at position 926 of SEQ ID NO: 915954
cagggacacucaguuugau

SEQ ID NO: 1118993 - RNA, 19 nt, Artificial Sequence
  Description of Artificial Sequence: Synthetic oligonucleotide
  Antisense strand to SEQ ID NO: 1118992
aucaaacugagugucccug

SEQ ID NO: 1118994 - RNA, 19 nt, Artificial Sequence
  Description of Artificial Sequence: Synthetic oligonucleotide
  Sense strand starting at position 980 of SEQ ID NO: 915954
augggcuacccuugagcaa

SEQ ID NO: 1118995 - RNA, 19 nt, Artificial Sequence
  Description of Artificial Sequence: Synthetic oligonucleotide
  Antisense strand to SEQ ID NO: 1118994
uugcucaaggguagcccau

SEQ ID NO: 1118996 - RNA, 19 nt, Artificial Sequence
  Description of Artificial Sequence: Synthetic oligonucleotide
  Sense strand starting at position 1148 of SEQ ID NO: 915954
gggugaugaaguugcugau

SEQ ID NO: 1118997 - RNA, 19 nt, Artificial Sequence
  Description of Artificial Sequence: Synthetic oligonucleotide
  Antisense strand to SEQ ID NO: 1118996
aucagcaacuucaucaccc

SEQ ID NO: 1118998 - RNA, 19 nt, Artificial Sequence
  Description of Artificial Sequence: Synthetic oligonucleotide
  Sense strand starting at position 1299 of SEQ ID NO: 915954
ggaguuugauuucagugau

SEQ ID NO: 1118999 - RNA, 19 nt, Artificial Sequence
  Description of Artificial Sequence: Synthetic oligonucleotide
  Antisense strand to SEQ ID NO: 1118998
aucacugaaaucaaacucc

SEQ ID NO: 1119000 - RNA, 19 nt, Artificial Sequence
  Description of Artificial Sequence: Synthetic oligonucleotide
  Sense strand starting at position 1381 of SEQ ID NO: 915954
agcugaggucaaggaaguu

SEQ ID NO: 1119001 - RNA, 19 nt, Artificial Sequence
  Description of Artificial Sequence: Synthetic oligonucleotide
  Antisense strand to SEQ ID NO: 1119000
aacuuccuugaccucagcu

SEQ ID NO: 1119002 - RNA, 19 nt, Artificial Sequence
  Description of Artificial Sequence: Synthetic oligonucleotide
  Sense strand starting at position 1585 of SEQ ID NO: 915954
gggauuaaugcuggacuuc

SEQ ID NO: 1119003 - RNA, 19 nt, Artificial Sequence
  Description of Artificial Sequence: Synthetic oligonucleotide
  Antisense strand to SEQ ID NO: 1119002
gaaguccagcauuaauccc

SEQ ID NO: 1119004 - RNA, 19 nt, Artificial Sequence
  Description of Artificial Sequence: Synthetic oligonucleotide
  Sense strand starting at position 2477 of SEQ ID NO: 915954
agaagugacaggcaaguuu

SEQ ID NO: 1119005 - RNA, 19 nt, Artificial Sequence
  Description of Artificial Sequence: Synthetic oligonucleotide
  Antisense strand to SEQ ID NO: 1119004
aaacuugccugucacuucu

SEQ ID NO: 1119006 - RNA, 19 nt, Artificial Sequence
  Description of Artificial Sequence: Synthetic oligonucleotide
  Sense strand starting at position 2512 of SEQ ID NO: 915954
cuaacuacaguuuguuaau

SEQ ID NO: 1119007 - RNA, 19 nt, Artificial Sequence
  Description of Artificial Sequence: Synthetic oligonucleotide
  Antisense strand to SEQ ID NO: 1119006
auuaacaaacuguaguuag

SEQ ID NO: 1119008 - RNA, 19 nt, Artificial Sequence
  Description of Artificial Sequence: Synthetic oligonucleotide
  Sense strand starting at position 2824 of SEQ ID NO: 915954
gcgccuggcauuguuaaua

SEQ ID NO: 1119009 - RNA, 19 nt, Artificial Sequence
  Description of Artificial Sequence: Synthetic oligonucleotide
  Antisense strand to SEQ ID NO: 1119008
uauuaacaaugccaggcgc

SEQ ID NO: 1119010 - RNA, 19 nt, Artificial Sequence
  Description of Artificial Sequence: Synthetic oligonucleotide
  Sense strand starting at position 2894 of SEQ ID NO: 915954
uacaaugcaucggucaaua

SEQ ID NO: 1119011 - RNA, 19 nt, Artificial Sequence
  Description of Artificial Sequence: Synthetic oligonucleotide
  Antisense strand to SEQ ID NO: 1119010
uauugaccgaugcauugua

SEQ ID NO: 1119012 - RNA, 19 nt, Artificial Sequence
  Description of Artificial Sequence: Synthetic oligonucleotide
  Sense strand starting at position 2896 of SEQ ID NO: 915954
caaugcaucggucaauaug

SEQ ID NO: 1119013 - RNA, 19 nt, Artificial Sequence
  Description of Artificial Sequence: Synthetic oligonucleotide
  Antisense strand to SEQ ID NO: 1119012
cauauugaccgaugcauug

SEQ ID NO: 1119014 - RNA, 19 nt, Artificial Sequence
  Description of Artificial Sequence: Synthetic oligonucleotide
  Sense strand starting at position 2937 of SEQ ID NO: 915954
gaaugagacucuucucgga

SEQ ID NO: 1119015 - RNA, 19 nt, Artificial Sequence
  Description of Artificial Sequence: Synthetic oligonucleotide
  Antisense strand to SEQ ID NO: 1119014
uccgagaagagucucauuc

SEQ ID NO: 1119016 - RNA, 19 nt, Artificial Sequence
  Description of Artificial Sequence: Synthetic oligonucleotide
  Sense strand starting at position 2939 of SEQ ID NO: 915954
augagacucuucucggaaa

SEQ ID NO: 1119017 - RNA, 19 nt, Artificial Sequence
  Description of Artificial Sequence: Synthetic oligonucleotide
  Antisense strand to SEQ ID NO: 1119016
uuuccgagaagagucucau

SEQ ID NO: 1119018 - RNA, 19 nt, Artificial Sequence
  Description of Artificial Sequence: Synthetic oligonucleotide
  Sense strand starting at position 3058 of SEQ ID NO: 915954
uuggaacacugguucugaa

SEQ ID NO: 1119019 - RNA, 19 nt, Artificial Sequence
  Description of Artificial Sequence: Synthetic oligonucleotide
  Antisense strand to SEQ ID NO: 1119018
uucagaaccaguguuccaa

SEQ ID NO: 1119020 - RNA, 19 nt, Artificial Sequence
  Description of Artificial Sequence: Synthetic oligonucleotide
  Sense strand starting at position 3190 of SEQ ID NO: 915954
uuuaaacuuccugagugau

SEQ ID NO: 1119021 - RNA, 19 nt, Artificial Sequence
  Description of Artificial Sequence: Synthetic oligonucleotide
  Antisense strand to SEQ ID NO: 1119020
aucacucaggaaguuuaaa

SEQ ID NO: 1119022 - RNA, 19 nt, Artificial Sequence
  Description of Artificial Sequence: Synthetic oligonucleotide
  Sense strand starting at position 3196 of SEQ ID NO: 915954
cuuccugagugauucucau

SEQ ID NO: 1119023 - RNA, 19 nt, Artificial Sequence
  Description of Artificial Sequence: Synthetic oligonucleotide
  Antisense strand to SEQ ID NO: 1119022
augagaaucacucaggaag

SEQ ID NO: 1119024 - RNA, 19 nt, Artificial Sequence
  Description of Artificial Sequence: Synthetic oligonucleotide
  Sense strand starting at position 3224 of SEQ ID NO: 915954
ggguuauaauugcugguau

SEQ ID NO: 1119025 - RNA, 19 nt, Artificial Sequence
  Description of Artificial Sequence: Synthetic oligonucleotide
  Antisense strand to SEQ ID NO: 1119024
auaccagcaauuauaaccc

SEQ ID NO: 1119026 - RNA, 19 nt, Artificial Sequence
  Description of Artificial Sequence: Synthetic oligonucleotide
  Sense strand starting at position 3226 of SEQ ID NO: 915954
guuauaauugcugguauuu

SEQ ID NO: 1119027 - RNA, 19 nt, Artificial Sequence
  Description of Artificial Sequence: Synthetic oligonucleotide
  Antisense strand to SEQ ID NO: 1119026
aaauaccagcaauuauaac

SEQ ID NO: 1119028 - RNA, 19 nt, Artificial Sequence
  Description of Artificial Sequence: Synthetic oligonucleotide
  Sense strand starting at position 3235 of SEQ ID NO: 915954
gcugguauuuaguucguuu

SEQ ID NO: 1119029 - RNA, 19 nt, Artificial Sequence
  Description of Artificial Sequence: Synthetic oligonucleotide
  Antisense strand to SEQ ID NO: 1119028
aaacgaacuaaauaccagc

SEQ ID NO: 1119030 - RNA, 19 nt, Artificial Sequence
  Description of Artificial Sequence: Synthetic oligonucleotide
  Sense strand starting at position 3238 of SEQ ID NO: 915954
gguauuuaguucguuugga

SEQ ID NO: 1119031 - RNA, 19 nt, Artificial Sequence
  Description of Artificial Sequence: Synthetic oligonucleotide
  Antisense strand to SEQ ID NO: 1119030
uccaaacgaacuaaauacc

SEQ ID NO: 1119032 - RNA, 19 nt, Artificial Sequence
  Description of Artificial Sequence: Synthetic oligonucleotide
  Sense strand starting at position 3239 of SEQ ID NO: 915954
guauuuaguucguuuggau

SEQ ID NO: 1119033 - RNA, 19 nt, Artificial Sequence
  Description of Artificial Sequence: Synthetic oligonucleotide
  Antisense strand to SEQ ID NO: 1119032
auccaaacgaacuaaauac

SEQ ID NO: 1119034 - RNA, 19 nt, Artificial Sequence
  Description of Artificial Sequence: Synthetic oligonucleotide
  Sense strand starting at position 3246 of SEQ ID NO: 915954
guucguuuggaucaugauu

SEQ ID NO: 1119035 - RNA, 19 nt, Artificial Sequence
  Description of Artificial Sequence: Synthetic oligonucleotide
  Antisense strand to SEQ ID NO: 1119034
aaucaugauccaaacgaac

SEQ ID NO: 1119036 - RNA, 19 nt, Artificial Sequence
  Description of Artificial Sequence: Synthetic oligonucleotide
  Sense strand starting at position 3362 of SEQ ID NO: 915954
cgcucaacccaggaaucua

SEQ ID NO: 1119037 - RNA, 19 nt, Artificial Sequence
  Description of Artificial Sequence: Synthetic oligonucleotide
  Antisense strand to SEQ ID NO: 1119036
uagauuccuggguugagcg

SEQ ID NO: 1119038 - RNA, 19 nt, Artificial Sequence
  Description of Artificial Sequence: Synthetic oligonucleotide
  Sense strand starting at position 3379 of SEQ ID NO: 915954
uacagauagugauuaugca

SEQ ID NO: 1119039 - RNA, 19 nt, Artificial Sequence
  Description of Artificial Sequence: Synthetic oligonucleotide
  Antisense strand to SEQ ID NO: 1119038
ugcauaaucacuaucugua

SEQ ID NO: 1119040 - RNA, 19 nt, Artificial Sequence
  Description of Artificial Sequence: Synthetic oligonucleotide
  Sense strand starting at position 3383 of SEQ ID NO: 915954
gauagugauuaugcaauac

SEQ ID NO: 1119041 - RNA, 19 nt, Artificial Sequence
  Description of Artificial Sequence: Synthetic oligonucleotide
  Antisense strand to SEQ ID NO: 1119040
guauugcauaaucacuauc

SEQ ID NO: 1119042 - RNA, 19 nt, Artificial Sequence
  Description of Artificial Sequence: Synthetic oligonucleotide
  Sense strand starting at position 3387 of SEQ ID NO: 915954
gugauuaugcaauacacag

SEQ ID NO: 1119043 - RNA, 19 nt, Artificial Sequence
  Description of Artificial Sequence: Synthetic oligonucleotide
  Antisense strand to SEQ ID NO: 1119042
cuguguauugcauaaucac

SEQ ID NO: 1119044 - RNA, 19 nt, Artificial Sequence
  Description of Artificial Sequence: Synthetic oligonucleotide
  Sense strand starting at position 3482 of SEQ ID NO: 915954
auccauguuccuuauuaug

SEQ ID NO: 1119045 - RNA, 19 nt, Artificial Sequence
  Description of Artificial Sequence: Synthetic oligonucleotide
  Antisense strand to SEQ ID NO: 1119044
cauaauaaggaacauggau

SEQ ID NO: 1119046 - RNA, 19 nt, Artificial Sequence
  Description of Artificial Sequence: Synthetic oligonucleotide
  Sense strand starting at position 3484 of SEQ ID NO: 915954
ccauguuccuuauuaugga

SEQ ID NO: 1119047 - RNA, 19 nt, Artificial Sequence
  Description of Artificial Sequence: Synthetic oligonucleotide
  Antisense strand to SEQ ID NO: 1119046
uccauaauaaggaacaugg

SEQ ID NO: 1119048 - RNA, 19 nt, Artificial Sequence
  Description of Artificial Sequence: Synthetic oligonucleotide
  Sense strand starting at position 3632 of SEQ ID NO: 915954
uccucagcugucuacaaga

SEQ ID NO: 1119049 - RNA, 19 nt, Artificial Sequence
  Description of Artificial Sequence: Synthetic oligonucleotide
  Antisense strand to SEQ ID NO: 1119048
ucuuguagacagcugagga

SEQ ID NO: 1119050 - RNA, 19 nt, Artificial Sequence
  Description of Artificial Sequence: Synthetic oligonucleotide
  Sense strand starting at position 3637 of SEQ ID NO: 915954
agcugucuacaagaucaga

SEQ ID NO: 1119051 - RNA, 19 nt, Artificial Sequence
  Description of Artificial Sequence: Synthetic oligonucleotide
  Antisense strand to SEQ ID NO: 1119050
ucugaucuuguagacagcu

SEQ ID NO: 1119052 - RNA, 19 nt, Artificial Sequence
  Description of Artificial Sequence: Synthetic oligonucleotide
  Sense strand starting at position 3957 of SEQ ID NO: 915954
gaauaaucuggaggccuua

SEQ ID NO: 1119053 - RNA, 19 nt, Artificial Sequence
  Description of Artificial Sequence: Synthetic oligonucleotide
  Antisense strand to SEQ ID NO: 1119052
uaaggccuccagauuauuc

SEQ ID NO: 1119054 - RNA, 19 nt, Artificial Sequence
  Description of Artificial Sequence: Synthetic oligonucleotide
  Sense strand starting at position 2 of SEQ ID NO: 915955
ggagcuccugaugaguaua

SEQ ID NO: 1119055 - RNA, 19 nt, Artificial Sequence
  Description of Artificial Sequence: Synthetic oligonucleotide
  Antisense strand to SEQ ID NO: 1119054
uauacucaucaggagcucc

SEQ ID NO: 1119056 - RNA, 19 nt, Artificial Sequence
  Description of Artificial Sequence: Synthetic oligonucleotide
  Sense strand starting at position 4 of SEQ ID NO: 915955
agcuccugaugaguauaaa

SEQ ID NO: 1119057 - RNA, 19 nt, Artificial Sequence
  Description of Artificial Sequence: Synthetic oligonucleotide
  Antisense strand to SEQ ID NO: 1119056
uuuauacucaucaggagcu

SEQ ID NO: 1119058 - RNA, 19 nt, Artificial Sequence
  Description of Artificial Sequence: Synthetic oligonucleotide
  Sense strand starting at position 5 of SEQ ID NO: 915955
gcuccugaugaguauaaac

SEQ ID NO: 1119059 - RNA, 19 nt, Artificial Sequence
  Description of Artificial Sequence: Synthetic oligonucleotide
  Antisense strand to SEQ ID NO: 1119058
guuuauacucaucaggagc

SEQ ID NO: 1119060 - RNA, 19 nt, Artificial Sequence
  Description of Artificial Sequence: Synthetic oligonucleotide
  Sense strand starting at position 135 of SEQ ID NO: 915955
uuuagacuauuaccggaaa

SEQ ID NO: 1119061 - RNA, 19 nt, Artificial Sequence
  Description of Artificial Sequence: Synthetic oligonucleotide
  Antisense strand to SEQ ID NO: 1119060
uuuccgguaauagucuaaa

SEQ ID NO: 1119062 - RNA, 19 nt, Artificial Sequence
  Description of Artificial Sequence: Synthetic oligonucleotide
  Sense strand starting at position 302 of SEQ ID NO: 915955
gagugaacagucugagcaa

SEQ ID NO: 1119063 - RNA, 19 nt, Artificial Sequence
  Description of Artificial Sequence: Synthetic oligonucleotide
  Antisense strand to SEQ ID NO: 1119062
uugcucagacuguucacuc

SEQ ID NO: 1119064 - RNA, 19 nt, Artificial Sequence
  Description of Artificial Sequence: Synthetic oligonucleotide
  Sense strand starting at position 330 of SEQ ID NO: 915955
acaggauugugguugauau

SEQ ID NO: 1119065 - RNA, 19 nt, Artificial Sequence
  Description of Artificial Sequence: Synthetic oligonucleotide
  Antisense strand to SEQ ID NO: 1119064
auaucaaccacaauccugu

SEQ ID NO: 1119066 - RNA, 19 nt, Artificial Sequence
  Description of Artificial Sequence: Synthetic oligonucleotide
  Sense strand starting at position 331 of SEQ ID NO: 915955
caggauugugguugauaug

SEQ ID NO: 1119067 - RNA, 19 nt, Artificial Sequence
  Description of Artificial Sequence: Synthetic oligonucleotide
  Antisense strand to SEQ ID NO: 1119066
cauaucaaccacaauccug

SEQ ID NO: 1119068 - RNA, 19 nt, Artificial Sequence
  Description of Artificial Sequence: Synthetic oligonucleotide
  Sense strand starting at position 332 of SEQ ID NO: 915955
aggauugugguugauaugu

SEQ ID NO: 1119069 - RNA, 19 nt, Artificial Sequence
  Description of Artificial Sequence: Synthetic oligonucleotide
  Antisense strand to SEQ ID NO: 1119068
acauaucaaccacaauccu

SEQ ID NO: 1119070 - RNA, 19 nt, Artificial Sequence
  Description of Artificial Sequence: Synthetic oligonucleotide
  Sense strand starting at position 340 of SEQ ID NO: 915955
gguugauauguucacagga

SEQ ID NO: 1119071 - RNA, 19 nt, Artificial Sequence
  Description of Artificial Sequence: Synthetic oligonucleotide
  Antisense strand to SEQ ID NO: 1119070
uccugugaacauaucaacc

SEQ ID NO: 1119072 - RNA, 19 nt, Artificial Sequence
  Description of Artificial Sequence: Synthetic oligonucleotide
  Sense strand starting at position 405 of SEQ ID NO: 915955
uagauugagccucauuagu

SEQ ID NO: 1119073 - RNA, 19 nt, Artificial Sequence
  Description of Artificial Sequence: Synthetic oligonucleotide
  Antisense strand to SEQ ID NO: 1119072
acuaaugaggcucaaucua

SEQ ID NO: 1119074 - RNA, 19 nt, Artificial Sequence
  Description of Artificial Sequence: Synthetic oligonucleotide
  Sense strand starting at position 422 of SEQ ID NO: 915955
gugggaggcccugaauuau

SEQ ID NO: 1119075 - RNA, 19 nt, Artificial Sequence
  Description of Artificial Sequence: Synthetic oligonucleotide
  Antisense strand to SEQ ID NO: 1119074
auaauucagggccucccac

SEQ ID NO: 1119076 - RNA, 19 nt, Artificial Sequence
  Description of Artificial Sequence: Synthetic oligonucleotide
  Sense strand starting at position 444 of SEQ ID NO: 915955
uaagaauguggaugcuaug

SEQ ID NO: 1119077 - RNA, 19 nt, Artificial Sequence
  Description of Artificial Sequence: Synthetic oligonucleotide
  Antisense strand to SEQ ID NO: 1119076
cauagcauccacauucuua

SEQ ID NO: 1119078 - RNA, 19 nt, Artificial Sequence
  Description of Artificial Sequence: Synthetic oligonucleotide
  Sense strand starting at position 454 of SEQ ID NO: 915955
gaugcuaugcuauaaacga

SEQ ID NO: 1119079 - RNA, 19 nt, Artificial Sequence
  Description of Artificial Sequence: Synthetic oligonucleotide
  Antisense strand to SEQ ID NO: 1119078
ucguuuauagcauagcauc

SEQ ID NO: 1119080 - RNA, 19 nt, Artificial Sequence
  Description of Artificial Sequence: Synthetic oligonucleotide
  Sense strand starting at position 461 of SEQ ID NO: 915955
ugcuauaaacgauacugua

SEQ ID NO: 1119081 - RNA, 19 nt, Artificial Sequence
  Description of Artificial Sequence: Synthetic oligonucleotide
  Antisense strand to SEQ ID NO: 1119080
uacaguaucguuuauagca

SEQ ID NO: 1119082 - RNA, 19 nt, Artificial Sequence
  Description of Artificial Sequence: Synthetic oligonucleotide
  Sense strand starting at position 580 of SEQ ID NO: 915955
aucacaguagagugaaaua

SEQ ID NO: 1119083 - RNA, 19 nt, Artificial Sequence
  Description of Artificial Sequence: Synthetic oligonucleotide
  Antisense strand to SEQ ID NO: 1119082
uauuucacucuacugugau

SEQ ID NO: 1119084 - RNA, 19 nt, Artificial Sequence
  Description of Artificial Sequence: Synthetic oligonucleotide
  Sense strand starting at position 664 of SEQ ID NO: 915955
ugcuacaaacauugaguaa

SEQ ID NO: 1119085 - RNA, 19 nt, Artificial Sequence
  Description of Artificial Sequence: Synthetic oligonucleotide
  Antisense strand to SEQ ID NO: 1119084
uuacucaauguuuguagca

SEQ ID NO: 1119086 - RNA, 19 nt, Artificial Sequence
  Description of Artificial Sequence: Synthetic oligonucleotide
  Sense strand starting at position 691 of SEQ ID NO: 915955
guauucugacgaggaaaga

SEQ ID NO: 1119087 - RNA, 19 nt, Artificial Sequence
  Description of Artificial Sequence: Synthetic oligonucleotide
  Antisense strand to SEQ ID NO: 1119086
ucuuuccucgucagaauac

SEQ ID NO: 1119088 - RNA, 19 nt, Artificial Sequence
  Description of Artificial Sequence: Synthetic oligonucleotide
  Sense strand starting at position 1006 of SEQ ID NO: 915955
gccagugccaaugaugaaa

SEQ ID NO: 1119089 - RNA, 19 nt, Artificial Sequence
  Description of Artificial Sequence: Synthetic oligonucleotide
  Antisense strand to SEQ ID NO: 1119088
uuucaucauuggcacuggc

SEQ ID NO: 1119090 - RNA, 19 nt, Artificial Sequence
  Description of Artificial Sequence: Synthetic oligonucleotide
  Sense strand starting at position 1269 of SEQ ID NO: 915955
gguaauaugaggugugaac

SEQ ID NO: 1119091 - RNA, 19 nt, Artificial Sequence
  Description of Artificial Sequence: Synthetic oligonucleotide
  Antisense strand to SEQ ID NO: 1119090
guucacaccucauauuacc

SEQ ID NO: 1119092 - RNA, 19 nt, Artificial Sequence
  Description of Artificial Sequence: Synthetic oligonucleotide
  Sense strand starting at position 1271 of SEQ ID NO: 915955
uaauaugaggugugaacuu

SEQ ID NO: 1119093 - RNA, 19 nt, Artificial Sequence
  Description of Artificial Sequence: Synthetic oligonucleotide
  Antisense strand to SEQ ID NO: 1119092
aaguucacaccucauauua

SEQ ID NO: 1119094 - RNA, 19 nt, Artificial Sequence
  Description of Artificial Sequence: Synthetic oligonucleotide
  Sense strand starting at position 1408 of SEQ ID NO: 915955
guggcaauuaccugauuag

SEQ ID NO: 1119095 - RNA, 19 nt, Artificial Sequence
  Description of Artificial Sequence: Synthetic oligonucleotide
  Antisense strand to SEQ ID NO: 1119094
cuaaucagguaauugccac

SEQ ID NO: 1119096 - RNA, 19 nt, Artificial Sequence
  Description of Artificial Sequence: Synthetic oligonucleotide
  Sense strand starting at position 1472 of SEQ ID NO: 915955
guggaugugaguuauccau

SEQ ID NO: 1119097 - RNA, 19 nt, Artificial Sequence
  Description of Artificial Sequence: Synthetic oligonucleotide
  Antisense strand to SEQ ID NO: 1119096
auggauaacucacauccac

SEQ ID NO: 1119098 - RNA, 19 nt, Artificial Sequence
  Description of Artificial Sequence: Synthetic oligonucleotide
  Sense strand starting at position 1498 of SEQ ID NO: 915955
cgaggacaaguuugaaucu

SEQ ID NO: 1119099 - RNA, 19 nt, Artificial Sequence
  Description of Artificial Sequence: Synthetic oligonucleotide
  Antisense strand to SEQ ID NO: 1119098
agauucaaacuuguccucg

SEQ ID NO: 1119100 - RNA, 19 nt, Artificial Sequence
  Description of Artificial Sequence: Synthetic oligonucleotide
  Sense strand starting at position 2302 of SEQ ID NO: 915955
ggaagcacuguagaaguuu

SEQ ID NO: 1119101 - RNA, 19 nt, Artificial Sequence
  Description of Artificial Sequence: Synthetic oligonucleotide
  Antisense strand to SEQ ID NO: 1119100
aaacuucuacagugcuucc

SEQ ID NO: 1119102 - RNA, 19 nt, Artificial Sequence
  Description of Artificial Sequence: Synthetic oligonucleotide
  Sense strand starting at position 2365 of SEQ ID NO: 915955
cuuccuuuccgguaagacu

SEQ ID NO: 1119103 - RNA, 19 nt, Artificial Sequence
  Description of Artificial Sequence: Synthetic oligonucleotide
  Antisense strand to SEQ ID NO: 1119102
agucuuaccggaaaggaag

SEQ ID NO: 1119104 - RNA, 19 nt, Artificial Sequence
  Description of Artificial Sequence: Synthetic oligonucleotide
  Sense strand starting at position 2455 of SEQ ID NO: 915955
cauagcauggucgaaauga

SEQ ID NO: 1119105 - RNA, 19 nt, Artificial Sequence
  Description of Artificial Sequence: Synthetic oligonucleotide
  Antisense strand to SEQ ID NO: 1119104
ucauuucgaccaugcuaug

SEQ ID NO: 1119106 - RNA, 19 nt, Artificial Sequence
  Description of Artificial Sequence: Synthetic oligonucleotide
  Sense strand starting at position 2608 of SEQ ID NO: 915955
cccaaauggcuugaguaau

SEQ ID NO: 1119107 - RNA, 19 nt, Artificial Sequence
  Description of Artificial Sequence: Synthetic oligonucleotide
  Antisense strand to SEQ ID NO: 1119106
auuacucaagccauuuggg

SEQ ID NO: 1119108 - RNA, 19 nt, Artificial Sequence
  Description of Artificial Sequence: Synthetic oligonucleotide
  Sense strand starting at position 2620 of SEQ ID NO: 915955
gaguaaugguagucaauca

SEQ ID NO: 1119109 - RNA, 19 nt, Artificial Sequence
  Description of Artificial Sequence: Synthetic oligonucleotide
  Antisense strand to SEQ ID NO: 1119108
ugauugacuaccauuacuc

SEQ ID NO: 1119110 - RNA, 19 nt, Artificial Sequence
  Description of Artificial Sequence: Synthetic oligonucleotide
  Sense strand starting at position 2758 of SEQ ID NO: 915955
ucucauugaauguaguagu

SEQ ID NO: 1119111 - RNA, 19 nt, Artificial Sequence
  Description of Artificial Sequence: Synthetic oligonucleotide
  Antisense strand to SEQ ID NO: 1119110
acuacuacauucaaugaga

SEQ ID NO: 1119112 - RNA, 19 nt, Artificial Sequence
  Description of Artificial Sequence: Synthetic oligonucleotide
  Sense strand starting at position 2819 of SEQ ID NO: 915955
ccuuuaugggcuuggacua

SEQ ID NO: 1119113 - RNA, 19 nt, Artificial Sequence
  Description of Artificial Sequence: Synthetic oligonucleotide
  Antisense strand to SEQ ID NO: 1119112
uaguccaagcccauaaagg

SEQ ID NO: 1119114 - RNA, 19 nt, Artificial Sequence
  Description of Artificial Sequence: Synthetic oligonucleotide
  Sense strand starting at position 2844 of SEQ ID NO: 915955
ggucucauuucuuugucuu

SEQ ID NO: 1119115 - RNA, 19 nt, Artificial Sequence
  Description of Artificial Sequence: Synthetic oligonucleotide
  Antisense strand to SEQ ID NO: 1119114
aagacaaagaaaugagacc

SEQ ID NO: 1119116 - RNA, 19 nt, Artificial Sequence
  Description of Artificial Sequence: Synthetic oligonucleotide
  Sense strand starting at position 2845 of SEQ ID NO: 915955
gucucauuucuuugucuua

SEQ ID NO: 1119117 - RNA, 19 nt, Artificial Sequence
  Description of Artificial Sequence: Synthetic oligonucleotide
  Antisense strand to SEQ ID NO: 1119116
uaagacaaagaaaugagac

SEQ ID NO: 1119118 - RNA, 19 nt, Artificial Sequence
  Description of Artificial Sequence: Synthetic oligonucleotide
  Sense strand starting at position 2936 of SEQ ID NO: 915955
agagguaucuaacuaguaa

SEQ ID NO: 1119119 - RNA, 19 nt, Artificial Sequence
  Description of Artificial Sequence: Synthetic oligonucleotide
  Antisense strand to SEQ ID NO: 1119118
uuacuaguuagauaccucu

SEQ ID NO: 1119120 - RNA, 19 nt, Artificial Sequence
  Description of Artificial Sequence: Synthetic oligonucleotide
  Sense strand starting at position 3213 of SEQ ID NO: 915955
ggcugugugcuguuggaac

SEQ ID NO: 1119121 - RNA, 19 nt, Artificial Sequence
  Description of Artificial Sequence: Synthetic oligonucleotide
  Antisense strand to SEQ ID NO: 1119120
guuccaacagcacacagcc

SEQ ID NO: 1119122 - RNA, 19 nt, Artificial Sequence
  Description of Artificial Sequence: Synthetic oligonucleotide
  Sense strand starting at position 3507 of SEQ ID NO: 915955
ucaucaguaccuggagcaa

SEQ ID NO: 1119123 - RNA, 19 nt, Artificial Sequence
  Description of Artificial Sequence: Synthetic oligonucleotide
  Antisense strand to SEQ ID NO: 1119122
uugcuccagguacugauga

SEQ ID NO: 1119124 - RNA, 19 nt, Artificial Sequence
  Description of Artificial Sequence: Synthetic oligonucleotide
  Sense strand starting at position 3569 of SEQ ID NO: 915955
ggaucaacucacgguuaua

SEQ ID NO: 1119125 - RNA, 19 nt, Artificial Sequence
  Description of Artificial Sequence: Synthetic oligonucleotide
  Antisense strand to SEQ ID NO: 1119124
uauaaccgugaguugaucc

SEQ ID NO: 1119126 - RNA, 19 nt, Artificial Sequence
  Description of Artificial Sequence: Synthetic oligonucleotide
  Sense strand starting at position 3572 of SEQ ID NO: 915955
ucaacucacgguuauaaac

SEQ ID NO: 1119127 - RNA, 19 nt, Artificial Sequence
  Description of Artificial Sequence: Synthetic oligonucleotide
  Antisense strand to SEQ ID NO: 1119126
guuuauaaccgugaguuga

SEQ ID NO: 1119128 - RNA, 19 nt, Artificial Sequence
  Description of Artificial Sequence: Synthetic oligonucleotide
  Sense strand starting at position 3631 of SEQ ID NO: 915955
cgauucucauaauucugaa

SEQ ID NO: 1119129 - RNA, 19 nt, Artificial Sequence
  Description of Artificial Sequence: Synthetic oligonucleotide
  Antisense strand to SEQ ID NO: 1119128
uucagaauuaugagaaucg

SEQ ID NO: 1119130 - RNA, 19 nt, Artificial Sequence
  Description of Artificial Sequence: Synthetic oligonucleotide
  Sense strand starting at position 3749 of SEQ ID NO: 915955
ucuaguaagcaucaaagau

SEQ ID NO: 1119131 - RNA, 19 nt, Artificial Sequence
  Description of Artificial Sequence: Synthetic oligonucleotide
  Antisense strand to SEQ ID NO: 1119130
aucuuugaugcuuacuaga

SEQ ID NO: 1119132 - RNA, 19 nt, Artificial Sequence
  Description of Artificial Sequence: Synthetic oligonucleotide
  Sense strand starting at position 3874 of SEQ ID NO: 915955
gaguaaucauccucauagg

SEQ ID NO: 1119133 - RNA, 19 nt, Artificial Sequence
  Description of Artificial Sequence: Synthetic oligonucleotide
  Antisense strand to SEQ ID NO: 1119132
ccuaugaggaugauuacuc

SEQ ID NO: 1119134 - RNA, 19 nt, Artificial Sequence
  Description of Artificial Sequence: Synthetic oligonucleotide
  Sense strand starting at position 5 of SEQ ID NO: 915956
aaggcaggguucucaauaa

SEQ ID NO: 1119135 - RNA, 19 nt, Artificial Sequence
  Description of Artificial Sequence: Synthetic oligonucleotide
  Antisense strand to SEQ ID NO: 1119134
uuauugagaacccugccuu

SEQ ID NO: 1119136 - RNA, 19 nt, Artificial Sequence
  Description of Artificial Sequence: Synthetic oligonucleotide
  Sense strand starting at position 95 of SEQ ID NO: 915956
uuaagaaaccguugguaaa

SEQ ID NO: 1119137 - RNA, 19 nt, Artificial Sequence
  Description of Artificial Sequence: Synthetic oligonucleotide
  Antisense strand to SEQ ID NO: 1119136
uuuaccaacgguuucuuaa

SEQ ID NO: 1119138 - RNA, 19 nt, Artificial Sequence
  Description of Artificial Sequence: Synthetic oligonucleotide
  Sense strand starting at position 165 of SEQ ID NO: 915956
agagguuguggucaugaga

SEQ ID NO: 1119139 - RNA, 19 nt, Artificial Sequence
  Description of Artificial Sequence: Synthetic oligonucleotide
  Antisense strand to SEQ ID NO: 1119138
ucucaugaccacaaccucu

SEQ ID NO: 1119140 - RNA, 19 nt, Artificial Sequence
  Description of Artificial Sequence: Synthetic oligonucleotide
  Sense strand starting at position 200 of SEQ ID NO: 915956
ggaguaagaaaguguuaga

SEQ ID NO: 1119141 - RNA, 19 nt, Artificial Sequence
  Description of Artificial Sequence: Synthetic oligonucleotide
  Antisense strand to SEQ ID NO: 1119140
ucuaacacuuucuuacucc

SEQ ID NO: 1119142 - RNA, 19 nt, Artificial Sequence
  Description of Artificial Sequence: Synthetic oligonucleotide
  Sense strand starting at position 483 of SEQ ID NO: 915956
auacuuaucugaucauguu

SEQ ID NO: 1119143 - RNA, 19 nt, Artificial Sequence
  Description of Artificial Sequence: Synthetic oligonucleotide
  Antisense strand to SEQ ID NO: 1119142
aacaugaucagauaaguau

SEQ ID NO: 1119144 - RNA, 19 nt, Artificial Sequence
  Description of Artificial Sequence: Synthetic oligonucleotide
  Sense strand starting at position 792 of SEQ ID NO: 915956
caguuaagccucuaggaag

SEQ ID NO: 1119145 - RNA, 19 nt, Artificial Sequence
  Description of Artificial Sequence: Synthetic oligonucleotide
  Antisense strand to SEQ ID NO: 1119144
cuuccuagaggcuuaacug

SEQ ID NO: 1119146 - RNA, 19 nt, Artificial Sequence
  Description of Artificial Sequence: Synthetic oligonucleotide
  Sense strand starting at position 940 of SEQ ID NO: 915956
aaggaauacugucuuguau

SEQ ID NO: 1119147 - RNA, 19 nt, Artificial Sequence
  Description of Artificial Sequence: Synthetic oligonucleotide
  Antisense strand to SEQ ID NO: 1119146
auacaagacaguauuccuu

SEQ ID NO: 1119148 - RNA, 19 nt, Artificial Sequence
  Description of Artificial Sequence: Synthetic oligonucleotide
  Sense strand starting at position 980 of SEQ ID NO: 915956
ugcgaauggcaagaacuaa

SEQ ID NO: 1119149 - RNA, 19 nt, Artificial Sequence
  Description of Artificial Sequence: Synthetic oligonucleotide
  Antisense strand to SEQ ID NO: 1119148
uuaguucuugccauucgca

SEQ ID NO: 1119150 - RNA, 19 nt, Artificial Sequence
  Description of Artificial Sequence: Synthetic oligonucleotide
  Sense strand starting at position 1184 of SEQ ID NO: 915956
guauguaggcuauacacaa

SEQ ID NO: 1119151 - RNA, 19 nt, Artificial Sequence
  Description of Artificial Sequence: Synthetic oligonucleotide
  Antisense strand to SEQ ID NO: 1119150
uuguguauagccuacauac

SEQ ID NO: 1119152 - RNA, 19 nt, Artificial Sequence
  Description of Artificial Sequence: Synthetic oligonucleotide
  Sense strand starting at position 1227 of SEQ ID NO: 915956
ugcaaagagauaggguauu

SEQ ID NO: 1119153 - RNA, 19 nt, Artificial Sequence
  Description of Artificial Sequence: Synthetic oligonucleotide
  Antisense strand to SEQ ID NO: 1119152
aauacccuaucucuuugca

SEQ ID NO: 1119154 - RNA, 19 nt, Artificial Sequence
  Description of Artificial Sequence: Synthetic oligonucleotide
  Sense strand starting at position 1327 of SEQ ID NO: 915956
agguauauucuaugaugua

SEQ ID NO: 1119155 - RNA, 19 nt, Artificial Sequence
  Description of Artificial Sequence: Synthetic oligonucleotide
  Antisense strand to SEQ ID NO: 1119154
uacaucauagaauauaccu

SEQ ID NO: 1119156 - RNA, 19 nt, Artificial Sequence
  Description of Artificial Sequence: Synthetic oligonucleotide
  Sense strand starting at position 1408 of SEQ ID NO: 915956
ccagaagaaugcucauaua

SEQ ID NO: 1119157 - RNA, 19 nt, Artificial Sequence
  Description of Artificial Sequence: Synthetic oligonucleotide
  Antisense strand to SEQ ID NO: 1119156
uauaugagcauucuucugg

SEQ ID NO: 1119158 - RNA, 19 nt, Artificial Sequence
  Description of Artificial Sequence: Synthetic oligonucleotide
  Sense strand starting at position 1469 of SEQ ID NO: 915956
guauuaguaggagaauagu

SEQ ID NO: 1119159 - RNA, 19 nt, Artificial Sequence
  Description of Artificial Sequence: Synthetic oligonucleotide
  Antisense strand to SEQ ID NO: 1119158
acuauucuccuacuaauac

SEQ ID NO: 1119160 - RNA, 19 nt, Artificial Sequence
  Description of Artificial Sequence: Synthetic oligonucleotide
  Sense strand starting at position 1726 of SEQ ID NO: 915956
cgugaaauccaggaagguu

SEQ ID NO: 1119161 - RNA, 19 nt, Artificial Sequence
  Description of Artificial Sequence: Synthetic oligonucleotide
  Antisense strand to SEQ ID NO: 1119160
aaccuuccuggauuucacg

SEQ ID NO: 1119162 - RNA, 19 nt, Artificial Sequence
  Description of Artificial Sequence: Synthetic oligonucleotide
  Sense strand starting at position 1734 of SEQ ID NO: 915956
ccaggaagguuucccauaa

SEQ ID NO: 1119163 - RNA, 19 nt, Artificial Sequence
  Description of Artificial Sequence: Synthetic oligonucleotide
  Antisense strand to SEQ ID NO: 1119162
uuaugggaaaccuuccugg

SEQ ID NO: 1119164 - RNA, 19 nt, Artificial Sequence
  Description of Artificial Sequence: Synthetic oligonucleotide
  Sense strand starting at position 1735 of SEQ ID NO: 915956
caggaagguuucccauaag

SEQ ID NO: 1119165 - RNA, 19 nt, Artificial Sequence
  Description of Artificial Sequence: Synthetic oligonucleotide
  Antisense strand to SEQ ID NO: 1119164
cuuaugggaaaccuuccug

SEQ ID NO: 1119166 - RNA, 19 nt, Artificial Sequence
  Description of Artificial Sequence: Synthetic oligonucleotide
  Sense strand starting at position 2153 of SEQ ID NO: 915956
ggugcaauaagguguauuu

SEQ ID NO: 1119167 - RNA, 19 nt, Artificial Sequence
  Description of Artificial Sequence: Synthetic oligonucleotide
  Antisense strand to SEQ ID NO: 1119166
aaauacaccuuauugcacc

SEQ ID NO: 1119168 - RNA, 19 nt, Artificial Sequence
  Description of Artificial Sequence: Synthetic oligonucleotide
  Sense strand starting at position 2200 of SEQ ID NO: 915956
ggcaaauccgccguuguga

SEQ ID NO: 1119169 - RNA, 19 nt, Artificial Sequence
  Description of Artificial Sequence: Synthetic oligonucleotide
  Antisense strand to SEQ ID NO: 1119168
ucacaacggcggauuugcc

SEQ ID NO: 1119170 - RNA, 19 nt, Artificial Sequence
  Description of Artificial Sequence: Synthetic oligonucleotide
  Sense strand starting at position 2487 of SEQ ID NO: 915956
uggguaguuccugacauuc

SEQ ID NO: 1119171 - RNA, 19 nt, Artificial Sequence
  Description of Artificial Sequence: Synthetic oligonucleotide
  Antisense strand to SEQ ID NO: 1119170
gaaugucaggaacuaccca

SEQ ID NO: 1119172 - RNA, 19 nt, Artificial Sequence
  Description of Artificial Sequence: Synthetic oligonucleotide
  Sense strand starting at position 2550 of SEQ ID NO: 915956
gggaaaggaucgaguaaga

SEQ ID NO: 1119173 - RNA, 19 nt, Artificial Sequence
  Description of Artificial Sequence: Synthetic oligonucleotide
  Antisense strand to SEQ ID NO: 1119172
ucuuacucgauccuuuccc

SEQ ID NO: 1119174 - RNA, 19 nt, Artificial Sequence
  Description of Artificial Sequence: Synthetic oligonucleotide
  Sense strand starting at position 2595 of SEQ ID NO: 915956
gauggacgguuaucaagaa

SEQ ID NO: 1119175 - RNA, 19 nt, Artificial Sequence
  Description of Artificial Sequence: Synthetic oligonucleotide
  Antisense strand to SEQ ID NO: 1119174
uucuugauaaccguccauc

SEQ ID NO: 1119176 - RNA, 19 nt, Artificial Sequence
  Description of Artificial Sequence: Synthetic oligonucleotide
  Sense strand starting at position 2760 of SEQ ID NO: 915956
gcccaauuauguguuauuu

SEQ ID NO: 1119177 - RNA, 19 nt, Artificial Sequence
  Description of Artificial Sequence: Synthetic oligonucleotide
  Antisense strand to SEQ ID NO: 1119176
aaauaacacauaauugggc

SEQ ID NO: 1119178 - RNA, 19 nt, Artificial Sequence
  Description of Artificial Sequence: Synthetic oligonucleotide
  Sense strand starting at position 2780 of SEQ ID NO: 915956
auuuguuuaucacuguagu

SEQ ID NO: 1119179 - RNA, 19 nt, Artificial Sequence
  Description of Artificial Sequence: Synthetic oligonucleotide
  Antisense strand to SEQ ID NO: 1119178
acuacagugauaaacaaau

SEQ ID NO: 1119180 - RNA, 19 nt, Artificial Sequence
  Description of Artificial Sequence: Synthetic oligonucleotide
  Sense strand starting at position 2850 of SEQ ID NO: 915956
acguauagaggguaaguua

SEQ ID NO: 1119181 - RNA, 19 nt, Artificial Sequence
  Description of Artificial Sequence: Synthetic oligonucleotide
  Antisense strand to SEQ ID NO: 1119180
uaacuuacccucuauacgu

SEQ ID NO: 1119182 - RNA, 19 nt, Artificial Sequence
  Description of Artificial Sequence: Synthetic oligonucleotide
  Sense strand starting at position 2938 of SEQ ID NO: 915956
gugcuuuccaucgugguau

SEQ ID NO: 1119183 - RNA, 19 nt, Artificial Sequence
  Description of Artificial Sequence: Synthetic oligonucleotide
  Antisense strand to SEQ ID NO: 1119182
auaccacgauggaaagcac

SEQ ID NO: 1119184 - RNA, 19 nt, Artificial Sequence
  Description of Artificial Sequence: Synthetic oligonucleotide
  Sense strand starting at position 2951 of SEQ ID NO: 915956
ugguauuagaaacgauucu

SEQ ID NO: 1119185 - RNA, 19 nt, Artificial Sequence
  Description of Artificial Sequence: Synthetic oligonucleotide
  Antisense strand to SEQ ID NO: 1119184
agaaucguuucuaauacca

SEQ ID NO: 1119186 - RNA, 19 nt, Artificial Sequence
  Description of Artificial Sequence: Synthetic oligonucleotide
  Sense strand starting at position 2952 of SEQ ID NO: 915956
gguauuagaaacgauucuu

SEQ ID NO: 1119187 - RNA, 19 nt, Artificial Sequence
  Description of Artificial Sequence: Synthetic oligonucleotide
  Antisense strand to SEQ ID NO: 1119186
aagaaucguuucuaauacc

SEQ ID NO: 1119188 - RNA, 19 nt, Artificial Sequence
  Description of Artificial Sequence: Synthetic oligonucleotide
  Sense strand starting at position 3116 of SEQ ID NO: 915956
gaaauaugagagugcgaaa

SEQ ID NO: 1119189 - RNA, 19 nt, Artificial Sequence
  Description of Artificial Sequence: Synthetic oligonucleotide
  Antisense strand to SEQ ID NO: 1119188
uuucgcacucucauauuuc

SEQ ID NO: 1119190 - RNA, 19 nt, Artificial Sequence
  Description of Artificial Sequence: Synthetic oligonucleotide
  Sense strand starting at position 3162 of SEQ ID NO: 915956
guuaauaugugacucugag

SEQ ID NO: 1119191 - RNA, 19 nt, Artificial Sequence
  Description of Artificial Sequence: Synthetic oligonucleotide
  Antisense strand to SEQ ID NO: 1119190
cucagagucacauauuaac

SEQ ID NO: 1119192 - RNA, 19 nt, Artificial Sequence
  Description of Artificial Sequence: Synthetic oligonucleotide
  Sense strand starting at position 3262 of SEQ ID NO: 915956
agucuaaugcuauaggauu

SEQ ID NO: 1119193 - RNA, 19 nt, Artificial Sequence
  Description of Artificial Sequence: Synthetic oligonucleotide
  Antisense strand to SEQ ID NO: 1119192
aauccuauagcauuagacu

SEQ ID NO: 1119194 - RNA, 19 nt, Artificial Sequence
  Description of Artificial Sequence: Synthetic oligonucleotide
  Sense strand starting at position 3424 of SEQ ID NO: 915956
agaggaaucuaaguuugcu

SEQ ID NO: 1119195 - RNA, 19 nt, Artificial Sequence
  Description of Artificial Sequence: Synthetic oligonucleotide
  Antisense strand to SEQ ID NO: 1119194
agcaaacuuagauuccucu

SEQ ID NO: 1119196 - RNA, 19 nt, Artificial Sequence
  Description of Artificial Sequence: Synthetic oligonucleotide
  Sense strand starting at position 3459 of SEQ ID NO: 915956
gcuguugguggagaauaaa

SEQ ID NO: 1119197 - RNA, 19 nt, Artificial Sequence
  Description of Artificial Sequence: Synthetic oligonucleotide
  Antisense strand to SEQ ID NO: 1119196
uuuauucuccaccaacagc

SEQ ID NO: 1119198 - RNA, 19 nt, Artificial Sequence
  Description of Artificial Sequence: Synthetic oligonucleotide
  Sense strand starting at position 3516 of SEQ ID NO: 915956
gguauuauaucauuggaga

SEQ ID NO: 1119199 - RNA, 19 nt, Artificial Sequence
  Description of Artificial Sequence: Synthetic oligonucleotide
  Antisense strand to SEQ ID NO: 1119198
ucuccaaugauauaauacc

SEQ ID NO: 1119200 - RNA, 19 nt, Artificial Sequence
  Description of Artificial Sequence: Synthetic oligonucleotide
  Sense strand starting at position 3517 of SEQ ID NO: 915956
guauuauaucauuggagag

SEQ ID NO: 1119201 - RNA, 19 nt, Artificial Sequence
  Description of Artificial Sequence: Synthetic oligonucleotide
  Antisense strand to SEQ ID NO: 1119200
cucuccaaugauauaauac

SEQ ID NO: 1119202 - RNA, 19 nt, Artificial Sequence
  Description of Artificial Sequence: Synthetic oligonucleotide
  Sense strand starting at position 3577 of SEQ ID NO: 915956
agaugaauuugggauguau

SEQ ID NO: 1119203 - RNA, 19 nt, Artificial Sequence
  Description of Artificial Sequence: Synthetic oligonucleotide
  Antisense strand to SEQ ID NO: 1119202
auacaucccaaauucaucu

SEQ ID NO: 1119204 - RNA, 19 nt, Artificial Sequence
  Description of Artificial Sequence: Synthetic oligonucleotide
  Sense strand starting at position 3650 of SEQ ID NO: 915956
aagaaagaaucagagauga

SEQ ID NO: 1119205 - RNA, 19 nt, Artificial Sequence
  Description of Artificial Sequence: Synthetic oligonucleotide
  Antisense strand to SEQ ID NO: 1119204
ucaucucugauucuuucuu

SEQ ID NO: 1119206 - RNA, 19 nt, Artificial Sequence
  Description of Artificial Sequence: Synthetic oligonucleotide
  Sense strand starting at position 3698 of SEQ ID NO: 915956
gauggaugaucuuuguauu

SEQ ID NO: 1119207 - RNA, 19 nt, Artificial Sequence
  Description of Artificial Sequence: Synthetic oligonucleotide
  Antisense strand to SEQ ID NO: 1119206
aauacaaagaucauccauc

SEQ ID NO: 1119208 - RNA, 19 nt, Artificial Sequence
  Description of Artificial Sequence: Synthetic oligonucleotide
  Sense strand starting at position 3824 of SEQ ID NO: 915956
ucauaaucccuuuguaagg

SEQ ID NO: 1119209 - RNA, 19 nt, Artificial Sequence
  Description of Artificial Sequence: Synthetic oligonucleotide
  Antisense strand to SEQ ID NO: 1119208
ccuuacaaagggauuauga

SEQ ID NO: 1119210 - RNA, 19 nt, Artificial Sequence
  Description of Artificial Sequence: Synthetic oligonucleotide
  Sense strand starting at position 3840 of SEQ ID NO: 915956
aggaacagcaguuguuaaa

SEQ ID NO: 1119211 - RNA, 19 nt, Artificial Sequence
  Description of Artificial Sequence: Synthetic oligonucleotide
  Antisense strand to SEQ ID NO: 1119210
uuuaacaacugcuguuccu

SEQ ID NO: 1119212 - RNA, 19 nt, Artificial Sequence
  Description of Artificial Sequence: Synthetic oligonucleotide
  Sense strand starting at position 3885 of SEQ ID NO: 915956
ccuggaaacuucucuagag

SEQ ID NO: 1119213 - RNA, 19 nt, Artificial Sequence
  Description of Artificial Sequence: Synthetic oligonucleotide
  Antisense strand to SEQ ID NO: 1119212
cucuagagaaguuuccagg

SEQ ID NO: 1119214 - RNA, 19 nt, Artificial Sequence
  Description of Artificial Sequence: Synthetic oligonucleotide
  Sense strand starting at position 45 of SEQ ID NO: 915957
ccacaucagaguugagaug

SEQ ID NO: 1119215 - RNA, 19 nt, Artificial Sequence
  Description of Artificial Sequence: Synthetic oligonucleotide
  Antisense strand to SEQ ID NO: 1119214
caucucaacucugaugugg

SEQ ID NO: 1119216 - RNA, 19 nt, Artificial Sequence
  Description of Artificial Sequence: Synthetic oligonucleotide
  Sense strand starting at position 339 of SEQ ID NO: 915957
aagacauacuuuguguaug

SEQ ID NO: 1119217 - RNA, 19 nt, Artificial Sequence
  Description of Artificial Sequence: Synthetic oligonucleotide
  Antisense strand to SEQ ID NO: 1119216
cauacacaaaguaugucuu

SEQ ID NO: 1119218 - RNA, 19 nt, Artificial Sequence
  Description of Artificial Sequence: Synthetic oligonucleotide
  Sense strand starting at position 495 of SEQ ID NO: 915957
gggagauguaaccauguuu

SEQ ID NO: 1119219 - RNA, 19 nt, Artificial Sequence
  Description of Artificial Sequence: Synthetic oligonucleotide
  Antisense strand to SEQ ID NO: 1119218
aaacaugguuacaucuccc

SEQ ID NO: 1119220 - RNA, 19 nt, Artificial Sequence
  Description of Artificial Sequence: Synthetic oligonucleotide
  Sense strand starting at position 500 of SEQ ID NO: 915957
auguaaccauguuucuuaa

SEQ ID NO: 1119221 - RNA, 19 nt, Artificial Sequence
  Description of Artificial Sequence: Synthetic oligonucleotide
  Antisense strand to SEQ ID NO: 1119220
uuaagaaacaugguuacau

SEQ ID NO: 1119222 - RNA, 19 nt, Artificial Sequence
  Description of Artificial Sequence: Synthetic oligonucleotide
  Sense strand starting at position 502 of SEQ ID NO: 915957
guaaccauguuucuuaaac

SEQ ID NO: 1119223 - RNA, 19 nt, Artificial Sequence
  Description of Artificial Sequence: Synthetic oligonucleotide
  Antisense strand to SEQ ID NO: 1119222
guuuaagaaacaugguuac

SEQ ID NO: 1119224 - RNA, 19 nt, Artificial Sequence
  Description of Artificial Sequence: Synthetic oligonucleotide
  Sense strand starting at position 531 of SEQ ID NO: 915957
cuaauaucuccagaugcug

SEQ ID NO: 1119225 - RNA, 19 nt, Artificial Sequence
  Description of Artificial Sequence: Synthetic oligonucleotide
  Antisense strand to SEQ ID NO: 1119224
cagcaucuggagauauuag

SEQ ID NO: 1119226 - RNA, 19 nt, Artificial Sequence
  Description of Artificial Sequence: Synthetic oligonucleotide
  Sense strand starting at position 677 of SEQ ID NO: 915957
guuugugauauaugacaga

SEQ ID NO: 1119227 - RNA, 19 nt, Artificial Sequence
  Description of Artificial Sequence: Synthetic oligonucleotide
  Antisense strand to SEQ ID NO: 1119226
ucugucauauaucacaaac

SEQ ID NO: 1119228 - RNA, 19 nt, Artificial Sequence
  Description of Artificial Sequence: Synthetic oligonucleotide
  Sense strand starting at position 823 of SEQ ID NO: 915957
uguugaagccuguaaguaa

SEQ ID NO: 1119229 - RNA, 19 nt, Artificial Sequence
  Description of Artificial Sequence: Synthetic oligonucleotide
  Antisense strand to SEQ ID NO: 1119228
uuacuuacaggcuucaaca

SEQ ID NO: 1119230 - RNA, 19 nt, Artificial Sequence
  Description of Artificial Sequence: Synthetic oligonucleotide
  Sense strand starting at position 826 of SEQ ID NO: 915957
ugaagccuguaaguaaauu

SEQ ID NO: 1119231 - RNA, 19 nt, Artificial Sequence
  Description of Artificial Sequence: Synthetic oligonucleotide
  Antisense strand to SEQ ID NO: 1119230
aauuuacuuacaggcuuca

SEQ ID NO: 1119232 - RNA, 19 nt, Artificial Sequence
  Description of Artificial Sequence: Synthetic oligonucleotide
  Sense strand starting at position 861 of SEQ ID NO: 915957
guacgucugcugccagaac

SEQ ID NO: 1119233 - RNA, 19 nt, Artificial Sequence
  Description of Artificial Sequence: Synthetic oligonucleotide
  Antisense strand to SEQ ID NO: 1119232
guucuggcagcagacguac

SEQ ID NO: 1119234 - RNA, 19 nt, Artificial Sequence
  Description of Artificial Sequence: Synthetic oligonucleotide
  Sense strand starting at position 1005 of SEQ ID NO: 915957
uccgauaaauucuuuagaa

SEQ ID NO: 1119235 - RNA, 19 nt, Artificial Sequence
  Description of Artificial Sequence: Synthetic oligonucleotide
  Antisense strand to SEQ ID NO: 1119234
uucuaaagaauuuaucgga

SEQ ID NO: 1119236 - RNA, 19 nt, Artificial Sequence
  Description of Artificial Sequence: Synthetic oligonucleotide
  Sense strand starting at position 1006 of SEQ ID NO: 915957
ccgauaaauucuuuagaau

SEQ ID NO: 1119237 - RNA, 19 nt, Artificial Sequence
  Description of Artificial Sequence: Synthetic oligonucleotide
  Antisense strand to SEQ ID NO: 1119236
auucuaaagaauuuaucgg

SEQ ID NO: 1119238 - RNA, 19 nt, Artificial Sequence
  Description of Artificial Sequence: Synthetic oligonucleotide
  Sense strand starting at position 1239 of SEQ ID NO: 915957
gcuuuaugugaucaauccu

SEQ ID NO: 1119239 - RNA, 19 nt, Artificial Sequence
  Description of Artificial Sequence: Synthetic oligonucleotide
  Antisense strand to SEQ ID NO: 1119238
aggauugaucacauaaagc

SEQ ID NO: 1119240 - RNA, 19 nt, Artificial Sequence
  Description of Artificial Sequence: Synthetic oligonucleotide
  Sense strand starting at position 1362 of SEQ ID NO: 915957
gugcccugccauugauuua

SEQ ID NO: 1119241 - RNA, 19 nt, Artificial Sequence
  Description of Artificial Sequence: Synthetic oligonucleotide
  Antisense strand to SEQ ID NO: 1119240
uaaaucaauggcagggcac

SEQ ID NO: 1119242 - RNA, 19 nt, Artificial Sequence
  Description of Artificial Sequence: Synthetic oligonucleotide
  Sense strand starting at position 1509 of SEQ ID NO: 915957
gccucauuacaguaacaga

SEQ ID NO: 1119243 - RNA, 19 nt, Artificial Sequence
  Description of Artificial Sequence: Synthetic oligonucleotide
  Antisense strand to SEQ ID NO: 1119242
ucuguuacuguaaugaggc

SEQ ID NO: 1119244 - RNA, 19 nt, Artificial Sequence
  Description of Artificial Sequence: Synthetic oligonucleotide
  Sense strand starting at position 1561 of SEQ ID NO: 915957
agggaagguuacucacagu

SEQ ID NO: 1119245 - RNA, 19 nt, Artificial Sequence
  Description of Artificial Sequence: Synthetic oligonucleotide
  Antisense strand to SEQ ID NO: 1119244
acugugaguaaccuucccu

SEQ ID NO: 1119246 - RNA, 19 nt, Artificial Sequence
  Description of Artificial Sequence: Synthetic oligonucleotide
  Sense strand starting at position 1618 of SEQ ID NO: 915957
gggagaagcugaguuacuu

SEQ ID NO: 1119247 - RNA, 19 nt, Artificial Sequence
  Description of Artificial Sequence: Synthetic oligonucleotide
  Antisense strand to SEQ ID NO: 1119246
aaguaacucagcuucuccc

SEQ ID NO: 1119248 - RNA, 19 nt, Artificial Sequence
  Description of Artificial Sequence: Synthetic oligonucleotide
  Sense strand starting at position 1645 of SEQ ID NO: 915957
ggaguagagauaugguucu

SEQ ID NO: 1119249 - RNA, 19 nt, Artificial Sequence
  Description of Artificial Sequence: Synthetic oligonucleotide
  Antisense strand to SEQ ID NO: 1119248
agaaccauaucucuacucc

SEQ ID NO: 1119250 - RNA, 19 nt, Artificial Sequence
  Description of Artificial Sequence: Synthetic oligonucleotide
  Sense strand starting at position 1677 of SEQ ID NO: 915957
cgauuuggauaacaauaaa

SEQ ID NO: 1119251 - RNA, 19 nt, Artificial Sequence
  Description of Artificial Sequence: Synthetic oligonucleotide
  Antisense strand to SEQ ID NO: 1119250
uuuauuguuauccaaaucg

SEQ ID NO: 1119252 - RNA, 19 nt, Artificial Sequence
  Description of Artificial Sequence: Synthetic oligonucleotide
  Sense strand starting at position 1758 of SEQ ID NO: 915957
agaggagucguaggaauga

SEQ ID NO: 1119253 - RNA, 19 nt, Artificial Sequence
  Description of Artificial Sequence: Synthetic oligonucleotide
  Antisense strand to SEQ ID NO: 1119252
ucauuccuacgacuccucu

SEQ ID NO: 1119254 - RNA, 19 nt, Artificial Sequence
  Description of Artificial Sequence: Synthetic oligonucleotide
  Sense strand starting at position 2346 of SEQ ID NO: 915957
uuuaauacuccguaaacag

SEQ ID NO: 1119255 - RNA, 19 nt, Artificial Sequence
  Description of Artificial Sequence: Synthetic oligonucleotide
  Antisense strand to SEQ ID NO: 1119254
cuguuuacggaguauuaaa

SEQ ID NO: 1119256 - RNA, 19 nt, Artificial Sequence
  Description of Artificial Sequence: Synthetic oligonucleotide
  Sense strand starting at position 2357 of SEQ ID NO: 915957
guaaacagguguuuauaag

SEQ ID NO: 1119257 - RNA, 19 nt, Artificial Sequence
  Description of Artificial Sequence: Synthetic oligonucleotide
  Antisense strand to SEQ ID NO: 1119256
cuuauaaacaccuguuuac

SEQ ID NO: 1119258 - RNA, 19 nt, Artificial Sequence
  Description of Artificial Sequence: Synthetic oligonucleotide
  Sense strand starting at position 2832 of SEQ ID NO: 915957
ugcuauuuguuucuguauu

SEQ ID NO: 1119259 - RNA, 19 nt, Artificial Sequence
  Description of Artificial Sequence: Synthetic oligonucleotide
  Antisense strand to SEQ ID NO: 1119258
aauacagaaacaaauagca

SEQ ID NO: 1119260 - RNA, 19 nt, Artificial Sequence
  Description of Artificial Sequence: Synthetic oligonucleotide
  Sense strand starting at position 2853 of SEQ ID NO: 915957
guuuguauauccuuacaaa

SEQ ID NO: 1119261 - RNA, 19 nt, Artificial Sequence
  Description of Artificial Sequence: Synthetic oligonucleotide
  Antisense strand to SEQ ID NO: 1119260
uuuguaaggauauacaaac

SEQ ID NO: 1119262 - RNA, 19 nt, Artificial Sequence
  Description of Artificial Sequence: Synthetic oligonucleotide
  Sense strand starting at position 3029 of SEQ ID NO: 915957
uuuguuaagucauuggaaa

SEQ ID NO: 1119263 - RNA, 19 nt, Artificial Sequence
  Description of Artificial Sequence: Synthetic oligonucleotide
  Antisense strand to SEQ ID NO: 1119262
uuuccaaugacuuaacaaa

SEQ ID NO: 1119264 - RNA, 19 nt, Artificial Sequence
  Description of Artificial Sequence: Synthetic oligonucleotide
  Sense strand starting at position 3064 of SEQ ID NO: 915957
gauuaugucccaggguaga

SEQ ID NO: 1119265 - RNA, 19 nt, Artificial Sequence
  Description of Artificial Sequence: Synthetic oligonucleotide
  Antisense strand to SEQ ID NO: 1119264
ucuacccugggacauaauc

SEQ ID NO: 1119266 - RNA, 19 nt, Artificial Sequence
  Description of Artificial Sequence: Synthetic oligonucleotide
  Sense strand starting at position 3074 of SEQ ID NO: 915957
caggguagauaucuuguuu

SEQ ID NO: 1119267 - RNA, 19 nt, Artificial Sequence
  Description of Artificial Sequence: Synthetic oligonucleotide
  Antisense strand to SEQ ID NO: 1119266
aaacaagauaucuacccug

SEQ ID NO: 1119268 - RNA, 19 nt, Artificial Sequence
  Description of Artificial Sequence: Synthetic oligonucleotide
  Sense strand starting at position 3186 of SEQ ID NO: 915957
gacuuugacauggaguugu

SEQ ID NO: 1119269 - RNA, 19 nt, Artificial Sequence
  Description of Artificial Sequence: Synthetic oligonucleotide
  Antisense strand to SEQ ID NO: 1119268
acaacuccaugucaaaguc

SEQ ID NO: 1119270 - RNA, 19 nt, Artificial Sequence
  Description of Artificial Sequence: Synthetic oligonucleotide
  Sense strand starting at position 3312 of SEQ ID NO: 915957
gaaauaauuugcuaaggga

SEQ ID NO: 1119271 - RNA, 19 nt, Artificial Sequence
  Description of Artificial Sequence: Synthetic oligonucleotide
  Antisense strand to SEQ ID NO: 1119270
ucccuuagcaaauuauuuc

SEQ ID NO: 1119272 - RNA, 19 nt, Artificial Sequence
  Description of Artificial Sequence: Synthetic oligonucleotide
  Sense strand starting at position 3344 of SEQ ID NO: 915957
ucuuuauugugaguaaagg

SEQ ID NO: 1119273 - RNA, 19 nt, Artificial Sequence
  Description of Artificial Sequence: Synthetic oligonucleotide
  Antisense strand to SEQ ID NO: 1119272
ccuuuacucacaauaaaga

SEQ ID NO: 1119274 - RNA, 19 nt, Artificial Sequence
  Description of Artificial Sequence: Synthetic oligonucleotide
  Sense strand starting at position 3350 of SEQ ID NO: 915957
uugugaguaaagggacaua

SEQ ID NO: 1119275 - RNA, 19 nt, Artificial Sequence
  Description of Artificial Sequence: Synthetic oligonucleotide
  Antisense strand to SEQ ID NO: 1119274
uaugucccuuuacucacaa

SEQ ID NO: 1119276 - RNA, 19 nt, Artificial Sequence
  Description of Artificial Sequence: Synthetic oligonucleotide
  Sense strand starting at position 3369 of SEQ ID NO: 915957
aggagagguugaccaaguu

SEQ ID NO: 1119277 - RNA, 19 nt, Artificial Sequence
  Description of Artificial Sequence: Synthetic oligonucleotide
  Antisense strand to SEQ ID NO: 1119276
aacuuggucaaccucuccu

SEQ ID NO: 1119278 - RNA, 19 nt, Artificial Sequence
  Description of Artificial Sequence: Synthetic oligonucleotide
  Sense strand starting at position 3379 of SEQ ID NO: 915957
gaccaaguuguuggguaaa

SEQ ID NO: 1119279 - RNA, 19 nt, Artificial Sequence
  Description of Artificial Sequence: Synthetic oligonucleotide
  Antisense strand to SEQ ID NO: 1119278
uuuacccaacaacuugguc

SEQ ID NO: 1119280 - RNA, 19 nt, Artificial Sequence
  Description of Artificial Sequence: Synthetic oligonucleotide
  Sense strand starting at position 3381 of SEQ ID NO: 915957
ccaaguuguuggguaaaga

SEQ ID NO: 1119281 - RNA, 19 nt, Artificial Sequence
  Description of Artificial Sequence: Synthetic oligonucleotide
  Antisense strand to SEQ ID NO: 1119280
ucuuuacccaacaacuugg

SEQ ID NO: 1119282 - RNA, 19 nt, Artificial Sequence
  Description of Artificial Sequence: Synthetic oligonucleotide
  Sense strand starting at position 3382 of SEQ ID NO: 915957
caaguuguuggguaaagaa

SEQ ID NO: 1119283 - RNA, 19 nt, Artificial Sequence
  Description of Artificial Sequence: Synthetic oligonucleotide
  Antisense strand to SEQ ID NO: 1119282
uucuuuacccaacaacuug

SEQ ID NO: 1119284 - RNA, 19 nt, Artificial Sequence
  Description of Artificial Sequence: Synthetic oligonucleotide
  Sense strand starting at position 3658 of SEQ ID NO: 915957
auaauaaaugccugaagug

SEQ ID NO: 1119285 - RNA, 19 nt, Artificial Sequence
  Description of Artificial Sequence: Synthetic oligonucleotide
  Antisense strand to SEQ ID NO: 1119284
cacuucaggcauuuauuau

SEQ ID NO: 1119286 - RNA, 19 nt, Artificial Sequence
  Description of Artificial Sequence: Synthetic oligonucleotide
  Sense strand starting at position 3667 of SEQ ID NO: 915957
gccugaagugauggauacu

SEQ ID NO: 1119287 - RNA, 19 nt, Artificial Sequence
  Description of Artificial Sequence: Synthetic oligonucleotide
  Antisense strand to SEQ ID NO: 1119286
aguauccaucacuucaggc

SEQ ID NO: 1119288 - RNA, 19 nt, Artificial Sequence
  Description of Artificial Sequence: Synthetic oligonucleotide
  Sense strand starting at position 3846 of SEQ ID NO: 915957
uuacuagagucacuucuuu

SEQ ID NO: 1119289 - RNA, 19 nt, Artificial Sequence
  Description of Artificial Sequence: Synthetic oligonucleotide
  Antisense strand to SEQ ID NO: 1119288
aaagaagugacucuaguaa

SEQ ID NO: 1119290 - RNA, 19 nt, Artificial Sequence
  Description of Artificial Sequence: Synthetic oligonucleotide
  Sense strand starting at position 3973 of SEQ ID NO: 915957
ccuuaugaacuagguauua

SEQ ID NO: 1119291 - RNA, 19 nt, Artificial Sequence
  Description of Artificial Sequence: Synthetic oligonucleotide
  Antisense strand to SEQ ID NO: 1119290
uaauaccuaguucauaagg

SEQ ID NO: 1119292 - RNA, 19 nt, Artificial Sequence
  Description of Artificial Sequence: Synthetic oligonucleotide
  Sense strand starting at position 3982 of SEQ ID NO: 915957
cuagguauuagguaguuau

SEQ ID NO: 1119293 - RNA, 19 nt, Artificial Sequence
  Description of Artificial Sequence: Synthetic oligonucleotide
  Antisense strand to SEQ ID NO: 1119292
auaacuaccuaauaccuag

SEQ ID NO: 1119294 - RNA, 19 nt, Artificial Sequence
  Description of Artificial Sequence: Synthetic oligonucleotide
  Sense strand starting at position 28 of SEQ ID NO: 915958
ccuagaagagucuaaugcu

SEQ ID NO: 1119295 - RNA, 19 nt, Artificial Sequence
  Description of Artificial Sequence: Synthetic oligonucleotide
  Antisense strand to SEQ ID NO: 1119294
agcauuagacucuucuagg

SEQ ID NO: 1119296 - RNA, 19 nt, Artificial Sequence
  Description of Artificial Sequence: Synthetic oligonucleotide
  Sense strand starting at position 123 of SEQ ID NO: 915958
ggguacaugaggcaucauu

SEQ ID NO: 1119297 - RNA, 19 nt, Artificial Sequence
  Description of Artificial Sequence: Synthetic oligonucleotide
  Antisense strand to SEQ ID NO: 1119296
aaugaugccucauguaccc

SEQ ID NO: 1119298 - RNA, 19 nt, Artificial Sequence
  Description of Artificial Sequence: Synthetic oligonucleotide
  Sense strand starting at position 205 of SEQ ID NO: 915958
agguguuugugggcauaaa

SEQ ID NO: 1119299 - RNA, 19 nt, Artificial Sequence
  Description of Artificial Sequence: Synthetic oligonucleotide
  Antisense strand to SEQ ID NO: 1119298
uuuaugcccacaaacaccu

SEQ ID NO: 1119300 - RNA, 19 nt, Artificial Sequence
  Description of Artificial Sequence: Synthetic oligonucleotide
  Sense strand starting at position 206 of SEQ ID NO: 915958
gguguuugugggcauaaag

SEQ ID NO: 1119301 - RNA, 19 nt, Artificial Sequence
  Description of Artificial Sequence: Synthetic oligonucleotide
  Antisense strand to SEQ ID NO: 1119300
cuuuaugcccacaaacacc

SEQ ID NO: 1119302 - RNA, 19 nt, Artificial Sequence
  Description of Artificial Sequence: Synthetic oligonucleotide
  Sense strand starting at position 239 of SEQ ID NO: 915958
guuuauugugaagaguucu

SEQ ID NO: 1119303 - RNA, 19 nt, Artificial Sequence
  Description of Artificial Sequence: Synthetic oligonucleotide
  Antisense strand to SEQ ID NO: 1119302
agaacucuucacaauaaac

SEQ ID NO: 1119304 - RNA, 19 nt, Artificial Sequence
  Description of Artificial Sequence: Synthetic oligonucleotide
  Sense strand starting at position 245 of SEQ ID NO: 915958
ugugaagaguucuuucuuu

SEQ ID NO: 1119305 - RNA, 19 nt, Artificial Sequence
  Description of Artificial Sequence: Synthetic oligonucleotide
  Antisense strand to SEQ ID NO: 1119304
aaagaaagaacucuucaca

SEQ ID NO: 1119306 - RNA, 19 nt, Artificial Sequence
  Description of Artificial Sequence: Synthetic oligonucleotide
  Sense strand starting at position 698 of SEQ ID NO: 915958
gaauuuaugugacagcuau

SEQ ID NO: 1119307 - RNA, 19 nt, Artificial Sequence
  Description of Artificial Sequence: Synthetic oligonucleotide
  Antisense strand to SEQ ID NO: 1119306
auagcugucacauaaauuc

SEQ ID NO: 1119308 - RNA, 19 nt, Artificial Sequence
  Description of Artificial Sequence: Synthetic oligonucleotide
  Sense strand starting at position 702 of SEQ ID NO: 915958
uuaugugacagcuaugaag

SEQ ID NO: 1119309 - RNA, 19 nt, Artificial Sequence
  Description of Artificial Sequence: Synthetic oligonucleotide
  Antisense strand to SEQ ID NO: 1119308
cuucauagcugucacauaa

SEQ ID NO: 1119310 - RNA, 19 nt, Artificial Sequence
  Description of Artificial Sequence: Synthetic oligonucleotide
  Sense strand starting at position 704 of SEQ ID NO: 915958
augugacagcuaugaaguu

SEQ ID NO: 1119311 - RNA, 19 nt, Artificial Sequence
  Description of Artificial Sequence: Synthetic oligonucleotide
  Antisense strand to SEQ ID NO: 1119310
aacuucauagcugucacau

SEQ ID NO: 1119312 - RNA, 19 nt, Artificial Sequence
  Description of Artificial Sequence: Synthetic oligonucleotide
  Sense strand starting at position 766 of SEQ ID NO: 915958
aguauaagaucgccucaau

SEQ ID NO: 1119313 - RNA, 19 nt, Artificial Sequence
  Description of Artificial Sequence: Synthetic oligonucleotide
  Antisense strand to SEQ ID NO: 1119312
auugaggcgaucuuauacu

SEQ ID NO: 1119314 - RNA, 19 nt, Artificial Sequence
  Description of Artificial Sequence: Synthetic oligonucleotide
  Sense strand starting at position 884 of SEQ ID NO: 915958
acaguugucacagggagaa

SEQ ID NO: 1119315 - RNA, 19 nt, Artificial Sequence
  Description of Artificial Sequence: Synthetic oligonucleotide
  Antisense strand to SEQ ID NO: 1119314
uucucccugugacaacugu

SEQ ID NO: 1119316 - RNA, 19 nt, Artificial Sequence
  Description of Artificial Sequence: Synthetic oligonucleotide
  Sense strand starting at position 1075 of SEQ ID NO: 915958
uuccucuggucuuccaaga

SEQ ID NO: 1119317 - RNA, 19 nt, Artificial Sequence
  Description of Artificial Sequence: Synthetic oligonucleotide
  Antisense strand to SEQ ID NO: 1119316
ucuuggaagaccagaggaa

SEQ ID NO: 1119318 - RNA, 19 nt, Artificial Sequence
  Description of Artificial Sequence: Synthetic oligonucleotide
  Sense strand starting at position 1167 of SEQ ID NO: 915958
ggguuaagcguuuaucuca

SEQ ID NO: 1119319 - RNA, 19 nt, Artificial Sequence
  Description of Artificial Sequence: Synthetic oligonucleotide
  Antisense strand to SEQ ID NO: 1119318
ugagauaaacgcuuaaccc

SEQ ID NO: 1119320 - RNA, 19 nt, Artificial Sequence
  Description of Artificial Sequence: Synthetic oligonucleotide
  Sense strand starting at position 1175 of SEQ ID NO: 915958
cguuuaucucaauggaaau

SEQ ID NO: 1119321 - RNA, 19 nt, Artificial Sequence
  Description of Artificial Sequence: Synthetic oligonucleotide
  Antisense strand to SEQ ID NO: 1119320
auuuccauugagauaaacg

SEQ ID NO: 1119322 - RNA, 19 nt, Artificial Sequence
  Description of Artificial Sequence: Synthetic oligonucleotide
  Sense strand starting at position 1261 of SEQ ID NO: 915958
gggagagugucucuacaug

SEQ ID NO: 1119323 - RNA, 19 nt, Artificial Sequence
  Description of Artificial Sequence: Synthetic oligonucleotide
  Antisense strand to SEQ ID NO: 1119322
cauguagagacacucuccc

SEQ ID NO: 1119324 - RNA, 19 nt, Artificial Sequence
  Description of Artificial Sequence: Synthetic oligonucleotide
  Sense strand starting at position 1266 of SEQ ID NO: 915958
agugucucuacauguaaag

SEQ ID NO: 1119325 - RNA, 19 nt, Artificial Sequence
  Description of Artificial Sequence: Synthetic oligonucleotide
  Antisense strand to SEQ ID NO: 1119324
cuuuacauguagagacacu

SEQ ID NO: 1119326 - RNA, 19 nt, Artificial Sequence
  Description of Artificial Sequence: Synthetic oligonucleotide
  Sense strand starting at position 2131 of SEQ ID NO: 915958
ggaagccuucgacaucaga

SEQ ID NO: 1119327 - RNA, 19 nt, Artificial Sequence
  Description of Artificial Sequence: Synthetic oligonucleotide
  Antisense strand to SEQ ID NO: 1119326
ucugaugucgaaggcuucc

SEQ ID NO: 1119328 - RNA, 19 nt, Artificial Sequence
  Description of Artificial Sequence: Synthetic oligonucleotide
  Sense strand starting at position 2134 of SEQ ID NO: 915958
agccuucgacaucagaaua

SEQ ID NO: 1119329 - RNA, 19 nt, Artificial Sequence
  Description of Artificial Sequence: Synthetic oligonucleotide
  Antisense strand to SEQ ID NO: 1119328
uauucugaugucgaaggcu

SEQ ID NO: 1119330 - RNA, 19 nt, Artificial Sequence
  Description of Artificial Sequence: Synthetic oligonucleotide
  Sense strand starting at position 2187 of SEQ ID NO: 915958
ggaucccgauguuuaucaa

SEQ ID NO: 1119331 - RNA, 19 nt, Artificial Sequence
  Description of Artificial Sequence: Synthetic oligonucleotide
  Antisense strand to SEQ ID NO: 1119330
uugauaaacaucgggaucc

SEQ ID NO: 1119332 - RNA, 19 nt, Artificial Sequence
  Description of Artificial Sequence: Synthetic oligonucleotide
  Sense strand starting at position 2188 of SEQ ID NO: 915958
gaucccgauguuuaucaaa

SEQ ID NO: 1119333 - RNA, 19 nt, Artificial Sequence
  Description of Artificial Sequence: Synthetic oligonucleotide
  Antisense strand to SEQ ID NO: 1119332
uuugauaaacaucgggauc

SEQ ID NO: 1119334 - RNA, 19 nt, Artificial Sequence
  Description of Artificial Sequence: Synthetic oligonucleotide
  Sense strand starting at position 2230 of SEQ ID NO: 915958
gguacuucuggagguagua

SEQ ID NO: 1119335 - RNA, 19 nt, Artificial Sequence
  Description of Artificial Sequence: Synthetic oligonucleotide
  Antisense strand to SEQ ID NO: 1119334
uacuaccuccagaaguacc

SEQ ID NO: 1119336 - RNA, 19 nt, Artificial Sequence
  Description of Artificial Sequence: Synthetic oligonucleotide
  Sense strand starting at position 2281 of SEQ ID NO: 915958
cuacucaucugccucgaau

SEQ ID NO: 1119337 - RNA, 19 nt, Artificial Sequence
  Description of Artificial Sequence: Synthetic oligonucleotide
  Antisense strand to SEQ ID NO: 1119336
auucgaggcagaugaguag

SEQ ID NO: 1119338 - RNA, 19 nt, Artificial Sequence
  Description of Artificial Sequence: Synthetic oligonucleotide
  Sense strand starting at position 2284 of SEQ ID NO: 915958
cucaucugccucgaauugu

SEQ ID NO: 1119339 - RNA, 19 nt, Artificial Sequence
  Description of Artificial Sequence: Synthetic oligonucleotide
  Antisense strand to SEQ ID NO: 1119338
acaauucgaggcagaugag

SEQ ID NO: 1119340 - RNA, 19 nt, Artificial Sequence
  Description of Artificial Sequence: Synthetic oligonucleotide
  Sense strand starting at position 2324 of SEQ ID NO: 915958
uagugcauccaggaauaau

SEQ ID NO: 1119341 - RNA, 19 nt, Artificial Sequence
  Description of Artificial Sequence: Synthetic oligonucleotide
  Antisense strand to SEQ ID NO: 1119340
auuauuccuggaugcacua

SEQ ID NO: 1119342 - RNA, 19 nt, Artificial Sequence
  Description of Artificial Sequence: Synthetic oligonucleotide
  Sense strand starting at position 2417 of SEQ ID NO: 915958
ucaugcuaguugguuuaga

SEQ ID NO: 1119343 - RNA, 19 nt, Artificial Sequence
  Description of Artificial Sequence: Synthetic oligonucleotide
  Antisense strand to SEQ ID NO: 1119342
ucuaaaccaacuagcauga

SEQ ID NO: 1119344 - RNA, 19 nt, Artificial Sequence
  Description of Artificial Sequence: Synthetic oligonucleotide
  Sense strand starting at position 2418 of SEQ ID NO: 915958
caugcuaguugguuuagaa

SEQ ID NO: 1119345 - RNA, 19 nt, Artificial Sequence
  Description of Artificial Sequence: Synthetic oligonucleotide
  Antisense strand to SEQ ID NO: 1119344
uucuaaaccaacuagcaug

SEQ ID NO: 1119346 - RNA, 19 nt, Artificial Sequence
  Description of Artificial Sequence: Synthetic oligonucleotide
  Sense strand starting at position 2433 of SEQ ID NO: 915958
agaaacuucugaggaauuu

SEQ ID NO: 1119347 - RNA, 19 nt, Artificial Sequence
  Description of Artificial Sequence: Synthetic oligonucleotide
  Antisense strand to SEQ ID NO: 1119346
aaauuccucagaaguuucu

SEQ ID NO: 1119348 - RNA, 19 nt, Artificial Sequence
  Description of Artificial Sequence: Synthetic oligonucleotide
  Sense strand starting at position 2485 of SEQ ID NO: 915958
ccgacuggucaaggacauu

SEQ ID NO: 1119349 - RNA, 19 nt, Artificial Sequence
  Description of Artificial Sequence: Synthetic oligonucleotide
  Antisense strand to SEQ ID NO: 1119348
aauguccuugaccagucgg

SEQ ID NO: 1119350 - RNA, 19 nt, Artificial Sequence
  Description of Artificial Sequence: Synthetic oligonucleotide
  Sense strand starting at position 2496 of SEQ ID NO: 915958
aggacauuuagcugugcca

SEQ ID NO: 1119351 - RNA, 19 nt, Artificial Sequence
  Description of Artificial Sequence: Synthetic oligonucleotide
  Antisense strand to SEQ ID NO: 1119350
uggcacagcuaaauguccu

SEQ ID NO: 1119352 - RNA, 19 nt, Artificial Sequence
  Description of Artificial Sequence: Synthetic oligonucleotide
  Sense strand starting at position 2498 of SEQ ID NO: 915958
gacauuuagcugugccaac

SEQ ID NO: 1119353 - RNA, 19 nt, Artificial Sequence
  Description of Artificial Sequence: Synthetic oligonucleotide
  Antisense strand to SEQ ID NO: 1119352
guuggcacagcuaaauguc

SEQ ID NO: 1119354 - RNA, 19 nt, Artificial Sequence
  Description of Artificial Sequence: Synthetic oligonucleotide
  Sense strand starting at position 2499 of SEQ ID NO: 915958
acauuuagcugugccaaca

SEQ ID NO: 1119355 - RNA, 19 nt, Artificial Sequence
  Description of Artificial Sequence: Synthetic oligonucleotide
  Antisense strand to SEQ ID NO: 1119354
uguuggcacagcuaaaugu

SEQ ID NO: 1119356 - RNA, 19 nt, Artificial Sequence
  Description of Artificial Sequence: Synthetic oligonucleotide
  Sense strand starting at position 2513 of SEQ ID NO: 915958
caacaaaggucguucucau

SEQ ID NO: 1119357 - RNA, 19 nt, Artificial Sequence
  Description of Artificial Sequence: Synthetic oligonucleotide
  Antisense strand to SEQ ID NO: 1119356
augagaacgaccuuuguug

SEQ ID NO: 1119358 - RNA, 19 nt, Artificial Sequence
  Description of Artificial Sequence: Synthetic oligonucleotide
  Sense strand starting at position 2524 of SEQ ID NO: 915958
guucucaucugccugagga

SEQ ID NO: 1119359 - RNA, 19 nt, Artificial Sequence
  Description of Artificial Sequence: Synthetic oligonucleotide
  Antisense strand to SEQ ID NO: 1119358
uccucaggcagaugagaac

SEQ ID NO: 1119360 - RNA, 19 nt, Artificial Sequence
  Description of Artificial Sequence: Synthetic oligonucleotide
  Sense strand starting at position 2526 of SEQ ID NO: 915958
ucucaucugccugaggagu

SEQ ID NO: 1119361 - RNA, 19 nt, Artificial Sequence
  Description of Artificial Sequence: Synthetic oligonucleotide
  Antisense strand to SEQ ID NO: 1119360
acuccucaggcagaugaga

SEQ ID NO: 1119362 - RNA, 19 nt, Artificial Sequence
  Description of Artificial Sequence: Synthetic oligonucleotide
  Sense strand starting at position 2617 of SEQ ID NO: 915958
accaaagaguuguuaaguc

SEQ ID NO: 1119363 - RNA, 19 nt, Artificial Sequence
  Description of Artificial Sequence: Synthetic oligonucleotide
  Antisense strand to SEQ ID NO: 1119362
gacuuaacaacucuuuggu

SEQ ID NO: 1119364 - RNA, 19 nt, Artificial Sequence
  Description of Artificial Sequence: Synthetic oligonucleotide
  Sense strand starting at position 2838 of SEQ ID NO: 915958
ucuugagucuuguuagauc

SEQ ID NO: 1119365 - RNA, 19 nt, Artificial Sequence
  Description of Artificial Sequence: Synthetic oligonucleotide
  Antisense strand to SEQ ID NO: 1119364
gaucuaacaagacucaaga

SEQ ID NO: 1119366 - RNA, 19 nt, Artificial Sequence
  Description of Artificial Sequence: Synthetic oligonucleotide
  Sense strand starting at position 2994 of SEQ ID NO: 915958
aaagucucgugaucaucga

SEQ ID NO: 1119367 - RNA, 19 nt, Artificial Sequence
  Description of Artificial Sequence: Synthetic oligonucleotide
  Antisense strand to SEQ ID NO: 1119366
ucgaugaucacgagacuuu

SEQ ID NO: 1119368 - RNA, 19 nt, Artificial Sequence
  Description of Artificial Sequence: Synthetic oligonucleotide
  Sense strand starting at position 3631 of SEQ ID NO: 915958
agcaaauaauccuugagua

SEQ ID NO: 1119369 - RNA, 19 nt, Artificial Sequence
  Description of Artificial Sequence: Synthetic oligonucleotide
  Antisense strand to SEQ ID NO: 1119368
uacucaaggauuauuugcu

SEQ ID NO: 1119370 - RNA, 19 nt, Artificial Sequence
  Description of Artificial Sequence: Synthetic oligonucleotide
  Sense strand starting at position 3632 of SEQ ID NO: 915958
gcaaauaauccuugaguac

SEQ ID NO: 1119371 - RNA, 19 nt, Artificial Sequence
  Description of Artificial Sequence: Synthetic oligonucleotide
  Antisense strand to SEQ ID NO: 1119370
guacucaaggauuauuugc

SEQ ID NO: 1119372 - RNA, 19 nt, Artificial Sequence
  Description of Artificial Sequence: Synthetic oligonucleotide
  Sense strand starting at position 3688 of SEQ ID NO: 915958
cccuguagagcucauucuu

SEQ ID NO: 1119373 - RNA, 19 nt, Artificial Sequence
  Description of Artificial Sequence: Synthetic oligonucleotide
  Antisense strand to SEQ ID NO: 1119372
aagaaugagcucuacaggg

SEQ ID NO: 1119374 - RNA, 19 nt, Artificial Sequence
  Description of Artificial Sequence: Synthetic oligonucleotide
  Sense strand starting at position 496 of SEQ ID NO: 915959
gaaagcaguccauguggaa

SEQ ID NO: 1119375 - RNA, 19 nt, Artificial Sequence
  Description of Artificial Sequence: Synthetic oligonucleotide
  Antisense strand to SEQ ID NO: 1119374
uuccacauggacugcuuuc

SEQ ID NO: 1119376 - RNA, 19 nt, Artificial Sequence
  Description of Artificial Sequence: Synthetic oligonucleotide
  Sense strand starting at position 569 of SEQ ID NO: 915959
uguagauugcauuaucuca

SEQ ID NO: 1119377 - RNA, 19 nt, Artificial Sequence
  Description of Artificial Sequence: Synthetic oligonucleotide
  Antisense strand to SEQ ID NO: 1119376
ugagauaaugcaaucuaca

SEQ ID NO: 1119378 - RNA, 19 nt, Artificial Sequence
  Description of Artificial Sequence: Synthetic oligonucleotide
  Sense strand starting at position 650 of SEQ ID NO: 915959
uagguacagugagauuuaa

SEQ ID NO: 1119379 - RNA, 19 nt, Artificial Sequence
  Description of Artificial Sequence: Synthetic oligonucleotide
  Antisense strand to SEQ ID NO: 1119378
uuaaaucucacuguaccua

SEQ ID NO: 1119380 - RNA, 19 nt, Artificial Sequence
  Description of Artificial Sequence: Synthetic oligonucleotide
  Sense strand starting at position 689 of SEQ ID NO: 915959
ccgcuaaugagauggaaag

SEQ ID NO: 1119381 - RNA, 19 nt, Artificial Sequence
  Description of Artificial Sequence: Synthetic oligonucleotide
  Antisense strand to SEQ ID NO: 1119380
cuuuccaucucauuagcgg

SEQ ID NO: 1119382 - RNA, 19 nt, Artificial Sequence
  Description of Artificial Sequence: Synthetic oligonucleotide
  Sense strand starting at position 704 of SEQ ID NO: 915959
aaaggcagaucuguaaaua

SEQ ID NO: 1119383 - RNA, 19 nt, Artificial Sequence
  Description of Artificial Sequence: Synthetic oligonucleotide
  Antisense strand to SEQ ID NO: 1119382
uauuuacagaucugccuuu

SEQ ID NO: 1119384 - RNA, 19 nt, Artificial Sequence
  Description of Artificial Sequence: Synthetic oligonucleotide
  Sense strand starting at position 768 of SEQ ID NO: 915959
ggcagacuauggucuggaa

SEQ ID NO: 1119385 - RNA, 19 nt, Artificial Sequence
  Description of Artificial Sequence: Synthetic oligonucleotide
  Antisense strand to SEQ ID NO: 1119384
uuccagaccauagucugcc

SEQ ID NO: 1119386 - RNA, 19 nt, Artificial Sequence
  Description of Artificial Sequence: Synthetic oligonucleotide
  Sense strand starting at position 772 of SEQ ID NO: 915959
gacuauggucuggaagcua

SEQ ID NO: 1119387 - RNA, 19 nt, Artificial Sequence
  Description of Artificial Sequence: Synthetic oligonucleotide
  Antisense strand to SEQ ID NO: 1119386
uagcuuccagaccauaguc

SEQ ID NO: 1119388 - RNA, 19 nt, Artificial Sequence
  Description of Artificial Sequence: Synthetic oligonucleotide
  Sense strand starting at position 939 of SEQ ID NO: 915959
cucuucucagagcaauguu

SEQ ID NO: 1119389 - RNA, 19 nt, Artificial Sequence
  Description of Artificial Sequence: Synthetic oligonucleotide
  Antisense strand to SEQ ID NO: 1119388
aacauugcucugagaagag

SEQ ID NO: 1119390 - RNA, 19 nt, Artificial Sequence
  Description of Artificial Sequence: Synthetic oligonucleotide
  Sense strand starting at position 1173 of SEQ ID NO: 915959
ugauaucuguaucugcaaa

SEQ ID NO: 1119391 - RNA, 19 nt, Artificial Sequence
  Description of Artificial Sequence: Synthetic oligonucleotide
  Antisense strand to SEQ ID NO: 1119390
uuugcagauacagauauca

SEQ ID NO: 1119392 - RNA, 19 nt, Artificial Sequence
  Description of Artificial Sequence: Synthetic oligonucleotide
  Sense strand starting at position 1216 of SEQ ID NO: 915959
gugacuucuguugggauaa

SEQ ID NO: 1119393 - RNA, 19 nt, Artificial Sequence
  Description of Artificial Sequence: Synthetic oligonucleotide
  Antisense strand to SEQ ID NO: 1119392
uuaucccaacagaagucac

SEQ ID NO: 1119394 - RNA, 19 nt, Artificial Sequence
  Description of Artificial Sequence: Synthetic oligonucleotide
  Sense strand starting at position 1248 of SEQ ID NO: 915959
ccagaacuacuguggcuua

SEQ ID NO: 1119395 - RNA, 19 nt, Artificial Sequence
  Description of Artificial Sequence: Synthetic oligonucleotide
  Antisense strand to SEQ ID NO: 1119394
uaagccacaguaguucugg

SEQ ID NO: 1119396 - RNA, 19 nt, Artificial Sequence
  Description of Artificial Sequence: Synthetic oligonucleotide
  Sense strand starting at position 1361 of SEQ ID NO: 915959
ggguucuauccaugauuag

SEQ ID NO: 1119397 - RNA, 19 nt, Artificial Sequence
  Description of Artificial Sequence: Synthetic oligonucleotide
  Antisense strand to SEQ ID NO: 1119396
cuaaucauggauagaaccc

SEQ ID NO: 1119398 - RNA, 19 nt, Artificial Sequence
  Description of Artificial Sequence: Synthetic oligonucleotide
  Sense strand starting at position 1539 of SEQ ID NO: 915959
ugcaguuaucucgaagaga

SEQ ID NO: 1119399 - RNA, 19 nt, Artificial Sequence
  Description of Artificial Sequence: Synthetic oligonucleotide
  Antisense strand to SEQ ID NO: 1119398
ucucuucgagauaacugca

SEQ ID NO: 1119400 - RNA, 19 nt, Artificial Sequence
  Description of Artificial Sequence: Synthetic oligonucleotide
  Sense strand starting at position 2195 of SEQ ID NO: 915959
aucauuucuugaugacaga

SEQ ID NO: 1119401 - RNA, 19 nt, Artificial Sequence
  Description of Artificial Sequence: Synthetic oligonucleotide
  Antisense strand to SEQ ID NO: 1119400
ucugucaucaagaaaugau

SEQ ID NO: 1119402 - RNA, 19 nt, Artificial Sequence
  Description of Artificial Sequence: Synthetic oligonucleotide
  Sense strand starting at position 2198 of SEQ ID NO: 915959
auuucuugaugacagaucu

SEQ ID NO: 1119403 - RNA, 19 nt, Artificial Sequence
  Description of Artificial Sequence: Synthetic oligonucleotide
  Antisense strand to SEQ ID NO: 1119402
agaucugucaucaagaaau

SEQ ID NO: 1119404 - RNA, 19 nt, Artificial Sequence
  Description of Artificial Sequence: Synthetic oligonucleotide
  Sense strand starting at position 2258 of SEQ ID NO: 915959
caggauuaguucccagguu

SEQ ID NO: 1119405 - RNA, 19 nt, Artificial Sequence
  Description of Artificial Sequence: Synthetic oligonucleotide
  Antisense strand to SEQ ID NO: 1119404
aaccugggaacuaauccug

SEQ ID NO: 1119406 - RNA, 19 nt, Artificial Sequence
  Description of Artificial Sequence: Synthetic oligonucleotide
  Sense strand starting at position 2312 of SEQ ID NO: 915959
uccagcugggccuaagaaa

SEQ ID NO: 1119407 - RNA, 19 nt, Artificial Sequence
  Description of Artificial Sequence: Synthetic oligonucleotide
  Antisense strand to SEQ ID NO: 1119406
uuucuuaggcccagcugga

SEQ ID NO: 1119408 - RNA, 19 nt, Artificial Sequence
  Description of Artificial Sequence: Synthetic oligonucleotide
  Sense strand starting at position 2332 of SEQ ID NO: 915959
accuuagagagcugguuaa

SEQ ID NO: 1119409 - RNA, 19 nt, Artificial Sequence
  Description of Artificial Sequence: Synthetic oligonucleotide
  Antisense strand to SEQ ID NO: 1119408
uuaaccagcucucuaaggu

SEQ ID NO: 1119410 - RNA, 19 nt, Artificial Sequence
  Description of Artificial Sequence: Synthetic oligonucleotide
  Sense strand starting at position 2394 of SEQ ID NO: 915959
aaucucugauagguggaau

SEQ ID NO: 1119411 - RNA, 19 nt, Artificial Sequence
  Description of Artificial Sequence: Synthetic oligonucleotide
  Antisense strand to SEQ ID NO: 1119410
auuccaccuaucagagauu

SEQ ID NO: 1119412 - RNA, 19 nt, Artificial Sequence
  Description of Artificial Sequence: Synthetic oligonucleotide
  Sense strand starting at position 2395 of SEQ ID NO: 915959
aucucugauagguggaauc

SEQ ID NO: 1119413 - RNA, 19 nt, Artificial Sequence
  Description of Artificial Sequence: Synthetic oligonucleotide
  Antisense strand to SEQ ID NO: 1119412
gauuccaccuaucagagau

SEQ ID NO: 1119414 - RNA, 19 nt, Artificial Sequence
  Description of Artificial Sequence: Synthetic oligonucleotide
  Sense strand starting at position 2443 of SEQ ID NO: 915959
gggccuuacuacuuaagag

SEQ ID NO: 1119415 - RNA, 19 nt, Artificial Sequence
  Description of Artificial Sequence: Synthetic oligonucleotide
  Antisense strand to SEQ ID NO: 1119414
cucuuaaguaguaaggccc

SEQ ID NO: 1119416 - RNA, 19 nt, Artificial Sequence
  Description of Artificial Sequence: Synthetic oligonucleotide
  Sense strand starting at position 2455 of SEQ ID NO: 915959
uuaagaguguaguccauga

SEQ ID NO: 1119417 - RNA, 19 nt, Artificial Sequence
  Description of Artificial Sequence: Synthetic oligonucleotide
  Antisense strand to SEQ ID NO: 1119416
ucauggacuacacucuuaa

SEQ ID NO: 1119418 - RNA, 19 nt, Artificial Sequence
  Description of Artificial Sequence: Synthetic oligonucleotide
  Sense strand starting at position 3007 of SEQ ID NO: 915959
aaauuagaaucucuguggu

SEQ ID NO: 1119419 - RNA, 19 nt, Artificial Sequence
  Description of Artificial Sequence: Synthetic oligonucleotide
  Antisense strand to SEQ ID NO: 1119418
accacagagauucuaauuu

SEQ ID NO: 1119420 - RNA, 19 nt, Artificial Sequence
  Description of Artificial Sequence: Synthetic oligonucleotide
  Sense strand starting at position 3009 of SEQ ID NO: 915959
auuagaaucucugugguua

SEQ ID NO: 1119421 - RNA, 19 nt, Artificial Sequence
  Description of Artificial Sequence: Synthetic oligonucleotide
  Antisense strand to SEQ ID NO: 1119420
uaaccacagagauucuaau

SEQ ID NO: 1119422 - RNA, 19 nt, Artificial Sequence
  Description of Artificial Sequence: Synthetic oligonucleotide
  Sense strand starting at position 3010 of SEQ ID NO: 915959
uuagaaucucugugguuaa

SEQ ID NO: 1119423 - RNA, 19 nt, Artificial Sequence
  Description of Artificial Sequence: Synthetic oligonucleotide
  Antisense strand to SEQ ID NO: 1119422
uuaaccacagagauucuaa

SEQ ID NO: 1119424 - RNA, 19 nt, Artificial Sequence
  Description of Artificial Sequence: Synthetic oligonucleotide
  Sense strand starting at position 3180 of SEQ ID NO: 915959
acugauauggucugaaugu

SEQ ID NO: 1119425 - RNA, 19 nt, Artificial Sequence
  Description of Artificial Sequence: Synthetic oligonucleotide
  Antisense strand to SEQ ID NO: 1119424
acauucagaccauaucagu

SEQ ID NO: 1119426 - RNA, 19 nt, Artificial Sequence
  Description of Artificial Sequence: Synthetic oligonucleotide
  Sense strand starting at position 3281 of SEQ ID NO: 915959
ccagaauugcaaggaauug

SEQ ID NO: 1119427 - RNA, 19 nt, Artificial Sequence
  Description of Artificial Sequence: Synthetic oligonucleotide
  Antisense strand to SEQ ID NO: 1119426
caauuccuugcaauucugg

SEQ ID NO: 1119428 - RNA, 19 nt, Artificial Sequence
  Description of Artificial Sequence: Synthetic oligonucleotide
  Sense strand starting at position 3304 of SEQ ID NO: 915959
uugagauaugcaugcuaua

SEQ ID NO: 1119429 - RNA, 19 nt, Artificial Sequence
  Description of Artificial Sequence: Synthetic oligonucleotide
  Antisense strand to SEQ ID NO: 1119428
uauagcaugcauaucucaa

SEQ ID NO: 1119430 - RNA, 19 nt, Artificial Sequence
  Description of Artificial Sequence: Synthetic oligonucleotide
  Sense strand starting at position 3314 of SEQ ID NO: 915959
caugcuauaguggacuaua

SEQ ID NO: 1119431 - RNA, 19 nt, Artificial Sequence
  Description of Artificial Sequence: Synthetic oligonucleotide
  Antisense strand to SEQ ID NO: 1119430
uauaguccacuauagcaug

SEQ ID NO: 1119432 - RNA, 19 nt, Artificial Sequence
  Description of Artificial Sequence: Synthetic oligonucleotide
  Sense strand starting at position 3393 of SEQ ID NO: 915959
acaaguaccguugaucaca

SEQ ID NO: 1119433 - RNA, 19 nt, Artificial Sequence
  Description of Artificial Sequence: Synthetic oligonucleotide
  Antisense strand to SEQ ID NO: 1119432
ugugaucaacgguacuugu

SEQ ID NO: 1119434 - RNA, 19 nt, Artificial Sequence
  Description of Artificial Sequence: Synthetic oligonucleotide
  Sense strand starting at position 3424 of SEQ ID NO: 915959
aggaguuggcuuuagcuua

SEQ ID NO: 1119435 - RNA, 19 nt, Artificial Sequence
  Description of Artificial Sequence: Synthetic oligonucleotide
  Antisense strand to SEQ ID NO: 1119434
uaagcuaaagccaacuccu

SEQ ID NO: 1119436 - RNA, 19 nt, Artificial Sequence
  Description of Artificial Sequence: Synthetic oligonucleotide
  Sense strand starting at position 3453 of SEQ ID NO: 915959
acccacuguuaggcaaaua

SEQ ID NO: 1119437 - RNA, 19 nt, Artificial Sequence
  Description of Artificial Sequence: Synthetic oligonucleotide
  Antisense strand to SEQ ID NO: 1119436
uauuugccuaacagugggu

SEQ ID NO: 1119438 - RNA, 19 nt, Artificial Sequence
  Description of Artificial Sequence: Synthetic oligonucleotide
  Sense strand starting at position 3463 of SEQ ID NO: 915959
aggcaaauauucuuaugca

SEQ ID NO: 1119439 - RNA, 19 nt, Artificial Sequence
  Description of Artificial Sequence: Synthetic oligonucleotide
  Antisense strand to SEQ ID NO: 1119438
ugcauaagaauauuugccu

SEQ ID NO: 1119440 - RNA, 19 nt, Artificial Sequence
  Description of Artificial Sequence: Synthetic oligonucleotide
  Sense strand starting at position 3483 of SEQ ID NO: 915959
gugguuuaucuauaauacu

SEQ ID NO: 1119441 - RNA, 19 nt, Artificial Sequence
  Description of Artificial Sequence: Synthetic oligonucleotide
  Antisense strand to SEQ ID NO: 1119440
aguauuauagauaaaccac

SEQ ID NO: 1119442 - RNA, 19 nt, Artificial Sequence
  Description of Artificial Sequence: Synthetic oligonucleotide
  Sense strand starting at position 3629 of SEQ ID NO: 915959
gugggaccucugggaagua

SEQ ID NO: 1119443 - RNA, 19 nt, Artificial Sequence
  Description of Artificial Sequence: Synthetic oligonucleotide
  Antisense strand to SEQ ID NO: 1119442
uacuucccagaggucccac

SEQ ID NO: 1119444 - RNA, 19 nt, Artificial Sequence
  Description of Artificial Sequence: Synthetic oligonucleotide
  Sense strand starting at position 3778 of SEQ ID NO: 915959
uguagucuccuguaaacag

SEQ ID NO: 1119445 - RNA, 19 nt, Artificial Sequence
  Description of Artificial Sequence: Synthetic oligonucleotide
  Antisense strand to SEQ ID NO: 1119444
cuguuuacaggagacuaca

SEQ ID NO: 1119446 - RNA, 19 nt, Artificial Sequence
  Description of Artificial Sequence: Synthetic oligonucleotide
  Sense strand starting at position 3785 of SEQ ID NO: 915959
uccuguaaacaggaaguuu

SEQ ID NO: 1119447 - RNA, 19 nt, Artificial Sequence
  Description of Artificial Sequence: Synthetic oligonucleotide
  Antisense strand to SEQ ID NO: 1119446
aaacuuccuguuuacagga

SEQ ID NO: 1119448 - RNA, 19 nt, Artificial Sequence
  Description of Artificial Sequence: Synthetic oligonucleotide
  Sense strand starting at position 3793 of SEQ ID NO: 915959
acaggaaguuucucagucu

SEQ ID NO: 1119449 - RNA, 19 nt, Artificial Sequence
  Description of Artificial Sequence: Synthetic oligonucleotide
  Antisense strand to SEQ ID NO: 1119448
agacugagaaacuuccugu

SEQ ID NO: 1119450 - RNA, 19 nt, Artificial Sequence
  Description of Artificial Sequence: Synthetic oligonucleotide
  Sense strand starting at position 3822 of SEQ ID NO: 915959
cuacauuguacccggauga

SEQ ID NO: 1119451 - RNA, 19 nt, Artificial Sequence
  Description of Artificial Sequence: Synthetic oligonucleotide
  Antisense strand to SEQ ID NO: 1119450
ucauccggguacaauguag

SEQ ID NO: 1119452 - RNA, 19 nt, Artificial Sequence
  Description of Artificial Sequence: Synthetic oligonucleotide
  Sense strand starting at position 3897 of SEQ ID NO: 915959
ugcuaucuugcugacacau

SEQ ID NO: 1119453 - RNA, 19 nt, Artificial Sequence
  Description of Artificial Sequence: Synthetic oligonucleotide
  Antisense strand to SEQ ID NO: 1119452
augugucagcaagauagca

SEQ ID NO: 1119454 - RNA, 19 nt, Artificial Sequence
  Description of Artificial Sequence: Synthetic oligonucleotide
  Sense strand starting at position 373 of SEQ ID NO: 915960
ucaccaauggcagguaaua

SEQ ID NO: 1119455 - RNA, 19 nt, Artificial Sequence
  Description of Artificial Sequence: Synthetic oligonucleotide
  Antisense strand to SEQ ID NO: 1119454
uauuaccugccauugguga

SEQ ID NO: 1119456 - RNA, 19 nt, Artificial Sequence
  Description of Artificial Sequence: Synthetic oligonucleotide
  Sense strand starting at position 444 of SEQ ID NO: 915960
gugggucugcaaugacaga

SEQ ID NO: 1119457 - RNA, 19 nt, Artificial Sequence
  Description of Artificial Sequence: Synthetic oligonucleotide
  Antisense strand to SEQ ID NO: 1119456
ucugucauugcagacccac

SEQ ID NO: 1119458 - RNA, 19 nt, Artificial Sequence
  Description of Artificial Sequence: Synthetic oligonucleotide
  Sense strand starting at position 479 of SEQ ID NO: 915960
agagcauaacaaugguuaa

SEQ ID NO: 1119459 - RNA, 19 nt, Artificial Sequence
  Description of Artificial Sequence: Synthetic oligonucleotide
  Antisense strand to SEQ ID NO: 1119458
uuaaccauuguuaugcucu

SEQ ID NO: 1119460 - RNA, 19 nt, Artificial Sequence
  Description of Artificial Sequence: Synthetic oligonucleotide
  Sense strand starting at position 503 of SEQ ID NO: 915960
gccagaaaugguuacuagu

SEQ ID NO: 1119461 - RNA, 19 nt, Artificial Sequence
  Description of Artificial Sequence: Synthetic oligonucleotide
  Antisense strand to SEQ ID NO: 1119460
acuaguaaccauuucuggc

SEQ ID NO: 1119462 - RNA, 19 nt, Artificial Sequence
  Description of Artificial Sequence: Synthetic oligonucleotide
  Sense strand starting at position 514 of SEQ ID NO: 915960
uuacuaguuguguaacacu

SEQ ID NO: 1119463 - RNA, 19 nt, Artificial Sequence
  Description of Artificial Sequence: Synthetic oligonucleotide
  Antisense strand to SEQ ID NO: 1119462
aguguuacacaacuaguaa

SEQ ID NO: 1119464 - RNA, 19 nt, Artificial Sequence
  Description of Artificial Sequence: Synthetic oligonucleotide
  Sense strand starting at position 701 of SEQ ID NO: 915960
ucucuaucccaucagaguu

SEQ ID NO: 1119465 - RNA, 19 nt, Artificial Sequence
  Description of Artificial Sequence: Synthetic oligonucleotide
  Antisense strand to SEQ ID NO: 1119464
aacucugaugggauagaga

SEQ ID NO: 1119466 - RNA, 19 nt, Artificial Sequence
  Description of Artificial Sequence: Synthetic oligonucleotide
  Sense strand starting at position 873 of SEQ ID NO: 915960
uggauucgugaucagagca

SEQ ID NO: 1119467 - RNA, 19 nt, Artificial Sequence
  Description of Artificial Sequence: Synthetic oligonucleotide
  Antisense strand to SEQ ID NO: 1119466
ugcucugaucacgaaucca

SEQ ID NO: 1119468 - RNA, 19 nt, Artificial Sequence
  Description of Artificial Sequence: Synthetic oligonucleotide
  Sense strand starting at position 945 of SEQ ID NO: 915960
gccacaugaucuccagaag

SEQ ID NO: 1119469 - RNA, 19 nt, Artificial Sequence
  Description of Artificial Sequence: Synthetic oligonucleotide
  Antisense strand to SEQ ID NO: 1119468
cuucuggagaucauguggc

SEQ ID NO: 1119470 - RNA, 19 nt, Artificial Sequence
  Description of Artificial Sequence: Synthetic oligonucleotide
  Sense strand starting at position 960 of SEQ ID NO: 915960
gaagguaaauuaccuguau

SEQ ID NO: 1119471 - RNA, 19 nt, Artificial Sequence
  Description of Artificial Sequence: Synthetic oligonucleotide
  Antisense strand to SEQ ID NO: 1119470
auacagguaauuuaccuuc

SEQ ID NO: 1119472 - RNA, 19 nt, Artificial Sequence
  Description of Artificial Sequence: Synthetic oligonucleotide
  Sense strand starting at position 964 of SEQ ID NO: 915960
guaaauuaccuguaugaua

SEQ ID NO: 1119473 - RNA, 19 nt, Artificial Sequence
  Description of Artificial Sequence: Synthetic oligonucleotide
  Antisense strand to SEQ ID NO: 1119472
uaucauacagguaauuuac

SEQ ID NO: 1119474 - RNA, 19 nt, Artificial Sequence
  Description of Artificial Sequence: Synthetic oligonucleotide
  Sense strand starting at position 979 of SEQ ID NO: 915960
gauaaaucaugucucaggu

SEQ ID NO: 1119475 - RNA, 19 nt, Artificial Sequence
  Description of Artificial Sequence: Synthetic oligonucleotide
  Antisense strand to SEQ ID NO: 1119474
accugagacaugauuuauc

SEQ ID NO: 1119476 - RNA, 19 nt, Artificial Sequence
  Description of Artificial Sequence: Synthetic oligonucleotide
  Sense strand starting at position 1048 of SEQ ID NO: 915960
aggauuagaugaguuaguu

SEQ ID NO: 1119477 - RNA, 19 nt, Artificial Sequence
  Description of Artificial Sequence: Synthetic oligonucleotide
  Antisense strand to SEQ ID NO: 1119476
aacuaacucaucuaauccu

SEQ ID NO: 1119478 - RNA, 19 nt, Artificial Sequence
  Description of Artificial Sequence: Synthetic oligonucleotide
  Sense strand starting at position 1091 of SEQ ID NO: 915960
acauaagcuuugguuauca

SEQ ID NO: 1119479 - RNA, 19 nt, Artificial Sequence
  Description of Artificial Sequence: Synthetic oligonucleotide
  Antisense strand to SEQ ID NO: 1119478
ugauaaccaaagcuuaugu

SEQ ID NO: 1119480 - RNA, 19 nt, Artificial Sequence
  Description of Artificial Sequence: Synthetic oligonucleotide
  Sense strand starting at position 1093 of SEQ ID NO: 915960
auaagcuuugguuaucauu

SEQ ID NO: 1119481 - RNA, 19 nt, Artificial Sequence
  Description of Artificial Sequence: Synthetic oligonucleotide
  Antisense strand to SEQ ID NO: 1119480
aaugauaaccaaagcuuau

SEQ ID NO: 1119482 - RNA, 19 nt, Artificial Sequence
  Description of Artificial Sequence: Synthetic oligonucleotide
  Sense strand starting at position 1110 of SEQ ID NO: 915960
uuauuauacuuccuucgga

SEQ ID NO: 1119483 - RNA, 19 nt, Artificial Sequence
  Description of Artificial Sequence: Synthetic oligonucleotide
  Antisense strand to SEQ ID NO: 1119482
uccgaaggaaguauaauaa

SEQ ID NO: 1119484 - RNA, 19 nt, Artificial Sequence
  Description of Artificial Sequence: Synthetic oligonucleotide
  Sense strand starting at position 1125 of SEQ ID NO: 915960
cggaaucucuggguucuca

SEQ ID NO: 1119485 - RNA, 19 nt, Artificial Sequence
  Description of Artificial Sequence: Synthetic oligonucleotide
  Antisense strand to SEQ ID NO: 1119484
ugagaacccagagauuccg

SEQ ID NO: 1119486 - RNA, 19 nt, Artificial Sequence
  Description of Artificial Sequence: Synthetic oligonucleotide
  Sense strand starting at position 1129 of SEQ ID NO: 915960
aucucuggguucucacaaa

SEQ ID NO: 1119487 - RNA, 19 nt, Artificial Sequence
  Description of Artificial Sequence: Synthetic oligonucleotide
  Antisense strand to SEQ ID NO: 1119486
uuugugagaacccagagau

SEQ ID NO: 1119488 - RNA, 19 nt, Artificial Sequence
  Description of Artificial Sequence: Synthetic oligonucleotide
  Sense strand starting at position 1164 of SEQ ID NO: 915960
aguauuuacugacaacaug

SEQ ID NO: 1119489 - RNA, 19 nt, Artificial Sequence
  Description of Artificial Sequence: Synthetic oligonucleotide
  Antisense strand to SEQ ID NO: 1119488
cauguugucaguaaauacu

SEQ ID NO: 1119490 - RNA, 19 nt, Artificial Sequence
  Description of Artificial Sequence: Synthetic oligonucleotide
  Sense strand starting at position 1348 of SEQ ID NO: 915960
accuauagugucugaaaug

SEQ ID NO: 1119491 - RNA, 19 nt, Artificial Sequence
  Description of Artificial Sequence: Synthetic oligonucleotide
  Antisense strand to SEQ ID NO: 1119490
cauuucagacacuauaggu

SEQ ID NO: 1119492 - RNA, 19 nt, Artificial Sequence
  Description of Artificial Sequence: Synthetic oligonucleotide
  Sense strand starting at position 1360 of SEQ ID NO: 915960
ugaaaugcuguguggauuu

SEQ ID NO: 1119493 - RNA, 19 nt, Artificial Sequence
  Description of Artificial Sequence: Synthetic oligonucleotide
  Antisense strand to SEQ ID NO: 1119492
aaauccacacagcauuuca

SEQ ID NO: 1119494 - RNA, 19 nt, Artificial Sequence
  Description of Artificial Sequence: Synthetic oligonucleotide
  Sense strand starting at position 1446 of SEQ ID NO: 915960
uagggacuguuagcauaau

SEQ ID NO: 1119495 - RNA, 19 nt, Artificial Sequence
  Description of Artificial Sequence: Synthetic oligonucleotide
  Antisense strand to SEQ ID NO: 1119494
auuaugcuaacagucccua

SEQ ID NO: 1119496 - RNA, 19 nt, Artificial Sequence
  Description of Artificial Sequence: Synthetic oligonucleotide
  Sense strand starting at position 2194 of SEQ ID NO: 915960
aggcucgauuucgccaaau

SEQ ID NO: 1119497 - RNA, 19 nt, Artificial Sequence
  Description of Artificial Sequence: Synthetic oligonucleotide
  Antisense strand to SEQ ID NO: 1119496
auuuggcgaaaucgagccu

SEQ ID NO: 1119498 - RNA, 19 nt, Artificial Sequence
  Description of Artificial Sequence: Synthetic oligonucleotide
  Sense strand starting at position 2196 of SEQ ID NO: 915960
gcucgauuucgccaaauuc

SEQ ID NO: 1119499 - RNA, 19 nt, Artificial Sequence
  Description of Artificial Sequence: Synthetic oligonucleotide
  Antisense strand to SEQ ID NO: 1119498
gaauuuggcgaaaucgagc

SEQ ID NO: 1119500 - RNA, 19 nt, Artificial Sequence
  Description of Artificial Sequence: Synthetic oligonucleotide
  Sense strand starting at position 2206 of SEQ ID NO: 915960
gccaaauucgggcauaaag

SEQ ID NO: 1119501 - RNA, 19 nt, Artificial Sequence
  Description of Artificial Sequence: Synthetic oligonucleotide
  Antisense strand to SEQ ID NO: 1119500
cuuuaugcccgaauuuggc

SEQ ID NO: 1119502 - RNA, 19 nt, Artificial Sequence
  Description of Artificial Sequence: Synthetic oligonucleotide
  Sense strand starting at position 2342 of SEQ ID NO: 915960
guggcagaccucuagauca

SEQ ID NO: 1119503 - RNA, 19 nt, Artificial Sequence
  Description of Artificial Sequence: Synthetic oligonucleotide
  Antisense strand to SEQ ID NO: 1119502
ugaucuagaggucugccac

SEQ ID NO: 1119504 - RNA, 19 nt, Artificial Sequence
  Description of Artificial Sequence: Synthetic oligonucleotide
  Sense strand starting at position 2344 of SEQ ID NO: 915960
ggcagaccucuagaucauu

SEQ ID NO: 1119505 - RNA, 19 nt, Artificial Sequence
  Description of Artificial Sequence: Synthetic oligonucleotide
  Antisense strand to SEQ ID NO: 1119504
aaugaucuagaggucugcc

SEQ ID NO: 1119506 - RNA, 19 nt, Artificial Sequence
  Description of Artificial Sequence: Synthetic oligonucleotide
  Sense strand starting at position 2599 of SEQ ID NO: 915960
uuuccugaccucgggagau

SEQ ID NO: 1119507 - RNA, 19 nt, Artificial Sequence
  Description of Artificial Sequence: Synthetic oligonucleotide
  Antisense strand to SEQ ID NO: 1119506
aucucccgaggucaggaaa

SEQ ID NO: 1119508 - RNA, 19 nt, Artificial Sequence
  Description of Artificial Sequence: Synthetic oligonucleotide
  Sense strand starting at position 2696 of SEQ ID NO: 915960
uuacuaugagcuugacuac

SEQ ID NO: 1119509 - RNA, 19 nt, Artificial Sequence
  Description of Artificial Sequence: Synthetic oligonucleotide
  Antisense strand to SEQ ID NO: 1119508
guagucaagcucauaguaa

SEQ ID NO: 1119510 - RNA, 19 nt, Artificial Sequence
  Description of Artificial Sequence: Synthetic oligonucleotide
  Sense strand starting at position 2720 of SEQ ID NO: 915960
auacauuauguagguggaa

SEQ ID NO: 1119511 - RNA, 19 nt, Artificial Sequence
  Description of Artificial Sequence: Synthetic oligonucleotide
  Antisense strand to SEQ ID NO: 1119510
uuccaccuacauaauguau

SEQ ID NO: 1119512 - RNA, 19 nt, Artificial Sequence
  Description of Artificial Sequence: Synthetic oligonucleotide
  Sense strand starting at position 2721 of SEQ ID NO: 915960
uacauuauguagguggaau

SEQ ID NO: 1119513 - RNA, 19 nt, Artificial Sequence
  Description of Artificial Sequence: Synthetic oligonucleotide
  Antisense strand to SEQ ID NO: 1119512
auuccaccuacauaaugua

SEQ ID NO: 1119514 - RNA, 19 nt, Artificial Sequence
  Description of Artificial Sequence: Synthetic oligonucleotide
  Sense strand starting at position 2722 of SEQ ID NO: 915960
acauuauguagguggaauc

SEQ ID NO: 1119515 - RNA, 19 nt, Artificial Sequence
  Description of Artificial Sequence: Synthetic oligonucleotide
  Antisense strand to SEQ ID NO: 1119514
gauuccaccuacauaaugu

SEQ ID NO: 1119516 - RNA, 19 nt, Artificial Sequence
  Description of Artificial Sequence: Synthetic oligonucleotide
  Sense strand starting at position 2928 of SEQ ID NO: 915960
uugugaacgcugcugcaau

SEQ ID NO: 1119517 - RNA, 19 nt, Artificial Sequence
  Description of Artificial Sequence: Synthetic oligonucleotide
  Antisense strand to SEQ ID NO: 1119516
auugcagcagcguucacaa

SEQ ID NO: 1119518 - RNA, 19 nt, Artificial Sequence
  Description of Artificial Sequence: Synthetic oligonucleotide
  Sense strand starting at position 3208 of SEQ ID NO: 915960
aagugauaucuugaaguuu

SEQ ID NO: 1119519 - RNA, 19 nt, Artificial Sequence
  Description of Artificial Sequence: Synthetic oligonucleotide
  Antisense strand to SEQ ID NO: 1119518
aaacuucaagauaucacuu

SEQ ID NO: 1119520 - RNA, 19 nt, Artificial Sequence
  Description of Artificial Sequence: Synthetic oligonucleotide
  Sense strand starting at position 3273 of SEQ ID NO: 915960
ugggcuuguuggccauuua

SEQ ID NO: 1119521 - RNA, 19 nt, Artificial Sequence
  Description of Artificial Sequence: Synthetic oligonucleotide
  Antisense strand to SEQ ID NO: 1119520
uaaauggccaacaagccca

SEQ ID NO: 1119522 - RNA, 19 nt, Artificial Sequence
  Description of Artificial Sequence: Synthetic oligonucleotide
  Sense strand starting at position 3274 of SEQ ID NO: 915960
gggcuuguuggccauuuau

SEQ ID NO: 1119523 - RNA, 19 nt, Artificial Sequence
  Description of Artificial Sequence: Synthetic oligonucleotide
  Antisense strand to SEQ ID NO: 1119522
auaaauggccaacaagccc

SEQ ID NO: 1119524 - RNA, 19 nt, Artificial Sequence
  Description of Artificial Sequence: Synthetic oligonucleotide
  Sense strand starting at position 3403 of SEQ ID NO: 915960
cccuuuaucggauauauga

SEQ ID NO: 1119525 - RNA, 19 nt, Artificial Sequence
  Description of Artificial Sequence: Synthetic oligonucleotide
  Antisense strand to SEQ ID NO: 1119524
ucauauauccgauaaaggg

SEQ ID NO: 1119526 - RNA, 19 nt, Artificial Sequence
  Description of Artificial Sequence: Synthetic oligonucleotide
  Sense strand starting at position 3558 of SEQ ID NO: 915960
agcagaaaccuuggaccaa

SEQ ID NO: 1119527 - RNA, 19 nt, Artificial Sequence
  Description of Artificial Sequence: Synthetic oligonucleotide
  Antisense strand to SEQ ID NO: 1119526
uugguccaagguuucugcu

SEQ ID NO: 1119528 - RNA, 19 nt, Artificial Sequence
  Description of Artificial Sequence: Synthetic oligonucleotide
  Sense strand starting at position 3775 of SEQ ID NO: 915960
auguaauggcacuggugau

SEQ ID NO: 1119529 - RNA, 19 nt, Artificial Sequence
  Description of Artificial Sequence: Synthetic oligonucleotide
  Antisense strand to SEQ ID NO: 1119528
aucaccagugccauuacau

SEQ ID NO: 1119530 - RNA, 19 nt, Artificial Sequence
  Description of Artificial Sequence: Synthetic oligonucleotide
  Sense strand starting at position 3776 of SEQ ID NO: 915960
uguaauggcacuggugaua

SEQ ID NO: 1119531 - RNA, 19 nt, Artificial Sequence
  Description of Artificial Sequence: Synthetic oligonucleotide
  Antisense strand to SEQ ID NO: 1119530
uaucaccagugccauuaca

SEQ ID NO: 1119532 - RNA, 19 nt, Artificial Sequence
  Description of Artificial Sequence: Synthetic oligonucleotide
  Sense strand starting at position 3942 of SEQ ID NO: 915960
gagcaauaugaauggcuaa

SEQ ID NO: 1119533 - RNA, 19 nt, Artificial Sequence
  Description of Artificial Sequence: Synthetic oligonucleotide
  Antisense strand to SEQ ID NO: 1119532
uuagccauucauauugcuc

SEQ ID NO: 1119534 - RNA, 19 nt, Artificial Sequence
  Description of Artificial Sequence: Synthetic oligonucleotide
  Sense strand starting at position 86 of SEQ ID NO: 915961
agauaucaacuaggcaauu

SEQ ID NO: 1119535 - RNA, 19 nt, Artificial Sequence
  Description of Artificial Sequence: Synthetic oligonucleotide
  Antisense strand to SEQ ID NO: 1119534
aauugccuaguugauaucu

SEQ ID NO: 1119536 - RNA, 19 nt, Artificial Sequence
  Description of Artificial Sequence: Synthetic oligonucleotide
  Sense strand starting at position 128 of SEQ ID NO: 915961
uggacagaucuaggcuguu

SEQ ID NO: 1119537 - RNA, 19 nt, Artificial Sequence
  Description of Artificial Sequence: Synthetic oligonucleotide
  Antisense strand to SEQ ID NO: 1119536
aacagccuagaucugucca

SEQ ID NO: 1119538 - RNA, 19 nt, Artificial Sequence
  Description of Artificial Sequence: Synthetic oligonucleotide
  Sense strand starting at position 212 of SEQ ID NO: 915961
gagauuaccugagucagau

SEQ ID NO: 1119539 - RNA, 19 nt, Artificial Sequence
  Description of Artificial Sequence: Synthetic oligonucleotide
  Antisense strand to SEQ ID NO: 1119538
aucugacucagguaaucuc

SEQ ID NO: 1119540 - RNA, 19 nt, Artificial Sequence
  Description of Artificial Sequence: Synthetic oligonucleotide
  Sense strand starting at position 344 of SEQ ID NO: 915961
gucacagaagucugguagu

SEQ ID NO: 1119541 - RNA, 19 nt, Artificial Sequence
  Description of Artificial Sequence: Synthetic oligonucleotide
  Antisense strand to SEQ ID NO: 1119540
acuaccagacuucugugac

SEQ ID NO: 1119542 - RNA, 19 nt, Artificial Sequence
  Description of Artificial Sequence: Synthetic oligonucleotide
  Sense strand starting at position 362 of SEQ ID NO: 915961
ucacaugauugcccagaca

SEQ ID NO: 1119543 - RNA, 19 nt, Artificial Sequence
  Description of Artificial Sequence: Synthetic oligonucleotide
  Antisense strand to SEQ ID NO: 1119542
ugucugggcaaucauguga

SEQ ID NO: 1119544 - RNA, 19 nt, Artificial Sequence
  Description of Artificial Sequence: Synthetic oligonucleotide
  Sense strand starting at position 373 of SEQ ID NO: 915961
cccagacaucccggccaau

SEQ ID NO: 1119545 - RNA, 19 nt, Artificial Sequence
  Description of Artificial Sequence: Synthetic oligonucleotide
  Antisense strand to SEQ ID NO: 1119544
auuggccgggaugucuggg

SEQ ID NO: 1119546 - RNA, 19 nt, Artificial Sequence
  Description of Artificial Sequence: Synthetic oligonucleotide
  Sense strand starting at position 376 of SEQ ID NO: 915961
agacaucccggccaauaaa

SEQ ID NO: 1119547 - RNA, 19 nt, Artificial Sequence
  Description of Artificial Sequence: Synthetic oligonucleotide
  Antisense strand to SEQ ID NO: 1119546
uuuauuggccgggaugucu

SEQ ID NO: 1119548 - RNA, 19 nt, Artificial Sequence
  Description of Artificial Sequence: Synthetic oligonucleotide
  Sense strand starting at position 493 of SEQ ID NO: 915961
aauguagagugaccacaua

SEQ ID NO: 1119549 - RNA, 19 nt, Artificial Sequence
  Description of Artificial Sequence: Synthetic oligonucleotide
  Antisense strand to SEQ ID NO: 1119548
uauguggucacucuacauu

SEQ ID NO: 1119550 - RNA, 19 nt, Artificial Sequence
  Description of Artificial Sequence: Synthetic oligonucleotide
  Sense strand starting at position 551 of SEQ ID NO: 915961
acacuugagcuuugagagu

SEQ ID NO: 1119551 - RNA, 19 nt, Artificial Sequence
  Description of Artificial Sequence: Synthetic oligonucleotide
  Antisense strand to SEQ ID NO: 1119550
acucucaaagcucaagugu

SEQ ID NO: 1119552 - RNA, 19 nt, Artificial Sequence
  Description of Artificial Sequence: Synthetic oligonucleotide
  Sense strand starting at position 692 of SEQ ID NO: 915961
uuauuaaugcuuuggguaa

SEQ ID NO: 1119553 - RNA, 19 nt, Artificial Sequence
  Description of Artificial Sequence: Synthetic oligonucleotide
  Antisense strand to SEQ ID NO: 1119552
uuacccaaagcauuaauaa

SEQ ID NO: 1119554 - RNA, 19 nt, Artificial Sequence
  Description of Artificial Sequence: Synthetic oligonucleotide
  Sense strand starting at position 696 of SEQ ID NO: 915961
uaaugcuuuggguaagauu

SEQ ID NO: 1119555 - RNA, 19 nt, Artificial Sequence
  Description of Artificial Sequence: Synthetic oligonucleotide
  Antisense strand to SEQ ID NO: 1119554
aaucuuacccaaagcauua

SEQ ID NO: 1119556 - RNA, 19 nt, Artificial Sequence
  Description of Artificial Sequence: Synthetic oligonucleotide
  Sense strand starting at position 730 of SEQ ID NO: 915961
cuugcuguuucucccagaa

SEQ ID NO: 1119557 - RNA, 19 nt, Artificial Sequence
  Description of Artificial Sequence: Synthetic oligonucleotide
  Antisense strand to SEQ ID NO: 1119556
uucugggagaaacagcaag

SEQ ID NO: 1119558 - RNA, 19 nt, Artificial Sequence
  Description of Artificial Sequence: Synthetic oligonucleotide
  Sense strand starting at position 794 of SEQ ID NO: 915961
guggaauucuaccaaucaa

SEQ ID NO: 1119559 - RNA, 19 nt, Artificial Sequence
  Description of Artificial Sequence: Synthetic oligonucleotide
  Antisense strand to SEQ ID NO: 1119558
uugauugguagaauuccac

SEQ ID NO: 1119560 - RNA, 19 nt, Artificial Sequence
  Description of Artificial Sequence: Synthetic oligonucleotide
  Sense strand starting at position 2067 of SEQ ID NO: 915961
agggcuagucgcgcaagau

SEQ ID NO: 1119561 - RNA, 19 nt, Artificial Sequence
  Description of Artificial Sequence: Synthetic oligonucleotide
  Antisense strand to SEQ ID NO: 1119560
aucuugcgcgacuagcccu

SEQ ID NO: 1119562 - RNA, 19 nt, Artificial Sequence
  Description of Artificial Sequence: Synthetic oligonucleotide
  Sense strand starting at position 2091 of SEQ ID NO: 915961
caccauuggucccuaagga

SEQ ID NO: 1119563 - RNA, 19 nt, Artificial Sequence
  Description of Artificial Sequence: Synthetic oligonucleotide
  Antisense strand to SEQ ID NO: 1119562
uccuuagggaccaauggug

SEQ ID NO: 1119564 - RNA, 19 nt, Artificial Sequence
  Description of Artificial Sequence: Synthetic oligonucleotide
  Sense strand starting at position 2149 of SEQ ID NO: 915961
ggacaaucgcgugagugcu

SEQ ID NO: 1119565 - RNA, 19 nt, Artificial Sequence
  Description of Artificial Sequence: Synthetic oligonucleotide
  Antisense strand to SEQ ID NO: 1119564
agcacucacgcgauugucc

SEQ ID NO: 1119566 - RNA, 19 nt, Artificial Sequence
  Description of Artificial Sequence: Synthetic oligonucleotide
  Sense strand starting at position 2367 of SEQ ID NO: 915961
ccaucauggucuguguagu

SEQ ID NO: 1119567 - RNA, 19 nt, Artificial Sequence
  Description of Artificial Sequence: Synthetic oligonucleotide
  Antisense strand to SEQ ID NO: 1119566
acuacacagaccaugaugg

SEQ ID NO: 1119568 - RNA, 19 nt, Artificial Sequence
  Description of Artificial Sequence: Synthetic oligonucleotide
  Sense strand starting at position 2499 of SEQ ID NO: 915961
aggcgaugcuccucugagu

SEQ ID NO: 1119569 - RNA, 19 nt, Artificial Sequence
  Description of Artificial Sequence: Synthetic oligonucleotide
  Antisense strand to SEQ ID NO: 1119568
acucagaggagcaucgccu

SEQ ID NO: 1119570 - RNA, 19 nt, Artificial Sequence
  Description of Artificial Sequence: Synthetic oligonucleotide
  Sense strand starting at position 2585 of SEQ ID NO: 915961
cucggugcgguccuucaaa

SEQ ID NO: 1119571 - RNA, 19 nt, Artificial Sequence
  Description of Artificial Sequence: Synthetic oligonucleotide
  Antisense strand to SEQ ID NO: 1119570
uuugaaggaccgcaccgag

SEQ ID NO: 1119572 - RNA, 19 nt, Artificial Sequence
  Description of Artificial Sequence: Synthetic oligonucleotide
  Sense strand starting at position 2612 of SEQ ID NO: 915961
gugggauguacagagcaga

SEQ ID NO: 1119573 - RNA, 19 nt, Artificial Sequence
  Description of Artificial Sequence: Synthetic oligonucleotide
  Antisense strand to SEQ ID NO: 1119572
ucugcucuguacaucccac

SEQ ID NO: 1119574 - RNA, 19 nt, Artificial Sequence
  Description of Artificial Sequence: Synthetic oligonucleotide
  Sense strand starting at position 2657 of SEQ ID NO: 915961
gaugcaucccgcgugcaaa

SEQ ID NO: 1119575 - RNA, 19 nt, Artificial Sequence
  Description of Artificial Sequence: Synthetic oligonucleotide
  Antisense strand to SEQ ID NO: 1119574
uuugcacgcgggaugcauc

SEQ ID NO: 1119576 - RNA, 19 nt, Artificial Sequence
  Description of Artificial Sequence: Synthetic oligonucleotide
  Sense strand starting at position 2699 of SEQ ID NO: 915961
gccugcuuccgacaaagaa

SEQ ID NO: 1119577 - RNA, 19 nt, Artificial Sequence
  Description of Artificial Sequence: Synthetic oligonucleotide
  Antisense strand to SEQ ID NO: 1119576
uucuuugucggaagcaggc

SEQ ID NO: 1119578 - RNA, 19 nt, Artificial Sequence
  Description of Artificial Sequence: Synthetic oligonucleotide
  Sense strand starting at position 2718 of SEQ ID NO: 915961
uccgaagccucuuccaaua

SEQ ID NO: 1119579 - RNA, 19 nt, Artificial Sequence
  Description of Artificial Sequence: Synthetic oligonucleotide
  Antisense strand to SEQ ID NO: 1119578
uauuggaagaggcuucgga

SEQ ID NO: 1119580 - RNA, 19 nt, Artificial Sequence
  Description of Artificial Sequence: Synthetic oligonucleotide
  Sense strand starting at position 2751 of SEQ ID NO: 915961
uagaguuucgagcauucga

SEQ ID NO: 1119581 - RNA, 19 nt, Artificial Sequence
  Description of Artificial Sequence: Synthetic oligonucleotide
  Antisense strand to SEQ ID NO: 1119580
ucgaaugcucgaaacucua

SEQ ID NO: 1119582 - RNA, 19 nt, Artificial Sequence
  Description of Artificial Sequence: Synthetic oligonucleotide
  Sense strand starting at position 2773 of SEQ ID NO: 915961
aggaguuaaauguguggau

SEQ ID NO: 1119583 - RNA, 19 nt, Artificial Sequence
  Description of Artificial Sequence: Synthetic oligonucleotide
  Antisense strand to SEQ ID NO: 1119582
auccacacauuuaacuccu

SEQ ID NO: 1119584 - RNA, 19 nt, Artificial Sequence
  Description of Artificial Sequence: Synthetic oligonucleotide
  Sense strand starting at position 2775 of SEQ ID NO: 915961
gaguuaaauguguggauga

SEQ ID NO: 1119585 - RNA, 19 nt, Artificial Sequence
  Description of Artificial Sequence: Synthetic oligonucleotide
  Antisense strand to SEQ ID NO: 1119584
ucauccacacauuuaacuc

SEQ ID NO: 1119586 - RNA, 19 nt, Artificial Sequence
  Description of Artificial Sequence: Synthetic oligonucleotide
  Sense strand starting at position 2777 of SEQ ID NO: 915961
guuaaauguguggaugaga

SEQ ID NO: 1119587 - RNA, 19 nt, Artificial Sequence
  Description of Artificial Sequence: Synthetic oligonucleotide
  Antisense strand to SEQ ID NO: 1119586
ucucauccacacauuuaac

SEQ ID NO: 1119588 - RNA, 19 nt, Artificial Sequence
  Description of Artificial Sequence: Synthetic oligonucleotide
  Sense strand starting at position 2790 of SEQ ID NO: 915961
augagaacuuuggaauaug

SEQ ID NO: 1119589 - RNA, 19 nt, Artificial Sequence
  Description of Artificial Sequence: Synthetic oligonucleotide
  Antisense strand to SEQ ID NO: 1119588
cauauuccaaaguucucau

SEQ ID NO: 1119590 - RNA, 19 nt, Artificial Sequence
  Description of Artificial Sequence: Synthetic oligonucleotide
  Sense strand starting at position 2870 of SEQ ID NO: 915961
uuaaguugagauugcaaau

SEQ ID NO: 1119591 - RNA, 19 nt, Artificial Sequence
  Description of Artificial Sequence: Synthetic oligonucleotide
  Antisense strand to SEQ ID NO: 1119590
auuugcaaucucaacuuaa

SEQ ID NO: 1119592 - RNA, 19 nt, Artificial Sequence
  Description of Artificial Sequence: Synthetic oligonucleotide
  Sense strand starting at position 2938 of SEQ ID NO: 915961
gcugcugaccgguuuguua

SEQ ID NO: 1119593 - RNA, 19 nt, Artificial Sequence
  Description of Artificial Sequence: Synthetic oligonucleotide
  Antisense strand to SEQ ID NO: 1119592
uaacaaaccggucagcagc

SEQ ID NO: 1119594 - RNA, 19 nt, Artificial Sequence
  Description of Artificial Sequence: Synthetic oligonucleotide
  Sense strand starting at position 2945 of SEQ ID NO: 915961
accgguuuguuaccuaauu

SEQ ID NO: 1119595 - RNA, 19 nt, Artificial Sequence
  Description of Artificial Sequence: Synthetic oligonucleotide
  Antisense strand to SEQ ID NO: 1119594
aauuagguaacaaaccggu

SEQ ID NO: 1119596 - RNA, 19 nt, Artificial Sequence
  Description of Artificial Sequence: Synthetic oligonucleotide
  Sense strand starting at position 2946 of SEQ ID NO: 915961
ccgguuuguuaccuaauuu

SEQ ID NO: 1119597 - RNA, 19 nt, Artificial Sequence
  Description of Artificial Sequence: Synthetic oligonucleotide
  Antisense strand to SEQ ID NO: 1119596
aaauuagguaacaaaccgg

SEQ ID NO: 1119598 - RNA, 19 nt, Artificial Sequence
  Description of Artificial Sequence: Synthetic oligonucleotide
  Sense strand starting at position 3039 of SEQ ID NO: 915961
caagaagccuggucaggau

SEQ ID NO: 1119599 - RNA, 19 nt, Artificial Sequence
  Description of Artificial Sequence: Synthetic oligonucleotide
  Antisense strand to SEQ ID NO: 1119598
auccugaccaggcuucuug

SEQ ID NO: 1119600 - RNA, 19 nt, Artificial Sequence
  Description of Artificial Sequence: Synthetic oligonucleotide
  Sense strand starting at position 3108 of SEQ ID NO: 915961
ccaucugacugauauagac

SEQ ID NO: 1119601 - RNA, 19 nt, Artificial Sequence
  Description of Artificial Sequence: Synthetic oligonucleotide
  Antisense strand to SEQ ID NO: 1119600
gucuauaucagucagaugg

SEQ ID NO: 1119602 - RNA, 19 nt, Artificial Sequence
  Description of Artificial Sequence: Synthetic oligonucleotide
  Sense strand starting at position 3299 of SEQ ID NO: 915961
ugaguaaauacuuguugag

SEQ ID NO: 1119603 - RNA, 19 nt, Artificial Sequence
  Description of Artificial Sequence: Synthetic oligonucleotide
  Antisense strand to SEQ ID NO: 1119602
cucaacaaguauuuacuca

SEQ ID NO: 1119604 - RNA, 19 nt, Artificial Sequence
  Description of Artificial Sequence: Synthetic oligonucleotide
  Sense strand starting at position 3329 of SEQ ID NO: 915961
gccaaacaguguccuggau

SEQ ID NO: 1119605 - RNA, 19 nt, Artificial Sequence
  Description of Artificial Sequence: Synthetic oligonucleotide
  Antisense strand to SEQ ID NO: 1119604
auccaggacacuguuuggc

SEQ ID NO: 1119606 - RNA, 19 nt, Artificial Sequence
  Description of Artificial Sequence: Synthetic oligonucleotide
  Sense strand starting at position 3451 of SEQ ID NO: 915961
acaaauaagugcuaugaau

SEQ ID NO: 1119607 - RNA, 19 nt, Artificial Sequence
  Description of Artificial Sequence: Synthetic oligonucleotide
  Antisense strand to SEQ ID NO: 1119606
auucauagcacuuauuugu

SEQ ID NO: 1119608 - RNA, 19 nt, Artificial Sequence
  Description of Artificial Sequence: Synthetic oligonucleotide
  Sense strand starting at position 3765 of SEQ ID NO: 915961
guuugauucugauugcacu

SEQ ID NO: 1119609 - RNA, 19 nt, Artificial Sequence
  Description of Artificial Sequence: Synthetic oligonucleotide
  Antisense strand to SEQ ID NO: 1119608
agugcaaucagaaucaaac

SEQ ID NO: 1119610 - RNA, 19 nt, Artificial Sequence
  Description of Artificial Sequence: Synthetic oligonucleotide
  Sense strand starting at position 3830 of SEQ ID NO: 915961
caggacucuuaguuugaca

SEQ ID NO: 1119611 - RNA, 19 nt, Artificial Sequence
  Description of Artificial Sequence: Synthetic oligonucleotide
  Antisense strand to SEQ ID NO: 1119610
ugucaaacuaagaguccug

SEQ ID NO: 1119612 - RNA, 19 nt, Artificial Sequence
  Description of Artificial Sequence: Synthetic oligonucleotide
  Sense strand starting at position 3832 of SEQ ID NO: 915961
ggacucuuaguuugacaau

SEQ ID NO: 1119613 - RNA, 19 nt, Artificial Sequence
  Description of Artificial Sequence: Synthetic oligonucleotide
  Antisense strand to SEQ ID NO: 1119612
auugucaaacuaagagucc

SEQ ID NO: 1119614 - RNA, 19 nt, Artificial Sequence
  Description of Artificial Sequence: Synthetic oligonucleotide
  Sense strand starting at position 245 of SEQ ID NO: 915962
gggucaggcgucuagaaag

SEQ ID NO: 1119615 - RNA, 19 nt, Artificial Sequence
  Description of Artificial Sequence: Synthetic oligonucleotide
  Antisense strand to SEQ ID NO: 1119614
cuuucuagacgccugaccc

SEQ ID NO: 1119616 - RNA, 19 nt, Artificial Sequence
  Description of Artificial Sequence: Synthetic oligonucleotide
  Sense strand starting at position 263 of SEQ ID NO: 915962
gugcacuaacauuggaaga

SEQ ID NO: 1119617 - RNA, 19 nt, Artificial Sequence
  Description of Artificial Sequence: Synthetic oligonucleotide
  Antisense strand to SEQ ID NO: 1119616
ucuuccaauguuagugcac

SEQ ID NO: 1119618 - RNA, 19 nt, Artificial Sequence
  Description of Artificial Sequence: Synthetic oligonucleotide
  Sense strand starting at position 324 of SEQ ID NO: 915962
cugugugaccuuuaguaag

SEQ ID NO: 1119619 - RNA, 19 nt, Artificial Sequence
  Description of Artificial Sequence: Synthetic oligonucleotide
  Antisense strand to SEQ ID NO: 1119618
cuuacuaaaggucacacag

SEQ ID NO: 1119620 - RNA, 19 nt, Artificial Sequence
  Description of Artificial Sequence: Synthetic oligonucleotide
  Sense strand starting at position 330 of SEQ ID NO: 915962
gaccuuuaguaaguuaaga

SEQ ID NO: 1119621 - RNA, 19 nt, Artificial Sequence
  Description of Artificial Sequence: Synthetic oligonucleotide
  Antisense strand to SEQ ID NO: 1119620
ucuuaacuuacuaaagguc

SEQ ID NO: 1119622 - RNA, 19 nt, Artificial Sequence
  Description of Artificial Sequence: Synthetic oligonucleotide
  Sense strand starting at position 341 of SEQ ID NO: 915962
aguuaagaauucucccaag

SEQ ID NO: 1119623 - RNA, 19 nt, Artificial Sequence
  Description of Artificial Sequence: Synthetic oligonucleotide
  Antisense strand to SEQ ID NO: 1119622
cuugggagaauucuuaacu

SEQ ID NO: 1119624 - RNA, 19 nt, Artificial Sequence
  Description of Artificial Sequence: Synthetic oligonucleotide
  Sense strand starting at position 402 of SEQ ID NO: 915962
gaacuagauuucuaaggua

SEQ ID NO: 1119625 - RNA, 19 nt, Artificial Sequence
  Description of Artificial Sequence: Synthetic oligonucleotide
  Antisense strand to SEQ ID NO: 1119624
uaccuuagaaaucuaguuc

SEQ ID NO: 1119626 - RNA, 19 nt, Artificial Sequence
  Description of Artificial Sequence: Synthetic oligonucleotide
  Sense strand starting at position 542 of SEQ ID NO: 915962
auauuaauguccuuuguga

SEQ ID NO: 1119627 - RNA, 19 nt, Artificial Sequence
  Description of Artificial Sequence: Synthetic oligonucleotide
  Antisense strand to SEQ ID NO: 1119626
ucacaaaggacauuaauau

SEQ ID NO: 1119628 - RNA, 19 nt, Artificial Sequence
  Description of Artificial Sequence: Synthetic oligonucleotide
  Sense strand starting at position 553 of SEQ ID NO: 915962
cuuugugagcuccaugaau

SEQ ID NO: 1119629 - RNA, 19 nt, Artificial Sequence
  Description of Artificial Sequence: Synthetic oligonucleotide
  Antisense strand to SEQ ID NO: 1119628
auucauggagcucacaaag

SEQ ID NO: 1119630 - RNA, 19 nt, Artificial Sequence
  Description of Artificial Sequence: Synthetic oligonucleotide
  Sense strand starting at position 605 of SEQ ID NO: 915962
agucuacuggcacacauua

SEQ ID NO: 1119631 - RNA, 19 nt, Artificial Sequence
  Description of Artificial Sequence: Synthetic oligonucleotide
  Antisense strand to SEQ ID NO: 1119630
uaaugugugccaguagacu

SEQ ID NO: 1119632 - RNA, 19 nt, Artificial Sequence
  Description of Artificial Sequence: Synthetic oligonucleotide
  Sense strand starting at position 647 of SEQ ID NO: 915962
gaacuauacguucguauuu

SEQ ID NO: 1119633 - RNA, 19 nt, Artificial Sequence
  Description of Artificial Sequence: Synthetic oligonucleotide
  Antisense strand to SEQ ID NO: 1119632
aaauacgaacguauaguuc

SEQ ID NO: 1119634 - RNA, 19 nt, Artificial Sequence
  Description of Artificial Sequence: Synthetic oligonucleotide
  Sense strand starting at position 652 of SEQ ID NO: 915962
auacguucguauuugggaa

SEQ ID NO: 1119635 - RNA, 19 nt, Artificial Sequence
  Description of Artificial Sequence: Synthetic oligonucleotide
  Antisense strand to SEQ ID NO: 1119634
uucccaaauacgaacguau

SEQ ID NO: 1119636 - RNA, 19 nt, Artificial Sequence
  Description of Artificial Sequence: Synthetic oligonucleotide
  Sense strand starting at position 653 of SEQ ID NO: 915962
uacguucguauuugggaau

SEQ ID NO: 1119637 - RNA, 19 nt, Artificial Sequence
  Description of Artificial Sequence: Synthetic oligonucleotide
  Antisense strand to SEQ ID NO: 1119636
auucccaaauacgaacgua

SEQ ID NO: 1119638 - RNA, 19 nt, Artificial Sequence
  Description of Artificial Sequence: Synthetic oligonucleotide
  Sense strand starting at position 685 of SEQ ID NO: 915962
auuggagcuuucuuuauag

SEQ ID NO: 1119639 - RNA, 19 nt, Artificial Sequence
  Description of Artificial Sequence: Synthetic oligonucleotide
  Antisense strand to SEQ ID NO: 1119638
cuauaaagaaagcuccaau

SEQ ID NO: 1119640 - RNA, 19 nt, Artificial Sequence
  Description of Artificial Sequence: Synthetic oligonucleotide
  Sense strand starting at position 687 of SEQ ID NO: 915962
uggagcuuucuuuauagaa

SEQ ID NO: 1119641 - RNA, 19 nt, Artificial Sequence
  Description of Artificial Sequence: Synthetic oligonucleotide
  Antisense strand to SEQ ID NO: 1119640
uucuauaaagaaagcucca

SEQ ID NO: 1119642 - RNA, 19 nt, Artificial Sequence
  Description of Artificial Sequence: Synthetic oligonucleotide
  Sense strand starting at position 785 of SEQ ID NO: 915962
ugagauacgcacuaucauu

SEQ ID NO: 1119643 - RNA, 19 nt, Artificial Sequence
  Description of Artificial Sequence: Synthetic oligonucleotide
  Antisense strand to SEQ ID NO: 1119642
aaugauagugcguaucuca

SEQ ID NO: 1119644 - RNA, 19 nt, Artificial Sequence
  Description of Artificial Sequence: Synthetic oligonucleotide
  Sense strand starting at position 802 of SEQ ID NO: 915962
uuugcauaucaggaaacuu

SEQ ID NO: 1119645 - RNA, 19 nt, Artificial Sequence
  Description of Artificial Sequence: Synthetic oligonucleotide
  Antisense strand to SEQ ID NO: 1119644
aaguuuccugauaugcaaa

SEQ ID NO: 1119646 - RNA, 19 nt, Artificial Sequence
  Description of Artificial Sequence: Synthetic oligonucleotide
  Sense strand starting at position 814 of SEQ ID NO: 915962
gaaacuuaaguccaggcua

SEQ ID NO: 1119647 - RNA, 19 nt, Artificial Sequence
  Description of Artificial Sequence: Synthetic oligonucleotide
  Antisense strand to SEQ ID NO: 1119646
uagccuggacuuaaguuuc

SEQ ID NO: 1119648 - RNA, 19 nt, Artificial Sequence
  Description of Artificial Sequence: Synthetic oligonucleotide
  Sense strand starting at position 836 of SEQ ID NO: 915962
ggcucuuagcuggagaaca

SEQ ID NO: 1119649 - RNA, 19 nt, Artificial Sequence
  Description of Artificial Sequence: Synthetic oligonucleotide
  Antisense strand to SEQ ID NO: 1119648
uguucuccagcuaagagcc

SEQ ID NO: 1119650 - RNA, 19 nt, Artificial Sequence
  Description of Artificial Sequence: Synthetic oligonucleotide
  Sense strand starting at position 866 of SEQ ID NO: 915962
aggucuaccuugccugaaa

SEQ ID NO: 1119651 - RNA, 19 nt, Artificial Sequence
  Description of Artificial Sequence: Synthetic oligonucleotide
  Antisense strand to SEQ ID NO: 1119650
uuucaggcaagguagaccu

SEQ ID NO: 1119652 - RNA, 19 nt, Artificial Sequence
  Description of Artificial Sequence: Synthetic oligonucleotide
  Sense strand starting at position 1336 of SEQ ID NO: 915962
ugagaucagagcugugauc

SEQ ID NO: 1119653 - RNA, 19 nt, Artificial Sequence
  Description of Artificial Sequence: Synthetic oligonucleotide
  Antisense strand to SEQ ID NO: 1119652
gaucacagcucugaucuca

SEQ ID NO: 1119654 - RNA, 19 nt, Artificial Sequence
  Description of Artificial Sequence: Synthetic oligonucleotide
  Sense strand starting at position 1338 of SEQ ID NO: 915962
agaucagagcugugauccu

SEQ ID NO: 1119655 - RNA, 19 nt, Artificial Sequence
  Description of Artificial Sequence: Synthetic oligonucleotide
  Antisense strand to SEQ ID NO: 1119654
aggaucacagcucugaucu

SEQ ID NO: 1119656 - RNA, 19 nt, Artificial Sequence
  Description of Artificial Sequence: Synthetic oligonucleotide
  Sense strand starting at position 1506 of SEQ ID NO: 915962
cgagcaauucugcaaacuc

SEQ ID NO: 1119657 - RNA, 19 nt, Artificial Sequence
  Description of Artificial Sequence: Synthetic oligonucleotide
  Antisense strand to SEQ ID NO: 1119656
gaguuugcagaauugcucg

SEQ ID NO: 1119658 - RNA, 19 nt, Artificial Sequence
  Description of Artificial Sequence: Synthetic oligonucleotide
  Sense strand starting at position 1557 of SEQ ID NO: 915962
cagacaagucuguggacau

SEQ ID NO: 1119659 - RNA, 19 nt, Artificial Sequence
  Description of Artificial Sequence: Synthetic oligonucleotide
  Antisense strand to SEQ ID NO: 1119658
auguccacagacuugucug

SEQ ID NO: 1119660 - RNA, 19 nt, Artificial Sequence
  Description of Artificial Sequence: Synthetic oligonucleotide
  Sense strand starting at position 1638 of SEQ ID NO: 915962
ggccucacuuuaucugaaa

SEQ ID NO: 1119661 - RNA, 19 nt, Artificial Sequence
  Description of Artificial Sequence: Synthetic oligonucleotide
  Antisense strand to SEQ ID NO: 1119660
uuucagauaaagugaggcc

SEQ ID NO: 1119662 - RNA, 19 nt, Artificial Sequence
  Description of Artificial Sequence: Synthetic oligonucleotide
  Sense strand starting at position 1658 of SEQ ID NO: 915962
acggaacgaagcuaucuaa

SEQ ID NO: 1119663 - RNA, 19 nt, Artificial Sequence
  Description of Artificial Sequence: Synthetic oligonucleotide
  Antisense strand to SEQ ID NO: 1119662
uuagauagcuucguuccgu

SEQ ID NO: 1119664 - RNA, 19 nt, Artificial Sequence
  Description of Artificial Sequence: Synthetic oligonucleotide
  Sense strand starting at position 1661 of SEQ ID NO: 915962
gaacgaagcuaucuaagac

SEQ ID NO: 1119665 - RNA, 19 nt, Artificial Sequence
  Description of Artificial Sequence: Synthetic oligonucleotide
  Antisense strand to SEQ ID NO: 1119664
gucuuagauagcuucguuc

SEQ ID NO: 1119666 - RNA, 19 nt, Artificial Sequence
  Description of Artificial Sequence: Synthetic oligonucleotide
  Sense strand starting at position 2212 of SEQ ID NO: 915962
uaggauuccuucccucgau

SEQ ID NO: 1119667 - RNA, 19 nt, Artificial Sequence
  Description of Artificial Sequence: Synthetic oligonucleotide
  Antisense strand to SEQ ID NO: 1119666
aucgagggaaggaauccua

SEQ ID NO: 1119668 - RNA, 19 nt, Artificial Sequence
  Description of Artificial Sequence: Synthetic oligonucleotide
  Sense strand starting at position 2213 of SEQ ID NO: 915962
aggauuccuucccucgaua

SEQ ID NO: 1119669 - RNA, 19 nt, Artificial Sequence
  Description of Artificial Sequence: Synthetic oligonucleotide
  Antisense strand to SEQ ID NO: 1119668
uaucgagggaaggaauccu

SEQ ID NO: 1119670 - RNA, 19 nt, Artificial Sequence
  Description of Artificial Sequence: Synthetic oligonucleotide
  Sense strand starting at position 2302 of SEQ ID NO: 915962
gaaugcaaccguucgucuu

SEQ ID NO: 1119671 - RNA, 19 nt, Artificial Sequence
  Description of Artificial Sequence: Synthetic oligonucleotide
  Antisense strand to SEQ ID NO: 1119670
aagacgaacgguugcauuc

SEQ ID NO: 1119672 - RNA, 19 nt, Artificial Sequence
  Description of Artificial Sequence: Synthetic oligonucleotide
  Sense strand starting at position 2363 of SEQ ID NO: 915962
ccaacagacuguguucuau

SEQ ID NO: 1119673 - RNA, 19 nt, Artificial Sequence
  Description of Artificial Sequence: Synthetic oligonucleotide
  Antisense strand to SEQ ID NO: 1119672
auagaacacagucuguugg

SEQ ID NO: 1119674 - RNA, 19 nt, Artificial Sequence
  Description of Artificial Sequence: Synthetic oligonucleotide
  Sense strand starting at position 2365 of SEQ ID NO: 915962
aacagacuguguucuauga

SEQ ID NO: 1119675 - RNA, 19 nt, Artificial Sequence
  Description of Artificial Sequence: Synthetic oligonucleotide
  Antisense strand to SEQ ID NO: 1119674
ucauagaacacagucuguu

SEQ ID NO: 1119676 - RNA, 19 nt, Artificial Sequence
  Description of Artificial Sequence: Synthetic oligonucleotide
  Sense strand starting at position 2386 of SEQ ID NO: 915962
ucuguuagucccuaaccuu

SEQ ID NO: 1119677 - RNA, 19 nt, Artificial Sequence
  Description of Artificial Sequence: Synthetic oligonucleotide
  Antisense strand to SEQ ID NO: 1119676
aagguuagggacuaacaga

SEQ ID NO: 1119678 - RNA, 19 nt, Artificial Sequence
  Description of Artificial Sequence: Synthetic oligonucleotide
  Sense strand starting at position 2585 of SEQ ID NO: 915962
gagagaccucacuguugau

SEQ ID NO: 1119679 - RNA, 19 nt, Artificial Sequence
  Description of Artificial Sequence: Synthetic oligonucleotide
  Antisense strand to SEQ ID NO: 1119678
aucaacagugaggucucuc

SEQ ID NO: 1119680 - RNA, 19 nt, Artificial Sequence
  Description of Artificial Sequence: Synthetic oligonucleotide
  Sense strand starting at position 2610 of SEQ ID NO: 915962
uucuaaggcccuugauauc

SEQ ID NO: 1119681 - RNA, 19 nt, Artificial Sequence
  Description of Artificial Sequence: Synthetic oligonucleotide
  Antisense strand to SEQ ID NO: 1119680
gauaucaagggccuuagaa

SEQ ID NO: 1119682 - RNA, 19 nt, Artificial Sequence
  Description of Artificial Sequence: Synthetic oligonucleotide
  Sense strand starting at position 2616 of SEQ ID NO: 915962
ggcccuugauaucuaguaa

SEQ ID NO: 1119683 - RNA, 19 nt, Artificial Sequence
  Description of Artificial Sequence: Synthetic oligonucleotide
  Antisense strand to SEQ ID NO: 1119682
uuacuagauaucaagggcc

SEQ ID NO: 1119684 - RNA, 19 nt, Artificial Sequence
  Description of Artificial Sequence: Synthetic oligonucleotide
  Sense strand starting at position 2781 of SEQ ID NO: 915962
ugcaguagucuugaguaaa

SEQ ID NO: 1119685 - RNA, 19 nt, Artificial Sequence
  Description of Artificial Sequence: Synthetic oligonucleotide
  Antisense strand to SEQ ID NO: 1119684
uuuacucaagacuacugca

SEQ ID NO: 1119686 - RNA, 19 nt, Artificial Sequence
  Description of Artificial Sequence: Synthetic oligonucleotide
  Sense strand starting at position 2784 of SEQ ID NO: 915962
aguagucuugaguaaaguc

SEQ ID NO: 1119687 - RNA, 19 nt, Artificial Sequence
  Description of Artificial Sequence: Synthetic oligonucleotide
  Antisense strand to SEQ ID NO: 1119686
gacuuuacucaagacuacu

SEQ ID NO: 1119688 - RNA, 19 nt, Artificial Sequence
  Description of Artificial Sequence: Synthetic oligonucleotide
  Sense strand starting at position 3749 of SEQ ID NO: 915962
aguaccuagcaaugugaca

SEQ ID NO: 1119689 - RNA, 19 nt, Artificial Sequence
  Description of Artificial Sequence: Synthetic oligonucleotide
  Antisense strand to SEQ ID NO: 1119688
ugucacauugcuagguacu

SEQ ID NO: 1119690 - RNA, 19 nt, Artificial Sequence
  Description of Artificial Sequence: Synthetic oligonucleotide
  Sense strand starting at position 3779 of SEQ ID NO: 915962
aauguuagcuaggugacau

SEQ ID NO: 1119691 - RNA, 19 nt, Artificial Sequence
  Description of Artificial Sequence: Synthetic oligonucleotide
  Antisense strand to SEQ ID NO: 1119690
augucaccuagcuaacauu

SEQ ID NO: 1119692 - RNA, 19 nt, Artificial Sequence
  Description of Artificial Sequence: Synthetic oligonucleotide
  Sense strand starting at position 3789 of SEQ ID NO: 915962
aggugacauugucuuccau

SEQ ID NO: 1119693 - RNA, 19 nt, Artificial Sequence
  Description of Artificial Sequence: Synthetic oligonucleotide
  Antisense strand to SEQ ID NO: 1119692
auggaagacaaugucaccu

SEQ ID NO: 1119694 - RNA, 19 nt, Artificial Sequence
  Description of Artificial Sequence: Synthetic oligonucleotide
  Sense strand starting at position 113 of SEQ ID NO: 915963
uuucucagucuauggagau

SEQ ID NO: 1119695 - RNA, 19 nt, Artificial Sequence
  Description of Artificial Sequence: Synthetic oligonucleotide
  Antisense strand to SEQ ID NO: 1119694
aucuccauagacugagaaa

SEQ ID NO: 1119696 - RNA, 19 nt, Artificial Sequence
  Description of Artificial Sequence: Synthetic oligonucleotide
  Sense strand starting at position 119 of SEQ ID NO: 915963
agucuauggagauacuguu

SEQ ID NO: 1119697 - RNA, 19 nt, Artificial Sequence
  Description of Artificial Sequence: Synthetic oligonucleotide
  Antisense strand to SEQ ID NO: 1119696
aacaguaucuccauagacu

SEQ ID NO: 1119698 - RNA, 19 nt, Artificial Sequence
  Description of Artificial Sequence: Synthetic oligonucleotide
  Sense strand starting at position 222 of SEQ ID NO: 915963
gugccuuuggcuuagaaag

SEQ ID NO: 1119699 - RNA, 19 nt, Artificial Sequence
  Description of Artificial Sequence: Synthetic oligonucleotide
  Antisense strand to SEQ ID NO: 1119698
cuuucuaagccaaaggcac

SEQ ID NO: 1119700 - RNA, 19 nt, Artificial Sequence
  Description of Artificial Sequence: Synthetic oligonucleotide
  Sense strand starting at position 290 of SEQ ID NO: 915963
aaaguagauguggauuguu

SEQ ID NO: 1119701 - RNA, 19 nt, Artificial Sequence
  Description of Artificial Sequence: Synthetic oligonucleotide
  Antisense strand to SEQ ID NO: 1119700
aacaauccacaucuacuuu

SEQ ID NO: 1119702 - RNA, 19 nt, Artificial Sequence
  Description of Artificial Sequence: Synthetic oligonucleotide
  Sense strand starting at position 555 of SEQ ID NO: 915963
ucaauaaacugguauuuga

SEQ ID NO: 1119703 - RNA, 19 nt, Artificial Sequence
  Description of Artificial Sequence: Synthetic oligonucleotide
  Antisense strand to SEQ ID NO: 1119702
ucaaauaccaguuuauuga

SEQ ID NO: 1119704 - RNA, 19 nt, Artificial Sequence
  Description of Artificial Sequence: Synthetic oligonucleotide
  Sense strand starting at position 644 of SEQ ID NO: 915963
uucucaucuguauacagga

SEQ ID NO: 1119705 - RNA, 19 nt, Artificial Sequence
  Description of Artificial Sequence: Synthetic oligonucleotide
  Antisense strand to SEQ ID NO: 1119704
uccuguauacagaugagaa

SEQ ID NO: 1119706 - RNA, 19 nt, Artificial Sequence
  Description of Artificial Sequence: Synthetic oligonucleotide
  Sense strand starting at position 711 of SEQ ID NO: 915963
aagguauugugagcuauua

SEQ ID NO: 1119707 - RNA, 19 nt, Artificial Sequence
  Description of Artificial Sequence: Synthetic oligonucleotide
  Antisense strand to SEQ ID NO: 1119706
uaauagcucacaauaccuu

SEQ ID NO: 1119708 - RNA, 19 nt, Artificial Sequence
  Description of Artificial Sequence: Synthetic oligonucleotide
  Sense strand starting at position 713 of SEQ ID NO: 915963
gguauugugagcuauuauu

SEQ ID NO: 1119709 - RNA, 19 nt, Artificial Sequence
  Description of Artificial Sequence: Synthetic oligonucleotide
  Antisense strand to SEQ ID NO: 1119708
aauaauagcucacaauacc

SEQ ID NO: 1119710 - RNA, 19 nt, Artificial Sequence
  Description of Artificial Sequence: Synthetic oligonucleotide
  Sense strand starting at position 756 of SEQ ID NO: 915963
cugguaacuuacucauuag

SEQ ID NO: 1119711 - RNA, 19 nt, Artificial Sequence
  Description of Artificial Sequence: Synthetic oligonucleotide
  Antisense strand to SEQ ID NO: 1119710
cuaaugaguaaguuaccag

SEQ ID NO: 1119712 - RNA, 19 nt, Artificial Sequence
  Description of Artificial Sequence: Synthetic oligonucleotide
  Sense strand starting at position 915 of SEQ ID NO: 915963
cagagagguugacuccauu

SEQ ID NO: 1119713 - RNA, 19 nt, Artificial Sequence
  Description of Artificial Sequence: Synthetic oligonucleotide
  Antisense strand to SEQ ID NO: 1119712
aauggagucaaccucucug

SEQ ID NO: 1119714 - RNA, 19 nt, Artificial Sequence
  Description of Artificial Sequence: Synthetic oligonucleotide
  Sense strand starting at position 1127 of SEQ ID NO: 915963
guggccaauuuguuuauau

SEQ ID NO: 1119715 - RNA, 19 nt, Artificial Sequence
  Description of Artificial Sequence: Synthetic oligonucleotide
  Antisense strand to SEQ ID NO: 1119714
auauaaacaaauuggccac

SEQ ID NO: 1119716 - RNA, 19 nt, Artificial Sequence
  Description of Artificial Sequence: Synthetic oligonucleotide
  Sense strand starting at position 1128 of SEQ ID NO: 915963
uggccaauuuguuuauauu

SEQ ID NO: 1119717 - RNA, 19 nt, Artificial Sequence
  Description of Artificial Sequence: Synthetic oligonucleotide
  Antisense strand to SEQ ID NO: 1119716
aauauaaacaaauuggcca

SEQ ID NO: 1119718 - RNA, 19 nt, Artificial Sequence
  Description of Artificial Sequence: Synthetic oligonucleotide
  Sense strand starting at position 1373 of SEQ ID NO: 915963
ggugucauaauauaggcaa

SEQ ID NO: 1119719 - RNA, 19 nt, Artificial Sequence
  Description of Artificial Sequence: Synthetic oligonucleotide
  Antisense strand to SEQ ID NO: 1119718
uugccuauauuaugacacc

SEQ ID NO: 1119720 - RNA, 19 nt, Artificial Sequence
  Description of Artificial Sequence: Synthetic oligonucleotide
  Sense strand starting at position 1519 of SEQ ID NO: 915963
auaagcuguuacuccagau

SEQ ID NO: 1119721 - RNA, 19 nt, Artificial Sequence
  Description of Artificial Sequence: Synthetic oligonucleotide
  Antisense strand to SEQ ID NO: 1119720
aucuggaguaacagcuuau

SEQ ID NO: 1119722 - RNA, 19 nt, Artificial Sequence
  Description of Artificial Sequence: Synthetic oligonucleotide
  Sense strand starting at position 1625 of SEQ ID NO: 915963
aaagauuaagcaugugaag

SEQ ID NO: 1119723 - RNA, 19 nt, Artificial Sequence
  Description of Artificial Sequence: Synthetic oligonucleotide
  Antisense strand to SEQ ID NO: 1119722
cuucacaugcuuaaucuuu

SEQ ID NO: 1119724 - RNA, 19 nt, Artificial Sequence
  Description of Artificial Sequence: Synthetic oligonucleotide
  Sense strand starting at position 1627 of SEQ ID NO: 915963
agauuaagcaugugaagua

SEQ ID NO: 1119725 - RNA, 19 nt, Artificial Sequence
  Description of Artificial Sequence: Synthetic oligonucleotide
  Antisense strand to SEQ ID NO: 1119724
uacuucacaugcuuaaucu

SEQ ID NO: 1119726 - RNA, 19 nt, Artificial Sequence
  Description of Artificial Sequence: Synthetic oligonucleotide
  Sense strand starting at position 1646 of SEQ ID NO: 915963
cugucaauuguacaauauu

SEQ ID NO: 1119727 - RNA, 19 nt, Artificial Sequence
  Description of Artificial Sequence: Synthetic oligonucleotide
  Antisense strand to SEQ ID NO: 1119726
aauauuguacaauugacag

SEQ ID NO: 1119728 - RNA, 19 nt, Artificial Sequence
  Description of Artificial Sequence: Synthetic oligonucleotide
  Sense strand starting at position 1665 of SEQ ID NO: 915963
uaccuuuaugcauguggaa

SEQ ID NO: 1119729 - RNA, 19 nt, Artificial Sequence
  Description of Artificial Sequence: Synthetic oligonucleotide
  Antisense strand to SEQ ID NO: 1119728
uuccacaugcauaaaggua

SEQ ID NO: 1119730 - RNA, 19 nt, Artificial Sequence
  Description of Artificial Sequence: Synthetic oligonucleotide
  Sense strand starting at position 1796 of SEQ ID NO: 915963
caagaacuaucagugugua

SEQ ID NO: 1119731 - RNA, 19 nt, Artificial Sequence
  Description of Artificial Sequence: Synthetic oligonucleotide
  Antisense strand to SEQ ID NO: 1119730
uacacacugauaguucuug

SEQ ID NO: 1119732 - RNA, 19 nt, Artificial Sequence
  Description of Artificial Sequence: Synthetic oligonucleotide
  Sense strand starting at position 1797 of SEQ ID NO: 915963
aagaacuaucaguguguaa

SEQ ID NO: 1119733 - RNA, 19 nt, Artificial Sequence
  Description of Artificial Sequence: Synthetic oligonucleotide
  Antisense strand to SEQ ID NO: 1119732
uuacacacugauaguucuu

SEQ ID NO: 1119734 - RNA, 19 nt, Artificial Sequence
  Description of Artificial Sequence: Synthetic oligonucleotide
  Sense strand starting at position 1799 of SEQ ID NO: 915963
gaacuaucaguguguaagg

SEQ ID NO: 1119735 - RNA, 19 nt, Artificial Sequence
  Description of Artificial Sequence: Synthetic oligonucleotide
  Antisense strand to SEQ ID NO: 1119734
ccuuacacacugauaguuc

SEQ ID NO: 1119736 - RNA, 19 nt, Artificial Sequence
  Description of Artificial Sequence: Synthetic oligonucleotide
  Sense strand starting at position 1847 of SEQ ID NO: 915963
ucaggcuaucaguaguauu

SEQ ID NO: 1119737 - RNA, 19 nt, Artificial Sequence
  Description of Artificial Sequence: Synthetic oligonucleotide
  Antisense strand to SEQ ID NO: 1119736
aauacuacugauagccuga

SEQ ID NO: 1119738 - RNA, 19 nt, Artificial Sequence
  Description of Artificial Sequence: Synthetic oligonucleotide
  Sense strand starting at position 1855 of SEQ ID NO: 915963
ucaguaguauuccuuuaaa

SEQ ID NO: 1119739 - RNA, 19 nt, Artificial Sequence
  Description of Artificial Sequence: Synthetic oligonucleotide
  Antisense strand to SEQ ID NO: 1119738
uuuaaaggaauacuacuga

SEQ ID NO: 1119740 - RNA, 19 nt, Artificial Sequence
  Description of Artificial Sequence: Synthetic oligonucleotide
  Sense strand starting at position 1881 of SEQ ID NO: 915963
uccuguugacaguauauua

SEQ ID NO: 1119741 - RNA, 19 nt, Artificial Sequence
  Description of Artificial Sequence: Synthetic oligonucleotide
  Antisense strand to SEQ ID NO: 1119740
uaauauacugucaacagga

SEQ ID NO: 1119742 - RNA, 19 nt, Artificial Sequence
  Description of Artificial Sequence: Synthetic oligonucleotide
  Sense strand starting at position 1900 of SEQ ID NO: 915963
cgcaauagauaauucuuaa

SEQ ID NO: 1119743 - RNA, 19 nt, Artificial Sequence
  Description of Artificial Sequence: Synthetic oligonucleotide
  Antisense strand to SEQ ID NO: 1119742
uuaagaauuaucuauugcg

SEQ ID NO: 1119744 - RNA, 19 nt, Artificial Sequence
  Description of Artificial Sequence: Synthetic oligonucleotide
  Sense strand starting at position 2082 of SEQ ID NO: 915963
ucagguaaacuacaguuua

SEQ ID NO: 1119745 - RNA, 19 nt, Artificial Sequence
  Description of Artificial Sequence: Synthetic oligonucleotide
  Antisense strand to SEQ ID NO: 1119744
uaaacuguaguuuaccuga

SEQ ID NO: 1119746 - RNA, 19 nt, Artificial Sequence
  Description of Artificial Sequence: Synthetic oligonucleotide
  Sense strand starting at position 2092 of SEQ ID NO: 915963
uacaguuuaccugagugaa

SEQ ID NO: 1119747 - RNA, 19 nt, Artificial Sequence
  Description of Artificial Sequence: Synthetic oligonucleotide
  Antisense strand to SEQ ID NO: 1119746
uucacucagguaaacugua

SEQ ID NO: 1119748 - RNA, 19 nt, Artificial Sequence
  Description of Artificial Sequence: Synthetic oligonucleotide
  Sense strand starting at position 2094 of SEQ ID NO: 915963
caguuuaccugagugaaca

SEQ ID NO: 1119749 - RNA, 19 nt, Artificial Sequence
  Description of Artificial Sequence: Synthetic oligonucleotide
  Antisense strand to SEQ ID NO: 1119748
uguucacucagguaaacug

SEQ ID NO: 1119750 - RNA, 19 nt, Artificial Sequence
  Description of Artificial Sequence: Synthetic oligonucleotide
  Sense strand starting at position 2095 of SEQ ID NO: 915963
aguuuaccugagugaacac

SEQ ID NO: 1119751 - RNA, 19 nt, Artificial Sequence
  Description of Artificial Sequence: Synthetic oligonucleotide
  Antisense strand to SEQ ID NO: 1119750
guguucacucagguaaacu

SEQ ID NO: 1119752 - RNA, 19 nt, Artificial Sequence
  Description of Artificial Sequence: Synthetic oligonucleotide
  Sense strand starting at position 2115 of SEQ ID NO: 915963
guauuucccuuacucaguu

SEQ ID NO: 1119753 - RNA, 19 nt, Artificial Sequence
  Description of Artificial Sequence: Synthetic oligonucleotide
  Antisense strand to SEQ ID NO: 1119752
aacugaguaagggaaauac

SEQ ID NO: 1119754 - RNA, 19 nt, Artificial Sequence
  Description of Artificial Sequence: Synthetic oligonucleotide
  Sense strand starting at position 2190 of SEQ ID NO: 915963
aauguucucguugaauaug

SEQ ID NO: 1119755 - RNA, 19 nt, Artificial Sequence
  Description of Artificial Sequence: Synthetic oligonucleotide
  Antisense strand to SEQ ID NO: 1119754
cauauucaacgagaacauu

SEQ ID NO: 1119756 - RNA, 19 nt, Artificial Sequence
  Description of Artificial Sequence: Synthetic oligonucleotide
  Sense strand starting at position 2322 of SEQ ID NO: 915963
gccauagguaaaugagcua

SEQ ID NO: 1119757 - RNA, 19 nt, Artificial Sequence
  Description of Artificial Sequence: Synthetic oligonucleotide
  Antisense strand to SEQ ID NO: 1119756
uagcucauuuaccuauggc

SEQ ID NO: 1119758 - RNA, 19 nt, Artificial Sequence
  Description of Artificial Sequence: Synthetic oligonucleotide
  Sense strand starting at position 2511 of SEQ ID NO: 915963
agaggaauaucuucuuccu

SEQ ID NO: 1119759 - RNA, 19 nt, Artificial Sequence
  Description of Artificial Sequence: Synthetic oligonucleotide
  Antisense strand to SEQ ID NO: 1119758
aggaagaagauauuccucu

SEQ ID NO: 1119760 - RNA, 19 nt, Artificial Sequence
  Description of Artificial Sequence: Synthetic oligonucleotide
  Sense strand starting at position 2524 of SEQ ID NO: 915963
cuuccuauagcagaaaguu

SEQ ID NO: 1119761 - RNA, 19 nt, Artificial Sequence
  Description of Artificial Sequence: Synthetic oligonucleotide
  Antisense strand to SEQ ID NO: 1119760
aacuuucugcuauaggaag

SEQ ID NO: 1119762 - RNA, 19 nt, Artificial Sequence
  Description of Artificial Sequence: Synthetic oligonucleotide
  Sense strand starting at position 2532 of SEQ ID NO: 915963
agcagaaaguuuccagagu

SEQ ID NO: 1119763 - RNA, 19 nt, Artificial Sequence
  Description of Artificial Sequence: Synthetic oligonucleotide
  Antisense strand to SEQ ID NO: 1119762
acucuggaaacuuucugcu

SEQ ID NO: 1119764 - RNA, 19 nt, Artificial Sequence
  Description of Artificial Sequence: Synthetic oligonucleotide
  Sense strand starting at position 2551 of SEQ ID NO: 915963
gcuugaaggcuuugagaau

SEQ ID NO: 1119765 - RNA, 19 nt, Artificial Sequence
  Description of Artificial Sequence: Synthetic oligonucleotide
  Antisense strand to SEQ ID NO: 1119764
auucucaaagccuucaagc

SEQ ID NO: 1119766 - RNA, 19 nt, Artificial Sequence
  Description of Artificial Sequence: Synthetic oligonucleotide
  Sense strand starting at position 2583 of SEQ ID NO: 915963
gggaaauacucugauuucc

SEQ ID NO: 1119767 - RNA, 19 nt, Artificial Sequence
  Description of Artificial Sequence: Synthetic oligonucleotide
  Antisense strand to SEQ ID NO: 1119766
ggaaaucagaguauuuccc

SEQ ID NO: 1119768 - RNA, 19 nt, Artificial Sequence
  Description of Artificial Sequence: Synthetic oligonucleotide
  Sense strand starting at position 3289 of SEQ ID NO: 915963
gugggauaaguuggccaaa

SEQ ID NO: 1119769 - RNA, 19 nt, Artificial Sequence
  Description of Artificial Sequence: Synthetic oligonucleotide
  Antisense strand to SEQ ID NO: 1119768
uuuggccaacuuaucccac

SEQ ID NO: 1119770 - RNA, 19 nt, Artificial Sequence
  Description of Artificial Sequence: Synthetic oligonucleotide
  Sense strand starting at position 3685 of SEQ ID NO: 915963
ccaugagguccuuacuucu

SEQ ID NO: 1119771 - RNA, 19 nt, Artificial Sequence
  Description of Artificial Sequence: Synthetic oligonucleotide
  Antisense strand to SEQ ID NO: 1119770
agaaguaaggaccucaugg

SEQ ID NO: 1119772 - RNA, 19 nt, Artificial Sequence
  Description of Artificial Sequence: Synthetic oligonucleotide
  Sense strand starting at position 3894 of SEQ ID NO: 915963
gcuagauuggcugagacac

SEQ ID NO: 1119773 - RNA, 19 nt, Artificial Sequence
  Description of Artificial Sequence: Synthetic oligonucleotide
  Antisense strand to SEQ ID NO: 1119772
gugucucagccaaucuagc

SEQ ID NO: 1119774 - RNA, 19 nt, Artificial Sequence
  Description of Artificial Sequence: Synthetic oligonucleotide
  Sense strand starting at position 127 of SEQ ID NO: 915964
ugcagcugucuggaagaga

SEQ ID NO: 1119775 - RNA, 19 nt, Artificial Sequence
  Description of Artificial Sequence: Synthetic oligonucleotide
  Antisense strand to SEQ ID NO: 1119774
ucucuuccagacagcugca

SEQ ID NO: 1119776 - RNA, 19 nt, Artificial Sequence
  Description of Artificial Sequence: Synthetic oligonucleotide
  Sense strand starting at position 260 of SEQ ID NO: 915964
cuuagaaauuuagaaguca

SEQ ID NO: 1119777 - RNA, 19 nt, Artificial Sequence
  Description of Artificial Sequence: Synthetic oligonucleotide
  Antisense strand to SEQ ID NO: 1119776
ugacuucuaaauuucuaag

SEQ ID NO: 1119778 - RNA, 19 nt, Artificial Sequence
  Description of Artificial Sequence: Synthetic oligonucleotide
  Sense strand starting at position 652 of SEQ ID NO: 915964
aguucugauuccuuaugaa

SEQ ID NO: 1119779 - RNA, 19 nt, Artificial Sequence
  Description of Artificial Sequence: Synthetic oligonucleotide
  Antisense strand to SEQ ID NO: 1119778
uucauaaggaaucagaacu

SEQ ID NO: 1119780 - RNA, 19 nt, Artificial Sequence
  Description of Artificial Sequence: Synthetic oligonucleotide
  Sense strand starting at position 667 of SEQ ID NO: 915964
ugaagcuuuccugacccau

SEQ ID NO: 1119781 - RNA, 19 nt, Artificial Sequence
  Description of Artificial Sequence: Synthetic oligonucleotide
  Antisense strand to SEQ ID NO: 1119780
augggucaggaaagcuuca

SEQ ID NO: 1119782 - RNA, 19 nt, Artificial Sequence
  Description of Artificial Sequence: Synthetic oligonucleotide
  Sense strand starting at position 808 of SEQ ID NO: 915964
uuagaugguugaccuugau

SEQ ID NO: 1119783 - RNA, 19 nt, Artificial Sequence
  Description of Artificial Sequence: Synthetic oligonucleotide
  Antisense strand to SEQ ID NO: 1119782
aucaaggucaaccaucuaa

SEQ ID NO: 1119784 - RNA, 19 nt, Artificial Sequence
  Description of Artificial Sequence: Synthetic oligonucleotide
  Sense strand starting at position 873 of SEQ ID NO: 915964
auaaauuaaugucccuagu

SEQ ID NO: 1119785 - RNA, 19 nt, Artificial Sequence
  Description of Artificial Sequence: Synthetic oligonucleotide
  Antisense strand to SEQ ID NO: 1119784
acuagggacauuaauuuau

SEQ ID NO: 1119786 - RNA, 19 nt, Artificial Sequence
  Description of Artificial Sequence: Synthetic oligonucleotide
  Sense strand starting at position 921 of SEQ ID NO: 915964
ugcaauugaugccugauuu

SEQ ID NO: 1119787 - RNA, 19 nt, Artificial Sequence
  Description of Artificial Sequence: Synthetic oligonucleotide
  Antisense strand to SEQ ID NO: 1119786
aaaucaggcaucaauugca

SEQ ID NO: 1119788 - RNA, 19 nt, Artificial Sequence
  Description of Artificial Sequence: Synthetic oligonucleotide
  Sense strand starting at position 922 of SEQ ID NO: 915964
gcaauugaugccugauuuc

SEQ ID NO: 1119789 - RNA, 19 nt, Artificial Sequence
  Description of Artificial Sequence: Synthetic oligonucleotide
  Antisense strand to SEQ ID NO: 1119788
gaaaucaggcaucaauugc

SEQ ID NO: 1119790 - RNA, 19 nt, Artificial Sequence
  Description of Artificial Sequence: Synthetic oligonucleotide
  Sense strand starting at position 1081 of SEQ ID NO: 915964
guucuucucccauagagua

SEQ ID NO: 1119791 - RNA, 19 nt, Artificial Sequence
  Description of Artificial Sequence: Synthetic oligonucleotide
  Antisense strand to SEQ ID NO: 1119790
uacucuaugggagaagaac

SEQ ID NO: 1119792 - RNA, 19 nt, Artificial Sequence
  Description of Artificial Sequence: Synthetic oligonucleotide
  Sense strand starting at position 1088 of SEQ ID NO: 915964
ucccauagaguauagcaau

SEQ ID NO: 1119793 - RNA, 19 nt, Artificial Sequence
  Description of Artificial Sequence: Synthetic oligonucleotide
  Antisense strand to SEQ ID NO: 1119792
auugcuauacucuauggga

SEQ ID NO: 1119794 - RNA, 19 nt, Artificial Sequence
  Description of Artificial Sequence: Synthetic oligonucleotide
  Sense strand starting at position 1102 of SEQ ID NO: 915964
gcaaucuaaggauguuuga

SEQ ID NO: 1119795 - RNA, 19 nt, Artificial Sequence
  Description of Artificial Sequence: Synthetic oligonucleotide
  Antisense strand to SEQ ID NO: 1119794
ucaaacauccuuagauugc

SEQ ID NO: 1119796 - RNA, 19 nt, Artificial Sequence
  Description of Artificial Sequence: Synthetic oligonucleotide
  Sense strand starting at position 1113 of SEQ ID NO: 915964
auguuugagggucaucauu

SEQ ID NO: 1119797 - RNA, 19 nt, Artificial Sequence
  Description of Artificial Sequence: Synthetic oligonucleotide
  Antisense strand to SEQ ID NO: 1119796
aaugaugacccucaaacau

SEQ ID NO: 1119798 - RNA, 19 nt, Artificial Sequence
  Description of Artificial Sequence: Synthetic oligonucleotide
  Sense strand starting at position 1115 of SEQ ID NO: 915964
guuugagggucaucauuag

SEQ ID NO: 1119799 - RNA, 19 nt, Artificial Sequence
  Description of Artificial Sequence: Synthetic oligonucleotide
  Antisense strand to SEQ ID NO: 1119798
cuaaugaugacccucaaac

SEQ ID NO: 1119800 - RNA, 19 nt, Artificial Sequence
  Description of Artificial Sequence: Synthetic oligonucleotide
  Sense strand starting at position 1482 of SEQ ID NO: 915964
ggaaguauuugcccugggu

SEQ ID NO: 1119801 - RNA, 19 nt, Artificial Sequence
  Description of Artificial Sequence: Synthetic oligonucleotide
  Antisense strand to SEQ ID NO: 1119800
acccagggcaaauacuucc

SEQ ID NO: 1119802 - RNA, 19 nt, Artificial Sequence
  Description of Artificial Sequence: Synthetic oligonucleotide
  Sense strand starting at position 1514 of SEQ ID NO: 915964
agucuuugucaguaacaac

SEQ ID NO: 1119803 - RNA, 19 nt, Artificial Sequence
  Description of Artificial Sequence: Synthetic oligonucleotide
  Antisense strand to SEQ ID NO: 1119802
guuguuacugacaaagacu

SEQ ID NO: 1119804 - RNA, 19 nt, Artificial Sequence
  Description of Artificial Sequence: Synthetic oligonucleotide
  Sense strand starting at position 1532 of SEQ ID NO: 915964
cagaaauugcagugaggaa

SEQ ID NO: 1119805 - RNA, 19 nt, Artificial Sequence
  Description of Artificial Sequence: Synthetic oligonucleotide
  Antisense strand to SEQ ID NO: 1119804
uuccucacugcaauuucug

SEQ ID NO: 1119806 - RNA, 19 nt, Artificial Sequence
  Description of Artificial Sequence: Synthetic oligonucleotide
  Sense strand starting at position 1586 of SEQ ID NO: 915964
aaauaaguuggcugagauu

SEQ ID NO: 1119807 - RNA, 19 nt, Artificial Sequence
  Description of Artificial Sequence: Synthetic oligonucleotide
  Antisense strand to SEQ ID NO: 1119806
aaucucagccaacuuauuu

SEQ ID NO: 1119808 - RNA, 19 nt, Artificial Sequence
  Description of Artificial Sequence: Synthetic oligonucleotide
  Sense strand starting at position 1627 of SEQ ID NO: 915964
ggucuuugaguucaggcaa

SEQ ID NO: 1119809 - RNA, 19 nt, Artificial Sequence
  Description of Artificial Sequence: Synthetic oligonucleotide
  Antisense strand to SEQ ID NO: 1119808
uugccugaacucaaagacc

SEQ ID NO: 1119810 - RNA, 19 nt, Artificial Sequence
  Description of Artificial Sequence: Synthetic oligonucleotide
  Sense strand starting at position 1663 of SEQ ID NO: 915964
gagugaaugcaagauuguc

SEQ ID NO: 1119811 - RNA, 19 nt, Artificial Sequence
  Description of Artificial Sequence: Synthetic oligonucleotide
  Antisense strand to SEQ ID NO: 1119810
gacaaucuugcauucacuc

SEQ ID NO: 1119812 - RNA, 19 nt, Artificial Sequence
  Description of Artificial Sequence: Synthetic oligonucleotide
  Sense strand starting at position 1775 of SEQ ID NO: 915964
aagugcuuuguagagaaga

SEQ ID NO: 1119813 - RNA, 19 nt, Artificial Sequence
  Description of Artificial Sequence: Synthetic oligonucleotide
  Antisense strand to SEQ ID NO: 1119812
ucuucucuacaaagcacuu

SEQ ID NO: 1119814 - RNA, 19 nt, Artificial Sequence
  Description of Artificial Sequence: Synthetic oligonucleotide
  Sense strand starting at position 1777 of SEQ ID NO: 915964
gugcuuuguagagaagaag

SEQ ID NO: 1119815 - RNA, 19 nt, Artificial Sequence
  Description of Artificial Sequence: Synthetic oligonucleotide
  Antisense strand to SEQ ID NO: 1119814
cuucuucucuacaaagcac

SEQ ID NO: 1119816 - RNA, 19 nt, Artificial Sequence
  Description of Artificial Sequence: Synthetic oligonucleotide
  Sense strand starting at position 1836 of SEQ ID NO: 915964
uugagaaguuucccuccca

SEQ ID NO: 1119817 - RNA, 19 nt, Artificial Sequence
  Description of Artificial Sequence: Synthetic oligonucleotide
  Antisense strand to SEQ ID NO: 1119816
ugggagggaaacuucucaa

SEQ ID NO: 1119818 - RNA, 19 nt, Artificial Sequence
  Description of Artificial Sequence: Synthetic oligonucleotide
  Sense strand starting at position 1837 of SEQ ID NO: 915964
ugagaaguuucccucccac

SEQ ID NO: 1119819 - RNA, 19 nt, Artificial Sequence
  Description of Artificial Sequence: Synthetic oligonucleotide
  Antisense strand to SEQ ID NO: 1119818
gugggagggaaacuucuca

SEQ ID NO: 1119820 - RNA, 19 nt, Artificial Sequence
  Description of Artificial Sequence: Synthetic oligonucleotide
  Sense strand starting at position 1892 of SEQ ID NO: 915964
agucaagaacgaggucaau

SEQ ID NO: 1119821 - RNA, 19 nt, Artificial Sequence
  Description of Artificial Sequence: Synthetic oligonucleotide
  Antisense strand to SEQ ID NO: 1119820
auugaccucguucuugacu

SEQ ID NO: 1119822 - RNA, 19 nt, Artificial Sequence
  Description of Artificial Sequence: Synthetic oligonucleotide
  Sense strand starting at position 1902 of SEQ ID NO: 915964
gaggucaauuaugccuaga

SEQ ID NO: 1119823 - RNA, 19 nt, Artificial Sequence
  Description of Artificial Sequence: Synthetic oligonucleotide
  Antisense strand to SEQ ID NO: 1119822
ucuaggcauaauugaccuc

SEQ ID NO: 1119824 - RNA, 19 nt, Artificial Sequence
  Description of Artificial Sequence: Synthetic oligonucleotide
  Sense strand starting at position 1904 of SEQ ID NO: 915964
ggucaauuaugccuagaaa

SEQ ID NO: 1119825 - RNA, 19 nt, Artificial Sequence
  Description of Artificial Sequence: Synthetic oligonucleotide
  Antisense strand to SEQ ID NO: 1119824
uuucuaggcauaauugacc

SEQ ID NO: 1119826 - RNA, 19 nt, Artificial Sequence
  Description of Artificial Sequence: Synthetic oligonucleotide
  Sense strand starting at position 1905 of SEQ ID NO: 915964
gucaauuaugccuagaaac

SEQ ID NO: 1119827 - RNA, 19 nt, Artificial Sequence
  Description of Artificial Sequence: Synthetic oligonucleotide
  Antisense strand to SEQ ID NO: 1119826
guuucuaggcauaauugac

SEQ ID NO: 1119828 - RNA, 19 nt, Artificial Sequence
  Description of Artificial Sequence: Synthetic oligonucleotide
  Sense strand starting at position 2216 of SEQ ID NO: 915964
uuggaaauccauugauucu

SEQ ID NO: 1119829 - RNA, 19 nt, Artificial Sequence
  Description of Artificial Sequence: Synthetic oligonucleotide
  Antisense strand to SEQ ID NO: 1119828
agaaucaauggauuuccaa

SEQ ID NO: 1119830 - RNA, 19 nt, Artificial Sequence
  Description of Artificial Sequence: Synthetic oligonucleotide
  Sense strand starting at position 2294 of SEQ ID NO: 915964
gucugagaaaucuggcuuu

SEQ ID NO: 1119831 - RNA, 19 nt, Artificial Sequence
  Description of Artificial Sequence: Synthetic oligonucleotide
  Antisense strand to SEQ ID NO: 1119830
aaagccagauuucucagac

SEQ ID NO: 1119832 - RNA, 19 nt, Artificial Sequence
  Description of Artificial Sequence: Synthetic oligonucleotide
  Sense strand starting at position 2351 of SEQ ID NO: 915964
uguugugaauucccaaagu

SEQ ID NO: 1119833 - RNA, 19 nt, Artificial Sequence
  Description of Artificial Sequence: Synthetic oligonucleotide
  Antisense strand to SEQ ID NO: 1119832
acuuugggaauucacaaca

SEQ ID NO: 1119834 - RNA, 19 nt, Artificial Sequence
  Description of Artificial Sequence: Synthetic oligonucleotide
  Sense strand starting at position 2387 of SEQ ID NO: 915964
accaaagauuugugaauga

SEQ ID NO: 1119835 - RNA, 19 nt, Artificial Sequence
  Description of Artificial Sequence: Synthetic oligonucleotide
  Antisense strand to SEQ ID NO: 1119834
ucauucacaaaucuuuggu

SEQ ID NO: 1119836 - RNA, 19 nt, Artificial Sequence
  Description of Artificial Sequence: Synthetic oligonucleotide
  Sense strand starting at position 2583 of SEQ ID NO: 915964
cuagaaaucuaagaacaga

SEQ ID NO: 1119837 - RNA, 19 nt, Artificial Sequence
  Description of Artificial Sequence: Synthetic oligonucleotide
  Antisense strand to SEQ ID NO: 1119836
ucuguucuuagauuucuag

SEQ ID NO: 1119838 - RNA, 19 nt, Artificial Sequence
  Description of Artificial Sequence: Synthetic oligonucleotide
  Sense strand starting at position 2691 of SEQ ID NO: 915964
ugaagugggaauuguggua

SEQ ID NO: 1119839 - RNA, 19 nt, Artificial Sequence
  Description of Artificial Sequence: Synthetic oligonucleotide
  Antisense strand to SEQ ID NO: 1119838
uaccacaauucccacuuca

SEQ ID NO: 1119840 - RNA, 19 nt, Artificial Sequence
  Description of Artificial Sequence: Synthetic oligonucleotide
  Sense strand starting at position 2713 of SEQ ID NO: 915964
cguguuuaggcagacagga

SEQ ID NO: 1119841 - RNA, 19 nt, Artificial Sequence
  Description of Artificial Sequence: Synthetic oligonucleotide
  Antisense strand to SEQ ID NO: 1119840
uccugucugccuaaacacg

SEQ ID NO: 1119842 - RNA, 19 nt, Artificial Sequence
  Description of Artificial Sequence: Synthetic oligonucleotide
  Sense strand starting at position 2914 of SEQ ID NO: 915964
uccaccugucuuuagcaga

SEQ ID NO: 1119843 - RNA, 19 nt, Artificial Sequence
  Description of Artificial Sequence: Synthetic oligonucleotide
  Antisense strand to SEQ ID NO: 1119842
ucugcuaaagacaggugga

SEQ ID NO: 1119844 - RNA, 19 nt, Artificial Sequence
  Description of Artificial Sequence: Synthetic oligonucleotide
  Sense strand starting at position 2919 of SEQ ID NO: 915964
cugucuuuagcagacuuua

SEQ ID NO: 1119845 - RNA, 19 nt, Artificial Sequence
  Description of Artificial Sequence: Synthetic oligonucleotide
  Antisense strand to SEQ ID NO: 1119844
uaaagucugcuaaagacag

SEQ ID NO: 1119846 - RNA, 19 nt, Artificial Sequence
  Description of Artificial Sequence: Synthetic oligonucleotide
  Sense strand starting at position 3325 of SEQ ID NO: 915964
agaggauacacauguaggu

SEQ ID NO: 1119847 - RNA, 19 nt, Artificial Sequence
  Description of Artificial Sequence: Synthetic oligonucleotide
  Antisense strand to SEQ ID NO: 1119846
accuacauguguauccucu

SEQ ID NO: 1119848 - RNA, 19 nt, Artificial Sequence
  Description of Artificial Sequence: Synthetic oligonucleotide
  Sense strand starting at position 3335 of SEQ ID NO: 915964
cauguagguuuguuacaag

SEQ ID NO: 1119849 - RNA, 19 nt, Artificial Sequence
  Description of Artificial Sequence: Synthetic oligonucleotide
  Antisense strand to SEQ ID NO: 1119848
cuuguaacaaaccuacaug

SEQ ID NO: 1119850 - RNA, 19 nt, Artificial Sequence
  Description of Artificial Sequence: Synthetic oligonucleotide
  Sense strand starting at position 3353 of SEQ ID NO: 915964
ggauauauugcugagguuu

SEQ ID NO: 1119851 - RNA, 19 nt, Artificial Sequence
  Description of Artificial Sequence: Synthetic oligonucleotide
  Antisense strand to SEQ ID NO: 1119850
aaaccucagcaauauaucc

SEQ ID NO: 1119852 - RNA, 19 nt, Artificial Sequence
  Description of Artificial Sequence: Synthetic oligonucleotide
  Sense strand starting at position 3966 of SEQ ID NO: 915964
ugagaugucucauugugau

SEQ ID NO: 1119853 - RNA, 19 nt, Artificial Sequence
  Description of Artificial Sequence: Synthetic oligonucleotide
  Antisense strand to SEQ ID NO: 1119852
aucacaaugagacaucuca

SEQ ID NO: 1119854 - RNA, 19 nt, Artificial Sequence
  Description of Artificial Sequence: Synthetic oligonucleotide
  Sense strand starting at position 49 of SEQ ID NO: 915965
ggcucuugucuguagugga

SEQ ID NO: 1119855 - RNA, 19 nt, Artificial Sequence
  Description of Artificial Sequence: Synthetic oligonucleotide
  Antisense strand to SEQ ID NO: 1119854
uccacuacagacaagagcc

SEQ ID NO: 1119856 - RNA, 19 nt, Artificial Sequence
  Description of Artificial Sequence: Synthetic oligonucleotide
  Sense strand starting at position 402 of SEQ ID NO: 915965
ucacaaagguauuccgagu

SEQ ID NO: 1119857 - RNA, 19 nt, Artificial Sequence
  Description of Artificial Sequence: Synthetic oligonucleotide
  Antisense strand to SEQ ID NO: 1119856
acucggaauaccuuuguga

SEQ ID NO: 1119858 - RNA, 19 nt, Artificial Sequence
  Description of Artificial Sequence: Synthetic oligonucleotide
  Sense strand starting at position 482 of SEQ ID NO: 915965
agccaugacuccucagcaa

SEQ ID NO: 1119859 - RNA, 19 nt, Artificial Sequence
  Description of Artificial Sequence: Synthetic oligonucleotide
  Antisense strand to SEQ ID NO: 1119858
uugcugaggagucauggcu

SEQ ID NO: 1119860 - RNA, 19 nt, Artificial Sequence
  Description of Artificial Sequence: Synthetic oligonucleotide
  Sense strand starting at position 539 of SEQ ID NO: 915965
ggcucagucaagggaauga

SEQ ID NO: 1119861 - RNA, 19 nt, Artificial Sequence
  Description of Artificial Sequence: Synthetic oligonucleotide
  Antisense strand to SEQ ID NO: 1119860
ucauucccuugacugagcc

SEQ ID NO: 1119862 - RNA, 19 nt, Artificial Sequence
  Description of Artificial Sequence: Synthetic oligonucleotide
  Sense strand starting at position 682 of SEQ ID NO: 915965
gcugguuuacaagguaaau

SEQ ID NO: 1119863 - RNA, 19 nt, Artificial Sequence
  Description of Artificial Sequence: Synthetic oligonucleotide
  Antisense strand to SEQ ID NO: 1119862
auuuaccuuguaaaccagc

SEQ ID NO: 1119864 - RNA, 19 nt, Artificial Sequence
  Description of Artificial Sequence: Synthetic oligonucleotide
  Sense strand starting at position 693 of SEQ ID NO: 915965
agguaaaucuauuccugga

SEQ ID NO: 1119865 - RNA, 19 nt, Artificial Sequence
  Description of Artificial Sequence: Synthetic oligonucleotide
  Antisense strand to SEQ ID NO: 1119864
uccaggaauagauuuaccu

SEQ ID NO: 1119866 - RNA, 19 nt, Artificial Sequence
  Description of Artificial Sequence: Synthetic oligonucleotide
  Sense strand starting at position 835 of SEQ ID NO: 915965
cccaguuuggaucaaguga

SEQ ID NO: 1119867 - RNA, 19 nt, Artificial Sequence
  Description of Artificial Sequence: Synthetic oligonucleotide
  Antisense strand to SEQ ID NO: 1119866
ucacuugauccaaacuggg

SEQ ID NO: 1119868 - RNA, 19 nt, Artificial Sequence
  Description of Artificial Sequence: Synthetic oligonucleotide
  Sense strand starting at position 848 of SEQ ID NO: 915965
aagugagccgccugagauu

SEQ ID NO: 1119869 - RNA, 19 nt, Artificial Sequence
  Description of Artificial Sequence: Synthetic oligonucleotide
  Antisense strand to SEQ ID NO: 1119868
aaucucaggcggcucacuu

SEQ ID NO: 1119870 - RNA, 19 nt, Artificial Sequence
  Description of Artificial Sequence: Synthetic oligonucleotide
  Sense strand starting at position 875 of SEQ ID NO: 915965
uccugugcgcaucucauua

SEQ ID NO: 1119871 - RNA, 19 nt, Artificial Sequence
  Description of Artificial Sequence: Synthetic oligonucleotide
  Antisense strand to SEQ ID NO: 1119870
uaaugagaugcgcacagga

SEQ ID NO: 1119872 - RNA, 19 nt, Artificial Sequence
  Description of Artificial Sequence: Synthetic oligonucleotide
  Sense strand starting at position 951 of SEQ ID NO: 915965
gugucucacucauucugua

SEQ ID NO: 1119873 - RNA, 19 nt, Artificial Sequence
  Description of Artificial Sequence: Synthetic oligonucleotide
  Antisense strand to SEQ ID NO: 1119872
uacagaaugagugagacac

SEQ ID NO: 1119874 - RNA, 19 nt, Artificial Sequence
  Description of Artificial Sequence: Synthetic oligonucleotide
  Sense strand starting at position 956 of SEQ ID NO: 915965
ucacucauucuguagcuca

SEQ ID NO: 1119875 - RNA, 19 nt, Artificial Sequence
  Description of Artificial Sequence: Synthetic oligonucleotide
  Antisense strand to SEQ ID NO: 1119874
ugagcuacagaaugaguga

SEQ ID NO: 1119876 - RNA, 19 nt, Artificial Sequence
  Description of Artificial Sequence: Synthetic oligonucleotide
  Sense strand starting at position 1198 of SEQ ID NO: 915965
uaaggauuauaggcgugau

SEQ ID NO: 1119877 - RNA, 19 nt, Artificial Sequence
  Description of Artificial Sequence: Synthetic oligonucleotide
  Antisense strand to SEQ ID NO: 1119876
aucacgccuauaauccuua

SEQ ID NO: 1119878 - RNA, 19 nt, Artificial Sequence
  Description of Artificial Sequence: Synthetic oligonucleotide
  Sense strand starting at position 1199 of SEQ ID NO: 915965
aaggauuauaggcgugauc

SEQ ID NO: 1119879 - RNA, 19 nt, Artificial Sequence
  Description of Artificial Sequence: Synthetic oligonucleotide
  Antisense strand to SEQ ID NO: 1119878
gaucacgccuauaauccuu

SEQ ID NO: 1119880 - RNA, 19 nt, Artificial Sequence
  Description of Artificial Sequence: Synthetic oligonucleotide
  Sense strand starting at position 1235 of SEQ ID NO: 915965
ugcauuuauucuuauugag

SEQ ID NO: 1119881 - RNA, 19 nt, Artificial Sequence
  Description of Artificial Sequence: Synthetic oligonucleotide
  Antisense strand to SEQ ID NO: 1119880
cucaauaagaauaaaugca

SEQ ID NO: 1119882 - RNA, 19 nt, Artificial Sequence
  Description of Artificial Sequence: Synthetic oligonucleotide
  Sense strand starting at position 1424 of SEQ ID NO: 915965
cugacuaggugcuuuguua

SEQ ID NO: 1119883 - RNA, 19 nt, Artificial Sequence
  Description of Artificial Sequence: Synthetic oligonucleotide
  Antisense strand to SEQ ID NO: 1119882
uaacaaagcaccuagucag

SEQ ID NO: 1119884 - RNA, 19 nt, Artificial Sequence
  Description of Artificial Sequence: Synthetic oligonucleotide
  Sense strand starting at position 1428 of SEQ ID NO: 915965
cuaggugcuuuguuaacaa

SEQ ID NO: 1119885 - RNA, 19 nt, Artificial Sequence
  Description of Artificial Sequence: Synthetic oligonucleotide
  Antisense strand to SEQ ID NO: 1119884
uuguuaacaaagcaccuag

SEQ ID NO: 1119886 - RNA, 19 nt, Artificial Sequence
  Description of Artificial Sequence: Synthetic oligonucleotide
  Sense strand starting at position 1552 of SEQ ID NO: 915965
gagaaugggagacguguuu

SEQ ID NO: 1119887 - RNA, 19 nt, Artificial Sequence
  Description of Artificial Sequence: Synthetic oligonucleotide
  Antisense strand to SEQ ID NO: 1119886
aaacacgucucccauucuc

SEQ ID NO: 1119888 - RNA, 19 nt, Artificial Sequence
  Description of Artificial Sequence: Synthetic oligonucleotide
  Sense strand starting at position 1558 of SEQ ID NO: 915965
gggagacguguuuguauua

SEQ ID NO: 1119889 - RNA, 19 nt, Artificial Sequence
  Description of Artificial Sequence: Synthetic oligonucleotide
  Antisense strand to SEQ ID NO: 1119888
uaauacaaacacgucuccc

SEQ ID NO: 1119890 - RNA, 19 nt, Artificial Sequence
  Description of Artificial Sequence: Synthetic oligonucleotide
  Sense strand starting at position 1608 of SEQ ID NO: 915965
uguuccucguucucaaaua

SEQ ID NO: 1119891 - RNA, 19 nt, Artificial Sequence
  Description of Artificial Sequence: Synthetic oligonucleotide
  Antisense strand to SEQ ID NO: 1119890
uauuugagaacgaggaaca

SEQ ID NO: 1119892 - RNA, 19 nt, Artificial Sequence
  Description of Artificial Sequence: Synthetic oligonucleotide
  Sense strand starting at position 1802 of SEQ ID NO: 915965
gcggguucucgguuaggua

SEQ ID NO: 1119893 - RNA, 19 nt, Artificial Sequence
  Description of Artificial Sequence: Synthetic oligonucleotide
  Antisense strand to SEQ ID NO: 1119892
uaccuaaccgagaacccgc

SEQ ID NO: 1119894 - RNA, 19 nt, Artificial Sequence
  Description of Artificial Sequence: Synthetic oligonucleotide
  Sense strand starting at position 2202 of SEQ ID NO: 915965
ucucgaucuuuguccuaac

SEQ ID NO: 1119895 - RNA, 19 nt, Artificial Sequence
  Description of Artificial Sequence: Synthetic oligonucleotide
  Antisense strand to SEQ ID NO: 1119894
guuaggacaaagaucgaga

SEQ ID NO: 1119896 - RNA, 19 nt, Artificial Sequence
  Description of Artificial Sequence: Synthetic oligonucleotide
  Sense strand starting at position 2431 of SEQ ID NO: 915965
ucaaucugguuuccuguua

SEQ ID NO: 1119897 - RNA, 19 nt, Artificial Sequence
  Description of Artificial Sequence: Synthetic oligonucleotide
  Antisense strand to SEQ ID NO: 1119896
uaacaggaaaccagauuga

SEQ ID NO: 1119898 - RNA, 19 nt, Artificial Sequence
  Description of Artificial Sequence: Synthetic oligonucleotide
  Sense strand starting at position 2548 of SEQ ID NO: 915965
uggcacagcuuucugauau

SEQ ID NO: 1119899 - RNA, 19 nt, Artificial Sequence
  Description of Artificial Sequence: Synthetic oligonucleotide
  Antisense strand to SEQ ID NO: 1119898
auaucagaaagcugugcca

SEQ ID NO: 1119900 - RNA, 19 nt, Artificial Sequence
  Description of Artificial Sequence: Synthetic oligonucleotide
  Sense strand starting at position 2565 of SEQ ID NO: 915965
auugucggaguguaaacau

SEQ ID NO: 1119901 - RNA, 19 nt, Artificial Sequence
  Description of Artificial Sequence: Synthetic oligonucleotide
  Antisense strand to SEQ ID NO: 1119900
auguuuacacuccgacaau

SEQ ID NO: 1119902 - RNA, 19 nt, Artificial Sequence
  Description of Artificial Sequence: Synthetic oligonucleotide
  Sense strand starting at position 2593 of SEQ ID NO: 915965
uucuccaaccagugagaaa

SEQ ID NO: 1119903 - RNA, 19 nt, Artificial Sequence
  Description of Artificial Sequence: Synthetic oligonucleotide
  Antisense strand to SEQ ID NO: 1119902
uuucucacugguuggagaa

SEQ ID NO: 1119904 - RNA, 19 nt, Artificial Sequence
  Description of Artificial Sequence: Synthetic oligonucleotide
  Sense strand starting at position 2898 of SEQ ID NO: 915965
gauuacaggcguuaaguca

SEQ ID NO: 1119905 - RNA, 19 nt, Artificial Sequence
  Description of Artificial Sequence: Synthetic oligonucleotide
  Antisense strand to SEQ ID NO: 1119904
ugacuuaacgccuguaauc

SEQ ID NO: 1119906 - RNA, 19 nt, Artificial Sequence
  Description of Artificial Sequence: Synthetic oligonucleotide
  Sense strand starting at position 2919 of SEQ ID NO: 915965
ucgcccagccuuugagaaa

SEQ ID NO: 1119907 - RNA, 19 nt, Artificial Sequence
  Description of Artificial Sequence: Synthetic oligonucleotide
  Antisense strand to SEQ ID NO: 1119906
uuucucaaaggcugggcga

SEQ ID NO: 1119908 - RNA, 19 nt, Artificial Sequence
  Description of Artificial Sequence: Synthetic oligonucleotide
  Sense strand starting at position 2999 of SEQ ID NO: 915965
uuccaaugcccaggacaau

SEQ ID NO: 1119909 - RNA, 19 nt, Artificial Sequence
  Description of Artificial Sequence: Synthetic oligonucleotide
  Antisense strand to SEQ ID NO: 1119908
auuguccugggcauuggaa

SEQ ID NO: 1119910 - RNA, 19 nt, Artificial Sequence
  Description of Artificial Sequence: Synthetic oligonucleotide
  Sense strand starting at position 3073 of SEQ ID NO: 915965
gacugaagaaugcggauua

SEQ ID NO: 1119911 - RNA, 19 nt, Artificial Sequence
  Description of Artificial Sequence: Synthetic oligonucleotide
  Antisense strand to SEQ ID NO: 1119910
uaauccgcauucuucaguc

SEQ ID NO: 1119912 - RNA, 19 nt, Artificial Sequence
  Description of Artificial Sequence: Synthetic oligonucleotide
  Sense strand starting at position 3103 of SEQ ID NO: 915965
gcugcagaggaguaaguau

SEQ ID NO: 1119913 - RNA, 19 nt, Artificial Sequence
  Description of Artificial Sequence: Synthetic oligonucleotide
  Antisense strand to SEQ ID NO: 1119912
auacuuacuccucugcagc

SEQ ID NO: 1119914 - RNA, 19 nt, Artificial Sequence
  Description of Artificial Sequence: Synthetic oligonucleotide
  Sense strand starting at position 3112 of SEQ ID NO: 915965
gaguaaguauuccuuaguu

SEQ ID NO: 1119915 - RNA, 19 nt, Artificial Sequence
  Description of Artificial Sequence: Synthetic oligonucleotide
  Antisense strand to SEQ ID NO: 1119914
aacuaaggaauacuuacuc

SEQ ID NO: 1119916 - RNA, 19 nt, Artificial Sequence
  Description of Artificial Sequence: Synthetic oligonucleotide
  Sense strand starting at position 3137 of SEQ ID NO: 915965
ggccaagaauaacuuacua

SEQ ID NO: 1119917 - RNA, 19 nt, Artificial Sequence
  Description of Artificial Sequence: Synthetic oligonucleotide
  Antisense strand to SEQ ID NO: 1119916
uaguaaguuauucuuggcc

SEQ ID NO: 1119918 - RNA, 19 nt, Artificial Sequence
  Description of Artificial Sequence: Synthetic oligonucleotide
  Sense strand starting at position 3153 of SEQ ID NO: 915965
cuaauuagguuagagaaau

SEQ ID NO: 1119919 - RNA, 19 nt, Artificial Sequence
  Description of Artificial Sequence: Synthetic oligonucleotide
  Antisense strand to SEQ ID NO: 1119918
auuucucuaaccuaauuag

SEQ ID NO: 1119920 - RNA, 19 nt, Artificial Sequence
  Description of Artificial Sequence: Synthetic oligonucleotide
  Sense strand starting at position 3184 of SEQ ID NO: 915965
acagaaaugcucuaaguca

SEQ ID NO: 1119921 - RNA, 19 nt, Artificial Sequence
  Description of Artificial Sequence: Synthetic oligonucleotide
  Antisense strand to SEQ ID NO: 1119920
ugacuuagagcauuucugu

SEQ ID NO: 1119922 - RNA, 19 nt, Artificial Sequence
  Description of Artificial Sequence: Synthetic oligonucleotide
  Sense strand starting at position 3305 of SEQ ID NO: 915965
gccagcaacccugaaucaa

SEQ ID NO: 1119923 - RNA, 19 nt, Artificial Sequence
  Description of Artificial Sequence: Synthetic oligonucleotide
  Antisense strand to SEQ ID NO: 1119922
uugauucaggguugcuggc

SEQ ID NO: 1119924 - RNA, 19 nt, Artificial Sequence
  Description of Artificial Sequence: Synthetic oligonucleotide
  Sense strand starting at position 3805 of SEQ ID NO: 915965
agggucuggcuagacuuaa

SEQ ID NO: 1119925 - RNA, 19 nt, Artificial Sequence
  Description of Artificial Sequence: Synthetic oligonucleotide
  Antisense strand to SEQ ID NO: 1119924
uuaagucuagccagacccu

SEQ ID NO: 1119926 - RNA, 19 nt, Artificial Sequence
  Description of Artificial Sequence: Synthetic oligonucleotide
  Sense strand starting at position 3826 of SEQ ID NO: 915965
cuaagaucauguuaaggaa

SEQ ID NO: 1119927 - RNA, 19 nt, Artificial Sequence
  Description of Artificial Sequence: Synthetic oligonucleotide
  Antisense strand to SEQ ID NO: 1119926
uuccuuaacaugaucuuag

SEQ ID NO: 1119928 - RNA, 19 nt, Artificial Sequence
  Description of Artificial Sequence: Synthetic oligonucleotide
  Sense strand starting at position 3889 of SEQ ID NO: 915965
augaccuaguaguuaaagu

SEQ ID NO: 1119929 - RNA, 19 nt, Artificial Sequence
  Description of Artificial Sequence: Synthetic oligonucleotide
  Antisense strand to SEQ ID NO: 1119928
acuuuaacuacuaggucau

SEQ ID NO: 1119930 - RNA, 19 nt, Artificial Sequence
  Description of Artificial Sequence: Synthetic oligonucleotide
  Sense strand starting at position 3890 of SEQ ID NO: 915965
ugaccuaguaguuaaaguu

SEQ ID NO: 1119931 - RNA, 19 nt, Artificial Sequence
  Description of Artificial Sequence: Synthetic oligonucleotide
  Antisense strand to SEQ ID NO: 1119930
aacuuuaacuacuagguca

SEQ ID NO: 1119932 - RNA, 19 nt, Artificial Sequence
  Description of Artificial Sequence: Synthetic oligonucleotide
  Sense strand starting at position 3983 of SEQ ID NO: 915965
cguagcaaccuuuauugau

SEQ ID NO: 1119933 - RNA, 19 nt, Artificial Sequence
  Description of Artificial Sequence: Synthetic oligonucleotide
  Antisense strand to SEQ ID NO: 1119932
aucaauaaagguugcuacg

SEQ ID NO: 1119934 - RNA, 19 nt, Artificial Sequence
  Description of Artificial Sequence: Synthetic oligonucleotide
  Sense strand starting at position 68 of SEQ ID NO: 915966
agagcugaaucagucaaca

SEQ ID NO: 1119935 - RNA, 19 nt, Artificial Sequence
  Description of Artificial Sequence: Synthetic oligonucleotide
  Antisense strand to SEQ ID NO: 1119934
uguugacugauucagcucu

SEQ ID NO: 1119936 - RNA, 19 nt, Artificial Sequence
  Description of Artificial Sequence: Synthetic oligonucleotide
  Sense strand starting at position 231 of SEQ ID NO: 915966
agcucugcuacucgagagu

SEQ ID NO: 1119937 - RNA, 19 nt, Artificial Sequence
  Description of Artificial Sequence: Synthetic oligonucleotide
  Antisense strand to SEQ ID NO: 1119936
acucucgaguagcagagcu

SEQ ID NO: 1119938 - RNA, 19 nt, Artificial Sequence
  Description of Artificial Sequence: Synthetic oligonucleotide
  Sense strand starting at position 244 of SEQ ID NO: 915966
gagagucugcaccauuaga

SEQ ID NO: 1119939 - RNA, 19 nt, Artificial Sequence
  Description of Artificial Sequence: Synthetic oligonucleotide
  Antisense strand to SEQ ID NO: 1119938
ucuaauggugcagacucuc

SEQ ID NO: 1119940 - RNA, 19 nt, Artificial Sequence
  Description of Artificial Sequence: Synthetic oligonucleotide
  Sense strand starting at position 257 of SEQ ID NO: 915966
auuagaguuugcuuccuca

SEQ ID NO: 1119941 - RNA, 19 nt, Artificial Sequence
  Description of Artificial Sequence: Synthetic oligonucleotide
  Antisense strand to SEQ ID NO: 1119940
ugaggaagcaaacucuaau

SEQ ID NO: 1119942 - RNA, 19 nt, Artificial Sequence
  Description of Artificial Sequence: Synthetic oligonucleotide
  Sense strand starting at position 260 of SEQ ID NO: 915966
agaguuugcuuccucauca

SEQ ID NO: 1119943 - RNA, 19 nt, Artificial Sequence
  Description of Artificial Sequence: Synthetic oligonucleotide
  Antisense strand to SEQ ID NO: 1119942
ugaugaggaagcaaacucu

SEQ ID NO: 1119944 - RNA, 19 nt, Artificial Sequence
  Description of Artificial Sequence: Synthetic oligonucleotide
  Sense strand starting at position 295 of SEQ ID NO: 915966
ugugauuaacaguacaggu

SEQ ID NO: 1119945 - RNA, 19 nt, Artificial Sequence
  Description of Artificial Sequence: Synthetic oligonucleotide
  Antisense strand to SEQ ID NO: 1119944
accuguacuguuaaucaca

SEQ ID NO: 1119946 - RNA, 19 nt, Artificial Sequence
  Description of Artificial Sequence: Synthetic oligonucleotide
  Sense strand starting at position 344 of SEQ ID NO: 915966
ugaaauuaugagugccagu

SEQ ID NO: 1119947 - RNA, 19 nt, Artificial Sequence
  Description of Artificial Sequence: Synthetic oligonucleotide
  Antisense strand to SEQ ID NO: 1119946
acuggcacucauaauuuca

SEQ ID NO: 1119948 - RNA, 19 nt, Artificial Sequence
  Description of Artificial Sequence: Synthetic oligonucleotide
  Sense strand starting at position 711 of SEQ ID NO: 915966
ccaagaauguuagucagau

SEQ ID NO: 1119949 - RNA, 19 nt, Artificial Sequence
  Description of Artificial Sequence: Synthetic oligonucleotide
  Antisense strand to SEQ ID NO: 1119948
aucugacuaacauucuugg

SEQ ID NO: 1119950 - RNA, 19 nt, Artificial Sequence
  Description of Artificial Sequence: Synthetic oligonucleotide
  Sense strand starting at position 712 of SEQ ID NO: 915966
caagaauguuagucagauu

SEQ ID NO: 1119951 - RNA, 19 nt, Artificial Sequence
  Description of Artificial Sequence: Synthetic oligonucleotide
  Antisense strand to SEQ ID NO: 1119950
aaucugacuaacauucuug

SEQ ID NO: 1119952 - RNA, 19 nt, Artificial Sequence
  Description of Artificial Sequence: Synthetic oligonucleotide
  Sense strand starting at position 1094 of SEQ ID NO: 915966
cggagagcgcaaggaauua

SEQ ID NO: 1119953 - RNA, 19 nt, Artificial Sequence
  Description of Artificial Sequence: Synthetic oligonucleotide
  Antisense strand to SEQ ID NO: 1119952
uaauuccuugcgcucuccg

SEQ ID NO: 1119954 - RNA, 19 nt, Artificial Sequence
  Description of Artificial Sequence: Synthetic oligonucleotide
  Sense strand starting at position 1688 of SEQ ID NO: 915966
cugcguauguguuuggaga

SEQ ID NO: 1119955 - RNA, 19 nt, Artificial Sequence
  Description of Artificial Sequence: Synthetic oligonucleotide
  Antisense strand to SEQ ID NO: 1119954
ucuccaaacacauacgcag

SEQ ID NO: 1119956 - RNA, 19 nt, Artificial Sequence
  Description of Artificial Sequence: Synthetic oligonucleotide
  Sense strand starting at position 1689 of SEQ ID NO: 915966
ugcguauguguuuggagag

SEQ ID NO: 1119957 - RNA, 19 nt, Artificial Sequence
  Description of Artificial Sequence: Synthetic oligonucleotide
  Antisense strand to SEQ ID NO: 1119956
cucuccaaacacauacgca

SEQ ID NO: 1119958 - RNA, 19 nt, Artificial Sequence
  Description of Artificial Sequence: Synthetic oligonucleotide
  Sense strand starting at position 1692 of SEQ ID NO: 915966
guauguguuuggagagaag

SEQ ID NO: 1119959 - RNA, 19 nt, Artificial Sequence
  Description of Artificial Sequence: Synthetic oligonucleotide
  Antisense strand to SEQ ID NO: 1119958
cuucucuccaaacacauac

SEQ ID NO: 1119960 - RNA, 19 nt, Artificial Sequence
  Description of Artificial Sequence: Synthetic oligonucleotide
  Sense strand starting at position 1703 of SEQ ID NO: 915966
gagagaagaugggauauaa

SEQ ID NO: 1119961 - RNA, 19 nt, Artificial Sequence
  Description of Artificial Sequence: Synthetic oligonucleotide
  Antisense strand to SEQ ID NO: 1119960
uuauaucccaucuucucuc

SEQ ID NO: 1119962 - RNA, 19 nt, Artificial Sequence
  Description of Artificial Sequence: Synthetic oligonucleotide
  Sense strand starting at position 1733 of SEQ ID NO: 915966
aauugaugagggugagcuu

SEQ ID NO: 1119963 - RNA, 19 nt, Artificial Sequence
  Description of Artificial Sequence: Synthetic oligonucleotide
  Antisense strand to SEQ ID NO: 1119962
aagcucacccucaucaauu

SEQ ID NO: 1119964 - RNA, 19 nt, Artificial Sequence
  Description of Artificial Sequence: Synthetic oligonucleotide
  Sense strand starting at position 1766 of SEQ ID NO: 915966
uuguuccuauuacuguaua

SEQ ID NO: 1119965 - RNA, 19 nt, Artificial Sequence
  Description of Artificial Sequence: Synthetic oligonucleotide
  Antisense strand to SEQ ID NO: 1119964
uauacaguaauaggaacaa

SEQ ID NO: 1119966 - RNA, 19 nt, Artificial Sequence
  Description of Artificial Sequence: Synthetic oligonucleotide
  Sense strand starting at position 1853 of SEQ ID NO: 915966
uuucuagaguucgcgaaca

SEQ ID NO: 1119967 - RNA, 19 nt, Artificial Sequence
  Description of Artificial Sequence: Synthetic oligonucleotide
  Antisense strand to SEQ ID NO: 1119966
uguucgcgaacucuagaaa

SEQ ID NO: 1119968 - RNA, 19 nt, Artificial Sequence
  Description of Artificial Sequence: Synthetic oligonucleotide
  Sense strand starting at position 1855 of SEQ ID NO: 915966
ucuagaguucgcgaacauu

SEQ ID NO: 1119969 - RNA, 19 nt, Artificial Sequence
  Description of Artificial Sequence: Synthetic oligonucleotide
  Antisense strand to SEQ ID NO: 1119968
aauguucgcgaacucuaga

SEQ ID NO: 1119970 - RNA, 19 nt, Artificial Sequence
  Description of Artificial Sequence: Synthetic oligonucleotide
  Sense strand starting at position 1858 of SEQ ID NO: 915966
agaguucgcgaacauuugu

SEQ ID NO: 1119971 - RNA, 19 nt, Artificial Sequence
  Description of Artificial Sequence: Synthetic oligonucleotide
  Antisense strand to SEQ ID NO: 1119970
acaaauguucgcgaacucu

SEQ ID NO: 1119972 - RNA, 19 nt, Artificial Sequence
  Description of Artificial Sequence: Synthetic oligonucleotide
  Sense strand starting at position 1863 of SEQ ID NO: 915966
ucgcgaacauuuguucuca

SEQ ID NO: 1119973 - RNA, 19 nt, Artificial Sequence
  Description of Artificial Sequence: Synthetic oligonucleotide
  Antisense strand to SEQ ID NO: 1119972
ugagaacaaauguucgcga

SEQ ID NO: 1119974 - RNA, 19 nt, Artificial Sequence
  Description of Artificial Sequence: Synthetic oligonucleotide
  Sense strand starting at position 1875 of SEQ ID NO: 915966
guucucagcccaugcaaau

SEQ ID NO: 1119975 - RNA, 19 nt, Artificial Sequence
  Description of Artificial Sequence: Synthetic oligonucleotide
  Antisense strand to SEQ ID NO: 1119974
auuugcaugggcugagaac

SEQ ID NO: 1119976 - RNA, 19 nt, Artificial Sequence
  Description of Artificial Sequence: Synthetic oligonucleotide
  Sense strand starting at position 1890 of SEQ ID NO: 915966
aaaugaguucggugcugau

SEQ ID NO: 1119977 - RNA, 19 nt, Artificial Sequence
  Description of Artificial Sequence: Synthetic oligonucleotide
  Antisense strand to SEQ ID NO: 1119976
aucagcaccgaacucauuu

SEQ ID NO: 1119978 - RNA, 19 nt, Artificial Sequence
  Description of Artificial Sequence: Synthetic oligonucleotide
  Sense strand starting at position 1899 of SEQ ID NO: 915966
cggugcugauugguugaga

SEQ ID NO: 1119979 - RNA, 19 nt, Artificial Sequence
  Description of Artificial Sequence: Synthetic oligonucleotide
  Antisense strand to SEQ ID NO: 1119978
ucucaaccaaucagcaccg

SEQ ID NO: 1119980 - RNA, 19 nt, Artificial Sequence
  Description of Artificial Sequence: Synthetic oligonucleotide
  Sense strand starting at position 1900 of SEQ ID NO: 915966
ggugcugauugguugagaa

SEQ ID NO: 1119981 - RNA, 19 nt, Artificial Sequence
  Description of Artificial Sequence: Synthetic oligonucleotide
  Antisense strand to SEQ ID NO: 1119980
uucucaaccaaucagcacc

SEQ ID NO: 1119982 - RNA, 19 nt, Artificial Sequence
  Description of Artificial Sequence: Synthetic oligonucleotide
  Sense strand starting at position 2008 of SEQ ID NO: 915966
uccuaaaggccuugucuau

SEQ ID NO: 1119983 - RNA, 19 nt, Artificial Sequence
  Description of Artificial Sequence: Synthetic oligonucleotide
  Antisense strand to SEQ ID NO: 1119982
auagacaaggccuuuagga

SEQ ID NO: 1119984 - RNA, 19 nt, Artificial Sequence
  Description of Artificial Sequence: Synthetic oligonucleotide
  Sense strand starting at position 2012 of SEQ ID NO: 915966
aaaggccuugucuauugau

SEQ ID NO: 1119985 - RNA, 19 nt, Artificial Sequence
  Description of Artificial Sequence: Synthetic oligonucleotide
  Antisense strand to SEQ ID NO: 1119984
aucaauagacaaggccuuu

SEQ ID NO: 1119986 - RNA, 19 nt, Artificial Sequence
  Description of Artificial Sequence: Synthetic oligonucleotide
  Sense strand starting at position 2019 of SEQ ID NO: 915966
uugucuauugaugagcgau

SEQ ID NO: 1119987 - RNA, 19 nt, Artificial Sequence
  Description of Artificial Sequence: Synthetic oligonucleotide
  Antisense strand to SEQ ID NO: 1119986
aucgcucaucaauagacaa

SEQ ID NO: 1119988 - RNA, 19 nt, Artificial Sequence
  Description of Artificial Sequence: Synthetic oligonucleotide
  Sense strand starting at position 2022 of SEQ ID NO: 915966
ucuauugaugagcgaugga

SEQ ID NO: 1119989 - RNA, 19 nt, Artificial Sequence
  Description of Artificial Sequence: Synthetic oligonucleotide
  Antisense strand to SEQ ID NO: 1119988
uccaucgcucaucaauaga

SEQ ID NO: 1119990 - RNA, 19 nt, Artificial Sequence
  Description of Artificial Sequence: Synthetic oligonucleotide
  Sense strand starting at position 2102 of SEQ ID NO: 915966
acuguaggugguuaaggau

SEQ ID NO: 1119991 - RNA, 19 nt, Artificial Sequence
  Description of Artificial Sequence: Synthetic oligonucleotide
  Antisense strand to SEQ ID NO: 1119990
auccuuaaccaccuacagu

SEQ ID NO: 1119992 - RNA, 19 nt, Artificial Sequence
  Description of Artificial Sequence: Synthetic oligonucleotide
  Sense strand starting at position 2126 of SEQ ID NO: 915966
guacuaaucgccuggaccu

SEQ ID NO: 1119993 - RNA, 19 nt, Artificial Sequence
  Description of Artificial Sequence: Synthetic oligonucleotide
  Antisense strand to SEQ ID NO: 1119992
agguccaggcgauuaguac

SEQ ID NO: 1119994 - RNA, 19 nt, Artificial Sequence
  Description of Artificial Sequence: Synthetic oligonucleotide
  Sense strand starting at position 2244 of SEQ ID NO: 915966
gggaucuuggcucaccaua

SEQ ID NO: 1119995 - RNA, 19 nt, Artificial Sequence
  Description of Artificial Sequence: Synthetic oligonucleotide
  Antisense strand to SEQ ID NO: 1119994
uauggugagccaagauccc

SEQ ID NO: 1119996 - RNA, 19 nt, Artificial Sequence
  Description of Artificial Sequence: Synthetic oligonucleotide
  Sense strand starting at position 2480 of SEQ ID NO: 915966
ucauaaccguuucuuaaag

SEQ ID NO: 1119997 - RNA, 19 nt, Artificial Sequence
  Description of Artificial Sequence: Synthetic oligonucleotide
  Antisense strand to SEQ ID NO: 1119996
cuuuaagaaacgguuauga

SEQ ID NO: 1119998 - RNA, 19 nt, Artificial Sequence
  Description of Artificial Sequence: Synthetic oligonucleotide
  Sense strand starting at position 2494 of SEQ ID NO: 915966
uaaaguauuccacggaaag

SEQ ID NO: 1119999 - RNA, 19 nt, Artificial Sequence
  Description of Artificial Sequence: Synthetic oligonucleotide
  Antisense strand to SEQ ID NO: 1119998
cuuuccguggaauacuuua

SEQ ID NO: 1120000 - RNA, 19 nt, Artificial Sequence
  Description of Artificial Sequence: Synthetic oligonucleotide
  Sense strand starting at position 2495 of SEQ ID NO: 915966
aaaguauuccacggaaagg

SEQ ID NO: 1120001 - RNA, 19 nt, Artificial Sequence
  Description of Artificial Sequence: Synthetic oligonucleotide
  Antisense strand to SEQ ID NO: 1120000
ccuuuccguggaauacuuu

SEQ ID NO: 1120002 - RNA, 19 nt, Artificial Sequence
  Description of Artificial Sequence: Synthetic oligonucleotide
  Sense strand starting at position 2505 of SEQ ID NO: 915966
acggaaagguuucaggacu

SEQ ID NO: 1120003 - RNA, 19 nt, Artificial Sequence
  Description of Artificial Sequence: Synthetic oligonucleotide
  Antisense strand to SEQ ID NO: 1120002
aguccugaaaccuuuccgu

SEQ ID NO: 1120004 - RNA, 19 nt, Artificial Sequence
  Description of Artificial Sequence: Synthetic oligonucleotide
  Sense strand starting at position 2529 of SEQ ID NO: 915966
gcccuuguuccggaggacu

SEQ ID NO: 1120005 - RNA, 19 nt, Artificial Sequence
  Description of Artificial Sequence: Synthetic oligonucleotide
  Antisense strand to SEQ ID NO: 1120004
aguccuccggaacaagggc

SEQ ID NO: 1120006 - RNA, 19 nt, Artificial Sequence
  Description of Artificial Sequence: Synthetic oligonucleotide
  Sense strand starting at position 2564 of SEQ ID NO: 915966
gugagacccgucugaauag

SEQ ID NO: 1120007 - RNA, 19 nt, Artificial Sequence
  Description of Artificial Sequence: Synthetic oligonucleotide
  Antisense strand to SEQ ID NO: 1120006
cuauucagacgggucucac

SEQ ID NO: 1120008 - RNA, 19 nt, Artificial Sequence
  Description of Artificial Sequence: Synthetic oligonucleotide
  Sense strand starting at position 2576 of SEQ ID NO: 915966
ugaauagauuccuagaacu

SEQ ID NO: 1120009 - RNA, 19 nt, Artificial Sequence
  Description of Artificial Sequence: Synthetic oligonucleotide
  Antisense strand to SEQ ID NO: 1120008
aguucuaggaaucuauuca

SEQ ID NO: 1120010 - RNA, 19 nt, Artificial Sequence
  Description of Artificial Sequence: Synthetic oligonucleotide
  Sense strand starting at position 2588 of SEQ ID NO: 915966
uagaacugaccacgucaga

SEQ ID NO: 1120011 - RNA, 19 nt, Artificial Sequence
  Description of Artificial Sequence: Synthetic oligonucleotide
  Antisense strand to SEQ ID NO: 1120010
ucugacguggucaguucua

SEQ ID NO: 1120012 - RNA, 19 nt, Artificial Sequence
  Description of Artificial Sequence: Synthetic oligonucleotide
  Sense strand starting at position 3771 of SEQ ID NO: 915966
gugcauagcagagagguaa

SEQ ID NO: 1120013 - RNA, 19 nt, Artificial Sequence
  Description of Artificial Sequence: Synthetic oligonucleotide
  Antisense strand to SEQ ID NO: 1120012
uuaccucucugcuaugcac

SEQ ID NO: 1120014 - RNA, 19 nt, Artificial Sequence
  Description of Artificial Sequence: Synthetic oligonucleotide
  Sense strand starting at position 4 of SEQ ID NO: 915967
agagcugaaucagucaaca

SEQ ID NO: 1120015 - RNA, 19 nt, Artificial Sequence
  Description of Artificial Sequence: Synthetic oligonucleotide
  Antisense strand to SEQ ID NO: 1120014
uguugacugauucagcucu

SEQ ID NO: 1120016 - RNA, 19 nt, Artificial Sequence
  Description of Artificial Sequence: Synthetic oligonucleotide
  Sense strand starting at position 167 of SEQ ID NO: 915967
agcucugcuacucgagagu

SEQ ID NO: 1120017 - RNA, 19 nt, Artificial Sequence
  Description of Artificial Sequence: Synthetic oligonucleotide
  Antisense strand to SEQ ID NO: 1120016
acucucgaguagcagagcu

SEQ ID NO: 1120018 - RNA, 19 nt, Artificial Sequence
  Description of Artificial Sequence: Synthetic oligonucleotide
  Sense strand starting at position 180 of SEQ ID NO: 915967
gagagucugcaccauuaga

SEQ ID NO: 1120019 - RNA, 19 nt, Artificial Sequence
  Description of Artificial Sequence: Synthetic oligonucleotide
  Antisense strand to SEQ ID NO: 1120018
ucuaauggugcagacucuc

SEQ ID NO: 1120020 - RNA, 19 nt, Artificial Sequence
  Description of Artificial Sequence: Synthetic oligonucleotide
  Sense strand starting at position 193 of SEQ ID NO: 915967
auuagaguuugcuuccuca

SEQ ID NO: 1120021 - RNA, 19 nt, Artificial Sequence
  Description of Artificial Sequence: Synthetic oligonucleotide
  Antisense strand to SEQ ID NO: 1120020
ugaggaagcaaacucuaau

SEQ ID NO: 1120022 - RNA, 19 nt, Artificial Sequence
  Description of Artificial Sequence: Synthetic oligonucleotide
  Sense strand starting at position 196 of SEQ ID NO: 915967
agaguuugcuuccucauca

SEQ ID NO: 1120023 - RNA, 19 nt, Artificial Sequence
  Description of Artificial Sequence: Synthetic oligonucleotide
  Antisense strand to SEQ ID NO: 1120022
ugaugaggaagcaaacucu

SEQ ID NO: 1120024 - RNA, 19 nt, Artificial Sequence
  Description of Artificial Sequence: Synthetic oligonucleotide
  Sense strand starting at position 231 of SEQ ID NO: 915967
ugugauuaacaguacaggu

SEQ ID NO: 1120025 - RNA, 19 nt, Artificial Sequence
  Description of Artificial Sequence: Synthetic oligonucleotide
  Antisense strand to SEQ ID NO: 1120024
accuguacuguuaaucaca

SEQ ID NO: 1120026 - RNA, 19 nt, Artificial Sequence
  Description of Artificial Sequence: Synthetic oligonucleotide
  Sense strand starting at position 280 of SEQ ID NO: 915967
ugaaauuaugagugccagu

SEQ ID NO: 1120027 - RNA, 19 nt, Artificial Sequence
  Description of Artificial Sequence: Synthetic oligonucleotide
  Antisense strand to SEQ ID NO: 1120026
acuggcacucauaauuuca

SEQ ID NO: 1120028 - RNA, 19 nt, Artificial Sequence
  Description of Artificial Sequence: Synthetic oligonucleotide
  Sense strand starting at position 647 of SEQ ID NO: 915967
ccaagaauguuagucagau

SEQ ID NO: 1120029 - RNA, 19 nt, Artificial Sequence
  Description of Artificial Sequence: Synthetic oligonucleotide
  Antisense strand to SEQ ID NO: 1120028
aucugacuaacauucuugg

SEQ ID NO: 1120030 - RNA, 19 nt, Artificial Sequence
  Description of Artificial Sequence: Synthetic oligonucleotide
  Sense strand starting at position 648 of SEQ ID NO: 915967
caagaauguuagucagauu

SEQ ID NO: 1120031 - RNA, 19 nt, Artificial Sequence
  Description of Artificial Sequence: Synthetic oligonucleotide
  Antisense strand to SEQ ID NO: 1120030
aaucugacuaacauucuug

SEQ ID NO: 1120032 - RNA, 19 nt, Artificial Sequence
  Description of Artificial Sequence: Synthetic oligonucleotide
  Sense strand starting at position 1030 of SEQ ID NO: 915967
cggagagcgcaaggaauua

SEQ ID NO: 1120033 - RNA, 19 nt, Artificial Sequence
  Description of Artificial Sequence: Synthetic oligonucleotide
  Antisense strand to SEQ ID NO: 1120032
uaauuccuugcgcucuccg

SEQ ID NO: 1120034 - RNA, 19 nt, Artificial Sequence
  Description of Artificial Sequence: Synthetic oligonucleotide
  Sense strand starting at position 1624 of SEQ ID NO: 915967
cugcguauguguuuggaga

SEQ ID NO: 1120035 - RNA, 19 nt, Artificial Sequence
  Description of Artificial Sequence: Synthetic oligonucleotide
  Antisense strand to SEQ ID NO: 1120034
ucuccaaacacauacgcag

SEQ ID NO: 1120036 - RNA, 19 nt, Artificial Sequence
  Description of Artificial Sequence: Synthetic oligonucleotide
  Sense strand starting at position 1625 of SEQ ID NO: 915967
ugcguauguguuuggagag

SEQ ID NO: 1120037 - RNA, 19 nt, Artificial Sequence
  Description of Artificial Sequence: Synthetic oligonucleotide
  Antisense strand to SEQ ID NO: 1120036
cucuccaaacacauacgca

SEQ ID NO: 1120038 - RNA, 19 nt, Artificial Sequence
  Description of Artificial Sequence: Synthetic oligonucleotide
  Sense strand starting at position 1628 of SEQ ID NO: 915967
guauguguuuggagagaag

SEQ ID NO: 1120039 - RNA, 19 nt, Artificial Sequence
  Description of Artificial Sequence: Synthetic oligonucleotide
  Antisense strand to SEQ ID NO: 1120038
cuucucuccaaacacauac

SEQ ID NO: 1120040 - RNA, 19 nt, Artificial Sequence
  Description of Artificial Sequence: Synthetic oligonucleotide
  Sense strand starting at position 1639 of SEQ ID NO: 915967
gagagaagaugggauauaa

SEQ ID NO: 1120041 - RNA, 19 nt, Artificial Sequence
  Description of Artificial Sequence: Synthetic oligonucleotide
  Antisense strand to SEQ ID NO: 1120040
uuauaucccaucuucucuc

SEQ ID NO: 1120042 - RNA, 19 nt, Artificial Sequence
  Description of Artificial Sequence: Synthetic oligonucleotide
  Sense strand starting at position 1669 of SEQ ID NO: 915967
aauugaugagggugagcuu

SEQ ID NO: 1120043 - RNA, 19 nt, Artificial Sequence
  Description of Artificial Sequence: Synthetic oligonucleotide
  Antisense strand to SEQ ID NO: 1120042
aagcucacccucaucaauu

SEQ ID NO: 1120044 - RNA, 19 nt, Artificial Sequence
  Description of Artificial Sequence: Synthetic oligonucleotide
  Sense strand starting at position 1702 of SEQ ID NO: 915967
uuguuccuauuacuguaua

SEQ ID NO: 1120045 - RNA, 19 nt, Artificial Sequence
  Description of Artificial Sequence: Synthetic oligonucleotide
  Antisense strand to SEQ ID NO: 1120044
uauacaguaauaggaacaa

SEQ ID NO: 1120046 - RNA, 19 nt, Artificial Sequence
  Description of Artificial Sequence: Synthetic oligonucleotide
  Sense strand starting at position 1789 of SEQ ID NO: 915967
uuucuagaguucgcgaaca

SEQ ID NO: 1120047 - RNA, 19 nt, Artificial Sequence
  Description of Artificial Sequence: Synthetic oligonucleotide
  Antisense strand to SEQ ID NO: 1120046
uguucgcgaacucuagaaa

SEQ ID NO: 1120048 - RNA, 19 nt, Artificial Sequence
  Description of Artificial Sequence: Synthetic oligonucleotide
  Sense strand starting at position 1791 of SEQ ID NO: 915967
ucuagaguucgcgaacauu

SEQ ID NO: 1120049 - RNA, 19 nt, Artificial Sequence
  Description of Artificial Sequence: Synthetic oligonucleotide
  Antisense strand to SEQ ID NO: 1120048
aauguucgcgaacucuaga

SEQ ID NO: 1120050 - RNA, 19 nt, Artificial Sequence
  Description of Artificial Sequence: Synthetic oligonucleotide
  Sense strand starting at position 1794 of SEQ ID NO: 915967
agaguucgcgaacauuugu

SEQ ID NO: 1120051 - RNA, 19 nt, Artificial Sequence
  Description of Artificial Sequence: Synthetic oligonucleotide
  Antisense strand to SEQ ID NO: 1120050
acaaauguucgcgaacucu

SEQ ID NO: 1120052 - RNA, 19 nt, Artificial Sequence
  Description of Artificial Sequence: Synthetic oligonucleotide
  Sense strand starting at position 1799 of SEQ ID NO: 915967
ucgcgaacauuuguucuca

SEQ ID NO: 1120053 - RNA, 19 nt, Artificial Sequence
  Description of Artificial Sequence: Synthetic oligonucleotide
  Antisense strand to SEQ ID NO: 1120052
ugagaacaaauguucgcga

SEQ ID NO: 1120054 - RNA, 19 nt, Artificial Sequence
  Description of Artificial Sequence: Synthetic oligonucleotide
  Sense strand starting at position 1811 of SEQ ID NO: 915967
guucucagcccaugcaaau

SEQ ID NO: 1120055 - RNA, 19 nt, Artificial Sequence
  Description of Artificial Sequence: Synthetic oligonucleotide
  Antisense strand to SEQ ID NO: 1120054
auuugcaugggcugagaac

SEQ ID NO: 1120056 - RNA, 19 nt, Artificial Sequence
  Description of Artificial Sequence: Synthetic oligonucleotide
  Sense strand starting at position 1826 of SEQ ID NO: 915967
aaaugaguucggugcugau

SEQ ID NO: 1120057 - RNA, 19 nt, Artificial Sequence
  Description of Artificial Sequence: Synthetic oligonucleotide
  Antisense strand to SEQ ID NO: 1120056
aucagcaccgaacucauuu

SEQ ID NO: 1120058 - RNA, 19 nt, Artificial Sequence
  Description of Artificial Sequence: Synthetic oligonucleotide
  Sense strand starting at position 1835 of SEQ ID NO: 915967
cggugcugauugguugaga

SEQ ID NO: 1120059 - RNA, 19 nt, Artificial Sequence
  Description of Artificial Sequence: Synthetic oligonucleotide
  Antisense strand to SEQ ID NO: 1120058
ucucaaccaaucagcaccg

SEQ ID NO: 1120060 - RNA, 19 nt, Artificial Sequence
  Description of Artificial Sequence: Synthetic oligonucleotide
  Sense strand starting at position 1836 of SEQ ID NO: 915967
ggugcugauugguugagaa

SEQ ID NO: 1120061 - RNA, 19 nt, Artificial Sequence
  Description of Artificial Sequence: Synthetic oligonucleotide
  Antisense strand to SEQ ID NO: 1120060
uucucaaccaaucagcacc

SEQ ID NO: 1120062 - RNA, 19 nt, Artificial Sequence
  Description of Artificial Sequence: Synthetic oligonucleotide
  Sense strand starting at position 1944 of SEQ ID NO: 915967
uccuaaaggccuugucuau

SEQ ID NO: 1120063 - RNA, 19 nt, Artificial Sequence
  Description of Artificial Sequence: Synthetic oligonucleotide
  Antisense strand to SEQ ID NO: 1120062
auagacaaggccuuuagga

SEQ ID NO: 1120064 - RNA, 19 nt, Artificial Sequence
  Description of Artificial Sequence: Synthetic oligonucleotide
  Sense strand starting at position 1948 of SEQ ID NO: 915967
aaaggccuugucuauugau

SEQ ID NO: 1120065 - RNA, 19 nt, Artificial Sequence
  Description of Artificial Sequence: Synthetic oligonucleotide
  Antisense strand to SEQ ID NO: 1120064
aucaauagacaaggccuuu

SEQ ID NO: 1120066 - RNA, 19 nt, Artificial Sequence
  Description of Artificial Sequence: Synthetic oligonucleotide
  Sense strand starting at position 1955 of SEQ ID NO: 915967
uugucuauugaugagcgau

SEQ ID NO: 1120067 - RNA, 19 nt, Artificial Sequence
  Description of Artificial Sequence: Synthetic oligonucleotide
  Antisense strand to SEQ ID NO: 1120066
aucgcucaucaauagacaa

SEQ ID NO: 1120068 - RNA, 19 nt, Artificial Sequence
  Description of Artificial Sequence: Synthetic oligonucleotide
  Sense strand starting at position 1958 of SEQ ID NO: 915967
ucuauugaugagcgaugga

SEQ ID NO: 1120069 - RNA, 19 nt, Artificial Sequence
  Description of Artificial Sequence: Synthetic oligonucleotide
  Antisense strand to SEQ ID NO: 1120068
uccaucgcucaucaauaga

SEQ ID NO: 1120070 - RNA, 19 nt, Artificial Sequence
  Description of Artificial Sequence: Synthetic oligonucleotide
  Sense strand starting at position 2038 of SEQ ID NO: 915967
acuguaggugguuaaggau

SEQ ID NO: 1120071 - RNA, 19 nt, Artificial Sequence
  Description of Artificial Sequence: Synthetic oligonucleotide
  Antisense strand to SEQ ID NO: 1120070
auccuuaaccaccuacagu

SEQ ID NO: 1120072 - RNA, 19 nt, Artificial Sequence
  Description of Artificial Sequence: Synthetic oligonucleotide
  Sense strand starting at position 2062 of SEQ ID NO: 915967
guacuaaucgccuggaccu

SEQ ID NO: 1120073 - RNA, 19 nt, Artificial Sequence
  Description of Artificial Sequence: Synthetic oligonucleotide
  Antisense strand to SEQ ID NO: 1120072
agguccaggcgauuaguac

SEQ ID NO: 1120074 - RNA, 19 nt, Artificial Sequence
  Description of Artificial Sequence: Synthetic oligonucleotide
  Sense strand starting at position 2180 of SEQ ID NO: 915967
gggaucuuggcucaccaua

SEQ ID NO: 1120075 - RNA, 19 nt, Artificial Sequence
  Description of Artificial Sequence: Synthetic oligonucleotide
  Antisense strand to SEQ ID NO: 1120074
uauggugagccaagauccc

SEQ ID NO: 1120076 - RNA, 19 nt, Artificial Sequence
  Description of Artificial Sequence: Synthetic oligonucleotide
  Sense strand starting at position 2416 of SEQ ID NO: 915967
ucauaaccguuucuuaaag

SEQ ID NO: 1120077 - RNA, 19 nt, Artificial Sequence
  Description of Artificial Sequence: Synthetic oligonucleotide
  Antisense strand to SEQ ID NO: 1120076
cuuuaagaaacgguuauga

SEQ ID NO: 1120078 - RNA, 19 nt, Artificial Sequence
  Description of Artificial Sequence: Synthetic oligonucleotide
  Sense strand starting at position 2430 of SEQ ID NO: 915967
uaaaguauuccacggaaag

SEQ ID NO: 1120079 - RNA, 19 nt, Artificial Sequence
  Description of Artificial Sequence: Synthetic oligonucleotide
  Antisense strand to SEQ ID NO: 1120078
cuuuccguggaauacuuua

SEQ ID NO: 1120080 - RNA, 19 nt, Artificial Sequence
  Description of Artificial Sequence: Synthetic oligonucleotide
  Sense strand starting at position 2431 of SEQ ID NO: 915967
aaaguauuccacggaaagg

SEQ ID NO: 1120081 - RNA, 19 nt, Artificial Sequence
  Description of Artificial Sequence: Synthetic oligonucleotide
  Antisense strand to SEQ ID NO: 1120080
ccuuuccguggaauacuuu

SEQ ID NO: 1120082 - RNA, 19 nt, Artificial Sequence
  Description of Artificial Sequence: Synthetic oligonucleotide
  Sense strand starting at position 2441 of SEQ ID NO: 915967
acggaaagguuucaggacu

SEQ ID NO: 1120083 - RNA, 19 nt, Artificial Sequence
  Description of Artificial Sequence: Synthetic oligonucleotide
  Antisense strand to SEQ ID NO: 1120082
aguccugaaaccuuuccgu

SEQ ID NO: 1120084 - RNA, 19 nt, Artificial Sequence
  Description of Artificial Sequence: Synthetic oligonucleotide
  Sense strand starting at position 2465 of SEQ ID NO: 915967
gcccuuguuccggaggacu

SEQ ID NO: 1120085 - RNA, 19 nt, Artificial Sequence
  Description of Artificial Sequence: Synthetic oligonucleotide
  Antisense strand to SEQ ID NO: 1120084
aguccuccggaacaagggc

SEQ ID NO: 1120086 - RNA, 19 nt, Artificial Sequence
  Description of Artificial Sequence: Synthetic oligonucleotide
  Sense strand starting at position 2500 of SEQ ID NO: 915967
gugagacccgucugaauag

SEQ ID NO: 1120087 - RNA, 19 nt, Artificial Sequence
  Description of Artificial Sequence: Synthetic oligonucleotide
  Antisense strand to SEQ ID NO: 1120086
cuauucagacgggucucac

SEQ ID NO: 1120088 - RNA, 19 nt, Artificial Sequence
  Description of Artificial Sequence: Synthetic oligonucleotide
  Sense strand starting at position 2512 of SEQ ID NO: 915967
ugaauagauuccuagaacu

SEQ ID NO: 1120089 - RNA, 19 nt, Artificial Sequence
  Description of Artificial Sequence: Synthetic oligonucleotide
  Antisense strand to SEQ ID NO: 1120088
aguucuaggaaucuauuca

SEQ ID NO: 1120090 - RNA, 19 nt, Artificial Sequence
  Description of Artificial Sequence: Synthetic oligonucleotide
  Sense strand starting at position 2524 of SEQ ID NO: 915967
uagaacugaccacgucaga

SEQ ID NO: 1120091 - RNA, 19 nt, Artificial Sequence
  Description of Artificial Sequence: Synthetic oligonucleotide
  Antisense strand to SEQ ID NO: 1120090
ucugacguggucaguucua

SEQ ID NO: 1120092 - RNA, 19 nt, Artificial Sequence
  Description of Artificial Sequence: Synthetic oligonucleotide
  Sense strand starting at position 3707 of SEQ ID NO: 915967
gugcauagcagagagguaa

SEQ ID NO: 1120093 - RNA, 19 nt, Artificial Sequence
  Description of Artificial Sequence: Synthetic oligonucleotide
  Antisense strand to SEQ ID NO: 1120092
uuaccucucugcuaugcac

SEQ ID NO: 1120094 - RNA, 19 nt, Artificial Sequence
  Description of Artificial Sequence: Synthetic oligonucleotide
  Sense strand starting at position 114 of SEQ ID NO: 915968
gugguagucuaagcaugaa

SEQ ID NO: 1120095 - RNA, 19 nt, Artificial Sequence
  Description of Artificial Sequence: Synthetic oligonucleotide
  Antisense strand to SEQ ID NO: 1120094
uucaugcuuagacuaccac

SEQ ID NO: 1120096 - RNA, 19 nt, Artificial Sequence
  Description of Artificial Sequence: Synthetic oligonucleotide
  Sense strand starting at position 151 of SEQ ID NO: 915968
ggcagcuguuugccaaaca

SEQ ID NO: 1120097 - RNA, 19 nt, Artificial Sequence
  Description of Artificial Sequence: Synthetic oligonucleotide
  Antisense strand to SEQ ID NO: 1120096
uguuuggcaaacagcugcc

SEQ ID NO: 1120098 - RNA, 19 nt, Artificial Sequence
  Description of Artificial Sequence: Synthetic oligonucleotide
  Sense strand starting at position 189 of SEQ ID NO: 915968
ucccgugugguuuggauga

SEQ ID NO: 1120099 - RNA, 19 nt, Artificial Sequence
  Description of Artificial Sequence: Synthetic oligonucleotide
  Antisense strand to SEQ ID NO: 1120098
ucauccaaaccacacggga

SEQ ID NO: 1120100 - RNA, 19 nt, Artificial Sequence
  Description of Artificial Sequence: Synthetic oligonucleotide
  Sense strand starting at position 194 of SEQ ID NO: 915968
ugugguuuggaugaugaca

SEQ ID NO: 1120101 - RNA, 19 nt, Artificial Sequence
  Description of Artificial Sequence: Synthetic oligonucleotide
  Antisense strand to SEQ ID NO: 1120100
ugucaucauccaaaccaca

SEQ ID NO: 1120102 - RNA, 19 nt, Artificial Sequence
  Description of Artificial Sequence: Synthetic oligonucleotide
  Sense strand starting at position 303 of SEQ ID NO: 915968
gcaguuuagucacuggaac

SEQ ID NO: 1120103 - RNA, 19 nt, Artificial Sequence
  Description of Artificial Sequence: Synthetic oligonucleotide
  Antisense strand to SEQ ID NO: 1120102
guuccagugacuaaacugc

SEQ ID NO: 1120104 - RNA, 19 nt, Artificial Sequence
  Description of Artificial Sequence: Synthetic oligonucleotide
  Sense strand starting at position 383 of SEQ ID NO: 915968
agagcugaaucagucaaca

SEQ ID NO: 1120105 - RNA, 19 nt, Artificial Sequence
  Description of Artificial Sequence: Synthetic oligonucleotide
  Antisense strand to SEQ ID NO: 1120104
uguugacugauucagcucu

SEQ ID NO: 1120106 - RNA, 19 nt, Artificial Sequence
  Description of Artificial Sequence: Synthetic oligonucleotide
  Sense strand starting at position 559 of SEQ ID NO: 915968
gagagucugcaccauuaga

SEQ ID NO: 1120107 - RNA, 19 nt, Artificial Sequence
  Description of Artificial Sequence: Synthetic oligonucleotide
  Antisense strand to SEQ ID NO: 1120106
ucuaauggugcagacucuc

SEQ ID NO: 1120108 - RNA, 19 nt, Artificial Sequence
  Description of Artificial Sequence: Synthetic oligonucleotide
  Sense strand starting at position 572 of SEQ ID NO: 915968
auuagaguuugcuuccuca

SEQ ID NO: 1120109 - RNA, 19 nt, Artificial Sequence
  Description of Artificial Sequence: Synthetic oligonucleotide
  Antisense strand to SEQ ID NO: 1120108
ugaggaagcaaacucuaau

SEQ ID NO: 1120110 - RNA, 19 nt, Artificial Sequence
  Description of Artificial Sequence: Synthetic oligonucleotide
  Sense strand starting at position 575 of SEQ ID NO: 915968
agaguuugcuuccucauca

SEQ ID NO: 1120111 - RNA, 19 nt, Artificial Sequence
  Description of Artificial Sequence: Synthetic oligonucleotide
  Antisense strand to SEQ ID NO: 1120110
ugaugaggaagcaaacucu

SEQ ID NO: 1120112 - RNA, 19 nt, Artificial Sequence
  Description of Artificial Sequence: Synthetic oligonucleotide
  Sense strand starting at position 610 of SEQ ID NO: 915968
ugugauuaacaguacaggu

SEQ ID NO: 1120113 - RNA, 19 nt, Artificial Sequence
  Description of Artificial Sequence: Synthetic oligonucleotide
  Antisense strand to SEQ ID NO: 1120112
accuguacuguuaaucaca

SEQ ID NO: 1120114 - RNA, 19 nt, Artificial Sequence
  Description of Artificial Sequence: Synthetic oligonucleotide
  Sense strand starting at position 659 of SEQ ID NO: 915968
ugaaauuaugagugccagu

SEQ ID NO: 1120115 - RNA, 19 nt, Artificial Sequence
  Description of Artificial Sequence: Synthetic oligonucleotide
  Antisense strand to SEQ ID NO: 1120114
acuggcacucauaauuuca

SEQ ID NO: 1120116 - RNA, 19 nt, Artificial Sequence
  Description of Artificial Sequence: Synthetic oligonucleotide
  Sense strand starting at position 1026 of SEQ ID NO: 915968
ccaagaauguuagucagau

SEQ ID NO: 1120117 - RNA, 19 nt, Artificial Sequence
  Description of Artificial Sequence: Synthetic oligonucleotide
  Antisense strand to SEQ ID NO: 1120116
aucugacuaacauucuugg

SEQ ID NO: 1120118 - RNA, 19 nt, Artificial Sequence
  Description of Artificial Sequence: Synthetic oligonucleotide
  Sense strand starting at position 1027 of SEQ ID NO: 915968
caagaauguuagucagauu

SEQ ID NO: 1120119 - RNA, 19 nt, Artificial Sequence
  Description of Artificial Sequence: Synthetic oligonucleotide
  Antisense strand to SEQ ID NO: 1120118
aaucugacuaacauucuug

SEQ ID NO: 1120120 - RNA, 19 nt, Artificial Sequence
  Description of Artificial Sequence: Synthetic oligonucleotide
  Sense strand starting at position 1409 of SEQ ID NO: 915968
cggagagcgcaaggaauua

SEQ ID NO: 1120121 - RNA, 19 nt, Artificial Sequence
  Description of Artificial Sequence: Synthetic oligonucleotide
  Antisense strand to SEQ ID NO: 1120120
uaauuccuugcgcucuccg

SEQ ID NO: 1120122 - RNA, 19 nt, Artificial Sequence
  Description of Artificial Sequence: Synthetic oligonucleotide
  Sense strand starting at position 2007 of SEQ ID NO: 915968
guauguguuuggagagaag

SEQ ID NO: 1120123 - RNA, 19 nt, Artificial Sequence
  Description of Artificial Sequence: Synthetic oligonucleotide
  Antisense strand to SEQ ID NO: 1120122
cuucucuccaaacacauac

SEQ ID NO: 1120124 - RNA, 19 nt, Artificial Sequence
  Description of Artificial Sequence: Synthetic oligonucleotide
  Sense strand starting at position 2018 of SEQ ID NO: 915968
gagagaagaugggauauaa

SEQ ID NO: 1120125 - RNA, 19 nt, Artificial Sequence
  Description of Artificial Sequence: Synthetic oligonucleotide
  Antisense strand to SEQ ID NO: 1120124
uuauaucccaucuucucuc

SEQ ID NO: 1120126 - RNA, 19 nt, Artificial Sequence
  Description of Artificial Sequence: Synthetic oligonucleotide
  Sense strand starting at position 2048 of SEQ ID NO: 915968
aauugaugagggugagcuu

SEQ ID NO: 1120127 - RNA, 19 nt, Artificial Sequence
  Description of Artificial Sequence: Synthetic oligonucleotide
  Antisense strand to SEQ ID NO: 1120126
aagcucacccucaucaauu

SEQ ID NO: 1120128 - RNA, 19 nt, Artificial Sequence
  Description of Artificial Sequence: Synthetic oligonucleotide
  Sense strand starting at position 2081 of SEQ ID NO: 915968
uuguuccuauuacuguaua

SEQ ID NO: 1120129 - RNA, 19 nt, Artificial Sequence
  Description of Artificial Sequence: Synthetic oligonucleotide
  Antisense strand to SEQ ID NO: 1120128
uauacaguaauaggaacaa

SEQ ID NO: 1120130 - RNA, 19 nt, Artificial Sequence
  Description of Artificial Sequence: Synthetic oligonucleotide
  Sense strand starting at position 2168 of SEQ ID NO: 915968
uuucuagaguucgcgaaca

SEQ ID NO: 1120131 - RNA, 19 nt, Artificial Sequence
  Description of Artificial Sequence: Synthetic oligonucleotide
  Antisense strand to SEQ ID NO: 1120130
uguucgcgaacucuagaaa

SEQ ID NO: 1120132 - RNA, 19 nt, Artificial Sequence
  Description of Artificial Sequence: Synthetic oligonucleotide
  Sense strand starting at position 2170 of SEQ ID NO: 915968
ucuagaguucgcgaacauu

SEQ ID NO: 1120133 - RNA, 19 nt, Artificial Sequence
  Description of Artificial Sequence: Synthetic oligonucleotide
  Antisense strand to SEQ ID NO: 1120132
aauguucgcgaacucuaga

SEQ ID NO: 1120134 - RNA, 19 nt, Artificial Sequence
  Description of Artificial Sequence: Synthetic oligonucleotide
  Sense strand starting at position 2173 of SEQ ID NO: 915968
agaguucgcgaacauuugu

SEQ ID NO: 1120135 - RNA, 19 nt, Artificial Sequence
  Description of Artificial Sequence: Synthetic oligonucleotide
  Antisense strand to SEQ ID NO: 1120134
acaaauguucgcgaacucu

SEQ ID NO: 1120136 - RNA, 19 nt, Artificial Sequence
  Description of Artificial Sequence: Synthetic oligonucleotide
  Sense strand starting at position 2178 of SEQ ID NO: 915968
ucgcgaacauuuguucuca

SEQ ID NO: 1120137 - RNA, 19 nt, Artificial Sequence
  Description of Artificial Sequence: Synthetic oligonucleotide
  Antisense strand to SEQ ID NO: 1120136
ugagaacaaauguucgcga

SEQ ID NO: 1120138 - RNA, 19 nt, Artificial Sequence
  Description of Artificial Sequence: Synthetic oligonucleotide
  Sense strand starting at position 2190 of SEQ ID NO: 915968
guucucagcccaugcaaau

SEQ ID NO: 1120139 - RNA, 19 nt, Artificial Sequence
  Description of Artificial Sequence: Synthetic oligonucleotide
  Antisense strand to SEQ ID NO: 1120138
auuugcaugggcugagaac

SEQ ID NO: 1120140 - RNA, 19 nt, Artificial Sequence
  Description of Artificial Sequence: Synthetic oligonucleotide
  Sense strand starting at position 2205 of SEQ ID NO: 915968
aaaugaguucggugcugau

SEQ ID NO: 1120141 - RNA, 19 nt, Artificial Sequence
  Description of Artificial Sequence: Synthetic oligonucleotide
  Antisense strand to SEQ ID NO: 1120140
aucagcaccgaacucauuu

SEQ ID NO: 1120142 - RNA, 19 nt, Artificial Sequence
  Description of Artificial Sequence: Synthetic oligonucleotide
  Sense strand starting at position 2214 of SEQ ID NO: 915968
cggugcugauugguugaga

SEQ ID NO: 1120143 - RNA, 19 nt, Artificial Sequence
  Description of Artificial Sequence: Synthetic oligonucleotide
  Antisense strand to SEQ ID NO: 1120142
ucucaaccaaucagcaccg

SEQ ID NO: 1120144 - RNA, 19 nt, Artificial Sequence
  Description of Artificial Sequence: Synthetic oligonucleotide
  Sense strand starting at position 2215 of SEQ ID NO: 915968
ggugcugauugguugagaa

SEQ ID NO: 1120145 - RNA, 19 nt, Artificial Sequence
  Description of Artificial Sequence: Synthetic oligonucleotide
  Antisense strand to SEQ ID NO: 1120144
uucucaaccaaucagcacc

SEQ ID NO: 1120146 - RNA, 19 nt, Artificial Sequence
  Description of Artificial Sequence: Synthetic oligonucleotide
  Sense strand starting at position 2323 of SEQ ID NO: 915968
uccuaaaggccuugucuau

SEQ ID NO: 1120147 - RNA, 19 nt, Artificial Sequence
  Description of Artificial Sequence: Synthetic oligonucleotide
  Antisense strand to SEQ ID NO: 1120146
auagacaaggccuuuagga

SEQ ID NO: 1120148 - RNA, 19 nt, Artificial Sequence
  Description of Artificial Sequence: Synthetic oligonucleotide
  Sense strand starting at position 2327 of SEQ ID NO: 915968
aaaggccuugucuauugau

SEQ ID NO: 1120149 - RNA, 19 nt, Artificial Sequence
  Description of Artificial Sequence: Synthetic oligonucleotide
  Antisense strand to SEQ ID NO: 1120148
aucaauagacaaggccuuu

SEQ ID NO: 1120150 - RNA, 19 nt, Artificial Sequence
  Description of Artificial Sequence: Synthetic oligonucleotide
  Sense strand starting at position 2334 of SEQ ID NO: 915968
uugucuauugaugagcgau

SEQ ID NO: 1120151 - RNA, 19 nt, Artificial Sequence
  Description of Artificial Sequence: Synthetic oligonucleotide
  Antisense strand to SEQ ID NO: 1120150
aucgcucaucaauagacaa

SEQ ID NO: 1120152 - RNA, 19 nt, Artificial Sequence
  Description of Artificial Sequence: Synthetic oligonucleotide
  Sense strand starting at position 2337 of SEQ ID NO: 915968
ucuauugaugagcgaugga

SEQ ID NO: 1120153 - RNA, 19 nt, Artificial Sequence
  Description of Artificial Sequence: Synthetic oligonucleotide
  Antisense strand to SEQ ID NO: 1120152
uccaucgcucaucaauaga

SEQ ID NO: 1120154 - RNA, 19 nt, Artificial Sequence
  Description of Artificial Sequence: Synthetic oligonucleotide
  Sense strand starting at position 2417 of SEQ ID NO: 915968
acuguaggugguuaaggau

SEQ ID NO: 1120155 - RNA, 19 nt, Artificial Sequence
  Description of Artificial Sequence: Synthetic oligonucleotide
  Antisense strand to SEQ ID NO: 1120154
auccuuaaccaccuacagu

SEQ ID NO: 1120156 - RNA, 19 nt, Artificial Sequence
  Description of Artificial Sequence: Synthetic oligonucleotide
  Sense strand starting at position 2441 of SEQ ID NO: 915968
guacuaaucgccuggaccu

SEQ ID NO: 1120157 - RNA, 19 nt, Artificial Sequence
  Description of Artificial Sequence: Synthetic oligonucleotide
  Antisense strand to SEQ ID NO: 1120156
agguccaggcgauuaguac

SEQ ID NO: 1120158 - RNA, 19 nt, Artificial Sequence
  Description of Artificial Sequence: Synthetic oligonucleotide
  Sense strand starting at position 2559 of SEQ ID NO: 915968
gggaucuuggcucaccaua

SEQ ID NO: 1120159 - RNA, 19 nt, Artificial Sequence
  Description of Artificial Sequence: Synthetic oligonucleotide
  Antisense strand to SEQ ID NO: 1120158
uauggugagccaagauccc

SEQ ID NO: 1120160 - RNA, 19 nt, Artificial Sequence
  Description of Artificial Sequence: Synthetic oligonucleotide
  Sense strand starting at position 2795 of SEQ ID NO: 915968
ucauaaccguuucuuaaag

SEQ ID NO: 1120161 - RNA, 19 nt, Artificial Sequence
  Description of Artificial Sequence: Synthetic oligonucleotide
  Antisense strand to SEQ ID NO: 1120160
cuuuaagaaacgguuauga

SEQ ID NO: 1120162 - RNA, 19 nt, Artificial Sequence
  Description of Artificial Sequence: Synthetic oligonucleotide
  Sense strand starting at position 2809 of SEQ ID NO: 915968
uaaaguauuccacggaaag

SEQ ID NO: 1120163 - RNA, 19 nt, Artificial Sequence
  Description of Artificial Sequence: Synthetic oligonucleotide
  Antisense strand to SEQ ID NO: 1120162
cuuuccguggaauacuuua

SEQ ID NO: 1120164 - RNA, 19 nt, Artificial Sequence
  Description of Artificial Sequence: Synthetic oligonucleotide
  Sense strand starting at position 2810 of SEQ ID NO: 915968
aaaguauuccacggaaagg

SEQ ID NO: 1120165 - RNA, 19 nt, Artificial Sequence
  Description of Artificial Sequence: Synthetic oligonucleotide
  Antisense strand to SEQ ID NO: 1120164
ccuuuccguggaauacuuu

SEQ ID NO: 1120166 - RNA, 19 nt, Artificial Sequence
  Description of Artificial Sequence: Synthetic oligonucleotide
  Sense strand starting at position 2844 of SEQ ID NO: 915968
gcccuuguuccggaggacu

SEQ ID NO: 1120167 - RNA, 19 nt, Artificial Sequence
  Description of Artificial Sequence: Synthetic oligonucleotide
  Antisense strand to SEQ ID NO: 1120166
aguccuccggaacaagggc

SEQ ID NO: 1120168 - RNA, 19 nt, Artificial Sequence
  Description of Artificial Sequence: Synthetic oligonucleotide
  Sense strand starting at position 2879 of SEQ ID NO: 915968
gugagacccgucugaauag

SEQ ID NO: 1120169 - RNA, 19 nt, Artificial Sequence
  Description of Artificial Sequence: Synthetic oligonucleotide
  Antisense strand to SEQ ID NO: 1120168
cuauucagacgggucucac

SEQ ID NO: 1120170 - RNA, 19 nt, Artificial Sequence
  Description of Artificial Sequence: Synthetic oligonucleotide
  Sense strand starting at position 2891 of SEQ ID NO: 915968
ugaauagauuccuagaacu

SEQ ID NO: 1120171 - RNA, 19 nt, Artificial Sequence
  Description of Artificial Sequence: Synthetic oligonucleotide
  Antisense strand to SEQ ID NO: 1120170
aguucuaggaaucuauuca

SEQ ID NO: 1120172 - RNA, 19 nt, Artificial Sequence
  Description of Artificial Sequence: Synthetic oligonucleotide
  Sense strand starting at position 2903 of SEQ ID NO: 915968
uagaacugaccacgucaga

SEQ ID NO: 1120173 - RNA, 19 nt, Artificial Sequence
  Description of Artificial Sequence: Synthetic oligonucleotide
  Antisense strand to SEQ ID NO: 1120172
ucugacguggucaguucua

SEQ ID NO: 1120174 - RNA, 19 nt, Artificial Sequence
  Description of Artificial Sequence: Synthetic oligonucleotide
  Sense strand starting at position 11 of SEQ ID NO: 915969
uaggccuucgaaugagaca

SEQ ID NO: 1120175 - RNA, 19 nt, Artificial Sequence
  Description of Artificial Sequence: Synthetic oligonucleotide
  Antisense strand to SEQ ID NO: 1120174
ugucucauucgaaggccua

SEQ ID NO: 1120176 - RNA, 19 nt, Artificial Sequence
  Description of Artificial Sequence: Synthetic oligonucleotide
  Sense strand starting at position 126 of SEQ ID NO: 915969
acaggaagcugaucuguaa

SEQ ID NO: 1120177 - RNA, 19 nt, Artificial Sequence
  Description of Artificial Sequence: Synthetic oligonucleotide
  Antisense strand to SEQ ID NO: 1120176
uuacagaucagcuuccugu

SEQ ID NO: 1120178 - RNA, 19 nt, Artificial Sequence
  Description of Artificial Sequence: Synthetic oligonucleotide
  Sense strand starting at position 145 of SEQ ID NO: 915969
acgucuacugauuacacaa

SEQ ID NO: 1120179 - RNA, 19 nt, Artificial Sequence
  Description of Artificial Sequence: Synthetic oligonucleotide
  Antisense strand to SEQ ID NO: 1120178
uuguguaaucaguagacgu

SEQ ID NO: 1120180 - RNA, 19 nt, Artificial Sequence
  Description of Artificial Sequence: Synthetic oligonucleotide
  Sense strand starting at position 242 of SEQ ID NO: 915969
ccugaccaacugugauaau

SEQ ID NO: 1120181 - RNA, 19 nt, Artificial Sequence
  Description of Artificial Sequence: Synthetic oligonucleotide
  Antisense strand to SEQ ID NO: 1120180
auuaucacaguuggucagg

SEQ ID NO: 1120182 - RNA, 19 nt, Artificial Sequence
  Description of Artificial Sequence: Synthetic oligonucleotide
  Sense strand starting at position 260 of SEQ ID NO: 915969
uuaaauaucgcucaaguga

SEQ ID NO: 1120183 - RNA, 19 nt, Artificial Sequence
  Description of Artificial Sequence: Synthetic oligonucleotide
  Antisense strand to SEQ ID NO: 1120182
ucacuugagcgauauuuaa

SEQ ID NO: 1120184 - RNA, 19 nt, Artificial Sequence
  Description of Artificial Sequence: Synthetic oligonucleotide
  Sense strand starting at position 858 of SEQ ID NO: 915969
gaucacuaauguguuagga

SEQ ID NO: 1120185 - RNA, 19 nt, Artificial Sequence
  Description of Artificial Sequence: Synthetic oligonucleotide
  Antisense strand to SEQ ID NO: 1120184
uccuaacacauuagugauc

SEQ ID NO: 1120186 - RNA, 19 nt, Artificial Sequence
  Description of Artificial Sequence: Synthetic oligonucleotide
  Sense strand starting at position 1056 of SEQ ID NO: 915969
uagguauaggaccgaucuu

SEQ ID NO: 1120187 - RNA, 19 nt, Artificial Sequence
  Description of Artificial Sequence: Synthetic oligonucleotide
  Antisense strand to SEQ ID NO: 1120186
aagaucgguccuauaccua

SEQ ID NO: 1120188 - RNA, 19 nt, Artificial Sequence
  Description of Artificial Sequence: Synthetic oligonucleotide
  Sense strand starting at position 1143 of SEQ ID NO: 915969
uuuauaacuggugguaaga

SEQ ID NO: 1120189 - RNA, 19 nt, Artificial Sequence
  Description of Artificial Sequence: Synthetic oligonucleotide
  Antisense strand to SEQ ID NO: 1120188
ucuuaccaccaguuauaaa

SEQ ID NO: 1120190 - RNA, 19 nt, Artificial Sequence
  Description of Artificial Sequence: Synthetic oligonucleotide
  Sense strand starting at position 1159 of SEQ ID NO: 915969
agaauagccuuccuacaug

SEQ ID NO: 1120191 - RNA, 19 nt, Artificial Sequence
  Description of Artificial Sequence: Synthetic oligonucleotide
  Antisense strand to SEQ ID NO: 1120190
cauguaggaaggcuauucu

SEQ ID NO: 1120192 - RNA, 19 nt, Artificial Sequence
  Description of Artificial Sequence: Synthetic oligonucleotide
  Sense strand starting at position 1207 of SEQ ID NO: 915969
aagcguauccucuaagaua

SEQ ID NO: 1120193 - RNA, 19 nt, Artificial Sequence
  Description of Artificial Sequence: Synthetic oligonucleotide
  Antisense strand to SEQ ID NO: 1120192
uaucuuagaggauacgcuu

SEQ ID NO: 1120194 - RNA, 19 nt, Artificial Sequence
  Description of Artificial Sequence: Synthetic oligonucleotide
  Sense strand starting at position 1307 of SEQ ID NO: 915969
gggcgaaggcuagaguuaa

SEQ ID NO: 1120195 - RNA, 19 nt, Artificial Sequence
  Description of Artificial Sequence: Synthetic oligonucleotide
  Antisense strand to SEQ ID NO: 1120194
uuaacucuagccuucgccc

SEQ ID NO: 1120196 - RNA, 19 nt, Artificial Sequence
  Description of Artificial Sequence: Synthetic oligonucleotide
  Sense strand starting at position 1311 of SEQ ID NO: 915969
gaaggcuagaguuaaguga

SEQ ID NO: 1120197 - RNA, 19 nt, Artificial Sequence
  Description of Artificial Sequence: Synthetic oligonucleotide
  Antisense strand to SEQ ID NO: 1120196
ucacuuaacucuagccuuc

SEQ ID NO: 1120198 - RNA, 19 nt, Artificial Sequence
  Description of Artificial Sequence: Synthetic oligonucleotide
  Sense strand starting at position 1315 of SEQ ID NO: 915969
gcuagaguuaagugaagaa

SEQ ID NO: 1120199 - RNA, 19 nt, Artificial Sequence
  Description of Artificial Sequence: Synthetic oligonucleotide
  Antisense strand to SEQ ID NO: 1120198
uucuucacuuaacucuagc

SEQ ID NO: 1120200 - RNA, 19 nt, Artificial Sequence
  Description of Artificial Sequence: Synthetic oligonucleotide
  Sense strand starting at position 1327 of SEQ ID NO: 915969
ugaagaaucccguacguag

SEQ ID NO: 1120201 - RNA, 19 nt, Artificial Sequence
  Description of Artificial Sequence: Synthetic oligonucleotide
  Antisense strand to SEQ ID NO: 1120200
cuacguacgggauucuuca

SEQ ID NO: 1120202 - RNA, 19 nt, Artificial Sequence
  Description of Artificial Sequence: Synthetic oligonucleotide
  Sense strand starting at position 1386 of SEQ ID NO: 915969
ucgggaauauagccaauau

SEQ ID NO: 1120203 - RNA, 19 nt, Artificial Sequence
  Description of Artificial Sequence: Synthetic oligonucleotide
  Antisense strand to SEQ ID NO: 1120202
auauuggcuauauucccga

SEQ ID NO: 1120204 - RNA, 19 nt, Artificial Sequence
  Description of Artificial Sequence: Synthetic oligonucleotide
  Sense strand starting at position 1565 of SEQ ID NO: 915969
ucuguucugccugucuauu

SEQ ID NO: 1120205 - RNA, 19 nt, Artificial Sequence
  Description of Artificial Sequence: Synthetic oligonucleotide
  Antisense strand to SEQ ID NO: 1120204
aauagacaggcagaacaga

SEQ ID NO: 1120206 - RNA, 19 nt, Artificial Sequence
  Description of Artificial Sequence: Synthetic oligonucleotide
  Sense strand starting at position 1626 of SEQ ID NO: 915969
gcuuacaaagcggauuaaa

SEQ ID NO: 1120207 - RNA, 19 nt, Artificial Sequence
  Description of Artificial Sequence: Synthetic oligonucleotide
  Antisense strand to SEQ ID NO: 1120206
uuuaauccgcuuuguaagc

SEQ ID NO: 1120208 - RNA, 19 nt, Artificial Sequence
  Description of Artificial Sequence: Synthetic oligonucleotide
  Sense strand starting at position 1637 of SEQ ID NO: 915969
ggauuaaacucaguggcaa

SEQ ID NO: 1120209 - RNA, 19 nt, Artificial Sequence
  Description of Artificial Sequence: Synthetic oligonucleotide
  Antisense strand to SEQ ID NO: 1120208
uugccacugaguuuaaucc

SEQ ID NO: 1120210 - RNA, 19 nt, Artificial Sequence
  Description of Artificial Sequence: Synthetic oligonucleotide
  Sense strand starting at position 1638 of SEQ ID NO: 915969
gauuaaacucaguggcaaa

SEQ ID NO: 1120211 - RNA, 19 nt, Artificial Sequence
  Description of Artificial Sequence: Synthetic oligonucleotide
  Antisense strand to SEQ ID NO: 1120210
uuugccacugaguuuaauc

SEQ ID NO: 1120212 - RNA, 19 nt, Artificial Sequence
  Description of Artificial Sequence: Synthetic oligonucleotide
  Sense strand starting at position 1705 of SEQ ID NO: 915969
accugcuugggucauaaga

SEQ ID NO: 1120213 - RNA, 19 nt, Artificial Sequence
  Description of Artificial Sequence: Synthetic oligonucleotide
  Antisense strand to SEQ ID NO: 1120212
ucuuaugacccaagcaggu

SEQ ID NO: 1120214 - RNA, 19 nt, Artificial Sequence
  Description of Artificial Sequence: Synthetic oligonucleotide
  Sense strand starting at position 1777 of SEQ ID NO: 915969
cuucuuuaucugcagaaug

SEQ ID NO: 1120215 - RNA, 19 nt, Artificial Sequence
  Description of Artificial Sequence: Synthetic oligonucleotide
  Antisense strand to SEQ ID NO: 1120214
cauucugcagauaaagaag

SEQ ID NO: 1120216 - RNA, 19 nt, Artificial Sequence
  Description of Artificial Sequence: Synthetic oligonucleotide
  Sense strand starting at position 1779 of SEQ ID NO: 915969
ucuuuaucugcagaaugua

SEQ ID NO: 1120217 - RNA, 19 nt, Artificial Sequence
  Description of Artificial Sequence: Synthetic oligonucleotide
  Antisense strand to SEQ ID NO: 1120216
uacauucugcagauaaaga

SEQ ID NO: 1120218 - RNA, 19 nt, Artificial Sequence
  Description of Artificial Sequence: Synthetic oligonucleotide
  Sense strand starting at position 1996 of SEQ ID NO: 915969
ccuggaauucuuggguauu

SEQ ID NO: 1120219 - RNA, 19 nt, Artificial Sequence
  Description of Artificial Sequence: Synthetic oligonucleotide
  Antisense strand to SEQ ID NO: 1120218
aauacccaagaauuccagg

SEQ ID NO: 1120220 - RNA, 19 nt, Artificial Sequence
  Description of Artificial Sequence: Synthetic oligonucleotide
  Sense strand starting at position 1998 of SEQ ID NO: 915969
uggaauucuuggguauucu

SEQ ID NO: 1120221 - RNA, 19 nt, Artificial Sequence
  Description of Artificial Sequence: Synthetic oligonucleotide
  Antisense strand to SEQ ID NO: 1120220
agaauacccaagaauucca

SEQ ID NO: 1120222 - RNA, 19 nt, Artificial Sequence
  Description of Artificial Sequence: Synthetic oligonucleotide
  Sense strand starting at position 2594 of SEQ ID NO: 915969
acgcuuauuuggcuugauu

SEQ ID NO: 1120223 - RNA, 19 nt, Artificial Sequence
  Description of Artificial Sequence: Synthetic oligonucleotide
  Antisense strand to SEQ ID NO: 1120222
aaucaagccaaauaagcgu

SEQ ID NO: 1120224 - RNA, 19 nt, Artificial Sequence
  Description of Artificial Sequence: Synthetic oligonucleotide
  Sense strand starting at position 2685 of SEQ ID NO: 915969
cuguaauucguauccguug

SEQ ID NO: 1120225 - RNA, 19 nt, Artificial Sequence
  Description of Artificial Sequence: Synthetic oligonucleotide
  Antisense strand to SEQ ID NO: 1120224
caacggauacgaauuacag

SEQ ID NO: 1120226 - RNA, 19 nt, Artificial Sequence
  Description of Artificial Sequence: Synthetic oligonucleotide
  Sense strand starting at position 2694 of SEQ ID NO: 915969
guauccguuguguuucauu

SEQ ID NO: 1120227 - RNA, 19 nt, Artificial Sequence
  Description of Artificial Sequence: Synthetic oligonucleotide
  Antisense strand to SEQ ID NO: 1120226
aaugaaacacaacggauac

SEQ ID NO: 1120228 - RNA, 19 nt, Artificial Sequence
  Description of Artificial Sequence: Synthetic oligonucleotide
  Sense strand starting at position 2743 of SEQ ID NO: 915969
gaggaaacuugagaaagga

SEQ ID NO: 1120229 - RNA, 19 nt, Artificial Sequence
  Description of Artificial Sequence: Synthetic oligonucleotide
  Antisense strand to SEQ ID NO: 1120228
uccuuucucaaguuuccuc

SEQ ID NO: 1120230 - RNA, 19 nt, Artificial Sequence
  Description of Artificial Sequence: Synthetic oligonucleotide
  Sense strand starting at position 3018 of SEQ ID NO: 915969
aucagagcuuuguuauaaa

SEQ ID NO: 1120231 - RNA, 19 nt, Artificial Sequence
  Description of Artificial Sequence: Synthetic oligonucleotide
  Antisense strand to SEQ ID NO: 1120230
uuuauaacaaagcucugau

SEQ ID NO: 1120232 - RNA, 19 nt, Artificial Sequence
  Description of Artificial Sequence: Synthetic oligonucleotide
  Sense strand starting at position 3104 of SEQ ID NO: 915969
aguaauugccaccagaaca

SEQ ID NO: 1120233 - RNA, 19 nt, Artificial Sequence
  Description of Artificial Sequence: Synthetic oligonucleotide
  Antisense strand to SEQ ID NO: 1120232
uguucugguggcaauuacu

SEQ ID NO: 1120234 - RNA, 19 nt, Artificial Sequence
  Description of Artificial Sequence: Synthetic oligonucleotide
  Sense strand starting at position 3115 of SEQ ID NO: 915969
ccagaacagcugugaaaca

SEQ ID NO: 1120235 - RNA, 19 nt, Artificial Sequence
  Description of Artificial Sequence: Synthetic oligonucleotide
  Antisense strand to SEQ ID NO: 1120234
uguuucacagcuguucugg

SEQ ID NO: 1120236 - RNA, 19 nt, Artificial Sequence
  Description of Artificial Sequence: Synthetic oligonucleotide
  Sense strand starting at position 3131 of SEQ ID NO: 915969
acaucuggcuuucugaaac

SEQ ID NO: 1120237 - RNA, 19 nt, Artificial Sequence
  Description of Artificial Sequence: Synthetic oligonucleotide
  Antisense strand to SEQ ID NO: 1120236
guuucagaaagccagaugu

SEQ ID NO: 1120238 - RNA, 19 nt, Artificial Sequence
  Description of Artificial Sequence: Synthetic oligonucleotide
  Sense strand starting at position 3197 of SEQ ID NO: 915969
guaauaaacugggcugaca

SEQ ID NO: 1120239 - RNA, 19 nt, Artificial Sequence
  Description of Artificial Sequence: Synthetic oligonucleotide
  Antisense strand to SEQ ID NO: 1120238
ugucagcccaguuuauuac

SEQ ID NO: 1120240 - RNA, 19 nt, Artificial Sequence
  Description of Artificial Sequence: Synthetic oligonucleotide
  Sense strand starting at position 3496 of SEQ ID NO: 915969
gggagcucucaguauagca

SEQ ID NO: 1120241 - RNA, 19 nt, Artificial Sequence
  Description of Artificial Sequence: Synthetic oligonucleotide
  Antisense strand to SEQ ID NO: 1120240
ugcuauacugagagcuccc

SEQ ID NO: 1120242 - RNA, 19 nt, Artificial Sequence
  Description of Artificial Sequence: Synthetic oligonucleotide
  Sense strand starting at position 3559 of SEQ ID NO: 915969
agagucaagcauuauaucu

SEQ ID NO: 1120243 - RNA, 19 nt, Artificial Sequence
  Description of Artificial Sequence: Synthetic oligonucleotide
  Antisense strand to SEQ ID NO: 1120242
agauauaaugcuugacucu

SEQ ID NO: 1120244 - RNA, 19 nt, Artificial Sequence
  Description of Artificial Sequence: Synthetic oligonucleotide
  Sense strand starting at position 3627 of SEQ ID NO: 915969
gugucuuagaaguauugag

SEQ ID NO: 1120245 - RNA, 19 nt, Artificial Sequence
  Description of Artificial Sequence: Synthetic oligonucleotide
  Antisense strand to SEQ ID NO: 1120244
cucaauacuucuaagacac

SEQ ID NO: 1120246 - RNA, 19 nt, Artificial Sequence
  Description of Artificial Sequence: Synthetic oligonucleotide
  Sense strand starting at position 3636 of SEQ ID NO: 915969
aaguauugagaauguacag

SEQ ID NO: 1120247 - RNA, 19 nt, Artificial Sequence
  Description of Artificial Sequence: Synthetic oligonucleotide
  Antisense strand to SEQ ID NO: 1120246
cuguacauucucaauacuu

SEQ ID NO: 1120248 - RNA, 19 nt, Artificial Sequence
  Description of Artificial Sequence: Synthetic oligonucleotide
  Sense strand starting at position 3811 of SEQ ID NO: 915969
guuugugccauaucguuaa

SEQ ID NO: 1120249 - RNA, 19 nt, Artificial Sequence
  Description of Artificial Sequence: Synthetic oligonucleotide
  Antisense strand to SEQ ID NO: 1120248
uuaacgauauggcacaaac

SEQ ID NO: 1120250 - RNA, 19 nt, Artificial Sequence
  Description of Artificial Sequence: Synthetic oligonucleotide
  Sense strand starting at position 3866 of SEQ ID NO: 915969
agugcugugauccauaaga

SEQ ID NO: 1120251 - RNA, 19 nt, Artificial Sequence
  Description of Artificial Sequence: Synthetic oligonucleotide
  Antisense strand to SEQ ID NO: 1120250
ucuuauggaucacagcacu

SEQ ID NO: 1120252 - RNA, 19 nt, Artificial Sequence
  Description of Artificial Sequence: Synthetic oligonucleotide
  Sense strand starting at position 3868 of SEQ ID NO: 915969
ugcugugauccauaagaaa

SEQ ID NO: 1120253 - RNA, 19 nt, Artificial Sequence
  Description of Artificial Sequence: Synthetic oligonucleotide
  Antisense strand to SEQ ID NO: 1120252
uuucuuauggaucacagca

SEQ ID NO: 1120254 - RNA, 19 nt, Artificial Sequence
  Description of Artificial Sequence: Synthetic oligonucleotide
  Sense strand starting at position 22 of SEQ ID NO: 915970
caagaaguuugaucuguga

SEQ ID NO: 1120255 - RNA, 19 nt, Artificial Sequence
  Description of Artificial Sequence: Synthetic oligonucleotide
  Antisense strand to SEQ ID NO: 1120254
ucacagaucaaacuucuug

SEQ ID NO: 1120256 - RNA, 19 nt, Artificial Sequence
  Description of Artificial Sequence: Synthetic oligonucleotide
  Sense strand starting at position 24 of SEQ ID NO: 915970
agaaguuugaucugugacu

SEQ ID NO: 1120257 - RNA, 19 nt, Artificial Sequence
  Description of Artificial Sequence: Synthetic oligonucleotide
  Antisense strand to SEQ ID NO: 1120256
agucacagaucaaacuucu

SEQ ID NO: 1120258 - RNA, 19 nt, Artificial Sequence
  Description of Artificial Sequence: Synthetic oligonucleotide
  Sense strand starting at position 25 of SEQ ID NO: 915970
gaaguuugaucugugacug

SEQ ID NO: 1120259 - RNA, 19 nt, Artificial Sequence
  Description of Artificial Sequence: Synthetic oligonucleotide
  Antisense strand to SEQ ID NO: 1120258
cagucacagaucaaacuuc

SEQ ID NO: 1120260 - RNA, 19 nt, Artificial Sequence
  Description of Artificial Sequence: Synthetic oligonucleotide
  Sense strand starting at position 358 of SEQ ID NO: 915970
gccugacuuucuguauuug

SEQ ID NO: 1120261 - RNA, 19 nt, Artificial Sequence
  Description of Artificial Sequence: Synthetic oligonucleotide
  Antisense strand to SEQ ID NO: 1120260
caaauacagaaagucaggc

SEQ ID NO: 1120262 - RNA, 19 nt, Artificial Sequence
  Description of Artificial Sequence: Synthetic oligonucleotide
  Sense strand starting at position 487 of SEQ ID NO: 915970
uggguaacuuuggcucuaa

SEQ ID NO: 1120263 - RNA, 19 nt, Artificial Sequence
  Description of Artificial Sequence: Synthetic oligonucleotide
  Antisense strand to SEQ ID NO: 1120262
uuagagccaaaguuaccca

SEQ ID NO: 1120264 - RNA, 19 nt, Artificial Sequence
  Description of Artificial Sequence: Synthetic oligonucleotide
  Sense strand starting at position 525 of SEQ ID NO: 915970
agauacuacuaccuagagu

SEQ ID NO: 1120265 - RNA, 19 nt, Artificial Sequence
  Description of Artificial Sequence: Synthetic oligonucleotide
  Antisense strand to SEQ ID NO: 1120264
acucuagguaguaguaucu

SEQ ID NO: 1120266 - RNA, 19 nt, Artificial Sequence
  Description of Artificial Sequence: Synthetic oligonucleotide
  Sense strand starting at position 578 of SEQ ID NO: 915970
aguacuuaguggucacuaa

SEQ ID NO: 1120267 - RNA, 19 nt, Artificial Sequence
  Description of Artificial Sequence: Synthetic oligonucleotide
  Antisense strand to SEQ ID NO: 1120266
uuagugaccacuaaguacu

SEQ ID NO: 1120268 - RNA, 19 nt, Artificial Sequence
  Description of Artificial Sequence: Synthetic oligonucleotide
  Sense strand starting at position 579 of SEQ ID NO: 915970
guacuuaguggucacuaaa

SEQ ID NO: 1120269 - RNA, 19 nt, Artificial Sequence
  Description of Artificial Sequence: Synthetic oligonucleotide
  Antisense strand to SEQ ID NO: 1120268
uuuagugaccacuaaguac

SEQ ID NO: 1120270 - RNA, 19 nt, Artificial Sequence
  Description of Artificial Sequence: Synthetic oligonucleotide
  Sense strand starting at position 656 of SEQ ID NO: 915970
auacacuguugucuuauga

SEQ ID NO: 1120271 - RNA, 19 nt, Artificial Sequence
  Description of Artificial Sequence: Synthetic oligonucleotide
  Antisense strand to SEQ ID NO: 1120270
ucauaagacaacaguguau

SEQ ID NO: 1120272 - RNA, 19 nt, Artificial Sequence
  Description of Artificial Sequence: Synthetic oligonucleotide
  Sense strand starting at position 744 of SEQ ID NO: 915970
acaacaguggcuuguaaau

SEQ ID NO: 1120273 - RNA, 19 nt, Artificial Sequence
  Description of Artificial Sequence: Synthetic oligonucleotide
  Antisense strand to SEQ ID NO: 1120272
auuuacaagccacuguugu

SEQ ID NO: 1120274 - RNA, 19 nt, Artificial Sequence
  Description of Artificial Sequence: Synthetic oligonucleotide
  Sense strand starting at position 796 of SEQ ID NO: 915970
cuugauaagccaugacauu

SEQ ID NO: 1120275 - RNA, 19 nt, Artificial Sequence
  Description of Artificial Sequence: Synthetic oligonucleotide
  Antisense strand to SEQ ID NO: 1120274
aaugucauggcuuaucaag

SEQ ID NO: 1120276 - RNA, 19 nt, Artificial Sequence
  Description of Artificial Sequence: Synthetic oligonucleotide
  Sense strand starting at position 834 of SEQ ID NO: 915970
gugggaucauaauucuggu

SEQ ID NO: 1120277 - RNA, 19 nt, Artificial Sequence
  Description of Artificial Sequence: Synthetic oligonucleotide
  Antisense strand to SEQ ID NO: 1120276
accagaauuaugaucccac

SEQ ID NO: 1120278 - RNA, 19 nt, Artificial Sequence
  Description of Artificial Sequence: Synthetic oligonucleotide
  Sense strand starting at position 840 of SEQ ID NO: 915970
ucauaauucuggucuguga

SEQ ID NO: 1120279 - RNA, 19 nt, Artificial Sequence
  Description of Artificial Sequence: Synthetic oligonucleotide
  Antisense strand to SEQ ID NO: 1120278
ucacagaccagaauuauga

SEQ ID NO: 1120280 - RNA, 19 nt, Artificial Sequence
  Description of Artificial Sequence: Synthetic oligonucleotide
  Sense strand starting at position 842 of SEQ ID NO: 915970
auaauucuggucugugaaa

SEQ ID NO: 1120281 - RNA, 19 nt, Artificial Sequence
  Description of Artificial Sequence: Synthetic oligonucleotide
  Antisense strand to SEQ ID NO: 1120280
uuucacagaccagaauuau

SEQ ID NO: 1120282 - RNA, 19 nt, Artificial Sequence
  Description of Artificial Sequence: Synthetic oligonucleotide
  Sense strand starting at position 843 of SEQ ID NO: 915970
uaauucuggucugugaaau

SEQ ID NO: 1120283 - RNA, 19 nt, Artificial Sequence
  Description of Artificial Sequence: Synthetic oligonucleotide
  Antisense strand to SEQ ID NO: 1120282
auuucacagaccagaauua

SEQ ID NO: 1120284 - RNA, 19 nt, Artificial Sequence
  Description of Artificial Sequence: Synthetic oligonucleotide
  Sense strand starting at position 844 of SEQ ID NO: 915970
aauucuggucugugaaauc

SEQ ID NO: 1120285 - RNA, 19 nt, Artificial Sequence
  Description of Artificial Sequence: Synthetic oligonucleotide
  Antisense strand to SEQ ID NO: 1120284
gauuucacagaccagaauu

SEQ ID NO: 1120286 - RNA, 19 nt, Artificial Sequence
  Description of Artificial Sequence: Synthetic oligonucleotide
  Sense strand starting at position 947 of SEQ ID NO: 915970
gaaguaaguccugguuuaa

SEQ ID NO: 1120287 - RNA, 19 nt, Artificial Sequence
  Description of Artificial Sequence: Synthetic oligonucleotide
  Antisense strand to SEQ ID NO: 1120286
uuaaaccaggacuuacuuc

SEQ ID NO: 1120288 - RNA, 19 nt, Artificial Sequence
  Description of Artificial Sequence: Synthetic oligonucleotide
  Sense strand starting at position 1421 of SEQ ID NO: 915970
gcagaucuguuauuccaag

SEQ ID NO: 1120289 - RNA, 19 nt, Artificial Sequence
  Description of Artificial Sequence: Synthetic oligonucleotide
  Antisense strand to SEQ ID NO: 1120288
cuuggaauaacagaucugc

SEQ ID NO: 1120290 - RNA, 19 nt, Artificial Sequence
  Description of Artificial Sequence: Synthetic oligonucleotide
  Sense strand starting at position 1427 of SEQ ID NO: 915970
cuguuauuccaagggcaga

SEQ ID NO: 1120291 - RNA, 19 nt, Artificial Sequence
  Description of Artificial Sequence: Synthetic oligonucleotide
  Antisense strand to SEQ ID NO: 1120290
ucugcccuuggaauaacag

SEQ ID NO: 1120292 - RNA, 19 nt, Artificial Sequence
  Description of Artificial Sequence: Synthetic oligonucleotide
  Sense strand starting at position 1428 of SEQ ID NO: 915970
uguuauuccaagggcagau

SEQ ID NO: 1120293 - RNA, 19 nt, Artificial Sequence
  Description of Artificial Sequence: Synthetic oligonucleotide
  Antisense strand to SEQ ID NO: 1120292
aucugcccuuggaauaaca

SEQ ID NO: 1120294 - RNA, 19 nt, Artificial Sequence
  Description of Artificial Sequence: Synthetic oligonucleotide
  Sense strand starting at position 1444 of SEQ ID NO: 915970
gauccauuuccuggguugu

SEQ ID NO: 1120295 - RNA, 19 nt, Artificial Sequence
  Description of Artificial Sequence: Synthetic oligonucleotide
  Antisense strand to SEQ ID NO: 1120294
acaacccaggaaauggauc

SEQ ID NO: 1120296 - RNA, 19 nt, Artificial Sequence
  Description of Artificial Sequence: Synthetic oligonucleotide
  Sense strand starting at position 1493 of SEQ ID NO: 915970
ccuuuacugugagccagaa

SEQ ID NO: 1120297 - RNA, 19 nt, Artificial Sequence
  Description of Artificial Sequence: Synthetic oligonucleotide
  Antisense strand to SEQ ID NO: 1120296
uucuggcucacaguaaagg

SEQ ID NO: 1120298 - RNA, 19 nt, Artificial Sequence
  Description of Artificial Sequence: Synthetic oligonucleotide
  Sense strand starting at position 1505 of SEQ ID NO: 915970
gccagaacuccuggaggua

SEQ ID NO: 1120299 - RNA, 19 nt, Artificial Sequence
  Description of Artificial Sequence: Synthetic oligonucleotide
  Antisense strand to SEQ ID NO: 1120298
uaccuccaggaguucuggc

SEQ ID NO: 1120300 - RNA, 19 nt, Artificial Sequence
  Description of Artificial Sequence: Synthetic oligonucleotide
  Sense strand starting at position 1551 of SEQ ID NO: 915970
guuaacuaugcugaagaau

SEQ ID NO: 1120301 - RNA, 19 nt, Artificial Sequence
  Description of Artificial Sequence: Synthetic oligonucleotide
  Antisense strand to SEQ ID NO: 1120300
auucuucagcauaguuaac

SEQ ID NO: 1120302 - RNA, 19 nt, Artificial Sequence
  Description of Artificial Sequence: Synthetic oligonucleotide
  Sense strand starting at position 2631 of SEQ ID NO: 915970
cuugcaugacccugacauc

SEQ ID NO: 1120303 - RNA, 19 nt, Artificial Sequence
  Description of Artificial Sequence: Synthetic oligonucleotide
  Antisense strand to SEQ ID NO: 1120302
gaugucagggucaugcaag

SEQ ID NO: 1120304 - RNA, 19 nt, Artificial Sequence
  Description of Artificial Sequence: Synthetic oligonucleotide
  Sense strand starting at position 2900 of SEQ ID NO: 915970
cgcagaucgcucuuccuga

SEQ ID NO: 1120305 - RNA, 19 nt, Artificial Sequence
  Description of Artificial Sequence: Synthetic oligonucleotide
  Antisense strand to SEQ ID NO: 1120304
ucaggaagagcgaucugcg

SEQ ID NO: 1120306 - RNA, 19 nt, Artificial Sequence
  Description of Artificial Sequence: Synthetic oligonucleotide
  Sense strand starting at position 2988 of SEQ ID NO: 915970
uuggaaucgcgguuguagu

SEQ ID NO: 1120307 - RNA, 19 nt, Artificial Sequence
  Description of Artificial Sequence: Synthetic oligonucleotide
  Antisense strand to SEQ ID NO: 1120306
acuacaaccgcgauuccaa

SEQ ID NO: 1120308 - RNA, 19 nt, Artificial Sequence
  Description of Artificial Sequence: Synthetic oligonucleotide
  Sense strand starting at position 3296 of SEQ ID NO: 915970
cauaucuuguugcugggaa

SEQ ID NO: 1120309 - RNA, 19 nt, Artificial Sequence
  Description of Artificial Sequence: Synthetic oligonucleotide
  Antisense strand to SEQ ID NO: 1120308
uucccagcaacaagauaug

SEQ ID NO: 1120310 - RNA, 19 nt, Artificial Sequence
  Description of Artificial Sequence: Synthetic oligonucleotide
  Sense strand starting at position 3373 of SEQ ID NO: 915970
auuguauuuguggguguuu

SEQ ID NO: 1120311 - RNA, 19 nt, Artificial Sequence
  Description of Artificial Sequence: Synthetic oligonucleotide
  Antisense strand to SEQ ID NO: 1120310
aaacacccacaaauacaau

SEQ ID NO: 1120312 - RNA, 19 nt, Artificial Sequence
  Description of Artificial Sequence: Synthetic oligonucleotide
  Sense strand starting at position 3374 of SEQ ID NO: 915970
uuguauuuguggguguuua

SEQ ID NO: 1120313 - RNA, 19 nt, Artificial Sequence
  Description of Artificial Sequence: Synthetic oligonucleotide
  Antisense strand to SEQ ID NO: 1120312
uaaacacccacaaauacaa

SEQ ID NO: 1120314 - RNA, 19 nt, Artificial Sequence
  Description of Artificial Sequence: Synthetic oligonucleotide
  Sense strand starting at position 3375 of SEQ ID NO: 915970
uguauuuguggguguuuaa

SEQ ID NO: 1120315 - RNA, 19 nt, Artificial Sequence
  Description of Artificial Sequence: Synthetic oligonucleotide
  Antisense strand to SEQ ID NO: 1120314
uuaaacacccacaaauaca

SEQ ID NO: 1120316 - RNA, 19 nt, Artificial Sequence
  Description of Artificial Sequence: Synthetic oligonucleotide
  Sense strand starting at position 3446 of SEQ ID NO: 915970
ggagaagcaucuuugaauu

SEQ ID NO: 1120317 - RNA, 19 nt, Artificial Sequence
  Description of Artificial Sequence: Synthetic oligonucleotide
  Antisense strand to SEQ ID NO: 1120316
aauucaaagaugcuucucc

SEQ ID NO: 1120318 - RNA, 19 nt, Artificial Sequence
  Description of Artificial Sequence: Synthetic oligonucleotide
  Sense strand starting at position 3539 of SEQ ID NO: 915970
gguucaucucccuggagag

SEQ ID NO: 1120319 - RNA, 19 nt, Artificial Sequence
  Description of Artificial Sequence: Synthetic oligonucleotide
  Antisense strand to SEQ ID NO: 1120318
cucuccagggagaugaacc

SEQ ID NO: 1120320 - RNA, 19 nt, Artificial Sequence
  Description of Artificial Sequence: Synthetic oligonucleotide
  Sense strand starting at position 3577 of SEQ ID NO: 915970
auagcauggugauuggaau

SEQ ID NO: 1120321 - RNA, 19 nt, Artificial Sequence
  Description of Artificial Sequence: Synthetic oligonucleotide
  Antisense strand to SEQ ID NO: 1120320
auuccaaucaccaugcuau

SEQ ID NO: 1120322 - RNA, 19 nt, Artificial Sequence
  Description of Artificial Sequence: Synthetic oligonucleotide
  Sense strand starting at position 3585 of SEQ ID NO: 915970
gugauuggaauccagguau

SEQ ID NO: 1120323 - RNA, 19 nt, Artificial Sequence
  Description of Artificial Sequence: Synthetic oligonucleotide
  Antisense strand to SEQ ID NO: 1120322
auaccuggauuccaaucac

SEQ ID NO: 1120324 - RNA, 19 nt, Artificial Sequence
  Description of Artificial Sequence: Synthetic oligonucleotide
  Sense strand starting at position 3596 of SEQ ID NO: 915970
ccagguauuucuguugcca

SEQ ID NO: 1120325 - RNA, 19 nt, Artificial Sequence
  Description of Artificial Sequence: Synthetic oligonucleotide
  Antisense strand to SEQ ID NO: 1120324
uggcaacagaaauaccugg

SEQ ID NO: 1120326 - RNA, 19 nt, Artificial Sequence
  Description of Artificial Sequence: Synthetic oligonucleotide
  Sense strand starting at position 3648 of SEQ ID NO: 915970
cccauuugucgugggugau

SEQ ID NO: 1120327 - RNA, 19 nt, Artificial Sequence
  Description of Artificial Sequence: Synthetic oligonucleotide
  Antisense strand to SEQ ID NO: 1120326
aucacccacgacaaauggg

SEQ ID NO: 1120328 - RNA, 19 nt, Artificial Sequence
  Description of Artificial Sequence: Synthetic oligonucleotide
  Sense strand starting at position 3649 of SEQ ID NO: 915970
ccauuugucgugggugaug

SEQ ID NO: 1120329 - RNA, 19 nt, Artificial Sequence
  Description of Artificial Sequence: Synthetic oligonucleotide
  Antisense strand to SEQ ID NO: 1120328
caucacccacgacaaaugg

SEQ ID NO: 1120330 - RNA, 19 nt, Artificial Sequence
  Description of Artificial Sequence: Synthetic oligonucleotide
  Sense strand starting at position 3909 of SEQ ID NO: 915970
uuuauaagugcaugaauuc

SEQ ID NO: 1120331 - RNA, 19 nt, Artificial Sequence
  Description of Artificial Sequence: Synthetic oligonucleotide
  Antisense strand to SEQ ID NO: 1120330
gaauucaugcacuuauaaa

SEQ ID NO: 1120332 - RNA, 19 nt, Artificial Sequence
  Description of Artificial Sequence: Synthetic oligonucleotide
  Sense strand starting at position 3962 of SEQ ID NO: 915970
gccaauuugccaugguaua

SEQ ID NO: 1120333 - RNA, 19 nt, Artificial Sequence
  Description of Artificial Sequence: Synthetic oligonucleotide
  Antisense strand to SEQ ID NO: 1120332
uauaccauggcaaauuggc

SEQ ID NO: 1120334 - RNA, 19 nt, Artificial Sequence
  Description of Artificial Sequence: Synthetic oligonucleotide
  Sense strand starting at position 95 of SEQ ID NO: 915971
gccugacuuucuguauuug

SEQ ID NO: 1120335 - RNA, 19 nt, Artificial Sequence
  Description of Artificial Sequence: Synthetic oligonucleotide
  Antisense strand to SEQ ID NO: 1120334
caaauacagaaagucaggc

SEQ ID NO: 1120336 - RNA, 19 nt, Artificial Sequence
  Description of Artificial Sequence: Synthetic oligonucleotide
  Sense strand starting at position 110 of SEQ ID NO: 915971
uuugacgacuccucucauu

SEQ ID NO: 1120337 - RNA, 19 nt, Artificial Sequence
  Description of Artificial Sequence: Synthetic oligonucleotide
  Antisense strand to SEQ ID NO: 1120336
aaugagaggagucgucaaa

SEQ ID NO: 1120338 - RNA, 19 nt, Artificial Sequence
  Description of Artificial Sequence: Synthetic oligonucleotide
  Sense strand starting at position 224 of SEQ ID NO: 915971
uggguaacuuuggcucuaa

SEQ ID NO: 1120339 - RNA, 19 nt, Artificial Sequence
  Description of Artificial Sequence: Synthetic oligonucleotide
  Antisense strand to SEQ ID NO: 1120338
uuagagccaaaguuaccca

SEQ ID NO: 1120340 - RNA, 19 nt, Artificial Sequence
  Description of Artificial Sequence: Synthetic oligonucleotide
  Sense strand starting at position 225 of SEQ ID NO: 915971
ggguaacuuuggcucuaau

SEQ ID NO: 1120341 - RNA, 19 nt, Artificial Sequence
  Description of Artificial Sequence: Synthetic oligonucleotide
  Antisense strand to SEQ ID NO: 1120340
auuagagccaaaguuaccc

SEQ ID NO: 1120342 - RNA, 19 nt, Artificial Sequence
  Description of Artificial Sequence: Synthetic oligonucleotide
  Sense strand starting at position 262 of SEQ ID NO: 915971
agauacuacuaccuagagu

SEQ ID NO: 1120343 - RNA, 19 nt, Artificial Sequence
  Description of Artificial Sequence: Synthetic oligonucleotide
  Antisense strand to SEQ ID NO: 1120342
acucuagguaguaguaucu

SEQ ID NO: 1120344 - RNA, 19 nt, Artificial Sequence
  Description of Artificial Sequence: Synthetic oligonucleotide
  Sense strand starting at position 315 of SEQ ID NO: 915971
aguacuuaguggucacuaa

SEQ ID NO: 1120345 - RNA, 19 nt, Artificial Sequence
  Description of Artificial Sequence: Synthetic oligonucleotide
  Antisense strand to SEQ ID NO: 1120344
uuagugaccacuaaguacu

SEQ ID NO: 1120346 - RNA, 19 nt, Artificial Sequence
  Description of Artificial Sequence: Synthetic oligonucleotide
  Sense strand starting at position 316 of SEQ ID NO: 915971
guacuuaguggucacuaaa

SEQ ID NO: 1120347 - RNA, 19 nt, Artificial Sequence
  Description of Artificial Sequence: Synthetic oligonucleotide
  Antisense strand to SEQ ID NO: 1120346
uuuagugaccacuaaguac

SEQ ID NO: 1120348 - RNA, 19 nt, Artificial Sequence
  Description of Artificial Sequence: Synthetic oligonucleotide
  Sense strand starting at position 393 of SEQ ID NO: 915971
auacacuguugucuuauga

SEQ ID NO: 1120349 - RNA, 19 nt, Artificial Sequence
  Description of Artificial Sequence: Synthetic oligonucleotide
  Antisense strand to SEQ ID NO: 1120348
ucauaagacaacaguguau

SEQ ID NO: 1120350 - RNA, 19 nt, Artificial Sequence
  Description of Artificial Sequence: Synthetic oligonucleotide
  Sense strand starting at position 481 of SEQ ID NO: 915971
acaacaguggcuuguaaau

SEQ ID NO: 1120351 - RNA, 19 nt, Artificial Sequence
  Description of Artificial Sequence: Synthetic oligonucleotide
  Antisense strand to SEQ ID NO: 1120350
auuuacaagccacuguugu

SEQ ID NO: 1120352 - RNA, 19 nt, Artificial Sequence
  Description of Artificial Sequence: Synthetic oligonucleotide
  Sense strand starting at position 533 of SEQ ID NO: 915971
cuugauaagccaugacauu

SEQ ID NO: 1120353 - RNA, 19 nt, Artificial Sequence
  Description of Artificial Sequence: Synthetic oligonucleotide
  Antisense strand to SEQ ID NO: 1120352
aaugucauggcuuaucaag

SEQ ID NO: 1120354 - RNA, 19 nt, Artificial Sequence
  Description of Artificial Sequence: Synthetic oligonucleotide
  Sense strand starting at position 571 of SEQ ID NO: 915971
gugggaucauaauucuggu

SEQ ID NO: 1120355 - RNA, 19 nt, Artificial Sequence
  Description of Artificial Sequence: Synthetic oligonucleotide
  Antisense strand to SEQ ID NO: 1120354
accagaauuaugaucccac

SEQ ID NO: 1120356 - RNA, 19 nt, Artificial Sequence
  Description of Artificial Sequence: Synthetic oligonucleotide
  Sense strand starting at position 577 of SEQ ID NO: 915971
ucauaauucuggucuguga

SEQ ID NO: 1120357 - RNA, 19 nt, Artificial Sequence
  Description of Artificial Sequence: Synthetic oligonucleotide
  Antisense strand to SEQ ID NO: 1120356
ucacagaccagaauuauga

SEQ ID NO: 1120358 - RNA, 19 nt, Artificial Sequence
  Description of Artificial Sequence: Synthetic oligonucleotide
  Sense strand starting at position 579 of SEQ ID NO: 915971
auaauucuggucugugaaa

SEQ ID NO: 1120359 - RNA, 19 nt, Artificial Sequence
  Description of Artificial Sequence: Synthetic oligonucleotide
  Antisense strand to SEQ ID NO: 1120358
uuucacagaccagaauuau

SEQ ID NO: 1120360 - RNA, 19 nt, Artificial Sequence
  Description of Artificial Sequence: Synthetic oligonucleotide
  Sense strand starting at position 580 of SEQ ID NO: 915971
uaauucuggucugugaaau

SEQ ID NO: 1120361 - RNA, 19 nt, Artificial Sequence
  Description of Artificial Sequence: Synthetic oligonucleotide
  Antisense strand to SEQ ID NO: 1120360
auuucacagaccagaauua

SEQ ID NO: 1120362 - RNA, 19 nt, Artificial Sequence
  Description of Artificial Sequence: Synthetic oligonucleotide
  Sense strand starting at position 581 of SEQ ID NO: 915971
aauucuggucugugaaauc

SEQ ID NO: 1120363 - RNA, 19 nt, Artificial Sequence
  Description of Artificial Sequence: Synthetic oligonucleotide
  Antisense strand to SEQ ID NO: 1120362
gauuucacagaccagaauu

SEQ ID NO: 1120364 - RNA, 19 nt, Artificial Sequence
  Description of Artificial Sequence: Synthetic oligonucleotide
  Sense strand starting at position 684 of SEQ ID NO: 915971
gaaguaaguccugguuuaa

SEQ ID NO: 1120365 - RNA, 19 nt, Artificial Sequence
  Description of Artificial Sequence: Synthetic oligonucleotide
  Antisense strand to SEQ ID NO: 1120364
uuaaaccaggacuuacuuc

SEQ ID NO: 1120366 - RNA, 19 nt, Artificial Sequence
  Description of Artificial Sequence: Synthetic oligonucleotide
  Sense strand starting at position 1158 of SEQ ID NO: 915971
gcagaucuguuauuccaag

SEQ ID NO: 1120367 - RNA, 19 nt, Artificial Sequence
  Description of Artificial Sequence: Synthetic oligonucleotide
  Antisense strand to SEQ ID NO: 1120366
cuuggaauaacagaucugc

SEQ ID NO: 1120368 - RNA, 19 nt, Artificial Sequence
  Description of Artificial Sequence: Synthetic oligonucleotide
  Sense strand starting at position 1164 of SEQ ID NO: 915971
cuguuauuccaagggcaga

SEQ ID NO: 1120369 - RNA, 19 nt, Artificial Sequence
  Description of Artificial Sequence: Synthetic oligonucleotide
  Antisense strand to SEQ ID NO: 1120368
ucugcccuuggaauaacag

SEQ ID NO: 1120370 - RNA, 19 nt, Artificial Sequence
  Description of Artificial Sequence: Synthetic oligonucleotide
  Sense strand starting at position 1165 of SEQ ID NO: 915971
uguuauuccaagggcagau

SEQ ID NO: 1120371 - RNA, 19 nt, Artificial Sequence
  Description of Artificial Sequence: Synthetic oligonucleotide
  Antisense strand to SEQ ID NO: 1120370
aucugcccuuggaauaaca

SEQ ID NO: 1120372 - RNA, 19 nt, Artificial Sequence
  Description of Artificial Sequence: Synthetic oligonucleotide
  Sense strand starting at position 1181 of SEQ ID NO: 915971
gauccauuuccuggguugu

SEQ ID NO: 1120373 - RNA, 19 nt, Artificial Sequence
  Description of Artificial Sequence: Synthetic oligonucleotide
  Antisense strand to SEQ ID NO: 1120372
acaacccaggaaauggauc

SEQ ID NO: 1120374 - RNA, 19 nt, Artificial Sequence
  Description of Artificial Sequence: Synthetic oligonucleotide
  Sense strand starting at position 1230 of SEQ ID NO: 915971
ccuuuacugugagccagaa

SEQ ID NO: 1120375 - RNA, 19 nt, Artificial Sequence
  Description of Artificial Sequence: Synthetic oligonucleotide
  Antisense strand to SEQ ID NO: 1120374
uucuggcucacaguaaagg

SEQ ID NO: 1120376 - RNA, 19 nt, Artificial Sequence
  Description of Artificial Sequence: Synthetic oligonucleotide
  Sense strand starting at position 1242 of SEQ ID NO: 915971
gccagaacuccuggaggua

SEQ ID NO: 1120377 - RNA, 19 nt, Artificial Sequence
  Description of Artificial Sequence: Synthetic oligonucleotide
  Antisense strand to SEQ ID NO: 1120376
uaccuccaggaguucuggc

SEQ ID NO: 1120378 - RNA, 19 nt, Artificial Sequence
  Description of Artificial Sequence: Synthetic oligonucleotide
  Sense strand starting at position 1288 of SEQ ID NO: 915971
guuaacuaugcugaagaau

SEQ ID NO: 1120379 - RNA, 19 nt, Artificial Sequence
  Description of Artificial Sequence: Synthetic oligonucleotide
  Antisense strand to SEQ ID NO: 1120378
auucuucagcauaguuaac

SEQ ID NO: 1120380 - RNA, 19 nt, Artificial Sequence
  Description of Artificial Sequence: Synthetic oligonucleotide
  Sense strand starting at position 2368 of SEQ ID NO: 915971
cuugcaugacccugacauc

SEQ ID NO: 1120381 - RNA, 19 nt, Artificial Sequence
  Description of Artificial Sequence: Synthetic oligonucleotide
  Antisense strand to SEQ ID NO: 1120380
gaugucagggucaugcaag

SEQ ID NO: 1120382 - RNA, 19 nt, Artificial Sequence
  Description of Artificial Sequence: Synthetic oligonucleotide
  Sense strand starting at position 2637 of SEQ ID NO: 915971
cgcagaucgcucuuccuga

SEQ ID NO: 1120383 - RNA, 19 nt, Artificial Sequence
  Description of Artificial Sequence: Synthetic oligonucleotide
  Antisense strand to SEQ ID NO: 1120382
ucaggaagagcgaucugcg

SEQ ID NO: 1120384 - RNA, 19 nt, Artificial Sequence
  Description of Artificial Sequence: Synthetic oligonucleotide
  Sense strand starting at position 2725 of SEQ ID NO: 915971
uuggaaucgcgguuguagu

SEQ ID NO: 1120385 - RNA, 19 nt, Artificial Sequence
  Description of Artificial Sequence: Synthetic oligonucleotide
  Antisense strand to SEQ ID NO: 1120384
acuacaaccgcgauuccaa

SEQ ID NO: 1120386 - RNA, 19 nt, Artificial Sequence
  Description of Artificial Sequence: Synthetic oligonucleotide
  Sense strand starting at position 3033 of SEQ ID NO: 915971
cauaucuuguugcugggaa

SEQ ID NO: 1120387 - RNA, 19 nt, Artificial Sequence
  Description of Artificial Sequence: Synthetic oligonucleotide
  Antisense strand to SEQ ID NO: 1120386
uucccagcaacaagauaug

SEQ ID NO: 1120388 - RNA, 19 nt, Artificial Sequence
  Description of Artificial Sequence: Synthetic oligonucleotide
  Sense strand starting at position 3035 of SEQ ID NO: 915971
uaucuuguugcugggaaau

SEQ ID NO: 1120389 - RNA, 19 nt, Artificial Sequence
  Description of Artificial Sequence: Synthetic oligonucleotide
  Antisense strand to SEQ ID NO: 1120388
auuucccagcaacaagaua

SEQ ID NO: 1120390 - RNA, 19 nt, Artificial Sequence
  Description of Artificial Sequence: Synthetic oligonucleotide
  Sense strand starting at position 3110 of SEQ ID NO: 915971
auuguauuuguggguguuu

SEQ ID NO: 1120391 - RNA, 19 nt, Artificial Sequence
  Description of Artificial Sequence: Synthetic oligonucleotide
  Antisense strand to SEQ ID NO: 1120390
aaacacccacaaauacaau

SEQ ID NO: 1120392 - RNA, 19 nt, Artificial Sequence
  Description of Artificial Sequence: Synthetic oligonucleotide
  Sense strand starting at position 3111 of SEQ ID NO: 915971
uuguauuuguggguguuua

SEQ ID NO: 1120393 - RNA, 19 nt, Artificial Sequence
  Description of Artificial Sequence: Synthetic oligonucleotide
  Antisense strand to SEQ ID NO: 1120392
uaaacacccacaaauacaa

SEQ ID NO: 1120394 - RNA, 19 nt, Artificial Sequence
  Description of Artificial Sequence: Synthetic oligonucleotide
  Sense strand starting at position 3112 of SEQ ID NO: 915971
uguauuuguggguguuuaa

SEQ ID NO: 1120395 - RNA, 19 nt, Artificial Sequence
  Description of Artificial Sequence: Synthetic oligonucleotide
  Antisense strand to SEQ ID NO: 1120394
uuaaacacccacaaauaca

SEQ ID NO: 1120396 - RNA, 19 nt, Artificial Sequence
  Description of Artificial Sequence: Synthetic oligonucleotide
  Sense strand starting at position 3183 of SEQ ID NO: 915971
ggagaagcaucuuugaauu

SEQ ID NO: 1120397 - RNA, 19 nt, Artificial Sequence
  Description of Artificial Sequence: Synthetic oligonucleotide
  Antisense strand to SEQ ID NO: 1120396
aauucaaagaugcuucucc

SEQ ID NO: 1120398 - RNA, 19 nt, Artificial Sequence
  Description of Artificial Sequence: Synthetic oligonucleotide
  Sense strand starting at position 3276 of SEQ ID NO: 915971
gguucaucucccuggagag

SEQ ID NO: 1120399 - RNA, 19 nt, Artificial Sequence
  Description of Artificial Sequence: Synthetic oligonucleotide
  Antisense strand to SEQ ID NO: 1120398
cucuccagggagaugaacc

SEQ ID NO: 1120400 - RNA, 19 nt, Artificial Sequence
  Description of Artificial Sequence: Synthetic oligonucleotide
  Sense strand starting at position 3314 of SEQ ID NO: 915971
auagcauggugauuggaau

SEQ ID NO: 1120401 - RNA, 19 nt, Artificial Sequence
  Description of Artificial Sequence: Synthetic oligonucleotide
  Antisense strand to SEQ ID NO: 1120400
auuccaaucaccaugcuau

SEQ ID NO: 1120402 - RNA, 19 nt, Artificial Sequence
  Description of Artificial Sequence: Synthetic oligonucleotide
  Sense strand starting at position 3322 of SEQ ID NO: 915971
gugauuggaauccagguau

SEQ ID NO: 1120403 - RNA, 19 nt, Artificial Sequence
  Description of Artificial Sequence: Synthetic oligonucleotide
  Antisense strand to SEQ ID NO: 1120402
auaccuggauuccaaucac

SEQ ID NO: 1120404 - RNA, 19 nt, Artificial Sequence
  Description of Artificial Sequence: Synthetic oligonucleotide
  Sense strand starting at position 3333 of SEQ ID NO: 915971
ccagguauuucuguugcca

SEQ ID NO: 1120405 - RNA, 19 nt, Artificial Sequence
  Description of Artificial Sequence: Synthetic oligonucleotide
  Antisense strand to SEQ ID NO: 1120404
uggcaacagaaauaccugg

SEQ ID NO: 1120406 - RNA, 19 nt, Artificial Sequence
  Description of Artificial Sequence: Synthetic oligonucleotide
  Sense strand starting at position 3385 of SEQ ID NO: 915971
cccauuugucgugggugau

SEQ ID NO: 1120407 - RNA, 19 nt, Artificial Sequence
  Description of Artificial Sequence: Synthetic oligonucleotide
  Antisense strand to SEQ ID NO: 1120406
aucacccacgacaaauggg

SEQ ID NO: 1120408 - RNA, 19 nt, Artificial Sequence
  Description of Artificial Sequence: Synthetic oligonucleotide
  Sense strand starting at position 3386 of SEQ ID NO: 915971
ccauuugucgugggugaug

SEQ ID NO: 1120409 - RNA, 19 nt, Artificial Sequence
  Description of Artificial Sequence: Synthetic oligonucleotide
  Antisense strand to SEQ ID NO: 1120408
caucacccacgacaaaugg

SEQ ID NO: 1120410 - RNA, 19 nt, Artificial Sequence
  Description of Artificial Sequence: Synthetic oligonucleotide
  Sense strand starting at position 3646 of SEQ ID NO: 915971
uuuauaagugcaugaauuc

SEQ ID NO: 1120411 - RNA, 19 nt, Artificial Sequence
  Description of Artificial Sequence: Synthetic oligonucleotide
  Antisense strand to SEQ ID NO: 1120410
gaauucaugcacuuauaaa

SEQ ID NO: 1120412 - RNA, 19 nt, Artificial Sequence
  Description of Artificial Sequence: Synthetic oligonucleotide
  Sense strand starting at position 3699 of SEQ ID NO: 915971
gccaauuugccaugguaua

SEQ ID NO: 1120413 - RNA, 19 nt, Artificial Sequence
  Description of Artificial Sequence: Synthetic oligonucleotide
  Antisense strand to SEQ ID NO: 1120412
uauaccauggcaaauuggc

SEQ ID NO: 1120414 - RNA, 19 nt, Artificial Sequence
  Description of Artificial Sequence: Synthetic oligonucleotide
  Sense strand starting at position 40 of SEQ ID NO: 915972
uggguaacuuuggcucuaa

SEQ ID NO: 1120415 - RNA, 19 nt, Artificial Sequence
  Description of Artificial Sequence: Synthetic oligonucleotide
  Antisense strand to SEQ ID NO: 1120414
uuagagccaaaguuaccca

SEQ ID NO: 1120416 - RNA, 19 nt, Artificial Sequence
  Description of Artificial Sequence: Synthetic oligonucleotide
  Sense strand starting at position 41 of SEQ ID NO: 915972
ggguaacuuuggcucuaau

SEQ ID NO: 1120417 - RNA, 19 nt, Artificial Sequence
  Description of Artificial Sequence: Synthetic oligonucleotide
  Antisense strand to SEQ ID NO: 1120416
auuagagccaaaguuaccc

SEQ ID NO: 1120418 - RNA, 19 nt, Artificial Sequence
  Description of Artificial Sequence: Synthetic oligonucleotide
  Sense strand starting at position 78 of SEQ ID NO: 915972
agauacuacuaccuagagu

SEQ ID NO: 1120419 - RNA, 19 nt, Artificial Sequence
  Description of Artificial Sequence: Synthetic oligonucleotide
  Antisense strand to SEQ ID NO: 1120418
acucuagguaguaguaucu

SEQ ID NO: 1120420 - RNA, 19 nt, Artificial Sequence
  Description of Artificial Sequence: Synthetic oligonucleotide
  Sense strand starting at position 131 of SEQ ID NO: 915972
aguacuuaguggucacuaa

SEQ ID NO: 1120421 - RNA, 19 nt, Artificial Sequence
  Description of Artificial Sequence: Synthetic oligonucleotide
  Antisense strand to SEQ ID NO: 1120420
uuagugaccacuaaguacu

SEQ ID NO: 1120422 - RNA, 19 nt, Artificial Sequence
  Description of Artificial Sequence: Synthetic oligonucleotide
  Sense strand starting at position 132 of SEQ ID NO: 915972
guacuuaguggucacuaaa

SEQ ID NO: 1120423 - RNA, 19 nt, Artificial Sequence
  Description of Artificial Sequence: Synthetic oligonucleotide
  Antisense strand to SEQ ID NO: 1120422
uuuagugaccacuaaguac

SEQ ID NO: 1120424 - RNA, 19 nt, Artificial Sequence
  Description of Artificial Sequence: Synthetic oligonucleotide
  Sense strand starting at position 209 of SEQ ID NO: 915972
auacacuguugucuuauga

SEQ ID NO: 1120425 - RNA, 19 nt, Artificial Sequence
  Description of Artificial Sequence: Synthetic oligonucleotide
  Antisense strand to SEQ ID NO: 1120424
ucauaagacaacaguguau

SEQ ID NO: 1120426 - RNA, 19 nt, Artificial Sequence
  Description of Artificial Sequence: Synthetic oligonucleotide
  Sense strand starting at position 297 of SEQ ID NO: 915972
acaacaguggcuuguaaau

SEQ ID NO: 1120427 - RNA, 19 nt, Artificial Sequence
  Description of Artificial Sequence: Synthetic oligonucleotide
  Antisense strand to SEQ ID NO: 1120426
auuuacaagccacuguugu

SEQ ID NO: 1120428 - RNA, 19 nt, Artificial Sequence
  Description of Artificial Sequence: Synthetic oligonucleotide
  Sense strand starting at position 349 of SEQ ID NO: 915972
cuugauaagccaugacauu

SEQ ID NO: 1120429 - RNA, 19 nt, Artificial Sequence
  Description of Artificial Sequence: Synthetic oligonucleotide
  Antisense strand to SEQ ID NO: 1120428
aaugucauggcuuaucaag

SEQ ID NO: 1120430 - RNA, 19 nt, Artificial Sequence
  Description of Artificial Sequence: Synthetic oligonucleotide
  Sense strand starting at position 387 of SEQ ID NO: 915972
gugggaucauaauucuggu

SEQ ID NO: 1120431 - RNA, 19 nt, Artificial Sequence
  Description of Artificial Sequence: Synthetic oligonucleotide
  Antisense strand to SEQ ID NO: 1120430
accagaauuaugaucccac

SEQ ID NO: 1120432 - RNA, 19 nt, Artificial Sequence
  Description of Artificial Sequence: Synthetic oligonucleotide
  Sense strand starting at position 393 of SEQ ID NO: 915972
ucauaauucuggucuguga

SEQ ID NO: 1120433 - RNA, 19 nt, Artificial Sequence
  Description of Artificial Sequence: Synthetic oligonucleotide
  Antisense strand to SEQ ID NO: 1120432
ucacagaccagaauuauga

SEQ ID NO: 1120434 - RNA, 19 nt, Artificial Sequence
  Description of Artificial Sequence: Synthetic oligonucleotide
  Sense strand starting at position 395 of SEQ ID NO: 915972
auaauucuggucugugaaa

SEQ ID NO: 1120435 - RNA, 19 nt, Artificial Sequence
  Description of Artificial Sequence: Synthetic oligonucleotide
  Antisense strand to SEQ ID NO: 1120434
uuucacagaccagaauuau

SEQ ID NO: 1120436 - RNA, 19 nt, Artificial Sequence
  Description of Artificial Sequence: Synthetic oligonucleotide
  Sense strand starting at position 396 of SEQ ID NO: 915972
uaauucuggucugugaaau

SEQ ID NO: 1120437 - RNA, 19 nt, Artificial Sequence
  Description of Artificial Sequence: Synthetic oligonucleotide
  Antisense strand to SEQ ID NO: 1120436
auuucacagaccagaauua

SEQ ID NO: 1120438 - RNA, 19 nt, Artificial Sequence
  Description of Artificial Sequence: Synthetic oligonucleotide
  Sense strand starting at position 397 of SEQ ID NO: 915972
aauucuggucugugaaauc

SEQ ID NO: 1120439 - RNA, 19 nt, Artificial Sequence
  Description of Artificial Sequence: Synthetic oligonucleotide
  Antisense strand to SEQ ID NO: 1120438
gauuucacagaccagaauu

SEQ ID NO: 1120440 - RNA, 19 nt, Artificial Sequence
  Description of Artificial Sequence: Synthetic oligonucleotide
  Sense strand starting at position 500 of SEQ ID NO: 915972
gaaguaaguccugguuuaa

SEQ ID NO: 1120441 - RNA, 19 nt, Artificial Sequence
  Description of Artificial Sequence: Synthetic oligonucleotide
  Antisense strand to SEQ ID NO: 1120440
uuaaaccaggacuuacuuc

SEQ ID NO: 1120442 - RNA, 19 nt, Artificial Sequence
  Description of Artificial Sequence: Synthetic oligonucleotide
  Sense strand starting at position 974 of SEQ ID NO: 915972
gcagaucuguuauuccaag

SEQ ID NO: 1120443 - RNA, 19 nt, Artificial Sequence
  Description of Artificial Sequence: Synthetic oligonucleotide
  Antisense strand to SEQ ID NO: 1120442
cuuggaauaacagaucugc

SEQ ID NO: 1120444 - RNA, 19 nt, Artificial Sequence
  Description of Artificial Sequence: Synthetic oligonucleotide
  Sense strand starting at position 980 of SEQ ID NO: 915972
cuguuauuccaagggcaga

SEQ ID NO: 1120445 - RNA, 19 nt, Artificial Sequence
  Description of Artificial Sequence: Synthetic oligonucleotide
  Antisense strand to SEQ ID NO: 1120444
ucugcccuuggaauaacag

SEQ ID NO: 1120446 - RNA, 19 nt, Artificial Sequence
  Description of Artificial Sequence: Synthetic oligonucleotide
  Sense strand starting at position 981 of SEQ ID NO: 915972
uguuauuccaagggcagau

SEQ ID NO: 1120447 - RNA, 19 nt, Artificial Sequence
  Description of Artificial Sequence: Synthetic oligonucleotide
  Antisense strand to SEQ ID NO: 1120446
aucugcccuuggaauaaca

SEQ ID NO: 1120448 - RNA, 19 nt, Artificial Sequence
  Description of Artificial Sequence: Synthetic oligonucleotide
  Sense strand starting at position 997 of SEQ ID NO: 915972
gauccauuuccuggguugu

SEQ ID NO: 1120449 - RNA, 19 nt, Artificial Sequence
  Description of Artificial Sequence: Synthetic oligonucleotide
  Antisense strand to SEQ ID NO: 1120448
acaacccaggaaauggauc

SEQ ID NO: 1120450 - RNA, 19 nt, Artificial Sequence
  Description of Artificial Sequence: Synthetic oligonucleotide
  Sense strand starting at position 1046 of SEQ ID NO: 915972
ccuuuacugugagccagaa

SEQ ID NO: 1120451 - RNA, 19 nt, Artificial Sequence
  Description of Artificial Sequence: Synthetic oligonucleotide
  Antisense strand to SEQ ID NO: 1120450
uucuggcucacaguaaagg

SEQ ID NO: 1120452 - RNA, 19 nt, Artificial Sequence
  Description of Artificial Sequence: Synthetic oligonucleotide
  Sense strand starting at position 1058 of SEQ ID NO: 915972
gccagaacuccuggaggua

SEQ ID NO: 1120453 - RNA, 19 nt, Artificial Sequence
  Description of Artificial Sequence: Synthetic oligonucleotide
  Antisense strand to SEQ ID NO: 1120452
uaccuccaggaguucuggc

SEQ ID NO: 1120454 - RNA, 19 nt, Artificial Sequence
  Description of Artificial Sequence: Synthetic oligonucleotide
  Sense strand starting at position 1104 of SEQ ID NO: 915972
guuaacuaugcugaagaau

SEQ ID NO: 1120455 - RNA, 19 nt, Artificial Sequence
  Description of Artificial Sequence: Synthetic oligonucleotide
  Antisense strand to SEQ ID NO: 1120454
auucuucagcauaguuaac

SEQ ID NO: 1120456 - RNA, 19 nt, Artificial Sequence
  Description of Artificial Sequence: Synthetic oligonucleotide
  Sense strand starting at position 2184 of SEQ ID NO: 915972
cuugcaugacccugacauc

SEQ ID NO: 1120457 - RNA, 19 nt, Artificial Sequence
  Description of Artificial Sequence: Synthetic oligonucleotide
  Antisense strand to SEQ ID NO: 1120456
gaugucagggucaugcaag

SEQ ID NO: 1120458 - RNA, 19 nt, Artificial Sequence
  Description of Artificial Sequence: Synthetic oligonucleotide
  Sense strand starting at position 2453 of SEQ ID NO: 915972
cgcagaucgcucuuccuga

SEQ ID NO: 1120459 - RNA, 19 nt, Artificial Sequence
  Description of Artificial Sequence: Synthetic oligonucleotide
  Antisense strand to SEQ ID NO: 1120458
ucaggaagagcgaucugcg

SEQ ID NO: 1120460 - RNA, 19 nt, Artificial Sequence
  Description of Artificial Sequence: Synthetic oligonucleotide
  Sense strand starting at position 2541 of SEQ ID NO: 915972
uuggaaucgcgguuguagu

SEQ ID NO: 1120461 - RNA, 19 nt, Artificial Sequence
  Description of Artificial Sequence: Synthetic oligonucleotide
  Antisense strand to SEQ ID NO: 1120460
acuacaaccgcgauuccaa

SEQ ID NO: 1120462 - RNA, 19 nt, Artificial Sequence
  Description of Artificial Sequence: Synthetic oligonucleotide
  Sense strand starting at position 2849 of SEQ ID NO: 915972
cauaucuuguugcugggaa

SEQ ID NO: 1120463 - RNA, 19 nt, Artificial Sequence
  Description of Artificial Sequence: Synthetic oligonucleotide
  Antisense strand to SEQ ID NO: 1120462
uucccagcaacaagauaug

SEQ ID NO: 1120464 - RNA, 19 nt, Artificial Sequence
  Description of Artificial Sequence: Synthetic oligonucleotide
  Sense strand starting at position 2851 of SEQ ID NO: 915972
uaucuuguugcugggaaau

SEQ ID NO: 1120465 - RNA, 19 nt, Artificial Sequence
  Description of Artificial Sequence: Synthetic oligonucleotide
  Antisense strand to SEQ ID NO: 1120464
auuucccagcaacaagaua

SEQ ID NO: 1120466 - RNA, 19 nt, Artificial Sequence
  Description of Artificial Sequence: Synthetic oligonucleotide
  Sense strand starting at position 2926 of SEQ ID NO: 915972
auuguauuuguggguguuu

SEQ ID NO: 1120467 - RNA, 19 nt, Artificial Sequence
  Description of Artificial Sequence: Synthetic oligonucleotide
  Antisense strand to SEQ ID NO: 1120466
aaacacccacaaauacaau

SEQ ID NO: 1120468 - RNA, 19 nt, Artificial Sequence
  Description of Artificial Sequence: Synthetic oligonucleotide
  Sense strand starting at position 2927 of SEQ ID NO: 915972
uuguauuuguggguguuua

SEQ ID NO: 1120469 - RNA, 19 nt, Artificial Sequence
  Description of Artificial Sequence: Synthetic oligonucleotide
  Antisense strand to SEQ ID NO: 1120468
uaaacacccacaaauacaa

SEQ ID NO: 1120470 - RNA, 19 nt, Artificial Sequence
  Description of Artificial Sequence: Synthetic oligonucleotide
  Sense strand starting at position 2928 of SEQ ID NO: 915972
uguauuuguggguguuuaa

SEQ ID NO: 1120471 - RNA, 19 nt, Artificial Sequence
  Description of Artificial Sequence: Synthetic oligonucleotide
  Antisense strand to SEQ ID NO: 1120470
uuaaacacccacaaauaca

SEQ ID NO: 1120472 - RNA, 19 nt, Artificial Sequence
  Description of Artificial Sequence: Synthetic oligonucleotide
  Sense strand starting at position 2999 of SEQ ID NO: 915972
ggagaagcaucuuugaauu

SEQ ID NO: 1120473 - RNA, 19 nt, Artificial Sequence
  Description of Artificial Sequence: Synthetic oligonucleotide
  Antisense strand to SEQ ID NO: 1120472
aauucaaagaugcuucucc

SEQ ID NO: 1120474 - RNA, 19 nt, Artificial Sequence
  Description of Artificial Sequence: Synthetic oligonucleotide
  Sense strand starting at position 3092 of SEQ ID NO: 915972
gguucaucucccuggagag

SEQ ID NO: 1120475 - RNA, 19 nt, Artificial Sequence
  Description of Artificial Sequence: Synthetic oligonucleotide
  Antisense strand to SEQ ID NO: 1120474
cucuccagggagaugaacc

SEQ ID NO: 1120476 - RNA, 19 nt, Artificial Sequence
  Description of Artificial Sequence: Synthetic oligonucleotide
  Sense strand starting at position 3130 of SEQ ID NO: 915972
auagcauggugauuggaau

SEQ ID NO: 1120477 - RNA, 19 nt, Artificial Sequence
  Description of Artificial Sequence: Synthetic oligonucleotide
  Antisense strand to SEQ ID NO: 1120476
auuccaaucaccaugcuau

SEQ ID NO: 1120478 - RNA, 19 nt, Artificial Sequence
  Description of Artificial Sequence: Synthetic oligonucleotide
  Sense strand starting at position 3138 of SEQ ID NO: 915972
gugauuggaauccagguau

SEQ ID NO: 1120479 - RNA, 19 nt, Artificial Sequence
  Description of Artificial Sequence: Synthetic oligonucleotide
  Antisense strand to SEQ ID NO: 1120478
auaccuggauuccaaucac

SEQ ID NO: 1120480 - RNA, 19 nt, Artificial Sequence
  Description of Artificial Sequence: Synthetic oligonucleotide
  Sense strand starting at position 3149 of SEQ ID NO: 915972
ccagguauuucuguugcca

SEQ ID NO: 1120481 - RNA, 19 nt, Artificial Sequence
  Description of Artificial Sequence: Synthetic oligonucleotide
  Antisense strand to SEQ ID NO: 1120480
uggcaacagaaauaccugg

SEQ ID NO: 1120482 - RNA, 19 nt, Artificial Sequence
  Description of Artificial Sequence: Synthetic oligonucleotide
  Sense strand starting at position 3201 of SEQ ID NO: 915972
cccauuugucgugggugau

SEQ ID NO: 1120483 - RNA, 19 nt, Artificial Sequence
  Description of Artificial Sequence: Synthetic oligonucleotide
  Antisense strand to SEQ ID NO: 1120482
aucacccacgacaaauggg

SEQ ID NO: 1120484 - RNA, 19 nt, Artificial Sequence
  Description of Artificial Sequence: Synthetic oligonucleotide
  Sense strand starting at position 3202 of SEQ ID NO: 915972
ccauuugucgugggugaug

SEQ ID NO: 1120485 - RNA, 19 nt, Artificial Sequence
  Description of Artificial Sequence: Synthetic oligonucleotide
  Antisense strand to SEQ ID NO: 1120484
caucacccacgacaaaugg

SEQ ID NO: 1120486 - RNA, 19 nt, Artificial Sequence
  Description of Artificial Sequence: Synthetic oligonucleotide
  Sense strand starting at position 3462 of SEQ ID NO: 915972
uuuauaagugcaugaauuc

SEQ ID NO: 1120487 - RNA, 19 nt, Artificial Sequence
  Description of Artificial Sequence: Synthetic oligonucleotide
  Antisense strand to SEQ ID NO: 1120486
gaauucaugcacuuauaaa

SEQ ID NO: 1120488 - RNA, 19 nt, Artificial Sequence
  Description of Artificial Sequence: Synthetic oligonucleotide
  Sense strand starting at position 3515 of SEQ ID NO: 915972
gccaauuugccaugguaua

SEQ ID NO: 1120489 - RNA, 19 nt, Artificial Sequence
  Description of Artificial Sequence: Synthetic oligonucleotide
  Antisense strand to SEQ ID NO: 1120488
uauaccauggcaaauuggc

SEQ ID NO: 1120490 - RNA, 19 nt, Artificial Sequence
  Description of Artificial Sequence: Synthetic oligonucleotide
  Sense strand starting at position 3839 of SEQ ID NO: 915972
aagcuaugguuguuaacag

SEQ ID NO: 1120491 - RNA, 19 nt, Artificial Sequence
  Description of Artificial Sequence: Synthetic oligonucleotide
  Antisense strand to SEQ ID NO: 1120490
cuguuaacaaccauagcuu

SEQ ID NO: 1120492 - RNA, 19 nt, Artificial Sequence
  Description of Artificial Sequence: Synthetic oligonucleotide
  Sense strand starting at position 3979 of SEQ ID NO: 915972
guauuccaauuguuacaua

SEQ ID NO: 1120493 - RNA, 19 nt, Artificial Sequence
  Description of Artificial Sequence: Synthetic oligonucleotide
  Antisense strand to SEQ ID NO: 1120492
uauguaacaauuggaauac

SEQ ID NO: 1120494 - RNA, 19 nt, Artificial Sequence
  Description of Artificial Sequence: Synthetic oligonucleotide
  Sense strand starting at position 46 of SEQ ID NO: 915973
cagccaguucuguuuacgu

SEQ ID NO: 1120495 - RNA, 19 nt, Artificial Sequence
  Description of Artificial Sequence: Synthetic oligonucleotide
  Antisense strand to SEQ ID NO: 1120494
acguaaacagaacuggcug

SEQ ID NO: 1120496 - RNA, 19 nt, Artificial Sequence
  Description of Artificial Sequence: Synthetic oligonucleotide
  Sense strand starting at position 48 of SEQ ID NO: 915973
gccaguucuguuuacguaa

SEQ ID NO: 1120497 - RNA, 19 nt, Artificial Sequence
  Description of Artificial Sequence: Synthetic oligonucleotide
  Antisense strand to SEQ ID NO: 1120496
uuacguaaacagaacuggc

SEQ ID NO: 1120498 - RNA, 19 nt, Artificial Sequence
  Description of Artificial Sequence: Synthetic oligonucleotide
  Sense strand starting at position 88 of SEQ ID NO: 915973
aaacuagaguagcagauuu

SEQ ID NO: 1120499 - RNA, 19 nt, Artificial Sequence
  Description of Artificial Sequence: Synthetic oligonucleotide
  Antisense strand to SEQ ID NO: 1120498
aaaucugcuacucuaguuu

SEQ ID NO: 1120500 - RNA, 19 nt, Artificial Sequence
  Description of Artificial Sequence: Synthetic oligonucleotide
  Sense strand starting at position 226 of SEQ ID NO: 915973
uuccauggauaaguuaaua

SEQ ID NO: 1120501 - RNA, 19 nt, Artificial Sequence
  Description of Artificial Sequence: Synthetic oligonucleotide
  Antisense strand to SEQ ID NO: 1120500
uauuaacuuauccauggaa

SEQ ID NO: 1120502 - RNA, 19 nt, Artificial Sequence
  Description of Artificial Sequence: Synthetic oligonucleotide
  Sense strand starting at position 346 of SEQ ID NO: 915973
guauuacagcuagaaucca

SEQ ID NO: 1120503 - RNA, 19 nt, Artificial Sequence
  Description of Artificial Sequence: Synthetic oligonucleotide
  Antisense strand to SEQ ID NO: 1120502
uggauucuagcuguaauac

SEQ ID NO: 1120504 - RNA, 19 nt, Artificial Sequence
  Description of Artificial Sequence: Synthetic oligonucleotide
  Sense strand starting at position 576 of SEQ ID NO: 915973
acugcaaauuugugagaaa

SEQ ID NO: 1120505 - RNA, 19 nt, Artificial Sequence
  Description of Artificial Sequence: Synthetic oligonucleotide
  Antisense strand to SEQ ID NO: 1120504
uuucucacaaauuugcagu

SEQ ID NO: 1120506 - RNA, 19 nt, Artificial Sequence
  Description of Artificial Sequence: Synthetic oligonucleotide
  Sense strand starting at position 577 of SEQ ID NO: 915973
cugcaaauuugugagaaau

SEQ ID NO: 1120507 - RNA, 19 nt, Artificial Sequence
  Description of Artificial Sequence: Synthetic oligonucleotide
  Antisense strand to SEQ ID NO: 1120506
auuucucacaaauuugcag

SEQ ID NO: 1120508 - RNA, 19 nt, Artificial Sequence
  Description of Artificial Sequence: Synthetic oligonucleotide
  Sense strand starting at position 579 of SEQ ID NO: 915973
gcaaauuugugagaaaugc

SEQ ID NO: 1120509 - RNA, 19 nt, Artificial Sequence
  Description of Artificial Sequence: Synthetic oligonucleotide
  Antisense strand to SEQ ID NO: 1120508
gcauuucucacaaauuugc

SEQ ID NO: 1120510 - RNA, 19 nt, Artificial Sequence
  Description of Artificial Sequence: Synthetic oligonucleotide
  Sense strand starting at position 625 of SEQ ID NO: 915973
aggugaaacuaucugacca

SEQ ID NO: 1120511 - RNA, 19 nt, Artificial Sequence
  Description of Artificial Sequence: Synthetic oligonucleotide
  Antisense strand to SEQ ID NO: 1120510
uggucagauaguuucaccu

SEQ ID NO: 1120512 - RNA, 19 nt, Artificial Sequence
  Description of Artificial Sequence: Synthetic oligonucleotide
  Sense strand starting at position 626 of SEQ ID NO: 915973
ggugaaacuaucugaccag

SEQ ID NO: 1120513 - RNA, 19 nt, Artificial Sequence
  Description of Artificial Sequence: Synthetic oligonucleotide
  Antisense strand to SEQ ID NO: 1120512
cuggucagauaguuucacc

SEQ ID NO: 1120514 - RNA, 19 nt, Artificial Sequence
  Description of Artificial Sequence: Synthetic oligonucleotide
  Sense strand starting at position 724 of SEQ ID NO: 915973
ccugucucuugaguguuua

SEQ ID NO: 1120515 - RNA, 19 nt, Artificial Sequence
  Description of Artificial Sequence: Synthetic oligonucleotide
  Antisense strand to SEQ ID NO: 1120514
uaaacacucaagagacagg

SEQ ID NO: 1120516 - RNA, 19 nt, Artificial Sequence
  Description of Artificial Sequence: Synthetic oligonucleotide
  Sense strand starting at position 728 of SEQ ID NO: 915973
ucucuugaguguuuacuga

SEQ ID NO: 1120517 - RNA, 19 nt, Artificial Sequence
  Description of Artificial Sequence: Synthetic oligonucleotide
  Antisense strand to SEQ ID NO: 1120516
ucaguaaacacucaagaga

SEQ ID NO: 1120518 - RNA, 19 nt, Artificial Sequence
  Description of Artificial Sequence: Synthetic oligonucleotide
  Sense strand starting at position 982 of SEQ ID NO: 915973
ugucauaauuaagcaguaa

SEQ ID NO: 1120519 - RNA, 19 nt, Artificial Sequence
  Description of Artificial Sequence: Synthetic oligonucleotide
  Antisense strand to SEQ ID NO: 1120518
uuacugcuuaauuaugaca

SEQ ID NO: 1120520 - RNA, 19 nt, Artificial Sequence
  Description of Artificial Sequence: Synthetic oligonucleotide
  Sense strand starting at position 1120 of SEQ ID NO: 915973
gcaagauguacaugaagug

SEQ ID NO: 1120521 - RNA, 19 nt, Artificial Sequence
  Description of Artificial Sequence: Synthetic oligonucleotide
  Antisense strand to SEQ ID NO: 1120520
cacuucauguacaucuugc

SEQ ID NO: 1120522 - RNA, 19 nt, Artificial Sequence
  Description of Artificial Sequence: Synthetic oligonucleotide
  Sense strand starting at position 1137 of SEQ ID NO: 915973
ugcuaagaguguuuaccau

SEQ ID NO: 1120523 - RNA, 19 nt, Artificial Sequence
  Description of Artificial Sequence: Synthetic oligonucleotide
  Antisense strand to SEQ ID NO: 1120522
augguaaacacucuuagca

SEQ ID NO: 1120524 - RNA, 19 nt, Artificial Sequence
  Description of Artificial Sequence: Synthetic oligonucleotide
  Sense strand starting at position 1177 of SEQ ID NO: 915973
gcuaguguuaggcauauuu

SEQ ID NO: 1120525 - RNA, 19 nt, Artificial Sequence
  Description of Artificial Sequence: Synthetic oligonucleotide
  Antisense strand to SEQ ID NO: 1120524
aaauaugccuaacacuagc

SEQ ID NO: 1120526 - RNA, 19 nt, Artificial Sequence
  Description of Artificial Sequence: Synthetic oligonucleotide
  Sense strand starting at position 1327 of SEQ ID NO: 915973
guaauagaacuagguuguu

SEQ ID NO: 1120527 - RNA, 19 nt, Artificial Sequence
  Description of Artificial Sequence: Synthetic oligonucleotide
  Antisense strand to SEQ ID NO: 1120526
aacaaccuaguucuauuac

SEQ ID NO: 1120528 - RNA, 19 nt, Artificial Sequence
  Description of Artificial Sequence: Synthetic oligonucleotide
  Sense strand starting at position 1393 of SEQ ID NO: 915973
gaagacauaguuugguuaa

SEQ ID NO: 1120529 - RNA, 19 nt, Artificial Sequence
  Description of Artificial Sequence: Synthetic oligonucleotide
  Antisense strand to SEQ ID NO: 1120528
uuaaccaaacuaugucuuc

SEQ ID NO: 1120530 - RNA, 19 nt, Artificial Sequence
  Description of Artificial Sequence: Synthetic oligonucleotide
  Sense strand starting at position 1395 of SEQ ID NO: 915973
agacauaguuugguuaacu

SEQ ID NO: 1120531 - RNA, 19 nt, Artificial Sequence
  Description of Artificial Sequence: Synthetic oligonucleotide
  Antisense strand to SEQ ID NO: 1120530
aguuaaccaaacuaugucu

SEQ ID NO: 1120532 - RNA, 19 nt, Artificial Sequence
  Description of Artificial Sequence: Synthetic oligonucleotide
  Sense strand starting at position 1396 of SEQ ID NO: 915973
gacauaguuugguuaacuu

SEQ ID NO: 1120533 - RNA, 19 nt, Artificial Sequence
  Description of Artificial Sequence: Synthetic oligonucleotide
  Antisense strand to SEQ ID NO: 1120532
aaguuaaccaaacuauguc

SEQ ID NO: 1120534 - RNA, 19 nt, Artificial Sequence
  Description of Artificial Sequence: Synthetic oligonucleotide
  Sense strand starting at position 1722 of SEQ ID NO: 915973
gguaggugaggcugugaua

SEQ ID NO: 1120535 - RNA, 19 nt, Artificial Sequence
  Description of Artificial Sequence: Synthetic oligonucleotide
  Antisense strand to SEQ ID NO: 1120534
uaucacagccucaccuacc

SEQ ID NO: 1120536 - RNA, 19 nt, Artificial Sequence
  Description of Artificial Sequence: Synthetic oligonucleotide
  Sense strand starting at position 1837 of SEQ ID NO: 915973
guccuuagccuugucguaa

SEQ ID NO: 1120537 - RNA, 19 nt, Artificial Sequence
  Description of Artificial Sequence: Synthetic oligonucleotide
  Antisense strand to SEQ ID NO: 1120536
uuacgacaaggcuaaggac

SEQ ID NO: 1120538 - RNA, 19 nt, Artificial Sequence
  Description of Artificial Sequence: Synthetic oligonucleotide
  Sense strand starting at position 1846 of SEQ ID NO: 915973
cuugucguaagagaagaua

SEQ ID NO: 1120539 - RNA, 19 nt, Artificial Sequence
  Description of Artificial Sequence: Synthetic oligonucleotide
  Antisense strand to SEQ ID NO: 1120538
uaucuucucuuacgacaag

SEQ ID NO: 1120540 - RNA, 19 nt, Artificial Sequence
  Description of Artificial Sequence: Synthetic oligonucleotide
  Sense strand starting at position 2082 of SEQ ID NO: 915973
gcuccugggccuuagagaa

SEQ ID NO: 1120541 - RNA, 19 nt, Artificial Sequence
  Description of Artificial Sequence: Synthetic oligonucleotide
  Antisense strand to SEQ ID NO: 1120540
uucucuaaggcccaggagc

SEQ ID NO: 1120542 - RNA, 19 nt, Artificial Sequence
  Description of Artificial Sequence: Synthetic oligonucleotide
  Sense strand starting at position 2176 of SEQ ID NO: 915973
gacuauucggaccgucaag

SEQ ID NO: 1120543 - RNA, 19 nt, Artificial Sequence
  Description of Artificial Sequence: Synthetic oligonucleotide
  Antisense strand to SEQ ID NO: 1120542
cuugacgguccgaauaguc

SEQ ID NO: 1120544 - RNA, 19 nt, Artificial Sequence
  Description of Artificial Sequence: Synthetic oligonucleotide
  Sense strand starting at position 2454 of SEQ ID NO: 915973
gugauuugcugagauuaga

SEQ ID NO: 1120545 - RNA, 19 nt, Artificial Sequence
  Description of Artificial Sequence: Synthetic oligonucleotide
  Antisense strand to SEQ ID NO: 1120544
ucuaaucucagcaaaucac

SEQ ID NO: 1120546 - RNA, 19 nt, Artificial Sequence
  Description of Artificial Sequence: Synthetic oligonucleotide
  Sense strand starting at position 2482 of SEQ ID NO: 915973
gguaaagguugaucuccuu

SEQ ID NO: 1120547 - RNA, 19 nt, Artificial Sequence
  Description of Artificial Sequence: Synthetic oligonucleotide
  Antisense strand to SEQ ID NO: 1120546
aaggagaucaaccuuuacc

SEQ ID NO: 1120548 - RNA, 19 nt, Artificial Sequence
  Description of Artificial Sequence: Synthetic oligonucleotide
  Sense strand starting at position 2536 of SEQ ID NO: 915973
gguuaacucucaccuguau

SEQ ID NO: 1120549 - RNA, 19 nt, Artificial Sequence
  Description of Artificial Sequence: Synthetic oligonucleotide
  Antisense strand to SEQ ID NO: 1120548
auacaggugagaguuaacc

SEQ ID NO: 1120550 - RNA, 19 nt, Artificial Sequence
  Description of Artificial Sequence: Synthetic oligonucleotide
  Sense strand starting at position 2548 of SEQ ID NO: 915973
ccuguaucccguucuaguu

SEQ ID NO: 1120551 - RNA, 19 nt, Artificial Sequence
  Description of Artificial Sequence: Synthetic oligonucleotide
  Antisense strand to SEQ ID NO: 1120550
aacuagaacgggauacagg

SEQ ID NO: 1120552 - RNA, 19 nt, Artificial Sequence
  Description of Artificial Sequence: Synthetic oligonucleotide
  Sense strand starting at position 2574 of SEQ ID NO: 915973
gucuguguuagcccugcaa

SEQ ID NO: 1120553 - RNA, 19 nt, Artificial Sequence
  Description of Artificial Sequence: Synthetic oligonucleotide
  Antisense strand to SEQ ID NO: 1120552
uugcagggcuaacacagac

SEQ ID NO: 1120554 - RNA, 19 nt, Artificial Sequence
  Description of Artificial Sequence: Synthetic oligonucleotide
  Sense strand starting at position 2578 of SEQ ID NO: 915973
guguuagcccugcaacuaa

SEQ ID NO: 1120555 - RNA, 19 nt, Artificial Sequence
  Description of Artificial Sequence: Synthetic oligonucleotide
  Antisense strand to SEQ ID NO: 1120554
uuaguugcagggcuaacac

SEQ ID NO: 1120556 - RNA, 19 nt, Artificial Sequence
  Description of Artificial Sequence: Synthetic oligonucleotide
  Sense strand starting at position 2973 of SEQ ID NO: 915973
uugugcacguugucauuua

SEQ ID NO: 1120557 - RNA, 19 nt, Artificial Sequence
  Description of Artificial Sequence: Synthetic oligonucleotide
  Antisense strand to SEQ ID NO: 1120556
uaaaugacaacgugcacaa

SEQ ID NO: 1120558 - RNA, 19 nt, Artificial Sequence
  Description of Artificial Sequence: Synthetic oligonucleotide
  Sense strand starting at position 2980 of SEQ ID NO: 915973
cguugucauuuagaauaau

SEQ ID NO: 1120559 - RNA, 19 nt, Artificial Sequence
  Description of Artificial Sequence: Synthetic oligonucleotide
  Antisense strand to SEQ ID NO: 1120558
auuauucuaaaugacaacg

SEQ ID NO: 1120560 - RNA, 19 nt, Artificial Sequence
  Description of Artificial Sequence: Synthetic oligonucleotide
  Sense strand starting at position 2997 of SEQ ID NO: 915973
auuacaaguuccuuuggca

SEQ ID NO: 1120561 - RNA, 19 nt, Artificial Sequence
  Description of Artificial Sequence: Synthetic oligonucleotide
  Antisense strand to SEQ ID NO: 1120560
ugccaaaggaacuuguaau

SEQ ID NO: 1120562 - RNA, 19 nt, Artificial Sequence
  Description of Artificial Sequence: Synthetic oligonucleotide
  Sense strand starting at position 3099 of SEQ ID NO: 915973
cuucuuugugcauacuuau

SEQ ID NO: 1120563 - RNA, 19 nt, Artificial Sequence
  Description of Artificial Sequence: Synthetic oligonucleotide
  Antisense strand to SEQ ID NO: 1120562
auaaguaugcacaaagaag

SEQ ID NO: 1120564 - RNA, 19 nt, Artificial Sequence
  Description of Artificial Sequence: Synthetic oligonucleotide
  Sense strand starting at position 3176 of SEQ ID NO: 915973
uggugagaucccuagggua

SEQ ID NO: 1120565 - RNA, 19 nt, Artificial Sequence
  Description of Artificial Sequence: Synthetic oligonucleotide
  Antisense strand to SEQ ID NO: 1120564
uacccuagggaucucacca

SEQ ID NO: 1120566 - RNA, 19 nt, Artificial Sequence
  Description of Artificial Sequence: Synthetic oligonucleotide
  Sense strand starting at position 3178 of SEQ ID NO: 915973
gugagaucccuaggguaca

SEQ ID NO: 1120567 - RNA, 19 nt, Artificial Sequence
  Description of Artificial Sequence: Synthetic oligonucleotide
  Antisense strand to SEQ ID NO: 1120566
uguacccuagggaucucac

SEQ ID NO: 1120568 - RNA, 19 nt, Artificial Sequence
  Description of Artificial Sequence: Synthetic oligonucleotide
  Sense strand starting at position 3240 of SEQ ID NO: 915973
cagccauguuuguugaaca

SEQ ID NO: 1120569 - RNA, 19 nt, Artificial Sequence
  Description of Artificial Sequence: Synthetic oligonucleotide
  Antisense strand to SEQ ID NO: 1120568
uguucaacaaacauggcug

SEQ ID NO: 1120570 - RNA, 19 nt, Artificial Sequence
  Description of Artificial Sequence: Synthetic oligonucleotide
  Sense strand starting at position 3295 of SEQ ID NO: 915973
uagagcuguucugccauca

SEQ ID NO: 1120571 - RNA, 19 nt, Artificial Sequence
  Description of Artificial Sequence: Synthetic oligonucleotide
  Antisense strand to SEQ ID NO: 1120570
ugauggcagaacagcucua

SEQ ID NO: 1120572 - RNA, 19 nt, Artificial Sequence
  Description of Artificial Sequence: Synthetic oligonucleotide
  Sense strand starting at position 3557 of SEQ ID NO: 915973
ccgcuuuccaggcuuuagu

SEQ ID NO: 1120573 - RNA, 19 nt, Artificial Sequence
  Description of Artificial Sequence: Synthetic oligonucleotide
  Antisense strand to SEQ ID NO: 1120572
acuaaagccuggaaagcgg

SEQ ID NO: 1120574 - RNA, 19 nt, Artificial Sequence
  Description of Artificial Sequence: Synthetic oligonucleotide
  Sense strand starting at position 484 of SEQ ID NO: 915974
gcccacauaugcuugaaau

SEQ ID NO: 1120575 - RNA, 19 nt, Artificial Sequence
  Description of Artificial Sequence: Synthetic oligonucleotide
  Antisense strand to SEQ ID NO: 1120574
auuucaagcauaugugggc

SEQ ID NO: 1120576 - RNA, 19 nt, Artificial Sequence
  Description of Artificial Sequence: Synthetic oligonucleotide
  Sense strand starting at position 485 of SEQ ID NO: 915974
cccacauaugcuugaaaug

SEQ ID NO: 1120577 - RNA, 19 nt, Artificial Sequence
  Description of Artificial Sequence: Synthetic oligonucleotide
  Antisense strand to SEQ ID NO: 1120576
cauuucaagcauauguggg

SEQ ID NO: 1120578 - RNA, 19 nt, Artificial Sequence
  Description of Artificial Sequence: Synthetic oligonucleotide
  Sense strand starting at position 486 of SEQ ID NO: 915974
ccacauaugcuugaaaugu

SEQ ID NO: 1120579 - RNA, 19 nt, Artificial Sequence
  Description of Artificial Sequence: Synthetic oligonucleotide
  Antisense strand to SEQ ID NO: 1120578
acauuucaagcauaugugg

SEQ ID NO: 1120580 - RNA, 19 nt, Artificial Sequence
  Description of Artificial Sequence: Synthetic oligonucleotide
  Sense strand starting at position 490 of SEQ ID NO: 915974
auaugcuugaaaugugagu

SEQ ID NO: 1120581 - RNA, 19 nt, Artificial Sequence
  Description of Artificial Sequence: Synthetic oligonucleotide
  Antisense strand to SEQ ID NO: 1120580
acucacauuucaagcauau

SEQ ID NO: 1120582 - RNA, 19 nt, Artificial Sequence
  Description of Artificial Sequence: Synthetic oligonucleotide
  Sense strand starting at position 492 of SEQ ID NO: 915974
augcuugaaaugugaguca

SEQ ID NO: 1120583 - RNA, 19 nt, Artificial Sequence
  Description of Artificial Sequence: Synthetic oligonucleotide
  Antisense strand to SEQ ID NO: 1120582
ugacucacauuucaagcau

SEQ ID NO: 1120584 - RNA, 19 nt, Artificial Sequence
  Description of Artificial Sequence: Synthetic oligonucleotide
  Sense strand starting at position 495 of SEQ ID NO: 915974
cuugaaaugugagucaaga

SEQ ID NO: 1120585 - RNA, 19 nt, Artificial Sequence
  Description of Artificial Sequence: Synthetic oligonucleotide
  Antisense strand to SEQ ID NO: 1120584
ucuugacucacauuucaag

SEQ ID NO: 1120586 - RNA, 19 nt, Artificial Sequence
  Description of Artificial Sequence: Synthetic oligonucleotide
  Sense strand starting at position 650 of SEQ ID NO: 915974
gucuauaugggauguccua

SEQ ID NO: 1120587 - RNA, 19 nt, Artificial Sequence
  Description of Artificial Sequence: Synthetic oligonucleotide
  Antisense strand to SEQ ID NO: 1120586
uaggacaucccauauagac

SEQ ID NO: 1120588 - RNA, 19 nt, Artificial Sequence
  Description of Artificial Sequence: Synthetic oligonucleotide
  Sense strand starting at position 700 of SEQ ID NO: 915974
gccucugugaaagagucuu

SEQ ID NO: 1120589 - RNA, 19 nt, Artificial Sequence
  Description of Artificial Sequence: Synthetic oligonucleotide
  Antisense strand to SEQ ID NO: 1120588
aagacucuuucacagaggc

SEQ ID NO: 1120590 - RNA, 19 nt, Artificial Sequence
  Description of Artificial Sequence: Synthetic oligonucleotide
  Sense strand starting at position 936 of SEQ ID NO: 915974
ggcuuaucaucugccauga

SEQ ID NO: 1120591 - RNA, 19 nt, Artificial Sequence
  Description of Artificial Sequence: Synthetic oligonucleotide
  Antisense strand to SEQ ID NO: 1120590
ucauggcagaugauaagcc

SEQ ID NO: 1120592 - RNA, 19 nt, Artificial Sequence
  Description of Artificial Sequence: Synthetic oligonucleotide
  Sense strand starting at position 962 of SEQ ID NO: 915974
ggauguguuagguaggaau

SEQ ID NO: 1120593 - RNA, 19 nt, Artificial Sequence
  Description of Artificial Sequence: Synthetic oligonucleotide
  Antisense strand to SEQ ID NO: 1120592
auuccuaccuaacacaucc

SEQ ID NO: 1120594 - RNA, 19 nt, Artificial Sequence
  Description of Artificial Sequence: Synthetic oligonucleotide
  Sense strand starting at position 964 of SEQ ID NO: 915974
auguguuagguaggaauaa

SEQ ID NO: 1120595 - RNA, 19 nt, Artificial Sequence
  Description of Artificial Sequence: Synthetic oligonucleotide
  Antisense strand to SEQ ID NO: 1120594
uuauuccuaccuaacacau

SEQ ID NO: 1120596 - RNA, 19 nt, Artificial Sequence
  Description of Artificial Sequence: Synthetic oligonucleotide
  Sense strand starting at position 1004 of SEQ ID NO: 915974
cguuuacucauuuguggaa

SEQ ID NO: 1120597 - RNA, 19 nt, Artificial Sequence
  Description of Artificial Sequence: Synthetic oligonucleotide
  Antisense strand to SEQ ID NO: 1120596
uuccacaaaugaguaaacg

SEQ ID NO: 1120598 - RNA, 19 nt, Artificial Sequence
  Description of Artificial Sequence: Synthetic oligonucleotide
  Sense strand starting at position 1110 of SEQ ID NO: 915974
gggagauauaguuagcccu

SEQ ID NO: 1120599 - RNA, 19 nt, Artificial Sequence
  Description of Artificial Sequence: Synthetic oligonucleotide
  Antisense strand to SEQ ID NO: 1120598
agggcuaacuauaucuccc

SEQ ID NO: 1120600 - RNA, 19 nt, Artificial Sequence
  Description of Artificial Sequence: Synthetic oligonucleotide
  Sense strand starting at position 1147 of SEQ ID NO: 915974
ucuuguuucccucagcauu

SEQ ID NO: 1120601 - RNA, 19 nt, Artificial Sequence
  Description of Artificial Sequence: Synthetic oligonucleotide
  Antisense strand to SEQ ID NO: 1120600
aaugcugagggaaacaaga

SEQ ID NO: 1120602 - RNA, 19 nt, Artificial Sequence
  Description of Artificial Sequence: Synthetic oligonucleotide
  Sense strand starting at position 1251 of SEQ ID NO: 915974
ccuccuaguggucauaaga

SEQ ID NO: 1120603 - RNA, 19 nt, Artificial Sequence
  Description of Artificial Sequence: Synthetic oligonucleotide
  Antisense strand to SEQ ID NO: 1120602
ucuuaugaccacuaggagg

SEQ ID NO: 1120604 - RNA, 19 nt, Artificial Sequence
  Description of Artificial Sequence: Synthetic oligonucleotide
  Sense strand starting at position 1341 of SEQ ID NO: 915974
ucccuuaagccuuagagga

SEQ ID NO: 1120605 - RNA, 19 nt, Artificial Sequence
  Description of Artificial Sequence: Synthetic oligonucleotide
  Antisense strand to SEQ ID NO: 1120604
uccucuaaggcuuaaggga

SEQ ID NO: 1120606 - RNA, 19 nt, Artificial Sequence
  Description of Artificial Sequence: Synthetic oligonucleotide
  Sense strand starting at position 1422 of SEQ ID NO: 915974
agcaucauauuccugauga

SEQ ID NO: 1120607 - RNA, 19 nt, Artificial Sequence
  Description of Artificial Sequence: Synthetic oligonucleotide
  Antisense strand to SEQ ID NO: 1120606
ucaucaggaauaugaugcu

SEQ ID NO: 1120608 - RNA, 19 nt, Artificial Sequence
  Description of Artificial Sequence: Synthetic oligonucleotide
  Sense strand starting at position 1470 of SEQ ID NO: 915974
gcuggauagcuggaaaucu

SEQ ID NO: 1120609 - RNA, 19 nt, Artificial Sequence
  Description of Artificial Sequence: Synthetic oligonucleotide
  Antisense strand to SEQ ID NO: 1120608
agauuuccagcuauccagc

SEQ ID NO: 1120610 - RNA, 19 nt, Artificial Sequence
  Description of Artificial Sequence: Synthetic oligonucleotide
  Sense strand starting at position 1479 of SEQ ID NO: 915974
cuggaaaucuugcugagca

SEQ ID NO: 1120611 - RNA, 19 nt, Artificial Sequence
  Description of Artificial Sequence: Synthetic oligonucleotide
  Antisense strand to SEQ ID NO: 1120610
ugcucagcaagauuuccag

SEQ ID NO: 1120612 - RNA, 19 nt, Artificial Sequence
  Description of Artificial Sequence: Synthetic oligonucleotide
  Sense strand starting at position 1481 of SEQ ID NO: 915974
ggaaaucuugcugagcagu

SEQ ID NO: 1120613 - RNA, 19 nt, Artificial Sequence
  Description of Artificial Sequence: Synthetic oligonucleotide
  Antisense strand to SEQ ID NO: 1120612
acugcucagcaagauuucc

SEQ ID NO: 1120614 - RNA, 19 nt, Artificial Sequence
  Description of Artificial Sequence: Synthetic oligonucleotide
  Sense strand starting at position 1483 of SEQ ID NO: 915974
aaaucuugcugagcaguuu

SEQ ID NO: 1120615 - RNA, 19 nt, Artificial Sequence
  Description of Artificial Sequence: Synthetic oligonucleotide
  Antisense strand to SEQ ID NO: 1120614
aaacugcucagcaagauuu

SEQ ID NO: 1120616 - RNA, 19 nt, Artificial Sequence
  Description of Artificial Sequence: Synthetic oligonucleotide
  Sense strand starting at position 1505 of SEQ ID NO: 915974
gaaauacagcgucaucauc

SEQ ID NO: 1120617 - RNA, 19 nt, Artificial Sequence
  Description of Artificial Sequence: Synthetic oligonucleotide
  Antisense strand to SEQ ID NO: 1120616
gaugaugacgcuguauuuc

SEQ ID NO: 1120618 - RNA, 19 nt, Artificial Sequence
  Description of Artificial Sequence: Synthetic oligonucleotide
  Sense strand starting at position 1601 of SEQ ID NO: 915974
uugguaacuugucuaucca

SEQ ID NO: 1120619 - RNA, 19 nt, Artificial Sequence
  Description of Artificial Sequence: Synthetic oligonucleotide
  Antisense strand to SEQ ID NO: 1120618
uggauagacaaguuaccaa

SEQ ID NO: 1120620 - RNA, 19 nt, Artificial Sequence
  Description of Artificial Sequence: Synthetic oligonucleotide
  Sense strand starting at position 1691 of SEQ ID NO: 915974
ccaggaagaugcuuaguuu

SEQ ID NO: 1120621 - RNA, 19 nt, Artificial Sequence
  Description of Artificial Sequence: Synthetic oligonucleotide
  Antisense strand to SEQ ID NO: 1120620
aaacuaagcaucuuccugg

SEQ ID NO: 1120622 - RNA, 19 nt, Artificial Sequence
  Description of Artificial Sequence: Synthetic oligonucleotide
  Sense strand starting at position 1694 of SEQ ID NO: 915974
ggaagaugcuuaguuugca

SEQ ID NO: 1120623 - RNA, 19 nt, Artificial Sequence
  Description of Artificial Sequence: Synthetic oligonucleotide
  Antisense strand to SEQ ID NO: 1120622
ugcaaacuaagcaucuucc

SEQ ID NO: 1120624 - RNA, 19 nt, Artificial Sequence
  Description of Artificial Sequence: Synthetic oligonucleotide
  Sense strand starting at position 1695 of SEQ ID NO: 915974
gaagaugcuuaguuugcaa

SEQ ID NO: 1120625 - RNA, 19 nt, Artificial Sequence
  Description of Artificial Sequence: Synthetic oligonucleotide
  Antisense strand to SEQ ID NO: 1120624
uugcaaacuaagcaucuuc

SEQ ID NO: 1120626 - RNA, 19 nt, Artificial Sequence
  Description of Artificial Sequence: Synthetic oligonucleotide
  Sense strand starting at position 2044 of SEQ ID NO: 915974
gagucauaguacuuaagca

SEQ ID NO: 1120627 - RNA, 19 nt, Artificial Sequence
  Description of Artificial Sequence: Synthetic oligonucleotide
  Antisense strand to SEQ ID NO: 1120626
ugcuuaaguacuaugacuc

SEQ ID NO: 1120628 - RNA, 19 nt, Artificial Sequence
  Description of Artificial Sequence: Synthetic oligonucleotide
  Sense strand starting at position 2835 of SEQ ID NO: 915974
guccuacugugguuguaag

SEQ ID NO: 1120629 - RNA, 19 nt, Artificial Sequence
  Description of Artificial Sequence: Synthetic oligonucleotide
  Antisense strand to SEQ ID NO: 1120628
cuuacaaccacaguaggac

SEQ ID NO: 1120630 - RNA, 19 nt, Artificial Sequence
  Description of Artificial Sequence: Synthetic oligonucleotide
  Sense strand starting at position 2836 of SEQ ID NO: 915974
uccuacugugguuguaaga

SEQ ID NO: 1120631 - RNA, 19 nt, Artificial Sequence
  Description of Artificial Sequence: Synthetic oligonucleotide
  Antisense strand to SEQ ID NO: 1120630
ucuuacaaccacaguagga

SEQ ID NO: 1120632 - RNA, 19 nt, Artificial Sequence
  Description of Artificial Sequence: Synthetic oligonucleotide
  Sense strand starting at position 3073 of SEQ ID NO: 915974
aaauguggauaugacauau

SEQ ID NO: 1120633 - RNA, 19 nt, Artificial Sequence
  Description of Artificial Sequence: Synthetic oligonucleotide
  Antisense strand to SEQ ID NO: 1120632
auaugucauauccacauuu

SEQ ID NO: 1120634 - RNA, 19 nt, Artificial Sequence
  Description of Artificial Sequence: Synthetic oligonucleotide
  Sense strand starting at position 3215 of SEQ ID NO: 915974
cuuugacuaugucucuuau

SEQ ID NO: 1120635 - RNA, 19 nt, Artificial Sequence
  Description of Artificial Sequence: Synthetic oligonucleotide
  Antisense strand to SEQ ID NO: 1120634
auaagagacauagucaaag

SEQ ID NO: 1120636 - RNA, 19 nt, Artificial Sequence
  Description of Artificial Sequence: Synthetic oligonucleotide
  Sense strand starting at position 3349 of SEQ ID NO: 915974
gucugaugacacuguuuag

SEQ ID NO: 1120637 - RNA, 19 nt, Artificial Sequence
  Description of Artificial Sequence: Synthetic oligonucleotide
  Antisense strand to SEQ ID NO: 1120636
cuaaacagugucaucagac

SEQ ID NO: 1120638 - RNA, 19 nt, Artificial Sequence
  Description of Artificial Sequence: Synthetic oligonucleotide
  Sense strand starting at position 3394 of SEQ ID NO: 915974
guaaguagggcuggaagaa

SEQ ID NO: 1120639 - RNA, 19 nt, Artificial Sequence
  Description of Artificial Sequence: Synthetic oligonucleotide
  Antisense strand to SEQ ID NO: 1120638
uucuuccagcccuacuuac

SEQ ID NO: 1120640 - RNA, 19 nt, Artificial Sequence
  Description of Artificial Sequence: Synthetic oligonucleotide
  Sense strand starting at position 3645 of SEQ ID NO: 915974
aaguuagagccaggaaugu

SEQ ID NO: 1120641 - RNA, 19 nt, Artificial Sequence
  Description of Artificial Sequence: Synthetic oligonucleotide
  Antisense strand to SEQ ID NO: 1120640
acauuccuggcucuaacuu

SEQ ID NO: 1120642 - RNA, 19 nt, Artificial Sequence
  Description of Artificial Sequence: Synthetic oligonucleotide
  Sense strand starting at position 3758 of SEQ ID NO: 915974
gaucccucuugaguguaga

SEQ ID NO: 1120643 - RNA, 19 nt, Artificial Sequence
  Description of Artificial Sequence: Synthetic oligonucleotide
  Antisense strand to SEQ ID NO: 1120642
ucuacacucaagagggauc

SEQ ID NO: 1120644 - RNA, 19 nt, Artificial Sequence
  Description of Artificial Sequence: Synthetic oligonucleotide
  Sense strand starting at position 3759 of SEQ ID NO: 915974
aucccucuugaguguagaa

SEQ ID NO: 1120645 - RNA, 19 nt, Artificial Sequence
  Description of Artificial Sequence: Synthetic oligonucleotide
  Antisense strand to SEQ ID NO: 1120644
uucuacacucaagagggau

SEQ ID NO: 1120646 - RNA, 19 nt, Artificial Sequence
  Description of Artificial Sequence: Synthetic oligonucleotide
  Sense strand starting at position 3761 of SEQ ID NO: 915974
cccucuugaguguagaaga

SEQ ID NO: 1120647 - RNA, 19 nt, Artificial Sequence
  Description of Artificial Sequence: Synthetic oligonucleotide
  Antisense strand to SEQ ID NO: 1120646
ucuucuacacucaagaggg

SEQ ID NO: 1120648 - RNA, 19 nt, Artificial Sequence
  Description of Artificial Sequence: Synthetic oligonucleotide
  Sense strand starting at position 3778 of SEQ ID NO: 915974
gaacgaaugcauggaguuu

SEQ ID NO: 1120649 - RNA, 19 nt, Artificial Sequence
  Description of Artificial Sequence: Synthetic oligonucleotide
  Antisense strand to SEQ ID NO: 1120648
aaacuccaugcauucguuc

SEQ ID NO: 1120650 - RNA, 19 nt, Artificial Sequence
  Description of Artificial Sequence: Synthetic oligonucleotide
  Sense strand starting at position 3793 of SEQ ID NO: 915974
guuuacuucucucuuguca

SEQ ID NO: 1120651 - RNA, 19 nt, Artificial Sequence
  Description of Artificial Sequence: Synthetic oligonucleotide
  Antisense strand to SEQ ID NO: 1120650
ugacaagagagaaguaaac

SEQ ID NO: 1120652 - RNA, 19 nt, Artificial Sequence
  Description of Artificial Sequence: Synthetic oligonucleotide
  Sense strand starting at position 3802 of SEQ ID NO: 915974
ucucuugucagguggcaga

SEQ ID NO: 1120653 - RNA, 19 nt, Artificial Sequence
  Description of Artificial Sequence: Synthetic oligonucleotide
  Antisense strand to SEQ ID NO: 1120652
ucugccaccugacaagaga

SEQ ID NO: 1120654 - RNA, 19 nt, Artificial Sequence
  Description of Artificial Sequence: Synthetic oligonucleotide
  Sense strand starting at position 282 of SEQ ID NO: 915975
ugugaugguacacagucau

SEQ ID NO: 1120655 - RNA, 19 nt, Artificial Sequence
  Description of Artificial Sequence: Synthetic oligonucleotide
  Antisense strand to SEQ ID NO: 1120654
augacuguguaccaucaca

SEQ ID NO: 1120656 - RNA, 19 nt, Artificial Sequence
  Description of Artificial Sequence: Synthetic oligonucleotide
  Sense strand starting at position 512 of SEQ ID NO: 915975
agaaaugacugcucccaac

SEQ ID NO: 1120657 - RNA, 19 nt, Artificial Sequence
  Description of Artificial Sequence: Synthetic oligonucleotide
  Antisense strand to SEQ ID NO: 1120656
guugggagcagucauuucu

SEQ ID NO: 1120658 - RNA, 19 nt, Artificial Sequence
  Description of Artificial Sequence: Synthetic oligonucleotide
  Sense strand starting at position 580 of SEQ ID NO: 915975
guaauuauuugugccauac

SEQ ID NO: 1120659 - RNA, 19 nt, Artificial Sequence
  Description of Artificial Sequence: Synthetic oligonucleotide
  Antisense strand to SEQ ID NO: 1120658
guauggcacaaauaauuac

SEQ ID NO: 1120660 - RNA, 19 nt, Artificial Sequence
  Description of Artificial Sequence: Synthetic oligonucleotide
  Sense strand starting at position 745 of SEQ ID NO: 915975
gagugucugcuacauucca

SEQ ID NO: 1120661 - RNA, 19 nt, Artificial Sequence
  Description of Artificial Sequence: Synthetic oligonucleotide
  Antisense strand to SEQ ID NO: 1120660
uggaauguagcagacacuc

SEQ ID NO: 1120662 - RNA, 19 nt, Artificial Sequence
  Description of Artificial Sequence: Synthetic oligonucleotide
  Sense strand starting at position 793 of SEQ ID NO: 915975
agacauagucuggagcuua

SEQ ID NO: 1120663 - RNA, 19 nt, Artificial Sequence
  Description of Artificial Sequence: Synthetic oligonucleotide
  Antisense strand to SEQ ID NO: 1120662
uaagcuccagacuaugucu

SEQ ID NO: 1120664 - RNA, 19 nt, Artificial Sequence
  Description of Artificial Sequence: Synthetic oligonucleotide
  Sense strand starting at position 865 of SEQ ID NO: 915975
acaagugcucuauggaaac

SEQ ID NO: 1120665 - RNA, 19 nt, Artificial Sequence
  Description of Artificial Sequence: Synthetic oligonucleotide
  Antisense strand to SEQ ID NO: 1120664
guuuccauagagcacuugu

SEQ ID NO: 1120666 - RNA, 19 nt, Artificial Sequence
  Description of Artificial Sequence: Synthetic oligonucleotide
  Sense strand starting at position 907 of SEQ ID NO: 915975
ggaggaauucuuugggagc

SEQ ID NO: 1120667 - RNA, 19 nt, Artificial Sequence
  Description of Artificial Sequence: Synthetic oligonucleotide
  Antisense strand to SEQ ID NO: 1120666
gcucccaaagaauuccucc

SEQ ID NO: 1120668 - RNA, 19 nt, Artificial Sequence
  Description of Artificial Sequence: Synthetic oligonucleotide
  Sense strand starting at position 937 of SEQ ID NO: 915975
cccucauugcuggaggaga

SEQ ID NO: 1120669 - RNA, 19 nt, Artificial Sequence
  Description of Artificial Sequence: Synthetic oligonucleotide
  Antisense strand to SEQ ID NO: 1120668
ucuccuccagcaaugaggg

SEQ ID NO: 1120670 - RNA, 19 nt, Artificial Sequence
  Description of Artificial Sequence: Synthetic oligonucleotide
  Sense strand starting at position 939 of SEQ ID NO: 915975
cucauugcuggaggagaga

SEQ ID NO: 1120671 - RNA, 19 nt, Artificial Sequence
  Description of Artificial Sequence: Synthetic oligonucleotide
  Antisense strand to SEQ ID NO: 1120670
ucucuccuccagcaaugag

SEQ ID NO: 1120672 - RNA, 19 nt, Artificial Sequence
  Description of Artificial Sequence: Synthetic oligonucleotide
  Sense strand starting at position 948 of SEQ ID NO: 915975
ggaggagagacuugugcua

SEQ ID NO: 1120673 - RNA, 19 nt, Artificial Sequence
  Description of Artificial Sequence: Synthetic oligonucleotide
  Antisense strand to SEQ ID NO: 1120672
uagcacaagucucuccucc

SEQ ID NO: 1120674 - RNA, 19 nt, Artificial Sequence
  Description of Artificial Sequence: Synthetic oligonucleotide
  Sense strand starting at position 961 of SEQ ID NO: 915975
gugcuaagacuugaaguuu

SEQ ID NO: 1120675 - RNA, 19 nt, Artificial Sequence
  Description of Artificial Sequence: Synthetic oligonucleotide
  Antisense strand to SEQ ID NO: 1120674
aaacuucaagucuuagcac

SEQ ID NO: 1120676 - RNA, 19 nt, Artificial Sequence
  Description of Artificial Sequence: Synthetic oligonucleotide
  Sense strand starting at position 1048 of SEQ ID NO: 915975
aaagaauggccucgaaaug

SEQ ID NO: 1120677 - RNA, 19 nt, Artificial Sequence
  Description of Artificial Sequence: Synthetic oligonucleotide
  Antisense strand to SEQ ID NO: 1120676
cauuucgaggccauucuuu

SEQ ID NO: 1120678 - RNA, 19 nt, Artificial Sequence
  Description of Artificial Sequence: Synthetic oligonucleotide
  Sense strand starting at position 1074 of SEQ ID NO: 915975
guuugaugaguuggagaaa

SEQ ID NO: 1120679 - RNA, 19 nt, Artificial Sequence
  Description of Artificial Sequence: Synthetic oligonucleotide
  Antisense strand to SEQ ID NO: 1120678
uuucuccaacucaucaaac

SEQ ID NO: 1120680 - RNA, 19 nt, Artificial Sequence
  Description of Artificial Sequence: Synthetic oligonucleotide
  Sense strand starting at position 1096 of SEQ ID NO: 915975
caaggaagcaggcgugaau

SEQ ID NO: 1120681 - RNA, 19 nt, Artificial Sequence
  Description of Artificial Sequence: Synthetic oligonucleotide
  Antisense strand to SEQ ID NO: 1120680
auucacgccugcuuccuug

SEQ ID NO: 1120682 - RNA, 19 nt, Artificial Sequence
  Description of Artificial Sequence: Synthetic oligonucleotide
  Sense strand starting at position 1247 of SEQ ID NO: 915975
gggcaaaugugauccuaau

SEQ ID NO: 1120683 - RNA, 19 nt, Artificial Sequence
  Description of Artificial Sequence: Synthetic oligonucleotide
  Antisense strand to SEQ ID NO: 1120682
auuaggaucacauuugccc

SEQ ID NO: 1120684 - RNA, 19 nt, Artificial Sequence
  Description of Artificial Sequence: Synthetic oligonucleotide
  Sense strand starting at position 1253 of SEQ ID NO: 915975
augugauccuaauuucguu

SEQ ID NO: 1120685 - RNA, 19 nt, Artificial Sequence
  Description of Artificial Sequence: Synthetic oligonucleotide
  Antisense strand to SEQ ID NO: 1120684
aacgaaauuaggaucacau

SEQ ID NO: 1120686 - RNA, 19 nt, Artificial Sequence
  Description of Artificial Sequence: Synthetic oligonucleotide
  Sense strand starting at position 1301 of SEQ ID NO: 915975
uggagugguccaggagcau

SEQ ID NO: 1120687 - RNA, 19 nt, Artificial Sequence
  Description of Artificial Sequence: Synthetic oligonucleotide
  Antisense strand to SEQ ID NO: 1120686
augcuccuggaccacucca

SEQ ID NO: 1120688 - RNA, 19 nt, Artificial Sequence
  Description of Artificial Sequence: Synthetic oligonucleotide
  Sense strand starting at position 1793 of SEQ ID NO: 915975
gggagcucuugaucagcaa

SEQ ID NO: 1120689 - RNA, 19 nt, Artificial Sequence
  Description of Artificial Sequence: Synthetic oligonucleotide
  Antisense strand to SEQ ID NO: 1120688
uugcugaucaagagcuccc

SEQ ID NO: 1120690 - RNA, 19 nt, Artificial Sequence
  Description of Artificial Sequence: Synthetic oligonucleotide
  Sense strand starting at position 1905 of SEQ ID NO: 915975
cgcucuacuagagacugua

SEQ ID NO: 1120691 - RNA, 19 nt, Artificial Sequence
  Description of Artificial Sequence: Synthetic oligonucleotide
  Antisense strand to SEQ ID NO: 1120690
uacagucucuaguagagcg

SEQ ID NO: 1120692 - RNA, 19 nt, Artificial Sequence
  Description of Artificial Sequence: Synthetic oligonucleotide
  Sense strand starting at position 2080 of SEQ ID NO: 915975
ggagaaagccagugacuuu

SEQ ID NO: 1120693 - RNA, 19 nt, Artificial Sequence
  Description of Artificial Sequence: Synthetic oligonucleotide
  Antisense strand to SEQ ID NO: 1120692
aaagucacuggcuuucucc

SEQ ID NO: 1120694 - RNA, 19 nt, Artificial Sequence
  Description of Artificial Sequence: Synthetic oligonucleotide
  Sense strand starting at position 2180 of SEQ ID NO: 915975
cuggcagauguggaaucua

SEQ ID NO: 1120695 - RNA, 19 nt, Artificial Sequence
  Description of Artificial Sequence: Synthetic oligonucleotide
  Antisense strand to SEQ ID NO: 1120694
uagauuccacaucugccag

SEQ ID NO: 1120696 - RNA, 19 nt, Artificial Sequence
  Description of Artificial Sequence: Synthetic oligonucleotide
  Sense strand starting at position 2285 of SEQ ID NO: 915975
ggagucacacauugagcau

SEQ ID NO: 1120697 - RNA, 19 nt, Artificial Sequence
  Description of Artificial Sequence: Synthetic oligonucleotide
  Antisense strand to SEQ ID NO: 1120696
augcucaaugugugacucc

SEQ ID NO: 1120698 - RNA, 19 nt, Artificial Sequence
  Description of Artificial Sequence: Synthetic oligonucleotide
  Sense strand starting at position 2337 of SEQ ID NO: 915975
accucuuaagagugaaguu

SEQ ID NO: 1120699 - RNA, 19 nt, Artificial Sequence
  Description of Artificial Sequence: Synthetic oligonucleotide
  Antisense strand to SEQ ID NO: 1120698
aacuucacucuuaagaggu

SEQ ID NO: 1120700 - RNA, 19 nt, Artificial Sequence
  Description of Artificial Sequence: Synthetic oligonucleotide
  Sense strand starting at position 2606 of SEQ ID NO: 915975
ucacuugaggccugaaauu

SEQ ID NO: 1120701 - RNA, 19 nt, Artificial Sequence
  Description of Artificial Sequence: Synthetic oligonucleotide
  Antisense strand to SEQ ID NO: 1120700
aauuucaggccucaaguga

SEQ ID NO: 1120702 - RNA, 19 nt, Artificial Sequence
  Description of Artificial Sequence: Synthetic oligonucleotide
  Sense strand starting at position 2864 of SEQ ID NO: 915975
gguggcagaugacuauaau

SEQ ID NO: 1120703 - RNA, 19 nt, Artificial Sequence
  Description of Artificial Sequence: Synthetic oligonucleotide
  Antisense strand to SEQ ID NO: 1120702
auuauagucaucugccacc

SEQ ID NO: 1120704 - RNA, 19 nt, Artificial Sequence
  Description of Artificial Sequence: Synthetic oligonucleotide
  Sense strand starting at position 2865 of SEQ ID NO: 915975
guggcagaugacuauaauc

SEQ ID NO: 1120705 - RNA, 19 nt, Artificial Sequence
  Description of Artificial Sequence: Synthetic oligonucleotide
  Antisense strand to SEQ ID NO: 1120704
gauuauagucaucugccac

SEQ ID NO: 1120706 - RNA, 19 nt, Artificial Sequence
  Description of Artificial Sequence: Synthetic oligonucleotide
  Sense strand starting at position 3086 of SEQ ID NO: 915975
gagucuuauggagguauau

SEQ ID NO: 1120707 - RNA, 19 nt, Artificial Sequence
  Description of Artificial Sequence: Synthetic oligonucleotide
  Antisense strand to SEQ ID NO: 1120706
auauaccuccauaagacuc

SEQ ID NO: 1120708 - RNA, 19 nt, Artificial Sequence
  Description of Artificial Sequence: Synthetic oligonucleotide
  Sense strand starting at position 3095 of SEQ ID NO: 915975
ggagguauauuugacauac

SEQ ID NO: 1120709 - RNA, 19 nt, Artificial Sequence
  Description of Artificial Sequence: Synthetic oligonucleotide
  Antisense strand to SEQ ID NO: 1120708
guaugucaaauauaccucc

SEQ ID NO: 1120710 - RNA, 19 nt, Artificial Sequence
  Description of Artificial Sequence: Synthetic oligonucleotide
  Sense strand starting at position 3139 of SEQ ID NO: 915975
acaauaugauguuugacau

SEQ ID NO: 1120711 - RNA, 19 nt, Artificial Sequence
  Description of Artificial Sequence: Synthetic oligonucleotide
  Antisense strand to SEQ ID NO: 1120710
augucaaacaucauauugu

SEQ ID NO: 1120712 - RNA, 19 nt, Artificial Sequence
  Description of Artificial Sequence: Synthetic oligonucleotide
  Sense strand starting at position 3147 of SEQ ID NO: 915975
auguuugacauaugugaga

SEQ ID NO: 1120713 - RNA, 19 nt, Artificial Sequence
  Description of Artificial Sequence: Synthetic oligonucleotide
  Antisense strand to SEQ ID NO: 1120712
ucucacauaugucaaacau

SEQ ID NO: 1120714 - RNA, 19 nt, Artificial Sequence
  Description of Artificial Sequence: Synthetic oligonucleotide
  Sense strand starting at position 3160 of SEQ ID NO: 915975
gugagaccauuaccacaau

SEQ ID NO: 1120715 - RNA, 19 nt, Artificial Sequence
  Description of Artificial Sequence: Synthetic oligonucleotide
  Antisense strand to SEQ ID NO: 1120714
auugugguaauggucucac

SEQ ID NO: 1120716 - RNA, 19 nt, Artificial Sequence
  Description of Artificial Sequence: Synthetic oligonucleotide
  Sense strand starting at position 3249 of SEQ ID NO: 915975
ggccucauuucccuaggua

SEQ ID NO: 1120717 - RNA, 19 nt, Artificial Sequence
  Description of Artificial Sequence: Synthetic oligonucleotide
  Antisense strand to SEQ ID NO: 1120716
uaccuagggaaaugaggcc

SEQ ID NO: 1120718 - RNA, 19 nt, Artificial Sequence
  Description of Artificial Sequence: Synthetic oligonucleotide
  Sense strand starting at position 3257 of SEQ ID NO: 915975
uucccuagguaaucacaga

SEQ ID NO: 1120719 - RNA, 19 nt, Artificial Sequence
  Description of Artificial Sequence: Synthetic oligonucleotide
  Antisense strand to SEQ ID NO: 1120718
ucugugauuaccuagggaa

SEQ ID NO: 1120720 - RNA, 19 nt, Artificial Sequence
  Description of Artificial Sequence: Synthetic oligonucleotide
  Sense strand starting at position 3368 of SEQ ID NO: 915975
ucaugcagcucaguuauuu

SEQ ID NO: 1120721 - RNA, 19 nt, Artificial Sequence
  Description of Artificial Sequence: Synthetic oligonucleotide
  Antisense strand to SEQ ID NO: 1120720
aaauaacugagcugcauga

SEQ ID NO: 1120722 - RNA, 19 nt, Artificial Sequence
  Description of Artificial Sequence: Synthetic oligonucleotide
  Sense strand starting at position 3439 of SEQ ID NO: 915975
guggguuuagacuacaauu

SEQ ID NO: 1120723 - RNA, 19 nt, Artificial Sequence
  Description of Artificial Sequence: Synthetic oligonucleotide
  Antisense strand to SEQ ID NO: 1120722
aauuguagucuaaacccac

SEQ ID NO: 1120724 - RNA, 19 nt, Artificial Sequence
  Description of Artificial Sequence: Synthetic oligonucleotide
  Sense strand starting at position 3572 of SEQ ID NO: 915975
agaugugacuaaucugagu

SEQ ID NO: 1120725 - RNA, 19 nt, Artificial Sequence
  Description of Artificial Sequence: Synthetic oligonucleotide
  Antisense strand to SEQ ID NO: 1120724
acucagauuagucacaucu

SEQ ID NO: 1120726 - RNA, 19 nt, Artificial Sequence
  Description of Artificial Sequence: Synthetic oligonucleotide
  Sense strand starting at position 3577 of SEQ ID NO: 915975
ugacuaaucugagucacau

SEQ ID NO: 1120727 - RNA, 19 nt, Artificial Sequence
  Description of Artificial Sequence: Synthetic oligonucleotide
  Antisense strand to SEQ ID NO: 1120726
augugacucagauuaguca

SEQ ID NO: 1120728 - RNA, 19 nt, Artificial Sequence
  Description of Artificial Sequence: Synthetic oligonucleotide
  Sense strand starting at position 3583 of SEQ ID NO: 915975
aucugagucacauacgguu

SEQ ID NO: 1120729 - RNA, 19 nt, Artificial Sequence
  Description of Artificial Sequence: Synthetic oligonucleotide
  Antisense strand to SEQ ID NO: 1120728
aaccguaugugacucagau

SEQ ID NO: 1120730 - RNA, 19 nt, Artificial Sequence
  Description of Artificial Sequence: Synthetic oligonucleotide
  Sense strand starting at position 3589 of SEQ ID NO: 915975
gucacauacgguuacaacu

SEQ ID NO: 1120731 - RNA, 19 nt, Artificial Sequence
  Description of Artificial Sequence: Synthetic oligonucleotide
  Antisense strand to SEQ ID NO: 1120730
aguuguaaccguaugugac

SEQ ID NO: 1120732 - RNA, 19 nt, Artificial Sequence
  Description of Artificial Sequence: Synthetic oligonucleotide
  Sense strand starting at position 3667 of SEQ ID NO: 915975
auuaaaugccagugacaaa

SEQ ID NO: 1120733 - RNA, 19 nt, Artificial Sequence
  Description of Artificial Sequence: Synthetic oligonucleotide
  Antisense strand to SEQ ID NO: 1120732
uuugucacuggcauuuaau

SEQ ID NO: 1120734 - RNA, 19 nt, Artificial Sequence
  Description of Artificial Sequence: Synthetic oligonucleotide
  Sense strand starting at position 137 of SEQ ID NO: 915976
uggugaguuguuugaggaa

SEQ ID NO: 1120735 - RNA, 19 nt, Artificial Sequence
  Description of Artificial Sequence: Synthetic oligonucleotide
  Antisense strand to SEQ ID NO: 1120734
uuccucaaacaacucacca

SEQ ID NO: 1120736 - RNA, 19 nt, Artificial Sequence
  Description of Artificial Sequence: Synthetic oligonucleotide
  Sense strand starting at position 245 of SEQ ID NO: 915976
aggacucaauuguuauaga

SEQ ID NO: 1120737 - RNA, 19 nt, Artificial Sequence
  Description of Artificial Sequence: Synthetic oligonucleotide
  Antisense strand to SEQ ID NO: 1120736
ucuauaacaauugaguccu

SEQ ID NO: 1120738 - RNA, 19 nt, Artificial Sequence
  Description of Artificial Sequence: Synthetic oligonucleotide
  Sense strand starting at position 388 of SEQ ID NO: 915976
ugguaauuccuggaggcug

SEQ ID NO: 1120739 - RNA, 19 nt, Artificial Sequence
  Description of Artificial Sequence: Synthetic oligonucleotide
  Antisense strand to SEQ ID NO: 1120738
cagccuccaggaauuacca

SEQ ID NO: 1120740 - RNA, 19 nt, Artificial Sequence
  Description of Artificial Sequence: Synthetic oligonucleotide
  Sense strand starting at position 414 of SEQ ID NO: 915976
gguugauaccaacauugcu

SEQ ID NO: 1120741 - RNA, 19 nt, Artificial Sequence
  Description of Artificial Sequence: Synthetic oligonucleotide
  Antisense strand to SEQ ID NO: 1120740
agcaauguugguaucaacc

SEQ ID NO: 1120742 - RNA, 19 nt, Artificial Sequence
  Description of Artificial Sequence: Synthetic oligonucleotide
  Sense strand starting at position 422 of SEQ ID NO: 915976
ccaacauugcuggagaggu

SEQ ID NO: 1120743 - RNA, 19 nt, Artificial Sequence
  Description of Artificial Sequence: Synthetic oligonucleotide
  Antisense strand to SEQ ID NO: 1120742
accucuccagcaauguugg

SEQ ID NO: 1120744 - RNA, 19 nt, Artificial Sequence
  Description of Artificial Sequence: Synthetic oligonucleotide
  Sense strand starting at position 430 of SEQ ID NO: 915976
gcuggagagguaugaaaug

SEQ ID NO: 1120745 - RNA, 19 nt, Artificial Sequence
  Description of Artificial Sequence: Synthetic oligonucleotide
  Antisense strand to SEQ ID NO: 1120744
cauuucauaccucuccagc

SEQ ID NO: 1120746 - RNA, 19 nt, Artificial Sequence
  Description of Artificial Sequence: Synthetic oligonucleotide
  Sense strand starting at position 441 of SEQ ID NO: 915976
augaaauggucccucccua

SEQ ID NO: 1120747 - RNA, 19 nt, Artificial Sequence
  Description of Artificial Sequence: Synthetic oligonucleotide
  Antisense strand to SEQ ID NO: 1120746
uagggagggaccauuucau

SEQ ID NO: 1120748 - RNA, 19 nt, Artificial Sequence
  Description of Artificial Sequence: Synthetic oligonucleotide
  Sense strand starting at position 539 of SEQ ID NO: 915976
gcaucaaaucuauagguac

SEQ ID NO: 1120749 - RNA, 19 nt, Artificial Sequence
  Description of Artificial Sequence: Synthetic oligonucleotide
  Antisense strand to SEQ ID NO: 1120748
guaccuauagauuugaugc

SEQ ID NO: 1120750 - RNA, 19 nt, Artificial Sequence
  Description of Artificial Sequence: Synthetic oligonucleotide
  Sense strand starting at position 677 of SEQ ID NO: 915976
gcugcagugcuccugagua

SEQ ID NO: 1120751 - RNA, 19 nt, Artificial Sequence
  Description of Artificial Sequence: Synthetic oligonucleotide
  Antisense strand to SEQ ID NO: 1120750
uacucaggagcacugcagc

SEQ ID NO: 1120752 - RNA, 19 nt, Artificial Sequence
  Description of Artificial Sequence: Synthetic oligonucleotide
  Sense strand starting at position 793 of SEQ ID NO: 915976
ccuuuagaagacuguccaa

SEQ ID NO: 1120753 - RNA, 19 nt, Artificial Sequence
  Description of Artificial Sequence: Synthetic oligonucleotide
  Antisense strand to SEQ ID NO: 1120752
uuggacagucuucuaaagg

SEQ ID NO: 1120754 - RNA, 19 nt, Artificial Sequence
  Description of Artificial Sequence: Synthetic oligonucleotide
  Sense strand starting at position 796 of SEQ ID NO: 915976
uuagaagacuguccaaguu

SEQ ID NO: 1120755 - RNA, 19 nt, Artificial Sequence
  Description of Artificial Sequence: Synthetic oligonucleotide
  Antisense strand to SEQ ID NO: 1120754
aacuuggacagucuucuaa

SEQ ID NO: 1120756 - RNA, 19 nt, Artificial Sequence
  Description of Artificial Sequence: Synthetic oligonucleotide
  Sense strand starting at position 855 of SEQ ID NO: 915976
uaggcacuugcauaauagu

SEQ ID NO: 1120757 - RNA, 19 nt, Artificial Sequence
  Description of Artificial Sequence: Synthetic oligonucleotide
  Antisense strand to SEQ ID NO: 1120756
acuauuaugcaagugccua

SEQ ID NO: 1120758 - RNA, 19 nt, Artificial Sequence
  Description of Artificial Sequence: Synthetic oligonucleotide
  Sense strand starting at position 861 of SEQ ID NO: 915976
cuugcauaauaguuagauc

SEQ ID NO: 1120759 - RNA, 19 nt, Artificial Sequence
  Description of Artificial Sequence: Synthetic oligonucleotide
  Antisense strand to SEQ ID NO: 1120758
gaucuaacuauuaugcaag

SEQ ID NO: 1120760 - RNA, 19 nt, Artificial Sequence
  Description of Artificial Sequence: Synthetic oligonucleotide
  Sense strand starting at position 869 of SEQ ID NO: 915976
auaguuagaucagauuucu

SEQ ID NO: 1120761 - RNA, 19 nt, Artificial Sequence
  Description of Artificial Sequence: Synthetic oligonucleotide
  Antisense strand to SEQ ID NO: 1120760
agaaaucugaucuaacuau

SEQ ID NO: 1120762 - RNA, 19 nt, Artificial Sequence
  Description of Artificial Sequence: Synthetic oligonucleotide
  Sense strand starting at position 1188 of SEQ ID NO: 915976
aagaaaugggucugguuuc

SEQ ID NO: 1120763 - RNA, 19 nt, Artificial Sequence
  Description of Artificial Sequence: Synthetic oligonucleotide
  Antisense strand to SEQ ID NO: 1120762
gaaaccagacccauuucuu

SEQ ID NO: 1120764 - RNA, 19 nt, Artificial Sequence
  Description of Artificial Sequence: Synthetic oligonucleotide
  Sense strand starting at position 1314 of SEQ ID NO: 915976
aggccuguugcagaaauua

SEQ ID NO: 1120765 - RNA, 19 nt, Artificial Sequence
  Description of Artificial Sequence: Synthetic oligonucleotide
  Antisense strand to SEQ ID NO: 1120764
uaauuucugcaacaggccu

SEQ ID NO: 1120766 - RNA, 19 nt, Artificial Sequence
  Description of Artificial Sequence: Synthetic oligonucleotide
  Sense strand starting at position 1355 of SEQ ID NO: 915976
cugggaagcuuucccuaaa

SEQ ID NO: 1120767 - RNA, 19 nt, Artificial Sequence
  Description of Artificial Sequence: Synthetic oligonucleotide
  Antisense strand to SEQ ID NO: 1120766
uuuagggaaagcuucccag

SEQ ID NO: 1120768 - RNA, 19 nt, Artificial Sequence
  Description of Artificial Sequence: Synthetic oligonucleotide
  Sense strand starting at position 1356 of SEQ ID NO: 915976
ugggaagcuuucccuaaau

SEQ ID NO: 1120769 - RNA, 19 nt, Artificial Sequence
  Description of Artificial Sequence: Synthetic oligonucleotide
  Antisense strand to SEQ ID NO: 1120768
auuuagggaaagcuuccca

SEQ ID NO: 1120770 - RNA, 19 nt, Artificial Sequence
  Description of Artificial Sequence: Synthetic oligonucleotide
  Sense strand starting at position 1501 of SEQ ID NO: 915976
ccuuccaagcuuugagaau

SEQ ID NO: 1120771 - RNA, 19 nt, Artificial Sequence
  Description of Artificial Sequence: Synthetic oligonucleotide
  Antisense strand to SEQ ID NO: 1120770
auucucaaagcuuggaagg

SEQ ID NO: 1120772 - RNA, 19 nt, Artificial Sequence
  Description of Artificial Sequence: Synthetic oligonucleotide
  Sense strand starting at position 1551 of SEQ ID NO: 915976
gccaucucacuguacuaga

SEQ ID NO: 1120773 - RNA, 19 nt, Artificial Sequence
  Description of Artificial Sequence: Synthetic oligonucleotide
  Antisense strand to SEQ ID NO: 1120772
ucuaguacagugagauggc

SEQ ID NO: 1120774 - RNA, 19 nt, Artificial Sequence
  Description of Artificial Sequence: Synthetic oligonucleotide
  Sense strand starting at position 1573 of SEQ ID NO: 915976
gaaaccauugcagguuaau

SEQ ID NO: 1120775 - RNA, 19 nt, Artificial Sequence
  Description of Artificial Sequence: Synthetic oligonucleotide
  Antisense strand to SEQ ID NO: 1120774
auuaaccugcaaugguuuc

SEQ ID NO: 1120776 - RNA, 19 nt, Artificial Sequence
  Description of Artificial Sequence: Synthetic oligonucleotide
  Sense strand starting at position 1576 of SEQ ID NO: 915976
accauugcagguuaaugau

SEQ ID NO: 1120777 - RNA, 19 nt, Artificial Sequence
  Description of Artificial Sequence: Synthetic oligonucleotide
  Antisense strand to SEQ ID NO: 1120776
aucauuaaccugcaauggu

SEQ ID NO: 1120778 - RNA, 19 nt, Artificial Sequence
  Description of Artificial Sequence: Synthetic oligonucleotide
  Sense strand starting at position 2111 of SEQ ID NO: 915976
uuucucuaagguugugaga

SEQ ID NO: 1120779 - RNA, 19 nt, Artificial Sequence
  Description of Artificial Sequence: Synthetic oligonucleotide
  Antisense strand to SEQ ID NO: 1120778
ucucacaaccuuagagaaa

SEQ ID NO: 1120780 - RNA, 19 nt, Artificial Sequence
  Description of Artificial Sequence: Synthetic oligonucleotide
  Sense strand starting at position 2120 of SEQ ID NO: 915976
gguugugagaugcauucuu

SEQ ID NO: 1120781 - RNA, 19 nt, Artificial Sequence
  Description of Artificial Sequence: Synthetic oligonucleotide
  Antisense strand to SEQ ID NO: 1120780
aagaaugcaucucacaacc

SEQ ID NO: 1120782 - RNA, 19 nt, Artificial Sequence
  Description of Artificial Sequence: Synthetic oligonucleotide
  Sense strand starting at position 2125 of SEQ ID NO: 915976
ugagaugcauucuuuggga

SEQ ID NO: 1120783 - RNA, 19 nt, Artificial Sequence
  Description of Artificial Sequence: Synthetic oligonucleotide
  Antisense strand to SEQ ID NO: 1120782
ucccaaagaaugcaucuca

SEQ ID NO: 1120784 - RNA, 19 nt, Artificial Sequence
  Description of Artificial Sequence: Synthetic oligonucleotide
  Sense strand starting at position 2127 of SEQ ID NO: 915976
agaugcauucuuugggacu

SEQ ID NO: 1120785 - RNA, 19 nt, Artificial Sequence
  Description of Artificial Sequence: Synthetic oligonucleotide
  Antisense strand to SEQ ID NO: 1120784
agucccaaagaaugcaucu

SEQ ID NO: 1120786 - RNA, 19 nt, Artificial Sequence
  Description of Artificial Sequence: Synthetic oligonucleotide
  Sense strand starting at position 2189 of SEQ ID NO: 915976
auuaaugacuugcuuugau

SEQ ID NO: 1120787 - RNA, 19 nt, Artificial Sequence
  Description of Artificial Sequence: Synthetic oligonucleotide
  Antisense strand to SEQ ID NO: 1120786
aucaaagcaagucauuaau

SEQ ID NO: 1120788 - RNA, 19 nt, Artificial Sequence
  Description of Artificial Sequence: Synthetic oligonucleotide
  Sense strand starting at position 2202 of SEQ ID NO: 915976
uuugauaagcauugaauag

SEQ ID NO: 1120789 - RNA, 19 nt, Artificial Sequence
  Description of Artificial Sequence: Synthetic oligonucleotide
  Antisense strand to SEQ ID NO: 1120788
cuauucaaugcuuaucaaa

SEQ ID NO: 1120790 - RNA, 19 nt, Artificial Sequence
  Description of Artificial Sequence: Synthetic oligonucleotide
  Sense strand starting at position 2246 of SEQ ID NO: 915976
gagugaauuugugaacauu

SEQ ID NO: 1120791 - RNA, 19 nt, Artificial Sequence
  Description of Artificial Sequence: Synthetic oligonucleotide
  Antisense strand to SEQ ID NO: 1120790
aauguucacaaauucacuc

SEQ ID NO: 1120792 - RNA, 19 nt, Artificial Sequence
  Description of Artificial Sequence: Synthetic oligonucleotide
  Sense strand starting at position 2310 of SEQ ID NO: 915976
ccaguauucucauuagauc

SEQ ID NO: 1120793 - RNA, 19 nt, Artificial Sequence
  Description of Artificial Sequence: Synthetic oligonucleotide
  Antisense strand to SEQ ID NO: 1120792
gaucuaaugagaauacugg

SEQ ID NO: 1120794 - RNA, 19 nt, Artificial Sequence
  Description of Artificial Sequence: Synthetic oligonucleotide
  Sense strand starting at position 2483 of SEQ ID NO: 915976
agauacuuacugugaaggu

SEQ ID NO: 1120795 - RNA, 19 nt, Artificial Sequence
  Description of Artificial Sequence: Synthetic oligonucleotide
  Antisense strand to SEQ ID NO: 1120794
accuucacaguaaguaucu

SEQ ID NO: 1120796 - RNA, 19 nt, Artificial Sequence
  Description of Artificial Sequence: Synthetic oligonucleotide
  Sense strand starting at position 2543 of SEQ ID NO: 915976
gcaguaucacuaugacuug

SEQ ID NO: 1120797 - RNA, 19 nt, Artificial Sequence
  Description of Artificial Sequence: Synthetic oligonucleotide
  Antisense strand to SEQ ID NO: 1120796
caagucauagugauacugc

SEQ ID NO: 1120798 - RNA, 19 nt, Artificial Sequence
  Description of Artificial Sequence: Synthetic oligonucleotide
  Sense strand starting at position 2546 of SEQ ID NO: 915976
guaucacuaugacuugaga

SEQ ID NO: 1120799 - RNA, 19 nt, Artificial Sequence
  Description of Artificial Sequence: Synthetic oligonucleotide
  Antisense strand to SEQ ID NO: 1120798
ucucaagucauagugauac

SEQ ID NO: 1120800 - RNA, 19 nt, Artificial Sequence
  Description of Artificial Sequence: Synthetic oligonucleotide
  Sense strand starting at position 2961 of SEQ ID NO: 915976
gugauucuuacauggguua

SEQ ID NO: 1120801 - RNA, 19 nt, Artificial Sequence
  Description of Artificial Sequence: Synthetic oligonucleotide
  Antisense strand to SEQ ID NO: 1120800
uaacccauguaagaaucac

SEQ ID NO: 1120802 - RNA, 19 nt, Artificial Sequence
  Description of Artificial Sequence: Synthetic oligonucleotide
  Sense strand starting at position 2962 of SEQ ID NO: 915976
ugauucuuacauggguuaa

SEQ ID NO: 1120803 - RNA, 19 nt, Artificial Sequence
  Description of Artificial Sequence: Synthetic oligonucleotide
  Antisense strand to SEQ ID NO: 1120802
uuaacccauguaagaauca

SEQ ID NO: 1120804 - RNA, 19 nt, Artificial Sequence
  Description of Artificial Sequence: Synthetic oligonucleotide
  Sense strand starting at position 3350 of SEQ ID NO: 915976
cgcacaugggauuguaaag

SEQ ID NO: 1120805 - RNA, 19 nt, Artificial Sequence
  Description of Artificial Sequence: Synthetic oligonucleotide
  Antisense strand to SEQ ID NO: 1120804
cuuuacaaucccaugugcg

SEQ ID NO: 1120806 - RNA, 19 nt, Artificial Sequence
  Description of Artificial Sequence: Synthetic oligonucleotide
  Sense strand starting at position 3636 of SEQ ID NO: 915976
ggaggugcucuccaauauc

SEQ ID NO: 1120807 - RNA, 19 nt, Artificial Sequence
  Description of Artificial Sequence: Synthetic oligonucleotide
  Antisense strand to SEQ ID NO: 1120806
gauauuggagagcaccucc

SEQ ID NO: 1120808 - RNA, 19 nt, Artificial Sequence
  Description of Artificial Sequence: Synthetic oligonucleotide
  Sense strand starting at position 3780 of SEQ ID NO: 915976
cuuacuuuauggcuuugaa

SEQ ID NO: 1120809 - RNA, 19 nt, Artificial Sequence
  Description of Artificial Sequence: Synthetic oligonucleotide
  Antisense strand to SEQ ID NO: 1120808
uucaaagccauaaaguaag

SEQ ID NO: 1120810 - RNA, 19 nt, Artificial Sequence
  Description of Artificial Sequence: Synthetic oligonucleotide
  Sense strand starting at position 3783 of SEQ ID NO: 915976
acuuuauggcuuugaauug

SEQ ID NO: 1120811 - RNA, 19 nt, Artificial Sequence
  Description of Artificial Sequence: Synthetic oligonucleotide
  Antisense strand to SEQ ID NO: 1120810
caauucaaagccauaaagu

SEQ ID NO: 1120812 - RNA, 19 nt, Artificial Sequence
  Description of Artificial Sequence: Synthetic oligonucleotide
  Sense strand starting at position 3790 of SEQ ID NO: 915976
ggcuuugaauuggcaaauu

SEQ ID NO: 1120813 - RNA, 19 nt, Artificial Sequence
  Description of Artificial Sequence: Synthetic oligonucleotide
  Antisense strand to SEQ ID NO: 1120812
aauuugccaauucaaagcc

SEQ ID NO: 1120814 - RNA, 19 nt, Artificial Sequence
  Description of Artificial Sequence: Synthetic oligonucleotide
  Sense strand starting at position 106 of SEQ ID NO: 915977
ucgaguuccugagcucaga

SEQ ID NO: 1120815 - RNA, 19 nt, Artificial Sequence
  Description of Artificial Sequence: Synthetic oligonucleotide
  Antisense strand to SEQ ID NO: 1120814
ucugagcucaggaacucga

SEQ ID NO: 1120816 - RNA, 19 nt, Artificial Sequence
  Description of Artificial Sequence: Synthetic oligonucleotide
  Sense strand starting at position 268 of SEQ ID NO: 915977
auguacaugcaugaaacua

SEQ ID NO: 1120817 - RNA, 19 nt, Artificial Sequence
  Description of Artificial Sequence: Synthetic oligonucleotide
  Antisense strand to SEQ ID NO: 1120816
uaguuucaugcauguacau

SEQ ID NO: 1120818 - RNA, 19 nt, Artificial Sequence
  Description of Artificial Sequence: Synthetic oligonucleotide
  Sense strand starting at position 276 of SEQ ID NO: 915977
gcaugaaacuagccucauu

SEQ ID NO: 1120819 - RNA, 19 nt, Artificial Sequence
  Description of Artificial Sequence: Synthetic oligonucleotide
  Antisense strand to SEQ ID NO: 1120818
aaugaggcuaguuucaugc

SEQ ID NO: 1120820 - RNA, 19 nt, Artificial Sequence
  Description of Artificial Sequence: Synthetic oligonucleotide
  Sense strand starting at position 500 of SEQ ID NO: 915977
gucugcccucauuagcaua

SEQ ID NO: 1120821 - RNA, 19 nt, Artificial Sequence
  Description of Artificial Sequence: Synthetic oligonucleotide
  Antisense strand to SEQ ID NO: 1120820
uaugcuaaugagggcagac

SEQ ID NO: 1120822 - RNA, 19 nt, Artificial Sequence
  Description of Artificial Sequence: Synthetic oligonucleotide
  Sense strand starting at position 582 of SEQ ID NO: 915977
cugcauugucaccaggaca

SEQ ID NO: 1120823 - RNA, 19 nt, Artificial Sequence
  Description of Artificial Sequence: Synthetic oligonucleotide
  Antisense strand to SEQ ID NO: 1120822
uguccuggugacaaugcag

SEQ ID NO: 1120824 - RNA, 19 nt, Artificial Sequence
  Description of Artificial Sequence: Synthetic oligonucleotide
  Sense strand starting at position 654 of SEQ ID NO: 915977
uggguuaagggaugugaca

SEQ ID NO: 1120825 - RNA, 19 nt, Artificial Sequence
  Description of Artificial Sequence: Synthetic oligonucleotide
  Antisense strand to SEQ ID NO: 1120824
ugucacaucccuuaaccca

SEQ ID NO: 1120826 - RNA, 19 nt, Artificial Sequence
  Description of Artificial Sequence: Synthetic oligonucleotide
  Sense strand starting at position 766 of SEQ ID NO: 915977
ggauguggcaucugguuga

SEQ ID NO: 1120827 - RNA, 19 nt, Artificial Sequence
  Description of Artificial Sequence: Synthetic oligonucleotide
  Antisense strand to SEQ ID NO: 1120826
ucaaccagaugccacaucc

SEQ ID NO: 1120828 - RNA, 19 nt, Artificial Sequence
  Description of Artificial Sequence: Synthetic oligonucleotide
  Sense strand starting at position 800 of SEQ ID NO: 915977
auaggagcucuuuauccaa

SEQ ID NO: 1120829 - RNA, 19 nt, Artificial Sequence
  Description of Artificial Sequence: Synthetic oligonucleotide
  Antisense strand to SEQ ID NO: 1120828
uuggauaaagagcuccuau

SEQ ID NO: 1120830 - RNA, 19 nt, Artificial Sequence
  Description of Artificial Sequence: Synthetic oligonucleotide
  Sense strand starting at position 825 of SEQ ID NO: 915977
acugaaauaggucagcagu

SEQ ID NO: 1120831 - RNA, 19 nt, Artificial Sequence
  Description of Artificial Sequence: Synthetic oligonucleotide
  Antisense strand to SEQ ID NO: 1120830
acugcugaccuauuucagu

SEQ ID NO: 1120832 - RNA, 19 nt, Artificial Sequence
  Description of Artificial Sequence: Synthetic oligonucleotide
  Sense strand starting at position 827 of SEQ ID NO: 915977
ugaaauaggucagcaguua

SEQ ID NO: 1120833 - RNA, 19 nt, Artificial Sequence
  Description of Artificial Sequence: Synthetic oligonucleotide
  Antisense strand to SEQ ID NO: 1120832
uaacugcugaccuauuuca

SEQ ID NO: 1120834 - RNA, 19 nt, Artificial Sequence
  Description of Artificial Sequence: Synthetic oligonucleotide
  Sense strand starting at position 828 of SEQ ID NO: 915977
gaaauaggucagcaguuau

SEQ ID NO: 1120835 - RNA, 19 nt, Artificial Sequence
  Description of Artificial Sequence: Synthetic oligonucleotide
  Antisense strand to SEQ ID NO: 1120834
auaacugcugaccuauuuc

SEQ ID NO: 1120836 - RNA, 19 nt, Artificial Sequence
  Description of Artificial Sequence: Synthetic oligonucleotide
  Sense strand starting at position 858 of SEQ ID NO: 915977
gauccaggguaccuuaaau

SEQ ID NO: 1120837 - RNA, 19 nt, Artificial Sequence
  Description of Artificial Sequence: Synthetic oligonucleotide
  Antisense strand to SEQ ID NO: 1120836
auuuaagguacccuggauc

SEQ ID NO: 1120838 - RNA, 19 nt, Artificial Sequence
  Description of Artificial Sequence: Synthetic oligonucleotide
  Sense strand starting at position 894 of SEQ ID NO: 915977
gugaaauagaagggugagu

SEQ ID NO: 1120839 - RNA, 19 nt, Artificial Sequence
  Description of Artificial Sequence: Synthetic oligonucleotide
  Antisense strand to SEQ ID NO: 1120838
acucacccuucuauuucac

SEQ ID NO: 1120840 - RNA, 19 nt, Artificial Sequence
  Description of Artificial Sequence: Synthetic oligonucleotide
  Sense strand starting at position 896 of SEQ ID NO: 915977
gaaauagaagggugaguuu

SEQ ID NO: 1120841 - RNA, 19 nt, Artificial Sequence
  Description of Artificial Sequence: Synthetic oligonucleotide
  Antisense strand to SEQ ID NO: 1120840
aaacucacccuucuauuuc

SEQ ID NO: 1120842 - RNA, 19 nt, Artificial Sequence
  Description of Artificial Sequence: Synthetic oligonucleotide
  Sense strand starting at position 2058 of SEQ ID NO: 915977
cggccauuggucguuauua

SEQ ID NO: 1120843 - RNA, 19 nt, Artificial Sequence
  Description of Artificial Sequence: Synthetic oligonucleotide
  Antisense strand to SEQ ID NO: 1120842
uaauaacgaccaauggccg

SEQ ID NO: 1120844 - RNA, 19 nt, Artificial Sequence
  Description of Artificial Sequence: Synthetic oligonucleotide
  Sense strand starting at position 2283 of SEQ ID NO: 915977
aaugcuauugacugaaugu

SEQ ID NO: 1120845 - RNA, 19 nt, Artificial Sequence
  Description of Artificial Sequence: Synthetic oligonucleotide
  Antisense strand to SEQ ID NO: 1120844
acauucagucaauagcauu

SEQ ID NO: 1120846 - RNA, 19 nt, Artificial Sequence
  Description of Artificial Sequence: Synthetic oligonucleotide
  Sense strand starting at position 2400 of SEQ ID NO: 915977
ccagauuggucaucuugac

SEQ ID NO: 1120847 - RNA, 19 nt, Artificial Sequence
  Description of Artificial Sequence: Synthetic oligonucleotide
  Antisense strand to SEQ ID NO: 1120846
gucaagaugaccaaucugg

SEQ ID NO: 1120848 - RNA, 19 nt, Artificial Sequence
  Description of Artificial Sequence: Synthetic oligonucleotide
  Sense strand starting at position 2404 of SEQ ID NO: 915977
auuggucaucuugaccuau

SEQ ID NO: 1120849 - RNA, 19 nt, Artificial Sequence
  Description of Artificial Sequence: Synthetic oligonucleotide
  Antisense strand to SEQ ID NO: 1120848
auaggucaagaugaccaau

SEQ ID NO: 1120850 - RNA, 19 nt, Artificial Sequence
  Description of Artificial Sequence: Synthetic oligonucleotide
  Sense strand starting at position 2469 of SEQ ID NO: 915977
aggaccuccucucugauaa

SEQ ID NO: 1120851 - RNA, 19 nt, Artificial Sequence
  Description of Artificial Sequence: Synthetic oligonucleotide
  Antisense strand to SEQ ID NO: 1120850
uuaucagagaggagguccu

SEQ ID NO: 1120852 - RNA, 19 nt, Artificial Sequence
  Description of Artificial Sequence: Synthetic oligonucleotide
  Sense strand starting at position 2470 of SEQ ID NO: 915977
ggaccuccucucugauaaa

SEQ ID NO: 1120853 - RNA, 19 nt, Artificial Sequence
  Description of Artificial Sequence: Synthetic oligonucleotide
  Antisense strand to SEQ ID NO: 1120852
uuuaucagagaggaggucc

SEQ ID NO: 1120854 - RNA, 19 nt, Artificial Sequence
  Description of Artificial Sequence: Synthetic oligonucleotide
  Sense strand starting at position 2480 of SEQ ID NO: 915977
ucugauaaaugagagaacu

SEQ ID NO: 1120855 - RNA, 19 nt, Artificial Sequence
  Description of Artificial Sequence: Synthetic oligonucleotide
  Antisense strand to SEQ ID NO: 1120854
aguucucucauuuaucaga

SEQ ID NO: 1120856 - RNA, 19 nt, Artificial Sequence
  Description of Artificial Sequence: Synthetic oligonucleotide
  Sense strand starting at position 2544 of SEQ ID NO: 915977
gcguuacugcagucagacu

SEQ ID NO: 1120857 - RNA, 19 nt, Artificial Sequence
  Description of Artificial Sequence: Synthetic oligonucleotide
  Antisense strand to SEQ ID NO: 1120856
agucugacugcaguaacgc

SEQ ID NO: 1120858 - RNA, 19 nt, Artificial Sequence
  Description of Artificial Sequence: Synthetic oligonucleotide
  Sense strand starting at position 2553 of SEQ ID NO: 915977
cagucagacugucugaguu

SEQ ID NO: 1120859 - RNA, 19 nt, Artificial Sequence
  Description of Artificial Sequence: Synthetic oligonucleotide
  Antisense strand to SEQ ID NO: 1120858
aacucagacagucugacug

SEQ ID NO: 1120860 - RNA, 19 nt, Artificial Sequence
  Description of Artificial Sequence: Synthetic oligonucleotide
  Sense strand starting at position 2557 of SEQ ID NO: 915977
cagacugucugaguuaaag

SEQ ID NO: 1120861 - RNA, 19 nt, Artificial Sequence
  Description of Artificial Sequence: Synthetic oligonucleotide
  Antisense strand to SEQ ID NO: 1120860
cuuuaacucagacagucug

SEQ ID NO: 1120862 - RNA, 19 nt, Artificial Sequence
  Description of Artificial Sequence: Synthetic oligonucleotide
  Sense strand starting at position 2600 of SEQ ID NO: 915977
gcgugaccucaggaaagua

SEQ ID NO: 1120863 - RNA, 19 nt, Artificial Sequence
  Description of Artificial Sequence: Synthetic oligonucleotide
  Antisense strand to SEQ ID NO: 1120862
uacuuuccugaggucacgc

SEQ ID NO: 1120864 - RNA, 19 nt, Artificial Sequence
  Description of Artificial Sequence: Synthetic oligonucleotide
  Sense strand starting at position 2695 of SEQ ID NO: 915977
aguucccuaucuuuaguaa

SEQ ID NO: 1120865 - RNA, 19 nt, Artificial Sequence
  Description of Artificial Sequence: Synthetic oligonucleotide
  Antisense strand to SEQ ID NO: 1120864
uuacuaaagauagggaacu

SEQ ID NO: 1120866 - RNA, 19 nt, Artificial Sequence
  Description of Artificial Sequence: Synthetic oligonucleotide
  Sense strand starting at position 2800 of SEQ ID NO: 915977
cguccuccuggcuuguaau

SEQ ID NO: 1120867 - RNA, 19 nt, Artificial Sequence
  Description of Artificial Sequence: Synthetic oligonucleotide
  Antisense strand to SEQ ID NO: 1120866
auuacaagccaggaggacg

SEQ ID NO: 1120868 - RNA, 19 nt, Artificial Sequence
  Description of Artificial Sequence: Synthetic oligonucleotide
  Sense strand starting at position 3002 of SEQ ID NO: 915977
aaggaauguuaacagagga

SEQ ID NO: 1120869 - RNA, 19 nt, Artificial Sequence
  Description of Artificial Sequence: Synthetic oligonucleotide
  Antisense strand to SEQ ID NO: 1120868
uccucuguuaacauuccuu

SEQ ID NO: 1120870 - RNA, 19 nt, Artificial Sequence
  Description of Artificial Sequence: Synthetic oligonucleotide
  Sense strand starting at position 3202 of SEQ ID NO: 915977
agauuaauuggguguggug

SEQ ID NO: 1120871 - RNA, 19 nt, Artificial Sequence
  Description of Artificial Sequence: Synthetic oligonucleotide
  Antisense strand to SEQ ID NO: 1120870
caccacacccaauuaaucu

SEQ ID NO: 1120872 - RNA, 19 nt, Artificial Sequence
  Description of Artificial Sequence: Synthetic oligonucleotide
  Sense strand starting at position 3476 of SEQ ID NO: 915977
ggcaauggugcguucuauc

SEQ ID NO: 1120873 - RNA, 19 nt, Artificial Sequence
  Description of Artificial Sequence: Synthetic oligonucleotide
  Antisense strand to SEQ ID NO: 1120872
gauagaacgcaccauugcc

SEQ ID NO: 1120874 - RNA, 19 nt, Artificial Sequence
  Description of Artificial Sequence: Synthetic oligonucleotide
  Sense strand starting at position 3596 of SEQ ID NO: 915977
aguugacuucuagaaguac

SEQ ID NO: 1120875 - RNA, 19 nt, Artificial Sequence
  Description of Artificial Sequence: Synthetic oligonucleotide
  Antisense strand to SEQ ID NO: 1120874
guacuucuagaagucaacu

SEQ ID NO: 1120876 - RNA, 19 nt, Artificial Sequence
  Description of Artificial Sequence: Synthetic oligonucleotide
  Sense strand starting at position 3685 of SEQ ID NO: 915977
ggaacuaucaaguagccga

SEQ ID NO: 1120877 - RNA, 19 nt, Artificial Sequence
  Description of Artificial Sequence: Synthetic oligonucleotide
  Antisense strand to SEQ ID NO: 1120876
ucggcuacuugauaguucc

SEQ ID NO: 1120878 - RNA, 19 nt, Artificial Sequence
  Description of Artificial Sequence: Synthetic oligonucleotide
  Sense strand starting at position 3689 of SEQ ID NO: 915977
cuaucaaguagccgaaaga

SEQ ID NO: 1120879 - RNA, 19 nt, Artificial Sequence
  Description of Artificial Sequence: Synthetic oligonucleotide
  Antisense strand to SEQ ID NO: 1120878
ucuuucggcuacuugauag

SEQ ID NO: 1120880 - RNA, 19 nt, Artificial Sequence
  Description of Artificial Sequence: Synthetic oligonucleotide
  Sense strand starting at position 3690 of SEQ ID NO: 915977
uaucaaguagccgaaagau

SEQ ID NO: 1120881 - RNA, 19 nt, Artificial Sequence
  Description of Artificial Sequence: Synthetic oligonucleotide
  Antisense strand to SEQ ID NO: 1120880
aucuuucggcuacuugaua

SEQ ID NO: 1120882 - RNA, 19 nt, Artificial Sequence
  Description of Artificial Sequence: Synthetic oligonucleotide
  Sense strand starting at position 3715 of SEQ ID NO: 915977
cugcuuauuucugugcuga

SEQ ID NO: 1120883 - RNA, 19 nt, Artificial Sequence
  Description of Artificial Sequence: Synthetic oligonucleotide
  Antisense strand to SEQ ID NO: 1120882
ucagcacagaaauaagcag

SEQ ID NO: 1120884 - RNA, 19 nt, Artificial Sequence
  Description of Artificial Sequence: Synthetic oligonucleotide
  Sense strand starting at position 3716 of SEQ ID NO: 915977
ugcuuauuucugugcugac

SEQ ID NO: 1120885 - RNA, 19 nt, Artificial Sequence
  Description of Artificial Sequence: Synthetic oligonucleotide
  Antisense strand to SEQ ID NO: 1120884
gucagcacagaaauaagca

SEQ ID NO: 1120886 - RNA, 19 nt, Artificial Sequence
  Description of Artificial Sequence: Synthetic oligonucleotide
  Sense strand starting at position 3717 of SEQ ID NO: 915977
gcuuauuucugugcugaca

SEQ ID NO: 1120887 - RNA, 19 nt, Artificial Sequence
  Description of Artificial Sequence: Synthetic oligonucleotide
  Antisense strand to SEQ ID NO: 1120886
ugucagcacagaaauaagc

SEQ ID NO: 1120888 - RNA, 19 nt, Artificial Sequence
  Description of Artificial Sequence: Synthetic oligonucleotide
  Sense strand starting at position 3787 of SEQ ID NO: 915977
ccuagaaacuggccuagaa

SEQ ID NO: 1120889 - RNA, 19 nt, Artificial Sequence
  Description of Artificial Sequence: Synthetic oligonucleotide
  Antisense strand to SEQ ID NO: 1120888
uucuaggccaguuucuagg

SEQ ID NO: 1120890 - RNA, 19 nt, Artificial Sequence
  Description of Artificial Sequence: Synthetic oligonucleotide
  Sense strand starting at position 3914 of SEQ ID NO: 915977
caaggugacucgguaaucu

SEQ ID NO: 1120891 - RNA, 19 nt, Artificial Sequence
  Description of Artificial Sequence: Synthetic oligonucleotide
  Antisense strand to SEQ ID NO: 1120890
agauuaccgagucaccuug

SEQ ID NO: 1120892 - RNA, 19 nt, Artificial Sequence
  Description of Artificial Sequence: Synthetic oligonucleotide
  Sense strand starting at position 3950 of SEQ ID NO: 915977
aaacaaggucauugugcaa

SEQ ID NO: 1120893 - RNA, 19 nt, Artificial Sequence
  Description of Artificial Sequence: Synthetic oligonucleotide
  Antisense strand to SEQ ID NO: 1120892
uugcacaaugaccuuguuu

SEQ ID NO: 1120894 - RNA, 19 nt, Artificial Sequence
  Description of Artificial Sequence: Synthetic oligonucleotide
  Sense strand starting at position 41 of SEQ ID NO: 915978
acaugagucagaugguuuc

SEQ ID NO: 1120895 - RNA, 19 nt, Artificial Sequence
  Description of Artificial Sequence: Synthetic oligonucleotide
  Antisense strand to SEQ ID NO: 1120894
gaaaccaucugacucaugu

SEQ ID NO: 1120896 - RNA, 19 nt, Artificial Sequence
  Description of Artificial Sequence: Synthetic oligonucleotide
  Sense strand starting at position 205 of SEQ ID NO: 915978
gcuuccagaucuuugcauu

SEQ ID NO: 1120897 - RNA, 19 nt, Artificial Sequence
  Description of Artificial Sequence: Synthetic oligonucleotide
  Antisense strand to SEQ ID NO: 1120896
aaugcaaagaucuggaagc

SEQ ID NO: 1120898 - RNA, 19 nt, Artificial Sequence
  Description of Artificial Sequence: Synthetic oligonucleotide
  Sense strand starting at position 257 of SEQ ID NO: 915978
ggauucuucuccuucuaug

SEQ ID NO: 1120899 - RNA, 19 nt, Artificial Sequence
  Description of Artificial Sequence: Synthetic oligonucleotide
  Antisense strand to SEQ ID NO: 1120898
cauagaaggagaagaaucc

SEQ ID NO: 1120900 - RNA, 19 nt, Artificial Sequence
  Description of Artificial Sequence: Synthetic oligonucleotide
  Sense strand starting at position 287 of SEQ ID NO: 915978
agaacugggucaucucuga

SEQ ID NO: 1120901 - RNA, 19 nt, Artificial Sequence
  Description of Artificial Sequence: Synthetic oligonucleotide
  Antisense strand to SEQ ID NO: 1120900
ucagagaugacccaguucu

SEQ ID NO: 1120902 - RNA, 19 nt, Artificial Sequence
  Description of Artificial Sequence: Synthetic oligonucleotide
  Sense strand starting at position 291 of SEQ ID NO: 915978
cugggucaucucugaccuu

SEQ ID NO: 1120903 - RNA, 19 nt, Artificial Sequence
  Description of Artificial Sequence: Synthetic oligonucleotide
  Antisense strand to SEQ ID NO: 1120902
aaggucagagaugacccag

SEQ ID NO: 1120904 - RNA, 19 nt, Artificial Sequence
  Description of Artificial Sequence: Synthetic oligonucleotide
  Sense strand starting at position 581 of SEQ ID NO: 915978
gcagaaucacgugaaucca

SEQ ID NO: 1120905 - RNA, 19 nt, Artificial Sequence
  Description of Artificial Sequence: Synthetic oligonucleotide
  Antisense strand to SEQ ID NO: 1120904
uggauucacgugauucugc

SEQ ID NO: 1120906 - RNA, 19 nt, Artificial Sequence
  Description of Artificial Sequence: Synthetic oligonucleotide
  Sense strand starting at position 1027 of SEQ ID NO: 915978
ccacgcuugaguuggauuu

SEQ ID NO: 1120907 - RNA, 19 nt, Artificial Sequence
  Description of Artificial Sequence: Synthetic oligonucleotide
  Antisense strand to SEQ ID NO: 1120906
aaauccaacucaagcgugg

SEQ ID NO: 1120908 - RNA, 19 nt, Artificial Sequence
  Description of Artificial Sequence: Synthetic oligonucleotide
  Sense strand starting at position 1144 of SEQ ID NO: 915978
ggaaauagguguccagcca

SEQ ID NO: 1120909 - RNA, 19 nt, Artificial Sequence
  Description of Artificial Sequence: Synthetic oligonucleotide
  Antisense strand to SEQ ID NO: 1120908
uggcuggacaccuauuucc

SEQ ID NO: 1120910 - RNA, 19 nt, Artificial Sequence
  Description of Artificial Sequence: Synthetic oligonucleotide
  Sense strand starting at position 1371 of SEQ ID NO: 915978
gaggacuguucuccaggga

SEQ ID NO: 1120911 - RNA, 19 nt, Artificial Sequence
  Description of Artificial Sequence: Synthetic oligonucleotide
  Antisense strand to SEQ ID NO: 1120910
ucccuggagaacaguccuc

SEQ ID NO: 1120912 - RNA, 19 nt, Artificial Sequence
  Description of Artificial Sequence: Synthetic oligonucleotide
  Sense strand starting at position 1374 of SEQ ID NO: 915978
gacuguucuccagggaaga

SEQ ID NO: 1120913 - RNA, 19 nt, Artificial Sequence
  Description of Artificial Sequence: Synthetic oligonucleotide
  Antisense strand to SEQ ID NO: 1120912
ucuucccuggagaacaguc

SEQ ID NO: 1120914 - RNA, 19 nt, Artificial Sequence
  Description of Artificial Sequence: Synthetic oligonucleotide
  Sense strand starting at position 1375 of SEQ ID NO: 915978
acuguucuccagggaagag

SEQ ID NO: 1120915 - RNA, 19 nt, Artificial Sequence
  Description of Artificial Sequence: Synthetic oligonucleotide
  Antisense strand to SEQ ID NO: 1120914
cucuucccuggagaacagu

SEQ ID NO: 1120916 - RNA, 19 nt, Artificial Sequence
  Description of Artificial Sequence: Synthetic oligonucleotide
  Sense strand starting at position 1393 of SEQ ID NO: 915978
gggaaaucuucccaagaga

SEQ ID NO: 1120917 - RNA, 19 nt, Artificial Sequence
  Description of Artificial Sequence: Synthetic oligonucleotide
  Antisense strand to SEQ ID NO: 1120916
ucucuugggaagauuuccc

SEQ ID NO: 1120918 - RNA, 19 nt, Artificial Sequence
  Description of Artificial Sequence: Synthetic oligonucleotide
  Sense strand starting at position 1457 of SEQ ID NO: 915978
cucaacucacucggaauaa

SEQ ID NO: 1120919 - RNA, 19 nt, Artificial Sequence
  Description of Artificial Sequence: Synthetic oligonucleotide
  Antisense strand to SEQ ID NO: 1120918
uuauuccgagugaguugag

SEQ ID NO: 1120920 - RNA, 19 nt, Artificial Sequence
  Description of Artificial Sequence: Synthetic oligonucleotide
  Sense strand starting at position 1528 of SEQ ID NO: 915978
auagcuugguggucacaga

SEQ ID NO: 1120921 - RNA, 19 nt, Artificial Sequence
  Description of Artificial Sequence: Synthetic oligonucleotide
  Antisense strand to SEQ ID NO: 1120920
ucugugaccaccaagcuau

SEQ ID NO: 1120922 - RNA, 19 nt, Artificial Sequence
  Description of Artificial Sequence: Synthetic oligonucleotide
  Sense strand starting at position 1529 of SEQ ID NO: 915978
uagcuugguggucacagaa

SEQ ID NO: 1120923 - RNA, 19 nt, Artificial Sequence
  Description of Artificial Sequence: Synthetic oligonucleotide
  Antisense strand to SEQ ID NO: 1120922
uucugugaccaccaagcua

SEQ ID NO: 1120924 - RNA, 19 nt, Artificial Sequence
  Description of Artificial Sequence: Synthetic oligonucleotide
  Sense strand starting at position 1752 of SEQ ID NO: 915978
uugggaagaccuuguaaca

SEQ ID NO: 1120925 - RNA, 19 nt, Artificial Sequence
  Description of Artificial Sequence: Synthetic oligonucleotide
  Antisense strand to SEQ ID NO: 1120924
uguuacaaggucuucccaa

SEQ ID NO: 1120926 - RNA, 19 nt, Artificial Sequence
  Description of Artificial Sequence: Synthetic oligonucleotide
  Sense strand starting at position 1762 of SEQ ID NO: 915978
cuuguaacagaucacugua

SEQ ID NO: 1120927 - RNA, 19 nt, Artificial Sequence
  Description of Artificial Sequence: Synthetic oligonucleotide
  Antisense strand to SEQ ID NO: 1120926
uacagugaucuguuacaag

SEQ ID NO: 1120928 - RNA, 19 nt, Artificial Sequence
  Description of Artificial Sequence: Synthetic oligonucleotide
  Sense strand starting at position 1764 of SEQ ID NO: 915978
uguaacagaucacuguauu

SEQ ID NO: 1120929 - RNA, 19 nt, Artificial Sequence
  Description of Artificial Sequence: Synthetic oligonucleotide
  Antisense strand to SEQ ID NO: 1120928
aauacagugaucuguuaca

SEQ ID NO: 1120930 - RNA, 19 nt, Artificial Sequence
  Description of Artificial Sequence: Synthetic oligonucleotide
  Sense strand starting at position 2065 of SEQ ID NO: 915978
cggugauugguucagggau

SEQ ID NO: 1120931 - RNA, 19 nt, Artificial Sequence
  Description of Artificial Sequence: Synthetic oligonucleotide
  Antisense strand to SEQ ID NO: 1120930
aucccugaaccaaucaccg

SEQ ID NO: 1120932 - RNA, 19 nt, Artificial Sequence
  Description of Artificial Sequence: Synthetic oligonucleotide
  Sense strand starting at position 2111 of SEQ ID NO: 915978
agagucuuucccgggacuu

SEQ ID NO: 1120933 - RNA, 19 nt, Artificial Sequence
  Description of Artificial Sequence: Synthetic oligonucleotide
  Antisense strand to SEQ ID NO: 1120932
aagucccgggaaagacucu

SEQ ID NO: 1120934 - RNA, 19 nt, Artificial Sequence
  Description of Artificial Sequence: Synthetic oligonucleotide
  Sense strand starting at position 2112 of SEQ ID NO: 915978
gagucuuucccgggacuuu

SEQ ID NO: 1120935 - RNA, 19 nt, Artificial Sequence
  Description of Artificial Sequence: Synthetic oligonucleotide
  Antisense strand to SEQ ID NO: 1120934
aaagucccgggaaagacuc

SEQ ID NO: 1120936 - RNA, 19 nt, Artificial Sequence
  Description of Artificial Sequence: Synthetic oligonucleotide
  Sense strand starting at position 2778 of SEQ ID NO: 915978
cuuugaggcuuugugguua

SEQ ID NO: 1120937 - RNA, 19 nt, Artificial Sequence
  Description of Artificial Sequence: Synthetic oligonucleotide
  Antisense strand to SEQ ID NO: 1120936
uaaccacaaagccucaaag

SEQ ID NO: 1120938 - RNA, 19 nt, Artificial Sequence
  Description of Artificial Sequence: Synthetic oligonucleotide
  Sense strand starting at position 2783 of SEQ ID NO: 915978
aggcuuugugguuaacgua

SEQ ID NO: 1120939 - RNA, 19 nt, Artificial Sequence
  Description of Artificial Sequence: Synthetic oligonucleotide
  Antisense strand to SEQ ID NO: 1120938
uacguuaaccacaaagccu

SEQ ID NO: 1120940 - RNA, 19 nt, Artificial Sequence
  Description of Artificial Sequence: Synthetic oligonucleotide
  Sense strand starting at position 2815 of SEQ ID NO: 915978
ucacuuacugcgcaaacaa

SEQ ID NO: 1120941 - RNA, 19 nt, Artificial Sequence
  Description of Artificial Sequence: Synthetic oligonucleotide
  Antisense strand to SEQ ID NO: 1120940
uuguuugcgcaguaaguga

SEQ ID NO: 1120942 - RNA, 19 nt, Artificial Sequence
  Description of Artificial Sequence: Synthetic oligonucleotide
  Sense strand starting at position 2926 of SEQ ID NO: 915978
ucugaacuuaguugugaga

SEQ ID NO: 1120943 - RNA, 19 nt, Artificial Sequence
  Description of Artificial Sequence: Synthetic oligonucleotide
  Antisense strand to SEQ ID NO: 1120942
ucucacaacuaaguucaga

SEQ ID NO: 1120944 - RNA, 19 nt, Artificial Sequence
  Description of Artificial Sequence: Synthetic oligonucleotide
  Sense strand starting at position 2955 of SEQ ID NO: 915978
cuggacagguucuuguuua

SEQ ID NO: 1120945 - RNA, 19 nt, Artificial Sequence
  Description of Artificial Sequence: Synthetic oligonucleotide
  Antisense strand to SEQ ID NO: 1120944
uaaacaagaaccuguccag

SEQ ID NO: 1120946 - RNA, 19 nt, Artificial Sequence
  Description of Artificial Sequence: Synthetic oligonucleotide
  Sense strand starting at position 3151 of SEQ ID NO: 915978
ccaguacuacuuggugcaa

SEQ ID NO: 1120947 - RNA, 19 nt, Artificial Sequence
  Description of Artificial Sequence: Synthetic oligonucleotide
  Antisense strand to SEQ ID NO: 1120946
uugcaccaaguaguacugg

SEQ ID NO: 1120948 - RNA, 19 nt, Artificial Sequence
  Description of Artificial Sequence: Synthetic oligonucleotide
  Sense strand starting at position 3152 of SEQ ID NO: 915978
caguacuacuuggugcaaa

SEQ ID NO: 1120949 - RNA, 19 nt, Artificial Sequence
  Description of Artificial Sequence: Synthetic oligonucleotide
  Antisense strand to SEQ ID NO: 1120948
uuugcaccaaguaguacug

SEQ ID NO: 1120950 - RNA, 19 nt, Artificial Sequence
  Description of Artificial Sequence: Synthetic oligonucleotide
  Sense strand starting at position 3218 of SEQ ID NO: 915978
uggcuaagucaugguuaca

SEQ ID NO: 1120951 - RNA, 19 nt, Artificial Sequence
  Description of Artificial Sequence: Synthetic oligonucleotide
  Antisense strand to SEQ ID NO: 1120950
uguaaccaugacuuagcca

SEQ ID NO: 1120952 - RNA, 19 nt, Artificial Sequence
  Description of Artificial Sequence: Synthetic oligonucleotide
  Sense strand starting at position 3221 of SEQ ID NO: 915978
cuaagucaugguuacauaa

SEQ ID NO: 1120953 - RNA, 19 nt, Artificial Sequence
  Description of Artificial Sequence: Synthetic oligonucleotide
  Antisense strand to SEQ ID NO: 1120952
uuauguaaccaugacuuag

SEQ ID NO: 1120954 - RNA, 19 nt, Artificial Sequence
  Description of Artificial Sequence: Synthetic oligonucleotide
  Sense strand starting at position 3280 of SEQ ID NO: 915978
agcuguguacugugagacu

SEQ ID NO: 1120955 - RNA, 19 nt, Artificial Sequence
  Description of Artificial Sequence: Synthetic oligonucleotide
  Antisense strand to SEQ ID NO: 1120954
agucucacaguacacagcu

SEQ ID NO: 1120956 - RNA, 19 nt, Artificial Sequence
  Description of Artificial Sequence: Synthetic oligonucleotide
  Sense strand starting at position 3293 of SEQ ID NO: 915978
gagacuccauuuggugaga

SEQ ID NO: 1120957 - RNA, 19 nt, Artificial Sequence
  Description of Artificial Sequence: Synthetic oligonucleotide
  Antisense strand to SEQ ID NO: 1120956
ucucaccaaauggagucuc

SEQ ID NO: 1120958 - RNA, 19 nt, Artificial Sequence
  Description of Artificial Sequence: Synthetic oligonucleotide
  Sense strand starting at position 3295 of SEQ ID NO: 915978
gacuccauuuggugagaug

SEQ ID NO: 1120959 - RNA, 19 nt, Artificial Sequence
  Description of Artificial Sequence: Synthetic oligonucleotide
  Antisense strand to SEQ ID NO: 1120958
caucucaccaaauggaguc

SEQ ID NO: 1120960 - RNA, 19 nt, Artificial Sequence
  Description of Artificial Sequence: Synthetic oligonucleotide
  Sense strand starting at position 3306 of SEQ ID NO: 915978
gugagaugauaguagauag

SEQ ID NO: 1120961 - RNA, 19 nt, Artificial Sequence
  Description of Artificial Sequence: Synthetic oligonucleotide
  Antisense strand to SEQ ID NO: 1120960
cuaucuacuaucaucucac

SEQ ID NO: 1120962 - RNA, 19 nt, Artificial Sequence
  Description of Artificial Sequence: Synthetic oligonucleotide
  Sense strand starting at position 3313 of SEQ ID NO: 915978
gauaguagauaguccauua

SEQ ID NO: 1120963 - RNA, 19 nt, Artificial Sequence
  Description of Artificial Sequence: Synthetic oligonucleotide
  Antisense strand to SEQ ID NO: 1120962
uaauggacuaucuacuauc

SEQ ID NO: 1120964 - RNA, 19 nt, Artificial Sequence
  Description of Artificial Sequence: Synthetic oligonucleotide
  Sense strand starting at position 3413 of SEQ ID NO: 915978
cauggagguuaucuucuaa

SEQ ID NO: 1120965 - RNA, 19 nt, Artificial Sequence
  Description of Artificial Sequence: Synthetic oligonucleotide
  Antisense strand to SEQ ID NO: 1120964
uuagaagauaaccuccaug

SEQ ID NO: 1120966 - RNA, 19 nt, Artificial Sequence
  Description of Artificial Sequence: Synthetic oligonucleotide
  Sense strand starting at position 3857 of SEQ ID NO: 915978
gccaauuucuagcuccgga

SEQ ID NO: 1120967 - RNA, 19 nt, Artificial Sequence
  Description of Artificial Sequence: Synthetic oligonucleotide
  Antisense strand to SEQ ID NO: 1120966
uccggagcuagaaauuggc

SEQ ID NO: 1120968 - RNA, 19 nt, Artificial Sequence
  Description of Artificial Sequence: Synthetic oligonucleotide
  Sense strand starting at position 3905 of SEQ ID NO: 915978
aggugaaggugaaggaauu

SEQ ID NO: 1120969 - RNA, 19 nt, Artificial Sequence
  Description of Artificial Sequence: Synthetic oligonucleotide
  Antisense strand to SEQ ID NO: 1120968
aauuccuucaccuucaccu

SEQ ID NO: 1120970 - RNA, 19 nt, Artificial Sequence
  Description of Artificial Sequence: Synthetic oligonucleotide
  Sense strand starting at position 3911 of SEQ ID NO: 915978
aggugaaggaauuggcuua

SEQ ID NO: 1120971 - RNA, 19 nt, Artificial Sequence
  Description of Artificial Sequence: Synthetic oligonucleotide
  Antisense strand to SEQ ID NO: 1120970
uaagccaauuccuucaccu

SEQ ID NO: 1120972 - RNA, 19 nt, Artificial Sequence
  Description of Artificial Sequence: Synthetic oligonucleotide
  Sense strand starting at position 3912 of SEQ ID NO: 915978
ggugaaggaauuggcuuau

SEQ ID NO: 1120973 - RNA, 19 nt, Artificial Sequence
  Description of Artificial Sequence: Synthetic oligonucleotide
  Antisense strand to SEQ ID NO: 1120972
auaagccaauuccuucacc

SEQ ID NO: 1120974 - RNA, 19 nt, Artificial Sequence
  Description of Artificial Sequence: Synthetic oligonucleotide
  Sense strand starting at position 79 of SEQ ID NO: 915979
ucauuuguauuugguuaga

SEQ ID NO: 1120975 - RNA, 19 nt, Artificial Sequence
  Description of Artificial Sequence: Synthetic oligonucleotide
  Antisense strand to SEQ ID NO: 1120974
ucuaaccaaauacaaauga

SEQ ID NO: 1120976 - RNA, 19 nt, Artificial Sequence
  Description of Artificial Sequence: Synthetic oligonucleotide
  Sense strand starting at position 123 of SEQ ID NO: 915979
gggauuaauccuggagcuc

SEQ ID NO: 1120977 - RNA, 19 nt, Artificial Sequence
  Description of Artificial Sequence: Synthetic oligonucleotide
  Antisense strand to SEQ ID NO: 1120976
gagcuccaggauuaauccc

SEQ ID NO: 1120978 - RNA, 19 nt, Artificial Sequence
  Description of Artificial Sequence: Synthetic oligonucleotide
  Sense strand starting at position 172 of SEQ ID NO: 915979
gucuaacaacauuguagau

SEQ ID NO: 1120979 - RNA, 19 nt, Artificial Sequence
  Description of Artificial Sequence: Synthetic oligonucleotide
  Antisense strand to SEQ ID NO: 1120978
aucuacaauguuguuagac

SEQ ID NO: 1120980 - RNA, 19 nt, Artificial Sequence
  Description of Artificial Sequence: Synthetic oligonucleotide
  Sense strand starting at position 182 of SEQ ID NO: 915979
auuguagauuaccuagaga

SEQ ID NO: 1120981 - RNA, 19 nt, Artificial Sequence
  Description of Artificial Sequence: Synthetic oligonucleotide
  Antisense strand to SEQ ID NO: 1120980
ucucuagguaaucuacaau

SEQ ID NO: 1120982 - RNA, 19 nt, Artificial Sequence
  Description of Artificial Sequence: Synthetic oligonucleotide
  Sense strand starting at position 343 of SEQ ID NO: 915979
aggacuauguuguuaugaa

SEQ ID NO: 1120983 - RNA, 19 nt, Artificial Sequence
  Description of Artificial Sequence: Synthetic oligonucleotide
  Antisense strand to SEQ ID NO: 1120982
uucauaacaacauaguccu

SEQ ID NO: 1120984 - RNA, 19 nt, Artificial Sequence
  Description of Artificial Sequence: Synthetic oligonucleotide
  Sense strand starting at position 611 of SEQ ID NO: 915979
guggguaccuuauuagaac

SEQ ID NO: 1120985 - RNA, 19 nt, Artificial Sequence
  Description of Artificial Sequence: Synthetic oligonucleotide
  Antisense strand to SEQ ID NO: 1120984
guucuaauaagguacccac

SEQ ID NO: 1120986 - RNA, 19 nt, Artificial Sequence
  Description of Artificial Sequence: Synthetic oligonucleotide
  Sense strand starting at position 773 of SEQ ID NO: 915979
agcguauaauuugucagac

SEQ ID NO: 1120987 - RNA, 19 nt, Artificial Sequence
  Description of Artificial Sequence: Synthetic oligonucleotide
  Antisense strand to SEQ ID NO: 1120986
gucugacaaauuauacgcu

SEQ ID NO: 1120988 - RNA, 19 nt, Artificial Sequence
  Description of Artificial Sequence: Synthetic oligonucleotide
  Sense strand starting at position 774 of SEQ ID NO: 915979
gcguauaauuugucagacg

SEQ ID NO: 1120989 - RNA, 19 nt, Artificial Sequence
  Description of Artificial Sequence: Synthetic oligonucleotide
  Antisense strand to SEQ ID NO: 1120988
cgucugacaaauuauacgc

SEQ ID NO: 1120990 - RNA, 19 nt, Artificial Sequence
  Description of Artificial Sequence: Synthetic oligonucleotide
  Sense strand starting at position 793 of SEQ ID NO: 915979
ggcaauauggucuagugga

SEQ ID NO: 1120991 - RNA, 19 nt, Artificial Sequence
  Description of Artificial Sequence: Synthetic oligonucleotide
  Antisense strand to SEQ ID NO: 1120990
uccacuagaccauauugcc

SEQ ID NO: 1120992 - RNA, 19 nt, Artificial Sequence
  Description of Artificial Sequence: Synthetic oligonucleotide
  Sense strand starting at position 866 of SEQ ID NO: 915979
agggaaaugucucugggug

SEQ ID NO: 1120993 - RNA, 19 nt, Artificial Sequence
  Description of Artificial Sequence: Synthetic oligonucleotide
  Antisense strand to SEQ ID NO: 1120992
cacccagagacauuucccu

SEQ ID NO: 1120994 - RNA, 19 nt, Artificial Sequence
  Description of Artificial Sequence: Synthetic oligonucleotide
  Sense strand starting at position 881 of SEQ ID NO: 915979
gguguugccaguuucggua

SEQ ID NO: 1120995 - RNA, 19 nt, Artificial Sequence
  Description of Artificial Sequence: Synthetic oligonucleotide
  Antisense strand to SEQ ID NO: 1120994
uaccgaaacuggcaacacc

SEQ ID NO: 1120996 - RNA, 19 nt, Artificial Sequence
  Description of Artificial Sequence: Synthetic oligonucleotide
  Sense strand starting at position 897 of SEQ ID NO: 915979
guaucuguggauugauaag

SEQ ID NO: 1120997 - RNA, 19 nt, Artificial Sequence
  Description of Artificial Sequence: Synthetic oligonucleotide
  Antisense strand to SEQ ID NO: 1120996
cuuaucaauccacagauac

SEQ ID NO: 1120998 - RNA, 19 nt, Artificial Sequence
  Description of Artificial Sequence: Synthetic oligonucleotide
  Sense strand starting at position 903 of SEQ ID NO: 915979
guggauugauaagcagauc

SEQ ID NO: 1120999 - RNA, 19 nt, Artificial Sequence
  Description of Artificial Sequence: Synthetic oligonucleotide
  Antisense strand to SEQ ID NO: 1120998
gaucugcuuaucaauccac

SEQ ID NO: 1121000 - RNA, 19 nt, Artificial Sequence
  Description of Artificial Sequence: Synthetic oligonucleotide
  Sense strand starting at position 906 of SEQ ID NO: 915979
gauugauaagcagaucgca

SEQ ID NO: 1121001 - RNA, 19 nt, Artificial Sequence
  Description of Artificial Sequence: Synthetic oligonucleotide
  Antisense strand to SEQ ID NO: 1121000
ugcgaucugcuuaucaauc

SEQ ID NO: 1121002 - RNA, 19 nt, Artificial Sequence
  Description of Artificial Sequence: Synthetic oligonucleotide
  Sense strand starting at position 989 of SEQ ID NO: 915979
guuacuuggucauuucuuu

SEQ ID NO: 1121003 - RNA, 19 nt, Artificial Sequence
  Description of Artificial Sequence: Synthetic oligonucleotide
  Antisense strand to SEQ ID NO: 1121002
aaagaaaugaccaaguaac

SEQ ID NO: 1121004 - RNA, 19 nt, Artificial Sequence
  Description of Artificial Sequence: Synthetic oligonucleotide
  Sense strand starting at position 1014 of SEQ ID NO: 915979
gcuauuuggugcuuuaaga

SEQ ID NO: 1121005 - RNA, 19 nt, Artificial Sequence
  Description of Artificial Sequence: Synthetic oligonucleotide
  Antisense strand to SEQ ID NO: 1121004
ucuuaaagcaccaaauagc

SEQ ID NO: 1121006 - RNA, 19 nt, Artificial Sequence
  Description of Artificial Sequence: Synthetic oligonucleotide
  Sense strand starting at position 1038 of SEQ ID NO: 915979
ucuaguauuggauaaguua

SEQ ID NO: 1121007 - RNA, 19 nt, Artificial Sequence
  Description of Artificial Sequence: Synthetic oligonucleotide
  Antisense strand to SEQ ID NO: 1121006
uaacuuauccaauacuaga

SEQ ID NO: 1121008 - RNA, 19 nt, Artificial Sequence
  Description of Artificial Sequence: Synthetic oligonucleotide
  Sense strand starting at position 1041 of SEQ ID NO: 915979
aguauuggauaaguuaaag

SEQ ID NO: 1121009 - RNA, 19 nt, Artificial Sequence
  Description of Artificial Sequence: Synthetic oligonucleotide
  Antisense strand to SEQ ID NO: 1121008
cuuuaacuuauccaauacu

SEQ ID NO: 1121010 - RNA, 19 nt, Artificial Sequence
  Description of Artificial Sequence: Synthetic oligonucleotide
  Sense strand starting at position 1047 of SEQ ID NO: 915979
ggauaaguuaaaggaguuu

SEQ ID NO: 1121011 - RNA, 19 nt, Artificial Sequence
  Description of Artificial Sequence: Synthetic oligonucleotide
  Antisense strand to SEQ ID NO: 1121010
aaacuccuuuaacuuaucc

SEQ ID NO: 1121012 - RNA, 19 nt, Artificial Sequence
  Description of Artificial Sequence: Synthetic oligonucleotide
  Sense strand starting at position 1100 of SEQ ID NO: 915979
cagaaugugcuacaugguu

SEQ ID NO: 1121013 - RNA, 19 nt, Artificial Sequence
  Description of Artificial Sequence: Synthetic oligonucleotide
  Antisense strand to SEQ ID NO: 1121012
aaccauguagcacauucug

SEQ ID NO: 1121014 - RNA, 19 nt, Artificial Sequence
  Description of Artificial Sequence: Synthetic oligonucleotide
  Sense strand starting at position 1169 of SEQ ID NO: 915979
aggucauugcaugauauug

SEQ ID NO: 1121015 - RNA, 19 nt, Artificial Sequence
  Description of Artificial Sequence: Synthetic oligonucleotide
  Antisense strand to SEQ ID NO: 1121014
caauaucaugcaaugaccu

SEQ ID NO: 1121016 - RNA, 19 nt, Artificial Sequence
  Description of Artificial Sequence: Synthetic oligonucleotide
  Sense strand starting at position 1718 of SEQ ID NO: 915979
guauaaucaggaugagcuu

SEQ ID NO: 1121017 - RNA, 19 nt, Artificial Sequence
  Description of Artificial Sequence: Synthetic oligonucleotide
  Antisense strand to SEQ ID NO: 1121016
aagcucauccugauuauac

SEQ ID NO: 1121018 - RNA, 19 nt, Artificial Sequence
  Description of Artificial Sequence: Synthetic oligonucleotide
  Sense strand starting at position 2433 of SEQ ID NO: 915979
gguagcugagagugauaaa

SEQ ID NO: 1121019 - RNA, 19 nt, Artificial Sequence
  Description of Artificial Sequence: Synthetic oligonucleotide
  Antisense strand to SEQ ID NO: 1121018
uuuaucacucucagcuacc

SEQ ID NO: 1121020 - RNA, 19 nt, Artificial Sequence
  Description of Artificial Sequence: Synthetic oligonucleotide
  Sense strand starting at position 2434 of SEQ ID NO: 915979
guagcugagagugauaaag

SEQ ID NO: 1121021 - RNA, 19 nt, Artificial Sequence
  Description of Artificial Sequence: Synthetic oligonucleotide
  Antisense strand to SEQ ID NO: 1121020
cuuuaucacucucagcuac

SEQ ID NO: 1121022 - RNA, 19 nt, Artificial Sequence
  Description of Artificial Sequence: Synthetic oligonucleotide
  Sense strand starting at position 2620 of SEQ ID NO: 915979
accugaauucuugaagcua

SEQ ID NO: 1121023 - RNA, 19 nt, Artificial Sequence
  Description of Artificial Sequence: Synthetic oligonucleotide
  Antisense strand to SEQ ID NO: 1121022
uagcuucaagaauucaggu

SEQ ID NO: 1121024 - RNA, 19 nt, Artificial Sequence
  Description of Artificial Sequence: Synthetic oligonucleotide
  Sense strand starting at position 2729 of SEQ ID NO: 915979
augugucacucugcuauuu

SEQ ID NO: 1121025 - RNA, 19 nt, Artificial Sequence
  Description of Artificial Sequence: Synthetic oligonucleotide
  Antisense strand to SEQ ID NO: 1121024
aaauagcagagugacacau

SEQ ID NO: 1121026 - RNA, 19 nt, Artificial Sequence
  Description of Artificial Sequence: Synthetic oligonucleotide
  Sense strand starting at position 2819 of SEQ ID NO: 915979
gguuaacugaauuguggga

SEQ ID NO: 1121027 - RNA, 19 nt, Artificial Sequence
  Description of Artificial Sequence: Synthetic oligonucleotide
  Antisense strand to SEQ ID NO: 1121026
ucccacaauucaguuaacc

SEQ ID NO: 1121028 - RNA, 19 nt, Artificial Sequence
  Description of Artificial Sequence: Synthetic oligonucleotide
  Sense strand starting at position 2826 of SEQ ID NO: 915979
ugaauugugggaggaaagu

SEQ ID NO: 1121029 - RNA, 19 nt, Artificial Sequence
  Description of Artificial Sequence: Synthetic oligonucleotide
  Antisense strand to SEQ ID NO: 1121028
acuuuccucccacaauuca

SEQ ID NO: 1121030 - RNA, 19 nt, Artificial Sequence
  Description of Artificial Sequence: Synthetic oligonucleotide
  Sense strand starting at position 2835 of SEQ ID NO: 915979
ggaggaaaguuucuagccu

SEQ ID NO: 1121031 - RNA, 19 nt, Artificial Sequence
  Description of Artificial Sequence: Synthetic oligonucleotide
  Antisense strand to SEQ ID NO: 1121030
aggcuagaaacuuuccucc

SEQ ID NO: 1121032 - RNA, 19 nt, Artificial Sequence
  Description of Artificial Sequence: Synthetic oligonucleotide
  Sense strand starting at position 2882 of SEQ ID NO: 915979
aaagguugcggaugacaga

SEQ ID NO: 1121033 - RNA, 19 nt, Artificial Sequence
  Description of Artificial Sequence: Synthetic oligonucleotide
  Antisense strand to SEQ ID NO: 1121032
ucugucauccgcaaccuuu

SEQ ID NO: 1121034 - RNA, 19 nt, Artificial Sequence
  Description of Artificial Sequence: Synthetic oligonucleotide
  Sense strand starting at position 2895 of SEQ ID NO: 915979
gacagacuugcugagcauu

SEQ ID NO: 1121035 - RNA, 19 nt, Artificial Sequence
  Description of Artificial Sequence: Synthetic oligonucleotide
  Antisense strand to SEQ ID NO: 1121034
aaugcucagcaagucuguc

SEQ ID NO: 1121036 - RNA, 19 nt, Artificial Sequence
  Description of Artificial Sequence: Synthetic oligonucleotide
  Sense strand starting at position 3128 of SEQ ID NO: 915979
gggaaugucucagugaaca

SEQ ID NO: 1121037 - RNA, 19 nt, Artificial Sequence
  Description of Artificial Sequence: Synthetic oligonucleotide
  Antisense strand to SEQ ID NO: 1121036
uguucacugagacauuccc

SEQ ID NO: 1121038 - RNA, 19 nt, Artificial Sequence
  Description of Artificial Sequence: Synthetic oligonucleotide
  Sense strand starting at position 3183 of SEQ ID NO: 915979
gcaucuaaucauuagugaa

SEQ ID NO: 1121039 - RNA, 19 nt, Artificial Sequence
  Description of Artificial Sequence: Synthetic oligonucleotide
  Antisense strand to SEQ ID NO: 1121038
uucacuaaugauuagaugc

SEQ ID NO: 1121040 - RNA, 19 nt, Artificial Sequence
  Description of Artificial Sequence: Synthetic oligonucleotide
  Sense strand starting at position 3376 of SEQ ID NO: 915979
ugaucuaagguuuggaagu

SEQ ID NO: 1121041 - RNA, 19 nt, Artificial Sequence
  Description of Artificial Sequence: Synthetic oligonucleotide
  Antisense strand to SEQ ID NO: 1121040
acuuccaaaccuuagauca

SEQ ID NO: 1121042 - RNA, 19 nt, Artificial Sequence
  Description of Artificial Sequence: Synthetic oligonucleotide
  Sense strand starting at position 3475 of SEQ ID NO: 915979
ucuguuuggaguuagaauu

SEQ ID NO: 1121043 - RNA, 19 nt, Artificial Sequence
  Description of Artificial Sequence: Synthetic oligonucleotide
  Antisense strand to SEQ ID NO: 1121042
aauucuaacuccaaacaga

SEQ ID NO: 1121044 - RNA, 19 nt, Artificial Sequence
  Description of Artificial Sequence: Synthetic oligonucleotide
  Sense strand starting at position 3613 of SEQ ID NO: 915979
cuuucuuagugauugaaua

SEQ ID NO: 1121045 - RNA, 19 nt, Artificial Sequence
  Description of Artificial Sequence: Synthetic oligonucleotide
  Antisense strand to SEQ ID NO: 1121044
uauucaaucacuaagaaag

SEQ ID NO: 1121046 - RNA, 19 nt, Artificial Sequence
  Description of Artificial Sequence: Synthetic oligonucleotide
  Sense strand starting at position 3708 of SEQ ID NO: 915979
auuguacauacguaguaga

SEQ ID NO: 1121047 - RNA, 19 nt, Artificial Sequence
  Description of Artificial Sequence: Synthetic oligonucleotide
  Antisense strand to SEQ ID NO: 1121046
ucuacuacguauguacaau

SEQ ID NO: 1121048 - RNA, 19 nt, Artificial Sequence
  Description of Artificial Sequence: Synthetic oligonucleotide
  Sense strand starting at position 3724 of SEQ ID NO: 915979
agauuaacucauugaaguc

SEQ ID NO: 1121049 - RNA, 19 nt, Artificial Sequence
  Description of Artificial Sequence: Synthetic oligonucleotide
  Antisense strand to SEQ ID NO: 1121048
gacuucaaugaguuaaucu

SEQ ID NO: 1121050 - RNA, 19 nt, Artificial Sequence
  Description of Artificial Sequence: Synthetic oligonucleotide
  Sense strand starting at position 3780 of SEQ ID NO: 915979
ggaugucuuagagguugau

SEQ ID NO: 1121051 - RNA, 19 nt, Artificial Sequence
  Description of Artificial Sequence: Synthetic oligonucleotide
  Antisense strand to SEQ ID NO: 1121050
aucaaccucuaagacaucc

SEQ ID NO: 1121052 - RNA, 19 nt, Artificial Sequence
  Description of Artificial Sequence: Synthetic oligonucleotide
  Sense strand starting at position 3964 of SEQ ID NO: 915979
gagcuuugacuguauggaa

SEQ ID NO: 1121053 - RNA, 19 nt, Artificial Sequence
  Description of Artificial Sequence: Synthetic oligonucleotide
  Antisense strand to SEQ ID NO: 1121052
uuccauacagucaaagcuc

SEQ ID NO: 1121054 - RNA, 19 nt, Artificial Sequence
  Description of Artificial Sequence: Synthetic oligonucleotide
  Sense strand starting at position 157 of SEQ ID NO: 915980
ugaagacuuccaugcauag

SEQ ID NO: 1121055 - RNA, 19 nt, Artificial Sequence
  Description of Artificial Sequence: Synthetic oligonucleotide
  Antisense strand to SEQ ID NO: 1121054
cuaugcauggaagucuuca

SEQ ID NO: 1121056 - RNA, 19 nt, Artificial Sequence
  Description of Artificial Sequence: Synthetic oligonucleotide
  Sense strand starting at position 257 of SEQ ID NO: 915980
gaggaaguaucuuuaaacu

SEQ ID NO: 1121057 - RNA, 19 nt, Artificial Sequence
  Description of Artificial Sequence: Synthetic oligonucleotide
  Antisense strand to SEQ ID NO: 1121056
aguuuaaagauacuuccuc

SEQ ID NO: 1121058 - RNA, 19 nt, Artificial Sequence
  Description of Artificial Sequence: Synthetic oligonucleotide
  Sense strand starting at position 411 of SEQ ID NO: 915980
ccuggaaaccuguagucau

SEQ ID NO: 1121059 - RNA, 19 nt, Artificial Sequence
  Description of Artificial Sequence: Synthetic oligonucleotide
  Antisense strand to SEQ ID NO: 1121058
augacuacagguuuccagg

SEQ ID NO: 1121060 - RNA, 19 nt, Artificial Sequence
  Description of Artificial Sequence: Synthetic oligonucleotide
  Sense strand starting at position 414 of SEQ ID NO: 915980
ggaaaccuguagucauuaa

SEQ ID NO: 1121061 - RNA, 19 nt, Artificial Sequence
  Description of Artificial Sequence: Synthetic oligonucleotide
  Antisense strand to SEQ ID NO: 1121060
uuaaugacuacagguuucc

SEQ ID NO: 1121062 - RNA, 19 nt, Artificial Sequence
  Description of Artificial Sequence: Synthetic oligonucleotide
  Sense strand starting at position 418 of SEQ ID NO: 915980
accuguagucauuaaacac

SEQ ID NO: 1121063 - RNA, 19 nt, Artificial Sequence
  Description of Artificial Sequence: Synthetic oligonucleotide
  Antisense strand to SEQ ID NO: 1121062
guguuuaaugacuacaggu

SEQ ID NO: 1121064 - RNA, 19 nt, Artificial Sequence
  Description of Artificial Sequence: Synthetic oligonucleotide
  Sense strand starting at position 432 of SEQ ID NO: 915980
aacacuagccaucgggaau

SEQ ID NO: 1121065 - RNA, 19 nt, Artificial Sequence
  Description of Artificial Sequence: Synthetic oligonucleotide
  Antisense strand to SEQ ID NO: 1121064
auucccgauggcuaguguu

SEQ ID NO: 1121066 - RNA, 19 nt, Artificial Sequence
  Description of Artificial Sequence: Synthetic oligonucleotide
  Sense strand starting at position 433 of SEQ ID NO: 915980
acacuagccaucgggaaua

SEQ ID NO: 1121067 - RNA, 19 nt, Artificial Sequence
  Description of Artificial Sequence: Synthetic oligonucleotide
  Antisense strand to SEQ ID NO: 1121066
uauucccgauggcuagugu

SEQ ID NO: 1121068 - RNA, 19 nt, Artificial Sequence
  Description of Artificial Sequence: Synthetic oligonucleotide
  Sense strand starting at position 598 of SEQ ID NO: 915980
uccagucuauuauuauaga

SEQ ID NO: 1121069 - RNA, 19 nt, Artificial Sequence
  Description of Artificial Sequence: Synthetic oligonucleotide
  Antisense strand to SEQ ID NO: 1121068
ucuauaauaauagacugga

SEQ ID NO: 1121070 - RNA, 19 nt, Artificial Sequence
  Description of Artificial Sequence: Synthetic oligonucleotide
  Sense strand starting at position 1174 of SEQ ID NO: 915980
gucugaugucaagaucuuc

SEQ ID NO: 1121071 - RNA, 19 nt, Artificial Sequence
  Description of Artificial Sequence: Synthetic oligonucleotide
  Antisense strand to SEQ ID NO: 1121070
gaagaucuugacaucagac

SEQ ID NO: 1121072 - RNA, 19 nt, Artificial Sequence
  Description of Artificial Sequence: Synthetic oligonucleotide
  Sense strand starting at position 1274 of SEQ ID NO: 915980
gaugaaauguaguugguaa

SEQ ID NO: 1121073 - RNA, 19 nt, Artificial Sequence
  Description of Artificial Sequence: Synthetic oligonucleotide
  Antisense strand to SEQ ID NO: 1121072
uuaccaacuacauuucauc

SEQ ID NO: 1121074 - RNA, 19 nt, Artificial Sequence
  Description of Artificial Sequence: Synthetic oligonucleotide
  Sense strand starting at position 1275 of SEQ ID NO: 915980
augaaauguaguugguaaa

SEQ ID NO: 1121075 - RNA, 19 nt, Artificial Sequence
  Description of Artificial Sequence: Synthetic oligonucleotide
  Antisense strand to SEQ ID NO: 1121074
uuuaccaacuacauuucau

SEQ ID NO: 1121076 - RNA, 19 nt, Artificial Sequence
  Description of Artificial Sequence: Synthetic oligonucleotide
  Sense strand starting at position 1276 of SEQ ID NO: 915980
ugaaauguaguugguaaac

SEQ ID NO: 1121077 - RNA, 19 nt, Artificial Sequence
  Description of Artificial Sequence: Synthetic oligonucleotide
  Antisense strand to SEQ ID NO: 1121076
guuuaccaacuacauuuca

SEQ ID NO: 1121078 - RNA, 19 nt, Artificial Sequence
  Description of Artificial Sequence: Synthetic oligonucleotide
  Sense strand starting at position 1366 of SEQ ID NO: 915980
uugaaauaccgaggagcuu

SEQ ID NO: 1121079 - RNA, 19 nt, Artificial Sequence
  Description of Artificial Sequence: Synthetic oligonucleotide
  Antisense strand to SEQ ID NO: 1121078
aagcuccucgguauuucaa

SEQ ID NO: 1121080 - RNA, 19 nt, Artificial Sequence
  Description of Artificial Sequence: Synthetic oligonucleotide
  Sense strand starting at position 1367 of SEQ ID NO: 915980
ugaaauaccgaggagcuuu

SEQ ID NO: 1121081 - RNA, 19 nt, Artificial Sequence
  Description of Artificial Sequence: Synthetic oligonucleotide
  Antisense strand to SEQ ID NO: 1121080
aaagcuccucgguauuuca

SEQ ID NO: 1121082 - RNA, 19 nt, Artificial Sequence
  Description of Artificial Sequence: Synthetic oligonucleotide
  Sense strand starting at position 1437 of SEQ ID NO: 915980
auguguugcgggucuacga

SEQ ID NO: 1121083 - RNA, 19 nt, Artificial Sequence
  Description of Artificial Sequence: Synthetic oligonucleotide
  Antisense strand to SEQ ID NO: 1121082
ucguagacccgcaacacau

SEQ ID NO: 1121084 - RNA, 19 nt, Artificial Sequence
  Description of Artificial Sequence: Synthetic oligonucleotide
  Sense strand starting at position 1440 of SEQ ID NO: 915980
uguugcgggucuacgaauu

SEQ ID NO: 1121085 - RNA, 19 nt, Artificial Sequence
  Description of Artificial Sequence: Synthetic oligonucleotide
  Antisense strand to SEQ ID NO: 1121084
aauucguagacccgcaaca

SEQ ID NO: 1121086 - RNA, 19 nt, Artificial Sequence
  Description of Artificial Sequence: Synthetic oligonucleotide
  Sense strand starting at position 1458 of SEQ ID NO: 915980
ucuaacucucgagaauggu

SEQ ID NO: 1121087 - RNA, 19 nt, Artificial Sequence
  Description of Artificial Sequence: Synthetic oligonucleotide
  Antisense strand to SEQ ID NO: 1121086
accauucucgagaguuaga

SEQ ID NO: 1121088 - RNA, 19 nt, Artificial Sequence
  Description of Artificial Sequence: Synthetic oligonucleotide
  Sense strand starting at position 1527 of SEQ ID NO: 915980
uggccuauuccuguguugu

SEQ ID NO: 1121089 - RNA, 19 nt, Artificial Sequence
  Description of Artificial Sequence: Synthetic oligonucleotide
  Antisense strand to SEQ ID NO: 1121088
acaacacaggaauaggcca

SEQ ID NO: 1121090 - RNA, 19 nt, Artificial Sequence
  Description of Artificial Sequence: Synthetic oligonucleotide
  Sense strand starting at position 1565 of SEQ ID NO: 915980
uauuccuggguguagaaau

SEQ ID NO: 1121091 - RNA, 19 nt, Artificial Sequence
  Description of Artificial Sequence: Synthetic oligonucleotide
  Antisense strand to SEQ ID NO: 1121090
auuucuacacccaggaaua

SEQ ID NO: 1121092 - RNA, 19 nt, Artificial Sequence
  Description of Artificial Sequence: Synthetic oligonucleotide
  Sense strand starting at position 1657 of SEQ ID NO: 915980
ugucaacauguuuacauau

SEQ ID NO: 1121093 - RNA, 19 nt, Artificial Sequence
  Description of Artificial Sequence: Synthetic oligonucleotide
  Antisense strand to SEQ ID NO: 1121092
auauguaaacauguugaca

SEQ ID NO: 1121094 - RNA, 19 nt, Artificial Sequence
  Description of Artificial Sequence: Synthetic oligonucleotide
  Sense strand starting at position 1699 of SEQ ID NO: 915980
guuaacuguguagagcaaa

SEQ ID NO: 1121095 - RNA, 19 nt, Artificial Sequence
  Description of Artificial Sequence: Synthetic oligonucleotide
  Antisense strand to SEQ ID NO: 1121094
uuugcucuacacaguuaac

SEQ ID NO: 1121096 - RNA, 19 nt, Artificial Sequence
  Description of Artificial Sequence: Synthetic oligonucleotide
  Sense strand starting at position 1943 of SEQ ID NO: 915980
ugaauuccagcuuauguga

SEQ ID NO: 1121097 - RNA, 19 nt, Artificial Sequence
  Description of Artificial Sequence: Synthetic oligonucleotide
  Antisense strand to SEQ ID NO: 1121096
ucacauaagcuggaauuca

SEQ ID NO: 1121098 - RNA, 19 nt, Artificial Sequence
  Description of Artificial Sequence: Synthetic oligonucleotide
  Sense strand starting at position 1971 of SEQ ID NO: 915980
acaucuugcaggugaugaa

SEQ ID NO: 1121099 - RNA, 19 nt, Artificial Sequence
  Description of Artificial Sequence: Synthetic oligonucleotide
  Antisense strand to SEQ ID NO: 1121098
uucaucaccugcaagaugu

SEQ ID NO: 1121100 - RNA, 19 nt, Artificial Sequence
  Description of Artificial Sequence: Synthetic oligonucleotide
  Sense strand starting at position 1972 of SEQ ID NO: 915980
caucuugcaggugaugaaa

SEQ ID NO: 1121101 - RNA, 19 nt, Artificial Sequence
  Description of Artificial Sequence: Synthetic oligonucleotide
  Antisense strand to SEQ ID NO: 1121100
uuucaucaccugcaagaug

SEQ ID NO: 1121102 - RNA, 19 nt, Artificial Sequence
  Description of Artificial Sequence: Synthetic oligonucleotide
  Sense strand starting at position 2016 of SEQ ID NO: 915980
gguguuuagccuguucuuu

SEQ ID NO: 1121103 - RNA, 19 nt, Artificial Sequence
  Description of Artificial Sequence: Synthetic oligonucleotide
  Antisense strand to SEQ ID NO: 1121102
aaagaacaggcuaaacacc

SEQ ID NO: 1121104 - RNA, 19 nt, Artificial Sequence
  Description of Artificial Sequence: Synthetic oligonucleotide
  Sense strand starting at position 2017 of SEQ ID NO: 915980
guguuuagccuguucuuua

SEQ ID NO: 1121105 - RNA, 19 nt, Artificial Sequence
  Description of Artificial Sequence: Synthetic oligonucleotide
  Antisense strand to SEQ ID NO: 1121104
uaaagaacaggcuaaacac

SEQ ID NO: 1121106 - RNA, 19 nt, Artificial Sequence
  Description of Artificial Sequence: Synthetic oligonucleotide
  Sense strand starting at position 2028 of SEQ ID NO: 915980
guucuuuaagacuaugggu

SEQ ID NO: 1121107 - RNA, 19 nt, Artificial Sequence
  Description of Artificial Sequence: Synthetic oligonucleotide
  Antisense strand to SEQ ID NO: 1121106
acccauagucuuaaagaac

SEQ ID NO: 1121108 - RNA, 19 nt, Artificial Sequence
  Description of Artificial Sequence: Synthetic oligonucleotide
  Sense strand starting at position 2030 of SEQ ID NO: 915980
ucuuuaagacuauggguca

SEQ ID NO: 1121109 - RNA, 19 nt, Artificial Sequence
  Description of Artificial Sequence: Synthetic oligonucleotide
  Antisense strand to SEQ ID NO: 1121108
ugacccauagucuuaaaga

SEQ ID NO: 1121110 - RNA, 19 nt, Artificial Sequence
  Description of Artificial Sequence: Synthetic oligonucleotide
  Sense strand starting at position 2226 of SEQ ID NO: 915980
ugagaucauuagccuguga

SEQ ID NO: 1121111 - RNA, 19 nt, Artificial Sequence
  Description of Artificial Sequence: Synthetic oligonucleotide
  Antisense strand to SEQ ID NO: 1121110
ucacaggcuaaugaucuca

SEQ ID NO: 1121112 - RNA, 19 nt, Artificial Sequence
  Description of Artificial Sequence: Synthetic oligonucleotide
  Sense strand starting at position 2228 of SEQ ID NO: 915980
agaucauuagccugugaau

SEQ ID NO: 1121113 - RNA, 19 nt, Artificial Sequence
  Description of Artificial Sequence: Synthetic oligonucleotide
  Antisense strand to SEQ ID NO: 1121112
auucacaggcuaaugaucu

SEQ ID NO: 1121114 - RNA, 19 nt, Artificial Sequence
  Description of Artificial Sequence: Synthetic oligonucleotide
  Sense strand starting at position 2363 of SEQ ID NO: 915980
accagugugcaacagagau

SEQ ID NO: 1121115 - RNA, 19 nt, Artificial Sequence
  Description of Artificial Sequence: Synthetic oligonucleotide
  Antisense strand to SEQ ID NO: 1121114
aucucuguugcacacuggu

SEQ ID NO: 1121116 - RNA, 19 nt, Artificial Sequence
  Description of Artificial Sequence: Synthetic oligonucleotide
  Sense strand starting at position 2473 of SEQ ID NO: 915980
aacgauuuauuauagagag

SEQ ID NO: 1121117 - RNA, 19 nt, Artificial Sequence
  Description of Artificial Sequence: Synthetic oligonucleotide
  Antisense strand to SEQ ID NO: 1121116
cucucuauaauaaaucguu

SEQ ID NO: 1121118 - RNA, 19 nt, Artificial Sequence
  Description of Artificial Sequence: Synthetic oligonucleotide
  Sense strand starting at position 2701 of SEQ ID NO: 915980
gaaguuuacucagucuuag

SEQ ID NO: 1121119 - RNA, 19 nt, Artificial Sequence
  Description of Artificial Sequence: Synthetic oligonucleotide
  Antisense strand to SEQ ID NO: 1121118
cuaagacugaguaaacuuc

SEQ ID NO: 1121120 - RNA, 19 nt, Artificial Sequence
  Description of Artificial Sequence: Synthetic oligonucleotide
  Sense strand starting at position 3031 of SEQ ID NO: 915980
aguguaauagugcaaauuc

SEQ ID NO: 1121121 - RNA, 19 nt, Artificial Sequence
  Description of Artificial Sequence: Synthetic oligonucleotide
  Antisense strand to SEQ ID NO: 1121120
gaauuugcacuauuacacu

SEQ ID NO: 1121122 - RNA, 19 nt, Artificial Sequence
  Description of Artificial Sequence: Synthetic oligonucleotide
  Sense strand starting at position 3052 of SEQ ID NO: 915980
cugcgagauuuacugcaga

SEQ ID NO: 1121123 - RNA, 19 nt, Artificial Sequence
  Description of Artificial Sequence: Synthetic oligonucleotide
  Antisense strand to SEQ ID NO: 1121122
ucugcaguaaaucucgcag

SEQ ID NO: 1121124 - RNA, 19 nt, Artificial Sequence
  Description of Artificial Sequence: Synthetic oligonucleotide
  Sense strand starting at position 3122 of SEQ ID NO: 915980
uagguaugucugggagaaa

SEQ ID NO: 1121125 - RNA, 19 nt, Artificial Sequence
  Description of Artificial Sequence: Synthetic oligonucleotide
  Antisense strand to SEQ ID NO: 1121124
uuucucccagacauaccua

SEQ ID NO: 1121126 - RNA, 19 nt, Artificial Sequence
  Description of Artificial Sequence: Synthetic oligonucleotide
  Sense strand starting at position 3414 of SEQ ID NO: 915980
cugauacagucaucauauu

SEQ ID NO: 1121127 - RNA, 19 nt, Artificial Sequence
  Description of Artificial Sequence: Synthetic oligonucleotide
  Antisense strand to SEQ ID NO: 1121126
aauaugaugacuguaucag

SEQ ID NO: 1121128 - RNA, 19 nt, Artificial Sequence
  Description of Artificial Sequence: Synthetic oligonucleotide
  Sense strand starting at position 3617 of SEQ ID NO: 915980
gugaguucacuugggagaa

SEQ ID NO: 1121129 - RNA, 19 nt, Artificial Sequence
  Description of Artificial Sequence: Synthetic oligonucleotide
  Antisense strand to SEQ ID NO: 1121128
uucucccaagugaacucac

SEQ ID NO: 1121130 - RNA, 19 nt, Artificial Sequence
  Description of Artificial Sequence: Synthetic oligonucleotide
  Sense strand starting at position 3750 of SEQ ID NO: 915980
cugggaaccagugauguuu

SEQ ID NO: 1121131 - RNA, 19 nt, Artificial Sequence
  Description of Artificial Sequence: Synthetic oligonucleotide
  Antisense strand to SEQ ID NO: 1121130
aaacaucacugguucccag

SEQ ID NO: 1121132 - RNA, 19 nt, Artificial Sequence
  Description of Artificial Sequence: Synthetic oligonucleotide
  Sense strand starting at position 3756 of SEQ ID NO: 915980
accagugauguuuauaaug

SEQ ID NO: 1121133 - RNA, 19 nt, Artificial Sequence
  Description of Artificial Sequence: Synthetic oligonucleotide
  Antisense strand to SEQ ID NO: 1121132
cauuauaaacaucacuggu

SEQ ID NO: 1121134 - RNA, 19 nt, Artificial Sequence
  Description of Artificial Sequence: Synthetic oligonucleotide
  Sense strand starting at position 54 of SEQ ID NO: 915981
gcaugucaucaacacguga

SEQ ID NO: 1121135 - RNA, 19 nt, Artificial Sequence
  Description of Artificial Sequence: Synthetic oligonucleotide
  Antisense strand to SEQ ID NO: 1121134
ucacguguugaugacaugc

SEQ ID NO: 1121136 - RNA, 19 nt, Artificial Sequence
  Description of Artificial Sequence: Synthetic oligonucleotide
  Sense strand starting at position 202 of SEQ ID NO: 915981
ccagauauguguguccaca

SEQ ID NO: 1121137 - RNA, 19 nt, Artificial Sequence
  Description of Artificial Sequence: Synthetic oligonucleotide
  Antisense strand to SEQ ID NO: 1121136
uguggacacacauaucugg

SEQ ID NO: 1121138 - RNA, 19 nt, Artificial Sequence
  Description of Artificial Sequence: Synthetic oligonucleotide
  Sense strand starting at position 218 of SEQ ID NO: 915981
acagucuuuagugaggcau

SEQ ID NO: 1121139 - RNA, 19 nt, Artificial Sequence
  Description of Artificial Sequence: Synthetic oligonucleotide
  Antisense strand to SEQ ID NO: 1121138
augccucacuaaagacugu

SEQ ID NO: 1121140 - RNA, 19 nt, Artificial Sequence
  Description of Artificial Sequence: Synthetic oligonucleotide
  Sense strand starting at position 253 of SEQ ID NO: 915981
cucugagaucuccagcagu

SEQ ID NO: 1121141 - RNA, 19 nt, Artificial Sequence
  Description of Artificial Sequence: Synthetic oligonucleotide
  Antisense strand to SEQ ID NO: 1121140
acugcuggagaucucagag

SEQ ID NO: 1121142 - RNA, 19 nt, Artificial Sequence
  Description of Artificial Sequence: Synthetic oligonucleotide
  Sense strand starting at position 270 of SEQ ID NO: 915981
gugucuguuauugcgagca

SEQ ID NO: 1121143 - RNA, 19 nt, Artificial Sequence
  Description of Artificial Sequence: Synthetic oligonucleotide
  Antisense strand to SEQ ID NO: 1121142
ugcucgcaauaacagacac

SEQ ID NO: 1121144 - RNA, 19 nt, Artificial Sequence
  Description of Artificial Sequence: Synthetic oligonucleotide
  Sense strand starting at position 322 of SEQ ID NO: 915981
gauggucugaaagguacuu

SEQ ID NO: 1121145 - RNA, 19 nt, Artificial Sequence
  Description of Artificial Sequence: Synthetic oligonucleotide
  Antisense strand to SEQ ID NO: 1121144
aaguaccuuucagaccauc

SEQ ID NO: 1121146 - RNA, 19 nt, Artificial Sequence
  Description of Artificial Sequence: Synthetic oligonucleotide
  Sense strand starting at position 324 of SEQ ID NO: 915981
uggucugaaagguacuuua

SEQ ID NO: 1121147 - RNA, 19 nt, Artificial Sequence
  Description of Artificial Sequence: Synthetic oligonucleotide
  Antisense strand to SEQ ID NO: 1121146
uaaaguaccuuucagacca

SEQ ID NO: 1121148 - RNA, 19 nt, Artificial Sequence
  Description of Artificial Sequence: Synthetic oligonucleotide
  Sense strand starting at position 327 of SEQ ID NO: 915981
ucugaaagguacuuuaugu

SEQ ID NO: 1121149 - RNA, 19 nt, Artificial Sequence
  Description of Artificial Sequence: Synthetic oligonucleotide
  Antisense strand to SEQ ID NO: 1121148
acauaaaguaccuuucaga

SEQ ID NO: 1121150 - RNA, 19 nt, Artificial Sequence
  Description of Artificial Sequence: Synthetic oligonucleotide
  Sense strand starting at position 490 of SEQ ID NO: 915981
uuugccuuuccuugaggau

SEQ ID NO: 1121151 - RNA, 19 nt, Artificial Sequence
  Description of Artificial Sequence: Synthetic oligonucleotide
  Antisense strand to SEQ ID NO: 1121150
auccucaaggaaaggcaaa

SEQ ID NO: 1121152 - RNA, 19 nt, Artificial Sequence
  Description of Artificial Sequence: Synthetic oligonucleotide
  Sense strand starting at position 491 of SEQ ID NO: 915981
uugccuuuccuugaggaua

SEQ ID NO: 1121153 - RNA, 19 nt, Artificial Sequence
  Description of Artificial Sequence: Synthetic oligonucleotide
  Antisense strand to SEQ ID NO: 1121152
uauccucaaggaaaggcaa

SEQ ID NO: 1121154 - RNA, 19 nt, Artificial Sequence
  Description of Artificial Sequence: Synthetic oligonucleotide
  Sense strand starting at position 511 of SEQ ID NO: 915981
acgccuuuccuugauauga

SEQ ID NO: 1121155 - RNA, 19 nt, Artificial Sequence
  Description of Artificial Sequence: Synthetic oligonucleotide
  Antisense strand to SEQ ID NO: 1121154
ucauaucaaggaaaggcgu

SEQ ID NO: 1121156 - RNA, 19 nt, Artificial Sequence
  Description of Artificial Sequence: Synthetic oligonucleotide
  Sense strand starting at position 1176 of SEQ ID NO: 915981
cccuaauugucuguaacac

SEQ ID NO: 1121157 - RNA, 19 nt, Artificial Sequence
  Description of Artificial Sequence: Synthetic oligonucleotide
  Antisense strand to SEQ ID NO: 1121156
guguuacagacaauuaggg

SEQ ID NO: 1121158 - RNA, 19 nt, Artificial Sequence
  Description of Artificial Sequence: Synthetic oligonucleotide
  Sense strand starting at position 1177 of SEQ ID NO: 915981
ccuaauugucuguaacaca

SEQ ID NO: 1121159 - RNA, 19 nt, Artificial Sequence
  Description of Artificial Sequence: Synthetic oligonucleotide
  Antisense strand to SEQ ID NO: 1121158
uguguuacagacaauuagg

SEQ ID NO: 1121160 - RNA, 19 nt, Artificial Sequence
  Description of Artificial Sequence: Synthetic oligonucleotide
  Sense strand starting at position 1273 of SEQ ID NO: 915981
gggcuacuuacuuaacguu

SEQ ID NO: 1121161 - RNA, 19 nt, Artificial Sequence
  Description of Artificial Sequence: Synthetic oligonucleotide
  Antisense strand to SEQ ID NO: 1121160
aacguuaaguaaguagccc

SEQ ID NO: 1121162 - RNA, 19 nt, Artificial Sequence
  Description of Artificial Sequence: Synthetic oligonucleotide
  Sense strand starting at position 1399 of SEQ ID NO: 915981
aucuaagggcaguguuaaa

SEQ ID NO: 1121163 - RNA, 19 nt, Artificial Sequence
  Description of Artificial Sequence: Synthetic oligonucleotide
  Antisense strand to SEQ ID NO: 1121162
uuuaacacugcccuuagau

SEQ ID NO: 1121164 - RNA, 19 nt, Artificial Sequence
  Description of Artificial Sequence: Synthetic oligonucleotide
  Sense strand starting at position 1416 of SEQ ID NO: 915981
aaaucuaaggugugauggu

SEQ ID NO: 1121165 - RNA, 19 nt, Artificial Sequence
  Description of Artificial Sequence: Synthetic oligonucleotide
  Antisense strand to SEQ ID NO: 1121164
accaucacaccuuagauuu

SEQ ID NO: 1121166 - RNA, 19 nt, Artificial Sequence
  Description of Artificial Sequence: Synthetic oligonucleotide
  Sense strand starting at position 1608 of SEQ ID NO: 915981
gcagaucuggauugaaauu

SEQ ID NO: 1121167 - RNA, 19 nt, Artificial Sequence
  Description of Artificial Sequence: Synthetic oligonucleotide
  Antisense strand to SEQ ID NO: 1121166
aauuucaauccagaucugc

SEQ ID NO: 1121168 - RNA, 19 nt, Artificial Sequence
  Description of Artificial Sequence: Synthetic oligonucleotide
  Sense strand starting at position 1709 of SEQ ID NO: 915981
ggauuauacucacccuaug

SEQ ID NO: 1121169 - RNA, 19 nt, Artificial Sequence
  Description of Artificial Sequence: Synthetic oligonucleotide
  Antisense strand to SEQ ID NO: 1121168
cauagggugaguauaaucc

SEQ ID NO: 1121170 - RNA, 19 nt, Artificial Sequence
  Description of Artificial Sequence: Synthetic oligonucleotide
  Sense strand starting at position 1720 of SEQ ID NO: 915981
acccuauggaauuguggua

SEQ ID NO: 1121171 - RNA, 19 nt, Artificial Sequence
  Description of Artificial Sequence: Synthetic oligonucleotide
  Antisense strand to SEQ ID NO: 1121170
uaccacaauuccauagggu

SEQ ID NO: 1121172 - RNA, 19 nt, Artificial Sequence
  Description of Artificial Sequence: Synthetic oligonucleotide
  Sense strand starting at position 1784 of SEQ ID NO: 915981
ugcacuuaguaaguacuua

SEQ ID NO: 1121173 - RNA, 19 nt, Artificial Sequence
  Description of Artificial Sequence: Synthetic oligonucleotide
  Antisense strand to SEQ ID NO: 1121172
uaaguacuuacuaagugca

SEQ ID NO: 1121174 - RNA, 19 nt, Artificial Sequence
  Description of Artificial Sequence: Synthetic oligonucleotide
  Sense strand starting at position 1806 of SEQ ID NO: 915981
aggaguagccgugauuacu

SEQ ID NO: 1121175 - RNA, 19 nt, Artificial Sequence
  Description of Artificial Sequence: Synthetic oligonucleotide
  Antisense strand to SEQ ID NO: 1121174
aguaaucacggcuacuccu

SEQ ID NO: 1121176 - RNA, 19 nt, Artificial Sequence
  Description of Artificial Sequence: Synthetic oligonucleotide
  Sense strand starting at position 1814 of SEQ ID NO: 915981
ccgugauuacuggugcugu

SEQ ID NO: 1121177 - RNA, 19 nt, Artificial Sequence
  Description of Artificial Sequence: Synthetic oligonucleotide
  Antisense strand to SEQ ID NO: 1121176
acagcaccaguaaucacgg

SEQ ID NO: 1121178 - RNA, 19 nt, Artificial Sequence
  Description of Artificial Sequence: Synthetic oligonucleotide
  Sense strand starting at position 1822 of SEQ ID NO: 915981
acuggugcugucgucauua

SEQ ID NO: 1121179 - RNA, 19 nt, Artificial Sequence
  Description of Artificial Sequence: Synthetic oligonucleotide
  Antisense strand to SEQ ID NO: 1121178
uaaugacgacagcaccagu

SEQ ID NO: 1121180 - RNA, 19 nt, Artificial Sequence
  Description of Artificial Sequence: Synthetic oligonucleotide
  Sense strand starting at position 2010 of SEQ ID NO: 915981
uguugaacuggugauguca

SEQ ID NO: 1121181 - RNA, 19 nt, Artificial Sequence
  Description of Artificial Sequence: Synthetic oligonucleotide
  Antisense strand to SEQ ID NO: 1121180
ugacaucaccaguucaaca

SEQ ID NO: 1121182 - RNA, 19 nt, Artificial Sequence
  Description of Artificial Sequence: Synthetic oligonucleotide
  Sense strand starting at position 2163 of SEQ ID NO: 915981
gagguugguguugacaaga

SEQ ID NO: 1121183 - RNA, 19 nt, Artificial Sequence
  Description of Artificial Sequence: Synthetic oligonucleotide
  Antisense strand to SEQ ID NO: 1121182
ucuugucaacaccaaccuc

SEQ ID NO: 1121184 - RNA, 19 nt, Artificial Sequence
  Description of Artificial Sequence: Synthetic oligonucleotide
  Sense strand starting at position 2168 of SEQ ID NO: 915981
ugguguugacaagauguua

SEQ ID NO: 1121185 - RNA, 19 nt, Artificial Sequence
  Description of Artificial Sequence: Synthetic oligonucleotide
  Antisense strand to SEQ ID NO: 1121184
uaacaucuugucaacacca

SEQ ID NO: 1121186 - RNA, 19 nt, Artificial Sequence
  Description of Artificial Sequence: Synthetic oligonucleotide
  Sense strand starting at position 2402 of SEQ ID NO: 915981
auaauuagagccuaauguu

SEQ ID NO: 1121187 - RNA, 19 nt, Artificial Sequence
  Description of Artificial Sequence: Synthetic oligonucleotide
  Antisense strand to SEQ ID NO: 1121186
aacauuaggcucuaauuau

SEQ ID NO: 1121188 - RNA, 19 nt, Artificial Sequence
  Description of Artificial Sequence: Synthetic oligonucleotide
  Sense strand starting at position 2412 of SEQ ID NO: 915981
ccuaauguuagacaguguu

SEQ ID NO: 1121189 - RNA, 19 nt, Artificial Sequence
  Description of Artificial Sequence: Synthetic oligonucleotide
  Antisense strand to SEQ ID NO: 1121188
aacacugucuaacauuagg

SEQ ID NO: 1121190 - RNA, 19 nt, Artificial Sequence
  Description of Artificial Sequence: Synthetic oligonucleotide
  Sense strand starting at position 2415 of SEQ ID NO: 915981
aauguuagacaguguuucu

SEQ ID NO: 1121191 - RNA, 19 nt, Artificial Sequence
  Description of Artificial Sequence: Synthetic oligonucleotide
  Antisense strand to SEQ ID NO: 1121190
agaaacacugucuaacauu

SEQ ID NO: 1121192 - RNA, 19 nt, Artificial Sequence
  Description of Artificial Sequence: Synthetic oligonucleotide
  Sense strand starting at position 2476 of SEQ ID NO: 915981
acaaucauuuggcaagguu

SEQ ID NO: 1121193 - RNA, 19 nt, Artificial Sequence
  Description of Artificial Sequence: Synthetic oligonucleotide
  Antisense strand to SEQ ID NO: 1121192
aaccuugccaaaugauugu

SEQ ID NO: 1121194 - RNA, 19 nt, Artificial Sequence
  Description of Artificial Sequence: Synthetic oligonucleotide
  Sense strand starting at position 2622 of SEQ ID NO: 915981
cuagaauggccgugugaag

SEQ ID NO: 1121195 - RNA, 19 nt, Artificial Sequence
  Description of Artificial Sequence: Synthetic oligonucleotide
  Antisense strand to SEQ ID NO: 1121194
cuucacacggccauucuag

SEQ ID NO: 1121196 - RNA, 19 nt, Artificial Sequence
  Description of Artificial Sequence: Synthetic oligonucleotide
  Sense strand starting at position 2840 of SEQ ID NO: 915981
gaagcugggagcuguugaa

SEQ ID NO: 1121197 - RNA, 19 nt, Artificial Sequence
  Description of Artificial Sequence: Synthetic oligonucleotide
  Antisense strand to SEQ ID NO: 1121196
uucaacagcucccagcuuc

SEQ ID NO: 1121198 - RNA, 19 nt, Artificial Sequence
  Description of Artificial Sequence: Synthetic oligonucleotide
  Sense strand starting at position 2844 of SEQ ID NO: 915981
cugggagcuguugaagagu

SEQ ID NO: 1121199 - RNA, 19 nt, Artificial Sequence
  Description of Artificial Sequence: Synthetic oligonucleotide
  Antisense strand to SEQ ID NO: 1121198
acucuucaacagcucccag

SEQ ID NO: 1121200 - RNA, 19 nt, Artificial Sequence
  Description of Artificial Sequence: Synthetic oligonucleotide
  Sense strand starting at position 3294 of SEQ ID NO: 915981
acacucaggugucugauua

SEQ ID NO: 1121201 - RNA, 19 nt, Artificial Sequence
  Description of Artificial Sequence: Synthetic oligonucleotide
  Antisense strand to SEQ ID NO: 1121200
uaaucagacaccugagugu

SEQ ID NO: 1121202 - RNA, 19 nt, Artificial Sequence
  Description of Artificial Sequence: Synthetic oligonucleotide
  Sense strand starting at position 3295 of SEQ ID NO: 915981
cacucaggugucugauuag

SEQ ID NO: 1121203 - RNA, 19 nt, Artificial Sequence
  Description of Artificial Sequence: Synthetic oligonucleotide
  Antisense strand to SEQ ID NO: 1121202
cuaaucagacaccugagug

SEQ ID NO: 1121204 - RNA, 19 nt, Artificial Sequence
  Description of Artificial Sequence: Synthetic oligonucleotide
  Sense strand starting at position 3298 of SEQ ID NO: 915981
ucaggugucugauuaguga

SEQ ID NO: 1121205 - RNA, 19 nt, Artificial Sequence
  Description of Artificial Sequence: Synthetic oligonucleotide
  Antisense strand to SEQ ID NO: 1121204
ucacuaaucagacaccuga

SEQ ID NO: 1121206 - RNA, 19 nt, Artificial Sequence
  Description of Artificial Sequence: Synthetic oligonucleotide
  Sense strand starting at position 3301 of SEQ ID NO: 915981
ggugucugauuagugaaca

SEQ ID NO: 1121207 - RNA, 19 nt, Artificial Sequence
  Description of Artificial Sequence: Synthetic oligonucleotide
  Antisense strand to SEQ ID NO: 1121206
uguucacuaaucagacacc

SEQ ID NO: 1121208 - RNA, 19 nt, Artificial Sequence
  Description of Artificial Sequence: Synthetic oligonucleotide
  Sense strand starting at position 3332 of SEQ ID NO: 915981
ccaacugggcccugaguua

SEQ ID NO: 1121209 - RNA, 19 nt, Artificial Sequence
  Description of Artificial Sequence: Synthetic oligonucleotide
  Antisense strand to SEQ ID NO: 1121208
uaacucagggcccaguugg

SEQ ID NO: 1121210 - RNA, 19 nt, Artificial Sequence
  Description of Artificial Sequence: Synthetic oligonucleotide
  Sense strand starting at position 3473 of SEQ ID NO: 915981
cuaggaguguguccaugau

SEQ ID NO: 1121211 - RNA, 19 nt, Artificial Sequence
  Description of Artificial Sequence: Synthetic oligonucleotide
  Antisense strand to SEQ ID NO: 1121210
aucauggacacacuccuag

SEQ ID NO: 1121212 - RNA, 19 nt, Artificial Sequence
  Description of Artificial Sequence: Synthetic oligonucleotide
  Sense strand starting at position 3477 of SEQ ID NO: 915981
gaguguguccaugauaaag

SEQ ID NO: 1121213 - RNA, 19 nt, Artificial Sequence
  Description of Artificial Sequence: Synthetic oligonucleotide
  Antisense strand to SEQ ID NO: 1121212
cuuuaucauggacacacuc

SEQ ID NO: 1121214 - RNA, 19 nt, Artificial Sequence
  Description of Artificial Sequence: Synthetic oligonucleotide
  Sense strand starting at position 283 of SEQ ID NO: 915982
uuccuauugccugagacau

SEQ ID NO: 1121215 - RNA, 19 nt, Artificial Sequence
  Description of Artificial Sequence: Synthetic oligonucleotide
  Antisense strand to SEQ ID NO: 1121214
augucucaggcaauaggaa

SEQ ID NO: 1121216 - RNA, 19 nt, Artificial Sequence
  Description of Artificial Sequence: Synthetic oligonucleotide
  Sense strand starting at position 296 of SEQ ID NO: 915982
agacauggauuccauucua

SEQ ID NO: 1121217 - RNA, 19 nt, Artificial Sequence
  Description of Artificial Sequence: Synthetic oligonucleotide
  Antisense strand to SEQ ID NO: 1121216
uagaauggaauccaugucu

SEQ ID NO: 1121218 - RNA, 19 nt, Artificial Sequence
  Description of Artificial Sequence: Synthetic oligonucleotide
  Sense strand starting at position 304 of SEQ ID NO: 915982
auuccauucuaauucgaag

SEQ ID NO: 1121219 - RNA, 19 nt, Artificial Sequence
  Description of Artificial Sequence: Synthetic oligonucleotide
  Antisense strand to SEQ ID NO: 1121218
cuucgaauuagaauggaau

SEQ ID NO: 1121220 - RNA, 19 nt, Artificial Sequence
  Description of Artificial Sequence: Synthetic oligonucleotide
  Sense strand starting at position 334 of SEQ ID NO: 915982
ccaguuagcugguccaaug

SEQ ID NO: 1121221 - RNA, 19 nt, Artificial Sequence
  Description of Artificial Sequence: Synthetic oligonucleotide
  Antisense strand to SEQ ID NO: 1121220
cauuggaccagcuaacugg

SEQ ID NO: 1121222 - RNA, 19 nt, Artificial Sequence
  Description of Artificial Sequence: Synthetic oligonucleotide
  Sense strand starting at position 457 of SEQ ID NO: 915982
ucugguguugcccauaguu

SEQ ID NO: 1121223 - RNA, 19 nt, Artificial Sequence
  Description of Artificial Sequence: Synthetic oligonucleotide
  Antisense strand to SEQ ID NO: 1121222
aacuaugggcaacaccaga

SEQ ID NO: 1121224 - RNA, 19 nt, Artificial Sequence
  Description of Artificial Sequence: Synthetic oligonucleotide
  Sense strand starting at position 494 of SEQ ID NO: 915982
ugcagagacacucagguuu

SEQ ID NO: 1121225 - RNA, 19 nt, Artificial Sequence
  Description of Artificial Sequence: Synthetic oligonucleotide
  Antisense strand to SEQ ID NO: 1121224
aaaccugagugucucugca

SEQ ID NO: 1121226 - RNA, 19 nt, Artificial Sequence
  Description of Artificial Sequence: Synthetic oligonucleotide
  Sense strand starting at position 508 of SEQ ID NO: 915982
gguuuaaguccugaguucu

SEQ ID NO: 1121227 - RNA, 19 nt, Artificial Sequence
  Description of Artificial Sequence: Synthetic oligonucleotide
  Antisense strand to SEQ ID NO: 1121226
agaacucaggacuuaaacc

SEQ ID NO: 1121228 - RNA, 19 nt, Artificial Sequence
  Description of Artificial Sequence: Synthetic oligonucleotide
  Sense strand starting at position 591 of SEQ ID NO: 915982
aauuuccucuguggguaaa

SEQ ID NO: 1121229 - RNA, 19 nt, Artificial Sequence
  Description of Artificial Sequence: Synthetic oligonucleotide
  Antisense strand to SEQ ID NO: 1121228
uuuacccacagaggaaauu

SEQ ID NO: 1121230 - RNA, 19 nt, Artificial Sequence
  Description of Artificial Sequence: Synthetic oligonucleotide
  Sense strand starting at position 594 of SEQ ID NO: 915982
uuccucuguggguaaauga

SEQ ID NO: 1121231 - RNA, 19 nt, Artificial Sequence
  Description of Artificial Sequence: Synthetic oligonucleotide
  Antisense strand to SEQ ID NO: 1121230
ucauuuacccacagaggaa

SEQ ID NO: 1121232 - RNA, 19 nt, Artificial Sequence
  Description of Artificial Sequence: Synthetic oligonucleotide
  Sense strand starting at position 812 of SEQ ID NO: 915982
cgugguaagcgaagaagua

SEQ ID NO: 1121233 - RNA, 19 nt, Artificial Sequence
  Description of Artificial Sequence: Synthetic oligonucleotide
  Antisense strand to SEQ ID NO: 1121232
uacuucuucgcuuaccacg

SEQ ID NO: 1121234 - RNA, 19 nt, Artificial Sequence
  Description of Artificial Sequence: Synthetic oligonucleotide
  Sense strand starting at position 1659 of SEQ ID NO: 915982
ugguuucuuagggaucuga

SEQ ID NO: 1121235 - RNA, 19 nt, Artificial Sequence
  Description of Artificial Sequence: Synthetic oligonucleotide
  Antisense strand to SEQ ID NO: 1121234
ucagaucccuaagaaacca

SEQ ID NO: 1121236 - RNA, 19 nt, Artificial Sequence
  Description of Artificial Sequence: Synthetic oligonucleotide
  Sense strand starting at position 1826 of SEQ ID NO: 915982
gcgcgaucuccuaguaggu

SEQ ID NO: 1121237 - RNA, 19 nt, Artificial Sequence
  Description of Artificial Sequence: Synthetic oligonucleotide
  Antisense strand to SEQ ID NO: 1121236
accuacuaggagaucgcgc

SEQ ID NO: 1121238 - RNA, 19 nt, Artificial Sequence
  Description of Artificial Sequence: Synthetic oligonucleotide
  Sense strand starting at position 1827 of SEQ ID NO: 915982
cgcgaucuccuaguagguu

SEQ ID NO: 1121239 - RNA, 19 nt, Artificial Sequence
  Description of Artificial Sequence: Synthetic oligonucleotide
  Antisense strand to SEQ ID NO: 1121238
aaccuacuaggagaucgcg

SEQ ID NO: 1121240 - RNA, 19 nt, Artificial Sequence
  Description of Artificial Sequence: Synthetic oligonucleotide
  Sense strand starting at position 2226 of SEQ ID NO: 915982
ggcauucucagaggccaga

SEQ ID NO: 1121241 - RNA, 19 nt, Artificial Sequence
  Description of Artificial Sequence: Synthetic oligonucleotide
  Antisense strand to SEQ ID NO: 1121240
ucuggccucugagaaugcc

SEQ ID NO: 1121242 - RNA, 19 nt, Artificial Sequence
  Description of Artificial Sequence: Synthetic oligonucleotide
  Sense strand starting at position 2422 of SEQ ID NO: 915982
cgaauaacaugguaaagga

SEQ ID NO: 1121243 - RNA, 19 nt, Artificial Sequence
  Description of Artificial Sequence: Synthetic oligonucleotide
  Antisense strand to SEQ ID NO: 1121242
uccuuuaccauguuauucg

SEQ ID NO: 1121244 - RNA, 19 nt, Artificial Sequence
  Description of Artificial Sequence: Synthetic oligonucleotide
  Sense strand starting at position 2864 of SEQ ID NO: 915982
uuuggacuccaaugugaca

SEQ ID NO: 1121245 - RNA, 19 nt, Artificial Sequence
  Description of Artificial Sequence: Synthetic oligonucleotide
  Antisense strand to SEQ ID NO: 1121244
ugucacauuggaguccaaa

SEQ ID NO: 1121246 - RNA, 19 nt, Artificial Sequence
  Description of Artificial Sequence: Synthetic oligonucleotide
  Sense strand starting at position 2953 of SEQ ID NO: 915982
gugacagugugcuccaaag

SEQ ID NO: 1121247 - RNA, 19 nt, Artificial Sequence
  Description of Artificial Sequence: Synthetic oligonucleotide
  Antisense strand to SEQ ID NO: 1121246
cuuuggagcacacugucac

SEQ ID NO: 1121248 - RNA, 19 nt, Artificial Sequence
  Description of Artificial Sequence: Synthetic oligonucleotide
  Sense strand starting at position 2955 of SEQ ID NO: 915982
gacagugugcuccaaagug

SEQ ID NO: 1121249 - RNA, 19 nt, Artificial Sequence
  Description of Artificial Sequence: Synthetic oligonucleotide
  Antisense strand to SEQ ID NO: 1121248
cacuuuggagcacacuguc

SEQ ID NO: 1121250 - RNA, 19 nt, Artificial Sequence
  Description of Artificial Sequence: Synthetic oligonucleotide
  Sense strand starting at position 3017 of SEQ ID NO: 915982
gugcgauuguggauugugu

SEQ ID NO: 1121251 - RNA, 19 nt, Artificial Sequence
  Description of Artificial Sequence: Synthetic oligonucleotide
  Antisense strand to SEQ ID NO: 1121250
acacaauccacaaucgcac

SEQ ID NO: 1121252 - RNA, 19 nt, Artificial Sequence
  Description of Artificial Sequence: Synthetic oligonucleotide
  Sense strand starting at position 3025 of SEQ ID NO: 915982
guggauuguguguugucuu

SEQ ID NO: 1121253 - RNA, 19 nt, Artificial Sequence
  Description of Artificial Sequence: Synthetic oligonucleotide
  Antisense strand to SEQ ID NO: 1121252
aagacaacacacaauccac

SEQ ID NO: 1121254 - RNA, 19 nt, Artificial Sequence
  Description of Artificial Sequence: Synthetic oligonucleotide
  Sense strand starting at position 3030 of SEQ ID NO: 915982
uuguguguugucuuugugu

SEQ ID NO: 1121255 - RNA, 19 nt, Artificial Sequence
  Description of Artificial Sequence: Synthetic oligonucleotide
  Antisense strand to SEQ ID NO: 1121254
acacaaagacaacacacaa

SEQ ID NO: 1121256 - RNA, 19 nt, Artificial Sequence
  Description of Artificial Sequence: Synthetic oligonucleotide
  Sense strand starting at position 3050 of SEQ ID NO: 915982
uguauaugugagggcuguu

SEQ ID NO: 1121257 - RNA, 19 nt, Artificial Sequence
  Description of Artificial Sequence: Synthetic oligonucleotide
  Antisense strand to SEQ ID NO: 1121256
aacagcccucacauauaca

SEQ ID NO: 1121258 - RNA, 19 nt, Artificial Sequence
  Description of Artificial Sequence: Synthetic oligonucleotide
  Sense strand starting at position 3053 of SEQ ID NO: 915982
auaugugagggcuguuuga

SEQ ID NO: 1121259 - RNA, 19 nt, Artificial Sequence
  Description of Artificial Sequence: Synthetic oligonucleotide
  Antisense strand to SEQ ID NO: 1121258
ucaaacagcccucacauau

SEQ ID NO: 1121260 - RNA, 19 nt, Artificial Sequence
  Description of Artificial Sequence: Synthetic oligonucleotide
  Sense strand starting at position 3062 of SEQ ID NO: 915982
ggcuguuugaagggaggua

SEQ ID NO: 1121261 - RNA, 19 nt, Artificial Sequence
  Description of Artificial Sequence: Synthetic oligonucleotide
  Antisense strand to SEQ ID NO: 1121260
uaccucccuucaaacagcc

SEQ ID NO: 1121262 - RNA, 19 nt, Artificial Sequence
  Description of Artificial Sequence: Synthetic oligonucleotide
  Sense strand starting at position 3063 of SEQ ID NO: 915982
gcuguuugaagggagguau

SEQ ID NO: 1121263 - RNA, 19 nt, Artificial Sequence
  Description of Artificial Sequence: Synthetic oligonucleotide
  Antisense strand to SEQ ID NO: 1121262
auaccucccuucaaacagc

SEQ ID NO: 1121264 - RNA, 19 nt, Artificial Sequence
  Description of Artificial Sequence: Synthetic oligonucleotide
  Sense strand starting at position 3294 of SEQ ID NO: 915982
aagaguuuguuguuagaug

SEQ ID NO: 1121265 - RNA, 19 nt, Artificial Sequence
  Description of Artificial Sequence: Synthetic oligonucleotide
  Antisense strand to SEQ ID NO: 1121264
caucuaacaacaaacucuu

SEQ ID NO: 1121266 - RNA, 19 nt, Artificial Sequence
  Description of Artificial Sequence: Synthetic oligonucleotide
  Sense strand starting at position 3322 of SEQ ID NO: 915982
gaaguuggaucccacauaa

SEQ ID NO: 1121267 - RNA, 19 nt, Artificial Sequence
  Description of Artificial Sequence: Synthetic oligonucleotide
  Antisense strand to SEQ ID NO: 1121266
uuaugugggauccaacuuc

SEQ ID NO: 1121268 - RNA, 19 nt, Artificial Sequence
  Description of Artificial Sequence: Synthetic oligonucleotide
  Sense strand starting at position 3358 of SEQ ID NO: 915982
guugaaguuggccaugcaa

SEQ ID NO: 1121269 - RNA, 19 nt, Artificial Sequence
  Description of Artificial Sequence: Synthetic oligonucleotide
  Antisense strand to SEQ ID NO: 1121268
uugcauggccaacuucaac

SEQ ID NO: 1121270 - RNA, 19 nt, Artificial Sequence
  Description of Artificial Sequence: Synthetic oligonucleotide
  Sense strand starting at position 3360 of SEQ ID NO: 915982
ugaaguuggccaugcaaau

SEQ ID NO: 1121271 - RNA, 19 nt, Artificial Sequence
  Description of Artificial Sequence: Synthetic oligonucleotide
  Antisense strand to SEQ ID NO: 1121270
auuugcauggccaacuuca

SEQ ID NO: 1121272 - RNA, 19 nt, Artificial Sequence
  Description of Artificial Sequence: Synthetic oligonucleotide
  Sense strand starting at position 3450 of SEQ ID NO: 915982
cggccaagacauugcuaga

SEQ ID NO: 1121273 - RNA, 19 nt, Artificial Sequence
  Description of Artificial Sequence: Synthetic oligonucleotide
  Antisense strand to SEQ ID NO: 1121272
ucuagcaaugucuuggccg

SEQ ID NO: 1121274 - RNA, 19 nt, Artificial Sequence
  Description of Artificial Sequence: Synthetic oligonucleotide
  Sense strand starting at position 3471 of SEQ ID NO: 915982
caggcauugcuagaucaga

SEQ ID NO: 1121275 - RNA, 19 nt, Artificial Sequence
  Description of Artificial Sequence: Synthetic oligonucleotide
  Antisense strand to SEQ ID NO: 1121274
ucugaucuagcaaugccug

SEQ ID NO: 1121276 - RNA, 19 nt, Artificial Sequence
  Description of Artificial Sequence: Synthetic oligonucleotide
  Sense strand starting at position 3585 of SEQ ID NO: 915982
agguucuaggacugguaaa

SEQ ID NO: 1121277 - RNA, 19 nt, Artificial Sequence
  Description of Artificial Sequence: Synthetic oligonucleotide
  Antisense strand to SEQ ID NO: 1121276
uuuaccaguccuagaaccu

SEQ ID NO: 1121278 - RNA, 19 nt, Artificial Sequence
  Description of Artificial Sequence: Synthetic oligonucleotide
  Sense strand starting at position 3660 of SEQ ID NO: 915982
caggauaagccaggacuau

SEQ ID NO: 1121279 - RNA, 19 nt, Artificial Sequence
  Description of Artificial Sequence: Synthetic oligonucleotide
  Antisense strand to SEQ ID NO: 1121278
auaguccuggcuuauccug

SEQ ID NO: 1121280 - RNA, 19 nt, Artificial Sequence
  Description of Artificial Sequence: Synthetic oligonucleotide
  Sense strand starting at position 3675 of SEQ ID NO: 915982
cuaucauguaugggagaac

SEQ ID NO: 1121281 - RNA, 19 nt, Artificial Sequence
  Description of Artificial Sequence: Synthetic oligonucleotide
  Antisense strand to SEQ ID NO: 1121280
guucucccauacaugauag

SEQ ID NO: 1121282 - RNA, 19 nt, Artificial Sequence
  Description of Artificial Sequence: Synthetic oligonucleotide
  Sense strand starting at position 3676 of SEQ ID NO: 915982
uaucauguaugggagaaca

SEQ ID NO: 1121283 - RNA, 19 nt, Artificial Sequence
  Description of Artificial Sequence: Synthetic oligonucleotide
  Antisense strand to SEQ ID NO: 1121282
uguucucccauacaugaua

SEQ ID NO: 1121284 - RNA, 19 nt, Artificial Sequence
  Description of Artificial Sequence: Synthetic oligonucleotide
  Sense strand starting at position 3684 of SEQ ID NO: 915982
augggagaacauuguguaa

SEQ ID NO: 1121285 - RNA, 19 nt, Artificial Sequence
  Description of Artificial Sequence: Synthetic oligonucleotide
  Antisense strand to SEQ ID NO: 1121284
uuacacaauguucucccau

SEQ ID NO: 1121286 - RNA, 19 nt, Artificial Sequence
  Description of Artificial Sequence: Synthetic oligonucleotide
  Sense strand starting at position 3687 of SEQ ID NO: 915982
ggagaacauuguguaagau

SEQ ID NO: 1121287 - RNA, 19 nt, Artificial Sequence
  Description of Artificial Sequence: Synthetic oligonucleotide
  Antisense strand to SEQ ID NO: 1121286
aucuuacacaauguucucc

SEQ ID NO: 1121288 - RNA, 19 nt, Artificial Sequence
  Description of Artificial Sequence: Synthetic oligonucleotide
  Sense strand starting at position 3731 of SEQ ID NO: 915982
ugauuauuggauggagagu

SEQ ID NO: 1121289 - RNA, 19 nt, Artificial Sequence
  Description of Artificial Sequence: Synthetic oligonucleotide
  Antisense strand to SEQ ID NO: 1121288
acucuccauccaauaauca

SEQ ID NO: 1121290 - RNA, 19 nt, Artificial Sequence
  Description of Artificial Sequence: Synthetic oligonucleotide
  Sense strand starting at position 3890 of SEQ ID NO: 915982
gagagaaaggauuggcagu

SEQ ID NO: 1121291 - RNA, 19 nt, Artificial Sequence
  Description of Artificial Sequence: Synthetic oligonucleotide
  Antisense strand to SEQ ID NO: 1121290
acugccaauccuuucucuc

SEQ ID NO: 1121292 - RNA, 19 nt, Artificial Sequence
  Description of Artificial Sequence: Synthetic oligonucleotide
  Sense strand starting at position 3959 of SEQ ID NO: 915982
ggucuuugucgccauuugu

SEQ ID NO: 1121293 - RNA, 19 nt, Artificial Sequence
  Description of Artificial Sequence: Synthetic oligonucleotide
  Antisense strand to SEQ ID NO: 1121292
acaaauggcgacaaagacc

SEQ ID NO: 1121294 - RNA, 19 nt, Artificial Sequence
  Description of Artificial Sequence: Synthetic oligonucleotide
  Sense strand starting at position 402 of SEQ ID NO: 915983
cgguaagacgugccauugu

SEQ ID NO: 1121295 - RNA, 19 nt, Artificial Sequence
  Description of Artificial Sequence: Synthetic oligonucleotide
  Antisense strand to SEQ ID NO: 1121294
acaauggcacgucuuaccg

SEQ ID NO: 1121296 - RNA, 19 nt, Artificial Sequence
  Description of Artificial Sequence: Synthetic oligonucleotide
  Sense strand starting at position 455 of SEQ ID NO: 915983
gggaaugguaguuguugga

SEQ ID NO: 1121297 - RNA, 19 nt, Artificial Sequence
  Description of Artificial Sequence: Synthetic oligonucleotide
  Antisense strand to SEQ ID NO: 1121296
uccaacaacuaccauuccc

SEQ ID NO: 1121298 - RNA, 19 nt, Artificial Sequence
  Description of Artificial Sequence: Synthetic oligonucleotide
  Sense strand starting at position 702 of SEQ ID NO: 915983
cacagugguuucccaaaga

SEQ ID NO: 1121299 - RNA, 19 nt, Artificial Sequence
  Description of Artificial Sequence: Synthetic oligonucleotide
  Antisense strand to SEQ ID NO: 1121298
ucuuugggaaaccacugug

SEQ ID NO: 1121300 - RNA, 19 nt, Artificial Sequence
  Description of Artificial Sequence: Synthetic oligonucleotide
  Sense strand starting at position 752 of SEQ ID NO: 915983
uccugacucaguggauguu

SEQ ID NO: 1121301 - RNA, 19 nt, Artificial Sequence
  Description of Artificial Sequence: Synthetic oligonucleotide
  Antisense strand to SEQ ID NO: 1121300
aacauccacugagucagga

SEQ ID NO: 1121302 - RNA, 19 nt, Artificial Sequence
  Description of Artificial Sequence: Synthetic oligonucleotide
  Sense strand starting at position 755 of SEQ ID NO: 915983
ugacucaguggauguugaa

SEQ ID NO: 1121303 - RNA, 19 nt, Artificial Sequence
  Description of Artificial Sequence: Synthetic oligonucleotide
  Antisense strand to SEQ ID NO: 1121302
uucaacauccacugaguca

SEQ ID NO: 1121304 - RNA, 19 nt, Artificial Sequence
  Description of Artificial Sequence: Synthetic oligonucleotide
  Sense strand starting at position 929 of SEQ ID NO: 915983
gugugcaugccauacagau

SEQ ID NO: 1121305 - RNA, 19 nt, Artificial Sequence
  Description of Artificial Sequence: Synthetic oligonucleotide
  Antisense strand to SEQ ID NO: 1121304
aucuguauggcaugcacac

SEQ ID NO: 1121306 - RNA, 19 nt, Artificial Sequence
  Description of Artificial Sequence: Synthetic oligonucleotide
  Sense strand starting at position 1538 of SEQ ID NO: 915983
cuggcuugggaccaguuaa

SEQ ID NO: 1121307 - RNA, 19 nt, Artificial Sequence
  Description of Artificial Sequence: Synthetic oligonucleotide
  Antisense strand to SEQ ID NO: 1121306
uuaacuggucccaagccag

SEQ ID NO: 1121308 - RNA, 19 nt, Artificial Sequence
  Description of Artificial Sequence: Synthetic oligonucleotide
  Sense strand starting at position 1624 of SEQ ID NO: 915983
gagaaaccaucuguggagu

SEQ ID NO: 1121309 - RNA, 19 nt, Artificial Sequence
  Description of Artificial Sequence: Synthetic oligonucleotide
  Antisense strand to SEQ ID NO: 1121308
acuccacagaugguuucuc

SEQ ID NO: 1121310 - RNA, 19 nt, Artificial Sequence
  Description of Artificial Sequence: Synthetic oligonucleotide
  Sense strand starting at position 1738 of SEQ ID NO: 915983
augagcaucuauguaugaa

SEQ ID NO: 1121311 - RNA, 19 nt, Artificial Sequence
  Description of Artificial Sequence: Synthetic oligonucleotide
  Antisense strand to SEQ ID NO: 1121310
uucauacauagaugcucau

SEQ ID NO: 1121312 - RNA, 19 nt, Artificial Sequence
  Description of Artificial Sequence: Synthetic oligonucleotide
  Sense strand starting at position 1739 of SEQ ID NO: 915983
ugagcaucuauguaugaag

SEQ ID NO: 1121313 - RNA, 19 nt, Artificial Sequence
  Description of Artificial Sequence: Synthetic oligonucleotide
  Antisense strand to SEQ ID NO: 1121312
cuucauacauagaugcuca

SEQ ID NO: 1121314 - RNA, 19 nt, Artificial Sequence
  Description of Artificial Sequence: Synthetic oligonucleotide
  Sense strand starting at position 1825 of SEQ ID NO: 915983
acugaugaggugugugaag

SEQ ID NO: 1121315 - RNA, 19 nt, Artificial Sequence
  Description of Artificial Sequence: Synthetic oligonucleotide
  Antisense strand to SEQ ID NO: 1121314
cuucacacaccucaucagu

SEQ ID NO: 1121316 - RNA, 19 nt, Artificial Sequence
  Description of Artificial Sequence: Synthetic oligonucleotide
  Sense strand starting at position 1830 of SEQ ID NO: 915983
ugaggugugugaagagaga

SEQ ID NO: 1121317 - RNA, 19 nt, Artificial Sequence
  Description of Artificial Sequence: Synthetic oligonucleotide
  Antisense strand to SEQ ID NO: 1121316
ucucucuucacacaccuca

SEQ ID NO: 1121318 - RNA, 19 nt, Artificial Sequence
  Description of Artificial Sequence: Synthetic oligonucleotide
  Sense strand starting at position 2058 of SEQ ID NO: 915983
gggaccauucccggaggaa

SEQ ID NO: 1121319 - RNA, 19 nt, Artificial Sequence
  Description of Artificial Sequence: Synthetic oligonucleotide
  Antisense strand to SEQ ID NO: 1121318
uuccuccgggaaugguccc

SEQ ID NO: 1121320 - RNA, 19 nt, Artificial Sequence
  Description of Artificial Sequence: Synthetic oligonucleotide
  Sense strand starting at position 2110 of SEQ ID NO: 915983
agaucugaguuuccacuuu

SEQ ID NO: 1121321 - RNA, 19 nt, Artificial Sequence
  Description of Artificial Sequence: Synthetic oligonucleotide
  Antisense strand to SEQ ID NO: 1121320
aaaguggaaacucagaucu

SEQ ID NO: 1121322 - RNA, 19 nt, Artificial Sequence
  Description of Artificial Sequence: Synthetic oligonucleotide
  Sense strand starting at position 2246 of SEQ ID NO: 915983
ccagaugucucagucucua

SEQ ID NO: 1121323 - RNA, 19 nt, Artificial Sequence
  Description of Artificial Sequence: Synthetic oligonucleotide
  Antisense strand to SEQ ID NO: 1121322
uagagacugagacaucugg

SEQ ID NO: 1121324 - RNA, 19 nt, Artificial Sequence
  Description of Artificial Sequence: Synthetic oligonucleotide
  Sense strand starting at position 2306 of SEQ ID NO: 915983
gcugcugcuguguuuacaa

SEQ ID NO: 1121325 - RNA, 19 nt, Artificial Sequence
  Description of Artificial Sequence: Synthetic oligonucleotide
  Antisense strand to SEQ ID NO: 1121324
uuguaaacacagcagcagc

SEQ ID NO: 1121326 - RNA, 19 nt, Artificial Sequence
  Description of Artificial Sequence: Synthetic oligonucleotide
  Sense strand starting at position 2551 of SEQ ID NO: 915983
cugcuuuagccaugaauga

SEQ ID NO: 1121327 - RNA, 19 nt, Artificial Sequence
  Description of Artificial Sequence: Synthetic oligonucleotide
  Antisense strand to SEQ ID NO: 1121326
ucauucauggcuaaagcag

SEQ ID NO: 1121328 - RNA, 19 nt, Artificial Sequence
  Description of Artificial Sequence: Synthetic oligonucleotide
  Sense strand starting at position 2552 of SEQ ID NO: 915983
ugcuuuagccaugaaugac

SEQ ID NO: 1121329 - RNA, 19 nt, Artificial Sequence
  Description of Artificial Sequence: Synthetic oligonucleotide
  Antisense strand to SEQ ID NO: 1121328
gucauucauggcuaaagca

SEQ ID NO: 1121330 - RNA, 19 nt, Artificial Sequence
  Description of Artificial Sequence: Synthetic oligonucleotide
  Sense strand starting at position 2579 of SEQ ID NO: 915983
auagaauaggguuggccau

SEQ ID NO: 1121331 - RNA, 19 nt, Artificial Sequence
  Description of Artificial Sequence: Synthetic oligonucleotide
  Antisense strand to SEQ ID NO: 1121330
auggccaacccuauucuau

SEQ ID NO: 1121332 - RNA, 19 nt, Artificial Sequence
  Description of Artificial Sequence: Synthetic oligonucleotide
  Sense strand starting at position 2610 of SEQ ID NO: 915983
cuaaaucagcccuggguuu

SEQ ID NO: 1121333 - RNA, 19 nt, Artificial Sequence
  Description of Artificial Sequence: Synthetic oligonucleotide
  Antisense strand to SEQ ID NO: 1121332
aaacccagggcugauuuag

SEQ ID NO: 1121334 - RNA, 19 nt, Artificial Sequence
  Description of Artificial Sequence: Synthetic oligonucleotide
  Sense strand starting at position 3087 of SEQ ID NO: 915983
gcguucuuaagccuuugua

SEQ ID NO: 1121335 - RNA, 19 nt, Artificial Sequence
  Description of Artificial Sequence: Synthetic oligonucleotide
  Antisense strand to SEQ ID NO: 1121334
uacaaaggcuuaagaacgc

SEQ ID NO: 1121336 - RNA, 19 nt, Artificial Sequence
  Description of Artificial Sequence: Synthetic oligonucleotide
  Sense strand starting at position 3115 of SEQ ID NO: 915983
gcuuguuucccuuauuaga

SEQ ID NO: 1121337 - RNA, 19 nt, Artificial Sequence
  Description of Artificial Sequence: Synthetic oligonucleotide
  Antisense strand to SEQ ID NO: 1121336
ucuaauaagggaaacaagc

SEQ ID NO: 1121338 - RNA, 19 nt, Artificial Sequence
  Description of Artificial Sequence: Synthetic oligonucleotide
  Sense strand starting at position 3117 of SEQ ID NO: 915983
uuguuucccuuauuagaug

SEQ ID NO: 1121339 - RNA, 19 nt, Artificial Sequence
  Description of Artificial Sequence: Synthetic oligonucleotide
  Antisense strand to SEQ ID NO: 1121338
caucuaauaagggaaacaa

SEQ ID NO: 1121340 - RNA, 19 nt, Artificial Sequence
  Description of Artificial Sequence: Synthetic oligonucleotide
  Sense strand starting at position 3193 of SEQ ID NO: 915983
cuguuuaaugugcaagaca

SEQ ID NO: 1121341 - RNA, 19 nt, Artificial Sequence
  Description of Artificial Sequence: Synthetic oligonucleotide
  Antisense strand to SEQ ID NO: 1121340
ugucuugcacauuaaacag

SEQ ID NO: 1121342 - RNA, 19 nt, Artificial Sequence
  Description of Artificial Sequence: Synthetic oligonucleotide
  Sense strand starting at position 3196 of SEQ ID NO: 915983
uuuaaugugcaagacacuu

SEQ ID NO: 1121343 - RNA, 19 nt, Artificial Sequence
  Description of Artificial Sequence: Synthetic oligonucleotide
  Antisense strand to SEQ ID NO: 1121342
aagugucuugcacauuaaa

SEQ ID NO: 1121344 - RNA, 19 nt, Artificial Sequence
  Description of Artificial Sequence: Synthetic oligonucleotide
  Sense strand starting at position 3218 of SEQ ID NO: 915983
caggcaauagauugcaaga

SEQ ID NO: 1121345 - RNA, 19 nt, Artificial Sequence
  Description of Artificial Sequence: Synthetic oligonucleotide
  Antisense strand to SEQ ID NO: 1121344
ucuugcaaucuauugccug

SEQ ID NO: 1121346 - RNA, 19 nt, Artificial Sequence
  Description of Artificial Sequence: Synthetic oligonucleotide
  Sense strand starting at position 3273 of SEQ ID NO: 915983
accacaucaucaguaguua

SEQ ID NO: 1121347 - RNA, 19 nt, Artificial Sequence
  Description of Artificial Sequence: Synthetic oligonucleotide
  Antisense strand to SEQ ID NO: 1121346
uaacuacugaugauguggu

SEQ ID NO: 1121348 - RNA, 19 nt, Artificial Sequence
  Description of Artificial Sequence: Synthetic oligonucleotide
  Sense strand starting at position 3394 of SEQ ID NO: 915983
cugugaugggaucagcaua

SEQ ID NO: 1121349 - RNA, 19 nt, Artificial Sequence
  Description of Artificial Sequence: Synthetic oligonucleotide
  Antisense strand to SEQ ID NO: 1121348
uaugcugaucccaucacag

SEQ ID NO: 1121350 - RNA, 19 nt, Artificial Sequence
  Description of Artificial Sequence: Synthetic oligonucleotide
  Sense strand starting at position 3408 of SEQ ID NO: 915983
gcauaugauccacagccuu

SEQ ID NO: 1121351 - RNA, 19 nt, Artificial Sequence
  Description of Artificial Sequence: Synthetic oligonucleotide
  Antisense strand to SEQ ID NO: 1121350
aaggcuguggaucauaugc

SEQ ID NO: 1121352 - RNA, 19 nt, Artificial Sequence
  Description of Artificial Sequence: Synthetic oligonucleotide
  Sense strand starting at position 3414 of SEQ ID NO: 915983
gauccacagccuuguuaga

SEQ ID NO: 1121353 - RNA, 19 nt, Artificial Sequence
  Description of Artificial Sequence: Synthetic oligonucleotide
  Antisense strand to SEQ ID NO: 1121352
ucuaacaaggcuguggauc

SEQ ID NO: 1121354 - RNA, 19 nt, Artificial Sequence
  Description of Artificial Sequence: Synthetic oligonucleotide
  Sense strand starting at position 3416 of SEQ ID NO: 915983
uccacagccuuguuagauc

SEQ ID NO: 1121355 - RNA, 19 nt, Artificial Sequence
  Description of Artificial Sequence: Synthetic oligonucleotide
  Antisense strand to SEQ ID NO: 1121354
gaucuaacaaggcugugga

SEQ ID NO: 1121356 - RNA, 19 nt, Artificial Sequence
  Description of Artificial Sequence: Synthetic oligonucleotide
  Sense strand starting at position 3611 of SEQ ID NO: 915983
agguaagucuuagcugaag

SEQ ID NO: 1121357 - RNA, 19 nt, Artificial Sequence
  Description of Artificial Sequence: Synthetic oligonucleotide
  Antisense strand to SEQ ID NO: 1121356
cuucagcuaagacuuaccu

SEQ ID NO: 1121358 - RNA, 19 nt, Artificial Sequence
  Description of Artificial Sequence: Synthetic oligonucleotide
  Sense strand starting at position 3653 of SEQ ID NO: 915983
cucaguucugcguuggcau

SEQ ID NO: 1121359 - RNA, 19 nt, Artificial Sequence
  Description of Artificial Sequence: Synthetic oligonucleotide
  Antisense strand to SEQ ID NO: 1121358
augccaacgcagaacugag

SEQ ID NO: 1121360 - RNA, 19 nt, Artificial Sequence
  Description of Artificial Sequence: Synthetic oligonucleotide
  Sense strand starting at position 3693 of SEQ ID NO: 915983
ggcaaaccuggaugucauu

SEQ ID NO: 1121361 - RNA, 19 nt, Artificial Sequence
  Description of Artificial Sequence: Synthetic oligonucleotide
  Antisense strand to SEQ ID NO: 1121360
aaugacauccagguuugcc

SEQ ID NO: 1121362 - RNA, 19 nt, Artificial Sequence
  Description of Artificial Sequence: Synthetic oligonucleotide
  Sense strand starting at position 3699 of SEQ ID NO: 915983
ccuggaugucauuagcuca

SEQ ID NO: 1121363 - RNA, 19 nt, Artificial Sequence
  Description of Artificial Sequence: Synthetic oligonucleotide
  Antisense strand to SEQ ID NO: 1121362
ugagcuaaugacauccagg

SEQ ID NO: 1121364 - RNA, 19 nt, Artificial Sequence
  Description of Artificial Sequence: Synthetic oligonucleotide
  Sense strand starting at position 3872 of SEQ ID NO: 915983
gaggauauagucgguuaca

SEQ ID NO: 1121365 - RNA, 19 nt, Artificial Sequence
  Description of Artificial Sequence: Synthetic oligonucleotide
  Antisense strand to SEQ ID NO: 1121364
uguaaccgacuauauccuc

SEQ ID NO: 1121366 - RNA, 19 nt, Artificial Sequence
  Description of Artificial Sequence: Synthetic oligonucleotide
  Sense strand starting at position 3873 of SEQ ID NO: 915983
aggauauagucgguuacag

SEQ ID NO: 1121367 - RNA, 19 nt, Artificial Sequence
  Description of Artificial Sequence: Synthetic oligonucleotide
  Antisense strand to SEQ ID NO: 1121366
cuguaaccgacuauauccu

SEQ ID NO: 1121368 - RNA, 19 nt, Artificial Sequence
  Description of Artificial Sequence: Synthetic oligonucleotide
  Sense strand starting at position 3875 of SEQ ID NO: 915983
gauauagucgguuacagug

SEQ ID NO: 1121369 - RNA, 19 nt, Artificial Sequence
  Description of Artificial Sequence: Synthetic oligonucleotide
  Antisense strand to SEQ ID NO: 1121368
cacuguaaccgacuauauc

SEQ ID NO: 1121370 - RNA, 19 nt, Artificial Sequence
  Description of Artificial Sequence: Synthetic oligonucleotide
  Sense strand starting at position 3907 of SEQ ID NO: 915983
ggauuugauucuugggaaa

SEQ ID NO: 1121371 - RNA, 19 nt, Artificial Sequence
  Description of Artificial Sequence: Synthetic oligonucleotide
  Antisense strand to SEQ ID NO: 1121370
uuucccaagaaucaaaucc

SEQ ID NO: 1121372 - RNA, 19 nt, Artificial Sequence
  Description of Artificial Sequence: Synthetic oligonucleotide
  Sense strand starting at position 3964 of SEQ ID NO: 915983
uggauaugucucuaucgcu

SEQ ID NO: 1121373 - RNA, 19 nt, Artificial Sequence
  Description of Artificial Sequence: Synthetic oligonucleotide
  Antisense strand to SEQ ID NO: 1121372
agcgauagagacauaucca

SEQ ID NO: 1121374 - RNA, 19 nt, Artificial Sequence
  Description of Artificial Sequence: Synthetic oligonucleotide
  Sense strand starting at position 437 of SEQ ID NO: 915984
ucagucuccugacuauacu

SEQ ID NO: 1121375 - RNA, 19 nt, Artificial Sequence
  Description of Artificial Sequence: Synthetic oligonucleotide
  Antisense strand to SEQ ID NO: 1121374
aguauagucaggagacuga

SEQ ID NO: 1121376 - RNA, 19 nt, Artificial Sequence
  Description of Artificial Sequence: Synthetic oligonucleotide
  Sense strand starting at position 503 of SEQ ID NO: 915984
uguccuuauucugaauaag

SEQ ID NO: 1121377 - RNA, 19 nt, Artificial Sequence
  Description of Artificial Sequence: Synthetic oligonucleotide
  Antisense strand to SEQ ID NO: 1121376
cuuauucagaauaaggaca

SEQ ID NO: 1121378 - RNA, 19 nt, Artificial Sequence
  Description of Artificial Sequence: Synthetic oligonucleotide
  Sense strand starting at position 506 of SEQ ID NO: 915984
ccuuauucugaauaaggcu

SEQ ID NO: 1121379 - RNA, 19 nt, Artificial Sequence
  Description of Artificial Sequence: Synthetic oligonucleotide
  Antisense strand to SEQ ID NO: 1121378
agccuuauucagaauaagg

SEQ ID NO: 1121380 - RNA, 19 nt, Artificial Sequence
  Description of Artificial Sequence: Synthetic oligonucleotide
  Sense strand starting at position 520 of SEQ ID NO: 915984
aggcuuuggcguuagaagu

SEQ ID NO: 1121381 - RNA, 19 nt, Artificial Sequence
  Description of Artificial Sequence: Synthetic oligonucleotide
  Antisense strand to SEQ ID NO: 1121380
acuucuaacgccaaagccu

SEQ ID NO: 1121382 - RNA, 19 nt, Artificial Sequence
  Description of Artificial Sequence: Synthetic oligonucleotide
  Sense strand starting at position 521 of SEQ ID NO: 915984
ggcuuuggcguuagaaguu

SEQ ID NO: 1121383 - RNA, 19 nt, Artificial Sequence
  Description of Artificial Sequence: Synthetic oligonucleotide
  Antisense strand to SEQ ID NO: 1121382
aacuucuaacgccaaagcc

SEQ ID NO: 1121384 - RNA, 19 nt, Artificial Sequence
  Description of Artificial Sequence: Synthetic oligonucleotide
  Sense strand starting at position 546 of SEQ ID NO: 915984
uagcucuuccaagguaagu

SEQ ID NO: 1121385 - RNA, 19 nt, Artificial Sequence
  Description of Artificial Sequence: Synthetic oligonucleotide
  Antisense strand to SEQ ID NO: 1121384
acuuaccuuggaagagcua

SEQ ID NO: 1121386 - RNA, 19 nt, Artificial Sequence
  Description of Artificial Sequence: Synthetic oligonucleotide
  Sense strand starting at position 561 of SEQ ID NO: 915984
aagugugaacggugacuua

SEQ ID NO: 1121387 - RNA, 19 nt, Artificial Sequence
  Description of Artificial Sequence: Synthetic oligonucleotide
  Antisense strand to SEQ ID NO: 1121386
uaagucaccguucacacuu

SEQ ID NO: 1121388 - RNA, 19 nt, Artificial Sequence
  Description of Artificial Sequence: Synthetic oligonucleotide
  Sense strand starting at position 585 of SEQ ID NO: 915984
uuguuauuauuugugucca

SEQ ID NO: 1121389 - RNA, 19 nt, Artificial Sequence
  Description of Artificial Sequence: Synthetic oligonucleotide
  Antisense strand to SEQ ID NO: 1121388
uggacacaaauaauaacaa

SEQ ID NO: 1121390 - RNA, 19 nt, Artificial Sequence
  Description of Artificial Sequence: Synthetic oligonucleotide
  Sense strand starting at position 688 of SEQ ID NO: 915984
uccauagauuugcaagauu

SEQ ID NO: 1121391 - RNA, 19 nt, Artificial Sequence
  Description of Artificial Sequence: Synthetic oligonucleotide
  Antisense strand to SEQ ID NO: 1121390
aaucuugcaaaucuaugga

SEQ ID NO: 1121392 - RNA, 19 nt, Artificial Sequence
  Description of Artificial Sequence: Synthetic oligonucleotide
  Sense strand starting at position 699 of SEQ ID NO: 915984
gcaagauuuguguguccau

SEQ ID NO: 1121393 - RNA, 19 nt, Artificial Sequence
  Description of Artificial Sequence: Synthetic oligonucleotide
  Antisense strand to SEQ ID NO: 1121392
auggacacacaaaucuugc

SEQ ID NO: 1121394 - RNA, 19 nt, Artificial Sequence
  Description of Artificial Sequence: Synthetic oligonucleotide
  Sense strand starting at position 700 of SEQ ID NO: 915984
caagauuuguguguccauu

SEQ ID NO: 1121395 - RNA, 19 nt, Artificial Sequence
  Description of Artificial Sequence: Synthetic oligonucleotide
  Antisense strand to SEQ ID NO: 1121394
aauggacacacaaaucuug

SEQ ID NO: 1121396 - RNA, 19 nt, Artificial Sequence
  Description of Artificial Sequence: Synthetic oligonucleotide
  Sense strand starting at position 921 of SEQ ID NO: 915984
gggaaucucccuggccaca

SEQ ID NO: 1121397 - RNA, 19 nt, Artificial Sequence
  Description of Artificial Sequence: Synthetic oligonucleotide
  Antisense strand to SEQ ID NO: 1121396
uguggccagggagauuccc

SEQ ID NO: 1121398 - RNA, 19 nt, Artificial Sequence
  Description of Artificial Sequence: Synthetic oligonucleotide
  Sense strand starting at position 1011 of SEQ ID NO: 915984
ggucgaaguccuggaagac

SEQ ID NO: 1121399 - RNA, 19 nt, Artificial Sequence
  Description of Artificial Sequence: Synthetic oligonucleotide
  Antisense strand to SEQ ID NO: 1121398
gucuuccaggacuucgacc

SEQ ID NO: 1121400 - RNA, 19 nt, Artificial Sequence
  Description of Artificial Sequence: Synthetic oligonucleotide
  Sense strand starting at position 1977 of SEQ ID NO: 915984
ggaggaaguuccuggaaau

SEQ ID NO: 1121401 - RNA, 19 nt, Artificial Sequence
  Description of Artificial Sequence: Synthetic oligonucleotide
  Antisense strand to SEQ ID NO: 1121400
auuuccaggaacuuccucc

SEQ ID NO: 1121402 - RNA, 19 nt, Artificial Sequence
  Description of Artificial Sequence: Synthetic oligonucleotide
  Sense strand starting at position 2205 of SEQ ID NO: 915984
gaguuauggcugcugccuu

SEQ ID NO: 1121403 - RNA, 19 nt, Artificial Sequence
  Description of Artificial Sequence: Synthetic oligonucleotide
  Antisense strand to SEQ ID NO: 1121402
aaggcagcagccauaacuc

SEQ ID NO: 1121404 - RNA, 19 nt, Artificial Sequence
  Description of Artificial Sequence: Synthetic oligonucleotide
  Sense strand starting at position 2278 of SEQ ID NO: 915984
gccucccucuuguagaauu

SEQ ID NO: 1121405 - RNA, 19 nt, Artificial Sequence
  Description of Artificial Sequence: Synthetic oligonucleotide
  Antisense strand to SEQ ID NO: 1121404
aauucuacaagagggaggc

SEQ ID NO: 1121406 - RNA, 19 nt, Artificial Sequence
  Description of Artificial Sequence: Synthetic oligonucleotide
  Sense strand starting at position 2280 of SEQ ID NO: 915984
cucccucuuguagaauuga

SEQ ID NO: 1121407 - RNA, 19 nt, Artificial Sequence
  Description of Artificial Sequence: Synthetic oligonucleotide
  Antisense strand to SEQ ID NO: 1121406
ucaauucuacaagagggag

SEQ ID NO: 1121408 - RNA, 19 nt, Artificial Sequence
  Description of Artificial Sequence: Synthetic oligonucleotide
  Sense strand starting at position 2291 of SEQ ID NO: 915984
agaauugaaguuugugauc

SEQ ID NO: 1121409 - RNA, 19 nt, Artificial Sequence
  Description of Artificial Sequence: Synthetic oligonucleotide
  Antisense strand to SEQ ID NO: 1121408
gaucacaaacuucaauucu

SEQ ID NO: 1121410 - RNA, 19 nt, Artificial Sequence
  Description of Artificial Sequence: Synthetic oligonucleotide
  Sense strand starting at position 2293 of SEQ ID NO: 915984
aauugaaguuugugauccu

SEQ ID NO: 1121411 - RNA, 19 nt, Artificial Sequence
  Description of Artificial Sequence: Synthetic oligonucleotide
  Antisense strand to SEQ ID NO: 1121410
aggaucacaaacuucaauu

SEQ ID NO: 1121412 - RNA, 19 nt, Artificial Sequence
  Description of Artificial Sequence: Synthetic oligonucleotide
  Sense strand starting at position 2296 of SEQ ID NO: 915984
ugaaguuugugauccuuga

SEQ ID NO: 1121413 - RNA, 19 nt, Artificial Sequence
  Description of Artificial Sequence: Synthetic oligonucleotide
  Antisense strand to SEQ ID NO: 1121412
ucaaggaucacaaacuuca

SEQ ID NO: 1121414 - RNA, 19 nt, Artificial Sequence
  Description of Artificial Sequence: Synthetic oligonucleotide
  Sense strand starting at position 2300 of SEQ ID NO: 915984
guuugugauccuugaacuu

SEQ ID NO: 1121415 - RNA, 19 nt, Artificial Sequence
  Description of Artificial Sequence: Synthetic oligonucleotide
  Antisense strand to SEQ ID NO: 1121414
aaguucaaggaucacaaac

SEQ ID NO: 1121416 - RNA, 19 nt, Artificial Sequence
  Description of Artificial Sequence: Synthetic oligonucleotide
  Sense strand starting at position 2496 of SEQ ID NO: 915984
cuucuuuaggcagauacua

SEQ ID NO: 1121417 - RNA, 19 nt, Artificial Sequence
  Description of Artificial Sequence: Synthetic oligonucleotide
  Antisense strand to SEQ ID NO: 1121416
uaguaucugccuaaagaag

SEQ ID NO: 1121418 - RNA, 19 nt, Artificial Sequence
  Description of Artificial Sequence: Synthetic oligonucleotide
  Sense strand starting at position 2577 of SEQ ID NO: 915984
ccagaaggcucuuauggag

SEQ ID NO: 1121419 - RNA, 19 nt, Artificial Sequence
  Description of Artificial Sequence: Synthetic oligonucleotide
  Antisense strand to SEQ ID NO: 1121418
cuccauaagagccuucugg

SEQ ID NO: 1121420 - RNA, 19 nt, Artificial Sequence
  Description of Artificial Sequence: Synthetic oligonucleotide
  Sense strand starting at position 2723 of SEQ ID NO: 915984
uaguaauauggaggcaagu

SEQ ID NO: 1121421 - RNA, 19 nt, Artificial Sequence
  Description of Artificial Sequence: Synthetic oligonucleotide
  Antisense strand to SEQ ID NO: 1121420
acuugccuccauauuacua

SEQ ID NO: 1121422 - RNA, 19 nt, Artificial Sequence
  Description of Artificial Sequence: Synthetic oligonucleotide
  Sense strand starting at position 2725 of SEQ ID NO: 915984
guaauauggaggcaaguua

SEQ ID NO: 1121423 - RNA, 19 nt, Artificial Sequence
  Description of Artificial Sequence: Synthetic oligonucleotide
  Antisense strand to SEQ ID NO: 1121422
uaacuugccuccauauuac

SEQ ID NO: 1121424 - RNA, 19 nt, Artificial Sequence
  Description of Artificial Sequence: Synthetic oligonucleotide
  Sense strand starting at position 2756 of SEQ ID NO: 915984
gggugugcucugcaucuuu

SEQ ID NO: 1121425 - RNA, 19 nt, Artificial Sequence
  Description of Artificial Sequence: Synthetic oligonucleotide
  Antisense strand to SEQ ID NO: 1121424
aaagaugcagagcacaccc

SEQ ID NO: 1121426 - RNA, 19 nt, Artificial Sequence
  Description of Artificial Sequence: Synthetic oligonucleotide
  Sense strand starting at position 2855 of SEQ ID NO: 915984
gaugcaaugucucagguac

SEQ ID NO: 1121427 - RNA, 19 nt, Artificial Sequence
  Description of Artificial Sequence: Synthetic oligonucleotide
  Antisense strand to SEQ ID NO: 1121426
guaccugagacauugcauc

SEQ ID NO: 1121428 - RNA, 19 nt, Artificial Sequence
  Description of Artificial Sequence: Synthetic oligonucleotide
  Sense strand starting at position 2867 of SEQ ID NO: 915984
cagguacagucuugagauc

SEQ ID NO: 1121429 - RNA, 19 nt, Artificial Sequence
  Description of Artificial Sequence: Synthetic oligonucleotide
  Antisense strand to SEQ ID NO: 1121428
gaucucaagacuguaccug

SEQ ID NO: 1121430 - RNA, 19 nt, Artificial Sequence
  Description of Artificial Sequence: Synthetic oligonucleotide
  Sense strand starting at position 3300 of SEQ ID NO: 915984
gugaccgacuguucugauu

SEQ ID NO: 1121431 - RNA, 19 nt, Artificial Sequence
  Description of Artificial Sequence: Synthetic oligonucleotide
  Antisense strand to SEQ ID NO: 1121430
aaucagaacagucggucac

SEQ ID NO: 1121432 - RNA, 19 nt, Artificial Sequence
  Description of Artificial Sequence: Synthetic oligonucleotide
  Sense strand starting at position 3302 of SEQ ID NO: 915984
gaccgacuguucugauuug

SEQ ID NO: 1121433 - RNA, 19 nt, Artificial Sequence
  Description of Artificial Sequence: Synthetic oligonucleotide
  Antisense strand to SEQ ID NO: 1121432
caaaucagaacagucgguc

SEQ ID NO: 1121434 - RNA, 19 nt, Artificial Sequence
  Description of Artificial Sequence: Synthetic oligonucleotide
  Sense strand starting at position 3309 of SEQ ID NO: 915984
uguucugauuugcguggga

SEQ ID NO: 1121435 - RNA, 19 nt, Artificial Sequence
  Description of Artificial Sequence: Synthetic oligonucleotide
  Antisense strand to SEQ ID NO: 1121434
ucccacgcaaaucagaaca

SEQ ID NO: 1121436 - RNA, 19 nt, Artificial Sequence
  Description of Artificial Sequence: Synthetic oligonucleotide
  Sense strand starting at position 3331 of SEQ ID NO: 915984
acggguuucccaggacaug

SEQ ID NO: 1121437 - RNA, 19 nt, Artificial Sequence
  Description of Artificial Sequence: Synthetic oligonucleotide
  Antisense strand to SEQ ID NO: 1121436
cauguccugggaaacccgu

SEQ ID NO: 1121438 - RNA, 19 nt, Artificial Sequence
  Description of Artificial Sequence: Synthetic oligonucleotide
  Sense strand starting at position 3332 of SEQ ID NO: 915984
cggguuucccaggacauga

SEQ ID NO: 1121439 - RNA, 19 nt, Artificial Sequence
  Description of Artificial Sequence: Synthetic oligonucleotide
  Antisense strand to SEQ ID NO: 1121438
ucauguccugggaaacccg

SEQ ID NO: 1121440 - RNA, 19 nt, Artificial Sequence
  Description of Artificial Sequence: Synthetic oligonucleotide
  Sense strand starting at position 3372 of SEQ ID NO: 915984
ggaaguucugggcaagcca

SEQ ID NO: 1121441 - RNA, 19 nt, Artificial Sequence
  Description of Artificial Sequence: Synthetic oligonucleotide
  Antisense strand to SEQ ID NO: 1121440
uggcuugcccagaacuucc

SEQ ID NO: 1121442 - RNA, 19 nt, Artificial Sequence
  Description of Artificial Sequence: Synthetic oligonucleotide
  Sense strand starting at position 3419 of SEQ ID NO: 915984
gguuaaagugcuggaguga

SEQ ID NO: 1121443 - RNA, 19 nt, Artificial Sequence
  Description of Artificial Sequence: Synthetic oligonucleotide
  Antisense strand to SEQ ID NO: 1121442
ucacuccagcacuuuaacc

SEQ ID NO: 1121444 - RNA, 19 nt, Artificial Sequence
  Description of Artificial Sequence: Synthetic oligonucleotide
  Sense strand starting at position 3601 of SEQ ID NO: 915984
gcggcugcagcaugaguua

SEQ ID NO: 1121445 - RNA, 19 nt, Artificial Sequence
  Description of Artificial Sequence: Synthetic oligonucleotide
  Antisense strand to SEQ ID NO: 1121444
uaacucaugcugcagccgc

SEQ ID NO: 1121446 - RNA, 19 nt, Artificial Sequence
  Description of Artificial Sequence: Synthetic oligonucleotide
  Sense strand starting at position 3608 of SEQ ID NO: 915984
cagcaugaguuagggucaa

SEQ ID NO: 1121447 - RNA, 19 nt, Artificial Sequence
  Description of Artificial Sequence: Synthetic oligonucleotide
  Antisense strand to SEQ ID NO: 1121446
uugacccuaacucaugcug

SEQ ID NO: 1121448 - RNA, 19 nt, Artificial Sequence
  Description of Artificial Sequence: Synthetic oligonucleotide
  Sense strand starting at position 3634 of SEQ ID NO: 915984
gggaggaauggcuggugau

SEQ ID NO: 1121449 - RNA, 19 nt, Artificial Sequence
  Description of Artificial Sequence: Synthetic oligonucleotide
  Antisense strand to SEQ ID NO: 1121448
aucaccagccauuccuccc

SEQ ID NO: 1121450 - RNA, 19 nt, Artificial Sequence
  Description of Artificial Sequence: Synthetic oligonucleotide
  Sense strand starting at position 3669 of SEQ ID NO: 915984
agcugauggcucugugcau

SEQ ID NO: 1121451 - RNA, 19 nt, Artificial Sequence
  Description of Artificial Sequence: Synthetic oligonucleotide
  Antisense strand to SEQ ID NO: 1121450
augcacagagccaucagcu

SEQ ID NO: 1121452 - RNA, 19 nt, Artificial Sequence
  Description of Artificial Sequence: Synthetic oligonucleotide
  Sense strand starting at position 3670 of SEQ ID NO: 915984
gcugauggcucugugcaua

SEQ ID NO: 1121453 - RNA, 19 nt, Artificial Sequence
  Description of Artificial Sequence: Synthetic oligonucleotide
  Antisense strand to SEQ ID NO: 1121452
uaugcacagagccaucagc

SEQ ID NO: 1121454 - RNA, 19 nt, Artificial Sequence
  Description of Artificial Sequence: Synthetic oligonucleotide
  Sense strand starting at position 322 of SEQ ID NO: 915985
ggagaaucuuaggucggaa

SEQ ID NO: 1121455 - RNA, 19 nt, Artificial Sequence
  Description of Artificial Sequence: Synthetic oligonucleotide
  Antisense strand to SEQ ID NO: 1121454
uuccgaccuaagauucucc

SEQ ID NO: 1121456 - RNA, 19 nt, Artificial Sequence
  Description of Artificial Sequence: Synthetic oligonucleotide
  Sense strand starting at position 324 of SEQ ID NO: 915985
agaaucuuaggucggaaua

SEQ ID NO: 1121457 - RNA, 19 nt, Artificial Sequence
  Description of Artificial Sequence: Synthetic oligonucleotide
  Antisense strand to SEQ ID NO: 1121456
uauuccgaccuaagauucu

SEQ ID NO: 1121458 - RNA, 19 nt, Artificial Sequence
  Description of Artificial Sequence: Synthetic oligonucleotide
  Sense strand starting at position 325 of SEQ ID NO: 915985
gaaucuuaggucggaauaa

SEQ ID NO: 1121459 - RNA, 19 nt, Artificial Sequence
  Description of Artificial Sequence: Synthetic oligonucleotide
  Antisense strand to SEQ ID NO: 1121458
uuauuccgaccuaagauuc

SEQ ID NO: 1121460 - RNA, 19 nt, Artificial Sequence
  Description of Artificial Sequence: Synthetic oligonucleotide
  Sense strand starting at position 717 of SEQ ID NO: 915985
gggaauggagucuguguca

SEQ ID NO: 1121461 - RNA, 19 nt, Artificial Sequence
  Description of Artificial Sequence: Synthetic oligonucleotide
  Antisense strand to SEQ ID NO: 1121460
ugacacagacuccauuccc

SEQ ID NO: 1121462 - RNA, 19 nt, Artificial Sequence
  Description of Artificial Sequence: Synthetic oligonucleotide
  Sense strand starting at position 730 of SEQ ID NO: 915985
gugucaucucagggacccu

SEQ ID NO: 1121463 - RNA, 19 nt, Artificial Sequence
  Description of Artificial Sequence: Synthetic oligonucleotide
  Antisense strand to SEQ ID NO: 1121462
agggucccugagaugacac

SEQ ID NO: 1121464 - RNA, 19 nt, Artificial Sequence
  Description of Artificial Sequence: Synthetic oligonucleotide
  Sense strand starting at position 995 of SEQ ID NO: 915985
ccuaguuaacuucgacuaa

SEQ ID NO: 1121465 - RNA, 19 nt, Artificial Sequence
  Description of Artificial Sequence: Synthetic oligonucleotide
  Antisense strand to SEQ ID NO: 1121464
uuagucgaaguuaacuagg

SEQ ID NO: 1121466 - RNA, 19 nt, Artificial Sequence
  Description of Artificial Sequence: Synthetic oligonucleotide
  Sense strand starting at position 999 of SEQ ID NO: 915985
guuaacuucgacuaacuuu

SEQ ID NO: 1121467 - RNA, 19 nt, Artificial Sequence
  Description of Artificial Sequence: Synthetic oligonucleotide
  Antisense strand to SEQ ID NO: 1121466
aaaguuagucgaaguuaac

SEQ ID NO: 1121468 - RNA, 19 nt, Artificial Sequence
  Description of Artificial Sequence: Synthetic oligonucleotide
  Sense strand starting at position 1006 of SEQ ID NO: 915985
ucgacuaacuuucuagacu

SEQ ID NO: 1121469 - RNA, 19 nt, Artificial Sequence
  Description of Artificial Sequence: Synthetic oligonucleotide
  Antisense strand to SEQ ID NO: 1121468
agucuagaaaguuagucga

SEQ ID NO: 1121470 - RNA, 19 nt, Artificial Sequence
  Description of Artificial Sequence: Synthetic oligonucleotide
  Sense strand starting at position 1091 of SEQ ID NO: 915985
cgaguacuuucucccaguu

SEQ ID NO: 1121471 - RNA, 19 nt, Artificial Sequence
  Description of Artificial Sequence: Synthetic oligonucleotide
  Antisense strand to SEQ ID NO: 1121470
aacugggagaaaguacucg

SEQ ID NO: 1121472 - RNA, 19 nt, Artificial Sequence
  Description of Artificial Sequence: Synthetic oligonucleotide
  Sense strand starting at position 1219 of SEQ ID NO: 915985
gcaucaugaucauccaugu

SEQ ID NO: 1121473 - RNA, 19 nt, Artificial Sequence
  Description of Artificial Sequence: Synthetic oligonucleotide
  Antisense strand to SEQ ID NO: 1121472
acauggaugaucaugaugc

SEQ ID NO: 1121474 - RNA, 19 nt, Artificial Sequence
  Description of Artificial Sequence: Synthetic oligonucleotide
  Sense strand starting at position 1223 of SEQ ID NO: 915985
caugaucauccauguagga

SEQ ID NO: 1121475 - RNA, 19 nt, Artificial Sequence
  Description of Artificial Sequence: Synthetic oligonucleotide
  Antisense strand to SEQ ID NO: 1121474
uccuacauggaugaucaug

SEQ ID NO: 1121476 - RNA, 19 nt, Artificial Sequence
  Description of Artificial Sequence: Synthetic oligonucleotide
  Sense strand starting at position 1247 of SEQ ID NO: 915985
ccucuucuuuaaccgugau

SEQ ID NO: 1121477 - RNA, 19 nt, Artificial Sequence
  Description of Artificial Sequence: Synthetic oligonucleotide
  Antisense strand to SEQ ID NO: 1121476
aucacgguuaaagaagagg

SEQ ID NO: 1121478 - RNA, 19 nt, Artificial Sequence
  Description of Artificial Sequence: Synthetic oligonucleotide
  Sense strand starting at position 1250 of SEQ ID NO: 915985
cuucuuuaaccgugaucac

SEQ ID NO: 1121479 - RNA, 19 nt, Artificial Sequence
  Description of Artificial Sequence: Synthetic oligonucleotide
  Antisense strand to SEQ ID NO: 1121478
gugaucacgguuaaagaag

SEQ ID NO: 1121480 - RNA, 19 nt, Artificial Sequence
  Description of Artificial Sequence: Synthetic oligonucleotide
  Sense strand starting at position 1288 of SEQ ID NO: 915985
cugucugcuguuuaucauu

SEQ ID NO: 1121481 - RNA, 19 nt, Artificial Sequence
  Description of Artificial Sequence: Synthetic oligonucleotide
  Antisense strand to SEQ ID NO: 1121480
aaugauaaacagcagacag

SEQ ID NO: 1121482 - RNA, 19 nt, Artificial Sequence
  Description of Artificial Sequence: Synthetic oligonucleotide
  Sense strand starting at position 1295 of SEQ ID NO: 915985
cuguuuaucauugcgugca

SEQ ID NO: 1121483 - RNA, 19 nt, Artificial Sequence
  Description of Artificial Sequence: Synthetic oligonucleotide
  Antisense strand to SEQ ID NO: 1121482
ugcacgcaaugauaaacag

SEQ ID NO: 1121484 - RNA, 19 nt, Artificial Sequence
  Description of Artificial Sequence: Synthetic oligonucleotide
  Sense strand starting at position 1386 of SEQ ID NO: 915985
ggacaagcggucugagaag

SEQ ID NO: 1121485 - RNA, 19 nt, Artificial Sequence
  Description of Artificial Sequence: Synthetic oligonucleotide
  Antisense strand to SEQ ID NO: 1121484
cuucucagaccgcuugucc

SEQ ID NO: 1121486 - RNA, 19 nt, Artificial Sequence
  Description of Artificial Sequence: Synthetic oligonucleotide
  Sense strand starting at position 1572 of SEQ ID NO: 915985
cuaguaaaggguugcuaaa

SEQ ID NO: 1121487 - RNA, 19 nt, Artificial Sequence
  Description of Artificial Sequence: Synthetic oligonucleotide
  Antisense strand to SEQ ID NO: 1121486
uuuagcaacccuuuacuag

SEQ ID NO: 1121488 - RNA, 19 nt, Artificial Sequence
  Description of Artificial Sequence: Synthetic oligonucleotide
  Sense strand starting at position 1656 of SEQ ID NO: 915985
agagaaauagguugucuau

SEQ ID NO: 1121489 - RNA, 19 nt, Artificial Sequence
  Description of Artificial Sequence: Synthetic oligonucleotide
  Antisense strand to SEQ ID NO: 1121488
auagacaaccuauuucucu

SEQ ID NO: 1121490 - RNA, 19 nt, Artificial Sequence
  Description of Artificial Sequence: Synthetic oligonucleotide
  Sense strand starting at position 1658 of SEQ ID NO: 915985
agaaauagguugucuauau

SEQ ID NO: 1121491 - RNA, 19 nt, Artificial Sequence
  Description of Artificial Sequence: Synthetic oligonucleotide
  Antisense strand to SEQ ID NO: 1121490
auauagacaaccuauuucu

SEQ ID NO: 1121492 - RNA, 19 nt, Artificial Sequence
  Description of Artificial Sequence: Synthetic oligonucleotide
  Sense strand starting at position 1659 of SEQ ID NO: 915985
gaaauagguugucuauauu

SEQ ID NO: 1121493 - RNA, 19 nt, Artificial Sequence
  Description of Artificial Sequence: Synthetic oligonucleotide
  Antisense strand to SEQ ID NO: 1121492
aauauagacaaccuauuuc

SEQ ID NO: 1121494 - RNA, 19 nt, Artificial Sequence
  Description of Artificial Sequence: Synthetic oligonucleotide
  Sense strand starting at position 1699 of SEQ ID NO: 915985
uugucagcccucuaucauu

SEQ ID NO: 1121495 - RNA, 19 nt, Artificial Sequence
  Description of Artificial Sequence: Synthetic oligonucleotide
  Antisense strand to SEQ ID NO: 1121494
aaugauagagggcugacaa

SEQ ID NO: 1121496 - RNA, 19 nt, Artificial Sequence
  Description of Artificial Sequence: Synthetic oligonucleotide
  Sense strand starting at position 2178 of SEQ ID NO: 915985
aaggguguguuucugaguu

SEQ ID NO: 1121497 - RNA, 19 nt, Artificial Sequence
  Description of Artificial Sequence: Synthetic oligonucleotide
  Antisense strand to SEQ ID NO: 1121496
aacucagaaacacacccuu

SEQ ID NO: 1121498 - RNA, 19 nt, Artificial Sequence
  Description of Artificial Sequence: Synthetic oligonucleotide
  Sense strand starting at position 2316 of SEQ ID NO: 915985
ucagaaauguaagucaucu

SEQ ID NO: 1121499 - RNA, 19 nt, Artificial Sequence
  Description of Artificial Sequence: Synthetic oligonucleotide
  Antisense strand to SEQ ID NO: 1121498
agaugacuuacauuucuga

SEQ ID NO: 1121500 - RNA, 19 nt, Artificial Sequence
  Description of Artificial Sequence: Synthetic oligonucleotide
  Sense strand starting at position 2344 of SEQ ID NO: 915985
agcaaauguaaugguugau

SEQ ID NO: 1121501 - RNA, 19 nt, Artificial Sequence
  Description of Artificial Sequence: Synthetic oligonucleotide
  Antisense strand to SEQ ID NO: 1121500
aucaaccauuacauuugcu

SEQ ID NO: 1121502 - RNA, 19 nt, Artificial Sequence
  Description of Artificial Sequence: Synthetic oligonucleotide
  Sense strand starting at position 2356 of SEQ ID NO: 915985
gguugauaaugacuuaaca

SEQ ID NO: 1121503 - RNA, 19 nt, Artificial Sequence
  Description of Artificial Sequence: Synthetic oligonucleotide
  Antisense strand to SEQ ID NO: 1121502
uguuaagucauuaucaacc

SEQ ID NO: 1121504 - RNA, 19 nt, Artificial Sequence
  Description of Artificial Sequence: Synthetic oligonucleotide
  Sense strand starting at position 2994 of SEQ ID NO: 915985
agagccuucccugaucuca

SEQ ID NO: 1121505 - RNA, 19 nt, Artificial Sequence
  Description of Artificial Sequence: Synthetic oligonucleotide
  Antisense strand to SEQ ID NO: 1121504
ugagaucagggaaggcucu

SEQ ID NO: 1121506 - RNA, 19 nt, Artificial Sequence
  Description of Artificial Sequence: Synthetic oligonucleotide
  Sense strand starting at position 3105 of SEQ ID NO: 915985
gucuuaggcucaucaccua

SEQ ID NO: 1121507 - RNA, 19 nt, Artificial Sequence
  Description of Artificial Sequence: Synthetic oligonucleotide
  Antisense strand to SEQ ID NO: 1121506
uaggugaugagccuaagac

SEQ ID NO: 1121508 - RNA, 19 nt, Artificial Sequence
  Description of Artificial Sequence: Synthetic oligonucleotide
  Sense strand starting at position 3203 of SEQ ID NO: 915985
aucaguucugccuacccua

SEQ ID NO: 1121509 - RNA, 19 nt, Artificial Sequence
  Description of Artificial Sequence: Synthetic oligonucleotide
  Antisense strand to SEQ ID NO: 1121508
uaggguaggcagaacugau

SEQ ID NO: 1121510 - RNA, 19 nt, Artificial Sequence
  Description of Artificial Sequence: Synthetic oligonucleotide
  Sense strand starting at position 3284 of SEQ ID NO: 915985
cuaauaaaugugcauguua

SEQ ID NO: 1121511 - RNA, 19 nt, Artificial Sequence
  Description of Artificial Sequence: Synthetic oligonucleotide
  Antisense strand to SEQ ID NO: 1121510
uaacaugcacauuuauuag

SEQ ID NO: 1121512 - RNA, 19 nt, Artificial Sequence
  Description of Artificial Sequence: Synthetic oligonucleotide
  Sense strand starting at position 3384 of SEQ ID NO: 915985
agcagugucaugcagaaca

SEQ ID NO: 1121513 - RNA, 19 nt, Artificial Sequence
  Description of Artificial Sequence: Synthetic oligonucleotide
  Antisense strand to SEQ ID NO: 1121512
uguucugcaugacacugcu

SEQ ID NO: 1121514 - RNA, 19 nt, Artificial Sequence
  Description of Artificial Sequence: Synthetic oligonucleotide
  Sense strand starting at position 3386 of SEQ ID NO: 915985
cagugucaugcagaacaca

SEQ ID NO: 1121515 - RNA, 19 nt, Artificial Sequence
  Description of Artificial Sequence: Synthetic oligonucleotide
  Antisense strand to SEQ ID NO: 1121514
uguguucugcaugacacug

SEQ ID NO: 1121516 - RNA, 19 nt, Artificial Sequence
  Description of Artificial Sequence: Synthetic oligonucleotide
  Sense strand starting at position 3395 of SEQ ID NO: 915985
gcagaacacagauguguau

SEQ ID NO: 1121517 - RNA, 19 nt, Artificial Sequence
  Description of Artificial Sequence: Synthetic oligonucleotide
  Antisense strand to SEQ ID NO: 1121516
auacacaucuguguucugc

SEQ ID NO: 1121518 - RNA, 19 nt, Artificial Sequence
  Description of Artificial Sequence: Synthetic oligonucleotide
  Sense strand starting at position 3399 of SEQ ID NO: 915985
aacacagauguguaugcaa

SEQ ID NO: 1121519 - RNA, 19 nt, Artificial Sequence
  Description of Artificial Sequence: Synthetic oligonucleotide
  Antisense strand to SEQ ID NO: 1121518
uugcauacacaucuguguu

SEQ ID NO: 1121520 - RNA, 19 nt, Artificial Sequence
  Description of Artificial Sequence: Synthetic oligonucleotide
  Sense strand starting at position 3452 of SEQ ID NO: 915985
acugcuuugccacauuaga

SEQ ID NO: 1121521 - RNA, 19 nt, Artificial Sequence
  Description of Artificial Sequence: Synthetic oligonucleotide
  Antisense strand to SEQ ID NO: 1121520
ucuaauguggcaaagcagu

SEQ ID NO: 1121522 - RNA, 19 nt, Artificial Sequence
  Description of Artificial Sequence: Synthetic oligonucleotide
  Sense strand starting at position 3483 of SEQ ID NO: 915985
gauaucagucuugggaaca

SEQ ID NO: 1121523 - RNA, 19 nt, Artificial Sequence
  Description of Artificial Sequence: Synthetic oligonucleotide
  Antisense strand to SEQ ID NO: 1121522
uguucccaagacugauauc

SEQ ID NO: 1121524 - RNA, 19 nt, Artificial Sequence
  Description of Artificial Sequence: Synthetic oligonucleotide
  Sense strand starting at position 3571 of SEQ ID NO: 915985
gcaggcuaauuuguaauca

SEQ ID NO: 1121525 - RNA, 19 nt, Artificial Sequence
  Description of Artificial Sequence: Synthetic oligonucleotide
  Antisense strand to SEQ ID NO: 1121524
ugauuacaaauuagccugc

SEQ ID NO: 1121526 - RNA, 19 nt, Artificial Sequence
  Description of Artificial Sequence: Synthetic oligonucleotide
  Sense strand starting at position 3581 of SEQ ID NO: 915985
uuguaaucacccgaagggu

SEQ ID NO: 1121527 - RNA, 19 nt, Artificial Sequence
  Description of Artificial Sequence: Synthetic oligonucleotide
  Antisense strand to SEQ ID NO: 1121526
acccuucgggugauuacaa

SEQ ID NO: 1121528 - RNA, 19 nt, Artificial Sequence
  Description of Artificial Sequence: Synthetic oligonucleotide
  Sense strand starting at position 3687 of SEQ ID NO: 915985
agugaaaggaugggaguuu

SEQ ID NO: 1121529 - RNA, 19 nt, Artificial Sequence
  Description of Artificial Sequence: Synthetic oligonucleotide
  Antisense strand to SEQ ID NO: 1121528
aaacucccauccuuucacu

SEQ ID NO: 1121530 - RNA, 19 nt, Artificial Sequence
  Description of Artificial Sequence: Synthetic oligonucleotide
  Sense strand starting at position 3737 of SEQ ID NO: 915985
aggcuaggguucuuaagga

SEQ ID NO: 1121531 - RNA, 19 nt, Artificial Sequence
  Description of Artificial Sequence: Synthetic oligonucleotide
  Antisense strand to SEQ ID NO: 1121530
uccuuaagaacccuagccu

SEQ ID NO: 1121532 - RNA, 19 nt, Artificial Sequence
  Description of Artificial Sequence: Synthetic oligonucleotide
  Sense strand starting at position 3754 of SEQ ID NO: 915985
gagaauuuggugggcggua

SEQ ID NO: 1121533 - RNA, 19 nt, Artificial Sequence
  Description of Artificial Sequence: Synthetic oligonucleotide
  Antisense strand to SEQ ID NO: 1121532
uaccgcccaccaaauucuc

SEQ ID NO: 1121534 - RNA, 19 nt, Artificial Sequence
  Description of Artificial Sequence: Synthetic oligonucleotide
  Sense strand starting at position 185 of SEQ ID NO: 915986
agguuugcaagcuauguaa

SEQ ID NO: 1121535 - RNA, 19 nt, Artificial Sequence
  Description of Artificial Sequence: Synthetic oligonucleotide
  Antisense strand to SEQ ID NO: 1121534
uuacauagcuugcaaaccu

SEQ ID NO: 1121536 - RNA, 19 nt, Artificial Sequence
  Description of Artificial Sequence: Synthetic oligonucleotide
  Sense strand starting at position 237 of SEQ ID NO: 915986
aguuacauccacuguaaca

SEQ ID NO: 1121537 - RNA, 19 nt, Artificial Sequence
  Description of Artificial Sequence: Synthetic oligonucleotide
  Antisense strand to SEQ ID NO: 1121536
uguuacaguggauguaacu

SEQ ID NO: 1121538 - RNA, 19 nt, Artificial Sequence
  Description of Artificial Sequence: Synthetic oligonucleotide
  Sense strand starting at position 379 of SEQ ID NO: 915986
ugggucaaugucugaacua

SEQ ID NO: 1121539 - RNA, 19 nt, Artificial Sequence
  Description of Artificial Sequence: Synthetic oligonucleotide
  Antisense strand to SEQ ID NO: 1121538
uaguucagacauugaccca

SEQ ID NO: 1121540 - RNA, 19 nt, Artificial Sequence
  Description of Artificial Sequence: Synthetic oligonucleotide
  Sense strand starting at position 521 of SEQ ID NO: 915986
ggcagugaacuguaauuau

SEQ ID NO: 1121541 - RNA, 19 nt, Artificial Sequence
  Description of Artificial Sequence: Synthetic oligonucleotide
  Antisense strand to SEQ ID NO: 1121540
auaauuacaguucacugcc

SEQ ID NO: 1121542 - RNA, 19 nt, Artificial Sequence
  Description of Artificial Sequence: Synthetic oligonucleotide
  Sense strand starting at position 531 of SEQ ID NO: 915986
uguaauuauucgguuagag

SEQ ID NO: 1121543 - RNA, 19 nt, Artificial Sequence
  Description of Artificial Sequence: Synthetic oligonucleotide
  Antisense strand to SEQ ID NO: 1121542
cucuaaccgaauaauuaca

SEQ ID NO: 1121544 - RNA, 19 nt, Artificial Sequence
  Description of Artificial Sequence: Synthetic oligonucleotide
  Sense strand starting at position 546 of SEQ ID NO: 915986
agagaacauuuaggaaaca

SEQ ID NO: 1121545 - RNA, 19 nt, Artificial Sequence
  Description of Artificial Sequence: Synthetic oligonucleotide
  Antisense strand to SEQ ID NO: 1121544
uguuuccuaaauguucucu

SEQ ID NO: 1121546 - RNA, 19 nt, Artificial Sequence
  Description of Artificial Sequence: Synthetic oligonucleotide
  Sense strand starting at position 574 of SEQ ID NO: 915986
uugagaugaaaucgagcua

SEQ ID NO: 1121547 - RNA, 19 nt, Artificial Sequence
  Description of Artificial Sequence: Synthetic oligonucleotide
  Antisense strand to SEQ ID NO: 1121546
uagcucgauuucaucucaa

SEQ ID NO: 1121548 - RNA, 19 nt, Artificial Sequence
  Description of Artificial Sequence: Synthetic oligonucleotide
  Sense strand starting at position 625 of SEQ ID NO: 915986
gcacuaauagcccaaauga

SEQ ID NO: 1121549 - RNA, 19 nt, Artificial Sequence
  Description of Artificial Sequence: Synthetic oligonucleotide
  Antisense strand to SEQ ID NO: 1121548
ucauuugggcuauuagugc

SEQ ID NO: 1121550 - RNA, 19 nt, Artificial Sequence
  Description of Artificial Sequence: Synthetic oligonucleotide
  Sense strand starting at position 737 of SEQ ID NO: 915986
ggccuuuacuaauuugcau

SEQ ID NO: 1121551 - RNA, 19 nt, Artificial Sequence
  Description of Artificial Sequence: Synthetic oligonucleotide
  Antisense strand to SEQ ID NO: 1121550
augcaaauuaguaaaggcc

SEQ ID NO: 1121552 - RNA, 19 nt, Artificial Sequence
  Description of Artificial Sequence: Synthetic oligonucleotide
  Sense strand starting at position 828 of SEQ ID NO: 915986
accucaaggcgcuaaauua

SEQ ID NO: 1121553 - RNA, 19 nt, Artificial Sequence
  Description of Artificial Sequence: Synthetic oligonucleotide
  Antisense strand to SEQ ID NO: 1121552
uaauuuagcgccuugaggu

SEQ ID NO: 1121554 - RNA, 19 nt, Artificial Sequence
  Description of Artificial Sequence: Synthetic oligonucleotide
  Sense strand starting at position 889 of SEQ ID NO: 915986
ggaaguguugcaguugugu

SEQ ID NO: 1121555 - RNA, 19 nt, Artificial Sequence
  Description of Artificial Sequence: Synthetic oligonucleotide
  Antisense strand to SEQ ID NO: 1121554
acacaacugcaacacuucc

SEQ ID NO: 1121556 - RNA, 19 nt, Artificial Sequence
  Description of Artificial Sequence: Synthetic oligonucleotide
  Sense strand starting at position 934 of SEQ ID NO: 915986
aaauguuaggcaugagagu

SEQ ID NO: 1121557 - RNA, 19 nt, Artificial Sequence
  Description of Artificial Sequence: Synthetic oligonucleotide
  Antisense strand to SEQ ID NO: 1121556
acucucaugccuaacauuu

SEQ ID NO: 1121558 - RNA, 19 nt, Artificial Sequence
  Description of Artificial Sequence: Synthetic oligonucleotide
  Sense strand starting at position 1147 of SEQ ID NO: 915986
gagucauuccggcauuugu

SEQ ID NO: 1121559 - RNA, 19 nt, Artificial Sequence
  Description of Artificial Sequence: Synthetic oligonucleotide
  Antisense strand to SEQ ID NO: 1121558
acaaaugccggaaugacuc

SEQ ID NO: 1121560 - RNA, 19 nt, Artificial Sequence
  Description of Artificial Sequence: Synthetic oligonucleotide
  Sense strand starting at position 1981 of SEQ ID NO: 915986
gaagaaagcaucgaucguu

SEQ ID NO: 1121561 - RNA, 19 nt, Artificial Sequence
  Description of Artificial Sequence: Synthetic oligonucleotide
  Antisense strand to SEQ ID NO: 1121560
aacgaucgaugcuuucuuc

SEQ ID NO: 1121562 - RNA, 19 nt, Artificial Sequence
  Description of Artificial Sequence: Synthetic oligonucleotide
  Sense strand starting at position 2027 of SEQ ID NO: 915986
aacuaaacucgccgaggaa

SEQ ID NO: 1121563 - RNA, 19 nt, Artificial Sequence
  Description of Artificial Sequence: Synthetic oligonucleotide
  Antisense strand to SEQ ID NO: 1121562
uuccucggcgaguuuaguu

SEQ ID NO: 1121564 - RNA, 19 nt, Artificial Sequence
  Description of Artificial Sequence: Synthetic oligonucleotide
  Sense strand starting at position 2028 of SEQ ID NO: 915986
acuaaacucgccgaggaaa

SEQ ID NO: 1121565 - RNA, 19 nt, Artificial Sequence
  Description of Artificial Sequence: Synthetic oligonucleotide
  Antisense strand to SEQ ID NO: 1121564
uuuccucggcgaguuuagu

SEQ ID NO: 1121566 - RNA, 19 nt, Artificial Sequence
  Description of Artificial Sequence: Synthetic oligonucleotide
  Sense strand starting at position 2144 of SEQ ID NO: 915986
gcugcuucccuggagggaa

SEQ ID NO: 1121567 - RNA, 19 nt, Artificial Sequence
  Description of Artificial Sequence: Synthetic oligonucleotide
  Antisense strand to SEQ ID NO: 1121566
uucccuccagggaagcagc

SEQ ID NO: 1121568 - RNA, 19 nt, Artificial Sequence
  Description of Artificial Sequence: Synthetic oligonucleotide
  Sense strand starting at position 2246 of SEQ ID NO: 915986
ucggaugggcugugauaga

SEQ ID NO: 1121569 - RNA, 19 nt, Artificial Sequence
  Description of Artificial Sequence: Synthetic oligonucleotide
  Antisense strand to SEQ ID NO: 1121568
ucuaucacagcccauccga

SEQ ID NO: 1121570 - RNA, 19 nt, Artificial Sequence
  Description of Artificial Sequence: Synthetic oligonucleotide
  Sense strand starting at position 2253 of SEQ ID NO: 915986
ggcugugauagauggagua

SEQ ID NO: 1121571 - RNA, 19 nt, Artificial Sequence
  Description of Artificial Sequence: Synthetic oligonucleotide
  Antisense strand to SEQ ID NO: 1121570
uacuccaucuaucacagcc

SEQ ID NO: 1121572 - RNA, 19 nt, Artificial Sequence
  Description of Artificial Sequence: Synthetic oligonucleotide
  Sense strand starting at position 2334 of SEQ ID NO: 915986
gcugguuucuacuuggaag

SEQ ID NO: 1121573 - RNA, 19 nt, Artificial Sequence
  Description of Artificial Sequence: Synthetic oligonucleotide
  Antisense strand to SEQ ID NO: 1121572
cuuccaaguagaaaccagc

SEQ ID NO: 1121574 - RNA, 19 nt, Artificial Sequence
  Description of Artificial Sequence: Synthetic oligonucleotide
  Sense strand starting at position 2691 of SEQ ID NO: 915986
caggcacaucucgaauagu

SEQ ID NO: 1121575 - RNA, 19 nt, Artificial Sequence
  Description of Artificial Sequence: Synthetic oligonucleotide
  Antisense strand to SEQ ID NO: 1121574
acuauucgagaugugccug

SEQ ID NO: 1121576 - RNA, 19 nt, Artificial Sequence
  Description of Artificial Sequence: Synthetic oligonucleotide
  Sense strand starting at position 2694 of SEQ ID NO: 915986
gcacaucucgaauagugaa

SEQ ID NO: 1121577 - RNA, 19 nt, Artificial Sequence
  Description of Artificial Sequence: Synthetic oligonucleotide
  Antisense strand to SEQ ID NO: 1121576
uucacuauucgagaugugc

SEQ ID NO: 1121578 - RNA, 19 nt, Artificial Sequence
  Description of Artificial Sequence: Synthetic oligonucleotide
  Sense strand starting at position 3005 of SEQ ID NO: 915986
ucgucuguggucucagcua

SEQ ID NO: 1121579 - RNA, 19 nt, Artificial Sequence
  Description of Artificial Sequence: Synthetic oligonucleotide
  Antisense strand to SEQ ID NO: 1121578
uagcugagaccacagacga

SEQ ID NO: 1121580 - RNA, 19 nt, Artificial Sequence
  Description of Artificial Sequence: Synthetic oligonucleotide
  Sense strand starting at position 3040 of SEQ ID NO: 915986
gggagaaucugggagaauu

SEQ ID NO: 1121581 - RNA, 19 nt, Artificial Sequence
  Description of Artificial Sequence: Synthetic oligonucleotide
  Antisense strand to SEQ ID NO: 1121580
aauucucccagauucuccc

SEQ ID NO: 1121582 - RNA, 19 nt, Artificial Sequence
  Description of Artificial Sequence: Synthetic oligonucleotide
  Sense strand starting at position 3178 of SEQ ID NO: 915986
acucuuagaucaucucagu

SEQ ID NO: 1121583 - RNA, 19 nt, Artificial Sequence
  Description of Artificial Sequence: Synthetic oligonucleotide
  Antisense strand to SEQ ID NO: 1121582
acugagaugaucuaagagu

SEQ ID NO: 1121584 - RNA, 19 nt, Artificial Sequence
  Description of Artificial Sequence: Synthetic oligonucleotide
  Sense strand starting at position 3189 of SEQ ID NO: 915986
aucucaguguucuuauuaa

SEQ ID NO: 1121585 - RNA, 19 nt, Artificial Sequence
  Description of Artificial Sequence: Synthetic oligonucleotide
  Antisense strand to SEQ ID NO: 1121584
uuaauaagaacacugagau

SEQ ID NO: 1121586 - RNA, 19 nt, Artificial Sequence
  Description of Artificial Sequence: Synthetic oligonucleotide
  Sense strand starting at position 3268 of SEQ ID NO: 915986
uggaaaguauagucaacca

SEQ ID NO: 1121587 - RNA, 19 nt, Artificial Sequence
  Description of Artificial Sequence: Synthetic oligonucleotide
  Antisense strand to SEQ ID NO: 1121586
ugguugacuauacuuucca

SEQ ID NO: 1121588 - RNA, 19 nt, Artificial Sequence
  Description of Artificial Sequence: Synthetic oligonucleotide
  Sense strand starting at position 3295 of SEQ ID NO: 915986
aaacauggagagcguuaaa

SEQ ID NO: 1121589 - RNA, 19 nt, Artificial Sequence
  Description of Artificial Sequence: Synthetic oligonucleotide
  Antisense strand to SEQ ID NO: 1121588
uuuaacgcucuccauguuu

SEQ ID NO: 1121590 - RNA, 19 nt, Artificial Sequence
  Description of Artificial Sequence: Synthetic oligonucleotide
  Sense strand starting at position 3298 of SEQ ID NO: 915986
cauggagagcguuaaacau

SEQ ID NO: 1121591 - RNA, 19 nt, Artificial Sequence
  Description of Artificial Sequence: Synthetic oligonucleotide
  Antisense strand to SEQ ID NO: 1121590
auguuuaacgcucuccaug

SEQ ID NO: 1121592 - RNA, 19 nt, Artificial Sequence
  Description of Artificial Sequence: Synthetic oligonucleotide
  Sense strand starting at position 3403 of SEQ ID NO: 915986
guaaauaaaucaguccuua

SEQ ID NO: 1121593 - RNA, 19 nt, Artificial Sequence
  Description of Artificial Sequence: Synthetic oligonucleotide
  Antisense strand to SEQ ID NO: 1121592
uaaggacugauuuauuuac

SEQ ID NO: 1121594 - RNA, 19 nt, Artificial Sequence
  Description of Artificial Sequence: Synthetic oligonucleotide
  Sense strand starting at position 3481 of SEQ ID NO: 915986
cggcucaaagauuguaaca

SEQ ID NO: 1121595 - RNA, 19 nt, Artificial Sequence
  Description of Artificial Sequence: Synthetic oligonucleotide
  Antisense strand to SEQ ID NO: 1121594
uguuacaaucuuugagccg

SEQ ID NO: 1121596 - RNA, 19 nt, Artificial Sequence
  Description of Artificial Sequence: Synthetic oligonucleotide
  Sense strand starting at position 3510 of SEQ ID NO: 915986
aagugaagauauccguaug

SEQ ID NO: 1121597 - RNA, 19 nt, Artificial Sequence
  Description of Artificial Sequence: Synthetic oligonucleotide
  Antisense strand to SEQ ID NO: 1121596
cauacggauaucuucacuu

SEQ ID NO: 1121598 - RNA, 19 nt, Artificial Sequence
  Description of Artificial Sequence: Synthetic oligonucleotide
  Sense strand starting at position 3511 of SEQ ID NO: 915986
agugaagauauccguauga

SEQ ID NO: 1121599 - RNA, 19 nt, Artificial Sequence
  Description of Artificial Sequence: Synthetic oligonucleotide
  Antisense strand to SEQ ID NO: 1121598
ucauacggauaucuucacu

SEQ ID NO: 1121600 - RNA, 19 nt, Artificial Sequence
  Description of Artificial Sequence: Synthetic oligonucleotide
  Sense strand starting at position 3513 of SEQ ID NO: 915986
ugaagauauccguaugauc

SEQ ID NO: 1121601 - RNA, 19 nt, Artificial Sequence
  Description of Artificial Sequence: Synthetic oligonucleotide
  Antisense strand to SEQ ID NO: 1121600
gaucauacggauaucuuca

SEQ ID NO: 1121602 - RNA, 19 nt, Artificial Sequence
  Description of Artificial Sequence: Synthetic oligonucleotide
  Sense strand starting at position 3515 of SEQ ID NO: 915986
aagauauccguaugaucuu

SEQ ID NO: 1121603 - RNA, 19 nt, Artificial Sequence
  Description of Artificial Sequence: Synthetic oligonucleotide
  Antisense strand to SEQ ID NO: 1121602
aagaucauacggauaucuu

SEQ ID NO: 1121604 - RNA, 19 nt, Artificial Sequence
  Description of Artificial Sequence: Synthetic oligonucleotide
  Sense strand starting at position 3574 of SEQ ID NO: 915986
aguagugaucccgaauuau

SEQ ID NO: 1121605 - RNA, 19 nt, Artificial Sequence
  Description of Artificial Sequence: Synthetic oligonucleotide
  Antisense strand to SEQ ID NO: 1121604
auaauucgggaucacuacu

SEQ ID NO: 1121606 - RNA, 19 nt, Artificial Sequence
  Description of Artificial Sequence: Synthetic oligonucleotide
  Sense strand starting at position 3611 of SEQ ID NO: 915986
ccuucuauggcaggaauau

SEQ ID NO: 1121607 - RNA, 19 nt, Artificial Sequence
  Description of Artificial Sequence: Synthetic oligonucleotide
  Antisense strand to SEQ ID NO: 1121606
auauuccugccauagaagg

SEQ ID NO: 1121608 - RNA, 19 nt, Artificial Sequence
  Description of Artificial Sequence: Synthetic oligonucleotide
  Sense strand starting at position 3612 of SEQ ID NO: 915986
cuucuauggcaggaauauu

SEQ ID NO: 1121609 - RNA, 19 nt, Artificial Sequence
  Description of Artificial Sequence: Synthetic oligonucleotide
  Antisense strand to SEQ ID NO: 1121608
aauauuccugccauagaag

SEQ ID NO: 1121610 - RNA, 19 nt, Artificial Sequence
  Description of Artificial Sequence: Synthetic oligonucleotide
  Sense strand starting at position 3771 of SEQ ID NO: 915986
augcgaauuuccuuagguc

SEQ ID NO: 1121611 - RNA, 19 nt, Artificial Sequence
  Description of Artificial Sequence: Synthetic oligonucleotide
  Antisense strand to SEQ ID NO: 1121610
gaccuaaggaaauucgcau

SEQ ID NO: 1121612 - RNA, 19 nt, Artificial Sequence
  Description of Artificial Sequence: Synthetic oligonucleotide
  Sense strand starting at position 3859 of SEQ ID NO: 915986
acacuaugugaucaacguu

SEQ ID NO: 1121613 - RNA, 19 nt, Artificial Sequence
  Description of Artificial Sequence: Synthetic oligonucleotide
  Antisense strand to SEQ ID NO: 1121612
aacguugaucacauagugu

SEQ ID NO: 1121614 - RNA, 19 nt, Artificial Sequence
  Description of Artificial Sequence: Synthetic oligonucleotide
  Sense strand starting at position 449 of SEQ ID NO: 915987
ggaugcuagggcugaaaga

SEQ ID NO: 1121615 - RNA, 19 nt, Artificial Sequence
  Description of Artificial Sequence: Synthetic oligonucleotide
  Antisense strand to SEQ ID NO: 1121614
ucuuucagcccuagcaucc

SEQ ID NO: 1121616 - RNA, 19 nt, Artificial Sequence
  Description of Artificial Sequence: Synthetic oligonucleotide
  Sense strand starting at position 679 of SEQ ID NO: 915987
caaguuugacagugaaacu

SEQ ID NO: 1121617 - RNA, 19 nt, Artificial Sequence
  Description of Artificial Sequence: Synthetic oligonucleotide
  Antisense strand to SEQ ID NO: 1121616
aguuucacugucaaacuug

SEQ ID NO: 1121618 - RNA, 19 nt, Artificial Sequence
  Description of Artificial Sequence: Synthetic oligonucleotide
  Sense strand starting at position 721 of SEQ ID NO: 915987
uaaucauuacuagggaggu

SEQ ID NO: 1121619 - RNA, 19 nt, Artificial Sequence
  Description of Artificial Sequence: Synthetic oligonucleotide
  Antisense strand to SEQ ID NO: 1121618
accucccuaguaaugauua

SEQ ID NO: 1121620 - RNA, 19 nt, Artificial Sequence
  Description of Artificial Sequence: Synthetic oligonucleotide
  Sense strand starting at position 917 of SEQ ID NO: 915987
guuaucugucaugagcuau

SEQ ID NO: 1121621 - RNA, 19 nt, Artificial Sequence
  Description of Artificial Sequence: Synthetic oligonucleotide
  Antisense strand to SEQ ID NO: 1121620
auagcucaugacagauaac

SEQ ID NO: 1121622 - RNA, 19 nt, Artificial Sequence
  Description of Artificial Sequence: Synthetic oligonucleotide
  Sense strand starting at position 923 of SEQ ID NO: 915987
ugucaugagcuauauguua

SEQ ID NO: 1121623 - RNA, 19 nt, Artificial Sequence
  Description of Artificial Sequence: Synthetic oligonucleotide
  Antisense strand to SEQ ID NO: 1121622
uaacauauagcucaugaca

SEQ ID NO: 1121624 - RNA, 19 nt, Artificial Sequence
  Description of Artificial Sequence: Synthetic oligonucleotide
  Sense strand starting at position 972 of SEQ ID NO: 915987
guauguaggagucagggau

SEQ ID NO: 1121625 - RNA, 19 nt, Artificial Sequence
  Description of Artificial Sequence: Synthetic oligonucleotide
  Antisense strand to SEQ ID NO: 1121624
aucccugacuccuacauac

SEQ ID NO: 1121626 - RNA, 19 nt, Artificial Sequence
  Description of Artificial Sequence: Synthetic oligonucleotide
  Sense strand starting at position 1317 of SEQ ID NO: 915987
aguccugcagagcaagauu

SEQ ID NO: 1121627 - RNA, 19 nt, Artificial Sequence
  Description of Artificial Sequence: Synthetic oligonucleotide
  Antisense strand to SEQ ID NO: 1121626
aaucuugcucugcaggacu

SEQ ID NO: 1121628 - RNA, 19 nt, Artificial Sequence
  Description of Artificial Sequence: Synthetic oligonucleotide
  Sense strand starting at position 1371 of SEQ ID NO: 915987
auaccauaccuuuaugugu

SEQ ID NO: 1121629 - RNA, 19 nt, Artificial Sequence
  Description of Artificial Sequence: Synthetic oligonucleotide
  Antisense strand to SEQ ID NO: 1121628
acacauaaagguaugguau

SEQ ID NO: 1121630 - RNA, 19 nt, Artificial Sequence
  Description of Artificial Sequence: Synthetic oligonucleotide
  Sense strand starting at position 1378 of SEQ ID NO: 915987
accuuuauguguuuaagau

SEQ ID NO: 1121631 - RNA, 19 nt, Artificial Sequence
  Description of Artificial Sequence: Synthetic oligonucleotide
  Antisense strand to SEQ ID NO: 1121630
aucuuaaacacauaaaggu

SEQ ID NO: 1121632 - RNA, 19 nt, Artificial Sequence
  Description of Artificial Sequence: Synthetic oligonucleotide
  Sense strand starting at position 1379 of SEQ ID NO: 915987
ccuuuauguguuuaagauu

SEQ ID NO: 1121633 - RNA, 19 nt, Artificial Sequence
  Description of Artificial Sequence: Synthetic oligonucleotide
  Antisense strand to SEQ ID NO: 1121632
aaucuuaaacacauaaagg

SEQ ID NO: 1121634 - RNA, 19 nt, Artificial Sequence
  Description of Artificial Sequence: Synthetic oligonucleotide
  Sense strand starting at position 1385 of SEQ ID NO: 915987
uguguuuaagauuaguaga

SEQ ID NO: 1121635 - RNA, 19 nt, Artificial Sequence
  Description of Artificial Sequence: Synthetic oligonucleotide
  Antisense strand to SEQ ID NO: 1121634
ucuacuaaucuuaaacaca

SEQ ID NO: 1121636 - RNA, 19 nt, Artificial Sequence
  Description of Artificial Sequence: Synthetic oligonucleotide
  Sense strand starting at position 1743 of SEQ ID NO: 915987
agacaaaugcaauguggaa

SEQ ID NO: 1121637 - RNA, 19 nt, Artificial Sequence
  Description of Artificial Sequence: Synthetic oligonucleotide
  Antisense strand to SEQ ID NO: 1121636
uuccacauugcauuugucu

SEQ ID NO: 1121638 - RNA, 19 nt, Artificial Sequence
  Description of Artificial Sequence: Synthetic oligonucleotide
  Sense strand starting at position 1883 of SEQ ID NO: 915987
aagcacaagucaucaggua

SEQ ID NO: 1121639 - RNA, 19 nt, Artificial Sequence
  Description of Artificial Sequence: Synthetic oligonucleotide
  Antisense strand to SEQ ID NO: 1121638
uaccugaugacuugugcuu

SEQ ID NO: 1121640 - RNA, 19 nt, Artificial Sequence
  Description of Artificial Sequence: Synthetic oligonucleotide
  Sense strand starting at position 1953 of SEQ ID NO: 915987
ccuggaugucuccacgagu

SEQ ID NO: 1121641 - RNA, 19 nt, Artificial Sequence
  Description of Artificial Sequence: Synthetic oligonucleotide
  Antisense strand to SEQ ID NO: 1121640
acucguggagacauccagg

SEQ ID NO: 1121642 - RNA, 19 nt, Artificial Sequence
  Description of Artificial Sequence: Synthetic oligonucleotide
  Sense strand starting at position 1997 of SEQ ID NO: 915987
cagugaagucaugaaguau

SEQ ID NO: 1121643 - RNA, 19 nt, Artificial Sequence
  Description of Artificial Sequence: Synthetic oligonucleotide
  Antisense strand to SEQ ID NO: 1121642
auacuucaugacuucacug

SEQ ID NO: 1121644 - RNA, 19 nt, Artificial Sequence
  Description of Artificial Sequence: Synthetic oligonucleotide
  Sense strand starting at position 2078 of SEQ ID NO: 915987
agucuuaugcucuagacca

SEQ ID NO: 1121645 - RNA, 19 nt, Artificial Sequence
  Description of Artificial Sequence: Synthetic oligonucleotide
  Antisense strand to SEQ ID NO: 1121644
uggucuagagcauaagacu

SEQ ID NO: 1121646 - RNA, 19 nt, Artificial Sequence
  Description of Artificial Sequence: Synthetic oligonucleotide
  Sense strand starting at position 2086 of SEQ ID NO: 915987
gcucuagaccacuaucuga

SEQ ID NO: 1121647 - RNA, 19 nt, Artificial Sequence
  Description of Artificial Sequence: Synthetic oligonucleotide
  Antisense strand to SEQ ID NO: 1121646
ucagauaguggucuagagc

SEQ ID NO: 1121648 - RNA, 19 nt, Artificial Sequence
  Description of Artificial Sequence: Synthetic oligonucleotide
  Sense strand starting at position 2228 of SEQ ID NO: 915987
gaggguaccucuguacaua

SEQ ID NO: 1121649 - RNA, 19 nt, Artificial Sequence
  Description of Artificial Sequence: Synthetic oligonucleotide
  Antisense strand to SEQ ID NO: 1121648
uauguacagagguacccuc

SEQ ID NO: 1121650 - RNA, 19 nt, Artificial Sequence
  Description of Artificial Sequence: Synthetic oligonucleotide
  Sense strand starting at position 2295 of SEQ ID NO: 915987
augagaugugaggguugga

SEQ ID NO: 1121651 - RNA, 19 nt, Artificial Sequence
  Description of Artificial Sequence: Synthetic oligonucleotide
  Antisense strand to SEQ ID NO: 1121650
uccaacccucacaucucau

SEQ ID NO: 1121652 - RNA, 19 nt, Artificial Sequence
  Description of Artificial Sequence: Synthetic oligonucleotide
  Sense strand starting at position 2375 of SEQ ID NO: 915987
aucugaaaugcuugauaua

SEQ ID NO: 1121653 - RNA, 19 nt, Artificial Sequence
  Description of Artificial Sequence: Synthetic oligonucleotide
  Antisense strand to SEQ ID NO: 1121652
uauaucaagcauuucagau

SEQ ID NO: 1121654 - RNA, 19 nt, Artificial Sequence
  Description of Artificial Sequence: Synthetic oligonucleotide
  Sense strand starting at position 2376 of SEQ ID NO: 915987
ucugaaaugcuugauauau

SEQ ID NO: 1121655 - RNA, 19 nt, Artificial Sequence
  Description of Artificial Sequence: Synthetic oligonucleotide
  Antisense strand to SEQ ID NO: 1121654
auauaucaagcauuucaga

SEQ ID NO: 1121656 - RNA, 19 nt, Artificial Sequence
  Description of Artificial Sequence: Synthetic oligonucleotide
  Sense strand starting at position 2456 of SEQ ID NO: 915987
ucacaaucgagugggaaua

SEQ ID NO: 1121657 - RNA, 19 nt, Artificial Sequence
  Description of Artificial Sequence: Synthetic oligonucleotide
  Antisense strand to SEQ ID NO: 1121656
uauucccacucgauuguga

SEQ ID NO: 1121658 - RNA, 19 nt, Artificial Sequence
  Description of Artificial Sequence: Synthetic oligonucleotide
  Sense strand starting at position 2457 of SEQ ID NO: 915987
cacaaucgagugggaauau

SEQ ID NO: 1121659 - RNA, 19 nt, Artificial Sequence
  Description of Artificial Sequence: Synthetic oligonucleotide
  Antisense strand to SEQ ID NO: 1121658
auauucccacucgauugug

SEQ ID NO: 1121660 - RNA, 19 nt, Artificial Sequence
  Description of Artificial Sequence: Synthetic oligonucleotide
  Sense strand starting at position 2468 of SEQ ID NO: 915987
gggaauauguacccauaca

SEQ ID NO: 1121661 - RNA, 19 nt, Artificial Sequence
  Description of Artificial Sequence: Synthetic oligonucleotide
  Antisense strand to SEQ ID NO: 1121660
uguauggguacauauuccc

SEQ ID NO: 1121662 - RNA, 19 nt, Artificial Sequence
  Description of Artificial Sequence: Synthetic oligonucleotide
  Sense strand starting at position 2573 of SEQ ID NO: 915987
auauauaacccagggcaau

SEQ ID NO: 1121663 - RNA, 19 nt, Artificial Sequence
  Description of Artificial Sequence: Synthetic oligonucleotide
  Antisense strand to SEQ ID NO: 1121662
auugcccuggguuauauau

SEQ ID NO: 1121664 - RNA, 19 nt, Artificial Sequence
  Description of Artificial Sequence: Synthetic oligonucleotide
  Sense strand starting at position 2586 of SEQ ID NO: 915987
ggcaaucuaggagagucuu

SEQ ID NO: 1121665 - RNA, 19 nt, Artificial Sequence
  Description of Artificial Sequence: Synthetic oligonucleotide
  Antisense strand to SEQ ID NO: 1121664
aagacucuccuagauugcc

SEQ ID NO: 1121666 - RNA, 19 nt, Artificial Sequence
  Description of Artificial Sequence: Synthetic oligonucleotide
  Sense strand starting at position 2621 of SEQ ID NO: 915987
gugggcaaguacuuaauua

SEQ ID NO: 1121667 - RNA, 19 nt, Artificial Sequence
  Description of Artificial Sequence: Synthetic oligonucleotide
  Antisense strand to SEQ ID NO: 1121666
uaauuaaguacuugcccac

SEQ ID NO: 1121668 - RNA, 19 nt, Artificial Sequence
  Description of Artificial Sequence: Synthetic oligonucleotide
  Sense strand starting at position 2625 of SEQ ID NO: 915987
gcaaguacuuaauuaagua

SEQ ID NO: 1121669 - RNA, 19 nt, Artificial Sequence
  Description of Artificial Sequence: Synthetic oligonucleotide
  Antisense strand to SEQ ID NO: 1121668
uacuuaauuaaguacuugc

SEQ ID NO: 1121670 - RNA, 19 nt, Artificial Sequence
  Description of Artificial Sequence: Synthetic oligonucleotide
  Sense strand starting at position 2691 of SEQ ID NO: 915987
auaaguggagccuagucaa

SEQ ID NO: 1121671 - RNA, 19 nt, Artificial Sequence
  Description of Artificial Sequence: Synthetic oligonucleotide
  Antisense strand to SEQ ID NO: 1121670
uugacuaggcuccacuuau

SEQ ID NO: 1121672 - RNA, 19 nt, Artificial Sequence
  Description of Artificial Sequence: Synthetic oligonucleotide
  Sense strand starting at position 2756 of SEQ ID NO: 915987
gagcuuaguggucacugga

SEQ ID NO: 1121673 - RNA, 19 nt, Artificial Sequence
  Description of Artificial Sequence: Synthetic oligonucleotide
  Antisense strand to SEQ ID NO: 1121672
uccagugaccacuaagcuc

SEQ ID NO: 1121674 - RNA, 19 nt, Artificial Sequence
  Description of Artificial Sequence: Synthetic oligonucleotide
  Sense strand starting at position 2759 of SEQ ID NO: 915987
cuuaguggucacuggagaa

SEQ ID NO: 1121675 - RNA, 19 nt, Artificial Sequence
  Description of Artificial Sequence: Synthetic oligonucleotide
  Antisense strand to SEQ ID NO: 1121674
uucuccagugaccacuaag

SEQ ID NO: 1121676 - RNA, 19 nt, Artificial Sequence
  Description of Artificial Sequence: Synthetic oligonucleotide
  Sense strand starting at position 2829 of SEQ ID NO: 915987
gguaauuccugcuuaauga

SEQ ID NO: 1121677 - RNA, 19 nt, Artificial Sequence
  Description of Artificial Sequence: Synthetic oligonucleotide
  Antisense strand to SEQ ID NO: 1121676
ucauuaagcaggaauuacc

SEQ ID NO: 1121678 - RNA, 19 nt, Artificial Sequence
  Description of Artificial Sequence: Synthetic oligonucleotide
  Sense strand starting at position 2830 of SEQ ID NO: 915987
guaauuccugcuuaaugaa

SEQ ID NO: 1121679 - RNA, 19 nt, Artificial Sequence
  Description of Artificial Sequence: Synthetic oligonucleotide
  Antisense strand to SEQ ID NO: 1121678
uucauuaagcaggaauuac

SEQ ID NO: 1121680 - RNA, 19 nt, Artificial Sequence
  Description of Artificial Sequence: Synthetic oligonucleotide
  Sense strand starting at position 3024 of SEQ ID NO: 915987
gcuuguuugcagucaaguc

SEQ ID NO: 1121681 - RNA, 19 nt, Artificial Sequence
  Description of Artificial Sequence: Synthetic oligonucleotide
  Antisense strand to SEQ ID NO: 1121680
gacuugacugcaaacaagc

SEQ ID NO: 1121682 - RNA, 19 nt, Artificial Sequence
  Description of Artificial Sequence: Synthetic oligonucleotide
  Sense strand starting at position 3036 of SEQ ID NO: 915987
ucaagucaccacggaauau

SEQ ID NO: 1121683 - RNA, 19 nt, Artificial Sequence
  Description of Artificial Sequence: Synthetic oligonucleotide
  Antisense strand to SEQ ID NO: 1121682
auauuccguggugacuuga

SEQ ID NO: 1121684 - RNA, 19 nt, Artificial Sequence
  Description of Artificial Sequence: Synthetic oligonucleotide
  Sense strand starting at position 3085 of SEQ ID NO: 915987
ccaagaguugaguaguauu

SEQ ID NO: 1121685 - RNA, 19 nt, Artificial Sequence
  Description of Artificial Sequence: Synthetic oligonucleotide
  Antisense strand to SEQ ID NO: 1121684
aauacuacucaacucuugg

SEQ ID NO: 1121686 - RNA, 19 nt, Artificial Sequence
  Description of Artificial Sequence: Synthetic oligonucleotide
  Sense strand starting at position 3109 of SEQ ID NO: 915987
guuuauuuccauugucauc

SEQ ID NO: 1121687 - RNA, 19 nt, Artificial Sequence
  Description of Artificial Sequence: Synthetic oligonucleotide
  Antisense strand to SEQ ID NO: 1121686
gaugacaauggaaauaaac

SEQ ID NO: 1121688 - RNA, 19 nt, Artificial Sequence
  Description of Artificial Sequence: Synthetic oligonucleotide
  Sense strand starting at position 3226 of SEQ ID NO: 915987
auuccacugcucgaaguaa

SEQ ID NO: 1121689 - RNA, 19 nt, Artificial Sequence
  Description of Artificial Sequence: Synthetic oligonucleotide
  Antisense strand to SEQ ID NO: 1121688
uuacuucgagcaguggaau

SEQ ID NO: 1121690 - RNA, 19 nt, Artificial Sequence
  Description of Artificial Sequence: Synthetic oligonucleotide
  Sense strand starting at position 3645 of SEQ ID NO: 915987
ugguaauuuaugugugauu

SEQ ID NO: 1121691 - RNA, 19 nt, Artificial Sequence
  Description of Artificial Sequence: Synthetic oligonucleotide
  Antisense strand to SEQ ID NO: 1121690
aaucacacauaaauuacca

SEQ ID NO: 1121692 - RNA, 19 nt, Artificial Sequence
  Description of Artificial Sequence: Synthetic oligonucleotide
  Sense strand starting at position 3703 of SEQ ID NO: 915987
acuuccauguuaguacaua

SEQ ID NO: 1121693 - RNA, 19 nt, Artificial Sequence
  Description of Artificial Sequence: Synthetic oligonucleotide
  Antisense strand to SEQ ID NO: 1121692
uauguacuaacauggaagu

SEQ ID NO: 1121694 - RNA, 19 nt, Artificial Sequence
  Description of Artificial Sequence: Synthetic oligonucleotide
  Sense strand starting at position 24 of SEQ ID NO: 915988
agagaacuguuuccagcua

SEQ ID NO: 1121695 - RNA, 19 nt, Artificial Sequence
  Description of Artificial Sequence: Synthetic oligonucleotide
  Antisense strand to SEQ ID NO: 1121694
uagcuggaaacaguucucu

SEQ ID NO: 1121696 - RNA, 19 nt, Artificial Sequence
  Description of Artificial Sequence: Synthetic oligonucleotide
  Sense strand starting at position 25 of SEQ ID NO: 915988
gagaacuguuuccagcuaa

SEQ ID NO: 1121697 - RNA, 19 nt, Artificial Sequence
  Description of Artificial Sequence: Synthetic oligonucleotide
  Antisense strand to SEQ ID NO: 1121696
uuagcuggaaacaguucuc

SEQ ID NO: 1121698 - RNA, 19 nt, Artificial Sequence
  Description of Artificial Sequence: Synthetic oligonucleotide
  Sense strand starting at position 170 of SEQ ID NO: 915988
gccacugccgaguaguauu

SEQ ID NO: 1121699 - RNA, 19 nt, Artificial Sequence
  Description of Artificial Sequence: Synthetic oligonucleotide
  Antisense strand to SEQ ID NO: 1121698
aauacuacucggcaguggc

SEQ ID NO: 1121700 - RNA, 19 nt, Artificial Sequence
  Description of Artificial Sequence: Synthetic oligonucleotide
  Sense strand starting at position 273 of SEQ ID NO: 915988
acagcuucuuuaugcuaga

SEQ ID NO: 1121701 - RNA, 19 nt, Artificial Sequence
  Description of Artificial Sequence: Synthetic oligonucleotide
  Antisense strand to SEQ ID NO: 1121700
ucuagcauaaagaagcugu

SEQ ID NO: 1121702 - RNA, 19 nt, Artificial Sequence
  Description of Artificial Sequence: Synthetic oligonucleotide
  Sense strand starting at position 276 of SEQ ID NO: 915988
gcuucuuuaugcuagaucu

SEQ ID NO: 1121703 - RNA, 19 nt, Artificial Sequence
  Description of Artificial Sequence: Synthetic oligonucleotide
  Antisense strand to SEQ ID NO: 1121702
agaucuagcauaaagaagc

SEQ ID NO: 1121704 - RNA, 19 nt, Artificial Sequence
  Description of Artificial Sequence: Synthetic oligonucleotide
  Sense strand starting at position 286 of SEQ ID NO: 915988
gcuagaucucagcacagaa

SEQ ID NO: 1121705 - RNA, 19 nt, Artificial Sequence
  Description of Artificial Sequence: Synthetic oligonucleotide
  Antisense strand to SEQ ID NO: 1121704
uucugugcugagaucuagc

SEQ ID NO: 1121706 - RNA, 19 nt, Artificial Sequence
  Description of Artificial Sequence: Synthetic oligonucleotide
  Sense strand starting at position 350 of SEQ ID NO: 915988
aucagaccucugcaugaca

SEQ ID NO: 1121707 - RNA, 19 nt, Artificial Sequence
  Description of Artificial Sequence: Synthetic oligonucleotide
  Antisense strand to SEQ ID NO: 1121706
ugucaugcagaggucugau

SEQ ID NO: 1121708 - RNA, 19 nt, Artificial Sequence
  Description of Artificial Sequence: Synthetic oligonucleotide
  Sense strand starting at position 385 of SEQ ID NO: 915988
acagaacugucucaaagcu

SEQ ID NO: 1121709 - RNA, 19 nt, Artificial Sequence
  Description of Artificial Sequence: Synthetic oligonucleotide
  Antisense strand to SEQ ID NO: 1121708
agcuuugagacaguucugu

SEQ ID NO: 1121710 - RNA, 19 nt, Artificial Sequence
  Description of Artificial Sequence: Synthetic oligonucleotide
  Sense strand starting at position 393 of SEQ ID NO: 915988
gucucaaagcugugccaau

SEQ ID NO: 1121711 - RNA, 19 nt, Artificial Sequence
  Description of Artificial Sequence: Synthetic oligonucleotide
  Antisense strand to SEQ ID NO: 1121710
auuggcacagcuuugagac

SEQ ID NO: 1121712 - RNA, 19 nt, Artificial Sequence
  Description of Artificial Sequence: Synthetic oligonucleotide
  Sense strand starting at position 406 of SEQ ID NO: 915988
gccaaugaguuugacuuga

SEQ ID NO: 1121713 - RNA, 19 nt, Artificial Sequence
  Description of Artificial Sequence: Synthetic oligonucleotide
  Antisense strand to SEQ ID NO: 1121712
ucaagucaaacucauuggc

SEQ ID NO: 1121714 - RNA, 19 nt, Artificial Sequence
  Description of Artificial Sequence: Synthetic oligonucleotide
  Sense strand starting at position 408 of SEQ ID NO: 915988
caaugaguuugacuugauu

SEQ ID NO: 1121715 - RNA, 19 nt, Artificial Sequence
  Description of Artificial Sequence: Synthetic oligonucleotide
  Antisense strand to SEQ ID NO: 1121714
aaucaagucaaacucauug

SEQ ID NO: 1121716 - RNA, 19 nt, Artificial Sequence
  Description of Artificial Sequence: Synthetic oligonucleotide
  Sense strand starting at position 475 of SEQ ID NO: 915988
gagguuuccuucuacugag

SEQ ID NO: 1121717 - RNA, 19 nt, Artificial Sequence
  Description of Artificial Sequence: Synthetic oligonucleotide
  Antisense strand to SEQ ID NO: 1121716
cucaguagaaggaaaccuc

SEQ ID NO: 1121718 - RNA, 19 nt, Artificial Sequence
  Description of Artificial Sequence: Synthetic oligonucleotide
  Sense strand starting at position 529 of SEQ ID NO: 915988
ccuauauugugacuacgga

SEQ ID NO: 1121719 - RNA, 19 nt, Artificial Sequence
  Description of Artificial Sequence: Synthetic oligonucleotide
  Antisense strand to SEQ ID NO: 1121718
uccguagucacaauauagg

SEQ ID NO: 1121720 - RNA, 19 nt, Artificial Sequence
  Description of Artificial Sequence: Synthetic oligonucleotide
  Sense strand starting at position 825 of SEQ ID NO: 915988
ucaaguaauucuguguucu

SEQ ID NO: 1121721 - RNA, 19 nt, Artificial Sequence
  Description of Artificial Sequence: Synthetic oligonucleotide
  Antisense strand to SEQ ID NO: 1121720
agaacacagaauuacuuga

SEQ ID NO: 1121722 - RNA, 19 nt, Artificial Sequence
  Description of Artificial Sequence: Synthetic oligonucleotide
  Sense strand starting at position 829 of SEQ ID NO: 915988
guaauucuguguucucuga

SEQ ID NO: 1121723 - RNA, 19 nt, Artificial Sequence
  Description of Artificial Sequence: Synthetic oligonucleotide
  Antisense strand to SEQ ID NO: 1121722
ucagagaacacagaauuac

SEQ ID NO: 1121724 - RNA, 19 nt, Artificial Sequence
  Description of Artificial Sequence: Synthetic oligonucleotide
  Sense strand starting at position 2299 of SEQ ID NO: 915988
gguacaacuuuggcaauga

SEQ ID NO: 1121725 - RNA, 19 nt, Artificial Sequence
  Description of Artificial Sequence: Synthetic oligonucleotide
  Antisense strand to SEQ ID NO: 1121724
ucauugccaaaguuguacc

SEQ ID NO: 1121726 - RNA, 19 nt, Artificial Sequence
  Description of Artificial Sequence: Synthetic oligonucleotide
  Sense strand starting at position 2517 of SEQ ID NO: 915988
ggauaucaguucucagaau

SEQ ID NO: 1121727 - RNA, 19 nt, Artificial Sequence
  Description of Artificial Sequence: Synthetic oligonucleotide
  Antisense strand to SEQ ID NO: 1121726
auucugagaacugauaucc

SEQ ID NO: 1121728 - RNA, 19 nt, Artificial Sequence
  Description of Artificial Sequence: Synthetic oligonucleotide
  Sense strand starting at position 2569 of SEQ ID NO: 915988
ugguaagucucagguagga

SEQ ID NO: 1121729 - RNA, 19 nt, Artificial Sequence
  Description of Artificial Sequence: Synthetic oligonucleotide
  Antisense strand to SEQ ID NO: 1121728
uccuaccugagacuuacca

SEQ ID NO: 1121730 - RNA, 19 nt, Artificial Sequence
  Description of Artificial Sequence: Synthetic oligonucleotide
  Sense strand starting at position 2635 of SEQ ID NO: 915988
cuuucuagaugcuacagaa

SEQ ID NO: 1121731 - RNA, 19 nt, Artificial Sequence
  Description of Artificial Sequence: Synthetic oligonucleotide
  Antisense strand to SEQ ID NO: 1121730
uucuguagcaucuagaaag

SEQ ID NO: 1121732 - RNA, 19 nt, Artificial Sequence
  Description of Artificial Sequence: Synthetic oligonucleotide
  Sense strand starting at position 2771 of SEQ ID NO: 915988
uuguucuccucuucuguaa

SEQ ID NO: 1121733 - RNA, 19 nt, Artificial Sequence
  Description of Artificial Sequence: Synthetic oligonucleotide
  Antisense strand to SEQ ID NO: 1121732
uuacagaagaggagaacaa

SEQ ID NO: 1121734 - RNA, 19 nt, Artificial Sequence
  Description of Artificial Sequence: Synthetic oligonucleotide
  Sense strand starting at position 2939 of SEQ ID NO: 915988
uuuaguauccggugcuuga

SEQ ID NO: 1121735 - RNA, 19 nt, Artificial Sequence
  Description of Artificial Sequence: Synthetic oligonucleotide
  Antisense strand to SEQ ID NO: 1121734
ucaagcaccggauacuaaa

SEQ ID NO: 1121736 - RNA, 19 nt, Artificial Sequence
  Description of Artificial Sequence: Synthetic oligonucleotide
  Sense strand starting at position 3038 of SEQ ID NO: 915988
accgcucggccucauuaaa

SEQ ID NO: 1121737 - RNA, 19 nt, Artificial Sequence
  Description of Artificial Sequence: Synthetic oligonucleotide
  Antisense strand to SEQ ID NO: 1121736
uuuaaugaggccgagcggu

SEQ ID NO: 1121738 - RNA, 19 nt, Artificial Sequence
  Description of Artificial Sequence: Synthetic oligonucleotide
  Sense strand starting at position 3236 of SEQ ID NO: 915988
gccacuuguaggcaugaga

SEQ ID NO: 1121739 - RNA, 19 nt, Artificial Sequence
  Description of Artificial Sequence: Synthetic oligonucleotide
  Antisense strand to SEQ ID NO: 1121738
ucucaugccuacaaguggc

SEQ ID NO: 1121740 - RNA, 19 nt, Artificial Sequence
  Description of Artificial Sequence: Synthetic oligonucleotide
  Sense strand starting at position 3288 of SEQ ID NO: 915988
agccgagauugggucacua

SEQ ID NO: 1121741 - RNA, 19 nt, Artificial Sequence
  Description of Artificial Sequence: Synthetic oligonucleotide
  Antisense strand to SEQ ID NO: 1121740
uagugacccaaucucggcu

SEQ ID NO: 1121742 - RNA, 19 nt, Artificial Sequence
  Description of Artificial Sequence: Synthetic oligonucleotide
  Sense strand starting at position 3290 of SEQ ID NO: 915988
ccgagauugggucacuaca

SEQ ID NO: 1121743 - RNA, 19 nt, Artificial Sequence
  Description of Artificial Sequence: Synthetic oligonucleotide
  Antisense strand to SEQ ID NO: 1121742
uguagugacccaaucucgg

SEQ ID NO: 1121744 - RNA, 19 nt, Artificial Sequence
  Description of Artificial Sequence: Synthetic oligonucleotide
  Sense strand starting at position 3383 of SEQ ID NO: 915988
acagauugccgauauuaca

SEQ ID NO: 1121745 - RNA, 19 nt, Artificial Sequence
  Description of Artificial Sequence: Synthetic oligonucleotide
  Antisense strand to SEQ ID NO: 1121744
uguaauaucggcaaucugu

SEQ ID NO: 1121746 - RNA, 19 nt, Artificial Sequence
  Description of Artificial Sequence: Synthetic oligonucleotide
  Sense strand starting at position 3432 of SEQ ID NO: 915988
ugcacugucugcuucuuua

SEQ ID NO: 1121747 - RNA, 19 nt, Artificial Sequence
  Description of Artificial Sequence: Synthetic oligonucleotide
  Antisense strand to SEQ ID NO: 1121746
uaaagaagcagacagugca

SEQ ID NO: 1121748 - RNA, 19 nt, Artificial Sequence
  Description of Artificial Sequence: Synthetic oligonucleotide
  Sense strand starting at position 3436 of SEQ ID NO: 915988
cugucugcuucuuuacaga

SEQ ID NO: 1121749 - RNA, 19 nt, Artificial Sequence
  Description of Artificial Sequence: Synthetic oligonucleotide
  Antisense strand to SEQ ID NO: 1121748
ucuguaaagaagcagacag

SEQ ID NO: 1121750 - RNA, 19 nt, Artificial Sequence
  Description of Artificial Sequence: Synthetic oligonucleotide
  Sense strand starting at position 3746 of SEQ ID NO: 915988
auccauaggcaaggaauua

SEQ ID NO: 1121751 - RNA, 19 nt, Artificial Sequence
  Description of Artificial Sequence: Synthetic oligonucleotide
  Antisense strand to SEQ ID NO: 1121750
uaauuccuugccuauggau

SEQ ID NO: 1121752 - RNA, 19 nt, Artificial Sequence
  Description of Artificial Sequence: Synthetic oligonucleotide
  Sense strand starting at position 3813 of SEQ ID NO: 915988
cuaggaaaguguggcaaau

SEQ ID NO: 1121753 - RNA, 19 nt, Artificial Sequence
  Description of Artificial Sequence: Synthetic oligonucleotide
  Antisense strand to SEQ ID NO: 1121752
auuugccacacuuuccuag

SEQ ID NO: 1121754 - RNA, 19 nt, Artificial Sequence
  Description of Artificial Sequence: Synthetic oligonucleotide
  Sense strand starting at position 3955 of SEQ ID NO: 915988
cugggauaugcagggugua

SEQ ID NO: 1121755 - RNA, 19 nt, Artificial Sequence
  Description of Artificial Sequence: Synthetic oligonucleotide
  Antisense strand to SEQ ID NO: 1121754
uacacccugcauaucccag

SEQ ID NO: 1121756 - RNA, 19 nt, Artificial Sequence
  Description of Artificial Sequence: Synthetic oligonucleotide
  Sense strand starting at position 3956 of SEQ ID NO: 915988
ugggauaugcaggguguaa

SEQ ID NO: 1121757 - RNA, 19 nt, Artificial Sequence
  Description of Artificial Sequence: Synthetic oligonucleotide
  Antisense strand to SEQ ID NO: 1121756
uuacacccugcauauccca

SEQ ID NO: 1121758 - RNA, 19 nt, Artificial Sequence
  Description of Artificial Sequence: Synthetic oligonucleotide
  Sense strand starting at position 3958 of SEQ ID NO: 915988
ggauaugcaggguguaaug

SEQ ID NO: 1121759 - RNA, 19 nt, Artificial Sequence
  Description of Artificial Sequence: Synthetic oligonucleotide
  Antisense strand to SEQ ID NO: 1121758
cauuacacccugcauaucc

SEQ ID NO: 1121760 - RNA, 19 nt, Artificial Sequence
  Description of Artificial Sequence: Synthetic oligonucleotide
  Sense strand starting at position 3969 of SEQ ID NO: 915988
guguaaugaguccacccuu

SEQ ID NO: 1121761 - RNA, 19 nt, Artificial Sequence
  Description of Artificial Sequence: Synthetic oligonucleotide
  Antisense strand to SEQ ID NO: 1121760
aaggguggacucauuacac

SEQ ID NO: 1121762 - RNA, 19 nt, Artificial Sequence
  Description of Artificial Sequence: Synthetic oligonucleotide
  Sense strand starting at position 3983 of SEQ ID NO: 915988
cccuuugaguucgagguca

SEQ ID NO: 1121763 - RNA, 19 nt, Artificial Sequence
  Description of Artificial Sequence: Synthetic oligonucleotide
  Antisense strand to SEQ ID NO: 1121762
ugaccucgaacucaaaggg

SEQ ID NO: 1121764 - RNA, 19 nt, Artificial Sequence
  Description of Artificial Sequence: Synthetic oligonucleotide
  Sense strand starting at position 105 of SEQ ID NO: 915989
agacauuagguauguugca

SEQ ID NO: 1121765 - RNA, 19 nt, Artificial Sequence
  Description of Artificial Sequence: Synthetic oligonucleotide
  Antisense strand to SEQ ID NO: 1121764
ugcaacauaccuaaugucu

SEQ ID NO: 1121766 - RNA, 19 nt, Artificial Sequence
  Description of Artificial Sequence: Synthetic oligonucleotide
  Sense strand starting at position 170 of SEQ ID NO: 915989
cacgaaauugacugcagua

SEQ ID NO: 1121767 - RNA, 19 nt, Artificial Sequence
  Description of Artificial Sequence: Synthetic oligonucleotide
  Antisense strand to SEQ ID NO: 1121766
uacugcagucaauuucgug

SEQ ID NO: 1121768 - RNA, 19 nt, Artificial Sequence
  Description of Artificial Sequence: Synthetic oligonucleotide
  Sense strand starting at position 175 of SEQ ID NO: 915989
aauugacugcaguaaguuu

SEQ ID NO: 1121769 - RNA, 19 nt, Artificial Sequence
  Description of Artificial Sequence: Synthetic oligonucleotide
  Antisense strand to SEQ ID NO: 1121768
aaacuuacugcagucaauu

SEQ ID NO: 1121770 - RNA, 19 nt, Artificial Sequence
  Description of Artificial Sequence: Synthetic oligonucleotide
  Sense strand starting at position 274 of SEQ ID NO: 915989
gaacaauuaugguuaugau

SEQ ID NO: 1121771 - RNA, 19 nt, Artificial Sequence
  Description of Artificial Sequence: Synthetic oligonucleotide
  Antisense strand to SEQ ID NO: 1121770
aucauaaccauaauuguuc

SEQ ID NO: 1121772 - RNA, 19 nt, Artificial Sequence
  Description of Artificial Sequence: Synthetic oligonucleotide
  Sense strand starting at position 367 of SEQ ID NO: 915989
accuuaagagguggauauu

SEQ ID NO: 1121773 - RNA, 19 nt, Artificial Sequence
  Description of Artificial Sequence: Synthetic oligonucleotide
  Antisense strand to SEQ ID NO: 1121772
aauauccaccucuuaaggu

SEQ ID NO: 1121774 - RNA, 19 nt, Artificial Sequence
  Description of Artificial Sequence: Synthetic oligonucleotide
  Sense strand starting at position 378 of SEQ ID NO: 915989
uggauauuaguaugcccaa

SEQ ID NO: 1121775 - RNA, 19 nt, Artificial Sequence
  Description of Artificial Sequence: Synthetic oligonucleotide
  Antisense strand to SEQ ID NO: 1121774
uugggcauacuaauaucca

SEQ ID NO: 1121776 - RNA, 19 nt, Artificial Sequence
  Description of Artificial Sequence: Synthetic oligonucleotide
  Sense strand starting at position 379 of SEQ ID NO: 915989
ggauauuaguaugcccaau

SEQ ID NO: 1121777 - RNA, 19 nt, Artificial Sequence
  Description of Artificial Sequence: Synthetic oligonucleotide
  Antisense strand to SEQ ID NO: 1121776
auugggcauacuaauaucc

SEQ ID NO: 1121778 - RNA, 19 nt, Artificial Sequence
  Description of Artificial Sequence: Synthetic oligonucleotide
  Sense strand starting at position 434 of SEQ ID NO: 915989
uaaguaaucugucuaaggu

SEQ ID NO: 1121779 - RNA, 19 nt, Artificial Sequence
  Description of Artificial Sequence: Synthetic oligonucleotide
  Antisense strand to SEQ ID NO: 1121778
accuuagacagauuacuua

SEQ ID NO: 1121780 - RNA, 19 nt, Artificial Sequence
  Description of Artificial Sequence: Synthetic oligonucleotide
  Sense strand starting at position 466 of SEQ ID NO: 915989
agaggaggccuguguaauc

SEQ ID NO: 1121781 - RNA, 19 nt, Artificial Sequence
  Description of Artificial Sequence: Synthetic oligonucleotide
  Antisense strand to SEQ ID NO: 1121780
gauuacacaggccuccucu

SEQ ID NO: 1121782 - RNA, 19 nt, Artificial Sequence
  Description of Artificial Sequence: Synthetic oligonucleotide
  Sense strand starting at position 476 of SEQ ID NO: 915989
uguguaaucugacucuuaa

SEQ ID NO: 1121783 - RNA, 19 nt, Artificial Sequence
  Description of Artificial Sequence: Synthetic oligonucleotide
  Antisense strand to SEQ ID NO: 1121782
uuaagagucagauuacaca

SEQ ID NO: 1121784 - RNA, 19 nt, Artificial Sequence
  Description of Artificial Sequence: Synthetic oligonucleotide
  Sense strand starting at position 491 of SEQ ID NO: 915989
uuaagcaugcuguugugua

SEQ ID NO: 1121785 - RNA, 19 nt, Artificial Sequence
  Description of Artificial Sequence: Synthetic oligonucleotide
  Antisense strand to SEQ ID NO: 1121784
uacacaacagcaugcuuaa

SEQ ID NO: 1121786 - RNA, 19 nt, Artificial Sequence
  Description of Artificial Sequence: Synthetic oligonucleotide
  Sense strand starting at position 496 of SEQ ID NO: 915989
caugcuguuguguaaggga

SEQ ID NO: 1121787 - RNA, 19 nt, Artificial Sequence
  Description of Artificial Sequence: Synthetic oligonucleotide
  Antisense strand to SEQ ID NO: 1121786
ucccuuacacaacagcaug

SEQ ID NO: 1121788 - RNA, 19 nt, Artificial Sequence
  Description of Artificial Sequence: Synthetic oligonucleotide
  Sense strand starting at position 529 of SEQ ID NO: 915989
gaaggauaauccuuguucu

SEQ ID NO: 1121789 - RNA, 19 nt, Artificial Sequence
  Description of Artificial Sequence: Synthetic oligonucleotide
  Antisense strand to SEQ ID NO: 1121788
agaacaaggauuauccuuc

SEQ ID NO: 1121790 - RNA, 19 nt, Artificial Sequence
  Description of Artificial Sequence: Synthetic oligonucleotide
  Sense strand starting at position 532 of SEQ ID NO: 915989
ggauaauccuuguucuuaa

SEQ ID NO: 1121791 - RNA, 19 nt, Artificial Sequence
  Description of Artificial Sequence: Synthetic oligonucleotide
  Antisense strand to SEQ ID NO: 1121790
uuaagaacaaggauuaucc

SEQ ID NO: 1121792 - RNA, 19 nt, Artificial Sequence
  Description of Artificial Sequence: Synthetic oligonucleotide
  Sense strand starting at position 631 of SEQ ID NO: 915989
gggcacuuccgaugcagaa

SEQ ID NO: 1121793 - RNA, 19 nt, Artificial Sequence
  Description of Artificial Sequence: Synthetic oligonucleotide
  Antisense strand to SEQ ID NO: 1121792
uucugcaucggaagugccc

SEQ ID NO: 1121794 - RNA, 19 nt, Artificial Sequence
  Description of Artificial Sequence: Synthetic oligonucleotide
  Sense strand starting at position 633 of SEQ ID NO: 915989
gcacuuccgaugcagaaga

SEQ ID NO: 1121795 - RNA, 19 nt, Artificial Sequence
  Description of Artificial Sequence: Synthetic oligonucleotide
  Antisense strand to SEQ ID NO: 1121794
ucuucugcaucggaagugc

SEQ ID NO: 1121796 - RNA, 19 nt, Artificial Sequence
  Description of Artificial Sequence: Synthetic oligonucleotide
  Sense strand starting at position 657 of SEQ ID NO: 915989
cuaagaagauaccagauua

SEQ ID NO: 1121797 - RNA, 19 nt, Artificial Sequence
  Description of Artificial Sequence: Synthetic oligonucleotide
  Antisense strand to SEQ ID NO: 1121796
uaaucugguaucuucuuag

SEQ ID NO: 1121798 - RNA, 19 nt, Artificial Sequence
  Description of Artificial Sequence: Synthetic oligonucleotide
  Sense strand starting at position 793 of SEQ ID NO: 915989
agcccaaaguguccuaaau

SEQ ID NO: 1121799 - RNA, 19 nt, Artificial Sequence
  Description of Artificial Sequence: Synthetic oligonucleotide
  Antisense strand to SEQ ID NO: 1121798
auuuaggacacuuugggcu

SEQ ID NO: 1121800 - RNA, 19 nt, Artificial Sequence
  Description of Artificial Sequence: Synthetic oligonucleotide
  Sense strand starting at position 819 of SEQ ID NO: 915989
cugguaaacugaccaagau

SEQ ID NO: 1121801 - RNA, 19 nt, Artificial Sequence
  Description of Artificial Sequence: Synthetic oligonucleotide
  Antisense strand to SEQ ID NO: 1121800
aucuuggucaguuuaccag

SEQ ID NO: 1121802 - RNA, 19 nt, Artificial Sequence
  Description of Artificial Sequence: Synthetic oligonucleotide
  Sense strand starting at position 919 of SEQ ID NO: 915989
ucaaguuccuugucuggaa

SEQ ID NO: 1121803 - RNA, 19 nt, Artificial Sequence
  Description of Artificial Sequence: Synthetic oligonucleotide
  Antisense strand to SEQ ID NO: 1121802
uuccagacaaggaacuuga

SEQ ID NO: 1121804 - RNA, 19 nt, Artificial Sequence
  Description of Artificial Sequence: Synthetic oligonucleotide
  Sense strand starting at position 920 of SEQ ID NO: 915989
caaguuccuugucuggaaa

SEQ ID NO: 1121805 - RNA, 19 nt, Artificial Sequence
  Description of Artificial Sequence: Synthetic oligonucleotide
  Antisense strand to SEQ ID NO: 1121804
uuuccagacaaggaacuug

SEQ ID NO: 1121806 - RNA, 19 nt, Artificial Sequence
  Description of Artificial Sequence: Synthetic oligonucleotide
  Sense strand starting at position 989 of SEQ ID NO: 915989
auaccugagucucuucuau

SEQ ID NO: 1121807 - RNA, 19 nt, Artificial Sequence
  Description of Artificial Sequence: Synthetic oligonucleotide
  Antisense strand to SEQ ID NO: 1121806
auagaagagacucagguau

SEQ ID NO: 1121808 - RNA, 19 nt, Artificial Sequence
  Description of Artificial Sequence: Synthetic oligonucleotide
  Sense strand starting at position 1074 of SEQ ID NO: 915989
cccagccuugcaugaaaga

SEQ ID NO: 1121809 - RNA, 19 nt, Artificial Sequence
  Description of Artificial Sequence: Synthetic oligonucleotide
  Antisense strand to SEQ ID NO: 1121808
ucuuucaugcaaggcuggg

SEQ ID NO: 1121810 - RNA, 19 nt, Artificial Sequence
  Description of Artificial Sequence: Synthetic oligonucleotide
  Sense strand starting at position 1075 of SEQ ID NO: 915989
ccagccuugcaugaaagau

SEQ ID NO: 1121811 - RNA, 19 nt, Artificial Sequence
  Description of Artificial Sequence: Synthetic oligonucleotide
  Antisense strand to SEQ ID NO: 1121810
aucuuucaugcaaggcugg

SEQ ID NO: 1121812 - RNA, 19 nt, Artificial Sequence
  Description of Artificial Sequence: Synthetic oligonucleotide
  Sense strand starting at position 1084 of SEQ ID NO: 915989
caugaaagaugcuuuagag

SEQ ID NO: 1121813 - RNA, 19 nt, Artificial Sequence
  Description of Artificial Sequence: Synthetic oligonucleotide
  Antisense strand to SEQ ID NO: 1121812
cucuaaagcaucuuucaug

SEQ ID NO: 1121814 - RNA, 19 nt, Artificial Sequence
  Description of Artificial Sequence: Synthetic oligonucleotide
  Sense strand starting at position 1268 of SEQ ID NO: 915989
gguccuauuugagauacuc

SEQ ID NO: 1121815 - RNA, 19 nt, Artificial Sequence
  Description of Artificial Sequence: Synthetic oligonucleotide
  Antisense strand to SEQ ID NO: 1121814
gaguaucucaaauaggacc

SEQ ID NO: 1121816 - RNA, 19 nt, Artificial Sequence
  Description of Artificial Sequence: Synthetic oligonucleotide
  Sense strand starting at position 1311 of SEQ ID NO: 915989
gaagaauuauuguuguuug

SEQ ID NO: 1121817 - RNA, 19 nt, Artificial Sequence
  Description of Artificial Sequence: Synthetic oligonucleotide
  Antisense strand to SEQ ID NO: 1121816
caaacaacaauaauucuuc

SEQ ID NO: 1121818 - RNA, 19 nt, Artificial Sequence
  Description of Artificial Sequence: Synthetic oligonucleotide
  Sense strand starting at position 1445 of SEQ ID NO: 915989
ugggaagggucuucagauu

SEQ ID NO: 1121819 - RNA, 19 nt, Artificial Sequence
  Description of Artificial Sequence: Synthetic oligonucleotide
  Antisense strand to SEQ ID NO: 1121818
aaucugaagacccuuccca

SEQ ID NO: 1121820 - RNA, 19 nt, Artificial Sequence
  Description of Artificial Sequence: Synthetic oligonucleotide
  Sense strand starting at position 1483 of SEQ ID NO: 915989
uggccagucccuugaauga

SEQ ID NO: 1121821 - RNA, 19 nt, Artificial Sequence
  Description of Artificial Sequence: Synthetic oligonucleotide
  Antisense strand to SEQ ID NO: 1121820
ucauucaagggacuggcca

SEQ ID NO: 1121822 - RNA, 19 nt, Artificial Sequence
  Description of Artificial Sequence: Synthetic oligonucleotide
  Sense strand starting at position 1751 of SEQ ID NO: 915989
gugcccaaccucugagaca

SEQ ID NO: 1121823 - RNA, 19 nt, Artificial Sequence
  Description of Artificial Sequence: Synthetic oligonucleotide
  Antisense strand to SEQ ID NO: 1121822
ugucucagagguugggcac

SEQ ID NO: 1121824 - RNA, 19 nt, Artificial Sequence
  Description of Artificial Sequence: Synthetic oligonucleotide
  Sense strand starting at position 1820 of SEQ ID NO: 915989
acauaccuuccuugagaga

SEQ ID NO: 1121825 - RNA, 19 nt, Artificial Sequence
  Description of Artificial Sequence: Synthetic oligonucleotide
  Antisense strand to SEQ ID NO: 1121824
ucucucaaggaagguaugu

SEQ ID NO: 1121826 - RNA, 19 nt, Artificial Sequence
  Description of Artificial Sequence: Synthetic oligonucleotide
  Sense strand starting at position 2102 of SEQ ID NO: 915989
ggguuuaacuuucugggca

SEQ ID NO: 1121827 - RNA, 19 nt, Artificial Sequence
  Description of Artificial Sequence: Synthetic oligonucleotide
  Antisense strand to SEQ ID NO: 1121826
ugcccagaaaguuaaaccc

SEQ ID NO: 1121828 - RNA, 19 nt, Artificial Sequence
  Description of Artificial Sequence: Synthetic oligonucleotide
  Sense strand starting at position 2297 of SEQ ID NO: 915989
gccaaaucugcagggagau

SEQ ID NO: 1121829 - RNA, 19 nt, Artificial Sequence
  Description of Artificial Sequence: Synthetic oligonucleotide
  Antisense strand to SEQ ID NO: 1121828
aucucccugcagauuuggc

SEQ ID NO: 1121830 - RNA, 19 nt, Artificial Sequence
  Description of Artificial Sequence: Synthetic oligonucleotide
  Sense strand starting at position 2531 of SEQ ID NO: 915989
agcgcucagggagaugaau

SEQ ID NO: 1121831 - RNA, 19 nt, Artificial Sequence
  Description of Artificial Sequence: Synthetic oligonucleotide
  Antisense strand to SEQ ID NO: 1121830
auucaucucccugagcgcu

SEQ ID NO: 1121832 - RNA, 19 nt, Artificial Sequence
  Description of Artificial Sequence: Synthetic oligonucleotide
  Sense strand starting at position 2682 of SEQ ID NO: 915989
uugccuugucacugaaaug

SEQ ID NO: 1121833 - RNA, 19 nt, Artificial Sequence
  Description of Artificial Sequence: Synthetic oligonucleotide
  Antisense strand to SEQ ID NO: 1121832
cauuucagugacaaggcaa

SEQ ID NO: 1121834 - RNA, 19 nt, Artificial Sequence
  Description of Artificial Sequence: Synthetic oligonucleotide
  Sense strand starting at position 3018 of SEQ ID NO: 915989
ucggcuuugauaugaauuc

SEQ ID NO: 1121835 - RNA, 19 nt, Artificial Sequence
  Description of Artificial Sequence: Synthetic oligonucleotide
  Antisense strand to SEQ ID NO: 1121834
gaauucauaucaaagccga

SEQ ID NO: 1121836 - RNA, 19 nt, Artificial Sequence
  Description of Artificial Sequence: Synthetic oligonucleotide
  Sense strand starting at position 3392 of SEQ ID NO: 915989
ggaguuacucagcagccuu

SEQ ID NO: 1121837 - RNA, 19 nt, Artificial Sequence
  Description of Artificial Sequence: Synthetic oligonucleotide
  Antisense strand to SEQ ID NO: 1121836
aaggcugcugaguaacucc

SEQ ID NO: 1121838 - RNA, 19 nt, Artificial Sequence
  Description of Artificial Sequence: Synthetic oligonucleotide
  Sense strand starting at position 3461 of SEQ ID NO: 915989
gcggguauugaugacuaaa

SEQ ID NO: 1121839 - RNA, 19 nt, Artificial Sequence
  Description of Artificial Sequence: Synthetic oligonucleotide
  Antisense strand to SEQ ID NO: 1121838
uuuagucaucaauacccgc

SEQ ID NO: 1121840 - RNA, 19 nt, Artificial Sequence
  Description of Artificial Sequence: Synthetic oligonucleotide
  Sense strand starting at position 3502 of SEQ ID NO: 915989
gcgugucuccuggaaacag

SEQ ID NO: 1121841 - RNA, 19 nt, Artificial Sequence
  Description of Artificial Sequence: Synthetic oligonucleotide
  Antisense strand to SEQ ID NO: 1121840
cuguuuccaggagacacgc

SEQ ID NO: 1121842 - RNA, 19 nt, Artificial Sequence
  Description of Artificial Sequence: Synthetic oligonucleotide
  Sense strand starting at position 3814 of SEQ ID NO: 915989
ugaacaggcuacucuugaa

SEQ ID NO: 1121843 - RNA, 19 nt, Artificial Sequence
  Description of Artificial Sequence: Synthetic oligonucleotide
  Antisense strand to SEQ ID NO: 1121842
uucaagaguagccuguuca

SEQ ID NO: 1121844 - RNA, 19 nt, Artificial Sequence
  Description of Artificial Sequence: Synthetic oligonucleotide
  Sense strand starting at position 274 of SEQ ID NO: 915990
ggcagcuucuggcucuaaa

SEQ ID NO: 1121845 - RNA, 19 nt, Artificial Sequence
  Description of Artificial Sequence: Synthetic oligonucleotide
  Antisense strand to SEQ ID NO: 1121844
uuuagagccagaagcugcc

SEQ ID NO: 1121846 - RNA, 19 nt, Artificial Sequence
  Description of Artificial Sequence: Synthetic oligonucleotide
  Sense strand starting at position 557 of SEQ ID NO: 915990
agaugucaugccuggaggu

SEQ ID NO: 1121847 - RNA, 19 nt, Artificial Sequence
  Description of Artificial Sequence: Synthetic oligonucleotide
  Antisense strand to SEQ ID NO: 1121846
accuccaggcaugacaucu

SEQ ID NO: 1121848 - RNA, 19 nt, Artificial Sequence
  Description of Artificial Sequence: Synthetic oligonucleotide
  Sense strand starting at position 558 of SEQ ID NO: 915990
gaugucaugccuggagguu

SEQ ID NO: 1121849 - RNA, 19 nt, Artificial Sequence
  Description of Artificial Sequence: Synthetic oligonucleotide
  Antisense strand to SEQ ID NO: 1121848
aaccuccaggcaugacauc

SEQ ID NO: 1121850 - RNA, 19 nt, Artificial Sequence
  Description of Artificial Sequence: Synthetic oligonucleotide
  Sense strand starting at position 635 of SEQ ID NO: 915990
cuaagcaacguccaagaaa

SEQ ID NO: 1121851 - RNA, 19 nt, Artificial Sequence
  Description of Artificial Sequence: Synthetic oligonucleotide
  Antisense strand to SEQ ID NO: 1121850
uuucuuggacguugcuuag

SEQ ID NO: 1121852 - RNA, 19 nt, Artificial Sequence
  Description of Artificial Sequence: Synthetic oligonucleotide
  Sense strand starting at position 686 of SEQ ID NO: 915990
ggagaaaguuuccaggaag

SEQ ID NO: 1121853 - RNA, 19 nt, Artificial Sequence
  Description of Artificial Sequence: Synthetic oligonucleotide
  Antisense strand to SEQ ID NO: 1121852
cuuccuggaaacuuucucc

SEQ ID NO: 1121854 - RNA, 19 nt, Artificial Sequence
  Description of Artificial Sequence: Synthetic oligonucleotide
  Sense strand starting at position 708 of SEQ ID NO: 915990
ggaguuaccugacugccuu

SEQ ID NO: 1121855 - RNA, 19 nt, Artificial Sequence
  Description of Artificial Sequence: Synthetic oligonucleotide
  Antisense strand to SEQ ID NO: 1121854
aaggcagucagguaacucc

SEQ ID NO: 1121856 - RNA, 19 nt, Artificial Sequence
  Description of Artificial Sequence: Synthetic oligonucleotide
  Sense strand starting at position 906 of SEQ ID NO: 915990
cccacaugugggugcgaau

SEQ ID NO: 1121857 - RNA, 19 nt, Artificial Sequence
  Description of Artificial Sequence: Synthetic oligonucleotide
  Antisense strand to SEQ ID NO: 1121856
auucgcacccacauguggg

SEQ ID NO: 1121858 - RNA, 19 nt, Artificial Sequence
  Description of Artificial Sequence: Synthetic oligonucleotide
  Sense strand starting at position 1390 of SEQ ID NO: 915990
aacacaugcucuggagaag

SEQ ID NO: 1121859 - RNA, 19 nt, Artificial Sequence
  Description of Artificial Sequence: Synthetic oligonucleotide
  Antisense strand to SEQ ID NO: 1121858
cuucuccagagcauguguu

SEQ ID NO: 1121860 - RNA, 19 nt, Artificial Sequence
  Description of Artificial Sequence: Synthetic oligonucleotide
  Sense strand starting at position 2124 of SEQ ID NO: 915990
ccggcucucugcugucaaa

SEQ ID NO: 1121861 - RNA, 19 nt, Artificial Sequence
  Description of Artificial Sequence: Synthetic oligonucleotide
  Antisense strand to SEQ ID NO: 1121860
uuugacagcagagagccgg

SEQ ID NO: 1121862 - RNA, 19 nt, Artificial Sequence
  Description of Artificial Sequence: Synthetic oligonucleotide
  Sense strand starting at position 2377 of SEQ ID NO: 915990
gcugaacgcuuccagaugu

SEQ ID NO: 1121863 - RNA, 19 nt, Artificial Sequence
  Description of Artificial Sequence: Synthetic oligonucleotide
  Antisense strand to SEQ ID NO: 1121862
acaucuggaagcguucagc

SEQ ID NO: 1121864 - RNA, 19 nt, Artificial Sequence
  Description of Artificial Sequence: Synthetic oligonucleotide
  Sense strand starting at position 2764 of SEQ ID NO: 915990
ggccucugugagcggaauu

SEQ ID NO: 1121865 - RNA, 19 nt, Artificial Sequence
  Description of Artificial Sequence: Synthetic oligonucleotide
  Antisense strand to SEQ ID NO: 1121864
aauuccgcucacagaggcc

SEQ ID NO: 1121866 - RNA, 19 nt, Artificial Sequence
  Description of Artificial Sequence: Synthetic oligonucleotide
  Sense strand starting at position 2813 of SEQ ID NO: 915990
accagagucucguuucgga

SEQ ID NO: 1121867 - RNA, 19 nt, Artificial Sequence
  Description of Artificial Sequence: Synthetic oligonucleotide
  Antisense strand to SEQ ID NO: 1121866
uccgaaacgagacucuggu

SEQ ID NO: 1121868 - RNA, 19 nt, Artificial Sequence
  Description of Artificial Sequence: Synthetic oligonucleotide
  Sense strand starting at position 2862 of SEQ ID NO: 915990
ccgugauuccgugauucug

SEQ ID NO: 1121869 - RNA, 19 nt, Artificial Sequence
  Description of Artificial Sequence: Synthetic oligonucleotide
  Antisense strand to SEQ ID NO: 1121868
cagaaucacggaaucacgg

SEQ ID NO: 1121870 - RNA, 19 nt, Artificial Sequence
  Description of Artificial Sequence: Synthetic oligonucleotide
  Sense strand starting at position 2864 of SEQ ID NO: 915990
gugauuccgugauucuguu

SEQ ID NO: 1121871 - RNA, 19 nt, Artificial Sequence
  Description of Artificial Sequence: Synthetic oligonucleotide
  Antisense strand to SEQ ID NO: 1121870
aacagaaucacggaaucac

SEQ ID NO: 1121872 - RNA, 19 nt, Artificial Sequence
  Description of Artificial Sequence: Synthetic oligonucleotide
  Sense strand starting at position 2868 of SEQ ID NO: 915990
uuccgugauucuguuugau

SEQ ID NO: 1121873 - RNA, 19 nt, Artificial Sequence
  Description of Artificial Sequence: Synthetic oligonucleotide
  Antisense strand to SEQ ID NO: 1121872
aucaaacagaaucacggaa

SEQ ID NO: 1121874 - RNA, 19 nt, Artificial Sequence
  Description of Artificial Sequence: Synthetic oligonucleotide
  Sense strand starting at position 2870 of SEQ ID NO: 915990
ccgugauucuguuugauca

SEQ ID NO: 1121875 - RNA, 19 nt, Artificial Sequence
  Description of Artificial Sequence: Synthetic oligonucleotide
  Antisense strand to SEQ ID NO: 1121874
ugaucaaacagaaucacgg

SEQ ID NO: 1121876 - RNA, 19 nt, Artificial Sequence
  Description of Artificial Sequence: Synthetic oligonucleotide
  Sense strand starting at position 2871 of SEQ ID NO: 915990
cgugauucuguuugaucaa

SEQ ID NO: 1121877 - RNA, 19 nt, Artificial Sequence
  Description of Artificial Sequence: Synthetic oligonucleotide
  Antisense strand to SEQ ID NO: 1121876
uugaucaaacagaaucacg

SEQ ID NO: 1121878 - RNA, 19 nt, Artificial Sequence
  Description of Artificial Sequence: Synthetic oligonucleotide
  Sense strand starting at position 2872 of SEQ ID NO: 915990
gugauucuguuugaucaau

SEQ ID NO: 1121879 - RNA, 19 nt, Artificial Sequence
  Description of Artificial Sequence: Synthetic oligonucleotide
  Antisense strand to SEQ ID NO: 1121878
auugaucaaacagaaucac

SEQ ID NO: 1121880 - RNA, 19 nt, Artificial Sequence
  Description of Artificial Sequence: Synthetic oligonucleotide
  Sense strand starting at position 2887 of SEQ ID NO: 915990
caauuauaaucagagcggu

SEQ ID NO: 1121881 - RNA, 19 nt, Artificial Sequence
  Description of Artificial Sequence: Synthetic oligonucleotide
  Antisense strand to SEQ ID NO: 1121880
accgcucugauuauaauug

SEQ ID NO: 1121882 - RNA, 19 nt, Artificial Sequence
  Description of Artificial Sequence: Synthetic oligonucleotide
  Sense strand starting at position 2890 of SEQ ID NO: 915990
uuauaaucagagcgguugu

SEQ ID NO: 1121883 - RNA, 19 nt, Artificial Sequence
  Description of Artificial Sequence: Synthetic oligonucleotide
  Antisense strand to SEQ ID NO: 1121882
acaaccgcucugauuauaa

SEQ ID NO: 1121884 - RNA, 19 nt, Artificial Sequence
  Description of Artificial Sequence: Synthetic oligonucleotide
  Sense strand starting at position 2891 of SEQ ID NO: 915990
uauaaucagagcgguugua

SEQ ID NO: 1121885 - RNA, 19 nt, Artificial Sequence
  Description of Artificial Sequence: Synthetic oligonucleotide
  Antisense strand to SEQ ID NO: 1121884
uacaaccgcucugauuaua

SEQ ID NO: 1121886 - RNA, 19 nt, Artificial Sequence
  Description of Artificial Sequence: Synthetic oligonucleotide
  Sense strand starting at position 2903 of SEQ ID NO: 915990
gguuguagaagugacagau

SEQ ID NO: 1121887 - RNA, 19 nt, Artificial Sequence
  Description of Artificial Sequence: Synthetic oligonucleotide
  Antisense strand to SEQ ID NO: 1121886
aucugucacuucuacaacc

SEQ ID NO: 1121888 - RNA, 19 nt, Artificial Sequence
  Description of Artificial Sequence: Synthetic oligonucleotide
  Sense strand starting at position 3002 of SEQ ID NO: 915990
uuccuagacccagguuuaa

SEQ ID NO: 1121889 - RNA, 19 nt, Artificial Sequence
  Description of Artificial Sequence: Synthetic oligonucleotide
  Antisense strand to SEQ ID NO: 1121888
uuaaaccugggucuaggaa

SEQ ID NO: 1121890 - RNA, 19 nt, Artificial Sequence
  Description of Artificial Sequence: Synthetic oligonucleotide
  Sense strand starting at position 3038 of SEQ ID NO: 915990
ccgagcacguguucuacua

SEQ ID NO: 1121891 - RNA, 19 nt, Artificial Sequence
  Description of Artificial Sequence: Synthetic oligonucleotide
  Antisense strand to SEQ ID NO: 1121890
uaguagaacacgugcucgg

SEQ ID NO: 1121892 - RNA, 19 nt, Artificial Sequence
  Description of Artificial Sequence: Synthetic oligonucleotide
  Sense strand starting at position 3045 of SEQ ID NO: 915990
cguguucuacuaggauauc

SEQ ID NO: 1121893 - RNA, 19 nt, Artificial Sequence
  Description of Artificial Sequence: Synthetic oligonucleotide
  Antisense strand to SEQ ID NO: 1121892
gauauccuaguagaacacg

SEQ ID NO: 1121894 - RNA, 19 nt, Artificial Sequence
  Description of Artificial Sequence: Synthetic oligonucleotide
  Sense strand starting at position 3329 of SEQ ID NO: 915990
uaaccauucccguggcuuu

SEQ ID NO: 1121895 - RNA, 19 nt, Artificial Sequence
  Description of Artificial Sequence: Synthetic oligonucleotide
  Antisense strand to SEQ ID NO: 1121894
aaagccacgggaaugguua

SEQ ID NO: 1121896 - RNA, 19 nt, Artificial Sequence
  Description of Artificial Sequence: Synthetic oligonucleotide
  Sense strand starting at position 3349 of SEQ ID NO: 915990
agcagcugucuauaucaaa

SEQ ID NO: 1121897 - RNA, 19 nt, Artificial Sequence
  Description of Artificial Sequence: Synthetic oligonucleotide
  Antisense strand to SEQ ID NO: 1121896
uuugauauagacagcugcu

SEQ ID NO: 1121898 - RNA, 19 nt, Artificial Sequence
  Description of Artificial Sequence: Synthetic oligonucleotide
  Sense strand starting at position 3352 of SEQ ID NO: 915990
agcugucuauaucaaaugu

SEQ ID NO: 1121899 - RNA, 19 nt, Artificial Sequence
  Description of Artificial Sequence: Synthetic oligonucleotide
  Antisense strand to SEQ ID NO: 1121898
acauuugauauagacagcu

SEQ ID NO: 1121900 - RNA, 19 nt, Artificial Sequence
  Description of Artificial Sequence: Synthetic oligonucleotide
  Sense strand starting at position 3412 of SEQ ID NO: 915990
gcugacuccgucugauaga

SEQ ID NO: 1121901 - RNA, 19 nt, Artificial Sequence
  Description of Artificial Sequence: Synthetic oligonucleotide
  Antisense strand to SEQ ID NO: 1121900
ucuaucagacggagucagc

SEQ ID NO: 1121902 - RNA, 19 nt, Artificial Sequence
  Description of Artificial Sequence: Synthetic oligonucleotide
  Sense strand starting at position 3415 of SEQ ID NO: 915990
gacuccgucugauagacau

SEQ ID NO: 1121903 - RNA, 19 nt, Artificial Sequence
  Description of Artificial Sequence: Synthetic oligonucleotide
  Antisense strand to SEQ ID NO: 1121902
augucuaucagacggaguc

SEQ ID NO: 1121904 - RNA, 19 nt, Artificial Sequence
  Description of Artificial Sequence: Synthetic oligonucleotide
  Sense strand starting at position 3515 of SEQ ID NO: 915990
cgaugaccaucccauacuu

SEQ ID NO: 1121905 - RNA, 19 nt, Artificial Sequence
  Description of Artificial Sequence: Synthetic oligonucleotide
  Antisense strand to SEQ ID NO: 1121904
aaguaugggauggucaucg

SEQ ID NO: 1121906 - RNA, 19 nt, Artificial Sequence
  Description of Artificial Sequence: Synthetic oligonucleotide
  Sense strand starting at position 3592 of SEQ ID NO: 915990
cgucuaguccaucaggaga

SEQ ID NO: 1121907 - RNA, 19 nt, Artificial Sequence
  Description of Artificial Sequence: Synthetic oligonucleotide
  Antisense strand to SEQ ID NO: 1121906
ucuccugauggacuagacg

SEQ ID NO: 1121908 - RNA, 19 nt, Artificial Sequence
  Description of Artificial Sequence: Synthetic oligonucleotide
  Sense strand starting at position 3705 of SEQ ID NO: 915990
agguuucuccuguggcuga

SEQ ID NO: 1121909 - RNA, 19 nt, Artificial Sequence
  Description of Artificial Sequence: Synthetic oligonucleotide
  Antisense strand to SEQ ID NO: 1121908
ucagccacaggagaaaccu

SEQ ID NO: 1121910 - RNA, 19 nt, Artificial Sequence
  Description of Artificial Sequence: Synthetic oligonucleotide
  Sense strand starting at position 3868 of SEQ ID NO: 915990
uguggugaccuacaggaau

SEQ ID NO: 1121911 - RNA, 19 nt, Artificial Sequence
  Description of Artificial Sequence: Synthetic oligonucleotide
  Antisense strand to SEQ ID NO: 1121910
auuccuguaggucaccaca

SEQ ID NO: 1121912 - RNA, 19 nt, Artificial Sequence
  Description of Artificial Sequence: Synthetic oligonucleotide
  Sense strand starting at position 3881 of SEQ ID NO: 915990
aggaauggcugaguacaaa

SEQ ID NO: 1121913 - RNA, 19 nt, Artificial Sequence
  Description of Artificial Sequence: Synthetic oligonucleotide
  Antisense strand to SEQ ID NO: 1121912
uuuguacucagccauuccu

SEQ ID NO: 1121914 - RNA, 19 nt, Artificial Sequence
  Description of Artificial Sequence: Synthetic oligonucleotide
  Sense strand starting at position 309 of SEQ ID NO: 915991
ggcagcuucuggcucuaaa

SEQ ID NO: 1121915 - RNA, 19 nt, Artificial Sequence
  Description of Artificial Sequence: Synthetic oligonucleotide
  Antisense strand to SEQ ID NO: 1121914
uuuagagccagaagcugcc

SEQ ID NO: 1121916 - RNA, 19 nt, Artificial Sequence
  Description of Artificial Sequence: Synthetic oligonucleotide
  Sense strand starting at position 592 of SEQ ID NO: 915991
agaugucaugccuggaggu

SEQ ID NO: 1121917 - RNA, 19 nt, Artificial Sequence
  Description of Artificial Sequence: Synthetic oligonucleotide
  Antisense strand to SEQ ID NO: 1121916
accuccaggcaugacaucu

SEQ ID NO: 1121918 - RNA, 19 nt, Artificial Sequence
  Description of Artificial Sequence: Synthetic oligonucleotide
  Sense strand starting at position 593 of SEQ ID NO: 915991
gaugucaugccuggagguu

SEQ ID NO: 1121919 - RNA, 19 nt, Artificial Sequence
  Description of Artificial Sequence: Synthetic oligonucleotide
  Antisense strand to SEQ ID NO: 1121918
aaccuccaggcaugacauc

SEQ ID NO: 1121920 - RNA, 19 nt, Artificial Sequence
  Description of Artificial Sequence: Synthetic oligonucleotide
  Sense strand starting at position 670 of SEQ ID NO: 915991
cuaagcaacguccaagaaa

SEQ ID NO: 1121921 - RNA, 19 nt, Artificial Sequence
  Description of Artificial Sequence: Synthetic oligonucleotide
  Antisense strand to SEQ ID NO: 1121920
uuucuuggacguugcuuag

SEQ ID NO: 1121922 - RNA, 19 nt, Artificial Sequence
  Description of Artificial Sequence: Synthetic oligonucleotide
  Sense strand starting at position 721 of SEQ ID NO: 915991
ggagaaaguuuccaggaag

SEQ ID NO: 1121923 - RNA, 19 nt, Artificial Sequence
  Description of Artificial Sequence: Synthetic oligonucleotide
  Antisense strand to SEQ ID NO: 1121922
cuuccuggaaacuuucucc

SEQ ID NO: 1121924 - RNA, 19 nt, Artificial Sequence
  Description of Artificial Sequence: Synthetic oligonucleotide
  Sense strand starting at position 743 of SEQ ID NO: 915991
ggaguuaccugacugccuu

SEQ ID NO: 1121925 - RNA, 19 nt, Artificial Sequence
  Description of Artificial Sequence: Synthetic oligonucleotide
  Antisense strand to SEQ ID NO: 1121924
aaggcagucagguaacucc

SEQ ID NO: 1121926 - RNA, 19 nt, Artificial Sequence
  Description of Artificial Sequence: Synthetic oligonucleotide
  Sense strand starting at position 941 of SEQ ID NO: 915991
cccacaugugggugcgaau

SEQ ID NO: 1121927 - RNA, 19 nt, Artificial Sequence
  Description of Artificial Sequence: Synthetic oligonucleotide
  Antisense strand to SEQ ID NO: 1121926
auucgcacccacauguggg

SEQ ID NO: 1121928 - RNA, 19 nt, Artificial Sequence
  Description of Artificial Sequence: Synthetic oligonucleotide
  Sense strand starting at position 1425 of SEQ ID NO: 915991
aacacaugcucuggagaag

SEQ ID NO: 1121929 - RNA, 19 nt, Artificial Sequence
  Description of Artificial Sequence: Synthetic oligonucleotide
  Antisense strand to SEQ ID NO: 1121928
cuucuccagagcauguguu

SEQ ID NO: 1121930 - RNA, 19 nt, Artificial Sequence
  Description of Artificial Sequence: Synthetic oligonucleotide
  Sense strand starting at position 2159 of SEQ ID NO: 915991
ccggcucucugcugucaaa

SEQ ID NO: 1121931 - RNA, 19 nt, Artificial Sequence
  Description of Artificial Sequence: Synthetic oligonucleotide
  Antisense strand to SEQ ID NO: 1121930
uuugacagcagagagccgg

SEQ ID NO: 1121932 - RNA, 19 nt, Artificial Sequence
  Description of Artificial Sequence: Synthetic oligonucleotide
  Sense strand starting at position 2412 of SEQ ID NO: 915991
gcugaacgcuuccagaugu

SEQ ID NO: 1121933 - RNA, 19 nt, Artificial Sequence
  Description of Artificial Sequence: Synthetic oligonucleotide
  Antisense strand to SEQ ID NO: 1121932
acaucuggaagcguucagc

SEQ ID NO: 1121934 - RNA, 19 nt, Artificial Sequence
  Description of Artificial Sequence: Synthetic oligonucleotide
  Sense strand starting at position 2799 of SEQ ID NO: 915991
ggccucugugagcggaauu

SEQ ID NO: 1121935 - RNA, 19 nt, Artificial Sequence
  Description of Artificial Sequence: Synthetic oligonucleotide
  Antisense strand to SEQ ID NO: 1121934
aauuccgcucacagaggcc

SEQ ID NO: 1121936 - RNA, 19 nt, Artificial Sequence
  Description of Artificial Sequence: Synthetic oligonucleotide
  Sense strand starting at position 2848 of SEQ ID NO: 915991
accagagucucguuucgga

SEQ ID NO: 1121937 - RNA, 19 nt, Artificial Sequence
  Description of Artificial Sequence: Synthetic oligonucleotide
  Antisense strand to SEQ ID NO: 1121936
uccgaaacgagacucuggu

SEQ ID NO: 1121938 - RNA, 19 nt, Artificial Sequence
  Description of Artificial Sequence: Synthetic oligonucleotide
  Sense strand starting at position 2897 of SEQ ID NO: 915991
ccgugauuccgugauucug

SEQ ID NO: 1121939 - RNA, 19 nt, Artificial Sequence
  Description of Artificial Sequence: Synthetic oligonucleotide
  Antisense strand to SEQ ID NO: 1121938
cagaaucacggaaucacgg

SEQ ID NO: 1121940 - RNA, 19 nt, Artificial Sequence
  Description of Artificial Sequence: Synthetic oligonucleotide
  Sense strand starting at position 2899 of SEQ ID NO: 915991
gugauuccgugauucuguu

SEQ ID NO: 1121941 - RNA, 19 nt, Artificial Sequence
  Description of Artificial Sequence: Synthetic oligonucleotide
  Antisense strand to SEQ ID NO: 1121940
aacagaaucacggaaucac

SEQ ID NO: 1121942 - RNA, 19 nt, Artificial Sequence
  Description of Artificial Sequence: Synthetic oligonucleotide
  Sense strand starting at position 2903 of SEQ ID NO: 915991
uuccgugauucuguuugau

SEQ ID NO: 1121943 - RNA, 19 nt, Artificial Sequence
  Description of Artificial Sequence: Synthetic oligonucleotide
  Antisense strand to SEQ ID NO: 1121942
aucaaacagaaucacggaa

SEQ ID NO: 1121944 - RNA, 19 nt, Artificial Sequence
  Description of Artificial Sequence: Synthetic oligonucleotide
  Sense strand starting at position 2905 of SEQ ID NO: 915991
ccgugauucuguuugauca

SEQ ID NO: 1121945 - RNA, 19 nt, Artificial Sequence
  Description of Artificial Sequence: Synthetic oligonucleotide
  Antisense strand to SEQ ID NO: 1121944
ugaucaaacagaaucacgg

SEQ ID NO: 1121946 - RNA, 19 nt, Artificial Sequence
  Description of Artificial Sequence: Synthetic oligonucleotide
  Sense strand starting at position 2906 of SEQ ID NO: 915991
cgugauucuguuugaucaa

SEQ ID NO: 1121947 - RNA, 19 nt, Artificial Sequence
  Description of Artificial Sequence: Synthetic oligonucleotide
  Antisense strand to SEQ ID NO: 1121946
uugaucaaacagaaucacg

SEQ ID NO: 1121948 - RNA, 19 nt, Artificial Sequence
  Description of Artificial Sequence: Synthetic oligonucleotide
  Sense strand starting at position 2907 of SEQ ID NO: 915991
gugauucuguuugaucaau

SEQ ID NO: 1121949 - RNA, 19 nt, Artificial Sequence
  Description of Artificial Sequence: Synthetic oligonucleotide
  Antisense strand to SEQ ID NO: 1121948
auugaucaaacagaaucac

SEQ ID NO: 1121950 - RNA, 19 nt, Artificial Sequence
  Description of Artificial Sequence: Synthetic oligonucleotide
  Sense strand starting at position 2922 of SEQ ID NO: 915991
caauuauaaucagagcggu

SEQ ID NO: 1121951 - RNA, 19 nt, Artificial Sequence
  Description of Artificial Sequence: Synthetic oligonucleotide
  Antisense strand to SEQ ID NO: 1121950
accgcucugauuauaauug

SEQ ID NO: 1121952 - RNA, 19 nt, Artificial Sequence
  Description of Artificial Sequence: Synthetic oligonucleotide
  Sense strand starting at position 2925 of SEQ ID NO: 915991
uuauaaucagagcgguugu

SEQ ID NO: 1121953 - RNA, 19 nt, Artificial Sequence
  Description of Artificial Sequence: Synthetic oligonucleotide
  Antisense strand to SEQ ID NO: 1121952
acaaccgcucugauuauaa

SEQ ID NO: 1121954 - RNA, 19 nt, Artificial Sequence
  Description of Artificial Sequence: Synthetic oligonucleotide
  Sense strand starting at position 2926 of SEQ ID NO: 915991
uauaaucagagcgguugua

SEQ ID NO: 1121955 - RNA, 19 nt, Artificial Sequence
  Description of Artificial Sequence: Synthetic oligonucleotide
  Antisense strand to SEQ ID NO: 1121954
uacaaccgcucugauuaua

SEQ ID NO: 1121956 - RNA, 19 nt, Artificial Sequence
  Description of Artificial Sequence: Synthetic oligonucleotide
  Sense strand starting at position 2938 of SEQ ID NO: 915991
gguuguagaagugacagau

SEQ ID NO: 1121957 - RNA, 19 nt, Artificial Sequence
  Description of Artificial Sequence: Synthetic oligonucleotide
  Antisense strand to SEQ ID NO: 1121956
aucugucacuucuacaacc

SEQ ID NO: 1121958 - RNA, 19 nt, Artificial Sequence
  Description of Artificial Sequence: Synthetic oligonucleotide
  Sense strand starting at position 3037 of SEQ ID NO: 915991
uuccuagacccagguuuaa

SEQ ID NO: 1121959 - RNA, 19 nt, Artificial Sequence
  Description of Artificial Sequence: Synthetic oligonucleotide
  Antisense strand to SEQ ID NO: 1121958
uuaaaccugggucuaggaa

SEQ ID NO: 1121960 - RNA, 19 nt, Artificial Sequence
  Description of Artificial Sequence: Synthetic oligonucleotide
  Sense strand starting at position 3073 of SEQ ID NO: 915991
ccgagcacguguucuacua

SEQ ID NO: 1121961 - RNA, 19 nt, Artificial Sequence
  Description of Artificial Sequence: Synthetic oligonucleotide
  Antisense strand to SEQ ID NO: 1121960
uaguagaacacgugcucgg

SEQ ID NO: 1121962 - RNA, 19 nt, Artificial Sequence
  Description of Artificial Sequence: Synthetic oligonucleotide
  Sense strand starting at position 3080 of SEQ ID NO: 915991
cguguucuacuaggauauc

SEQ ID NO: 1121963 - RNA, 19 nt, Artificial Sequence
  Description of Artificial Sequence: Synthetic oligonucleotide
  Antisense strand to SEQ ID NO: 1121962
gauauccuaguagaacacg

SEQ ID NO: 1121964 - RNA, 19 nt, Artificial Sequence
  Description of Artificial Sequence: Synthetic oligonucleotide
  Sense strand starting at position 3364 of SEQ ID NO: 915991
uaaccauucccguggcuuu

SEQ ID NO: 1121965 - RNA, 19 nt, Artificial Sequence
  Description of Artificial Sequence: Synthetic oligonucleotide
  Antisense strand to SEQ ID NO: 1121964
aaagccacgggaaugguua

SEQ ID NO: 1121966 - RNA, 19 nt, Artificial Sequence
  Description of Artificial Sequence: Synthetic oligonucleotide
  Sense strand starting at position 3384 of SEQ ID NO: 915991
agcagcugucuauaucaaa

SEQ ID NO: 1121967 - RNA, 19 nt, Artificial Sequence
  Description of Artificial Sequence: Synthetic oligonucleotide
  Antisense strand to SEQ ID NO: 1121966
uuugauauagacagcugcu

SEQ ID NO: 1121968 - RNA, 19 nt, Artificial Sequence
  Description of Artificial Sequence: Synthetic oligonucleotide
  Sense strand starting at position 3387 of SEQ ID NO: 915991
agcugucuauaucaaaugu

SEQ ID NO: 1121969 - RNA, 19 nt, Artificial Sequence
  Description of Artificial Sequence: Synthetic oligonucleotide
  Antisense strand to SEQ ID NO: 1121968
acauuugauauagacagcu

SEQ ID NO: 1121970 - RNA, 19 nt, Artificial Sequence
  Description of Artificial Sequence: Synthetic oligonucleotide
  Sense strand starting at position 3447 of SEQ ID NO: 915991
gcugacuccgucugauaga

SEQ ID NO: 1121971 - RNA, 19 nt, Artificial Sequence
  Description of Artificial Sequence: Synthetic oligonucleotide
  Antisense strand to SEQ ID NO: 1121970
ucuaucagacggagucagc

SEQ ID NO: 1121972 - RNA, 19 nt, Artificial Sequence
  Description of Artificial Sequence: Synthetic oligonucleotide
  Sense strand starting at position 3450 of SEQ ID NO: 915991
gacuccgucugauagacau

SEQ ID NO: 1121973 - RNA, 19 nt, Artificial Sequence
  Description of Artificial Sequence: Synthetic oligonucleotide
  Antisense strand to SEQ ID NO: 1121972
augucuaucagacggaguc

SEQ ID NO: 1121974 - RNA, 19 nt, Artificial Sequence
  Description of Artificial Sequence: Synthetic oligonucleotide
  Sense strand starting at position 3550 of SEQ ID NO: 915991
cgaugaccaucccauacuu

SEQ ID NO: 1121975 - RNA, 19 nt, Artificial Sequence
  Description of Artificial Sequence: Synthetic oligonucleotide
  Antisense strand to SEQ ID NO: 1121974
aaguaugggauggucaucg

SEQ ID NO: 1121976 - RNA, 19 nt, Artificial Sequence
  Description of Artificial Sequence: Synthetic oligonucleotide
  Sense strand starting at position 3627 of SEQ ID NO: 915991
cgucuaguccaucaggaga

SEQ ID NO: 1121977 - RNA, 19 nt, Artificial Sequence
  Description of Artificial Sequence: Synthetic oligonucleotide
  Antisense strand to SEQ ID NO: 1121976
ucuccugauggacuagacg

SEQ ID NO: 1121978 - RNA, 19 nt, Artificial Sequence
  Description of Artificial Sequence: Synthetic oligonucleotide
  Sense strand starting at position 3740 of SEQ ID NO: 915991
agguuucuccuguggcuga

SEQ ID NO: 1121979 - RNA, 19 nt, Artificial Sequence
  Description of Artificial Sequence: Synthetic oligonucleotide
  Antisense strand to SEQ ID NO: 1121978
ucagccacaggagaaaccu

SEQ ID NO: 1121980 - RNA, 19 nt, Artificial Sequence
  Description of Artificial Sequence: Synthetic oligonucleotide
  Sense strand starting at position 3903 of SEQ ID NO: 915991
uguggugaccuacaggaau

SEQ ID NO: 1121981 - RNA, 19 nt, Artificial Sequence
  Description of Artificial Sequence: Synthetic oligonucleotide
  Antisense strand to SEQ ID NO: 1121980
auuccuguaggucaccaca

SEQ ID NO: 1121982 - RNA, 19 nt, Artificial Sequence
  Description of Artificial Sequence: Synthetic oligonucleotide
  Sense strand starting at position 3916 of SEQ ID NO: 915991
aggaauggcugaguacaaa

SEQ ID NO: 1121983 - RNA, 19 nt, Artificial Sequence
  Description of Artificial Sequence: Synthetic oligonucleotide
  Antisense strand to SEQ ID NO: 1121982
uuuguacucagccauuccu

SEQ ID NO: 1121984 - RNA, 19 nt, Artificial Sequence
  Description of Artificial Sequence: Synthetic oligonucleotide
  Sense strand starting at position 13 of SEQ ID NO: 915992
ccaggaaugucuccuggau

SEQ ID NO: 1121985 - RNA, 19 nt, Artificial Sequence
  Description of Artificial Sequence: Synthetic oligonucleotide
  Antisense strand to SEQ ID NO: 1121984
auccaggagacauuccugg

SEQ ID NO: 1121986 - RNA, 19 nt, Artificial Sequence
  Description of Artificial Sequence: Synthetic oligonucleotide
  Sense strand starting at position 99 of SEQ ID NO: 915992
gggaaagacugagaagaga

SEQ ID NO: 1121987 - RNA, 19 nt, Artificial Sequence
  Description of Artificial Sequence: Synthetic oligonucleotide
  Antisense strand to SEQ ID NO: 1121986
ucucuucucagucuuuccc

SEQ ID NO: 1121988 - RNA, 19 nt, Artificial Sequence
  Description of Artificial Sequence: Synthetic oligonucleotide
  Sense strand starting at position 385 of SEQ ID NO: 915992
ggguguaauggugaaagug

SEQ ID NO: 1121989 - RNA, 19 nt, Artificial Sequence
  Description of Artificial Sequence: Synthetic oligonucleotide
  Antisense strand to SEQ ID NO: 1121988
cacuuucaccauuacaccc

SEQ ID NO: 1121990 - RNA, 19 nt, Artificial Sequence
  Description of Artificial Sequence: Synthetic oligonucleotide
  Sense strand starting at position 532 of SEQ ID NO: 915992
acugaauggcucugcaaac

SEQ ID NO: 1121991 - RNA, 19 nt, Artificial Sequence
  Description of Artificial Sequence: Synthetic oligonucleotide
  Antisense strand to SEQ ID NO: 1121990
guuugcagagccauucagu

SEQ ID NO: 1121992 - RNA, 19 nt, Artificial Sequence
  Description of Artificial Sequence: Synthetic oligonucleotide
  Sense strand starting at position 533 of SEQ ID NO: 915992
cugaauggcucugcaaacu

SEQ ID NO: 1121993 - RNA, 19 nt, Artificial Sequence
  Description of Artificial Sequence: Synthetic oligonucleotide
  Antisense strand to SEQ ID NO: 1121992
aguuugcagagccauucag

SEQ ID NO: 1121994 - RNA, 19 nt, Artificial Sequence
  Description of Artificial Sequence: Synthetic oligonucleotide
  Sense strand starting at position 552 of SEQ ID NO: 915992
aacggugucauuugugaag

SEQ ID NO: 1121995 - RNA, 19 nt, Artificial Sequence
  Description of Artificial Sequence: Synthetic oligonucleotide
  Antisense strand to SEQ ID NO: 1121994
cuucacaaaugacaccguu

SEQ ID NO: 1121996 - RNA, 19 nt, Artificial Sequence
  Description of Artificial Sequence: Synthetic oligonucleotide
  Sense strand starting at position 822 of SEQ ID NO: 915992
ccacauguauuggaaauuu

SEQ ID NO: 1121997 - RNA, 19 nt, Artificial Sequence
  Description of Artificial Sequence: Synthetic oligonucleotide
  Antisense strand to SEQ ID NO: 1121996
aaauuuccaauacaugugg

SEQ ID NO: 1121998 - RNA, 19 nt, Artificial Sequence
  Description of Artificial Sequence: Synthetic oligonucleotide
  Sense strand starting at position 969 of SEQ ID NO: 915992
cggcuagagaaucaagguu

SEQ ID NO: 1121999 - RNA, 19 nt, Artificial Sequence
  Description of Artificial Sequence: Synthetic oligonucleotide
  Antisense strand to SEQ ID NO: 1121998
aaccuugauucucuagccg

SEQ ID NO: 1122000 - RNA, 19 nt, Artificial Sequence
  Description of Artificial Sequence: Synthetic oligonucleotide
  Sense strand starting at position 993 of SEQ ID NO: 915992
gaggcagaaagguguagaa

SEQ ID NO: 1122001 - RNA, 19 nt, Artificial Sequence
  Description of Artificial Sequence: Synthetic oligonucleotide
  Antisense strand to SEQ ID NO: 1122000
uucuacaccuuucugccuc

SEQ ID NO: 1122002 - RNA, 19 nt, Artificial Sequence
  Description of Artificial Sequence: Synthetic oligonucleotide
  Sense strand starting at position 1158 of SEQ ID NO: 915992
agcugcgaugcugagauaa

SEQ ID NO: 1122003 - RNA, 19 nt, Artificial Sequence
  Description of Artificial Sequence: Synthetic oligonucleotide
  Antisense strand to SEQ ID NO: 1122002
uuaucucagcaucgcagcu

SEQ ID NO: 1122004 - RNA, 19 nt, Artificial Sequence
  Description of Artificial Sequence: Synthetic oligonucleotide
  Sense strand starting at position 1541 of SEQ ID NO: 915992
acguuuccagaggaaucuu

SEQ ID NO: 1122005 - RNA, 19 nt, Artificial Sequence
  Description of Artificial Sequence: Synthetic oligonucleotide
  Antisense strand to SEQ ID NO: 1122004
aagauuccucuggaaacgu

SEQ ID NO: 1122006 - RNA, 19 nt, Artificial Sequence
  Description of Artificial Sequence: Synthetic oligonucleotide
  Sense strand starting at position 1617 of SEQ ID NO: 915992
cgaggucuucugcacaaag

SEQ ID NO: 1122007 - RNA, 19 nt, Artificial Sequence
  Description of Artificial Sequence: Synthetic oligonucleotide
  Antisense strand to SEQ ID NO: 1122006
cuuugugcagaagaccucg

SEQ ID NO: 1122008 - RNA, 19 nt, Artificial Sequence
  Description of Artificial Sequence: Synthetic oligonucleotide
  Sense strand starting at position 2194 of SEQ ID NO: 915992
uuugcacaguacucugauu

SEQ ID NO: 1122009 - RNA, 19 nt, Artificial Sequence
  Description of Artificial Sequence: Synthetic oligonucleotide
  Antisense strand to SEQ ID NO: 1122008
aaucagaguacugugcaaa

SEQ ID NO: 1122010 - RNA, 19 nt, Artificial Sequence
  Description of Artificial Sequence: Synthetic oligonucleotide
  Sense strand starting at position 2196 of SEQ ID NO: 915992
ugcacaguacucugauuga

SEQ ID NO: 1122011 - RNA, 19 nt, Artificial Sequence
  Description of Artificial Sequence: Synthetic oligonucleotide
  Antisense strand to SEQ ID NO: 1122010
ucaaucagaguacugugca

SEQ ID NO: 1122012 - RNA, 19 nt, Artificial Sequence
  Description of Artificial Sequence: Synthetic oligonucleotide
  Sense strand starting at position 2339 of SEQ ID NO: 915992
gccuuugggacaggucaua

SEQ ID NO: 1122013 - RNA, 19 nt, Artificial Sequence
  Description of Artificial Sequence: Synthetic oligonucleotide
  Antisense strand to SEQ ID NO: 1122012
uaugaccugucccaaaggc

SEQ ID NO: 1122014 - RNA, 19 nt, Artificial Sequence
  Description of Artificial Sequence: Synthetic oligonucleotide
  Sense strand starting at position 2424 of SEQ ID NO: 915992
gcauuugcugugcaacuga

SEQ ID NO: 1122015 - RNA, 19 nt, Artificial Sequence
  Description of Artificial Sequence: Synthetic oligonucleotide
  Antisense strand to SEQ ID NO: 1122014
ucaguugcacagcaaaugc

SEQ ID NO: 1122016 - RNA, 19 nt, Artificial Sequence
  Description of Artificial Sequence: Synthetic oligonucleotide
  Sense strand starting at position 2556 of SEQ ID NO: 915992
accauaaccgguugagacu

SEQ ID NO: 1122017 - RNA, 19 nt, Artificial Sequence
  Description of Artificial Sequence: Synthetic oligonucleotide
  Antisense strand to SEQ ID NO: 1122016
agucucaaccgguuauggu

SEQ ID NO: 1122018 - RNA, 19 nt, Artificial Sequence
  Description of Artificial Sequence: Synthetic oligonucleotide
  Sense strand starting at position 2597 of SEQ ID NO: 915992
uucucuuccgucugaggga

SEQ ID NO: 1122019 - RNA, 19 nt, Artificial Sequence
  Description of Artificial Sequence: Synthetic oligonucleotide
  Antisense strand to SEQ ID NO: 1122018
ucccucagacggaagagaa

SEQ ID NO: 1122020 - RNA, 19 nt, Artificial Sequence
  Description of Artificial Sequence: Synthetic oligonucleotide
  Sense strand starting at position 2610 of SEQ ID NO: 915992
gagggacucuuaguuggau

SEQ ID NO: 1122021 - RNA, 19 nt, Artificial Sequence
  Description of Artificial Sequence: Synthetic oligonucleotide
  Antisense strand to SEQ ID NO: 1122020
auccaacuaagagucccuc

SEQ ID NO: 1122022 - RNA, 19 nt, Artificial Sequence
  Description of Artificial Sequence: Synthetic oligonucleotide
  Sense strand starting at position 2612 of SEQ ID NO: 915992
gggacucuuaguuggauga

SEQ ID NO: 1122023 - RNA, 19 nt, Artificial Sequence
  Description of Artificial Sequence: Synthetic oligonucleotide
  Antisense strand to SEQ ID NO: 1122022
ucauccaacuaagaguccc

SEQ ID NO: 1122024 - RNA, 19 nt, Artificial Sequence
  Description of Artificial Sequence: Synthetic oligonucleotide
  Sense strand starting at position 2613 of SEQ ID NO: 915992
ggacucuuaguuggaugau

SEQ ID NO: 1122025 - RNA, 19 nt, Artificial Sequence
  Description of Artificial Sequence: Synthetic oligonucleotide
  Antisense strand to SEQ ID NO: 1122024
aucauccaacuaagagucc

SEQ ID NO: 1122026 - RNA, 19 nt, Artificial Sequence
  Description of Artificial Sequence: Synthetic oligonucleotide
  Sense strand starting at position 2616 of SEQ ID NO: 915992
cucuuaguuggaugauguu

SEQ ID NO: 1122027 - RNA, 19 nt, Artificial Sequence
  Description of Artificial Sequence: Synthetic oligonucleotide
  Antisense strand to SEQ ID NO: 1122026
aacaucauccaacuaagag

SEQ ID NO: 1122028 - RNA, 19 nt, Artificial Sequence
  Description of Artificial Sequence: Synthetic oligonucleotide
  Sense strand starting at position 2690 of SEQ ID NO: 915992
cacuuaaucugggcuuagu

SEQ ID NO: 1122029 - RNA, 19 nt, Artificial Sequence
  Description of Artificial Sequence: Synthetic oligonucleotide
  Antisense strand to SEQ ID NO: 1122028
acuaagcccagauuaagug

SEQ ID NO: 1122030 - RNA, 19 nt, Artificial Sequence
  Description of Artificial Sequence: Synthetic oligonucleotide
  Sense strand starting at position 2730 of SEQ ID NO: 915992
cagugacuucuuuguacag

SEQ ID NO: 1122031 - RNA, 19 nt, Artificial Sequence
  Description of Artificial Sequence: Synthetic oligonucleotide
  Antisense strand to SEQ ID NO: 1122030
cuguacaaagaagucacug

SEQ ID NO: 1122032 - RNA, 19 nt, Artificial Sequence
  Description of Artificial Sequence: Synthetic oligonucleotide
  Sense strand starting at position 2731 of SEQ ID NO: 915992
agugacuucuuuguacaga

SEQ ID NO: 1122033 - RNA, 19 nt, Artificial Sequence
  Description of Artificial Sequence: Synthetic oligonucleotide
  Antisense strand to SEQ ID NO: 1122032
ucuguacaaagaagucacu

SEQ ID NO: 1122034 - RNA, 19 nt, Artificial Sequence
  Description of Artificial Sequence: Synthetic oligonucleotide
  Sense strand starting at position 2749 of SEQ ID NO: 915992
agaaguuaccuccagcuga

SEQ ID NO: 1122035 - RNA, 19 nt, Artificial Sequence
  Description of Artificial Sequence: Synthetic oligonucleotide
  Antisense strand to SEQ ID NO: 1122034
ucagcuggagguaacuucu

SEQ ID NO: 1122036 - RNA, 19 nt, Artificial Sequence
  Description of Artificial Sequence: Synthetic oligonucleotide
  Sense strand starting at position 2908 of SEQ ID NO: 915992
aggagcucaucugcagaaa

SEQ ID NO: 1122037 - RNA, 19 nt, Artificial Sequence
  Description of Artificial Sequence: Synthetic oligonucleotide
  Antisense strand to SEQ ID NO: 1122036
uuucugcagaugagcuccu

SEQ ID NO: 1122038 - RNA, 19 nt, Artificial Sequence
  Description of Artificial Sequence: Synthetic oligonucleotide
  Sense strand starting at position 2945 of SEQ ID NO: 915992
agguaacaucguuggugga

SEQ ID NO: 1122039 - RNA, 19 nt, Artificial Sequence
  Description of Artificial Sequence: Synthetic oligonucleotide
  Antisense strand to SEQ ID NO: 1122038
uccaccaacgauguuaccu

SEQ ID NO: 1122040 - RNA, 19 nt, Artificial Sequence
  Description of Artificial Sequence: Synthetic oligonucleotide
  Sense strand starting at position 2964 of SEQ ID NO: 915992
ggauuugguucucaccaag

SEQ ID NO: 1122041 - RNA, 19 nt, Artificial Sequence
  Description of Artificial Sequence: Synthetic oligonucleotide
  Antisense strand to SEQ ID NO: 1122040
cuuggugagaaccaaaucc

SEQ ID NO: 1122042 - RNA, 19 nt, Artificial Sequence
  Description of Artificial Sequence: Synthetic oligonucleotide
  Sense strand starting at position 2993 of SEQ ID NO: 915992
gacagaaguucucuccugu

SEQ ID NO: 1122043 - RNA, 19 nt, Artificial Sequence
  Description of Artificial Sequence: Synthetic oligonucleotide
  Antisense strand to SEQ ID NO: 1122042
acaggagagaacuucuguc

SEQ ID NO: 1122044 - RNA, 19 nt, Artificial Sequence
  Description of Artificial Sequence: Synthetic oligonucleotide
  Sense strand starting at position 3060 of SEQ ID NO: 915992
uuguguucugaugagaguu

SEQ ID NO: 1122045 - RNA, 19 nt, Artificial Sequence
  Description of Artificial Sequence: Synthetic oligonucleotide
  Antisense strand to SEQ ID NO: 1122044
aacucucaucagaacacaa

SEQ ID NO: 1122046 - RNA, 19 nt, Artificial Sequence
  Description of Artificial Sequence: Synthetic oligonucleotide
  Sense strand starting at position 3274 of SEQ ID NO: 915992
cagagaaaugcuugcagaa

SEQ ID NO: 1122047 - RNA, 19 nt, Artificial Sequence
  Description of Artificial Sequence: Synthetic oligonucleotide
  Antisense strand to SEQ ID NO: 1122046
uucugcaagcauuucucug

SEQ ID NO: 1122048 - RNA, 19 nt, Artificial Sequence
  Description of Artificial Sequence: Synthetic oligonucleotide
  Sense strand starting at position 3346 of SEQ ID NO: 915992
guaguaucagaguaaucug

SEQ ID NO: 1122049 - RNA, 19 nt, Artificial Sequence
  Description of Artificial Sequence: Synthetic oligonucleotide
  Antisense strand to SEQ ID NO: 1122048
cagauuacucugauacuac

SEQ ID NO: 1122050 - RNA, 19 nt, Artificial Sequence
  Description of Artificial Sequence: Synthetic oligonucleotide
  Sense strand starting at position 3349 of SEQ ID NO: 915992
guaucagaguaaucuggug

SEQ ID NO: 1122051 - RNA, 19 nt, Artificial Sequence
  Description of Artificial Sequence: Synthetic oligonucleotide
  Antisense strand to SEQ ID NO: 1122050
caccagauuacucugauac

SEQ ID NO: 1122052 - RNA, 19 nt, Artificial Sequence
  Description of Artificial Sequence: Synthetic oligonucleotide
  Sense strand starting at position 3509 of SEQ ID NO: 915992
cugggcagucaauacauaa

SEQ ID NO: 1122053 - RNA, 19 nt, Artificial Sequence
  Description of Artificial Sequence: Synthetic oligonucleotide
  Antisense strand to SEQ ID NO: 1122052
uuauguauugacugcccag

SEQ ID NO: 1122054 - RNA, 19 nt, Artificial Sequence
  Description of Artificial Sequence: Synthetic oligonucleotide
  Sense strand starting at position 3531 of SEQ ID NO: 915992
gaauguaacuucucuaggu

SEQ ID NO: 1122055 - RNA, 19 nt, Artificial Sequence
  Description of Artificial Sequence: Synthetic oligonucleotide
  Antisense strand to SEQ ID NO: 1122054
accuagagaaguuacauuc

SEQ ID NO: 1122056 - RNA, 19 nt, Artificial Sequence
  Description of Artificial Sequence: Synthetic oligonucleotide
  Sense strand starting at position 3533 of SEQ ID NO: 915992
auguaacuucucuagguuu

SEQ ID NO: 1122057 - RNA, 19 nt, Artificial Sequence
  Description of Artificial Sequence: Synthetic oligonucleotide
  Antisense strand to SEQ ID NO: 1122056
aaaccuagagaaguuacau

SEQ ID NO: 1122058 - RNA, 19 nt, Artificial Sequence
  Description of Artificial Sequence: Synthetic oligonucleotide
  Sense strand starting at position 3642 of SEQ ID NO: 915992
uuuauuguggcccaauauu

SEQ ID NO: 1122059 - RNA, 19 nt, Artificial Sequence
  Description of Artificial Sequence: Synthetic oligonucleotide
  Antisense strand to SEQ ID NO: 1122058
aauauugggccacaauaaa

SEQ ID NO: 1122060 - RNA, 19 nt, Artificial Sequence
  Description of Artificial Sequence: Synthetic oligonucleotide
  Sense strand starting at position 3704 of SEQ ID NO: 915992
uacgguuuaguguaauuaa

SEQ ID NO: 1122061 - RNA, 19 nt, Artificial Sequence
  Description of Artificial Sequence: Synthetic oligonucleotide
  Antisense strand to SEQ ID NO: 1122060
uuaauuacacuaaaccgua

SEQ ID NO: 1122062 - RNA, 19 nt, Artificial Sequence
  Description of Artificial Sequence: Synthetic oligonucleotide
  Sense strand starting at position 3978 of SEQ ID NO: 915992
gugccgcgugugucagaau

SEQ ID NO: 1122063 - RNA, 19 nt, Artificial Sequence
  Description of Artificial Sequence: Synthetic oligonucleotide
  Antisense strand to SEQ ID NO: 1122062
auucugacacacgcggcac

SEQ ID NO: 1122064 - RNA, 19 nt, Artificial Sequence
  Description of Artificial Sequence: Synthetic oligonucleotide
  Sense strand starting at position 114 of SEQ ID NO: 915993
gucagucugcuccuugcaa

SEQ ID NO: 1122065 - RNA, 19 nt, Artificial Sequence
  Description of Artificial Sequence: Synthetic oligonucleotide
  Antisense strand to SEQ ID NO: 1122064
uugcaaggagcagacugac

SEQ ID NO: 1122066 - RNA, 19 nt, Artificial Sequence
  Description of Artificial Sequence: Synthetic oligonucleotide
  Sense strand starting at position 139 of SEQ ID NO: 915993
uugccuucucaccagggau

SEQ ID NO: 1122067 - RNA, 19 nt, Artificial Sequence
  Description of Artificial Sequence: Synthetic oligonucleotide
  Antisense strand to SEQ ID NO: 1122066
aucccuggugagaaggcaa

SEQ ID NO: 1122068 - RNA, 19 nt, Artificial Sequence
  Description of Artificial Sequence: Synthetic oligonucleotide
  Sense strand starting at position 288 of SEQ ID NO: 915993
cugaucuagcggcaaugua

SEQ ID NO: 1122069 - RNA, 19 nt, Artificial Sequence
  Description of Artificial Sequence: Synthetic oligonucleotide
  Antisense strand to SEQ ID NO: 1122068
uacauugccgcuagaucag

SEQ ID NO: 1122070 - RNA, 19 nt, Artificial Sequence
  Description of Artificial Sequence: Synthetic oligonucleotide
  Sense strand starting at position 411 of SEQ ID NO: 915993
gcaguaagugaugggagaa

SEQ ID NO: 1122071 - RNA, 19 nt, Artificial Sequence
  Description of Artificial Sequence: Synthetic oligonucleotide
  Antisense strand to SEQ ID NO: 1122070
uucucccaucacuuacugc

SEQ ID NO: 1122072 - RNA, 19 nt, Artificial Sequence
  Description of Artificial Sequence: Synthetic oligonucleotide
  Sense strand starting at position 615 of SEQ ID NO: 915993
cugucugagcuccgggaau

SEQ ID NO: 1122073 - RNA, 19 nt, Artificial Sequence
  Description of Artificial Sequence: Synthetic oligonucleotide
  Antisense strand to SEQ ID NO: 1122072
auucccggagcucagacag

SEQ ID NO: 1122074 - RNA, 19 nt, Artificial Sequence
  Description of Artificial Sequence: Synthetic oligonucleotide
  Sense strand starting at position 617 of SEQ ID NO: 915993
gucugagcuccgggaauca

SEQ ID NO: 1122075 - RNA, 19 nt, Artificial Sequence
  Description of Artificial Sequence: Synthetic oligonucleotide
  Antisense strand to SEQ ID NO: 1122074
ugauucccggagcucagac

SEQ ID NO: 1122076 - RNA, 19 nt, Artificial Sequence
  Description of Artificial Sequence: Synthetic oligonucleotide
  Sense strand starting at position 628 of SEQ ID NO: 915993
gggaaucacugcuuaauga

SEQ ID NO: 1122077 - RNA, 19 nt, Artificial Sequence
  Description of Artificial Sequence: Synthetic oligonucleotide
  Antisense strand to SEQ ID NO: 1122076
ucauuaagcagugauuccc

SEQ ID NO: 1122078 - RNA, 19 nt, Artificial Sequence
  Description of Artificial Sequence: Synthetic oligonucleotide
  Sense strand starting at position 635 of SEQ ID NO: 915993
acugcuuaaugagcugauu

SEQ ID NO: 1122079 - RNA, 19 nt, Artificial Sequence
  Description of Artificial Sequence: Synthetic oligonucleotide
  Antisense strand to SEQ ID NO: 1122078
aaucagcucauuaagcagu

SEQ ID NO: 1122080 - RNA, 19 nt, Artificial Sequence
  Description of Artificial Sequence: Synthetic oligonucleotide
  Sense strand starting at position 644 of SEQ ID NO: 915993
ugagcugauuugucucagu

SEQ ID NO: 1122081 - RNA, 19 nt, Artificial Sequence
  Description of Artificial Sequence: Synthetic oligonucleotide
  Antisense strand to SEQ ID NO: 1122080
acugagacaaaucagcuca

SEQ ID NO: 1122082 - RNA, 19 nt, Artificial Sequence
  Description of Artificial Sequence: Synthetic oligonucleotide
  Sense strand starting at position 890 of SEQ ID NO: 915993
gguuucagccugggagaga

SEQ ID NO: 1122083 - RNA, 19 nt, Artificial Sequence
  Description of Artificial Sequence: Synthetic oligonucleotide
  Antisense strand to SEQ ID NO: 1122082
ucucucccaggcugaaacc

SEQ ID NO: 1122084 - RNA, 19 nt, Artificial Sequence
  Description of Artificial Sequence: Synthetic oligonucleotide
  Sense strand starting at position 974 of SEQ ID NO: 915993
aauggagcuccucaaguuu

SEQ ID NO: 1122085 - RNA, 19 nt, Artificial Sequence
  Description of Artificial Sequence: Synthetic oligonucleotide
  Antisense strand to SEQ ID NO: 1122084
aaacuugaggagcuccauu

SEQ ID NO: 1122086 - RNA, 19 nt, Artificial Sequence
  Description of Artificial Sequence: Synthetic oligonucleotide
  Sense strand starting at position 992 of SEQ ID NO: 915993
uuaggauccgucugucuga

SEQ ID NO: 1122087 - RNA, 19 nt, Artificial Sequence
  Description of Artificial Sequence: Synthetic oligonucleotide
  Antisense strand to SEQ ID NO: 1122086
ucagacagacggauccuaa

SEQ ID NO: 1122088 - RNA, 19 nt, Artificial Sequence
  Description of Artificial Sequence: Synthetic oligonucleotide
  Sense strand starting at position 993 of SEQ ID NO: 915993
uaggauccgucugucugaa

SEQ ID NO: 1122089 - RNA, 19 nt, Artificial Sequence
  Description of Artificial Sequence: Synthetic oligonucleotide
  Antisense strand to SEQ ID NO: 1122088
uucagacagacggauccua

SEQ ID NO: 1122090 - RNA, 19 nt, Artificial Sequence
  Description of Artificial Sequence: Synthetic oligonucleotide
  Sense strand starting at position 995 of SEQ ID NO: 915993
ggauccgucugucugaaga

SEQ ID NO: 1122091 - RNA, 19 nt, Artificial Sequence
  Description of Artificial Sequence: Synthetic oligonucleotide
  Antisense strand to SEQ ID NO: 1122090
ucuucagacagacggaucc

SEQ ID NO: 1122092 - RNA, 19 nt, Artificial Sequence
  Description of Artificial Sequence: Synthetic oligonucleotide
  Sense strand starting at position 1048 of SEQ ID NO: 915993
cccugaugugucguuugcu

SEQ ID NO: 1122093 - RNA, 19 nt, Artificial Sequence
  Description of Artificial Sequence: Synthetic oligonucleotide
  Antisense strand to SEQ ID NO: 1122092
agcaaacgacacaucaggg

SEQ ID NO: 1122094 - RNA, 19 nt, Artificial Sequence
  Description of Artificial Sequence: Synthetic oligonucleotide
  Sense strand starting at position 1060 of SEQ ID NO: 915993
guuugcuugaggcacaaga

SEQ ID NO: 1122095 - RNA, 19 nt, Artificial Sequence
  Description of Artificial Sequence: Synthetic oligonucleotide
  Antisense strand to SEQ ID NO: 1122094
ucuugugccucaagcaaac

SEQ ID NO: 1122096 - RNA, 19 nt, Artificial Sequence
  Description of Artificial Sequence: Synthetic oligonucleotide
  Sense strand starting at position 2062 of SEQ ID NO: 915993
gaacuacuccgccgggaaa

SEQ ID NO: 1122097 - RNA, 19 nt, Artificial Sequence
  Description of Artificial Sequence: Synthetic oligonucleotide
  Antisense strand to SEQ ID NO: 1122096
uuucccggcggaguaguuc

SEQ ID NO: 1122098 - RNA, 19 nt, Artificial Sequence
  Description of Artificial Sequence: Synthetic oligonucleotide
  Sense strand starting at position 2155 of SEQ ID NO: 915993
ggcgcaggugucgaggaaa

SEQ ID NO: 1122099 - RNA, 19 nt, Artificial Sequence
  Description of Artificial Sequence: Synthetic oligonucleotide
  Antisense strand to SEQ ID NO: 1122098
uuuccucgacaccugcgcc

SEQ ID NO: 1122100 - RNA, 19 nt, Artificial Sequence
  Description of Artificial Sequence: Synthetic oligonucleotide
  Sense strand starting at position 2473 of SEQ ID NO: 915993
gggaacuuuccgugagcug

SEQ ID NO: 1122101 - RNA, 19 nt, Artificial Sequence
  Description of Artificial Sequence: Synthetic oligonucleotide
  Antisense strand to SEQ ID NO: 1122100
cagcucacggaaaguuccc

SEQ ID NO: 1122102 - RNA, 19 nt, Artificial Sequence
  Description of Artificial Sequence: Synthetic oligonucleotide
  Sense strand starting at position 2507 of SEQ ID NO: 915993
accuguugcacggauagau

SEQ ID NO: 1122103 - RNA, 19 nt, Artificial Sequence
  Description of Artificial Sequence: Synthetic oligonucleotide
  Antisense strand to SEQ ID NO: 1122102
aucuauccgugcaacaggu

SEQ ID NO: 1122104 - RNA, 19 nt, Artificial Sequence
  Description of Artificial Sequence: Synthetic oligonucleotide
  Sense strand starting at position 2576 of SEQ ID NO: 915993
aggauugugccagacagug

SEQ ID NO: 1122105 - RNA, 19 nt, Artificial Sequence
  Description of Artificial Sequence: Synthetic oligonucleotide
  Antisense strand to SEQ ID NO: 1122104
cacugucuggcacaauccu

SEQ ID NO: 1122106 - RNA, 19 nt, Artificial Sequence
  Description of Artificial Sequence: Synthetic oligonucleotide
  Sense strand starting at position 2684 of SEQ ID NO: 915993
ggauaguugugggugggau

SEQ ID NO: 1122107 - RNA, 19 nt, Artificial Sequence
  Description of Artificial Sequence: Synthetic oligonucleotide
  Antisense strand to SEQ ID NO: 1122106
aucccacccacaacuaucc

SEQ ID NO: 1122108 - RNA, 19 nt, Artificial Sequence
  Description of Artificial Sequence: Synthetic oligonucleotide
  Sense strand starting at position 2685 of SEQ ID NO: 915993
gauaguugugggugggauc

SEQ ID NO: 1122109 - RNA, 19 nt, Artificial Sequence
  Description of Artificial Sequence: Synthetic oligonucleotide
  Antisense strand to SEQ ID NO: 1122108
gaucccacccacaacuauc

SEQ ID NO: 1122110 - RNA, 19 nt, Artificial Sequence
  Description of Artificial Sequence: Synthetic oligonucleotide
  Sense strand starting at position 2696 of SEQ ID NO: 915993
gugggauccuggcuacacu

SEQ ID NO: 1122111 - RNA, 19 nt, Artificial Sequence
  Description of Artificial Sequence: Synthetic oligonucleotide
  Antisense strand to SEQ ID NO: 1122110
aguguagccaggaucccac

SEQ ID NO: 1122112 - RNA, 19 nt, Artificial Sequence
  Description of Artificial Sequence: Synthetic oligonucleotide
  Sense strand starting at position 2808 of SEQ ID NO: 915993
cucagucuccuuuacagga

SEQ ID NO: 1122113 - RNA, 19 nt, Artificial Sequence
  Description of Artificial Sequence: Synthetic oligonucleotide
  Antisense strand to SEQ ID NO: 1122112
uccuguaaaggagacugag

SEQ ID NO: 1122114 - RNA, 19 nt, Artificial Sequence
  Description of Artificial Sequence: Synthetic oligonucleotide
  Sense strand starting at position 3094 of SEQ ID NO: 915993
ccuccuuggcuugaggaga

SEQ ID NO: 1122115 - RNA, 19 nt, Artificial Sequence
  Description of Artificial Sequence: Synthetic oligonucleotide
  Antisense strand to SEQ ID NO: 1122114
ucuccucaagccaaggagg

SEQ ID NO: 1122116 - RNA, 19 nt, Artificial Sequence
  Description of Artificial Sequence: Synthetic oligonucleotide
  Sense strand starting at position 3131 of SEQ ID NO: 915993
ugacauggcuuaguaagau

SEQ ID NO: 1122117 - RNA, 19 nt, Artificial Sequence
  Description of Artificial Sequence: Synthetic oligonucleotide
  Antisense strand to SEQ ID NO: 1122116
aucuuacuaagccauguca

SEQ ID NO: 1122118 - RNA, 19 nt, Artificial Sequence
  Description of Artificial Sequence: Synthetic oligonucleotide
  Sense strand starting at position 3141 of SEQ ID NO: 915993
uaguaagaucuaugguaga

SEQ ID NO: 1122119 - RNA, 19 nt, Artificial Sequence
  Description of Artificial Sequence: Synthetic oligonucleotide
  Antisense strand to SEQ ID NO: 1122118
ucuaccauagaucuuacua

SEQ ID NO: 1122120 - RNA, 19 nt, Artificial Sequence
  Description of Artificial Sequence: Synthetic oligonucleotide
  Sense strand starting at position 3144 of SEQ ID NO: 915993
uaagaucuaugguagaaag

SEQ ID NO: 1122121 - RNA, 19 nt, Artificial Sequence
  Description of Artificial Sequence: Synthetic oligonucleotide
  Antisense strand to SEQ ID NO: 1122120
cuuucuaccauagaucuua

SEQ ID NO: 1122122 - RNA, 19 nt, Artificial Sequence
  Description of Artificial Sequence: Synthetic oligonucleotide
  Sense strand starting at position 3154 of SEQ ID NO: 915993
gguagaaagcacugugcau

SEQ ID NO: 1122123 - RNA, 19 nt, Artificial Sequence
  Description of Artificial Sequence: Synthetic oligonucleotide
  Antisense strand to SEQ ID NO: 1122122
augcacagugcuuucuacc

SEQ ID NO: 1122124 - RNA, 19 nt, Artificial Sequence
  Description of Artificial Sequence: Synthetic oligonucleotide
  Sense strand starting at position 3226 of SEQ ID NO: 915993
gguguuaucuuggcaagac

SEQ ID NO: 1122125 - RNA, 19 nt, Artificial Sequence
  Description of Artificial Sequence: Synthetic oligonucleotide
  Antisense strand to SEQ ID NO: 1122124
gucuugccaagauaacacc

SEQ ID NO: 1122126 - RNA, 19 nt, Artificial Sequence
  Description of Artificial Sequence: Synthetic oligonucleotide
  Sense strand starting at position 3326 of SEQ ID NO: 915993
ucaugcuggguuugacaaa

SEQ ID NO: 1122127 - RNA, 19 nt, Artificial Sequence
  Description of Artificial Sequence: Synthetic oligonucleotide
  Antisense strand to SEQ ID NO: 1122126
uuugucaaacccagcauga

SEQ ID NO: 1122128 - RNA, 19 nt, Artificial Sequence
  Description of Artificial Sequence: Synthetic oligonucleotide
  Sense strand starting at position 3414 of SEQ ID NO: 915993
ggucauauacuggauucuu

SEQ ID NO: 1122129 - RNA, 19 nt, Artificial Sequence
  Description of Artificial Sequence: Synthetic oligonucleotide
  Antisense strand to SEQ ID NO: 1122128
aagaauccaguauaugacc

SEQ ID NO: 1122130 - RNA, 19 nt, Artificial Sequence
  Description of Artificial Sequence: Synthetic oligonucleotide
  Sense strand starting at position 3577 of SEQ ID NO: 915993
ugcucuucuccugggagau

SEQ ID NO: 1122131 - RNA, 19 nt, Artificial Sequence
  Description of Artificial Sequence: Synthetic oligonucleotide
  Antisense strand to SEQ ID NO: 1122130
aucucccaggagaagagca

SEQ ID NO: 1122132 - RNA, 19 nt, Artificial Sequence
  Description of Artificial Sequence: Synthetic oligonucleotide
  Sense strand starting at position 3578 of SEQ ID NO: 915993
gcucuucuccugggagaug

SEQ ID NO: 1122133 - RNA, 19 nt, Artificial Sequence
  Description of Artificial Sequence: Synthetic oligonucleotide
  Antisense strand to SEQ ID NO: 1122132
caucucccaggagaagagc

SEQ ID NO: 1122134 - RNA, 19 nt, Artificial Sequence
  Description of Artificial Sequence: Synthetic oligonucleotide
  Sense strand starting at position 3590 of SEQ ID NO: 915993
ggagauggcucuagugaag

SEQ ID NO: 1122135 - RNA, 19 nt, Artificial Sequence
  Description of Artificial Sequence: Synthetic oligonucleotide
  Antisense strand to SEQ ID NO: 1122134
cuucacuagagccaucucc

SEQ ID NO: 1122136 - RNA, 19 nt, Artificial Sequence
  Description of Artificial Sequence: Synthetic oligonucleotide
  Sense strand starting at position 3758 of SEQ ID NO: 915993
uguaaucuccugcgacaag

SEQ ID NO: 1122137 - RNA, 19 nt, Artificial Sequence
  Description of Artificial Sequence: Synthetic oligonucleotide
  Antisense strand to SEQ ID NO: 1122136
cuugucgcaggagauuaca

SEQ ID NO: 1122138 - RNA, 19 nt, Artificial Sequence
  Description of Artificial Sequence: Synthetic oligonucleotide
  Sense strand starting at position 3767 of SEQ ID NO: 915993
cugcgacaagguugucuaa

SEQ ID NO: 1122139 - RNA, 19 nt, Artificial Sequence
  Description of Artificial Sequence: Synthetic oligonucleotide
  Antisense strand to SEQ ID NO: 1122138
uuagacaaccuugucgcag

SEQ ID NO: 1122140 - RNA, 19 nt, Artificial Sequence
  Description of Artificial Sequence: Synthetic oligonucleotide
  Sense strand starting at position 3784 of SEQ ID NO: 915993
aagucugcuccugaggcau

SEQ ID NO: 1122141 - RNA, 19 nt, Artificial Sequence
  Description of Artificial Sequence: Synthetic oligonucleotide
  Antisense strand to SEQ ID NO: 1122140
augccucaggagcagacuu

SEQ ID NO: 1122142 - RNA, 19 nt, Artificial Sequence
  Description of Artificial Sequence: Synthetic oligonucleotide
  Sense strand starting at position 3904 of SEQ ID NO: 915993
ucauaucucuggguugcua

SEQ ID NO: 1122143 - RNA, 19 nt, Artificial Sequence
  Description of Artificial Sequence: Synthetic oligonucleotide
  Antisense strand to SEQ ID NO: 1122142
uagcaacccagagauauga

SEQ ID NO: 1122144 - RNA, 19 nt, Artificial Sequence
  Description of Artificial Sequence: Synthetic oligonucleotide
  Sense strand starting at position 197 of SEQ ID NO: 915994
ccuccuuggcuugaggaga

SEQ ID NO: 1122145 - RNA, 19 nt, Artificial Sequence
  Description of Artificial Sequence: Synthetic oligonucleotide
  Antisense strand to SEQ ID NO: 1122144
ucuccucaagccaaggagg

SEQ ID NO: 1122146 - RNA, 19 nt, Artificial Sequence
  Description of Artificial Sequence: Synthetic oligonucleotide
  Sense strand starting at position 234 of SEQ ID NO: 915994
ugacauggcuuaguaagau

SEQ ID NO: 1122147 - RNA, 19 nt, Artificial Sequence
  Description of Artificial Sequence: Synthetic oligonucleotide
  Antisense strand to SEQ ID NO: 1122146
aucuuacuaagccauguca

SEQ ID NO: 1122148 - RNA, 19 nt, Artificial Sequence
  Description of Artificial Sequence: Synthetic oligonucleotide
  Sense strand starting at position 238 of SEQ ID NO: 915994
auggcuuaguaagaucuau

SEQ ID NO: 1122149 - RNA, 19 nt, Artificial Sequence
  Description of Artificial Sequence: Synthetic oligonucleotide
  Antisense strand to SEQ ID NO: 1122148
auagaucuuacuaagccau

SEQ ID NO: 1122150 - RNA, 19 nt, Artificial Sequence
  Description of Artificial Sequence: Synthetic oligonucleotide
  Sense strand starting at position 244 of SEQ ID NO: 915994
uaguaagaucuaugguaga

SEQ ID NO: 1122151 - RNA, 19 nt, Artificial Sequence
  Description of Artificial Sequence: Synthetic oligonucleotide
  Antisense strand to SEQ ID NO: 1122150
ucuaccauagaucuuacua

SEQ ID NO: 1122152 - RNA, 19 nt, Artificial Sequence
  Description of Artificial Sequence: Synthetic oligonucleotide
  Sense strand starting at position 247 of SEQ ID NO: 915994
uaagaucuaugguagaaag

SEQ ID NO: 1122153 - RNA, 19 nt, Artificial Sequence
  Description of Artificial Sequence: Synthetic oligonucleotide
  Antisense strand to SEQ ID NO: 1122152
cuuucuaccauagaucuua

SEQ ID NO: 1122154 - RNA, 19 nt, Artificial Sequence
  Description of Artificial Sequence: Synthetic oligonucleotide
  Sense strand starting at position 257 of SEQ ID NO: 915994
gguagaaagcacugugcau

SEQ ID NO: 1122155 - RNA, 19 nt, Artificial Sequence
  Description of Artificial Sequence: Synthetic oligonucleotide
  Antisense strand to SEQ ID NO: 1122154
augcacagugcuuucuacc

SEQ ID NO: 1122156 - RNA, 19 nt, Artificial Sequence
  Description of Artificial Sequence: Synthetic oligonucleotide
  Sense strand starting at position 317 of SEQ ID NO: 915994
gggucacuuaucgguguua

SEQ ID NO: 1122157 - RNA, 19 nt, Artificial Sequence
  Description of Artificial Sequence: Synthetic oligonucleotide
  Antisense strand to SEQ ID NO: 1122156
uaacaccgauaagugaccc

SEQ ID NO: 1122158 - RNA, 19 nt, Artificial Sequence
  Description of Artificial Sequence: Synthetic oligonucleotide
  Sense strand starting at position 318 of SEQ ID NO: 915994
ggucacuuaucgguguuau

SEQ ID NO: 1122159 - RNA, 19 nt, Artificial Sequence
  Description of Artificial Sequence: Synthetic oligonucleotide
  Antisense strand to SEQ ID NO: 1122158
auaacaccgauaagugacc

SEQ ID NO: 1122160 - RNA, 19 nt, Artificial Sequence
  Description of Artificial Sequence: Synthetic oligonucleotide
  Sense strand starting at position 319 of SEQ ID NO: 915994
gucacuuaucgguguuauc

SEQ ID NO: 1122161 - RNA, 19 nt, Artificial Sequence
  Description of Artificial Sequence: Synthetic oligonucleotide
  Antisense strand to SEQ ID NO: 1122160
gauaacaccgauaagugac

SEQ ID NO: 1122162 - RNA, 19 nt, Artificial Sequence
  Description of Artificial Sequence: Synthetic oligonucleotide
  Sense strand starting at position 328 of SEQ ID NO: 915994
cgguguuaucuuggcaaga

SEQ ID NO: 1122163 - RNA, 19 nt, Artificial Sequence
  Description of Artificial Sequence: Synthetic oligonucleotide
  Antisense strand to SEQ ID NO: 1122162
ucuugccaagauaacaccg

SEQ ID NO: 1122164 - RNA, 19 nt, Artificial Sequence
  Description of Artificial Sequence: Synthetic oligonucleotide
  Sense strand starting at position 329 of SEQ ID NO: 915994
gguguuaucuuggcaagac

SEQ ID NO: 1122165 - RNA, 19 nt, Artificial Sequence
  Description of Artificial Sequence: Synthetic oligonucleotide
  Antisense strand to SEQ ID NO: 1122164
gucuugccaagauaacacc

SEQ ID NO: 1122166 - RNA, 19 nt, Artificial Sequence
  Description of Artificial Sequence: Synthetic oligonucleotide
  Sense strand starting at position 429 of SEQ ID NO: 915994
ucaugcuggguuugacaaa

SEQ ID NO: 1122167 - RNA, 19 nt, Artificial Sequence
  Description of Artificial Sequence: Synthetic oligonucleotide
  Antisense strand to SEQ ID NO: 1122166
uuugucaaacccagcauga

SEQ ID NO: 1122168 - RNA, 19 nt, Artificial Sequence
  Description of Artificial Sequence: Synthetic oligonucleotide
  Sense strand starting at position 517 of SEQ ID NO: 915994
ggucauauacuggauucuu

SEQ ID NO: 1122169 - RNA, 19 nt, Artificial Sequence
  Description of Artificial Sequence: Synthetic oligonucleotide
  Antisense strand to SEQ ID NO: 1122168
aagaauccaguauaugacc

SEQ ID NO: 1122170 - RNA, 19 nt, Artificial Sequence
  Description of Artificial Sequence: Synthetic oligonucleotide
  Sense strand starting at position 585 of SEQ ID NO: 915994
uacgcaguauuccuuguau

SEQ ID NO: 1122171 - RNA, 19 nt, Artificial Sequence
  Description of Artificial Sequence: Synthetic oligonucleotide
  Antisense strand to SEQ ID NO: 1122170
auacaaggaauacugcgua

SEQ ID NO: 1122172 - RNA, 19 nt, Artificial Sequence
  Description of Artificial Sequence: Synthetic oligonucleotide
  Sense strand starting at position 680 of SEQ ID NO: 915994
ugcucuucuccugggagau

SEQ ID NO: 1122173 - RNA, 19 nt, Artificial Sequence
  Description of Artificial Sequence: Synthetic oligonucleotide
  Antisense strand to SEQ ID NO: 1122172
aucucccaggagaagagca

SEQ ID NO: 1122174 - RNA, 19 nt, Artificial Sequence
  Description of Artificial Sequence: Synthetic oligonucleotide
  Sense strand starting at position 681 of SEQ ID NO: 915994
gcucuucuccugggagaug

SEQ ID NO: 1122175 - RNA, 19 nt, Artificial Sequence
  Description of Artificial Sequence: Synthetic oligonucleotide
  Antisense strand to SEQ ID NO: 1122174
caucucccaggagaagagc

SEQ ID NO: 1122176 - RNA, 19 nt, Artificial Sequence
  Description of Artificial Sequence: Synthetic oligonucleotide
  Sense strand starting at position 693 of SEQ ID NO: 915994
ggagauggcucuagugaag

SEQ ID NO: 1122177 - RNA, 19 nt, Artificial Sequence
  Description of Artificial Sequence: Synthetic oligonucleotide
  Antisense strand to SEQ ID NO: 1122176
cuucacuagagccaucucc

SEQ ID NO: 1122178 - RNA, 19 nt, Artificial Sequence
  Description of Artificial Sequence: Synthetic oligonucleotide
  Sense strand starting at position 861 of SEQ ID NO: 915994
uguaaucuccugcgacaag

SEQ ID NO: 1122179 - RNA, 19 nt, Artificial Sequence
  Description of Artificial Sequence: Synthetic oligonucleotide
  Antisense strand to SEQ ID NO: 1122178
cuugucgcaggagauuaca

SEQ ID NO: 1122180 - RNA, 19 nt, Artificial Sequence
  Description of Artificial Sequence: Synthetic oligonucleotide
  Sense strand starting at position 870 of SEQ ID NO: 915994
cugcgacaagguugucuaa

SEQ ID NO: 1122181 - RNA, 19 nt, Artificial Sequence
  Description of Artificial Sequence: Synthetic oligonucleotide
  Antisense strand to SEQ ID NO: 1122180
uuagacaaccuugucgcag

SEQ ID NO: 1122182 - RNA, 19 nt, Artificial Sequence
  Description of Artificial Sequence: Synthetic oligonucleotide
  Sense strand starting at position 872 of SEQ ID NO: 915994
gcgacaagguugucuaagu

SEQ ID NO: 1122183 - RNA, 19 nt, Artificial Sequence
  Description of Artificial Sequence: Synthetic oligonucleotide
  Antisense strand to SEQ ID NO: 1122182
acuuagacaaccuugucgc

SEQ ID NO: 1122184 - RNA, 19 nt, Artificial Sequence
  Description of Artificial Sequence: Synthetic oligonucleotide
  Sense strand starting at position 887 of SEQ ID NO: 915994
aagucugcuccugaggcau

SEQ ID NO: 1122185 - RNA, 19 nt, Artificial Sequence
  Description of Artificial Sequence: Synthetic oligonucleotide
  Antisense strand to SEQ ID NO: 1122184
augccucaggagcagacuu

SEQ ID NO: 1122186 - RNA, 19 nt, Artificial Sequence
  Description of Artificial Sequence: Synthetic oligonucleotide
  Sense strand starting at position 1007 of SEQ ID NO: 915994
ucauaucucuggguugcua

SEQ ID NO: 1122187 - RNA, 19 nt, Artificial Sequence
  Description of Artificial Sequence: Synthetic oligonucleotide
  Antisense strand to SEQ ID NO: 1122186
uagcaacccagagauauga

SEQ ID NO: 1122188 - RNA, 19 nt, Artificial Sequence
  Description of Artificial Sequence: Synthetic oligonucleotide
  Sense strand starting at position 1105 of SEQ ID NO: 915994
aggacaugugccugucagu

SEQ ID NO: 1122189 - RNA, 19 nt, Artificial Sequence
  Description of Artificial Sequence: Synthetic oligonucleotide
  Antisense strand to SEQ ID NO: 1122188
acugacaggcacauguccu

SEQ ID NO: 1122190 - RNA, 19 nt, Artificial Sequence
  Description of Artificial Sequence: Synthetic oligonucleotide
  Sense strand starting at position 1114 of SEQ ID NO: 915994
gccugucaguguccaugua

SEQ ID NO: 1122191 - RNA, 19 nt, Artificial Sequence
  Description of Artificial Sequence: Synthetic oligonucleotide
  Antisense strand to SEQ ID NO: 1122190
uacauggacacugacaggc

SEQ ID NO: 1122192 - RNA, 19 nt, Artificial Sequence
  Description of Artificial Sequence: Synthetic oligonucleotide
  Sense strand starting at position 1215 of SEQ ID NO: 915994
ugcugauucuuucuaggag

SEQ ID NO: 1122193 - RNA, 19 nt, Artificial Sequence
  Description of Artificial Sequence: Synthetic oligonucleotide
  Antisense strand to SEQ ID NO: 1122192
cuccuagaaagaaucagca

SEQ ID NO: 1122194 - RNA, 19 nt, Artificial Sequence
  Description of Artificial Sequence: Synthetic oligonucleotide
  Sense strand starting at position 1216 of SEQ ID NO: 915994
gcugauucuuucuaggaga

SEQ ID NO: 1122195 - RNA, 19 nt, Artificial Sequence
  Description of Artificial Sequence: Synthetic oligonucleotide
  Antisense strand to SEQ ID NO: 1122194
ucuccuagaaagaaucagc

SEQ ID NO: 1122196 - RNA, 19 nt, Artificial Sequence
  Description of Artificial Sequence: Synthetic oligonucleotide
  Sense strand starting at position 1219 of SEQ ID NO: 915994
gauucuuucuaggagagag

SEQ ID NO: 1122197 - RNA, 19 nt, Artificial Sequence
  Description of Artificial Sequence: Synthetic oligonucleotide
  Antisense strand to SEQ ID NO: 1122196
cucucuccuagaaagaauc

SEQ ID NO: 1122198 - RNA, 19 nt, Artificial Sequence
  Description of Artificial Sequence: Synthetic oligonucleotide
  Sense strand starting at position 1227 of SEQ ID NO: 915994
cuaggagagaguuguuaga

SEQ ID NO: 1122199 - RNA, 19 nt, Artificial Sequence
  Description of Artificial Sequence: Synthetic oligonucleotide
  Antisense strand to SEQ ID NO: 1122198
ucuaacaacucucuccuag

SEQ ID NO: 1122200 - RNA, 19 nt, Artificial Sequence
  Description of Artificial Sequence: Synthetic oligonucleotide
  Sense strand starting at position 1229 of SEQ ID NO: 915994
aggagagaguuguuagacu

SEQ ID NO: 1122201 - RNA, 19 nt, Artificial Sequence
  Description of Artificial Sequence: Synthetic oligonucleotide
  Antisense strand to SEQ ID NO: 1122200
agucuaacaacucucuccu

SEQ ID NO: 1122202 - RNA, 19 nt, Artificial Sequence
  Description of Artificial Sequence: Synthetic oligonucleotide
  Sense strand starting at position 1308 of SEQ ID NO: 915994
agguuugggagcuggaaua

SEQ ID NO: 1122203 - RNA, 19 nt, Artificial Sequence
  Description of Artificial Sequence: Synthetic oligonucleotide
  Antisense strand to SEQ ID NO: 1122202
uauuccagcucccaaaccu

SEQ ID NO: 1122204 - RNA, 19 nt, Artificial Sequence
  Description of Artificial Sequence: Synthetic oligonucleotide
  Sense strand starting at position 1331 of SEQ ID NO: 915994
gaaaccuucuugggagguu

SEQ ID NO: 1122205 - RNA, 19 nt, Artificial Sequence
  Description of Artificial Sequence: Synthetic oligonucleotide
  Antisense strand to SEQ ID NO: 1122204
aaccucccaagaagguuuc

SEQ ID NO: 1122206 - RNA, 19 nt, Artificial Sequence
  Description of Artificial Sequence: Synthetic oligonucleotide
  Sense strand starting at position 1332 of SEQ ID NO: 915994
aaaccuucuugggagguuu

SEQ ID NO: 1122207 - RNA, 19 nt, Artificial Sequence
  Description of Artificial Sequence: Synthetic oligonucleotide
  Antisense strand to SEQ ID NO: 1122206
aaaccucccaagaagguuu

SEQ ID NO: 1122208 - RNA, 19 nt, Artificial Sequence
  Description of Artificial Sequence: Synthetic oligonucleotide
  Sense strand starting at position 1442 of SEQ ID NO: 915994
uaggccuucugggaagacu

SEQ ID NO: 1122209 - RNA, 19 nt, Artificial Sequence
  Description of Artificial Sequence: Synthetic oligonucleotide
  Antisense strand to SEQ ID NO: 1122208
agucuucccagaaggccua

SEQ ID NO: 1122210 - RNA, 19 nt, Artificial Sequence
  Description of Artificial Sequence: Synthetic oligonucleotide
  Sense strand starting at position 1839 of SEQ ID NO: 915994
acgguuaccucguucagca

SEQ ID NO: 1122211 - RNA, 19 nt, Artificial Sequence
  Description of Artificial Sequence: Synthetic oligonucleotide
  Antisense strand to SEQ ID NO: 1122210
ugcugaacgagguaaccgu

SEQ ID NO: 1122212 - RNA, 19 nt, Artificial Sequence
  Description of Artificial Sequence: Synthetic oligonucleotide
  Sense strand starting at position 2352 of SEQ ID NO: 915994
uccugagcucuuggcggaa

SEQ ID NO: 1122213 - RNA, 19 nt, Artificial Sequence
  Description of Artificial Sequence: Synthetic oligonucleotide
  Antisense strand to SEQ ID NO: 1122212
uuccgccaagagcucagga

SEQ ID NO: 1122214 - RNA, 19 nt, Artificial Sequence
  Description of Artificial Sequence: Synthetic oligonucleotide
  Sense strand starting at position 3644 of SEQ ID NO: 915994
ccuggaaagugcuuugaga

SEQ ID NO: 1122215 - RNA, 19 nt, Artificial Sequence
  Description of Artificial Sequence: Synthetic oligonucleotide
  Antisense strand to SEQ ID NO: 1122214
ucucaaagcacuuuccagg

SEQ ID NO: 1122216 - RNA, 19 nt, Artificial Sequence
  Description of Artificial Sequence: Synthetic oligonucleotide
  Sense strand starting at position 3646 of SEQ ID NO: 915994
uggaaagugcuuugagaag

SEQ ID NO: 1122217 - RNA, 19 nt, Artificial Sequence
  Description of Artificial Sequence: Synthetic oligonucleotide
  Antisense strand to SEQ ID NO: 1122216
cuucucaaagcacuuucca

SEQ ID NO: 1122218 - RNA, 19 nt, Artificial Sequence
  Description of Artificial Sequence: Synthetic oligonucleotide
  Sense strand starting at position 3767 of SEQ ID NO: 915994
gaaguuauguuauuugugu

SEQ ID NO: 1122219 - RNA, 19 nt, Artificial Sequence
  Description of Artificial Sequence: Synthetic oligonucleotide
  Antisense strand to SEQ ID NO: 1122218
acacaaauaacauaacuuc

SEQ ID NO: 1122220 - RNA, 19 nt, Artificial Sequence
  Description of Artificial Sequence: Synthetic oligonucleotide
  Sense strand starting at position 3845 of SEQ ID NO: 915994
gagcaaacgcuuugccuuu

SEQ ID NO: 1122221 - RNA, 19 nt, Artificial Sequence
  Description of Artificial Sequence: Synthetic oligonucleotide
  Antisense strand to SEQ ID NO: 1122220
aaaggcaaagcguuugcuc

SEQ ID NO: 1122222 - RNA, 19 nt, Artificial Sequence
  Description of Artificial Sequence: Synthetic oligonucleotide
  Sense strand starting at position 3960 of SEQ ID NO: 915994
agcuuaaguuuccauagga

SEQ ID NO: 1122223 - RNA, 19 nt, Artificial Sequence
  Description of Artificial Sequence: Synthetic oligonucleotide
  Antisense strand to SEQ ID NO: 1122222
uccuauggaaacuuaagcu

SEQ ID NO: 1122224 - RNA, 19 nt, Artificial Sequence
  Description of Artificial Sequence: Synthetic oligonucleotide
  Sense strand starting at position 73 of SEQ ID NO: 915995
ugcugauucuuucuaggag

SEQ ID NO: 1122225 - RNA, 19 nt, Artificial Sequence
  Description of Artificial Sequence: Synthetic oligonucleotide
  Antisense strand to SEQ ID NO: 1122224
cuccuagaaagaaucagca

SEQ ID NO: 1122226 - RNA, 19 nt, Artificial Sequence
  Description of Artificial Sequence: Synthetic oligonucleotide
  Sense strand starting at position 74 of SEQ ID NO: 915995
gcugauucuuucuaggaga

SEQ ID NO: 1122227 - RNA, 19 nt, Artificial Sequence
  Description of Artificial Sequence: Synthetic oligonucleotide
  Antisense strand to SEQ ID NO: 1122226
ucuccuagaaagaaucagc

SEQ ID NO: 1122228 - RNA, 19 nt, Artificial Sequence
  Description of Artificial Sequence: Synthetic oligonucleotide
  Sense strand starting at position 77 of SEQ ID NO: 915995
gauucuuucuaggagagag

SEQ ID NO: 1122229 - RNA, 19 nt, Artificial Sequence
  Description of Artificial Sequence: Synthetic oligonucleotide
  Antisense strand to SEQ ID NO: 1122228
cucucuccuagaaagaauc

SEQ ID NO: 1122230 - RNA, 19 nt, Artificial Sequence
  Description of Artificial Sequence: Synthetic oligonucleotide
  Sense strand starting at position 85 of SEQ ID NO: 915995
cuaggagagaguuguuaga

SEQ ID NO: 1122231 - RNA, 19 nt, Artificial Sequence
  Description of Artificial Sequence: Synthetic oligonucleotide
  Antisense strand to SEQ ID NO: 1122230
ucuaacaacucucuccuag

SEQ ID NO: 1122232 - RNA, 19 nt, Artificial Sequence
  Description of Artificial Sequence: Synthetic oligonucleotide
  Sense strand starting at position 87 of SEQ ID NO: 915995
aggagagaguuguuagacu

SEQ ID NO: 1122233 - RNA, 19 nt, Artificial Sequence
  Description of Artificial Sequence: Synthetic oligonucleotide
  Antisense strand to SEQ ID NO: 1122232
agucuaacaacucucuccu

SEQ ID NO: 1122234 - RNA, 19 nt, Artificial Sequence
  Description of Artificial Sequence: Synthetic oligonucleotide
  Sense strand starting at position 166 of SEQ ID NO: 915995
agguuugggagcuggaaua

SEQ ID NO: 1122235 - RNA, 19 nt, Artificial Sequence
  Description of Artificial Sequence: Synthetic oligonucleotide
  Antisense strand to SEQ ID NO: 1122234
uauuccagcucccaaaccu

SEQ ID NO: 1122236 - RNA, 19 nt, Artificial Sequence
  Description of Artificial Sequence: Synthetic oligonucleotide
  Sense strand starting at position 189 of SEQ ID NO: 915995
gaaaccuucuugggagguu

SEQ ID NO: 1122237 - RNA, 19 nt, Artificial Sequence
  Description of Artificial Sequence: Synthetic oligonucleotide
  Antisense strand to SEQ ID NO: 1122236
aaccucccaagaagguuuc

SEQ ID NO: 1122238 - RNA, 19 nt, Artificial Sequence
  Description of Artificial Sequence: Synthetic oligonucleotide
  Sense strand starting at position 190 of SEQ ID NO: 915995
aaaccuucuugggagguuu

SEQ ID NO: 1122239 - RNA, 19 nt, Artificial Sequence
  Description of Artificial Sequence: Synthetic oligonucleotide
  Antisense strand to SEQ ID NO: 1122238
aaaccucccaagaagguuu

SEQ ID NO: 1122240 - RNA, 19 nt, Artificial Sequence
  Description of Artificial Sequence: Synthetic oligonucleotide
  Sense strand starting at position 300 of SEQ ID NO: 915995
uaggccuucugggaagacu

SEQ ID NO: 1122241 - RNA, 19 nt, Artificial Sequence
  Description of Artificial Sequence: Synthetic oligonucleotide
  Antisense strand to SEQ ID NO: 1122240
agucuucccagaaggccua

SEQ ID NO: 1122242 - RNA, 19 nt, Artificial Sequence
  Description of Artificial Sequence: Synthetic oligonucleotide
  Sense strand starting at position 697 of SEQ ID NO: 915995
acgguuaccucguucagca

SEQ ID NO: 1122243 - RNA, 19 nt, Artificial Sequence
  Description of Artificial Sequence: Synthetic oligonucleotide
  Antisense strand to SEQ ID NO: 1122242
ugcugaacgagguaaccgu

SEQ ID NO: 1122244 - RNA, 19 nt, Artificial Sequence
  Description of Artificial Sequence: Synthetic oligonucleotide
  Sense strand starting at position 1009 of SEQ ID NO: 915995
uuccgucucuccugucuaa

SEQ ID NO: 1122245 - RNA, 19 nt, Artificial Sequence
  Description of Artificial Sequence: Synthetic oligonucleotide
  Antisense strand to SEQ ID NO: 1122244
uuagacaggagagacggaa

SEQ ID NO: 1122246 - RNA, 19 nt, Artificial Sequence
  Description of Artificial Sequence: Synthetic oligonucleotide
  Sense strand starting at position 1210 of SEQ ID NO: 915995
uccugagcucuuggcggaa

SEQ ID NO: 1122247 - RNA, 19 nt, Artificial Sequence
  Description of Artificial Sequence: Synthetic oligonucleotide
  Antisense strand to SEQ ID NO: 1122246
uuccgccaagagcucagga

SEQ ID NO: 1122248 - RNA, 19 nt, Artificial Sequence
  Description of Artificial Sequence: Synthetic oligonucleotide
  Sense strand starting at position 2502 of SEQ ID NO: 915995
ccuggaaagugcuuugaga

SEQ ID NO: 1122249 - RNA, 19 nt, Artificial Sequence
  Description of Artificial Sequence: Synthetic oligonucleotide
  Antisense strand to SEQ ID NO: 1122248
ucucaaagcacuuuccagg

SEQ ID NO: 1122250 - RNA, 19 nt, Artificial Sequence
  Description of Artificial Sequence: Synthetic oligonucleotide
  Sense strand starting at position 2504 of SEQ ID NO: 915995
uggaaagugcuuugagaag

SEQ ID NO: 1122251 - RNA, 19 nt, Artificial Sequence
  Description of Artificial Sequence: Synthetic oligonucleotide
  Antisense strand to SEQ ID NO: 1122250
cuucucaaagcacuuucca

SEQ ID NO: 1122252 - RNA, 19 nt, Artificial Sequence
  Description of Artificial Sequence: Synthetic oligonucleotide
  Sense strand starting at position 2625 of SEQ ID NO: 915995
gaaguuauguuauuugugu

SEQ ID NO: 1122253 - RNA, 19 nt, Artificial Sequence
  Description of Artificial Sequence: Synthetic oligonucleotide
  Antisense strand to SEQ ID NO: 1122252
acacaaauaacauaacuuc

SEQ ID NO: 1122254 - RNA, 19 nt, Artificial Sequence
  Description of Artificial Sequence: Synthetic oligonucleotide
  Sense strand starting at position 2703 of SEQ ID NO: 915995
gagcaaacgcuuugccuuu

SEQ ID NO: 1122255 - RNA, 19 nt, Artificial Sequence
  Description of Artificial Sequence: Synthetic oligonucleotide
  Antisense strand to SEQ ID NO: 1122254
aaaggcaaagcguuugcuc

SEQ ID NO: 1122256 - RNA, 19 nt, Artificial Sequence
  Description of Artificial Sequence: Synthetic oligonucleotide
  Sense strand starting at position 2818 of SEQ ID NO: 915995
agcuuaaguuuccauagga

SEQ ID NO: 1122257 - RNA, 19 nt, Artificial Sequence
  Description of Artificial Sequence: Synthetic oligonucleotide
  Antisense strand to SEQ ID NO: 1122256
uccuauggaaacuuaagcu

SEQ ID NO: 1122258 - RNA, 19 nt, Artificial Sequence
  Description of Artificial Sequence: Synthetic oligonucleotide
  Sense strand starting at position 2933 of SEQ ID NO: 915995
cugaaacuauagcauagaa

SEQ ID NO: 1122259 - RNA, 19 nt, Artificial Sequence
  Description of Artificial Sequence: Synthetic oligonucleotide
  Antisense strand to SEQ ID NO: 1122258
uucuaugcuauaguuucag

SEQ ID NO: 1122260 - RNA, 19 nt, Artificial Sequence
  Description of Artificial Sequence: Synthetic oligonucleotide
  Sense strand starting at position 3298 of SEQ ID NO: 915995
aucaguuacuucucccuga

SEQ ID NO: 1122261 - RNA, 19 nt, Artificial Sequence
  Description of Artificial Sequence: Synthetic oligonucleotide
  Antisense strand to SEQ ID NO: 1122260
ucagggagaaguaacugau

SEQ ID NO: 1122262 - RNA, 19 nt, Artificial Sequence
  Description of Artificial Sequence: Synthetic oligonucleotide
  Sense strand starting at position 3301 of SEQ ID NO: 915995
aguuacuucucccugaggu

SEQ ID NO: 1122263 - RNA, 19 nt, Artificial Sequence
  Description of Artificial Sequence: Synthetic oligonucleotide
  Antisense strand to SEQ ID NO: 1122262
accucagggagaaguaacu

SEQ ID NO: 1122264 - RNA, 19 nt, Artificial Sequence
  Description of Artificial Sequence: Synthetic oligonucleotide
  Sense strand starting at position 3302 of SEQ ID NO: 915995
guuacuucucccugagguu

SEQ ID NO: 1122265 - RNA, 19 nt, Artificial Sequence
  Description of Artificial Sequence: Synthetic oligonucleotide
  Antisense strand to SEQ ID NO: 1122264
aaccucagggagaaguaac

SEQ ID NO: 1122266 - RNA, 19 nt, Artificial Sequence
  Description of Artificial Sequence: Synthetic oligonucleotide
  Sense strand starting at position 3798 of SEQ ID NO: 915995
ugacgugacuggcaggauu

SEQ ID NO: 1122267 - RNA, 19 nt, Artificial Sequence
  Description of Artificial Sequence: Synthetic oligonucleotide
  Antisense strand to SEQ ID NO: 1122266
aauccugccagucacguca

SEQ ID NO: 1122268 - RNA, 19 nt, Artificial Sequence
  Description of Artificial Sequence: Synthetic oligonucleotide
  Sense strand starting at position 3800 of SEQ ID NO: 915995
acgugacuggcaggauuau

SEQ ID NO: 1122269 - RNA, 19 nt, Artificial Sequence
  Description of Artificial Sequence: Synthetic oligonucleotide
  Antisense strand to SEQ ID NO: 1122268
auaauccugccagucacgu

SEQ ID NO: 1122270 - RNA, 19 nt, Artificial Sequence
  Description of Artificial Sequence: Synthetic oligonucleotide
  Sense strand starting at position 3809 of SEQ ID NO: 915995
gcaggauuauccuucucca

SEQ ID NO: 1122271 - RNA, 19 nt, Artificial Sequence
  Description of Artificial Sequence: Synthetic oligonucleotide
  Antisense strand to SEQ ID NO: 1122270
uggagaaggauaauccugc

SEQ ID NO: 1122272 - RNA, 19 nt, Artificial Sequence
  Description of Artificial Sequence: Synthetic oligonucleotide
  Sense strand starting at position 3890 of SEQ ID NO: 915995
uggcucaaaccucauagua

SEQ ID NO: 1122273 - RNA, 19 nt, Artificial Sequence
  Description of Artificial Sequence: Synthetic oligonucleotide
  Antisense strand to SEQ ID NO: 1122272
uacuaugagguuugagcca

SEQ ID NO: 1122274 - RNA, 19 nt, Artificial Sequence
  Description of Artificial Sequence: Synthetic oligonucleotide
  Sense strand starting at position 3947 of SEQ ID NO: 915995
ggauccauuccuggaagcu

SEQ ID NO: 1122275 - RNA, 19 nt, Artificial Sequence
  Description of Artificial Sequence: Synthetic oligonucleotide
  Antisense strand to SEQ ID NO: 1122274
agcuuccaggaauggaucc

SEQ ID NO: 1122276 - RNA, 19 nt, Artificial Sequence
  Description of Artificial Sequence: Synthetic oligonucleotide
  Sense strand starting at position 137 of SEQ ID NO: 915996
gggcccucucauugagaga

SEQ ID NO: 1122277 - RNA, 19 nt, Artificial Sequence
  Description of Artificial Sequence: Synthetic oligonucleotide
  Antisense strand to SEQ ID NO: 1122276
ucucucaaugagagggccc

SEQ ID NO: 1122278 - RNA, 19 nt, Artificial Sequence
  Description of Artificial Sequence: Synthetic oligonucleotide
  Sense strand starting at position 142 of SEQ ID NO: 915996
cucucauugagagaggugu

SEQ ID NO: 1122279 - RNA, 19 nt, Artificial Sequence
  Description of Artificial Sequence: Synthetic oligonucleotide
  Antisense strand to SEQ ID NO: 1122278
acaccucucucaaugagag

SEQ ID NO: 1122280 - RNA, 19 nt, Artificial Sequence
  Description of Artificial Sequence: Synthetic oligonucleotide
  Sense strand starting at position 146 of SEQ ID NO: 915996
cauugagagagguguccuu

SEQ ID NO: 1122281 - RNA, 19 nt, Artificial Sequence
  Description of Artificial Sequence: Synthetic oligonucleotide
  Antisense strand to SEQ ID NO: 1122280
aaggacaccucucucaaug

SEQ ID NO: 1122282 - RNA, 19 nt, Artificial Sequence
  Description of Artificial Sequence: Synthetic oligonucleotide
  Sense strand starting at position 192 of SEQ ID NO: 915996
uguauccaggaaugaguua

SEQ ID NO: 1122283 - RNA, 19 nt, Artificial Sequence
  Description of Artificial Sequence: Synthetic oligonucleotide
  Antisense strand to SEQ ID NO: 1122282
uaacucauuccuggauaca

SEQ ID NO: 1122284 - RNA, 19 nt, Artificial Sequence
  Description of Artificial Sequence: Synthetic oligonucleotide
  Sense strand starting at position 226 of SEQ ID NO: 915996
gcaacuaaucucugaaagg

SEQ ID NO: 1122285 - RNA, 19 nt, Artificial Sequence
  Description of Artificial Sequence: Synthetic oligonucleotide
  Antisense strand to SEQ ID NO: 1122284
ccuuucagagauuaguugc

SEQ ID NO: 1122286 - RNA, 19 nt, Artificial Sequence
  Description of Artificial Sequence: Synthetic oligonucleotide
  Sense strand starting at position 355 of SEQ ID NO: 915996
ccaugaauucuagggaagc

SEQ ID NO: 1122287 - RNA, 19 nt, Artificial Sequence
  Description of Artificial Sequence: Synthetic oligonucleotide
  Antisense strand to SEQ ID NO: 1122286
gcuucccuagaauucaugg

SEQ ID NO: 1122288 - RNA, 19 nt, Artificial Sequence
  Description of Artificial Sequence: Synthetic oligonucleotide
  Sense strand starting at position 385 of SEQ ID NO: 915996
gcuggcauccaagagacaa

SEQ ID NO: 1122289 - RNA, 19 nt, Artificial Sequence
  Description of Artificial Sequence: Synthetic oligonucleotide
  Antisense strand to SEQ ID NO: 1122288
uugucucuuggaugccagc

SEQ ID NO: 1122290 - RNA, 19 nt, Artificial Sequence
  Description of Artificial Sequence: Synthetic oligonucleotide
  Sense strand starting at position 443 of SEQ ID NO: 915996
uugacuuauuauuccagga

SEQ ID NO: 1122291 - RNA, 19 nt, Artificial Sequence
  Description of Artificial Sequence: Synthetic oligonucleotide
  Antisense strand to SEQ ID NO: 1122290
uccuggaauaauaagucaa

SEQ ID NO: 1122292 - RNA, 19 nt, Artificial Sequence
  Description of Artificial Sequence: Synthetic oligonucleotide
  Sense strand starting at position 447 of SEQ ID NO: 915996
cuuauuauuccaggaaguc

SEQ ID NO: 1122293 - RNA, 19 nt, Artificial Sequence
  Description of Artificial Sequence: Synthetic oligonucleotide
  Antisense strand to SEQ ID NO: 1122292
gacuuccuggaauaauaag

SEQ ID NO: 1122294 - RNA, 19 nt, Artificial Sequence
  Description of Artificial Sequence: Synthetic oligonucleotide
  Sense strand starting at position 980 of SEQ ID NO: 915996
aucuauuuccugugucacu

SEQ ID NO: 1122295 - RNA, 19 nt, Artificial Sequence
  Description of Artificial Sequence: Synthetic oligonucleotide
  Antisense strand to SEQ ID NO: 1122294
agugacacaggaaauagau

SEQ ID NO: 1122296 - RNA, 19 nt, Artificial Sequence
  Description of Artificial Sequence: Synthetic oligonucleotide
  Sense strand starting at position 1219 of SEQ ID NO: 915996
gguugaaacuaauccaugu

SEQ ID NO: 1122297 - RNA, 19 nt, Artificial Sequence
  Description of Artificial Sequence: Synthetic oligonucleotide
  Antisense strand to SEQ ID NO: 1122296
acauggauuaguuucaacc

SEQ ID NO: 1122298 - RNA, 19 nt, Artificial Sequence
  Description of Artificial Sequence: Synthetic oligonucleotide
  Sense strand starting at position 1358 of SEQ ID NO: 915996
ucauguccgaaagaaaguu

SEQ ID NO: 1122299 - RNA, 19 nt, Artificial Sequence
  Description of Artificial Sequence: Synthetic oligonucleotide
  Antisense strand to SEQ ID NO: 1122298
aacuuucuuucggacauga

SEQ ID NO: 1122300 - RNA, 19 nt, Artificial Sequence
  Description of Artificial Sequence: Synthetic oligonucleotide
  Sense strand starting at position 1467 of SEQ ID NO: 915996
ucuagaguuccuugacauu

SEQ ID NO: 1122301 - RNA, 19 nt, Artificial Sequence
  Description of Artificial Sequence: Synthetic oligonucleotide
  Antisense strand to SEQ ID NO: 1122300
aaugucaaggaacucuaga

SEQ ID NO: 1122302 - RNA, 19 nt, Artificial Sequence
  Description of Artificial Sequence: Synthetic oligonucleotide
  Sense strand starting at position 1529 of SEQ ID NO: 915996
cguaaaggccuuuggauuu

SEQ ID NO: 1122303 - RNA, 19 nt, Artificial Sequence
  Description of Artificial Sequence: Synthetic oligonucleotide
  Antisense strand to SEQ ID NO: 1122302
aaauccaaaggccuuuacg

SEQ ID NO: 1122304 - RNA, 19 nt, Artificial Sequence
  Description of Artificial Sequence: Synthetic oligonucleotide
  Sense strand starting at position 1618 of SEQ ID NO: 915996
ccuugaagggaucagcuuu

SEQ ID NO: 1122305 - RNA, 19 nt, Artificial Sequence
  Description of Artificial Sequence: Synthetic oligonucleotide
  Antisense strand to SEQ ID NO: 1122304
aaagcugaucccuucaagg

SEQ ID NO: 1122306 - RNA, 19 nt, Artificial Sequence
  Description of Artificial Sequence: Synthetic oligonucleotide
  Sense strand starting at position 2170 of SEQ ID NO: 915996
ggcccaugaucccuuagga

SEQ ID NO: 1122307 - RNA, 19 nt, Artificial Sequence
  Description of Artificial Sequence: Synthetic oligonucleotide
  Antisense strand to SEQ ID NO: 1122306
uccuaagggaucaugggcc

SEQ ID NO: 1122308 - RNA, 19 nt, Artificial Sequence
  Description of Artificial Sequence: Synthetic oligonucleotide
  Sense strand starting at position 2349 of SEQ ID NO: 915996
aggcguuaagcguuaugca

SEQ ID NO: 1122309 - RNA, 19 nt, Artificial Sequence
  Description of Artificial Sequence: Synthetic oligonucleotide
  Antisense strand to SEQ ID NO: 1122308
ugcauaacgcuuaacgccu

SEQ ID NO: 1122310 - RNA, 19 nt, Artificial Sequence
  Description of Artificial Sequence: Synthetic oligonucleotide
  Sense strand starting at position 2357 of SEQ ID NO: 915996
agcguuaugcacgcuuuau

SEQ ID NO: 1122311 - RNA, 19 nt, Artificial Sequence
  Description of Artificial Sequence: Synthetic oligonucleotide
  Antisense strand to SEQ ID NO: 1122310
auaaagcgugcauaacgcu

SEQ ID NO: 1122312 - RNA, 19 nt, Artificial Sequence
  Description of Artificial Sequence: Synthetic oligonucleotide
  Sense strand starting at position 2358 of SEQ ID NO: 915996
gcguuaugcacgcuuuaua

SEQ ID NO: 1122313 - RNA, 19 nt, Artificial Sequence
  Description of Artificial Sequence: Synthetic oligonucleotide
  Antisense strand to SEQ ID NO: 1122312
uauaaagcgugcauaacgc

SEQ ID NO: 1122314 - RNA, 19 nt, Artificial Sequence
  Description of Artificial Sequence: Synthetic oligonucleotide
  Sense strand starting at position 2376 of SEQ ID NO: 915996
agauguagaaagugaagua

SEQ ID NO: 1122315 - RNA, 19 nt, Artificial Sequence
  Description of Artificial Sequence: Synthetic oligonucleotide
  Antisense strand to SEQ ID NO: 1122314
uacuucacuuucuacaucu

SEQ ID NO: 1122316 - RNA, 19 nt, Artificial Sequence
  Description of Artificial Sequence: Synthetic oligonucleotide
  Sense strand starting at position 2383 of SEQ ID NO: 915996
gaaagugaaguacgguuaa

SEQ ID NO: 1122317 - RNA, 19 nt, Artificial Sequence
  Description of Artificial Sequence: Synthetic oligonucleotide
  Antisense strand to SEQ ID NO: 1122316
uuaaccguacuucacuuuc

SEQ ID NO: 1122318 - RNA, 19 nt, Artificial Sequence
  Description of Artificial Sequence: Synthetic oligonucleotide
  Sense strand starting at position 2416 of SEQ ID NO: 915996
gugucaaagcuaugaaaug

SEQ ID NO: 1122319 - RNA, 19 nt, Artificial Sequence
  Description of Artificial Sequence: Synthetic oligonucleotide
  Antisense strand to SEQ ID NO: 1122318
cauuucauagcuuugacac

SEQ ID NO: 1122320 - RNA, 19 nt, Artificial Sequence
  Description of Artificial Sequence: Synthetic oligonucleotide
  Sense strand starting at position 2838 of SEQ ID NO: 915996
ggcuuaaauuaauuaggau

SEQ ID NO: 1122321 - RNA, 19 nt, Artificial Sequence
  Description of Artificial Sequence: Synthetic oligonucleotide
  Antisense strand to SEQ ID NO: 1122320
auccuaauuaauuuaagcc

SEQ ID NO: 1122322 - RNA, 19 nt, Artificial Sequence
  Description of Artificial Sequence: Synthetic oligonucleotide
  Sense strand starting at position 3012 of SEQ ID NO: 915996
cuggcucugcauuaaagga

SEQ ID NO: 1122323 - RNA, 19 nt, Artificial Sequence
  Description of Artificial Sequence: Synthetic oligonucleotide
  Antisense strand to SEQ ID NO: 1122322
uccuuuaaugcagagccag

SEQ ID NO: 1122324 - RNA, 19 nt, Artificial Sequence
  Description of Artificial Sequence: Synthetic oligonucleotide
  Sense strand starting at position 3020 of SEQ ID NO: 915996
gcauuaaaggauuacaguc

SEQ ID NO: 1122325 - RNA, 19 nt, Artificial Sequence
  Description of Artificial Sequence: Synthetic oligonucleotide
  Antisense strand to SEQ ID NO: 1122324
gacuguaauccuuuaaugc

SEQ ID NO: 1122326 - RNA, 19 nt, Artificial Sequence
  Description of Artificial Sequence: Synthetic oligonucleotide
  Sense strand starting at position 3242 of SEQ ID NO: 915996
ugugucauuagucaggauu

SEQ ID NO: 1122327 - RNA, 19 nt, Artificial Sequence
  Description of Artificial Sequence: Synthetic oligonucleotide
  Antisense strand to SEQ ID NO: 1122326
aauccugacuaaugacaca

SEQ ID NO: 1122328 - RNA, 19 nt, Artificial Sequence
  Description of Artificial Sequence: Synthetic oligonucleotide
  Sense strand starting at position 3305 of SEQ ID NO: 915996
ucuggaguggguuaagagu

SEQ ID NO: 1122329 - RNA, 19 nt, Artificial Sequence
  Description of Artificial Sequence: Synthetic oligonucleotide
  Antisense strand to SEQ ID NO: 1122328
acucuuaacccacuccaga

SEQ ID NO: 1122330 - RNA, 19 nt, Artificial Sequence
  Description of Artificial Sequence: Synthetic oligonucleotide
  Sense strand starting at position 3429 of SEQ ID NO: 915996
uccauuucuugggugcuua

SEQ ID NO: 1122331 - RNA, 19 nt, Artificial Sequence
  Description of Artificial Sequence: Synthetic oligonucleotide
  Antisense strand to SEQ ID NO: 1122330
uaagcacccaagaaaugga

SEQ ID NO: 1122332 - RNA, 19 nt, Artificial Sequence
  Description of Artificial Sequence: Synthetic oligonucleotide
  Sense strand starting at position 3430 of SEQ ID NO: 915996
ccauuucuugggugcuuau

SEQ ID NO: 1122333 - RNA, 19 nt, Artificial Sequence
  Description of Artificial Sequence: Synthetic oligonucleotide
  Antisense strand to SEQ ID NO: 1122332
auaagcacccaagaaaugg

SEQ ID NO: 1122334 - RNA, 19 nt, Artificial Sequence
  Description of Artificial Sequence: Synthetic oligonucleotide
  Sense strand starting at position 3485 of SEQ ID NO: 915996
auacaacaggcuuauguaa

SEQ ID NO: 1122335 - RNA, 19 nt, Artificial Sequence
  Description of Artificial Sequence: Synthetic oligonucleotide
  Antisense strand to SEQ ID NO: 1122334
uuacauaagccuguuguau

SEQ ID NO: 1122336 - RNA, 19 nt, Artificial Sequence
  Description of Artificial Sequence: Synthetic oligonucleotide
  Sense strand starting at position 3555 of SEQ ID NO: 915996
aaugacuugccuggaguca

SEQ ID NO: 1122337 - RNA, 19 nt, Artificial Sequence
  Description of Artificial Sequence: Synthetic oligonucleotide
  Antisense strand to SEQ ID NO: 1122336
ugacuccaggcaagucauu

SEQ ID NO: 1122338 - RNA, 19 nt, Artificial Sequence
  Description of Artificial Sequence: Synthetic oligonucleotide
  Sense strand starting at position 3556 of SEQ ID NO: 915996
augacuugccuggagucau

SEQ ID NO: 1122339 - RNA, 19 nt, Artificial Sequence
  Description of Artificial Sequence: Synthetic oligonucleotide
  Antisense strand to SEQ ID NO: 1122338
augacuccaggcaagucau

SEQ ID NO: 1122340 - RNA, 19 nt, Artificial Sequence
  Description of Artificial Sequence: Synthetic oligonucleotide
  Sense strand starting at position 3568 of SEQ ID NO: 915996
gagucauccagcuagugag

SEQ ID NO: 1122341 - RNA, 19 nt, Artificial Sequence
  Description of Artificial Sequence: Synthetic oligonucleotide
  Antisense strand to SEQ ID NO: 1122340
cucacuagcuggaugacuc

SEQ ID NO: 1122342 - RNA, 19 nt, Artificial Sequence
  Description of Artificial Sequence: Synthetic oligonucleotide
  Sense strand starting at position 3580 of SEQ ID NO: 915996
uagugaguggcagaaucaa

SEQ ID NO: 1122343 - RNA, 19 nt, Artificial Sequence
  Description of Artificial Sequence: Synthetic oligonucleotide
  Antisense strand to SEQ ID NO: 1122342
uugauucugccacucacua

SEQ ID NO: 1122344 - RNA, 19 nt, Artificial Sequence
  Description of Artificial Sequence: Synthetic oligonucleotide
  Sense strand starting at position 3635 of SEQ ID NO: 915996
gaaacucuggcaugugaua

SEQ ID NO: 1122345 - RNA, 19 nt, Artificial Sequence
  Description of Artificial Sequence: Synthetic oligonucleotide
  Antisense strand to SEQ ID NO: 1122344
uaucacaugccagaguuuc

SEQ ID NO: 1122346 - RNA, 19 nt, Artificial Sequence
  Description of Artificial Sequence: Synthetic oligonucleotide
  Sense strand starting at position 3712 of SEQ ID NO: 915996
ugagcauuuaugugcucag

SEQ ID NO: 1122347 - RNA, 19 nt, Artificial Sequence
  Description of Artificial Sequence: Synthetic oligonucleotide
  Antisense strand to SEQ ID NO: 1122346
cugagcacauaaaugcuca

SEQ ID NO: 1122348 - RNA, 19 nt, Artificial Sequence
  Description of Artificial Sequence: Synthetic oligonucleotide
  Sense strand starting at position 3713 of SEQ ID NO: 915996
gagcauuuaugugcucagu

SEQ ID NO: 1122349 - RNA, 19 nt, Artificial Sequence
  Description of Artificial Sequence: Synthetic oligonucleotide
  Antisense strand to SEQ ID NO: 1122348
acugagcacauaaaugcuc

SEQ ID NO: 1122350 - RNA, 19 nt, Artificial Sequence
  Description of Artificial Sequence: Synthetic oligonucleotide
  Sense strand starting at position 3716 of SEQ ID NO: 915996
cauuuaugugcucagugca

SEQ ID NO: 1122351 - RNA, 19 nt, Artificial Sequence
  Description of Artificial Sequence: Synthetic oligonucleotide
  Antisense strand to SEQ ID NO: 1122350
ugcacugagcacauaaaug

SEQ ID NO: 1122352 - RNA, 19 nt, Artificial Sequence
  Description of Artificial Sequence: Synthetic oligonucleotide
  Sense strand starting at position 3769 of SEQ ID NO: 915996
aaauauguggcagguacua

SEQ ID NO: 1122353 - RNA, 19 nt, Artificial Sequence
  Description of Artificial Sequence: Synthetic oligonucleotide
  Antisense strand to SEQ ID NO: 1122352
uaguaccugccacauauuu

SEQ ID NO: 1122354 - RNA, 19 nt, Artificial Sequence
  Description of Artificial Sequence: Synthetic oligonucleotide
  Sense strand starting at position 3949 of SEQ ID NO: 915996
uuggauaguuuggcaagau

SEQ ID NO: 1122355 - RNA, 19 nt, Artificial Sequence
  Description of Artificial Sequence: Synthetic oligonucleotide
  Antisense strand to SEQ ID NO: 1122354
aucuugccaaacuauccaa

SEQ ID NO: 1122356 - RNA, 19 nt, Artificial Sequence
  Description of Artificial Sequence: Synthetic oligonucleotide
  Sense strand starting at position 26 of SEQ ID NO: 915997
uuugguaggcauuaaauga

SEQ ID NO: 1122357 - RNA, 19 nt, Artificial Sequence
  Description of Artificial Sequence: Synthetic oligonucleotide
  Antisense strand to SEQ ID NO: 1122356
ucauuuaaugccuaccaaa

SEQ ID NO: 1122358 - RNA, 19 nt, Artificial Sequence
  Description of Artificial Sequence: Synthetic oligonucleotide
  Sense strand starting at position 457 of SEQ ID NO: 915997
ucaucaaaugauggcuauu

SEQ ID NO: 1122359 - RNA, 19 nt, Artificial Sequence
  Description of Artificial Sequence: Synthetic oligonucleotide
  Antisense strand to SEQ ID NO: 1122358
aauagccaucauuugauga

SEQ ID NO: 1122360 - RNA, 19 nt, Artificial Sequence
  Description of Artificial Sequence: Synthetic oligonucleotide
  Sense strand starting at position 460 of SEQ ID NO: 915997
ucaaaugauggcuauuacu

SEQ ID NO: 1122361 - RNA, 19 nt, Artificial Sequence
  Description of Artificial Sequence: Synthetic oligonucleotide
  Antisense strand to SEQ ID NO: 1122360
aguaauagccaucauuuga

SEQ ID NO: 1122362 - RNA, 19 nt, Artificial Sequence
  Description of Artificial Sequence: Synthetic oligonucleotide
  Sense strand starting at position 555 of SEQ ID NO: 915997
gccugcuuccuccauagga

SEQ ID NO: 1122363 - RNA, 19 nt, Artificial Sequence
  Description of Artificial Sequence: Synthetic oligonucleotide
  Antisense strand to SEQ ID NO: 1122362
uccuauggaggaagcaggc

SEQ ID NO: 1122364 - RNA, 19 nt, Artificial Sequence
  Description of Artificial Sequence: Synthetic oligonucleotide
  Sense strand starting at position 1265 of SEQ ID NO: 915997
gaauuuaggucagaaggac

SEQ ID NO: 1122365 - RNA, 19 nt, Artificial Sequence
  Description of Artificial Sequence: Synthetic oligonucleotide
  Antisense strand to SEQ ID NO: 1122364
guccuucugaccuaaauuc

SEQ ID NO: 1122366 - RNA, 19 nt, Artificial Sequence
  Description of Artificial Sequence: Synthetic oligonucleotide
  Sense strand starting at position 2410 of SEQ ID NO: 915997
gcuugcuuuguuuagccaa

SEQ ID NO: 1122367 - RNA, 19 nt, Artificial Sequence
  Description of Artificial Sequence: Synthetic oligonucleotide
  Antisense strand to SEQ ID NO: 1122366
uuggcuaaacaaagcaagc

SEQ ID NO: 1122368 - RNA, 19 nt, Artificial Sequence
  Description of Artificial Sequence: Synthetic oligonucleotide
  Sense strand starting at position 2412 of SEQ ID NO: 915997
uugcuuuguuuagccaaau

SEQ ID NO: 1122369 - RNA, 19 nt, Artificial Sequence
  Description of Artificial Sequence: Synthetic oligonucleotide
  Antisense strand to SEQ ID NO: 1122368
auuuggcuaaacaaagcaa

SEQ ID NO: 1122370 - RNA, 19 nt, Artificial Sequence
  Description of Artificial Sequence: Synthetic oligonucleotide
  Sense strand starting at position 2413 of SEQ ID NO: 915997
ugcuuuguuuagccaaaug

SEQ ID NO: 1122371 - RNA, 19 nt, Artificial Sequence
  Description of Artificial Sequence: Synthetic oligonucleotide
  Antisense strand to SEQ ID NO: 1122370
cauuuggcuaaacaaagca

SEQ ID NO: 1122372 - RNA, 19 nt, Artificial Sequence
  Description of Artificial Sequence: Synthetic oligonucleotide
  Sense strand starting at position 2454 of SEQ ID NO: 915997
ggcugacccugggaaaguu

SEQ ID NO: 1122373 - RNA, 19 nt, Artificial Sequence
  Description of Artificial Sequence: Synthetic oligonucleotide
  Antisense strand to SEQ ID NO: 1122372
aacuuucccagggucagcc

SEQ ID NO: 1122374 - RNA, 19 nt, Artificial Sequence
  Description of Artificial Sequence: Synthetic oligonucleotide
  Sense strand starting at position 2715 of SEQ ID NO: 915997
ccagauggcuacuuagaug

SEQ ID NO: 1122375 - RNA, 19 nt, Artificial Sequence
  Description of Artificial Sequence: Synthetic oligonucleotide
  Antisense strand to SEQ ID NO: 1122374
caucuaaguagccaucugg

SEQ ID NO: 1122376 - RNA, 19 nt, Artificial Sequence
  Description of Artificial Sequence: Synthetic oligonucleotide
  Sense strand starting at position 2795 of SEQ ID NO: 915997
gccuuaagugugcguugga

SEQ ID NO: 1122377 - RNA, 19 nt, Artificial Sequence
  Description of Artificial Sequence: Synthetic oligonucleotide
  Antisense strand to SEQ ID NO: 1122376
uccaacgcacacuuaaggc

SEQ ID NO: 1122378 - RNA, 19 nt, Artificial Sequence
  Description of Artificial Sequence: Synthetic oligonucleotide
  Sense strand starting at position 2796 of SEQ ID NO: 915997
ccuuaagugugcguuggau

SEQ ID NO: 1122379 - RNA, 19 nt, Artificial Sequence
  Description of Artificial Sequence: Synthetic oligonucleotide
  Antisense strand to SEQ ID NO: 1122378
auccaacgcacacuuaagg

SEQ ID NO: 1122380 - RNA, 19 nt, Artificial Sequence
  Description of Artificial Sequence: Synthetic oligonucleotide
  Sense strand starting at position 2958 of SEQ ID NO: 915997
agagucaaccuccaaguua

SEQ ID NO: 1122381 - RNA, 19 nt, Artificial Sequence
  Description of Artificial Sequence: Synthetic oligonucleotide
  Antisense strand to SEQ ID NO: 1122380
uaacuuggagguugacucu

SEQ ID NO: 1122382 - RNA, 19 nt, Artificial Sequence
  Description of Artificial Sequence: Synthetic oligonucleotide
  Sense strand starting at position 2995 of SEQ ID NO: 915997
ucuaguuaacuggguggau

SEQ ID NO: 1122383 - RNA, 19 nt, Artificial Sequence
  Description of Artificial Sequence: Synthetic oligonucleotide
  Antisense strand to SEQ ID NO: 1122382
auccacccaguuaacuaga

SEQ ID NO: 1122384 - RNA, 19 nt, Artificial Sequence
  Description of Artificial Sequence: Synthetic oligonucleotide
  Sense strand starting at position 2996 of SEQ ID NO: 915997
cuaguuaacuggguggauu

SEQ ID NO: 1122385 - RNA, 19 nt, Artificial Sequence
  Description of Artificial Sequence: Synthetic oligonucleotide
  Antisense strand to SEQ ID NO: 1122384
aauccacccaguuaacuag

SEQ ID NO: 1122386 - RNA, 19 nt, Artificial Sequence
  Description of Artificial Sequence: Synthetic oligonucleotide
  Sense strand starting at position 3027 of SEQ ID NO: 915997
cgaugugcuucucuuguau

SEQ ID NO: 1122387 - RNA, 19 nt, Artificial Sequence
  Description of Artificial Sequence: Synthetic oligonucleotide
  Antisense strand to SEQ ID NO: 1122386
auacaagagaagcacaucg

SEQ ID NO: 1122388 - RNA, 19 nt, Artificial Sequence
  Description of Artificial Sequence: Synthetic oligonucleotide
  Sense strand starting at position 3039 of SEQ ID NO: 915997
cuuguauuucuaggccgua

SEQ ID NO: 1122389 - RNA, 19 nt, Artificial Sequence
  Description of Artificial Sequence: Synthetic oligonucleotide
  Antisense strand to SEQ ID NO: 1122388
uacggccuagaaauacaag

SEQ ID NO: 1122390 - RNA, 19 nt, Artificial Sequence
  Description of Artificial Sequence: Synthetic oligonucleotide
  Sense strand starting at position 3760 of SEQ ID NO: 915997
uccaccucuucugauguua

SEQ ID NO: 1122391 - RNA, 19 nt, Artificial Sequence
  Description of Artificial Sequence: Synthetic oligonucleotide
  Antisense strand to SEQ ID NO: 1122390
uaacaucagaagaggugga

SEQ ID NO: 1122392 - RNA, 19 nt, Artificial Sequence
  Description of Artificial Sequence: Synthetic oligonucleotide
  Sense strand starting at position 3768 of SEQ ID NO: 915997
uucugauguuacucaacgu

SEQ ID NO: 1122393 - RNA, 19 nt, Artificial Sequence
  Description of Artificial Sequence: Synthetic oligonucleotide
  Antisense strand to SEQ ID NO: 1122392
acguugaguaacaucagaa

SEQ ID NO: 1122394 - RNA, 19 nt, Artificial Sequence
  Description of Artificial Sequence: Synthetic oligonucleotide
  Sense strand starting at position 3772 of SEQ ID NO: 915997
gauguuacucaacgugcau

SEQ ID NO: 1122395 - RNA, 19 nt, Artificial Sequence
  Description of Artificial Sequence: Synthetic oligonucleotide
  Antisense strand to SEQ ID NO: 1122394
augcacguugaguaacauc

SEQ ID NO: 1122396 - RNA, 19 nt, Artificial Sequence
  Description of Artificial Sequence: Synthetic oligonucleotide
  Sense strand starting at position 3787 of SEQ ID NO: 915997
gcaugcauuugcuggaaau

SEQ ID NO: 1122397 - RNA, 19 nt, Artificial Sequence
  Description of Artificial Sequence: Synthetic oligonucleotide
  Antisense strand to SEQ ID NO: 1122396
auuuccagcaaaugcaugc

SEQ ID NO: 1122398 - RNA, 19 nt, Artificial Sequence
  Description of Artificial Sequence: Synthetic oligonucleotide
  Sense strand starting at position 445 of SEQ ID NO: 915998
augaaaugauccuauggag

SEQ ID NO: 1122399 - RNA, 19 nt, Artificial Sequence
  Description of Artificial Sequence: Synthetic oligonucleotide
  Antisense strand to SEQ ID NO: 1122398
cuccauaggaucauuucau

SEQ ID NO: 1122400 - RNA, 19 nt, Artificial Sequence
  Description of Artificial Sequence: Synthetic oligonucleotide
  Sense strand starting at position 517 of SEQ ID NO: 915998
auaaucagaugcugauuaa

SEQ ID NO: 1122401 - RNA, 19 nt, Artificial Sequence
  Description of Artificial Sequence: Synthetic oligonucleotide
  Antisense strand to SEQ ID NO: 1122400
uuaaucagcaucugauuau

SEQ ID NO: 1122402 - RNA, 19 nt, Artificial Sequence
  Description of Artificial Sequence: Synthetic oligonucleotide
  Sense strand starting at position 520 of SEQ ID NO: 915998
aucagaugcugauuaacgu

SEQ ID NO: 1122403 - RNA, 19 nt, Artificial Sequence
  Description of Artificial Sequence: Synthetic oligonucleotide
  Antisense strand to SEQ ID NO: 1122402
acguuaaucagcaucugau

SEQ ID NO: 1122404 - RNA, 19 nt, Artificial Sequence
  Description of Artificial Sequence: Synthetic oligonucleotide
  Sense strand starting at position 527 of SEQ ID NO: 915998
gcugauuaacguuaugaag

SEQ ID NO: 1122405 - RNA, 19 nt, Artificial Sequence
  Description of Artificial Sequence: Synthetic oligonucleotide
  Antisense strand to SEQ ID NO: 1122404
cuucauaacguuaaucagc

SEQ ID NO: 1122406 - RNA, 19 nt, Artificial Sequence
  Description of Artificial Sequence: Synthetic oligonucleotide
  Sense strand starting at position 530 of SEQ ID NO: 915998
gauuaacguuaugaaggaa

SEQ ID NO: 1122407 - RNA, 19 nt, Artificial Sequence
  Description of Artificial Sequence: Synthetic oligonucleotide
  Antisense strand to SEQ ID NO: 1122406
uuccuucauaacguuaauc

SEQ ID NO: 1122408 - RNA, 19 nt, Artificial Sequence
  Description of Artificial Sequence: Synthetic oligonucleotide
  Sense strand starting at position 623 of SEQ ID NO: 915998
aggugauacuggaguugag

SEQ ID NO: 1122409 - RNA, 19 nt, Artificial Sequence
  Description of Artificial Sequence: Synthetic oligonucleotide
  Antisense strand to SEQ ID NO: 1122408
cucaacuccaguaucaccu

SEQ ID NO: 1122410 - RNA, 19 nt, Artificial Sequence
  Description of Artificial Sequence: Synthetic oligonucleotide
  Sense strand starting at position 626 of SEQ ID NO: 915998
ugauacuggaguugagacu

SEQ ID NO: 1122411 - RNA, 19 nt, Artificial Sequence
  Description of Artificial Sequence: Synthetic oligonucleotide
  Antisense strand to SEQ ID NO: 1122410
agucucaacuccaguauca

SEQ ID NO: 1122412 - RNA, 19 nt, Artificial Sequence
  Description of Artificial Sequence: Synthetic oligonucleotide
  Sense strand starting at position 633 of SEQ ID NO: 915998
ggaguugagacuuggacau

SEQ ID NO: 1122413 - RNA, 19 nt, Artificial Sequence
  Description of Artificial Sequence: Synthetic oligonucleotide
  Antisense strand to SEQ ID NO: 1122412
auguccaagucucaacucc

SEQ ID NO: 1122414 - RNA, 19 nt, Artificial Sequence
  Description of Artificial Sequence: Synthetic oligonucleotide
  Sense strand starting at position 635 of SEQ ID NO: 915998
aguugagacuuggacauua

SEQ ID NO: 1122415 - RNA, 19 nt, Artificial Sequence
  Description of Artificial Sequence: Synthetic oligonucleotide
  Antisense strand to SEQ ID NO: 1122414
uaauguccaagucucaacu

SEQ ID NO: 1122416 - RNA, 19 nt, Artificial Sequence
  Description of Artificial Sequence: Synthetic oligonucleotide
  Sense strand starting at position 692 of SEQ ID NO: 915998
ggaggugguuccaagcaga

SEQ ID NO: 1122417 - RNA, 19 nt, Artificial Sequence
  Description of Artificial Sequence: Synthetic oligonucleotide
  Antisense strand to SEQ ID NO: 1122416
ucugcuuggaaccaccucc

SEQ ID NO: 1122418 - RNA, 19 nt, Artificial Sequence
  Description of Artificial Sequence: Synthetic oligonucleotide
  Sense strand starting at position 744 of SEQ ID NO: 915998
cuuggauuccgaggaaugu

SEQ ID NO: 1122419 - RNA, 19 nt, Artificial Sequence
  Description of Artificial Sequence: Synthetic oligonucleotide
  Antisense strand to SEQ ID NO: 1122418
acauuccucggaauccaag

SEQ ID NO: 1122420 - RNA, 19 nt, Artificial Sequence
  Description of Artificial Sequence: Synthetic oligonucleotide
  Sense strand starting at position 745 of SEQ ID NO: 915998
uuggauuccgaggaaugug

SEQ ID NO: 1122421 - RNA, 19 nt, Artificial Sequence
  Description of Artificial Sequence: Synthetic oligonucleotide
  Antisense strand to SEQ ID NO: 1122420
cacauuccucggaauccaa

SEQ ID NO: 1122422 - RNA, 19 nt, Artificial Sequence
  Description of Artificial Sequence: Synthetic oligonucleotide
  Sense strand starting at position 859 of SEQ ID NO: 915998
ggaucugaguucucuguau

SEQ ID NO: 1122423 - RNA, 19 nt, Artificial Sequence
  Description of Artificial Sequence: Synthetic oligonucleotide
  Antisense strand to SEQ ID NO: 1122422
auacagagaacucagaucc

SEQ ID NO: 1122424 - RNA, 19 nt, Artificial Sequence
  Description of Artificial Sequence: Synthetic oligonucleotide
  Sense strand starting at position 1105 of SEQ ID NO: 915998
agcccucacccaugaguau

SEQ ID NO: 1122425 - RNA, 19 nt, Artificial Sequence
  Description of Artificial Sequence: Synthetic oligonucleotide
  Antisense strand to SEQ ID NO: 1122424
auacucaugggugagggcu

SEQ ID NO: 1122426 - RNA, 19 nt, Artificial Sequence
  Description of Artificial Sequence: Synthetic oligonucleotide
  Sense strand starting at position 1106 of SEQ ID NO: 915998
gcccucacccaugaguaua

SEQ ID NO: 1122427 - RNA, 19 nt, Artificial Sequence
  Description of Artificial Sequence: Synthetic oligonucleotide
  Antisense strand to SEQ ID NO: 1122426
uauacucaugggugagggc

SEQ ID NO: 1122428 - RNA, 19 nt, Artificial Sequence
  Description of Artificial Sequence: Synthetic oligonucleotide
  Sense strand starting at position 1329 of SEQ ID NO: 915998
caagguucccuggagucaa

SEQ ID NO: 1122429 - RNA, 19 nt, Artificial Sequence
  Description of Artificial Sequence: Synthetic oligonucleotide
  Antisense strand to SEQ ID NO: 1122428
uugacuccagggaaccuug

SEQ ID NO: 1122430 - RNA, 19 nt, Artificial Sequence
  Description of Artificial Sequence: Synthetic oligonucleotide
  Sense strand starting at position 1340 of SEQ ID NO: 915998
ggagucaacuccuagguca

SEQ ID NO: 1122431 - RNA, 19 nt, Artificial Sequence
  Description of Artificial Sequence: Synthetic oligonucleotide
  Antisense strand to SEQ ID NO: 1122430
ugaccuaggaguugacucc

SEQ ID NO: 1122432 - RNA, 19 nt, Artificial Sequence
  Description of Artificial Sequence: Synthetic oligonucleotide
  Sense strand starting at position 1470 of SEQ ID NO: 915998
ccugcauacccgugaugga

SEQ ID NO: 1122433 - RNA, 19 nt, Artificial Sequence
  Description of Artificial Sequence: Synthetic oligonucleotide
  Antisense strand to SEQ ID NO: 1122432
uccaucacggguaugcagg

SEQ ID NO: 1122434 - RNA, 19 nt, Artificial Sequence
  Description of Artificial Sequence: Synthetic oligonucleotide
  Sense strand starting at position 1803 of SEQ ID NO: 915998
gguggaugcucaaggauga

SEQ ID NO: 1122435 - RNA, 19 nt, Artificial Sequence
  Description of Artificial Sequence: Synthetic oligonucleotide
  Antisense strand to SEQ ID NO: 1122434
ucauccuugagcauccacc

SEQ ID NO: 1122436 - RNA, 19 nt, Artificial Sequence
  Description of Artificial Sequence: Synthetic oligonucleotide
  Sense strand starting at position 2138 of SEQ ID NO: 915998
ugaucugaucucugagucu

SEQ ID NO: 1122437 - RNA, 19 nt, Artificial Sequence
  Description of Artificial Sequence: Synthetic oligonucleotide
  Antisense strand to SEQ ID NO: 1122436
agacucagagaucagauca

SEQ ID NO: 1122438 - RNA, 19 nt, Artificial Sequence
  Description of Artificial Sequence: Synthetic oligonucleotide
  Sense strand starting at position 2141 of SEQ ID NO: 915998
ucugaucucugagucuaua

SEQ ID NO: 1122439 - RNA, 19 nt, Artificial Sequence
  Description of Artificial Sequence: Synthetic oligonucleotide
  Antisense strand to SEQ ID NO: 1122438
uauagacucagagaucaga

SEQ ID NO: 1122440 - RNA, 19 nt, Artificial Sequence
  Description of Artificial Sequence: Synthetic oligonucleotide
  Sense strand starting at position 2172 of SEQ ID NO: 915998
gucugcaucuucuuauauu

SEQ ID NO: 1122441 - RNA, 19 nt, Artificial Sequence
  Description of Artificial Sequence: Synthetic oligonucleotide
  Antisense strand to SEQ ID NO: 1122440
aauauaagaagaugcagac

SEQ ID NO: 1122442 - RNA, 19 nt, Artificial Sequence
  Description of Artificial Sequence: Synthetic oligonucleotide
  Sense strand starting at position 2482 of SEQ ID NO: 915998
aauuguugcucggcaggaa

SEQ ID NO: 1122443 - RNA, 19 nt, Artificial Sequence
  Description of Artificial Sequence: Synthetic oligonucleotide
  Antisense strand to SEQ ID NO: 1122442
uuccugccgagcaacaauu

SEQ ID NO: 1122444 - RNA, 19 nt, Artificial Sequence
  Description of Artificial Sequence: Synthetic oligonucleotide
  Sense strand starting at position 2483 of SEQ ID NO: 915998
auuguugcucggcaggaau

SEQ ID NO: 1122445 - RNA, 19 nt, Artificial Sequence
  Description of Artificial Sequence: Synthetic oligonucleotide
  Antisense strand to SEQ ID NO: 1122444
auuccugccgagcaacaau

SEQ ID NO: 1122446 - RNA, 19 nt, Artificial Sequence
  Description of Artificial Sequence: Synthetic oligonucleotide
  Sense strand starting at position 2494 of SEQ ID NO: 915998
gcaggaaucugggccuacu

SEQ ID NO: 1122447 - RNA, 19 nt, Artificial Sequence
  Description of Artificial Sequence: Synthetic oligonucleotide
  Antisense strand to SEQ ID NO: 1122446
aguaggcccagauuccugc

SEQ ID NO: 1122448 - RNA, 19 nt, Artificial Sequence
  Description of Artificial Sequence: Synthetic oligonucleotide
  Sense strand starting at position 2497 of SEQ ID NO: 915998
ggaaucugggccuacuauu

SEQ ID NO: 1122449 - RNA, 19 nt, Artificial Sequence
  Description of Artificial Sequence: Synthetic oligonucleotide
  Antisense strand to SEQ ID NO: 1122448
aauaguaggcccagauucc

SEQ ID NO: 1122450 - RNA, 19 nt, Artificial Sequence
  Description of Artificial Sequence: Synthetic oligonucleotide
  Sense strand starting at position 2551 of SEQ ID NO: 915998
uaaggagguuaauaaguuu

SEQ ID NO: 1122451 - RNA, 19 nt, Artificial Sequence
  Description of Artificial Sequence: Synthetic oligonucleotide
  Antisense strand to SEQ ID NO: 1122450
aaacuuauuaaccuccuua

SEQ ID NO: 1122452 - RNA, 19 nt, Artificial Sequence
  Description of Artificial Sequence: Synthetic oligonucleotide
  Sense strand starting at position 2557 of SEQ ID NO: 915998
gguuaauaaguuugccuga

SEQ ID NO: 1122453 - RNA, 19 nt, Artificial Sequence
  Description of Artificial Sequence: Synthetic oligonucleotide
  Antisense strand to SEQ ID NO: 1122452
ucaggcaaacuuauuaacc

SEQ ID NO: 1122454 - RNA, 19 nt, Artificial Sequence
  Description of Artificial Sequence: Synthetic oligonucleotide
  Sense strand starting at position 2559 of SEQ ID NO: 915998
uuaauaaguuugccugacu

SEQ ID NO: 1122455 - RNA, 19 nt, Artificial Sequence
  Description of Artificial Sequence: Synthetic oligonucleotide
  Antisense strand to SEQ ID NO: 1122454
agucaggcaaacuuauuaa

SEQ ID NO: 1122456 - RNA, 19 nt, Artificial Sequence
  Description of Artificial Sequence: Synthetic oligonucleotide
  Sense strand starting at position 2585 of SEQ ID NO: 915998
uuuaaaugcugggcauuaa

SEQ ID NO: 1122457 - RNA, 19 nt, Artificial Sequence
  Description of Artificial Sequence: Synthetic oligonucleotide
  Antisense strand to SEQ ID NO: 1122456
uuaaugcccagcauuuaaa

SEQ ID NO: 1122458 - RNA, 19 nt, Artificial Sequence
  Description of Artificial Sequence: Synthetic oligonucleotide
  Sense strand starting at position 2873 of SEQ ID NO: 915998
ucagcaacucagcaauaga

SEQ ID NO: 1122459 - RNA, 19 nt, Artificial Sequence
  Description of Artificial Sequence: Synthetic oligonucleotide
  Antisense strand to SEQ ID NO: 1122458
ucuauugcugaguugcuga

SEQ ID NO: 1122460 - RNA, 19 nt, Artificial Sequence
  Description of Artificial Sequence: Synthetic oligonucleotide
  Sense strand starting at position 3074 of SEQ ID NO: 915998
gacuaaugguugccuagga

SEQ ID NO: 1122461 - RNA, 19 nt, Artificial Sequence
  Description of Artificial Sequence: Synthetic oligonucleotide
  Antisense strand to SEQ ID NO: 1122460
uccuaggcaaccauuaguc

SEQ ID NO: 1122462 - RNA, 19 nt, Artificial Sequence
  Description of Artificial Sequence: Synthetic oligonucleotide
  Sense strand starting at position 3078 of SEQ ID NO: 915998
aaugguugccuaggacuau

SEQ ID NO: 1122463 - RNA, 19 nt, Artificial Sequence
  Description of Artificial Sequence: Synthetic oligonucleotide
  Antisense strand to SEQ ID NO: 1122462
auaguccuaggcaaccauu

SEQ ID NO: 1122464 - RNA, 19 nt, Artificial Sequence
  Description of Artificial Sequence: Synthetic oligonucleotide
  Sense strand starting at position 3132 of SEQ ID NO: 915998
gcuuaaugggcacagguuu

SEQ ID NO: 1122465 - RNA, 19 nt, Artificial Sequence
  Description of Artificial Sequence: Synthetic oligonucleotide
  Antisense strand to SEQ ID NO: 1122464
aaaccugugcccauuaagc

SEQ ID NO: 1122466 - RNA, 19 nt, Artificial Sequence
  Description of Artificial Sequence: Synthetic oligonucleotide
  Sense strand starting at position 3203 of SEQ ID NO: 915998
cagcauugugaacguacua

SEQ ID NO: 1122467 - RNA, 19 nt, Artificial Sequence
  Description of Artificial Sequence: Synthetic oligonucleotide
  Antisense strand to SEQ ID NO: 1122466
uaguacguucacaaugcug

SEQ ID NO: 1122468 - RNA, 19 nt, Artificial Sequence
  Description of Artificial Sequence: Synthetic oligonucleotide
  Sense strand starting at position 3249 of SEQ ID NO: 915998
uggccaacuuauguuacau

SEQ ID NO: 1122469 - RNA, 19 nt, Artificial Sequence
  Description of Artificial Sequence: Synthetic oligonucleotide
  Antisense strand to SEQ ID NO: 1122468
auguaacauaaguuggcca

SEQ ID NO: 1122470 - RNA, 19 nt, Artificial Sequence
  Description of Artificial Sequence: Synthetic oligonucleotide
  Sense strand starting at position 3936 of SEQ ID NO: 915998
uaccgucucugggacagaa

SEQ ID NO: 1122471 - RNA, 19 nt, Artificial Sequence
  Description of Artificial Sequence: Synthetic oligonucleotide
  Antisense strand to SEQ ID NO: 1122470
uucugucccagagacggua

SEQ ID NO: 1122472 - RNA, 19 nt, Artificial Sequence
  Description of Artificial Sequence: Synthetic oligonucleotide
  Sense strand starting at position 3962 of SEQ ID NO: 915998
cuuugcuuaacguguuuga

SEQ ID NO: 1122473 - RNA, 19 nt, Artificial Sequence
  Description of Artificial Sequence: Synthetic oligonucleotide
  Antisense strand to SEQ ID NO: 1122472
ucaaacacguuaagcaaag

SEQ ID NO: 1122474 - RNA, 19 nt, Artificial Sequence
  Description of Artificial Sequence: Synthetic oligonucleotide
  Sense strand starting at position 3965 of SEQ ID NO: 915998
ugcuuaacguguuugacaa

SEQ ID NO: 1122475 - RNA, 19 nt, Artificial Sequence
  Description of Artificial Sequence: Synthetic oligonucleotide
  Antisense strand to SEQ ID NO: 1122474
uugucaaacacguuaagca

SEQ ID NO: 1122476 - RNA, 19 nt, Artificial Sequence
  Description of Artificial Sequence: Synthetic oligonucleotide
  Sense strand starting at position 3966 of SEQ ID NO: 915998
gcuuaacguguuugacaaa

SEQ ID NO: 1122477 - RNA, 19 nt, Artificial Sequence
  Description of Artificial Sequence: Synthetic oligonucleotide
  Antisense strand to SEQ ID NO: 1122476
uuugucaaacacguuaagc

SEQ ID NO: 1122478 - RNA, 19 nt, Artificial Sequence
  Description of Artificial Sequence: Synthetic oligonucleotide
  Sense strand starting at position 855 of SEQ ID NO: 915999
gcuugcuuuguuuagccaa

SEQ ID NO: 1122479 - RNA, 19 nt, Artificial Sequence
  Description of Artificial Sequence: Synthetic oligonucleotide
  Antisense strand to SEQ ID NO: 1122478
uuggcuaaacaaagcaagc

SEQ ID NO: 1122480 - RNA, 19 nt, Artificial Sequence
  Description of Artificial Sequence: Synthetic oligonucleotide
  Sense strand starting at position 857 of SEQ ID NO: 915999
uugcuuuguuuagccaaau

SEQ ID NO: 1122481 - RNA, 19 nt, Artificial Sequence
  Description of Artificial Sequence: Synthetic oligonucleotide
  Antisense strand to SEQ ID NO: 1122480
auuuggcuaaacaaagcaa

SEQ ID NO: 1122482 - RNA, 19 nt, Artificial Sequence
  Description of Artificial Sequence: Synthetic oligonucleotide
  Sense strand starting at position 858 of SEQ ID NO: 915999
ugcuuuguuuagccaaaug

SEQ ID NO: 1122483 - RNA, 19 nt, Artificial Sequence
  Description of Artificial Sequence: Synthetic oligonucleotide
  Antisense strand to SEQ ID NO: 1122482
cauuuggcuaaacaaagca

SEQ ID NO: 1122484 - RNA, 19 nt, Artificial Sequence
  Description of Artificial Sequence: Synthetic oligonucleotide
  Sense strand starting at position 899 of SEQ ID NO: 915999
ggcugacccugggaaaguu

SEQ ID NO: 1122485 - RNA, 19 nt, Artificial Sequence
  Description of Artificial Sequence: Synthetic oligonucleotide
  Antisense strand to SEQ ID NO: 1122484
aacuuucccagggucagcc

SEQ ID NO: 1122486 - RNA, 19 nt, Artificial Sequence
  Description of Artificial Sequence: Synthetic oligonucleotide
  Sense strand starting at position 1160 of SEQ ID NO: 915999
ccagauggcuacuuagaug

SEQ ID NO: 1122487 - RNA, 19 nt, Artificial Sequence
  Description of Artificial Sequence: Synthetic oligonucleotide
  Antisense strand to SEQ ID NO: 1122486
caucuaaguagccaucugg

SEQ ID NO: 1122488 - RNA, 19 nt, Artificial Sequence
  Description of Artificial Sequence: Synthetic oligonucleotide
  Sense strand starting at position 1240 of SEQ ID NO: 915999
gccuuaagugugcguugga

SEQ ID NO: 1122489 - RNA, 19 nt, Artificial Sequence
  Description of Artificial Sequence: Synthetic oligonucleotide
  Antisense strand to SEQ ID NO: 1122488
uccaacgcacacuuaaggc

SEQ ID NO: 1122490 - RNA, 19 nt, Artificial Sequence
  Description of Artificial Sequence: Synthetic oligonucleotide
  Sense strand starting at position 1241 of SEQ ID NO: 915999
ccuuaagugugcguuggau

SEQ ID NO: 1122491 - RNA, 19 nt, Artificial Sequence
  Description of Artificial Sequence: Synthetic oligonucleotide
  Antisense strand to SEQ ID NO: 1122490
auccaacgcacacuuaagg

SEQ ID NO: 1122492 - RNA, 19 nt, Artificial Sequence
  Description of Artificial Sequence: Synthetic oligonucleotide
  Sense strand starting at position 1403 of SEQ ID NO: 915999
agagucaaccuccaaguua

SEQ ID NO: 1122493 - RNA, 19 nt, Artificial Sequence
  Description of Artificial Sequence: Synthetic oligonucleotide
  Antisense strand to SEQ ID NO: 1122492
uaacuuggagguugacucu

SEQ ID NO: 1122494 - RNA, 19 nt, Artificial Sequence
  Description of Artificial Sequence: Synthetic oligonucleotide
  Sense strand starting at position 1440 of SEQ ID NO: 915999
ucuaguuaacuggguggau

SEQ ID NO: 1122495 - RNA, 19 nt, Artificial Sequence
  Description of Artificial Sequence: Synthetic oligonucleotide
  Antisense strand to SEQ ID NO: 1122494
auccacccaguuaacuaga

SEQ ID NO: 1122496 - RNA, 19 nt, Artificial Sequence
  Description of Artificial Sequence: Synthetic oligonucleotide
  Sense strand starting at position 1441 of SEQ ID NO: 915999
cuaguuaacuggguggauu

SEQ ID NO: 1122497 - RNA, 19 nt, Artificial Sequence
  Description of Artificial Sequence: Synthetic oligonucleotide
  Antisense strand to SEQ ID NO: 1122496
aauccacccaguuaacuag

SEQ ID NO: 1122498 - RNA, 19 nt, Artificial Sequence
  Description of Artificial Sequence: Synthetic oligonucleotide
  Sense strand starting at position 1472 of SEQ ID NO: 915999
cgaugugcuucucuuguau

SEQ ID NO: 1122499 - RNA, 19 nt, Artificial Sequence
  Description of Artificial Sequence: Synthetic oligonucleotide
  Antisense strand to SEQ ID NO: 1122498
auacaagagaagcacaucg

SEQ ID NO: 1122500 - RNA, 19 nt, Artificial Sequence
  Description of Artificial Sequence: Synthetic oligonucleotide
  Sense strand starting at position 1484 of SEQ ID NO: 915999
cuuguauuucuaggccgua

SEQ ID NO: 1122501 - RNA, 19 nt, Artificial Sequence
  Description of Artificial Sequence: Synthetic oligonucleotide
  Antisense strand to SEQ ID NO: 1122500
uacggccuagaaauacaag

SEQ ID NO: 1122502 - RNA, 19 nt, Artificial Sequence
  Description of Artificial Sequence: Synthetic oligonucleotide
  Sense strand starting at position 2205 of SEQ ID NO: 915999
uccaccucuucugauguua

SEQ ID NO: 1122503 - RNA, 19 nt, Artificial Sequence
  Description of Artificial Sequence: Synthetic oligonucleotide
  Antisense strand to SEQ ID NO: 1122502
uaacaucagaagaggugga

SEQ ID NO: 1122504 - RNA, 19 nt, Artificial Sequence
  Description of Artificial Sequence: Synthetic oligonucleotide
  Sense strand starting at position 2213 of SEQ ID NO: 915999
uucugauguuacucaacgu

SEQ ID NO: 1122505 - RNA, 19 nt, Artificial Sequence
  Description of Artificial Sequence: Synthetic oligonucleotide
  Antisense strand to SEQ ID NO: 1122504
acguugaguaacaucagaa

SEQ ID NO: 1122506 - RNA, 19 nt, Artificial Sequence
  Description of Artificial Sequence: Synthetic oligonucleotide
  Sense strand starting at position 2217 of SEQ ID NO: 915999
gauguuacucaacgugcau

SEQ ID NO: 1122507 - RNA, 19 nt, Artificial Sequence
  Description of Artificial Sequence: Synthetic oligonucleotide
  Antisense strand to SEQ ID NO: 1122506
augcacguugaguaacauc

SEQ ID NO: 1122508 - RNA, 19 nt, Artificial Sequence
  Description of Artificial Sequence: Synthetic oligonucleotide
  Sense strand starting at position 2232 of SEQ ID NO: 915999
gcaugcauuugcuggaaau

SEQ ID NO: 1122509 - RNA, 19 nt, Artificial Sequence
  Description of Artificial Sequence: Synthetic oligonucleotide
  Antisense strand to SEQ ID NO: 1122508
auuuccagcaaaugcaugc

SEQ ID NO: 1122510 - RNA, 19 nt, Artificial Sequence
  Description of Artificial Sequence: Synthetic oligonucleotide
  Sense strand starting at position 2877 of SEQ ID NO: 915999
ggaacaacuuccuauaugu

SEQ ID NO: 1122511 - RNA, 19 nt, Artificial Sequence
  Description of Artificial Sequence: Synthetic oligonucleotide
  Antisense strand to SEQ ID NO: 1122510
acauauaggaaguuguucc

SEQ ID NO: 1122512 - RNA, 19 nt, Artificial Sequence
  Description of Artificial Sequence: Synthetic oligonucleotide
  Sense strand starting at position 2922 of SEQ ID NO: 915999
ucauuauaguuguuugaug

SEQ ID NO: 1122513 - RNA, 19 nt, Artificial Sequence
  Description of Artificial Sequence: Synthetic oligonucleotide
  Antisense strand to SEQ ID NO: 1122512
caucaaacaacuauaauga

SEQ ID NO: 1122514 - RNA, 19 nt, Artificial Sequence
  Description of Artificial Sequence: Synthetic oligonucleotide
  Sense strand starting at position 2924 of SEQ ID NO: 915999
auuauaguuguuugaugga

SEQ ID NO: 1122515 - RNA, 19 nt, Artificial Sequence
  Description of Artificial Sequence: Synthetic oligonucleotide
  Antisense strand to SEQ ID NO: 1122514
uccaucaaacaacuauaau

SEQ ID NO: 1122516 - RNA, 19 nt, Artificial Sequence
  Description of Artificial Sequence: Synthetic oligonucleotide
  Sense strand starting at position 2927 of SEQ ID NO: 915999
auaguuguuugauggaaua

SEQ ID NO: 1122517 - RNA, 19 nt, Artificial Sequence
  Description of Artificial Sequence: Synthetic oligonucleotide
  Antisense strand to SEQ ID NO: 1122516
uauuccaucaaacaacuau

SEQ ID NO: 1122518 - RNA, 19 nt, Artificial Sequence
  Description of Artificial Sequence: Synthetic oligonucleotide
  Sense strand starting at position 2971 of SEQ ID NO: 915999
cuggaucuguacugacaua

SEQ ID NO: 1122519 - RNA, 19 nt, Artificial Sequence
  Description of Artificial Sequence: Synthetic oligonucleotide
  Antisense strand to SEQ ID NO: 1122518
uaugucaguacagauccag

SEQ ID NO: 1122520 - RNA, 19 nt, Artificial Sequence
  Description of Artificial Sequence: Synthetic oligonucleotide
  Sense strand starting at position 3045 of SEQ ID NO: 915999
gauguacaauuugugugua

SEQ ID NO: 1122521 - RNA, 19 nt, Artificial Sequence
  Description of Artificial Sequence: Synthetic oligonucleotide
  Antisense strand to SEQ ID NO: 1122520
uacacacaaauuguacauc

SEQ ID NO: 1122522 - RNA, 19 nt, Artificial Sequence
  Description of Artificial Sequence: Synthetic oligonucleotide
  Sense strand starting at position 3048 of SEQ ID NO: 915999
guacaauuuguguguaccu

SEQ ID NO: 1122523 - RNA, 19 nt, Artificial Sequence
  Description of Artificial Sequence: Synthetic oligonucleotide
  Antisense strand to SEQ ID NO: 1122522
agguacacacaaauuguac

SEQ ID NO: 1122524 - RNA, 19 nt, Artificial Sequence
  Description of Artificial Sequence: Synthetic oligonucleotide
  Sense strand starting at position 3094 of SEQ ID NO: 915999
auggacacaugcuuacaua

SEQ ID NO: 1122525 - RNA, 19 nt, Artificial Sequence
  Description of Artificial Sequence: Synthetic oligonucleotide
  Antisense strand to SEQ ID NO: 1122524
uauguaagcauguguccau

SEQ ID NO: 1122526 - RNA, 19 nt, Artificial Sequence
  Description of Artificial Sequence: Synthetic oligonucleotide
  Sense strand starting at position 3156 of SEQ ID NO: 915999
gacagugugccacaaagaa

SEQ ID NO: 1122527 - RNA, 19 nt, Artificial Sequence
  Description of Artificial Sequence: Synthetic oligonucleotide
  Antisense strand to SEQ ID NO: 1122526
uucuuuguggcacacuguc

SEQ ID NO: 1122528 - RNA, 19 nt, Artificial Sequence
  Description of Artificial Sequence: Synthetic oligonucleotide
  Sense strand starting at position 3200 of SEQ ID NO: 915999
gagcauaaggaauguugua

SEQ ID NO: 1122529 - RNA, 19 nt, Artificial Sequence
  Description of Artificial Sequence: Synthetic oligonucleotide
  Antisense strand to SEQ ID NO: 1122528
uacaacauuccuuaugcuc

SEQ ID NO: 1122530 - RNA, 19 nt, Artificial Sequence
  Description of Artificial Sequence: Synthetic oligonucleotide
  Sense strand starting at position 3205 of SEQ ID NO: 915999
uaaggaauguuguaaaguu

SEQ ID NO: 1122531 - RNA, 19 nt, Artificial Sequence
  Description of Artificial Sequence: Synthetic oligonucleotide
  Antisense strand to SEQ ID NO: 1122530
aacuuuacaacauuccuua

SEQ ID NO: 1122532 - RNA, 19 nt, Artificial Sequence
  Description of Artificial Sequence: Synthetic oligonucleotide
  Sense strand starting at position 3261 of SEQ ID NO: 915999
auggcaaacuguuagcaau

SEQ ID NO: 1122533 - RNA, 19 nt, Artificial Sequence
  Description of Artificial Sequence: Synthetic oligonucleotide
  Antisense strand to SEQ ID NO: 1122532
auugcuaacaguuugccau

SEQ ID NO: 1122534 - RNA, 19 nt, Artificial Sequence
  Description of Artificial Sequence: Synthetic oligonucleotide
  Sense strand starting at position 3452 of SEQ ID NO: 915999
agccauaggcucuguaaug

SEQ ID NO: 1122535 - RNA, 19 nt, Artificial Sequence
  Description of Artificial Sequence: Synthetic oligonucleotide
  Antisense strand to SEQ ID NO: 1122534
cauuacagagccuauggcu

SEQ ID NO: 1122536 - RNA, 19 nt, Artificial Sequence
  Description of Artificial Sequence: Synthetic oligonucleotide
  Sense strand starting at position 3665 of SEQ ID NO: 915999
cuacacgcgugauuacaau

SEQ ID NO: 1122537 - RNA, 19 nt, Artificial Sequence
  Description of Artificial Sequence: Synthetic oligonucleotide
  Antisense strand to SEQ ID NO: 1122536
auuguaaucacgcguguag

SEQ ID NO: 1122538 - RNA, 19 nt, Artificial Sequence
  Description of Artificial Sequence: Synthetic oligonucleotide
  Sense strand starting at position 3799 of SEQ ID NO: 915999
ccauucuuagcaggccaua

SEQ ID NO: 1122539 - RNA, 19 nt, Artificial Sequence
  Description of Artificial Sequence: Synthetic oligonucleotide
  Antisense strand to SEQ ID NO: 1122538
uauggccugcuaagaaugg

SEQ ID NO: 1122540 - RNA, 19 nt, Artificial Sequence
  Description of Artificial Sequence: Synthetic oligonucleotide
  Sense strand starting at position 3836 of SEQ ID NO: 915999
agauuuagcuuaugggcaa

SEQ ID NO: 1122541 - RNA, 19 nt, Artificial Sequence
  Description of Artificial Sequence: Synthetic oligonucleotide
  Antisense strand to SEQ ID NO: 1122540
uugcccauaagcuaaaucu

SEQ ID NO: 1122542 - RNA, 19 nt, Artificial Sequence
  Description of Artificial Sequence: Synthetic oligonucleotide
  Sense strand starting at position 3837 of SEQ ID NO: 915999
gauuuagcuuaugggcaau

SEQ ID NO: 1122543 - RNA, 19 nt, Artificial Sequence
  Description of Artificial Sequence: Synthetic oligonucleotide
  Antisense strand to SEQ ID NO: 1122542
auugcccauaagcuaaauc

SEQ ID NO: 1122544 - RNA, 19 nt, Artificial Sequence
  Description of Artificial Sequence: Synthetic oligonucleotide
  Sense strand starting at position 3839 of SEQ ID NO: 915999
uuuagcuuaugggcaauaa

SEQ ID NO: 1122545 - RNA, 19 nt, Artificial Sequence
  Description of Artificial Sequence: Synthetic oligonucleotide
  Antisense strand to SEQ ID NO: 1122544
uuauugcccauaagcuaaa

SEQ ID NO: 1122546 - RNA, 19 nt, Artificial Sequence
  Description of Artificial Sequence: Synthetic oligonucleotide
  Sense strand starting at position 3840 of SEQ ID NO: 915999
uuagcuuaugggcaauaaa

SEQ ID NO: 1122547 - RNA, 19 nt, Artificial Sequence
  Description of Artificial Sequence: Synthetic oligonucleotide
  Antisense strand to SEQ ID NO: 1122546
uuuauugcccauaagcuaa

SEQ ID NO: 1122548 - RNA, 19 nt, Artificial Sequence
  Description of Artificial Sequence: Synthetic oligonucleotide
  Sense strand starting at position 3843 of SEQ ID NO: 915999
gcuuaugggcaauaaauag

SEQ ID NO: 1122549 - RNA, 19 nt, Artificial Sequence
  Description of Artificial Sequence: Synthetic oligonucleotide
  Antisense strand to SEQ ID NO: 1122548
cuauuuauugcccauaagc

SEQ ID NO: 1122550 - RNA, 19 nt, Artificial Sequence
  Description of Artificial Sequence: Synthetic oligonucleotide
  Sense strand starting at position 3864 of SEQ ID NO: 915999
uggcaacccugcuuuacua

SEQ ID NO: 1122551 - RNA, 19 nt, Artificial Sequence
  Description of Artificial Sequence: Synthetic oligonucleotide
  Antisense strand to SEQ ID NO: 1122550
uaguaaagcaggguugcca

SEQ ID NO: 1122552 - RNA, 19 nt, Artificial Sequence
  Description of Artificial Sequence: Synthetic oligonucleotide
  Sense strand starting at position 3933 of SEQ ID NO: 915999
ccugguacuuguuaaacaa

SEQ ID NO: 1122553 - RNA, 19 nt, Artificial Sequence
  Description of Artificial Sequence: Synthetic oligonucleotide
  Antisense strand to SEQ ID NO: 1122552
uuguuuaacaaguaccagg

SEQ ID NO: 1122554 - RNA, 19 nt, Artificial Sequence
  Description of Artificial Sequence: Synthetic oligonucleotide
  Sense strand starting at position 3948 of SEQ ID NO: 915999
acaauucuguauguuuaca

SEQ ID NO: 1122555 - RNA, 19 nt, Artificial Sequence
  Description of Artificial Sequence: Synthetic oligonucleotide
  Antisense strand to SEQ ID NO: 1122554
uguaaacauacagaauugu

SEQ ID NO: 1122556 - RNA, 19 nt, Artificial Sequence
  Description of Artificial Sequence: Synthetic oligonucleotide
  Sense strand starting at position 3956 of SEQ ID NO: 915999
guauguuuacaucauguua

SEQ ID NO: 1122557 - RNA, 19 nt, Artificial Sequence
  Description of Artificial Sequence: Synthetic oligonucleotide
  Antisense strand to SEQ ID NO: 1122556
uaacaugauguaaacauac

SEQ ID NO: 1122558 - RNA, 19 nt, Artificial Sequence
  Description of Artificial Sequence: Synthetic oligonucleotide
  Sense strand starting at position 166 of SEQ ID NO: 916000
aagagcugccuagguagaa

SEQ ID NO: 1122559 - RNA, 19 nt, Artificial Sequence
  Description of Artificial Sequence: Synthetic oligonucleotide
  Antisense strand to SEQ ID NO: 1122558
uucuaccuaggcagcucuu

SEQ ID NO: 1122560 - RNA, 19 nt, Artificial Sequence
  Description of Artificial Sequence: Synthetic oligonucleotide
  Sense strand starting at position 167 of SEQ ID NO: 916000
agagcugccuagguagaaa

SEQ ID NO: 1122561 - RNA, 19 nt, Artificial Sequence
  Description of Artificial Sequence: Synthetic oligonucleotide
  Antisense strand to SEQ ID NO: 1122560
uuucuaccuaggcagcucu

SEQ ID NO: 1122562 - RNA, 19 nt, Artificial Sequence
  Description of Artificial Sequence: Synthetic oligonucleotide
  Sense strand starting at position 170 of SEQ ID NO: 916000
gcugccuagguagaaauau

SEQ ID NO: 1122563 - RNA, 19 nt, Artificial Sequence
  Description of Artificial Sequence: Synthetic oligonucleotide
  Antisense strand to SEQ ID NO: 1122562
auauuucuaccuaggcagc

SEQ ID NO: 1122564 - RNA, 19 nt, Artificial Sequence
  Description of Artificial Sequence: Synthetic oligonucleotide
  Sense strand starting at position 519 of SEQ ID NO: 916000
agaacuuauuugugaagag

SEQ ID NO: 1122565 - RNA, 19 nt, Artificial Sequence
  Description of Artificial Sequence: Synthetic oligonucleotide
  Antisense strand to SEQ ID NO: 1122564
cucuucacaaauaaguucu

SEQ ID NO: 1122566 - RNA, 19 nt, Artificial Sequence
  Description of Artificial Sequence: Synthetic oligonucleotide
  Sense strand starting at position 520 of SEQ ID NO: 916000
gaacuuauuugugaagaga

SEQ ID NO: 1122567 - RNA, 19 nt, Artificial Sequence
  Description of Artificial Sequence: Synthetic oligonucleotide
  Antisense strand to SEQ ID NO: 1122566
ucucuucacaaauaaguuc

SEQ ID NO: 1122568 - RNA, 19 nt, Artificial Sequence
  Description of Artificial Sequence: Synthetic oligonucleotide
  Sense strand starting at position 701 of SEQ ID NO: 916000
ucaccagguccguauuaaa

SEQ ID NO: 1122569 - RNA, 19 nt, Artificial Sequence
  Description of Artificial Sequence: Synthetic oligonucleotide
  Antisense strand to SEQ ID NO: 1122568
uuuaauacggaccugguga

SEQ ID NO: 1122570 - RNA, 19 nt, Artificial Sequence
  Description of Artificial Sequence: Synthetic oligonucleotide
  Sense strand starting at position 733 of SEQ ID NO: 916000
ugaagauccgucugcuaug

SEQ ID NO: 1122571 - RNA, 19 nt, Artificial Sequence
  Description of Artificial Sequence: Synthetic oligonucleotide
  Antisense strand to SEQ ID NO: 1122570
cauagcagacggaucuuca

SEQ ID NO: 1122572 - RNA, 19 nt, Artificial Sequence
  Description of Artificial Sequence: Synthetic oligonucleotide
  Sense strand starting at position 734 of SEQ ID NO: 916000
gaagauccgucugcuauga

SEQ ID NO: 1122573 - RNA, 19 nt, Artificial Sequence
  Description of Artificial Sequence: Synthetic oligonucleotide
  Antisense strand to SEQ ID NO: 1122572
ucauagcagacggaucuuc

SEQ ID NO: 1122574 - RNA, 19 nt, Artificial Sequence
  Description of Artificial Sequence: Synthetic oligonucleotide
  Sense strand starting at position 738 of SEQ ID NO: 916000
auccgucugcuaugauuaa

SEQ ID NO: 1122575 - RNA, 19 nt, Artificial Sequence
  Description of Artificial Sequence: Synthetic oligonucleotide
  Antisense strand to SEQ ID NO: 1122574
uuaaucauagcagacggau

SEQ ID NO: 1122576 - RNA, 19 nt, Artificial Sequence
  Description of Artificial Sequence: Synthetic oligonucleotide
  Sense strand starting at position 742 of SEQ ID NO: 916000
gucugcuaugauuaagauc

SEQ ID NO: 1122577 - RNA, 19 nt, Artificial Sequence
  Description of Artificial Sequence: Synthetic oligonucleotide
  Antisense strand to SEQ ID NO: 1122576
gaucuuaaucauagcagac

SEQ ID NO: 1122578 - RNA, 19 nt, Artificial Sequence
  Description of Artificial Sequence: Synthetic oligonucleotide
  Sense strand starting at position 1279 of SEQ ID NO: 916000
ggcaacugccuaggagaaa

SEQ ID NO: 1122579 - RNA, 19 nt, Artificial Sequence
  Description of Artificial Sequence: Synthetic oligonucleotide
  Antisense strand to SEQ ID NO: 1122578
uuucuccuaggcaguugcc

SEQ ID NO: 1122580 - RNA, 19 nt, Artificial Sequence
  Description of Artificial Sequence: Synthetic oligonucleotide
  Sense strand starting at position 2041 of SEQ ID NO: 916000
aaacaauucgguuggcuga

SEQ ID NO: 1122581 - RNA, 19 nt, Artificial Sequence
  Description of Artificial Sequence: Synthetic oligonucleotide
  Antisense strand to SEQ ID NO: 1122580
ucagccaaccgaauuguuu

SEQ ID NO: 1122582 - RNA, 19 nt, Artificial Sequence
  Description of Artificial Sequence: Synthetic oligonucleotide
  Sense strand starting at position 2134 of SEQ ID NO: 916000
acucuaaagcgacgguuaa

SEQ ID NO: 1122583 - RNA, 19 nt, Artificial Sequence
  Description of Artificial Sequence: Synthetic oligonucleotide
  Antisense strand to SEQ ID NO: 1122582
uuaaccgucgcuuuagagu

SEQ ID NO: 1122584 - RNA, 19 nt, Artificial Sequence
  Description of Artificial Sequence: Synthetic oligonucleotide
  Sense strand starting at position 2228 of SEQ ID NO: 916000
gauuacgagcuuugagaag

SEQ ID NO: 1122585 - RNA, 19 nt, Artificial Sequence
  Description of Artificial Sequence: Synthetic oligonucleotide
  Antisense strand to SEQ ID NO: 1122584
cuucucaaagcucguaauc

SEQ ID NO: 1122586 - RNA, 19 nt, Artificial Sequence
  Description of Artificial Sequence: Synthetic oligonucleotide
  Sense strand starting at position 2246 of SEQ ID NO: 916000
ggaggaagccugggaguaa

SEQ ID NO: 1122587 - RNA, 19 nt, Artificial Sequence
  Description of Artificial Sequence: Synthetic oligonucleotide
  Antisense strand to SEQ ID NO: 1122586
uuacucccaggcuuccucc

SEQ ID NO: 1122588 - RNA, 19 nt, Artificial Sequence
  Description of Artificial Sequence: Synthetic oligonucleotide
  Sense strand starting at position 2312 of SEQ ID NO: 916000
agggaggugucguuuggga

SEQ ID NO: 1122589 - RNA, 19 nt, Artificial Sequence
  Description of Artificial Sequence: Synthetic oligonucleotide
  Antisense strand to SEQ ID NO: 1122588
ucccaaacgacaccucccu

SEQ ID NO: 1122590 - RNA, 19 nt, Artificial Sequence
  Description of Artificial Sequence: Synthetic oligonucleotide
  Sense strand starting at position 2314 of SEQ ID NO: 916000
ggaggugucguuugggauc

SEQ ID NO: 1122591 - RNA, 19 nt, Artificial Sequence
  Description of Artificial Sequence: Synthetic oligonucleotide
  Antisense strand to SEQ ID NO: 1122590
gaucccaaacgacaccucc

SEQ ID NO: 1122592 - RNA, 19 nt, Artificial Sequence
  Description of Artificial Sequence: Synthetic oligonucleotide
  Sense strand starting at position 2412 of SEQ ID NO: 916000
gugauacacuggcucagaa

SEQ ID NO: 1122593 - RNA, 19 nt, Artificial Sequence
  Description of Artificial Sequence: Synthetic oligonucleotide
  Antisense strand to SEQ ID NO: 1122592
uucugagccaguguaucac

SEQ ID NO: 1122594 - RNA, 19 nt, Artificial Sequence
  Description of Artificial Sequence: Synthetic oligonucleotide
  Sense strand starting at position 2419 of SEQ ID NO: 916000
acuggcucagaaugugauu

SEQ ID NO: 1122595 - RNA, 19 nt, Artificial Sequence
  Description of Artificial Sequence: Synthetic oligonucleotide
  Antisense strand to SEQ ID NO: 1122594
aaucacauucugagccagu

SEQ ID NO: 1122596 - RNA, 19 nt, Artificial Sequence
  Description of Artificial Sequence: Synthetic oligonucleotide
  Sense strand starting at position 2532 of SEQ ID NO: 916000
cuuagaaucgucgcgcacu

SEQ ID NO: 1122597 - RNA, 19 nt, Artificial Sequence
  Description of Artificial Sequence: Synthetic oligonucleotide
  Antisense strand to SEQ ID NO: 1122596
agugcgcgacgauucuaag

SEQ ID NO: 1122598 - RNA, 19 nt, Artificial Sequence
  Description of Artificial Sequence: Synthetic oligonucleotide
  Sense strand starting at position 2730 of SEQ ID NO: 916000
ccacuucucuggccagaca

SEQ ID NO: 1122599 - RNA, 19 nt, Artificial Sequence
  Description of Artificial Sequence: Synthetic oligonucleotide
  Antisense strand to SEQ ID NO: 1122598
ugucuggccagagaagugg

SEQ ID NO: 1122600 - RNA, 19 nt, Artificial Sequence
  Description of Artificial Sequence: Synthetic oligonucleotide
  Sense strand starting at position 2802 of SEQ ID NO: 916000
aagaguaauggguaugcga

SEQ ID NO: 1122601 - RNA, 19 nt, Artificial Sequence
  Description of Artificial Sequence: Synthetic oligonucleotide
  Antisense strand to SEQ ID NO: 1122600
ucgcauacccauuacucuu

SEQ ID NO: 1122602 - RNA, 19 nt, Artificial Sequence
  Description of Artificial Sequence: Synthetic oligonucleotide
  Sense strand starting at position 2804 of SEQ ID NO: 916000
gaguaauggguaugcgaca

SEQ ID NO: 1122603 - RNA, 19 nt, Artificial Sequence
  Description of Artificial Sequence: Synthetic oligonucleotide
  Antisense strand to SEQ ID NO: 1122602
ugucgcauacccauuacuc

SEQ ID NO: 1122604 - RNA, 19 nt, Artificial Sequence
  Description of Artificial Sequence: Synthetic oligonucleotide
  Sense strand starting at position 2819 of SEQ ID NO: 916000
gacagauggcuguagucag

SEQ ID NO: 1122605 - RNA, 19 nt, Artificial Sequence
  Description of Artificial Sequence: Synthetic oligonucleotide
  Antisense strand to SEQ ID NO: 1122604
cugacuacagccaucuguc

SEQ ID NO: 1122606 - RNA, 19 nt, Artificial Sequence
  Description of Artificial Sequence: Synthetic oligonucleotide
  Sense strand starting at position 2830 of SEQ ID NO: 916000
guagucaggcccuacugau

SEQ ID NO: 1122607 - RNA, 19 nt, Artificial Sequence
  Description of Artificial Sequence: Synthetic oligonucleotide
  Antisense strand to SEQ ID NO: 1122606
aucaguagggccugacuac

SEQ ID NO: 1122608 - RNA, 19 nt, Artificial Sequence
  Description of Artificial Sequence: Synthetic oligonucleotide
  Sense strand starting at position 2864 of SEQ ID NO: 916000
agacuaucucuguaguuag

SEQ ID NO: 1122609 - RNA, 19 nt, Artificial Sequence
  Description of Artificial Sequence: Synthetic oligonucleotide
  Antisense strand to SEQ ID NO: 1122608
cuaacuacagagauagucu

SEQ ID NO: 1122610 - RNA, 19 nt, Artificial Sequence
  Description of Artificial Sequence: Synthetic oligonucleotide
  Sense strand starting at position 2930 of SEQ ID NO: 916000
guacaaauucguggagaug

SEQ ID NO: 1122611 - RNA, 19 nt, Artificial Sequence
  Description of Artificial Sequence: Synthetic oligonucleotide
  Antisense strand to SEQ ID NO: 1122610
caucuccacgaauuuguac

SEQ ID NO: 1122612 - RNA, 19 nt, Artificial Sequence
  Description of Artificial Sequence: Synthetic oligonucleotide
  Sense strand starting at position 2933 of SEQ ID NO: 916000
caaauucguggagaugagu

SEQ ID NO: 1122613 - RNA, 19 nt, Artificial Sequence
  Description of Artificial Sequence: Synthetic oligonucleotide
  Antisense strand to SEQ ID NO: 1122612
acucaucuccacgaauuug

SEQ ID NO: 1122614 - RNA, 19 nt, Artificial Sequence
  Description of Artificial Sequence: Synthetic oligonucleotide
  Sense strand starting at position 2936 of SEQ ID NO: 916000
auucguggagaugaguuau

SEQ ID NO: 1122615 - RNA, 19 nt, Artificial Sequence
  Description of Artificial Sequence: Synthetic oligonucleotide
  Antisense strand to SEQ ID NO: 1122614
auaacucaucuccacgaau

SEQ ID NO: 1122616 - RNA, 19 nt, Artificial Sequence
  Description of Artificial Sequence: Synthetic oligonucleotide
  Sense strand starting at position 3026 of SEQ ID NO: 916000
gggucaacaucccugaaag

SEQ ID NO: 1122617 - RNA, 19 nt, Artificial Sequence
  Description of Artificial Sequence: Synthetic oligonucleotide
  Antisense strand to SEQ ID NO: 1122616
cuuucagggauguugaccc

SEQ ID NO: 1122618 - RNA, 19 nt, Artificial Sequence
  Description of Artificial Sequence: Synthetic oligonucleotide
  Sense strand starting at position 3027 of SEQ ID NO: 916000
ggucaacaucccugaaagu

SEQ ID NO: 1122619 - RNA, 19 nt, Artificial Sequence
  Description of Artificial Sequence: Synthetic oligonucleotide
  Antisense strand to SEQ ID NO: 1122618
acuuucagggauguugacc

SEQ ID NO: 1122620 - RNA, 19 nt, Artificial Sequence
  Description of Artificial Sequence: Synthetic oligonucleotide
  Sense strand starting at position 3043 of SEQ ID NO: 916000
aguguuagggauggagcua

SEQ ID NO: 1122621 - RNA, 19 nt, Artificial Sequence
  Description of Artificial Sequence: Synthetic oligonucleotide
  Antisense strand to SEQ ID NO: 1122620
uagcuccaucccuaacacu

SEQ ID NO: 1122622 - RNA, 19 nt, Artificial Sequence
  Description of Artificial Sequence: Synthetic oligonucleotide
  Sense strand starting at position 3288 of SEQ ID NO: 916000
uugguuuagccucauaaua

SEQ ID NO: 1122623 - RNA, 19 nt, Artificial Sequence
  Description of Artificial Sequence: Synthetic oligonucleotide
  Antisense strand to SEQ ID NO: 1122622
uauuaugaggcuaaaccaa

SEQ ID NO: 1122624 - RNA, 19 nt, Artificial Sequence
  Description of Artificial Sequence: Synthetic oligonucleotide
  Sense strand starting at position 3296 of SEQ ID NO: 916000
gccucauaauauguguuua

SEQ ID NO: 1122625 - RNA, 19 nt, Artificial Sequence
  Description of Artificial Sequence: Synthetic oligonucleotide
  Antisense strand to SEQ ID NO: 1122624
uaaacacauauuaugaggc

SEQ ID NO: 1122626 - RNA, 19 nt, Artificial Sequence
  Description of Artificial Sequence: Synthetic oligonucleotide
  Sense strand starting at position 3346 of SEQ ID NO: 916000
guauccuucuacuugaaug

SEQ ID NO: 1122627 - RNA, 19 nt, Artificial Sequence
  Description of Artificial Sequence: Synthetic oligonucleotide
  Antisense strand to SEQ ID NO: 1122626
cauucaaguagaaggauac

SEQ ID NO: 1122628 - RNA, 19 nt, Artificial Sequence
  Description of Artificial Sequence: Synthetic oligonucleotide
  Sense strand starting at position 3752 of SEQ ID NO: 916000
ucaucaaacuguccuuagu

SEQ ID NO: 1122629 - RNA, 19 nt, Artificial Sequence
  Description of Artificial Sequence: Synthetic oligonucleotide
  Antisense strand to SEQ ID NO: 1122628
acuaaggacaguuugauga

SEQ ID NO: 1122630 - RNA, 19 nt, Artificial Sequence
  Description of Artificial Sequence: Synthetic oligonucleotide
  Sense strand starting at position 3886 of SEQ ID NO: 916000
accucaaggccucagucau

SEQ ID NO: 1122631 - RNA, 19 nt, Artificial Sequence
  Description of Artificial Sequence: Synthetic oligonucleotide
  Antisense strand to SEQ ID NO: 1122630
augacugaggccuugaggu

SEQ ID NO: 1122632 - RNA, 19 nt, Artificial Sequence
  Description of Artificial Sequence: Synthetic oligonucleotide
  Sense strand starting at position 3892 of SEQ ID NO: 916000
aggccucagucauuuggua

SEQ ID NO: 1122633 - RNA, 19 nt, Artificial Sequence
  Description of Artificial Sequence: Synthetic oligonucleotide
  Antisense strand to SEQ ID NO: 1122632
uaccaaaugacugaggccu

SEQ ID NO: 1122634 - RNA, 19 nt, Artificial Sequence
  Description of Artificial Sequence: Synthetic oligonucleotide
  Sense strand starting at position 3900 of SEQ ID NO: 916000
gucauuugguauuaucaau

SEQ ID NO: 1122635 - RNA, 19 nt, Artificial Sequence
  Description of Artificial Sequence: Synthetic oligonucleotide
  Antisense strand to SEQ ID NO: 1122634
auugauaauaccaaaugac

SEQ ID NO: 1122636 - RNA, 19 nt, Artificial Sequence
  Description of Artificial Sequence: Synthetic oligonucleotide
  Sense strand starting at position 3951 of SEQ ID NO: 916000
agcaaaucaugguuugucu

SEQ ID NO: 1122637 - RNA, 19 nt, Artificial Sequence
  Description of Artificial Sequence: Synthetic oligonucleotide
  Antisense strand to SEQ ID NO: 1122636
agacaaaccaugauuugcu

SEQ ID NO: 1122638 - RNA, 19 nt, Artificial Sequence
  Description of Artificial Sequence: Synthetic oligonucleotide
  Sense strand starting at position 137 of SEQ ID NO: 916001
uaacuaggucuuggcacaa

SEQ ID NO: 1122639 - RNA, 19 nt, Artificial Sequence
  Description of Artificial Sequence: Synthetic oligonucleotide
  Antisense strand to SEQ ID NO: 1122638
uugugccaagaccuaguua

SEQ ID NO: 1122640 - RNA, 19 nt, Artificial Sequence
  Description of Artificial Sequence: Synthetic oligonucleotide
  Sense strand starting at position 210 of SEQ ID NO: 916001
gcagaagagaaacguaaua

SEQ ID NO: 1122641 - RNA, 19 nt, Artificial Sequence
  Description of Artificial Sequence: Synthetic oligonucleotide
  Antisense strand to SEQ ID NO: 1122640
uauuacguuucucuucugc

SEQ ID NO: 1122642 - RNA, 19 nt, Artificial Sequence
  Description of Artificial Sequence: Synthetic oligonucleotide
  Sense strand starting at position 239 of SEQ ID NO: 916001
acgugcagucuguuucaca

SEQ ID NO: 1122643 - RNA, 19 nt, Artificial Sequence
  Description of Artificial Sequence: Synthetic oligonucleotide
  Antisense strand to SEQ ID NO: 1122642
ugugaaacagacugcacgu

SEQ ID NO: 1122644 - RNA, 19 nt, Artificial Sequence
  Description of Artificial Sequence: Synthetic oligonucleotide
  Sense strand starting at position 421 of SEQ ID NO: 916001
cuaguucuacuacgguuaa

SEQ ID NO: 1122645 - RNA, 19 nt, Artificial Sequence
  Description of Artificial Sequence: Synthetic oligonucleotide
  Antisense strand to SEQ ID NO: 1122644
uuaaccguaguagaacuag

SEQ ID NO: 1122646 - RNA, 19 nt, Artificial Sequence
  Description of Artificial Sequence: Synthetic oligonucleotide
  Sense strand starting at position 457 of SEQ ID NO: 916001
gcaguuauacugcaauauc

SEQ ID NO: 1122647 - RNA, 19 nt, Artificial Sequence
  Description of Artificial Sequence: Synthetic oligonucleotide
  Antisense strand to SEQ ID NO: 1122646
gauauugcaguauaacugc

SEQ ID NO: 1122648 - RNA, 19 nt, Artificial Sequence
  Description of Artificial Sequence: Synthetic oligonucleotide
  Sense strand starting at position 612 of SEQ ID NO: 916001
ugcauaauguaacuaugaa

SEQ ID NO: 1122649 - RNA, 19 nt, Artificial Sequence
  Description of Artificial Sequence: Synthetic oligonucleotide
  Antisense strand to SEQ ID NO: 1122648
uucauaguuacauuaugca

SEQ ID NO: 1122650 - RNA, 19 nt, Artificial Sequence
  Description of Artificial Sequence: Synthetic oligonucleotide
  Sense strand starting at position 691 of SEQ ID NO: 916001
guaaccugcuuguuuaaag

SEQ ID NO: 1122651 - RNA, 19 nt, Artificial Sequence
  Description of Artificial Sequence: Synthetic oligonucleotide
  Antisense strand to SEQ ID NO: 1122650
cuuuaaacaagcagguuac

SEQ ID NO: 1122652 - RNA, 19 nt, Artificial Sequence
  Description of Artificial Sequence: Synthetic oligonucleotide
  Sense strand starting at position 717 of SEQ ID NO: 916001
accuaagguuaguuaaauu

SEQ ID NO: 1122653 - RNA, 19 nt, Artificial Sequence
  Description of Artificial Sequence: Synthetic oligonucleotide
  Antisense strand to SEQ ID NO: 1122652
aauuuaacuaaccuuaggu

SEQ ID NO: 1122654 - RNA, 19 nt, Artificial Sequence
  Description of Artificial Sequence: Synthetic oligonucleotide
  Sense strand starting at position 749 of SEQ ID NO: 916001
accuaugagcucugaaaga

SEQ ID NO: 1122655 - RNA, 19 nt, Artificial Sequence
  Description of Artificial Sequence: Synthetic oligonucleotide
  Antisense strand to SEQ ID NO: 1122654
ucuuucagagcucauaggu

SEQ ID NO: 1122656 - RNA, 19 nt, Artificial Sequence
  Description of Artificial Sequence: Synthetic oligonucleotide
  Sense strand starting at position 855 of SEQ ID NO: 916001
uuguguuuaaggcauauga

SEQ ID NO: 1122657 - RNA, 19 nt, Artificial Sequence
  Description of Artificial Sequence: Synthetic oligonucleotide
  Antisense strand to SEQ ID NO: 1122656
ucauaugccuuaaacacaa

SEQ ID NO: 1122658 - RNA, 19 nt, Artificial Sequence
  Description of Artificial Sequence: Synthetic oligonucleotide
  Sense strand starting at position 857 of SEQ ID NO: 916001
guguuuaaggcauaugagu

SEQ ID NO: 1122659 - RNA, 19 nt, Artificial Sequence
  Description of Artificial Sequence: Synthetic oligonucleotide
  Antisense strand to SEQ ID NO: 1122658
acucauaugccuuaaacac

SEQ ID NO: 1122660 - RNA, 19 nt, Artificial Sequence
  Description of Artificial Sequence: Synthetic oligonucleotide
  Sense strand starting at position 891 of SEQ ID NO: 916001
gucucauacgcuugggaag

SEQ ID NO: 1122661 - RNA, 19 nt, Artificial Sequence
  Description of Artificial Sequence: Synthetic oligonucleotide
  Antisense strand to SEQ ID NO: 1122660
cuucccaagcguaugagac

SEQ ID NO: 1122662 - RNA, 19 nt, Artificial Sequence
  Description of Artificial Sequence: Synthetic oligonucleotide
  Sense strand starting at position 1025 of SEQ ID NO: 916001
cucugaauggccugaaggu

SEQ ID NO: 1122663 - RNA, 19 nt, Artificial Sequence
  Description of Artificial Sequence: Synthetic oligonucleotide
  Antisense strand to SEQ ID NO: 1122662
accuucaggccauucagag

SEQ ID NO: 1122664 - RNA, 19 nt, Artificial Sequence
  Description of Artificial Sequence: Synthetic oligonucleotide
  Sense strand starting at position 1034 of SEQ ID NO: 916001
gccugaaggugacugguaa

SEQ ID NO: 1122665 - RNA, 19 nt, Artificial Sequence
  Description of Artificial Sequence: Synthetic oligonucleotide
  Antisense strand to SEQ ID NO: 1122664
uuaccagucaccuucaggc

SEQ ID NO: 1122666 - RNA, 19 nt, Artificial Sequence
  Description of Artificial Sequence: Synthetic oligonucleotide
  Sense strand starting at position 1151 of SEQ ID NO: 916001
ggcaauaacuucccuggaa

SEQ ID NO: 1122667 - RNA, 19 nt, Artificial Sequence
  Description of Artificial Sequence: Synthetic oligonucleotide
  Antisense strand to SEQ ID NO: 1122666
uuccagggaaguuauugcc

SEQ ID NO: 1122668 - RNA, 19 nt, Artificial Sequence
  Description of Artificial Sequence: Synthetic oligonucleotide
  Sense strand starting at position 1152 of SEQ ID NO: 916001
gcaauaacuucccuggaaa

SEQ ID NO: 1122669 - RNA, 19 nt, Artificial Sequence
  Description of Artificial Sequence: Synthetic oligonucleotide
  Antisense strand to SEQ ID NO: 1122668
uuuccagggaaguuauugc

SEQ ID NO: 1122670 - RNA, 19 nt, Artificial Sequence
  Description of Artificial Sequence: Synthetic oligonucleotide
  Sense strand starting at position 1217 of SEQ ID NO: 916001
acccaaugaugcuugagau

SEQ ID NO: 1122671 - RNA, 19 nt, Artificial Sequence
  Description of Artificial Sequence: Synthetic oligonucleotide
  Antisense strand to SEQ ID NO: 1122670
aucucaagcaucauugggu

SEQ ID NO: 1122672 - RNA, 19 nt, Artificial Sequence
  Description of Artificial Sequence: Synthetic oligonucleotide
  Sense strand starting at position 1218 of SEQ ID NO: 916001
cccaaugaugcuugagaua

SEQ ID NO: 1122673 - RNA, 19 nt, Artificial Sequence
  Description of Artificial Sequence: Synthetic oligonucleotide
  Antisense strand to SEQ ID NO: 1122672
uaucucaagcaucauuggg

SEQ ID NO: 1122674 - RNA, 19 nt, Artificial Sequence
  Description of Artificial Sequence: Synthetic oligonucleotide
  Sense strand starting at position 1223 of SEQ ID NO: 916001
ugaugcuugagauacuugu

SEQ ID NO: 1122675 - RNA, 19 nt, Artificial Sequence
  Description of Artificial Sequence: Synthetic oligonucleotide
  Antisense strand to SEQ ID NO: 1122674
acaaguaucucaagcauca

SEQ ID NO: 1122676 - RNA, 19 nt, Artificial Sequence
  Description of Artificial Sequence: Synthetic oligonucleotide
  Sense strand starting at position 1271 of SEQ ID NO: 916001
gccgcuagccaauaaggau

SEQ ID NO: 1122677 - RNA, 19 nt, Artificial Sequence
  Description of Artificial Sequence: Synthetic oligonucleotide
  Antisense strand to SEQ ID NO: 1122676
auccuuauuggcuagcggc

SEQ ID NO: 1122678 - RNA, 19 nt, Artificial Sequence
  Description of Artificial Sequence: Synthetic oligonucleotide
  Sense strand starting at position 1320 of SEQ ID NO: 916001
ggaggauguuuccagaaau

SEQ ID NO: 1122679 - RNA, 19 nt, Artificial Sequence
  Description of Artificial Sequence: Synthetic oligonucleotide
  Antisense strand to SEQ ID NO: 1122678
auuucuggaaacauccucc

SEQ ID NO: 1122680 - RNA, 19 nt, Artificial Sequence
  Description of Artificial Sequence: Synthetic oligonucleotide
  Sense strand starting at position 1712 of SEQ ID NO: 916001
cucaguuguuugguuuaga

SEQ ID NO: 1122681 - RNA, 19 nt, Artificial Sequence
  Description of Artificial Sequence: Synthetic oligonucleotide
  Antisense strand to SEQ ID NO: 1122680
ucuaaaccaaacaacugag

SEQ ID NO: 1122682 - RNA, 19 nt, Artificial Sequence
  Description of Artificial Sequence: Synthetic oligonucleotide
  Sense strand starting at position 1713 of SEQ ID NO: 916001
ucaguuguuugguuuagac

SEQ ID NO: 1122683 - RNA, 19 nt, Artificial Sequence
  Description of Artificial Sequence: Synthetic oligonucleotide
  Antisense strand to SEQ ID NO: 1122682
gucuaaaccaaacaacuga

SEQ ID NO: 1122684 - RNA, 19 nt, Artificial Sequence
  Description of Artificial Sequence: Synthetic oligonucleotide
  Sense strand starting at position 1715 of SEQ ID NO: 916001
aguuguuugguuuagacua

SEQ ID NO: 1122685 - RNA, 19 nt, Artificial Sequence
  Description of Artificial Sequence: Synthetic oligonucleotide
  Antisense strand to SEQ ID NO: 1122684
uagucuaaaccaaacaacu

SEQ ID NO: 1122686 - RNA, 19 nt, Artificial Sequence
  Description of Artificial Sequence: Synthetic oligonucleotide
  Sense strand starting at position 1758 of SEQ ID NO: 916001
aguuuaagagcucauucua

SEQ ID NO: 1122687 - RNA, 19 nt, Artificial Sequence
  Description of Artificial Sequence: Synthetic oligonucleotide
  Antisense strand to SEQ ID NO: 1122686
uagaaugagcucuuaaacu

SEQ ID NO: 1122688 - RNA, 19 nt, Artificial Sequence
  Description of Artificial Sequence: Synthetic oligonucleotide
  Sense strand starting at position 2804 of SEQ ID NO: 916001
ccagauaagccaugcuuga

SEQ ID NO: 1122689 - RNA, 19 nt, Artificial Sequence
  Description of Artificial Sequence: Synthetic oligonucleotide
  Antisense strand to SEQ ID NO: 1122688
ucaagcauggcuuaucugg

SEQ ID NO: 1122690 - RNA, 19 nt, Artificial Sequence
  Description of Artificial Sequence: Synthetic oligonucleotide
  Sense strand starting at position 2842 of SEQ ID NO: 916001
guagucgugaaaugcagau

SEQ ID NO: 1122691 - RNA, 19 nt, Artificial Sequence
  Description of Artificial Sequence: Synthetic oligonucleotide
  Antisense strand to SEQ ID NO: 1122690
aucugcauuucacgacuac

SEQ ID NO: 1122692 - RNA, 19 nt, Artificial Sequence
  Description of Artificial Sequence: Synthetic oligonucleotide
  Sense strand starting at position 2954 of SEQ ID NO: 916001
ccaaaucagcaucgccaua

SEQ ID NO: 1122693 - RNA, 19 nt, Artificial Sequence
  Description of Artificial Sequence: Synthetic oligonucleotide
  Antisense strand to SEQ ID NO: 1122692
uauggcgaugcugauuugg

SEQ ID NO: 1122694 - RNA, 19 nt, Artificial Sequence
  Description of Artificial Sequence: Synthetic oligonucleotide
  Sense strand starting at position 2989 of SEQ ID NO: 916001
cuucgcaaccugcaauaau

SEQ ID NO: 1122695 - RNA, 19 nt, Artificial Sequence
  Description of Artificial Sequence: Synthetic oligonucleotide
  Antisense strand to SEQ ID NO: 1122694
auuauugcagguugcgaag

SEQ ID NO: 1122696 - RNA, 19 nt, Artificial Sequence
  Description of Artificial Sequence: Synthetic oligonucleotide
  Sense strand starting at position 3001 of SEQ ID NO: 916001
caauaauaggauugaguuu

SEQ ID NO: 1122697 - RNA, 19 nt, Artificial Sequence
  Description of Artificial Sequence: Synthetic oligonucleotide
  Antisense strand to SEQ ID NO: 1122696
aaacucaauccuauuauug

SEQ ID NO: 1122698 - RNA, 19 nt, Artificial Sequence
  Description of Artificial Sequence: Synthetic oligonucleotide
  Sense strand starting at position 3028 of SEQ ID NO: 916001
cguauuauuuguucaugug

SEQ ID NO: 1122699 - RNA, 19 nt, Artificial Sequence
  Description of Artificial Sequence: Synthetic oligonucleotide
  Antisense strand to SEQ ID NO: 1122698
cacaugaacaaauaauacg

SEQ ID NO: 1122700 - RNA, 19 nt, Artificial Sequence
  Description of Artificial Sequence: Synthetic oligonucleotide
  Sense strand starting at position 3210 of SEQ ID NO: 916001
cccaacauguguuuacuua

SEQ ID NO: 1122701 - RNA, 19 nt, Artificial Sequence
  Description of Artificial Sequence: Synthetic oligonucleotide
  Antisense strand to SEQ ID NO: 1122700
uaaguaaacacauguuggg

SEQ ID NO: 1122702 - RNA, 19 nt, Artificial Sequence
  Description of Artificial Sequence: Synthetic oligonucleotide
  Sense strand starting at position 3211 of SEQ ID NO: 916001
ccaacauguguuuacuuau

SEQ ID NO: 1122703 - RNA, 19 nt, Artificial Sequence
  Description of Artificial Sequence: Synthetic oligonucleotide
  Antisense strand to SEQ ID NO: 1122702
auaaguaaacacauguugg

SEQ ID NO: 1122704 - RNA, 19 nt, Artificial Sequence
  Description of Artificial Sequence: Synthetic oligonucleotide
  Sense strand starting at position 3214 of SEQ ID NO: 916001
acauguguuuacuuauuac

SEQ ID NO: 1122705 - RNA, 19 nt, Artificial Sequence
  Description of Artificial Sequence: Synthetic oligonucleotide
  Antisense strand to SEQ ID NO: 1122704
guaauaaguaaacacaugu

SEQ ID NO: 1122706 - RNA, 19 nt, Artificial Sequence
  Description of Artificial Sequence: Synthetic oligonucleotide
  Sense strand starting at position 3478 of SEQ ID NO: 916001
cucugaaucccauaugugu

SEQ ID NO: 1122707 - RNA, 19 nt, Artificial Sequence
  Description of Artificial Sequence: Synthetic oligonucleotide
  Antisense strand to SEQ ID NO: 1122706
acacauaugggauucagag

SEQ ID NO: 1122708 - RNA, 19 nt, Artificial Sequence
  Description of Artificial Sequence: Synthetic oligonucleotide
  Sense strand starting at position 3492 of SEQ ID NO: 916001
uguguucuucagggucaga

SEQ ID NO: 1122709 - RNA, 19 nt, Artificial Sequence
  Description of Artificial Sequence: Synthetic oligonucleotide
  Antisense strand to SEQ ID NO: 1122708
ucugacccugaagaacaca

SEQ ID NO: 1122710 - RNA, 19 nt, Artificial Sequence
  Description of Artificial Sequence: Synthetic oligonucleotide
  Sense strand starting at position 3495 of SEQ ID NO: 916001
guucuucagggucagagaa

SEQ ID NO: 1122711 - RNA, 19 nt, Artificial Sequence
  Description of Artificial Sequence: Synthetic oligonucleotide
  Antisense strand to SEQ ID NO: 1122710
uucucugacccugaagaac

SEQ ID NO: 1122712 - RNA, 19 nt, Artificial Sequence
  Description of Artificial Sequence: Synthetic oligonucleotide
  Sense strand starting at position 3654 of SEQ ID NO: 916001
uuggaucaaugaguugaca

SEQ ID NO: 1122713 - RNA, 19 nt, Artificial Sequence
  Description of Artificial Sequence: Synthetic oligonucleotide
  Antisense strand to SEQ ID NO: 1122712
ugucaacucauugauccaa

SEQ ID NO: 1122714 - RNA, 19 nt, Artificial Sequence
  Description of Artificial Sequence: Synthetic oligonucleotide
  Sense strand starting at position 3696 of SEQ ID NO: 916001
uguaguccgagcuaaugau

SEQ ID NO: 1122715 - RNA, 19 nt, Artificial Sequence
  Description of Artificial Sequence: Synthetic oligonucleotide
  Antisense strand to SEQ ID NO: 1122714
aucauuagcucggacuaca

SEQ ID NO: 1122716 - RNA, 19 nt, Artificial Sequence
  Description of Artificial Sequence: Synthetic oligonucleotide
  Sense strand starting at position 3859 of SEQ ID NO: 916001
cagcguggugaauauccau

SEQ ID NO: 1122717 - RNA, 19 nt, Artificial Sequence
  Description of Artificial Sequence: Synthetic oligonucleotide
  Antisense strand to SEQ ID NO: 1122716
auggauauucaccacgcug

SEQ ID NO: 1122718 - RNA, 19 nt, Artificial Sequence
  Description of Artificial Sequence: Synthetic oligonucleotide
  Sense strand starting at position 52 of SEQ ID NO: 916002
gcuuucuuuccagagcuau

SEQ ID NO: 1122719 - RNA, 19 nt, Artificial Sequence
  Description of Artificial Sequence: Synthetic oligonucleotide
  Antisense strand to SEQ ID NO: 1122718
auagcucuggaaagaaagc

SEQ ID NO: 1122720 - RNA, 19 nt, Artificial Sequence
  Description of Artificial Sequence: Synthetic oligonucleotide
  Sense strand starting at position 132 of SEQ ID NO: 916002
uugguuguuuaaucacaca

SEQ ID NO: 1122721 - RNA, 19 nt, Artificial Sequence
  Description of Artificial Sequence: Synthetic oligonucleotide
  Antisense strand to SEQ ID NO: 1122720
ugugugauuaaacaaccaa

SEQ ID NO: 1122722 - RNA, 19 nt, Artificial Sequence
  Description of Artificial Sequence: Synthetic oligonucleotide
  Sense strand starting at position 208 of SEQ ID NO: 916002
gcugaacaaucagcaaagu

SEQ ID NO: 1122723 - RNA, 19 nt, Artificial Sequence
  Description of Artificial Sequence: Synthetic oligonucleotide
  Antisense strand to SEQ ID NO: 1122722
acuuugcugauuguucagc

SEQ ID NO: 1122724 - RNA, 19 nt, Artificial Sequence
  Description of Artificial Sequence: Synthetic oligonucleotide
  Sense strand starting at position 672 of SEQ ID NO: 916002
ucuuuaaugcuagacugua

SEQ ID NO: 1122725 - RNA, 19 nt, Artificial Sequence
  Description of Artificial Sequence: Synthetic oligonucleotide
  Antisense strand to SEQ ID NO: 1122724
uacagucuagcauuaaaga

SEQ ID NO: 1122726 - RNA, 19 nt, Artificial Sequence
  Description of Artificial Sequence: Synthetic oligonucleotide
  Sense strand starting at position 724 of SEQ ID NO: 916002
uuagaaagcccacaaugua

SEQ ID NO: 1122727 - RNA, 19 nt, Artificial Sequence
  Description of Artificial Sequence: Synthetic oligonucleotide
  Antisense strand to SEQ ID NO: 1122726
uacauugugggcuuucuaa

SEQ ID NO: 1122728 - RNA, 19 nt, Artificial Sequence
  Description of Artificial Sequence: Synthetic oligonucleotide
  Sense strand starting at position 848 of SEQ ID NO: 916002
ugccgucauacauggaaca

SEQ ID NO: 1122729 - RNA, 19 nt, Artificial Sequence
  Description of Artificial Sequence: Synthetic oligonucleotide
  Antisense strand to SEQ ID NO: 1122728
uguuccauguaugacggca

SEQ ID NO: 1122730 - RNA, 19 nt, Artificial Sequence
  Description of Artificial Sequence: Synthetic oligonucleotide
  Sense strand starting at position 901 of SEQ ID NO: 916002
cugacacccuauguagaua

SEQ ID NO: 1122731 - RNA, 19 nt, Artificial Sequence
  Description of Artificial Sequence: Synthetic oligonucleotide
  Antisense strand to SEQ ID NO: 1122730
uaucuacauagggugucag

SEQ ID NO: 1122732 - RNA, 19 nt, Artificial Sequence
  Description of Artificial Sequence: Synthetic oligonucleotide
  Sense strand starting at position 1029 of SEQ ID NO: 916002
ccaguuauugcagacccga

SEQ ID NO: 1122733 - RNA, 19 nt, Artificial Sequence
  Description of Artificial Sequence: Synthetic oligonucleotide
  Antisense strand to SEQ ID NO: 1122732
ucgggucugcaauaacugg

SEQ ID NO: 1122734 - RNA, 19 nt, Artificial Sequence
  Description of Artificial Sequence: Synthetic oligonucleotide
  Sense strand starting at position 1121 of SEQ ID NO: 916002
gaaugagcuguagggacua

SEQ ID NO: 1122735 - RNA, 19 nt, Artificial Sequence
  Description of Artificial Sequence: Synthetic oligonucleotide
  Antisense strand to SEQ ID NO: 1122734
uagucccuacagcucauuc

SEQ ID NO: 1122736 - RNA, 19 nt, Artificial Sequence
  Description of Artificial Sequence: Synthetic oligonucleotide
  Sense strand starting at position 1165 of SEQ ID NO: 916002
gcacaagaaucagcaaaca

SEQ ID NO: 1122737 - RNA, 19 nt, Artificial Sequence
  Description of Artificial Sequence: Synthetic oligonucleotide
  Antisense strand to SEQ ID NO: 1122736
uguuugcugauucuugugc

SEQ ID NO: 1122738 - RNA, 19 nt, Artificial Sequence
  Description of Artificial Sequence: Synthetic oligonucleotide
  Sense strand starting at position 1185 of SEQ ID NO: 916002
cuggcugugagugaaucuu

SEQ ID NO: 1122739 - RNA, 19 nt, Artificial Sequence
  Description of Artificial Sequence: Synthetic oligonucleotide
  Antisense strand to SEQ ID NO: 1122738
aagauucacucacagccag

SEQ ID NO: 1122740 - RNA, 19 nt, Artificial Sequence
  Description of Artificial Sequence: Synthetic oligonucleotide
  Sense strand starting at position 1191 of SEQ ID NO: 916002
gugagugaaucuuugaaac

SEQ ID NO: 1122741 - RNA, 19 nt, Artificial Sequence
  Description of Artificial Sequence: Synthetic oligonucleotide
  Antisense strand to SEQ ID NO: 1122740
guuucaaagauucacucac

SEQ ID NO: 1122742 - RNA, 19 nt, Artificial Sequence
  Description of Artificial Sequence: Synthetic oligonucleotide
  Sense strand starting at position 1201 of SEQ ID NO: 916002
cuuugaaaccuaugccaag

SEQ ID NO: 1122743 - RNA, 19 nt, Artificial Sequence
  Description of Artificial Sequence: Synthetic oligonucleotide
  Antisense strand to SEQ ID NO: 1122742
cuuggcauagguuucaaag

SEQ ID NO: 1122744 - RNA, 19 nt, Artificial Sequence
  Description of Artificial Sequence: Synthetic oligonucleotide
  Sense strand starting at position 1223 of SEQ ID NO: 916002
ugucuuugucauuaagcac

SEQ ID NO: 1122745 - RNA, 19 nt, Artificial Sequence
  Description of Artificial Sequence: Synthetic oligonucleotide
  Antisense strand to SEQ ID NO: 1122744
gugcuuaaugacaaagaca

SEQ ID NO: 1122746 - RNA, 19 nt, Artificial Sequence
  Description of Artificial Sequence: Synthetic oligonucleotide
  Sense strand starting at position 1230 of SEQ ID NO: 916002
gucauuaagcacugaauau

SEQ ID NO: 1122747 - RNA, 19 nt, Artificial Sequence
  Description of Artificial Sequence: Synthetic oligonucleotide
  Antisense strand to SEQ ID NO: 1122746
auauucagugcuuaaugac

SEQ ID NO: 1122748 - RNA, 19 nt, Artificial Sequence
  Description of Artificial Sequence: Synthetic oligonucleotide
  Sense strand starting at position 1242 of SEQ ID NO: 916002
ugaauauccagcugggcua

SEQ ID NO: 1122749 - RNA, 19 nt, Artificial Sequence
  Description of Artificial Sequence: Synthetic oligonucleotide
  Antisense strand to SEQ ID NO: 1122748
uagcccagcuggauauuca

SEQ ID NO: 1122750 - RNA, 19 nt, Artificial Sequence
  Description of Artificial Sequence: Synthetic oligonucleotide
  Sense strand starting at position 1253 of SEQ ID NO: 916002
cugggcuauguuggagaua

SEQ ID NO: 1122751 - RNA, 19 nt, Artificial Sequence
  Description of Artificial Sequence: Synthetic oligonucleotide
  Antisense strand to SEQ ID NO: 1122750
uaucuccaacauagcccag

SEQ ID NO: 1122752 - RNA, 19 nt, Artificial Sequence
  Description of Artificial Sequence: Synthetic oligonucleotide
  Sense strand starting at position 1329 of SEQ ID NO: 916002
gcugcaugucaugagauga

SEQ ID NO: 1122753 - RNA, 19 nt, Artificial Sequence
  Description of Artificial Sequence: Synthetic oligonucleotide
  Antisense strand to SEQ ID NO: 1122752
ucaucucaugacaugcagc

SEQ ID NO: 1122754 - RNA, 19 nt, Artificial Sequence
  Description of Artificial Sequence: Synthetic oligonucleotide
  Sense strand starting at position 1363 of SEQ ID NO: 916002
auaaauacuguuggcuaau

SEQ ID NO: 1122755 - RNA, 19 nt, Artificial Sequence
  Description of Artificial Sequence: Synthetic oligonucleotide
  Antisense strand to SEQ ID NO: 1122754
auuagccaacaguauuuau

SEQ ID NO: 1122756 - RNA, 19 nt, Artificial Sequence
  Description of Artificial Sequence: Synthetic oligonucleotide
  Sense strand starting at position 1470 of SEQ ID NO: 916002
cacuucucucgguaguaau

SEQ ID NO: 1122757 - RNA, 19 nt, Artificial Sequence
  Description of Artificial Sequence: Synthetic oligonucleotide
  Antisense strand to SEQ ID NO: 1122756
auuacuaccgagagaagug

SEQ ID NO: 1122758 - RNA, 19 nt, Artificial Sequence
  Description of Artificial Sequence: Synthetic oligonucleotide
  Sense strand starting at position 1481 of SEQ ID NO: 916002
guaguaauauuacuggcua

SEQ ID NO: 1122759 - RNA, 19 nt, Artificial Sequence
  Description of Artificial Sequence: Synthetic oligonucleotide
  Antisense strand to SEQ ID NO: 1122758
uagccaguaauauuacuac

SEQ ID NO: 1122760 - RNA, 19 nt, Artificial Sequence
  Description of Artificial Sequence: Synthetic oligonucleotide
  Sense strand starting at position 1627 of SEQ ID NO: 916002
ggaccaagucuauguugau

SEQ ID NO: 1122761 - RNA, 19 nt, Artificial Sequence
  Description of Artificial Sequence: Synthetic oligonucleotide
  Antisense strand to SEQ ID NO: 1122760
aucaacauagacuuggucc

SEQ ID NO: 1122762 - RNA, 19 nt, Artificial Sequence
  Description of Artificial Sequence: Synthetic oligonucleotide
  Sense strand starting at position 1628 of SEQ ID NO: 916002
gaccaagucuauguugauc

SEQ ID NO: 1122763 - RNA, 19 nt, Artificial Sequence
  Description of Artificial Sequence: Synthetic oligonucleotide
  Antisense strand to SEQ ID NO: 1122762
gaucaacauagacuugguc

SEQ ID NO: 1122764 - RNA, 19 nt, Artificial Sequence
  Description of Artificial Sequence: Synthetic oligonucleotide
  Sense strand starting at position 1633 of SEQ ID NO: 916002
agucuauguugaucccaga

SEQ ID NO: 1122765 - RNA, 19 nt, Artificial Sequence
  Description of Artificial Sequence: Synthetic oligonucleotide
  Antisense strand to SEQ ID NO: 1122764
ucugggaucaacauagacu

SEQ ID NO: 1122766 - RNA, 19 nt, Artificial Sequence
  Description of Artificial Sequence: Synthetic oligonucleotide
  Sense strand starting at position 1872 of SEQ ID NO: 916002
cuaacaagcucgguaagaa

SEQ ID NO: 1122767 - RNA, 19 nt, Artificial Sequence
  Description of Artificial Sequence: Synthetic oligonucleotide
  Antisense strand to SEQ ID NO: 1122766
uucuuaccgagcuuguuag

SEQ ID NO: 1122768 - RNA, 19 nt, Artificial Sequence
  Description of Artificial Sequence: Synthetic oligonucleotide
  Sense strand starting at position 1873 of SEQ ID NO: 916002
uaacaagcucgguaagaag

SEQ ID NO: 1122769 - RNA, 19 nt, Artificial Sequence
  Description of Artificial Sequence: Synthetic oligonucleotide
  Antisense strand to SEQ ID NO: 1122768
cuucuuaccgagcuuguua

SEQ ID NO: 1122770 - RNA, 19 nt, Artificial Sequence
  Description of Artificial Sequence: Synthetic oligonucleotide
  Sense strand starting at position 2031 of SEQ ID NO: 916002
cagggcuucugauuacacu

SEQ ID NO: 1122771 - RNA, 19 nt, Artificial Sequence
  Description of Artificial Sequence: Synthetic oligonucleotide
  Antisense strand to SEQ ID NO: 1122770
aguguaaucagaagcccug

SEQ ID NO: 1122772 - RNA, 19 nt, Artificial Sequence
  Description of Artificial Sequence: Synthetic oligonucleotide
  Sense strand starting at position 2196 of SEQ ID NO: 916002
aguacuugcuggcuggaaa

SEQ ID NO: 1122773 - RNA, 19 nt, Artificial Sequence
  Description of Artificial Sequence: Synthetic oligonucleotide
  Antisense strand to SEQ ID NO: 1122772
uuuccagccagcaaguacu

SEQ ID NO: 1122774 - RNA, 19 nt, Artificial Sequence
  Description of Artificial Sequence: Synthetic oligonucleotide
  Sense strand starting at position 2379 of SEQ ID NO: 916002
guaauucuuugucuaauug

SEQ ID NO: 1122775 - RNA, 19 nt, Artificial Sequence
  Description of Artificial Sequence: Synthetic oligonucleotide
  Antisense strand to SEQ ID NO: 1122774
caauuagacaaagaauuac

SEQ ID NO: 1122776 - RNA, 19 nt, Artificial Sequence
  Description of Artificial Sequence: Synthetic oligonucleotide
  Sense strand starting at position 2584 of SEQ ID NO: 916002
uugugugacuauguacaua

SEQ ID NO: 1122777 - RNA, 19 nt, Artificial Sequence
  Description of Artificial Sequence: Synthetic oligonucleotide
  Antisense strand to SEQ ID NO: 1122776
uauguacauagucacacaa

SEQ ID NO: 1122778 - RNA, 19 nt, Artificial Sequence
  Description of Artificial Sequence: Synthetic oligonucleotide
  Sense strand starting at position 3042 of SEQ ID NO: 916002
guaugcucuguacacaaua

SEQ ID NO: 1122779 - RNA, 19 nt, Artificial Sequence
  Description of Artificial Sequence: Synthetic oligonucleotide
  Antisense strand to SEQ ID NO: 1122778
uauuguguacagagcauac

SEQ ID NO: 1122780 - RNA, 19 nt, Artificial Sequence
  Description of Artificial Sequence: Synthetic oligonucleotide
  Sense strand starting at position 3269 of SEQ ID NO: 916002
cucagaauguauguaucaa

SEQ ID NO: 1122781 - RNA, 19 nt, Artificial Sequence
  Description of Artificial Sequence: Synthetic oligonucleotide
  Antisense strand to SEQ ID NO: 1122780
uugauacauacauucugag

SEQ ID NO: 1122782 - RNA, 19 nt, Artificial Sequence
  Description of Artificial Sequence: Synthetic oligonucleotide
  Sense strand starting at position 3301 of SEQ ID NO: 916002
ccaguauuuccuggugcaa

SEQ ID NO: 1122783 - RNA, 19 nt, Artificial Sequence
  Description of Artificial Sequence: Synthetic oligonucleotide
  Antisense strand to SEQ ID NO: 1122782
uugcaccaggaaauacugg

SEQ ID NO: 1122784 - RNA, 19 nt, Artificial Sequence
  Description of Artificial Sequence: Synthetic oligonucleotide
  Sense strand starting at position 3314 of SEQ ID NO: 916002
gugcaaauuugggaguaaa

SEQ ID NO: 1122785 - RNA, 19 nt, Artificial Sequence
  Description of Artificial Sequence: Synthetic oligonucleotide
  Antisense strand to SEQ ID NO: 1122784
uuuacucccaaauuugcac

SEQ ID NO: 1122786 - RNA, 19 nt, Artificial Sequence
  Description of Artificial Sequence: Synthetic oligonucleotide
  Sense strand starting at position 3377 of SEQ ID NO: 916002
gguauaauguaaucacucu

SEQ ID NO: 1122787 - RNA, 19 nt, Artificial Sequence
  Description of Artificial Sequence: Synthetic oligonucleotide
  Antisense strand to SEQ ID NO: 1122786
agagugauuacauuauacc

SEQ ID NO: 1122788 - RNA, 19 nt, Artificial Sequence
  Description of Artificial Sequence: Synthetic oligonucleotide
  Sense strand starting at position 3905 of SEQ ID NO: 916002
aggacaugcacuuguugau

SEQ ID NO: 1122789 - RNA, 19 nt, Artificial Sequence
  Description of Artificial Sequence: Synthetic oligonucleotide
  Antisense strand to SEQ ID NO: 1122788
aucaacaagugcauguccu

SEQ ID NO: 1122790 - RNA, 19 nt, Artificial Sequence
  Description of Artificial Sequence: Synthetic oligonucleotide
  Sense strand starting at position 3914 of SEQ ID NO: 916002
acuuguugauuccuggcaa

SEQ ID NO: 1122791 - RNA, 19 nt, Artificial Sequence
  Description of Artificial Sequence: Synthetic oligonucleotide
  Antisense strand to SEQ ID NO: 1122790
uugccaggaaucaacaagu

SEQ ID NO: 1122792 - RNA, 19 nt, Artificial Sequence
  Description of Artificial Sequence: Synthetic oligonucleotide
  Sense strand starting at position 3965 of SEQ ID NO: 916002
uucugaauauagcugucua

SEQ ID NO: 1122793 - RNA, 19 nt, Artificial Sequence
  Description of Artificial Sequence: Synthetic oligonucleotide
  Antisense strand to SEQ ID NO: 1122792
uagacagcuauauucagaa

SEQ ID NO: 1122794 - RNA, 19 nt, Artificial Sequence
  Description of Artificial Sequence: Synthetic oligonucleotide
  Sense strand starting at position 3978 of SEQ ID NO: 916002
ugucuaagccauugggaac

SEQ ID NO: 1122795 - RNA, 19 nt, Artificial Sequence
  Description of Artificial Sequence: Synthetic oligonucleotide
  Antisense strand to SEQ ID NO: 1122794
guucccaauggcuuagaca

SEQ ID NO: 1122796 - RNA, 19 nt, Artificial Sequence
  Description of Artificial Sequence: Synthetic oligonucleotide
  Sense strand starting at position 3979 of SEQ ID NO: 916002
gucuaagccauugggaaca

SEQ ID NO: 1122797 - RNA, 19 nt, Artificial Sequence
  Description of Artificial Sequence: Synthetic oligonucleotide
  Antisense strand to SEQ ID NO: 1122796
uguucccaauggcuuagac

SEQ ID NO: 1122798 - RNA, 19 nt, Artificial Sequence
  Description of Artificial Sequence: Synthetic oligonucleotide
  Sense strand starting at position 194 of SEQ ID NO: 916003
uaagauuugugugacuuga

SEQ ID NO: 1122799 - RNA, 19 nt, Artificial Sequence
  Description of Artificial Sequence: Synthetic oligonucleotide
  Antisense strand to SEQ ID NO: 1122798
ucaagucacacaaaucuua

SEQ ID NO: 1122800 - RNA, 19 nt, Artificial Sequence
  Description of Artificial Sequence: Synthetic oligonucleotide
  Sense strand starting at position 205 of SEQ ID NO: 916003
ugacuugagugaguugaua

SEQ ID NO: 1122801 - RNA, 19 nt, Artificial Sequence
  Description of Artificial Sequence: Synthetic oligonucleotide
  Antisense strand to SEQ ID NO: 1122800
uaucaacucacucaaguca

SEQ ID NO: 1122802 - RNA, 19 nt, Artificial Sequence
  Description of Artificial Sequence: Synthetic oligonucleotide
  Sense strand starting at position 207 of SEQ ID NO: 916003
acuugagugaguugauauu

SEQ ID NO: 1122803 - RNA, 19 nt, Artificial Sequence
  Description of Artificial Sequence: Synthetic oligonucleotide
  Antisense strand to SEQ ID NO: 1122802
aauaucaacucacucaagu

SEQ ID NO: 1122804 - RNA, 19 nt, Artificial Sequence
  Description of Artificial Sequence: Synthetic oligonucleotide
  Sense strand starting at position 216 of SEQ ID NO: 916003
aguugauauuguccaagca

SEQ ID NO: 1122805 - RNA, 19 nt, Artificial Sequence
  Description of Artificial Sequence: Synthetic oligonucleotide
  Antisense strand to SEQ ID NO: 1122804
ugcuuggacaauaucaacu

SEQ ID NO: 1122806 - RNA, 19 nt, Artificial Sequence
  Description of Artificial Sequence: Synthetic oligonucleotide
  Sense strand starting at position 217 of SEQ ID NO: 916003
guugauauuguccaagcau

SEQ ID NO: 1122807 - RNA, 19 nt, Artificial Sequence
  Description of Artificial Sequence: Synthetic oligonucleotide
  Antisense strand to SEQ ID NO: 1122806
augcuuggacaauaucaac

SEQ ID NO: 1122808 - RNA, 19 nt, Artificial Sequence
  Description of Artificial Sequence: Synthetic oligonucleotide
  Sense strand starting at position 300 of SEQ ID NO: 916003
uauuguaacuguuugauga

SEQ ID NO: 1122809 - RNA, 19 nt, Artificial Sequence
  Description of Artificial Sequence: Synthetic oligonucleotide
  Antisense strand to SEQ ID NO: 1122808
ucaucaaacaguuacaaua

SEQ ID NO: 1122810 - RNA, 19 nt, Artificial Sequence
  Description of Artificial Sequence: Synthetic oligonucleotide
  Sense strand starting at position 301 of SEQ ID NO: 916003
auuguaacuguuugaugau

SEQ ID NO: 1122811 - RNA, 19 nt, Artificial Sequence
  Description of Artificial Sequence: Synthetic oligonucleotide
  Antisense strand to SEQ ID NO: 1122810
aucaucaaacaguuacaau

SEQ ID NO: 1122812 - RNA, 19 nt, Artificial Sequence
  Description of Artificial Sequence: Synthetic oligonucleotide
  Sense strand starting at position 324 of SEQ ID NO: 916003
cugugucaccuuuaauuaa

SEQ ID NO: 1122813 - RNA, 19 nt, Artificial Sequence
  Description of Artificial Sequence: Synthetic oligonucleotide
  Antisense strand to SEQ ID NO: 1122812
uuaauuaaaggugacacag

SEQ ID NO: 1122814 - RNA, 19 nt, Artificial Sequence
  Description of Artificial Sequence: Synthetic oligonucleotide
  Sense strand starting at position 438 of SEQ ID NO: 916003
gaaugagaugucuagcagu

SEQ ID NO: 1122815 - RNA, 19 nt, Artificial Sequence
  Description of Artificial Sequence: Synthetic oligonucleotide
  Antisense strand to SEQ ID NO: 1122814
acugcuagacaucucauuc

SEQ ID NO: 1122816 - RNA, 19 nt, Artificial Sequence
  Description of Artificial Sequence: Synthetic oligonucleotide
  Sense strand starting at position 497 of SEQ ID NO: 916003
augugaugaucaccuguca

SEQ ID NO: 1122817 - RNA, 19 nt, Artificial Sequence
  Description of Artificial Sequence: Synthetic oligonucleotide
  Antisense strand to SEQ ID NO: 1122816
ugacaggugaucaucacau

SEQ ID NO: 1122818 - RNA, 19 nt, Artificial Sequence
  Description of Artificial Sequence: Synthetic oligonucleotide
  Sense strand starting at position 515 of SEQ ID NO: 916003
agugauguuccggagagua

SEQ ID NO: 1122819 - RNA, 19 nt, Artificial Sequence
  Description of Artificial Sequence: Synthetic oligonucleotide
  Antisense strand to SEQ ID NO: 1122818
uacucuccggaacaucacu

SEQ ID NO: 1122820 - RNA, 19 nt, Artificial Sequence
  Description of Artificial Sequence: Synthetic oligonucleotide
  Sense strand starting at position 517 of SEQ ID NO: 916003
ugauguuccggagaguaua

SEQ ID NO: 1122821 - RNA, 19 nt, Artificial Sequence
  Description of Artificial Sequence: Synthetic oligonucleotide
  Antisense strand to SEQ ID NO: 1122820
uauacucuccggaacauca

SEQ ID NO: 1122822 - RNA, 19 nt, Artificial Sequence
  Description of Artificial Sequence: Synthetic oligonucleotide
  Sense strand starting at position 697 of SEQ ID NO: 916003
agguucuagccauacuaaa

SEQ ID NO: 1122823 - RNA, 19 nt, Artificial Sequence
  Description of Artificial Sequence: Synthetic oligonucleotide
  Antisense strand to SEQ ID NO: 1122822
uuuaguauggcuagaaccu

SEQ ID NO: 1122824 - RNA, 19 nt, Artificial Sequence
  Description of Artificial Sequence: Synthetic oligonucleotide
  Sense strand starting at position 775 of SEQ ID NO: 916003
uuagaaugcuaucuuagac

SEQ ID NO: 1122825 - RNA, 19 nt, Artificial Sequence
  Description of Artificial Sequence: Synthetic oligonucleotide
  Antisense strand to SEQ ID NO: 1122824
gucuaagauagcauucuaa

SEQ ID NO: 1122826 - RNA, 19 nt, Artificial Sequence
  Description of Artificial Sequence: Synthetic oligonucleotide
  Sense strand starting at position 812 of SEQ ID NO: 916003
guauacaauuuccagaaag

SEQ ID NO: 1122827 - RNA, 19 nt, Artificial Sequence
  Description of Artificial Sequence: Synthetic oligonucleotide
  Antisense strand to SEQ ID NO: 1122826
cuuucuggaaauuguauac

SEQ ID NO: 1122828 - RNA, 19 nt, Artificial Sequence
  Description of Artificial Sequence: Synthetic oligonucleotide
  Sense strand starting at position 933 of SEQ ID NO: 916003
gcuugaaagcuggaucugu

SEQ ID NO: 1122829 - RNA, 19 nt, Artificial Sequence
  Description of Artificial Sequence: Synthetic oligonucleotide
  Antisense strand to SEQ ID NO: 1122828
acagauccagcuuucaagc

SEQ ID NO: 1122830 - RNA, 19 nt, Artificial Sequence
  Description of Artificial Sequence: Synthetic oligonucleotide
  Sense strand starting at position 1039 of SEQ ID NO: 916003
cuuacauaggucuauuguu

SEQ ID NO: 1122831 - RNA, 19 nt, Artificial Sequence
  Description of Artificial Sequence: Synthetic oligonucleotide
  Antisense strand to SEQ ID NO: 1122830
aacaauagaccuauguaag

SEQ ID NO: 1122832 - RNA, 19 nt, Artificial Sequence
  Description of Artificial Sequence: Synthetic oligonucleotide
  Sense strand starting at position 1399 of SEQ ID NO: 916003
cugugaaugccacaauuag

SEQ ID NO: 1122833 - RNA, 19 nt, Artificial Sequence
  Description of Artificial Sequence: Synthetic oligonucleotide
  Antisense strand to SEQ ID NO: 1122832
cuaauuguggcauucacag

SEQ ID NO: 1122834 - RNA, 19 nt, Artificial Sequence
  Description of Artificial Sequence: Synthetic oligonucleotide
  Sense strand starting at position 1450 of SEQ ID NO: 916003
cugaauugugcugaugaga

SEQ ID NO: 1122835 - RNA, 19 nt, Artificial Sequence
  Description of Artificial Sequence: Synthetic oligonucleotide
  Antisense strand to SEQ ID NO: 1122834
ucucaucagcacaauucag

SEQ ID NO: 1122836 - RNA, 19 nt, Artificial Sequence
  Description of Artificial Sequence: Synthetic oligonucleotide
  Sense strand starting at position 1491 of SEQ ID NO: 916003
cuuugaagaguuuggugau

SEQ ID NO: 1122837 - RNA, 19 nt, Artificial Sequence
  Description of Artificial Sequence: Synthetic oligonucleotide
  Antisense strand to SEQ ID NO: 1122836
aucaccaaacucuucaaag

SEQ ID NO: 1122838 - RNA, 19 nt, Artificial Sequence
  Description of Artificial Sequence: Synthetic oligonucleotide
  Sense strand starting at position 1539 of SEQ ID NO: 916003
ugugguuucccacaaaggu

SEQ ID NO: 1122839 - RNA, 19 nt, Artificial Sequence
  Description of Artificial Sequence: Synthetic oligonucleotide
  Antisense strand to SEQ ID NO: 1122838
accuuugugggaaaccaca

SEQ ID NO: 1122840 - RNA, 19 nt, Artificial Sequence
  Description of Artificial Sequence: Synthetic oligonucleotide
  Sense strand starting at position 1584 of SEQ ID NO: 916003
ucaauuaaguuggccuuaa

SEQ ID NO: 1122841 - RNA, 19 nt, Artificial Sequence
  Description of Artificial Sequence: Synthetic oligonucleotide
  Antisense strand to SEQ ID NO: 1122840
uuaaggccaacuuaauuga

SEQ ID NO: 1122842 - RNA, 19 nt, Artificial Sequence
  Description of Artificial Sequence: Synthetic oligonucleotide
  Sense strand starting at position 1588 of SEQ ID NO: 916003
uuaaguuggccuuaagaac

SEQ ID NO: 1122843 - RNA, 19 nt, Artificial Sequence
  Description of Artificial Sequence: Synthetic oligonucleotide
  Antisense strand to SEQ ID NO: 1122842
guucuuaaggccaacuuaa

SEQ ID NO: 1122844 - RNA, 19 nt, Artificial Sequence
  Description of Artificial Sequence: Synthetic oligonucleotide
  Sense strand starting at position 1602 of SEQ ID NO: 916003
agaacuucuuuggccuuaa

SEQ ID NO: 1122845 - RNA, 19 nt, Artificial Sequence
  Description of Artificial Sequence: Synthetic oligonucleotide
  Antisense strand to SEQ ID NO: 1122844
uuaaggccaaagaaguucu

SEQ ID NO: 1122846 - RNA, 19 nt, Artificial Sequence
  Description of Artificial Sequence: Synthetic oligonucleotide
  Sense strand starting at position 1643 of SEQ ID NO: 916003
ccauucugucccugaggaa

SEQ ID NO: 1122847 - RNA, 19 nt, Artificial Sequence
  Description of Artificial Sequence: Synthetic oligonucleotide
  Antisense strand to SEQ ID NO: 1122846
uuccucagggacagaaugg

SEQ ID NO: 1122848 - RNA, 19 nt, Artificial Sequence
  Description of Artificial Sequence: Synthetic oligonucleotide
  Sense strand starting at position 1786 of SEQ ID NO: 916003
accuguuacucagcaauug

SEQ ID NO: 1122849 - RNA, 19 nt, Artificial Sequence
  Description of Artificial Sequence: Synthetic oligonucleotide
  Antisense strand to SEQ ID NO: 1122848
caauugcugaguaacaggu

SEQ ID NO: 1122850 - RNA, 19 nt, Artificial Sequence
  Description of Artificial Sequence: Synthetic oligonucleotide
  Sense strand starting at position 1883 of SEQ ID NO: 916003
acuacauuaguuuagugaa

SEQ ID NO: 1122851 - RNA, 19 nt, Artificial Sequence
  Description of Artificial Sequence: Synthetic oligonucleotide
  Antisense strand to SEQ ID NO: 1122850
uucacuaaacuaauguagu

SEQ ID NO: 1122852 - RNA, 19 nt, Artificial Sequence
  Description of Artificial Sequence: Synthetic oligonucleotide
  Sense strand starting at position 1929 of SEQ ID NO: 916003
uucuuuaguuugucagaca

SEQ ID NO: 1122853 - RNA, 19 nt, Artificial Sequence
  Description of Artificial Sequence: Synthetic oligonucleotide
  Antisense strand to SEQ ID NO: 1122852
ugucugacaaacuaaagaa

SEQ ID NO: 1122854 - RNA, 19 nt, Artificial Sequence
  Description of Artificial Sequence: Synthetic oligonucleotide
  Sense strand starting at position 2558 of SEQ ID NO: 916003
uaaaguacacgugaaguuu

SEQ ID NO: 1122855 - RNA, 19 nt, Artificial Sequence
  Description of Artificial Sequence: Synthetic oligonucleotide
  Antisense strand to SEQ ID NO: 1122854
aaacuucacguguacuuua

SEQ ID NO: 1122856 - RNA, 19 nt, Artificial Sequence
  Description of Artificial Sequence: Synthetic oligonucleotide
  Sense strand starting at position 2800 of SEQ ID NO: 916003
guuccuugggucuggauua

SEQ ID NO: 1122857 - RNA, 19 nt, Artificial Sequence
  Description of Artificial Sequence: Synthetic oligonucleotide
  Antisense strand to SEQ ID NO: 1122856
uaauccagacccaaggaac

SEQ ID NO: 1122858 - RNA, 19 nt, Artificial Sequence
  Description of Artificial Sequence: Synthetic oligonucleotide
  Sense strand starting at position 2861 of SEQ ID NO: 916003
augagauucuguuuguauu

SEQ ID NO: 1122859 - RNA, 19 nt, Artificial Sequence
  Description of Artificial Sequence: Synthetic oligonucleotide
  Antisense strand to SEQ ID NO: 1122858
aauacaaacagaaucucau

SEQ ID NO: 1122860 - RNA, 19 nt, Artificial Sequence
  Description of Artificial Sequence: Synthetic oligonucleotide
  Sense strand starting at position 2902 of SEQ ID NO: 916003
uuccaucaucgaugucaca

SEQ ID NO: 1122861 - RNA, 19 nt, Artificial Sequence
  Description of Artificial Sequence: Synthetic oligonucleotide
  Antisense strand to SEQ ID NO: 1122860
ugugacaucgaugauggaa

SEQ ID NO: 1122862 - RNA, 19 nt, Artificial Sequence
  Description of Artificial Sequence: Synthetic oligonucleotide
  Sense strand starting at position 3224 of SEQ ID NO: 916003
acuacuuuccuagacaugu

SEQ ID NO: 1122863 - RNA, 19 nt, Artificial Sequence
  Description of Artificial Sequence: Synthetic oligonucleotide
  Antisense strand to SEQ ID NO: 1122862
acaugucuaggaaaguagu

SEQ ID NO: 1122864 - RNA, 19 nt, Artificial Sequence
  Description of Artificial Sequence: Synthetic oligonucleotide
  Sense strand starting at position 3496 of SEQ ID NO: 916003
ggacauacuugaguucuuu

SEQ ID NO: 1122865 - RNA, 19 nt, Artificial Sequence
  Description of Artificial Sequence: Synthetic oligonucleotide
  Antisense strand to SEQ ID NO: 1122864
aaagaacucaaguaugucc

SEQ ID NO: 1122866 - RNA, 19 nt, Artificial Sequence
  Description of Artificial Sequence: Synthetic oligonucleotide
  Sense strand starting at position 3507 of SEQ ID NO: 916003
aguucuuucuucgucauuu

SEQ ID NO: 1122867 - RNA, 19 nt, Artificial Sequence
  Description of Artificial Sequence: Synthetic oligonucleotide
  Antisense strand to SEQ ID NO: 1122866
aaaugacgaagaaagaacu

SEQ ID NO: 1122868 - RNA, 19 nt, Artificial Sequence
  Description of Artificial Sequence: Synthetic oligonucleotide
  Sense strand starting at position 3518 of SEQ ID NO: 916003
cgucauuuccuuuaccuuu

SEQ ID NO: 1122869 - RNA, 19 nt, Artificial Sequence
  Description of Artificial Sequence: Synthetic oligonucleotide
  Antisense strand to SEQ ID NO: 1122868
aaagguaaaggaaaugacg

SEQ ID NO: 1122870 - RNA, 19 nt, Artificial Sequence
  Description of Artificial Sequence: Synthetic oligonucleotide
  Sense strand starting at position 3535 of SEQ ID NO: 916003
uuuauauugucagcauuuc

SEQ ID NO: 1122871 - RNA, 19 nt, Artificial Sequence
  Description of Artificial Sequence: Synthetic oligonucleotide
  Antisense strand to SEQ ID NO: 1122870
gaaaugcugacaauauaaa

SEQ ID NO: 1122872 - RNA, 19 nt, Artificial Sequence
  Description of Artificial Sequence: Synthetic oligonucleotide
  Sense strand starting at position 3549 of SEQ ID NO: 916003
auuuccaugucagauuaua

SEQ ID NO: 1122873 - RNA, 19 nt, Artificial Sequence
  Description of Artificial Sequence: Synthetic oligonucleotide
  Antisense strand to SEQ ID NO: 1122872
uauaaucugacauggaaau

SEQ ID NO: 1122874 - RNA, 19 nt, Artificial Sequence
  Description of Artificial Sequence: Synthetic oligonucleotide
  Sense strand starting at position 3562 of SEQ ID NO: 916003
auuauaugcugucuuauag

SEQ ID NO: 1122875 - RNA, 19 nt, Artificial Sequence
  Description of Artificial Sequence: Synthetic oligonucleotide
  Antisense strand to SEQ ID NO: 1122874
cuauaagacagcauauaau

SEQ ID NO: 1122876 - RNA, 19 nt, Artificial Sequence
  Description of Artificial Sequence: Synthetic oligonucleotide
  Sense strand starting at position 3598 of SEQ ID NO: 916003
guucuaucugcugaagaua

SEQ ID NO: 1122877 - RNA, 19 nt, Artificial Sequence
  Description of Artificial Sequence: Synthetic oligonucleotide
  Antisense strand to SEQ ID NO: 1122876
uaucuucagcagauagaac

SEQ ID NO: 1122878 - RNA, 19 nt, Artificial Sequence
  Description of Artificial Sequence: Synthetic oligonucleotide
  Sense strand starting at position 16 of SEQ ID NO: 916004
auuccuguuauuugugagu

SEQ ID NO: 1122879 - RNA, 19 nt, Artificial Sequence
  Description of Artificial Sequence: Synthetic oligonucleotide
  Antisense strand to SEQ ID NO: 1122878
acucacaaauaacaggaau

SEQ ID NO: 1122880 - RNA, 19 nt, Artificial Sequence
  Description of Artificial Sequence: Synthetic oligonucleotide
  Sense strand starting at position 21 of SEQ ID NO: 916004
uguuauuugugaguuacuc

SEQ ID NO: 1122881 - RNA, 19 nt, Artificial Sequence
  Description of Artificial Sequence: Synthetic oligonucleotide
  Antisense strand to SEQ ID NO: 1122880
gaguaacucacaaauaaca

SEQ ID NO: 1122882 - RNA, 19 nt, Artificial Sequence
  Description of Artificial Sequence: Synthetic oligonucleotide
  Sense strand starting at position 64 of SEQ ID NO: 916004
gcacaagugaacugugaca

SEQ ID NO: 1122883 - RNA, 19 nt, Artificial Sequence
  Description of Artificial Sequence: Synthetic oligonucleotide
  Antisense strand to SEQ ID NO: 1122882
ugucacaguucacuugugc

SEQ ID NO: 1122884 - RNA, 19 nt, Artificial Sequence
  Description of Artificial Sequence: Synthetic oligonucleotide
  Sense strand starting at position 66 of SEQ ID NO: 916004
acaagugaacugugacacu

SEQ ID NO: 1122885 - RNA, 19 nt, Artificial Sequence
  Description of Artificial Sequence: Synthetic oligonucleotide
  Antisense strand to SEQ ID NO: 1122884
agugucacaguucacuugu

SEQ ID NO: 1122886 - RNA, 19 nt, Artificial Sequence
  Description of Artificial Sequence: Synthetic oligonucleotide
  Sense strand starting at position 79 of SEQ ID NO: 916004
gacacuaugugucuggaag

SEQ ID NO: 1122887 - RNA, 19 nt, Artificial Sequence
  Description of Artificial Sequence: Synthetic oligonucleotide
  Antisense strand to SEQ ID NO: 1122886
cuuccagacacauaguguc

SEQ ID NO: 1122888 - RNA, 19 nt, Artificial Sequence
  Description of Artificial Sequence: Synthetic oligonucleotide
  Sense strand starting at position 80 of SEQ ID NO: 916004
acacuaugugucuggaaga

SEQ ID NO: 1122889 - RNA, 19 nt, Artificial Sequence
  Description of Artificial Sequence: Synthetic oligonucleotide
  Antisense strand to SEQ ID NO: 1122888
ucuuccagacacauagugu

SEQ ID NO: 1122890 - RNA, 19 nt, Artificial Sequence
  Description of Artificial Sequence: Synthetic oligonucleotide
  Sense strand starting at position 85 of SEQ ID NO: 916004
augugucuggaagauguga

SEQ ID NO: 1122891 - RNA, 19 nt, Artificial Sequence
  Description of Artificial Sequence: Synthetic oligonucleotide
  Antisense strand to SEQ ID NO: 1122890
ucacaucuuccagacacau

SEQ ID NO: 1122892 - RNA, 19 nt, Artificial Sequence
  Description of Artificial Sequence: Synthetic oligonucleotide
  Sense strand starting at position 146 of SEQ ID NO: 916004
auacuaguaccagauuagu

SEQ ID NO: 1122893 - RNA, 19 nt, Artificial Sequence
  Description of Artificial Sequence: Synthetic oligonucleotide
  Antisense strand to SEQ ID NO: 1122892
acuaaucugguacuaguau

SEQ ID NO: 1122894 - RNA, 19 nt, Artificial Sequence
  Description of Artificial Sequence: Synthetic oligonucleotide
  Sense strand starting at position 149 of SEQ ID NO: 916004
cuaguaccagauuagugau

SEQ ID NO: 1122895 - RNA, 19 nt, Artificial Sequence
  Description of Artificial Sequence: Synthetic oligonucleotide
  Antisense strand to SEQ ID NO: 1122894
aucacuaaucugguacuag

SEQ ID NO: 1122896 - RNA, 19 nt, Artificial Sequence
  Description of Artificial Sequence: Synthetic oligonucleotide
  Sense strand starting at position 207 of SEQ ID NO: 916004
uguaauaaguacuucuaag

SEQ ID NO: 1122897 - RNA, 19 nt, Artificial Sequence
  Description of Artificial Sequence: Synthetic oligonucleotide
  Antisense strand to SEQ ID NO: 1122896
cuuagaaguacuuauuaca

SEQ ID NO: 1122898 - RNA, 19 nt, Artificial Sequence
  Description of Artificial Sequence: Synthetic oligonucleotide
  Sense strand starting at position 293 of SEQ ID NO: 916004
cuuggaagaccauguuagu

SEQ ID NO: 1122899 - RNA, 19 nt, Artificial Sequence
  Description of Artificial Sequence: Synthetic oligonucleotide
  Antisense strand to SEQ ID NO: 1122898
acuaacauggucuuccaag

SEQ ID NO: 1122900 - RNA, 19 nt, Artificial Sequence
  Description of Artificial Sequence: Synthetic oligonucleotide
  Sense strand starting at position 299 of SEQ ID NO: 916004
agaccauguuaguuaucag

SEQ ID NO: 1122901 - RNA, 19 nt, Artificial Sequence
  Description of Artificial Sequence: Synthetic oligonucleotide
  Antisense strand to SEQ ID NO: 1122900
cugauaacuaacauggucu

SEQ ID NO: 1122902 - RNA, 19 nt, Artificial Sequence
  Description of Artificial Sequence: Synthetic oligonucleotide
  Sense strand starting at position 302 of SEQ ID NO: 916004
ccauguuaguuaucagaca

SEQ ID NO: 1122903 - RNA, 19 nt, Artificial Sequence
  Description of Artificial Sequence: Synthetic oligonucleotide
  Antisense strand to SEQ ID NO: 1122902
ugucugauaacuaacaugg

SEQ ID NO: 1122904 - RNA, 19 nt, Artificial Sequence
  Description of Artificial Sequence: Synthetic oligonucleotide
  Sense strand starting at position 489 of SEQ ID NO: 916004
cuaggacugaauugaguua

SEQ ID NO: 1122905 - RNA, 19 nt, Artificial Sequence
  Description of Artificial Sequence: Synthetic oligonucleotide
  Antisense strand to SEQ ID NO: 1122904
uaacucaauucaguccuag

SEQ ID NO: 1122906 - RNA, 19 nt, Artificial Sequence
  Description of Artificial Sequence: Synthetic oligonucleotide
  Sense strand starting at position 715 of SEQ ID NO: 916004
acaaaugucuuggucuuua

SEQ ID NO: 1122907 - RNA, 19 nt, Artificial Sequence
  Description of Artificial Sequence: Synthetic oligonucleotide
  Antisense strand to SEQ ID NO: 1122906
uaaagaccaagacauuugu

SEQ ID NO: 1122908 - RNA, 19 nt, Artificial Sequence
  Description of Artificial Sequence: Synthetic oligonucleotide
  Sense strand starting at position 720 of SEQ ID NO: 916004
ugucuuggucuuuaugaug

SEQ ID NO: 1122909 - RNA, 19 nt, Artificial Sequence
  Description of Artificial Sequence: Synthetic oligonucleotide
  Antisense strand to SEQ ID NO: 1122908
caucauaaagaccaagaca

SEQ ID NO: 1122910 - RNA, 19 nt, Artificial Sequence
  Description of Artificial Sequence: Synthetic oligonucleotide
  Sense strand starting at position 731 of SEQ ID NO: 916004
uuaugauggucaccaccau

SEQ ID NO: 1122911 - RNA, 19 nt, Artificial Sequence
  Description of Artificial Sequence: Synthetic oligonucleotide
  Antisense strand to SEQ ID NO: 1122910
augguggugaccaucauaa

SEQ ID NO: 1122912 - RNA, 19 nt, Artificial Sequence
  Description of Artificial Sequence: Synthetic oligonucleotide
  Sense strand starting at position 2015 of SEQ ID NO: 916004
agaagcuuuccuugugaag

SEQ ID NO: 1122913 - RNA, 19 nt, Artificial Sequence
  Description of Artificial Sequence: Synthetic oligonucleotide
  Antisense strand to SEQ ID NO: 1122912
cuucacaaggaaagcuucu

SEQ ID NO: 1122914 - RNA, 19 nt, Artificial Sequence
  Description of Artificial Sequence: Synthetic oligonucleotide
  Sense strand starting at position 2263 of SEQ ID NO: 916004
caggaaucacaaugguguu

SEQ ID NO: 1122915 - RNA, 19 nt, Artificial Sequence
  Description of Artificial Sequence: Synthetic oligonucleotide
  Antisense strand to SEQ ID NO: 1122914
aacaccauugugauuccug

SEQ ID NO: 1122916 - RNA, 19 nt, Artificial Sequence
  Description of Artificial Sequence: Synthetic oligonucleotide
  Sense strand starting at position 2436 of SEQ ID NO: 916004
caaauauuguggguuugga

SEQ ID NO: 1122917 - RNA, 19 nt, Artificial Sequence
  Description of Artificial Sequence: Synthetic oligonucleotide
  Antisense strand to SEQ ID NO: 1122916
uccaaacccacaauauuug

SEQ ID NO: 1122918 - RNA, 19 nt, Artificial Sequence
  Description of Artificial Sequence: Synthetic oligonucleotide
  Sense strand starting at position 2607 of SEQ ID NO: 916004
gugguaacagcugaugagu

SEQ ID NO: 1122919 - RNA, 19 nt, Artificial Sequence
  Description of Artificial Sequence: Synthetic oligonucleotide
  Antisense strand to SEQ ID NO: 1122918
acucaucagcuguuaccac

SEQ ID NO: 1122920 - RNA, 19 nt, Artificial Sequence
  Description of Artificial Sequence: Synthetic oligonucleotide
  Sense strand starting at position 2720 of SEQ ID NO: 916004
ggcucuacaggucaugaaa

SEQ ID NO: 1122921 - RNA, 19 nt, Artificial Sequence
  Description of Artificial Sequence: Synthetic oligonucleotide
  Antisense strand to SEQ ID NO: 1122920
uuucaugaccuguagagcc

SEQ ID NO: 1122922 - RNA, 19 nt, Artificial Sequence
  Description of Artificial Sequence: Synthetic oligonucleotide
  Sense strand starting at position 2748 of SEQ ID NO: 916004
ugagauauccauugagagc

SEQ ID NO: 1122923 - RNA, 19 nt, Artificial Sequence
  Description of Artificial Sequence: Synthetic oligonucleotide
  Antisense strand to SEQ ID NO: 1122922
gcucucaauggauaucuca

SEQ ID NO: 1122924 - RNA, 19 nt, Artificial Sequence
  Description of Artificial Sequence: Synthetic oligonucleotide
  Sense strand starting at position 2941 of SEQ ID NO: 916004
ugagcuuugcuggauuaag

SEQ ID NO: 1122925 - RNA, 19 nt, Artificial Sequence
  Description of Artificial Sequence: Synthetic oligonucleotide
  Antisense strand to SEQ ID NO: 1122924
cuuaauccagcaaagcuca

SEQ ID NO: 1122926 - RNA, 19 nt, Artificial Sequence
  Description of Artificial Sequence: Synthetic oligonucleotide
  Sense strand starting at position 3005 of SEQ ID NO: 916004
aucugaaacuuaguaguuu

SEQ ID NO: 1122927 - RNA, 19 nt, Artificial Sequence
  Description of Artificial Sequence: Synthetic oligonucleotide
  Antisense strand to SEQ ID NO: 1122926
aaacuacuaaguuucagau

SEQ ID NO: 1122928 - RNA, 19 nt, Artificial Sequence
  Description of Artificial Sequence: Synthetic oligonucleotide
  Sense strand starting at position 3119 of SEQ ID NO: 916004
guaguuuaucuaugauaag

SEQ ID NO: 1122929 - RNA, 19 nt, Artificial Sequence
  Description of Artificial Sequence: Synthetic oligonucleotide
  Antisense strand to SEQ ID NO: 1122928
cuuaucauagauaaacuac

SEQ ID NO: 1122930 - RNA, 19 nt, Artificial Sequence
  Description of Artificial Sequence: Synthetic oligonucleotide
  Sense strand starting at position 3176 of SEQ ID NO: 916004
auacacucaccaugguauu

SEQ ID NO: 1122931 - RNA, 19 nt, Artificial Sequence
  Description of Artificial Sequence: Synthetic oligonucleotide
  Antisense strand to SEQ ID NO: 1122930
aauaccauggugaguguau

SEQ ID NO: 1122932 - RNA, 19 nt, Artificial Sequence
  Description of Artificial Sequence: Synthetic oligonucleotide
  Sense strand starting at position 3237 of SEQ ID NO: 916004
ugggcauuggacuaaugua

SEQ ID NO: 1122933 - RNA, 19 nt, Artificial Sequence
  Description of Artificial Sequence: Synthetic oligonucleotide
  Antisense strand to SEQ ID NO: 1122932
uacauuaguccaaugccca

SEQ ID NO: 1122934 - RNA, 19 nt, Artificial Sequence
  Description of Artificial Sequence: Synthetic oligonucleotide
  Sense strand starting at position 3270 of SEQ ID NO: 916004
aucagucaugguuacuauu

SEQ ID NO: 1122935 - RNA, 19 nt, Artificial Sequence
  Description of Artificial Sequence: Synthetic oligonucleotide
  Antisense strand to SEQ ID NO: 1122934
aauaguaaccaugacugau

SEQ ID NO: 1122936 - RNA, 19 nt, Artificial Sequence
  Description of Artificial Sequence: Synthetic oligonucleotide
  Sense strand starting at position 3312 of SEQ ID NO: 916004
cuguguucgguggcauauu

SEQ ID NO: 1122937 - RNA, 19 nt, Artificial Sequence
  Description of Artificial Sequence: Synthetic oligonucleotide
  Antisense strand to SEQ ID NO: 1122936
aauaugccaccgaacacag

SEQ ID NO: 1122938 - RNA, 19 nt, Artificial Sequence
  Description of Artificial Sequence: Synthetic oligonucleotide
  Sense strand starting at position 3369 of SEQ ID NO: 916004
ggguuaauuugcucaccuu

SEQ ID NO: 1122939 - RNA, 19 nt, Artificial Sequence
  Description of Artificial Sequence: Synthetic oligonucleotide
  Antisense strand to SEQ ID NO: 1122938
aaggugagcaaauuaaccc

SEQ ID NO: 1122940 - RNA, 19 nt, Artificial Sequence
  Description of Artificial Sequence: Synthetic oligonucleotide
  Sense strand starting at position 3466 of SEQ ID NO: 916004
caggcaauagauuguuaua

SEQ ID NO: 1122941 - RNA, 19 nt, Artificial Sequence
  Description of Artificial Sequence: Synthetic oligonucleotide
  Antisense strand to SEQ ID NO: 1122940
uauaacaaucuauugccug

SEQ ID NO: 1122942 - RNA, 19 nt, Artificial Sequence
  Description of Artificial Sequence: Synthetic oligonucleotide
  Sense strand starting at position 3468 of SEQ ID NO: 916004
ggcaauagauuguuauaau

SEQ ID NO: 1122943 - RNA, 19 nt, Artificial Sequence
  Description of Artificial Sequence: Synthetic oligonucleotide
  Antisense strand to SEQ ID NO: 1122942
auuauaacaaucuauugcc

SEQ ID NO: 1122944 - RNA, 19 nt, Artificial Sequence
  Description of Artificial Sequence: Synthetic oligonucleotide
  Sense strand starting at position 3692 of SEQ ID NO: 916004
aucaaauguuucuuuagga

SEQ ID NO: 1122945 - RNA, 19 nt, Artificial Sequence
  Description of Artificial Sequence: Synthetic oligonucleotide
  Antisense strand to SEQ ID NO: 1122944
uccuaaagaaacauuugau

SEQ ID NO: 1122946 - RNA, 19 nt, Artificial Sequence
  Description of Artificial Sequence: Synthetic oligonucleotide
  Sense strand starting at position 3723 of SEQ ID NO: 916004
caaugacuuucugugagaa

SEQ ID NO: 1122947 - RNA, 19 nt, Artificial Sequence
  Description of Artificial Sequence: Synthetic oligonucleotide
  Antisense strand to SEQ ID NO: 1122946
uucucacagaaagucauug

SEQ ID NO: 1122948 - RNA, 19 nt, Artificial Sequence
  Description of Artificial Sequence: Synthetic oligonucleotide
  Sense strand starting at position 3724 of SEQ ID NO: 916004
aaugacuuucugugagaau

SEQ ID NO: 1122949 - RNA, 19 nt, Artificial Sequence
  Description of Artificial Sequence: Synthetic oligonucleotide
  Antisense strand to SEQ ID NO: 1122948
auucucacagaaagucauu

SEQ ID NO: 1122950 - RNA, 19 nt, Artificial Sequence
  Description of Artificial Sequence: Synthetic oligonucleotide
  Sense strand starting at position 3916 of SEQ ID NO: 916004
uauccuauccuagguggaa

SEQ ID NO: 1122951 - RNA, 19 nt, Artificial Sequence
  Description of Artificial Sequence: Synthetic oligonucleotide
  Antisense strand to SEQ ID NO: 1122950
uuccaccuaggauaggaua

SEQ ID NO: 1122952 - RNA, 19 nt, Artificial Sequence
  Description of Artificial Sequence: Synthetic oligonucleotide
  Sense strand starting at position 3928 of SEQ ID NO: 916004
gguggaacuuaauccaaug

SEQ ID NO: 1122953 - RNA, 19 nt, Artificial Sequence
  Description of Artificial Sequence: Synthetic oligonucleotide
  Antisense strand to SEQ ID NO: 1122952
cauuggauuaaguuccacc

SEQ ID NO: 1122954 - RNA, 19 nt, Artificial Sequence
  Description of Artificial Sequence: Synthetic oligonucleotide
  Sense strand starting at position 3939 of SEQ ID NO: 916004
auccaaugucaguaauugu

SEQ ID NO: 1122955 - RNA, 19 nt, Artificial Sequence
  Description of Artificial Sequence: Synthetic oligonucleotide
  Antisense strand to SEQ ID NO: 1122954
acaauuacugacauuggau

SEQ ID NO: 1122956 - RNA, 19 nt, Artificial Sequence
  Description of Artificial Sequence: Synthetic oligonucleotide
  Sense strand starting at position 3963 of SEQ ID NO: 916004
aaagguuagucucuuaaga

SEQ ID NO: 1122957 - RNA, 19 nt, Artificial Sequence
  Description of Artificial Sequence: Synthetic oligonucleotide
  Antisense strand to SEQ ID NO: 1122956
ucuuaagagacuaaccuuu

SEQ ID NO: 1122958 - RNA, 19 nt, Artificial Sequence
  Description of Artificial Sequence: Synthetic oligonucleotide
  Sense strand starting at position 189 of SEQ ID NO: 916005
ccaugugaagaaugaaguu

SEQ ID NO: 1122959 - RNA, 19 nt, Artificial Sequence
  Description of Artificial Sequence: Synthetic oligonucleotide
  Antisense strand to SEQ ID NO: 1122958
aacuucauucuucacaugg

SEQ ID NO: 1122960 - RNA, 19 nt, Artificial Sequence
  Description of Artificial Sequence: Synthetic oligonucleotide
  Sense strand starting at position 270 of SEQ ID NO: 916005
ggcccucagagguaucaca

SEQ ID NO: 1122961 - RNA, 19 nt, Artificial Sequence
  Description of Artificial Sequence: Synthetic oligonucleotide
  Antisense strand to SEQ ID NO: 1122960
ugugauaccucugagggcc

SEQ ID NO: 1122962 - RNA, 19 nt, Artificial Sequence
  Description of Artificial Sequence: Synthetic oligonucleotide
  Sense strand starting at position 407 of SEQ ID NO: 916005
acaguagauuuggaguuga

SEQ ID NO: 1122963 - RNA, 19 nt, Artificial Sequence
  Description of Artificial Sequence: Synthetic oligonucleotide
  Antisense strand to SEQ ID NO: 1122962
ucaacuccaaaucuacugu

SEQ ID NO: 1122964 - RNA, 19 nt, Artificial Sequence
  Description of Artificial Sequence: Synthetic oligonucleotide
  Sense strand starting at position 422 of SEQ ID NO: 916005
uugaguggguuccuggaau

SEQ ID NO: 1122965 - RNA, 19 nt, Artificial Sequence
  Description of Artificial Sequence: Synthetic oligonucleotide
  Antisense strand to SEQ ID NO: 1122964
auuccaggaacccacucaa

SEQ ID NO: 1122966 - RNA, 19 nt, Artificial Sequence
  Description of Artificial Sequence: Synthetic oligonucleotide
  Sense strand starting at position 476 of SEQ ID NO: 916005
auaaauguuccaugggcca

SEQ ID NO: 1122967 - RNA, 19 nt, Artificial Sequence
  Description of Artificial Sequence: Synthetic oligonucleotide
  Antisense strand to SEQ ID NO: 1122966
uggcccauggaacauuuau

SEQ ID NO: 1122968 - RNA, 19 nt, Artificial Sequence
  Description of Artificial Sequence: Synthetic oligonucleotide
  Sense strand starting at position 1140 of SEQ ID NO: 916005
uuguuuaaucuguauccua

SEQ ID NO: 1122969 - RNA, 19 nt, Artificial Sequence
  Description of Artificial Sequence: Synthetic oligonucleotide
  Antisense strand to SEQ ID NO: 1122968
uaggauacagauuaaacaa

SEQ ID NO: 1122970 - RNA, 19 nt, Artificial Sequence
  Description of Artificial Sequence: Synthetic oligonucleotide
  Sense strand starting at position 1147 of SEQ ID NO: 916005
aucuguauccuauaagcag

SEQ ID NO: 1122971 - RNA, 19 nt, Artificial Sequence
  Description of Artificial Sequence: Synthetic oligonucleotide
  Antisense strand to SEQ ID NO: 1122970
cugcuuauaggauacagau

SEQ ID NO: 1122972 - RNA, 19 nt, Artificial Sequence
  Description of Artificial Sequence: Synthetic oligonucleotide
  Sense strand starting at position 1161 of SEQ ID NO: 916005
agcagaguugucgucaugu

SEQ ID NO: 1122973 - RNA, 19 nt, Artificial Sequence
  Description of Artificial Sequence: Synthetic oligonucleotide
  Antisense strand to SEQ ID NO: 1122972
acaugacgacaacucugcu

SEQ ID NO: 1122974 - RNA, 19 nt, Artificial Sequence
  Description of Artificial Sequence: Synthetic oligonucleotide
  Sense strand starting at position 1415 of SEQ ID NO: 916005
ugagaagccuuaucauauu

SEQ ID NO: 1122975 - RNA, 19 nt, Artificial Sequence
  Description of Artificial Sequence: Synthetic oligonucleotide
  Antisense strand to SEQ ID NO: 1122974
aauaugauaaggcuucuca

SEQ ID NO: 1122976 - RNA, 19 nt, Artificial Sequence
  Description of Artificial Sequence: Synthetic oligonucleotide
  Sense strand starting at position 1517 of SEQ ID NO: 916005
aguaaauugcauuagcuuu

SEQ ID NO: 1122977 - RNA, 19 nt, Artificial Sequence
  Description of Artificial Sequence: Synthetic oligonucleotide
  Antisense strand to SEQ ID NO: 1122976
aaagcuaaugcaauuuacu

SEQ ID NO: 1122978 - RNA, 19 nt, Artificial Sequence
  Description of Artificial Sequence: Synthetic oligonucleotide
  Sense strand starting at position 1536 of SEQ ID NO: 916005
uaauuaacugcuggagaag

SEQ ID NO: 1122979 - RNA, 19 nt, Artificial Sequence
  Description of Artificial Sequence: Synthetic oligonucleotide
  Antisense strand to SEQ ID NO: 1122978
cuucuccagcaguuaauua

SEQ ID NO: 1122980 - RNA, 19 nt, Artificial Sequence
  Description of Artificial Sequence: Synthetic oligonucleotide
  Sense strand starting at position 1598 of SEQ ID NO: 916005
gaacgucuaucacuacuga

SEQ ID NO: 1122981 - RNA, 19 nt, Artificial Sequence
  Description of Artificial Sequence: Synthetic oligonucleotide
  Antisense strand to SEQ ID NO: 1122980
ucaguagugauagacguuc

SEQ ID NO: 1122982 - RNA, 19 nt, Artificial Sequence
  Description of Artificial Sequence: Synthetic oligonucleotide
  Sense strand starting at position 1611 of SEQ ID NO: 916005
uacugaaaguuacuagguu

SEQ ID NO: 1122983 - RNA, 19 nt, Artificial Sequence
  Description of Artificial Sequence: Synthetic oligonucleotide
  Antisense strand to SEQ ID NO: 1122982
aaccuaguaacuuucagua

SEQ ID NO: 1122984 - RNA, 19 nt, Artificial Sequence
  Description of Artificial Sequence: Synthetic oligonucleotide
  Sense strand starting at position 1615 of SEQ ID NO: 916005
gaaaguuacuagguuggga

SEQ ID NO: 1122985 - RNA, 19 nt, Artificial Sequence
  Description of Artificial Sequence: Synthetic oligonucleotide
  Antisense strand to SEQ ID NO: 1122984
ucccaaccuaguaacuuuc

SEQ ID NO: 1122986 - RNA, 19 nt, Artificial Sequence
  Description of Artificial Sequence: Synthetic oligonucleotide
  Sense strand starting at position 1700 of SEQ ID NO: 916005
ugcagaaacugguuuggga

SEQ ID NO: 1122987 - RNA, 19 nt, Artificial Sequence
  Description of Artificial Sequence: Synthetic oligonucleotide
  Antisense strand to SEQ ID NO: 1122986
ucccaaaccaguuucugca

SEQ ID NO: 1122988 - RNA, 19 nt, Artificial Sequence
  Description of Artificial Sequence: Synthetic oligonucleotide
  Sense strand starting at position 1830 of SEQ ID NO: 916005
acuggcucuugauuacauu

SEQ ID NO: 1122989 - RNA, 19 nt, Artificial Sequence
  Description of Artificial Sequence: Synthetic oligonucleotide
  Antisense strand to SEQ ID NO: 1122988
aauguaaucaagagccagu

SEQ ID NO: 1122990 - RNA, 19 nt, Artificial Sequence
  Description of Artificial Sequence: Synthetic oligonucleotide
  Sense strand starting at position 1831 of SEQ ID NO: 916005
cuggcucuugauuacauua

SEQ ID NO: 1122991 - RNA, 19 nt, Artificial Sequence
  Description of Artificial Sequence: Synthetic oligonucleotide
  Antisense strand to SEQ ID NO: 1122990
uaauguaaucaagagccag

SEQ ID NO: 1122992 - RNA, 19 nt, Artificial Sequence
  Description of Artificial Sequence: Synthetic oligonucleotide
  Sense strand starting at position 1907 of SEQ ID NO: 916005
cuugcucaccauuaagagu

SEQ ID NO: 1122993 - RNA, 19 nt, Artificial Sequence
  Description of Artificial Sequence: Synthetic oligonucleotide
  Antisense strand to SEQ ID NO: 1122992
acucuuaauggugagcaag

SEQ ID NO: 1122994 - RNA, 19 nt, Artificial Sequence
  Description of Artificial Sequence: Synthetic oligonucleotide
  Sense strand starting at position 1957 of SEQ ID NO: 916005
agcagaaauuguguggaca

SEQ ID NO: 1122995 - RNA, 19 nt, Artificial Sequence
  Description of Artificial Sequence: Synthetic oligonucleotide
  Antisense strand to SEQ ID NO: 1122994
uguccacacaauuucugcu

SEQ ID NO: 1122996 - RNA, 19 nt, Artificial Sequence
  Description of Artificial Sequence: Synthetic oligonucleotide
  Sense strand starting at position 1958 of SEQ ID NO: 916005
gcagaaauuguguggacaa

SEQ ID NO: 1122997 - RNA, 19 nt, Artificial Sequence
  Description of Artificial Sequence: Synthetic oligonucleotide
  Antisense strand to SEQ ID NO: 1122996
uuguccacacaauuucugc

SEQ ID NO: 1122998 - RNA, 19 nt, Artificial Sequence
  Description of Artificial Sequence: Synthetic oligonucleotide
  Sense strand starting at position 2227 of SEQ ID NO: 916005
gggucuggaggcgaaauau

SEQ ID NO: 1122999 - RNA, 19 nt, Artificial Sequence
  Description of Artificial Sequence: Synthetic oligonucleotide
  Antisense strand to SEQ ID NO: 1122998
auauuucgccuccagaccc

SEQ ID NO: 1123000 - RNA, 19 nt, Artificial Sequence
  Description of Artificial Sequence: Synthetic oligonucleotide
  Sense strand starting at position 2303 of SEQ ID NO: 916005
acgguuuauuuccuagagu

SEQ ID NO: 1123001 - RNA, 19 nt, Artificial Sequence
  Description of Artificial Sequence: Synthetic oligonucleotide
  Antisense strand to SEQ ID NO: 1123000
acucuaggaaauaaaccgu

SEQ ID NO: 1123002 - RNA, 19 nt, Artificial Sequence
  Description of Artificial Sequence: Synthetic oligonucleotide
  Sense strand starting at position 2320 of SEQ ID NO: 916005
guguguugggucuuucugu

SEQ ID NO: 1123003 - RNA, 19 nt, Artificial Sequence
  Description of Artificial Sequence: Synthetic oligonucleotide
  Antisense strand to SEQ ID NO: 1123002
acagaaagacccaacacac

SEQ ID NO: 1123004 - RNA, 19 nt, Artificial Sequence
  Description of Artificial Sequence: Synthetic oligonucleotide
  Sense strand starting at position 2341 of SEQ ID NO: 916005
ggguuucgagaaggaaaca

SEQ ID NO: 1123005 - RNA, 19 nt, Artificial Sequence
  Description of Artificial Sequence: Synthetic oligonucleotide
  Antisense strand to SEQ ID NO: 1123004
uguuuccuucucgaaaccc

SEQ ID NO: 1123006 - RNA, 19 nt, Artificial Sequence
  Description of Artificial Sequence: Synthetic oligonucleotide
  Sense strand starting at position 2460 of SEQ ID NO: 916005
gaaauaaguuggcuccaga

SEQ ID NO: 1123007 - RNA, 19 nt, Artificial Sequence
  Description of Artificial Sequence: Synthetic oligonucleotide
  Antisense strand to SEQ ID NO: 1123006
ucuggagccaacuuauuuc

SEQ ID NO: 1123008 - RNA, 19 nt, Artificial Sequence
  Description of Artificial Sequence: Synthetic oligonucleotide
  Sense strand starting at position 2565 of SEQ ID NO: 916005
cuaagagcgcccuaaacaa

SEQ ID NO: 1123009 - RNA, 19 nt, Artificial Sequence
  Description of Artificial Sequence: Synthetic oligonucleotide
  Antisense strand to SEQ ID NO: 1123008
uuguuuagggcgcucuuag

SEQ ID NO: 1123010 - RNA, 19 nt, Artificial Sequence
  Description of Artificial Sequence: Synthetic oligonucleotide
  Sense strand starting at position 2572 of SEQ ID NO: 916005
cgcccuaaacaagaauuga

SEQ ID NO: 1123011 - RNA, 19 nt, Artificial Sequence
  Description of Artificial Sequence: Synthetic oligonucleotide
  Antisense strand to SEQ ID NO: 1123010
ucaauucuuguuuagggcg

SEQ ID NO: 1123012 - RNA, 19 nt, Artificial Sequence
  Description of Artificial Sequence: Synthetic oligonucleotide
  Sense strand starting at position 2792 of SEQ ID NO: 916005
gacugaguucucuguaauu

SEQ ID NO: 1123013 - RNA, 19 nt, Artificial Sequence
  Description of Artificial Sequence: Synthetic oligonucleotide
  Antisense strand to SEQ ID NO: 1123012
aauuacagagaacucaguc

SEQ ID NO: 1123014 - RNA, 19 nt, Artificial Sequence
  Description of Artificial Sequence: Synthetic oligonucleotide
  Sense strand starting at position 2794 of SEQ ID NO: 916005
cugaguucucuguaauugu

SEQ ID NO: 1123015 - RNA, 19 nt, Artificial Sequence
  Description of Artificial Sequence: Synthetic oligonucleotide
  Antisense strand to SEQ ID NO: 1123014
acaauuacagagaacucag

SEQ ID NO: 1123016 - RNA, 19 nt, Artificial Sequence
  Description of Artificial Sequence: Synthetic oligonucleotide
  Sense strand starting at position 2920 of SEQ ID NO: 916005
caguguuauugacuacaug

SEQ ID NO: 1123017 - RNA, 19 nt, Artificial Sequence
  Description of Artificial Sequence: Synthetic oligonucleotide
  Antisense strand to SEQ ID NO: 1123016
cauguagucaauaacacug

SEQ ID NO: 1123018 - RNA, 19 nt, Artificial Sequence
  Description of Artificial Sequence: Synthetic oligonucleotide
  Sense strand starting at position 2923 of SEQ ID NO: 916005
uguuauugacuacaugcau

SEQ ID NO: 1123019 - RNA, 19 nt, Artificial Sequence
  Description of Artificial Sequence: Synthetic oligonucleotide
  Antisense strand to SEQ ID NO: 1123018
augcauguagucaauaaca

SEQ ID NO: 1123020 - RNA, 19 nt, Artificial Sequence
  Description of Artificial Sequence: Synthetic oligonucleotide
  Sense strand starting at position 2958 of SEQ ID NO: 916005
guaggacuaagcuagucuu

SEQ ID NO: 1123021 - RNA, 19 nt, Artificial Sequence
  Description of Artificial Sequence: Synthetic oligonucleotide
  Antisense strand to SEQ ID NO: 1123020
aagacuagcuuaguccuac

SEQ ID NO: 1123022 - RNA, 19 nt, Artificial Sequence
  Description of Artificial Sequence: Synthetic oligonucleotide
  Sense strand starting at position 2972 of SEQ ID NO: 916005
gucuuuguggguuaaagug

SEQ ID NO: 1123023 - RNA, 19 nt, Artificial Sequence
  Description of Artificial Sequence: Synthetic oligonucleotide
  Antisense strand to SEQ ID NO: 1123022
cacuuuaacccacaaagac

SEQ ID NO: 1123024 - RNA, 19 nt, Artificial Sequence
  Description of Artificial Sequence: Synthetic oligonucleotide
  Sense strand starting at position 2997 of SEQ ID NO: 916005
ucccuauuguaaccuguaa

SEQ ID NO: 1123025 - RNA, 19 nt, Artificial Sequence
  Description of Artificial Sequence: Synthetic oligonucleotide
  Antisense strand to SEQ ID NO: 1123024
uuacagguuacaauaggga

SEQ ID NO: 1123026 - RNA, 19 nt, Artificial Sequence
  Description of Artificial Sequence: Synthetic oligonucleotide
  Sense strand starting at position 3015 of SEQ ID NO: 916005
acuauuauagguuguguaa

SEQ ID NO: 1123027 - RNA, 19 nt, Artificial Sequence
  Description of Artificial Sequence: Synthetic oligonucleotide
  Antisense strand to SEQ ID NO: 1123026
uuacacaaccuauaauagu

SEQ ID NO: 1123028 - RNA, 19 nt, Artificial Sequence
  Description of Artificial Sequence: Synthetic oligonucleotide
  Sense strand starting at position 3018 of SEQ ID NO: 916005
auuauagguuguguaauag

SEQ ID NO: 1123029 - RNA, 19 nt, Artificial Sequence
  Description of Artificial Sequence: Synthetic oligonucleotide
  Antisense strand to SEQ ID NO: 1123028
cuauuacacaaccuauaau

SEQ ID NO: 1123030 - RNA, 19 nt, Artificial Sequence
  Description of Artificial Sequence: Synthetic oligonucleotide
  Sense strand starting at position 3119 of SEQ ID NO: 916005
accauagcuguuugauaug

SEQ ID NO: 1123031 - RNA, 19 nt, Artificial Sequence
  Description of Artificial Sequence: Synthetic oligonucleotide
  Antisense strand to SEQ ID NO: 1123030
cauaucaaacagcuauggu

SEQ ID NO: 1123032 - RNA, 19 nt, Artificial Sequence
  Description of Artificial Sequence: Synthetic oligonucleotide
  Sense strand starting at position 3124 of SEQ ID NO: 916005
agcuguuugauaugaaagu

SEQ ID NO: 1123033 - RNA, 19 nt, Artificial Sequence
  Description of Artificial Sequence: Synthetic oligonucleotide
  Antisense strand to SEQ ID NO: 1123032
acuuucauaucaaacagcu

SEQ ID NO: 1123034 - RNA, 19 nt, Artificial Sequence
  Description of Artificial Sequence: Synthetic oligonucleotide
  Sense strand starting at position 3374 of SEQ ID NO: 916005
uuuccauuagccuggaacu

SEQ ID NO: 1123035 - RNA, 19 nt, Artificial Sequence
  Description of Artificial Sequence: Synthetic oligonucleotide
  Antisense strand to SEQ ID NO: 1123034
aguuccaggcuaauggaaa

SEQ ID NO: 1123036 - RNA, 19 nt, Artificial Sequence
  Description of Artificial Sequence: Synthetic oligonucleotide
  Sense strand starting at position 3646 of SEQ ID NO: 916005
cuauuucucuuaguggcua

SEQ ID NO: 1123037 - RNA, 19 nt, Artificial Sequence
  Description of Artificial Sequence: Synthetic oligonucleotide
  Antisense strand to SEQ ID NO: 1123036
uagccacuaagagaaauag

SEQ ID NO: 1123038 - RNA, 19 nt, Artificial Sequence
  Description of Artificial Sequence: Synthetic oligonucleotide
  Sense strand starting at position 369 of SEQ ID NO: 916006
agacaaguagugugguaug

SEQ ID NO: 1123039 - RNA, 19 nt, Artificial Sequence
  Description of Artificial Sequence: Synthetic oligonucleotide
  Antisense strand to SEQ ID NO: 1123038
cauaccacacuacuugucu

SEQ ID NO: 1123040 - RNA, 19 nt, Artificial Sequence
  Description of Artificial Sequence: Synthetic oligonucleotide
  Sense strand starting at position 384 of SEQ ID NO: 916006
uauguuauuccuggcuaug

SEQ ID NO: 1123041 - RNA, 19 nt, Artificial Sequence
  Description of Artificial Sequence: Synthetic oligonucleotide
  Antisense strand to SEQ ID NO: 1123040
cauagccaggaauaacaua

SEQ ID NO: 1123042 - RNA, 19 nt, Artificial Sequence
  Description of Artificial Sequence: Synthetic oligonucleotide
  Sense strand starting at position 387 of SEQ ID NO: 916006
guuauuccuggcuauguuu

SEQ ID NO: 1123043 - RNA, 19 nt, Artificial Sequence
  Description of Artificial Sequence: Synthetic oligonucleotide
  Antisense strand to SEQ ID NO: 1123042
aaacauagccaggaauaac

SEQ ID NO: 1123044 - RNA, 19 nt, Artificial Sequence
  Description of Artificial Sequence: Synthetic oligonucleotide
  Sense strand starting at position 398 of SEQ ID NO: 916006
cuauguuuguaacuguuua

SEQ ID NO: 1123045 - RNA, 19 nt, Artificial Sequence
  Description of Artificial Sequence: Synthetic oligonucleotide
  Antisense strand to SEQ ID NO: 1123044
uaaacaguuacaaacauag

SEQ ID NO: 1123046 - RNA, 19 nt, Artificial Sequence
  Description of Artificial Sequence: Synthetic oligonucleotide
  Sense strand starting at position 402 of SEQ ID NO: 916006
guuuguaacuguuuacaag

SEQ ID NO: 1123047 - RNA, 19 nt, Artificial Sequence
  Description of Artificial Sequence: Synthetic oligonucleotide
  Antisense strand to SEQ ID NO: 1123046
cuuguaaacaguuacaaac

SEQ ID NO: 1123048 - RNA, 19 nt, Artificial Sequence
  Description of Artificial Sequence: Synthetic oligonucleotide
  Sense strand starting at position 821 of SEQ ID NO: 916006
aguaauucccaagaugcaa

SEQ ID NO: 1123049 - RNA, 19 nt, Artificial Sequence
  Description of Artificial Sequence: Synthetic oligonucleotide
  Antisense strand to SEQ ID NO: 1123048
uugcaucuugggaauuacu

SEQ ID NO: 1123050 - RNA, 19 nt, Artificial Sequence
  Description of Artificial Sequence: Synthetic oligonucleotide
  Sense strand starting at position 845 of SEQ ID NO: 916006
ccaaauaguuaagaaggua

SEQ ID NO: 1123051 - RNA, 19 nt, Artificial Sequence
  Description of Artificial Sequence: Synthetic oligonucleotide
  Antisense strand to SEQ ID NO: 1123050
uaccuucuuaacuauuugg

SEQ ID NO: 1123052 - RNA, 19 nt, Artificial Sequence
  Description of Artificial Sequence: Synthetic oligonucleotide
  Sense strand starting at position 1016 of SEQ ID NO: 916006
uggaaauugaguuaagcuc

SEQ ID NO: 1123053 - RNA, 19 nt, Artificial Sequence
  Description of Artificial Sequence: Synthetic oligonucleotide
  Antisense strand to SEQ ID NO: 1123052
gagcuuaacucaauuucca

SEQ ID NO: 1123054 - RNA, 19 nt, Artificial Sequence
  Description of Artificial Sequence: Synthetic oligonucleotide
  Sense strand starting at position 1022 of SEQ ID NO: 916006
uugaguuaagcucagaaau

SEQ ID NO: 1123055 - RNA, 19 nt, Artificial Sequence
  Description of Artificial Sequence: Synthetic oligonucleotide
  Antisense strand to SEQ ID NO: 1123054
auuucugagcuuaacucaa

SEQ ID NO: 1123056 - RNA, 19 nt, Artificial Sequence
  Description of Artificial Sequence: Synthetic oligonucleotide
  Sense strand starting at position 1087 of SEQ ID NO: 916006
ccauguuguuguuccauaa

SEQ ID NO: 1123057 - RNA, 19 nt, Artificial Sequence
  Description of Artificial Sequence: Synthetic oligonucleotide
  Antisense strand to SEQ ID NO: 1123056
uuauggaacaacaacaugg

SEQ ID NO: 1123058 - RNA, 19 nt, Artificial Sequence
  Description of Artificial Sequence: Synthetic oligonucleotide
  Sense strand starting at position 1091 of SEQ ID NO: 916006
guuguuguuccauaaucau

SEQ ID NO: 1123059 - RNA, 19 nt, Artificial Sequence
  Description of Artificial Sequence: Synthetic oligonucleotide
  Antisense strand to SEQ ID NO: 1123058
augauuauggaacaacaac

SEQ ID NO: 1123060 - RNA, 19 nt, Artificial Sequence
  Description of Artificial Sequence: Synthetic oligonucleotide
  Sense strand starting at position 1134 of SEQ ID NO: 916006
gcuaaauggugccuacagu

SEQ ID NO: 1123061 - RNA, 19 nt, Artificial Sequence
  Description of Artificial Sequence: Synthetic oligonucleotide
  Antisense strand to SEQ ID NO: 1123060
acuguaggcaccauuuagc

SEQ ID NO: 1123062 - RNA, 19 nt, Artificial Sequence
  Description of Artificial Sequence: Synthetic oligonucleotide
  Sense strand starting at position 1142 of SEQ ID NO: 916006
gugccuacagucuggauua

SEQ ID NO: 1123063 - RNA, 19 nt, Artificial Sequence
  Description of Artificial Sequence: Synthetic oligonucleotide
  Antisense strand to SEQ ID NO: 1123062
uaauccagacuguaggcac

SEQ ID NO: 1123064 - RNA, 19 nt, Artificial Sequence
  Description of Artificial Sequence: Synthetic oligonucleotide
  Sense strand starting at position 1144 of SEQ ID NO: 916006
gccuacagucuggauuaca

SEQ ID NO: 1123065 - RNA, 19 nt, Artificial Sequence
  Description of Artificial Sequence: Synthetic oligonucleotide
  Antisense strand to SEQ ID NO: 1123064
uguaauccagacuguaggc

SEQ ID NO: 1123066 - RNA, 19 nt, Artificial Sequence
  Description of Artificial Sequence: Synthetic oligonucleotide
  Sense strand starting at position 1292 of SEQ ID NO: 916006
cuaaccucagaaugauguu

SEQ ID NO: 1123067 - RNA, 19 nt, Artificial Sequence
  Description of Artificial Sequence: Synthetic oligonucleotide
  Antisense strand to SEQ ID NO: 1123066
aacaucauucugagguuag

SEQ ID NO: 1123068 - RNA, 19 nt, Artificial Sequence
  Description of Artificial Sequence: Synthetic oligonucleotide
  Sense strand starting at position 1459 of SEQ ID NO: 916006
gcccuauaagacuaaguuu

SEQ ID NO: 1123069 - RNA, 19 nt, Artificial Sequence
  Description of Artificial Sequence: Synthetic oligonucleotide
  Antisense strand to SEQ ID NO: 1123068
aaacuuagucuuauagggc

SEQ ID NO: 1123070 - RNA, 19 nt, Artificial Sequence
  Description of Artificial Sequence: Synthetic oligonucleotide
  Sense strand starting at position 1641 of SEQ ID NO: 916006
ugucauauuccagggagag

SEQ ID NO: 1123071 - RNA, 19 nt, Artificial Sequence
  Description of Artificial Sequence: Synthetic oligonucleotide
  Antisense strand to SEQ ID NO: 1123070
cucucccuggaauaugaca

SEQ ID NO: 1123072 - RNA, 19 nt, Artificial Sequence
  Description of Artificial Sequence: Synthetic oligonucleotide
  Sense strand starting at position 1642 of SEQ ID NO: 916006
gucauauuccagggagagu

SEQ ID NO: 1123073 - RNA, 19 nt, Artificial Sequence
  Description of Artificial Sequence: Synthetic oligonucleotide
  Antisense strand to SEQ ID NO: 1123072
acucucccuggaauaugac

SEQ ID NO: 1123074 - RNA, 19 nt, Artificial Sequence
  Description of Artificial Sequence: Synthetic oligonucleotide
  Sense strand starting at position 1745 of SEQ ID NO: 916006
guuagaugcaugcaguuaa

SEQ ID NO: 1123075 - RNA, 19 nt, Artificial Sequence
  Description of Artificial Sequence: Synthetic oligonucleotide
  Antisense strand to SEQ ID NO: 1123074
uuaacugcaugcaucuaac

SEQ ID NO: 1123076 - RNA, 19 nt, Artificial Sequence
  Description of Artificial Sequence: Synthetic oligonucleotide
  Sense strand starting at position 2207 of SEQ ID NO: 916006
gggaauuacuucuuagguu

SEQ ID NO: 1123077 - RNA, 19 nt, Artificial Sequence
  Description of Artificial Sequence: Synthetic oligonucleotide
  Antisense strand to SEQ ID NO: 1123076
aaccuaagaaguaauuccc

SEQ ID NO: 1123078 - RNA, 19 nt, Artificial Sequence
  Description of Artificial Sequence: Synthetic oligonucleotide
  Sense strand starting at position 2231 of SEQ ID NO: 916006
uccaguauuuaugcuuauu

SEQ ID NO: 1123079 - RNA, 19 nt, Artificial Sequence
  Description of Artificial Sequence: Synthetic oligonucleotide
  Antisense strand to SEQ ID NO: 1123078
aauaagcauaaauacugga

SEQ ID NO: 1123080 - RNA, 19 nt, Artificial Sequence
  Description of Artificial Sequence: Synthetic oligonucleotide
  Sense strand starting at position 2251 of SEQ ID NO: 916006
cucuaacagcacugugaau

SEQ ID NO: 1123081 - RNA, 19 nt, Artificial Sequence
  Description of Artificial Sequence: Synthetic oligonucleotide
  Antisense strand to SEQ ID NO: 1123080
auucacagugcuguuagag

SEQ ID NO: 1123082 - RNA, 19 nt, Artificial Sequence
  Description of Artificial Sequence: Synthetic oligonucleotide
  Sense strand starting at position 2253 of SEQ ID NO: 916006
cuaacagcacugugaauua

SEQ ID NO: 1123083 - RNA, 19 nt, Artificial Sequence
  Description of Artificial Sequence: Synthetic oligonucleotide
  Antisense strand to SEQ ID NO: 1123082
uaauucacagugcuguuag

SEQ ID NO: 1123084 - RNA, 19 nt, Artificial Sequence
  Description of Artificial Sequence: Synthetic oligonucleotide
  Sense strand starting at position 2417 of SEQ ID NO: 916006
ccgucugucacagaacagu

SEQ ID NO: 1123085 - RNA, 19 nt, Artificial Sequence
  Description of Artificial Sequence: Synthetic oligonucleotide
  Antisense strand to SEQ ID NO: 1123084
acuguucugugacagacgg

SEQ ID NO: 1123086 - RNA, 19 nt, Artificial Sequence
  Description of Artificial Sequence: Synthetic oligonucleotide
  Sense strand starting at position 2690 of SEQ ID NO: 916006
aggucacgugcucaagacu

SEQ ID NO: 1123087 - RNA, 19 nt, Artificial Sequence
  Description of Artificial Sequence: Synthetic oligonucleotide
  Antisense strand to SEQ ID NO: 1123086
agucuugagcacgugaccu

SEQ ID NO: 1123088 - RNA, 19 nt, Artificial Sequence
  Description of Artificial Sequence: Synthetic oligonucleotide
  Sense strand starting at position 2973 of SEQ ID NO: 916006
gagagcaguucugccacaa

SEQ ID NO: 1123089 - RNA, 19 nt, Artificial Sequence
  Description of Artificial Sequence: Synthetic oligonucleotide
  Antisense strand to SEQ ID NO: 1123088
uuguggcagaacugcucuc

SEQ ID NO: 1123090 - RNA, 19 nt, Artificial Sequence
  Description of Artificial Sequence: Synthetic oligonucleotide
  Sense strand starting at position 2977 of SEQ ID NO: 916006
gcaguucugccacaaccua

SEQ ID NO: 1123091 - RNA, 19 nt, Artificial Sequence
  Description of Artificial Sequence: Synthetic oligonucleotide
  Antisense strand to SEQ ID NO: 1123090
uagguuguggcagaacugc

SEQ ID NO: 1123092 - RNA, 19 nt, Artificial Sequence
  Description of Artificial Sequence: Synthetic oligonucleotide
  Sense strand starting at position 2992 of SEQ ID NO: 916006
ccuaaugguugauaaauuu

SEQ ID NO: 1123093 - RNA, 19 nt, Artificial Sequence
  Description of Artificial Sequence: Synthetic oligonucleotide
  Antisense strand to SEQ ID NO: 1123092
aaauuuaucaaccauuagg

SEQ ID NO: 1123094 - RNA, 19 nt, Artificial Sequence
  Description of Artificial Sequence: Synthetic oligonucleotide
  Sense strand starting at position 3014 of SEQ ID NO: 916006
ccacuuauagguugcucua

SEQ ID NO: 1123095 - RNA, 19 nt, Artificial Sequence
  Description of Artificial Sequence: Synthetic oligonucleotide
  Antisense strand to SEQ ID NO: 1123094
uagagcaaccuauaagugg

SEQ ID NO: 1123096 - RNA, 19 nt, Artificial Sequence
  Description of Artificial Sequence: Synthetic oligonucleotide
  Sense strand starting at position 3016 of SEQ ID NO: 916006
acuuauagguugcucuaua

SEQ ID NO: 1123097 - RNA, 19 nt, Artificial Sequence
  Description of Artificial Sequence: Synthetic oligonucleotide
  Antisense strand to SEQ ID NO: 1123096
uauagagcaaccuauaagu

SEQ ID NO: 1123098 - RNA, 19 nt, Artificial Sequence
  Description of Artificial Sequence: Synthetic oligonucleotide
  Sense strand starting at position 3017 of SEQ ID NO: 916006
cuuauagguugcucuauaa

SEQ ID NO: 1123099 - RNA, 19 nt, Artificial Sequence
  Description of Artificial Sequence: Synthetic oligonucleotide
  Antisense strand to SEQ ID NO: 1123098
uuauagagcaaccuauaag

SEQ ID NO: 1123100 - RNA, 19 nt, Artificial Sequence
  Description of Artificial Sequence: Synthetic oligonucleotide
  Sense strand starting at position 3021 of SEQ ID NO: 916006
uagguugcucuauaauguu

SEQ ID NO: 1123101 - RNA, 19 nt, Artificial Sequence
  Description of Artificial Sequence: Synthetic oligonucleotide
  Antisense strand to SEQ ID NO: 1123100
aacauuauagagcaaccua

SEQ ID NO: 1123102 - RNA, 19 nt, Artificial Sequence
  Description of Artificial Sequence: Synthetic oligonucleotide
  Sense strand starting at position 3100 of SEQ ID NO: 916006
guaucaguaugucucaaua

SEQ ID NO: 1123103 - RNA, 19 nt, Artificial Sequence
  Description of Artificial Sequence: Synthetic oligonucleotide
  Antisense strand to SEQ ID NO: 1123102
uauugagacauacugauac

SEQ ID NO: 1123104 - RNA, 19 nt, Artificial Sequence
  Description of Artificial Sequence: Synthetic oligonucleotide
  Sense strand starting at position 3108 of SEQ ID NO: 916006
augucucaauacuugagaa

SEQ ID NO: 1123105 - RNA, 19 nt, Artificial Sequence
  Description of Artificial Sequence: Synthetic oligonucleotide
  Antisense strand to SEQ ID NO: 1123104
uucucaaguauugagacau

SEQ ID NO: 1123106 - RNA, 19 nt, Artificial Sequence
  Description of Artificial Sequence: Synthetic oligonucleotide
  Sense strand starting at position 3164 of SEQ ID NO: 916006
cuugaaauacuguaaguuu

SEQ ID NO: 1123107 - RNA, 19 nt, Artificial Sequence
  Description of Artificial Sequence: Synthetic oligonucleotide
  Antisense strand to SEQ ID NO: 1123106
aaacuuacaguauuucaag

SEQ ID NO: 1123108 - RNA, 19 nt, Artificial Sequence
  Description of Artificial Sequence: Synthetic oligonucleotide
  Sense strand starting at position 3187 of SEQ ID NO: 916006
uucuucuggcucuaaagaa

SEQ ID NO: 1123109 - RNA, 19 nt, Artificial Sequence
  Description of Artificial Sequence: Synthetic oligonucleotide
  Antisense strand to SEQ ID NO: 1123108
uucuuuagagccagaagaa

SEQ ID NO: 1123110 - RNA, 19 nt, Artificial Sequence
  Description of Artificial Sequence: Synthetic oligonucleotide
  Sense strand starting at position 3233 of SEQ ID NO: 916006
cugcuuuauagauguggga

SEQ ID NO: 1123111 - RNA, 19 nt, Artificial Sequence
  Description of Artificial Sequence: Synthetic oligonucleotide
  Antisense strand to SEQ ID NO: 1123110
ucccacaucuauaaagcag

SEQ ID NO: 1123112 - RNA, 19 nt, Artificial Sequence
  Description of Artificial Sequence: Synthetic oligonucleotide
  Sense strand starting at position 3235 of SEQ ID NO: 916006
gcuuuauagaugugggaac

SEQ ID NO: 1123113 - RNA, 19 nt, Artificial Sequence
  Description of Artificial Sequence: Synthetic oligonucleotide
  Antisense strand to SEQ ID NO: 1123112
guucccacaucuauaaagc

SEQ ID NO: 1123114 - RNA, 19 nt, Artificial Sequence
  Description of Artificial Sequence: Synthetic oligonucleotide
  Sense strand starting at position 3237 of SEQ ID NO: 916006
uuuauagaugugggaacuu

SEQ ID NO: 1123115 - RNA, 19 nt, Artificial Sequence
  Description of Artificial Sequence: Synthetic oligonucleotide
  Antisense strand to SEQ ID NO: 1123114
aaguucccacaucuauaaa

SEQ ID NO: 1123116 - RNA, 19 nt, Artificial Sequence
  Description of Artificial Sequence: Synthetic oligonucleotide
  Sense strand starting at position 3648 of SEQ ID NO: 916006
gacuauuacgacugucaaa

SEQ ID NO: 1123117 - RNA, 19 nt, Artificial Sequence
  Description of Artificial Sequence: Synthetic oligonucleotide
  Antisense strand to SEQ ID NO: 1123116
uuugacagucguaauaguc

SEQ ID NO: 1123118 - RNA, 19 nt, Artificial Sequence
  Description of Artificial Sequence: Synthetic oligonucleotide
  Sense strand starting at position 410 of SEQ ID NO: 916007
agacaaguagugugguaug

SEQ ID NO: 1123119 - RNA, 19 nt, Artificial Sequence
  Description of Artificial Sequence: Synthetic oligonucleotide
  Antisense strand to SEQ ID NO: 1123118
cauaccacacuacuugucu

SEQ ID NO: 1123120 - RNA, 19 nt, Artificial Sequence
  Description of Artificial Sequence: Synthetic oligonucleotide
  Sense strand starting at position 425 of SEQ ID NO: 916007
uauguuauuccuggcuaug

SEQ ID NO: 1123121 - RNA, 19 nt, Artificial Sequence
  Description of Artificial Sequence: Synthetic oligonucleotide
  Antisense strand to SEQ ID NO: 1123120
cauagccaggaauaacaua

SEQ ID NO: 1123122 - RNA, 19 nt, Artificial Sequence
  Description of Artificial Sequence: Synthetic oligonucleotide
  Sense strand starting at position 428 of SEQ ID NO: 916007
guuauuccuggcuauguuu

SEQ ID NO: 1123123 - RNA, 19 nt, Artificial Sequence
  Description of Artificial Sequence: Synthetic oligonucleotide
  Antisense strand to SEQ ID NO: 1123122
aaacauagccaggaauaac

SEQ ID NO: 1123124 - RNA, 19 nt, Artificial Sequence
  Description of Artificial Sequence: Synthetic oligonucleotide
  Sense strand starting at position 439 of SEQ ID NO: 916007
cuauguuuguaacuguuua

SEQ ID NO: 1123125 - RNA, 19 nt, Artificial Sequence
  Description of Artificial Sequence: Synthetic oligonucleotide
  Antisense strand to SEQ ID NO: 1123124
uaaacaguuacaaacauag

SEQ ID NO: 1123126 - RNA, 19 nt, Artificial Sequence
  Description of Artificial Sequence: Synthetic oligonucleotide
  Sense strand starting at position 443 of SEQ ID NO: 916007
guuuguaacuguuuacaag

SEQ ID NO: 1123127 - RNA, 19 nt, Artificial Sequence
  Description of Artificial Sequence: Synthetic oligonucleotide
  Antisense strand to SEQ ID NO: 1123126
cuuguaaacaguuacaaac

SEQ ID NO: 1123128 - RNA, 19 nt, Artificial Sequence
  Description of Artificial Sequence: Synthetic oligonucleotide
  Sense strand starting at position 862 of SEQ ID NO: 916007
aguaauucccaagaugcaa

SEQ ID NO: 1123129 - RNA, 19 nt, Artificial Sequence
  Description of Artificial Sequence: Synthetic oligonucleotide
  Antisense strand to SEQ ID NO: 1123128
uugcaucuugggaauuacu

SEQ ID NO: 1123130 - RNA, 19 nt, Artificial Sequence
  Description of Artificial Sequence: Synthetic oligonucleotide
  Sense strand starting at position 886 of SEQ ID NO: 916007
ccaaauaguuaagaaggua

SEQ ID NO: 1123131 - RNA, 19 nt, Artificial Sequence
  Description of Artificial Sequence: Synthetic oligonucleotide
  Antisense strand to SEQ ID NO: 1123130
uaccuucuuaacuauuugg

SEQ ID NO: 1123132 - RNA, 19 nt, Artificial Sequence
  Description of Artificial Sequence: Synthetic oligonucleotide
  Sense strand starting at position 1057 of SEQ ID NO: 916007
uggaaauugaguuaagcuc

SEQ ID NO: 1123133 - RNA, 19 nt, Artificial Sequence
  Description of Artificial Sequence: Synthetic oligonucleotide
  Antisense strand to SEQ ID NO: 1123132
gagcuuaacucaauuucca

SEQ ID NO: 1123134 - RNA, 19 nt, Artificial Sequence
  Description of Artificial Sequence: Synthetic oligonucleotide
  Sense strand starting at position 1063 of SEQ ID NO: 916007
uugaguuaagcucagaaau

SEQ ID NO: 1123135 - RNA, 19 nt, Artificial Sequence
  Description of Artificial Sequence: Synthetic oligonucleotide
  Antisense strand to SEQ ID NO: 1123134
auuucugagcuuaacucaa

SEQ ID NO: 1123136 - RNA, 19 nt, Artificial Sequence
  Description of Artificial Sequence: Synthetic oligonucleotide
  Sense strand starting at position 1128 of SEQ ID NO: 916007
ccauguuguuguuccauaa

SEQ ID NO: 1123137 - RNA, 19 nt, Artificial Sequence
  Description of Artificial Sequence: Synthetic oligonucleotide
  Antisense strand to SEQ ID NO: 1123136
uuauggaacaacaacaugg

SEQ ID NO: 1123138 - RNA, 19 nt, Artificial Sequence
  Description of Artificial Sequence: Synthetic oligonucleotide
  Sense strand starting at position 1132 of SEQ ID NO: 916007
guuguuguuccauaaucau

SEQ ID NO: 1123139 - RNA, 19 nt, Artificial Sequence
  Description of Artificial Sequence: Synthetic oligonucleotide
  Antisense strand to SEQ ID NO: 1123138
augauuauggaacaacaac

SEQ ID NO: 1123140 - RNA, 19 nt, Artificial Sequence
  Description of Artificial Sequence: Synthetic oligonucleotide
  Sense strand starting at position 1175 of SEQ ID NO: 916007
gcuaaauggugccuacagu

SEQ ID NO: 1123141 - RNA, 19 nt, Artificial Sequence
  Description of Artificial Sequence: Synthetic oligonucleotide
  Antisense strand to SEQ ID NO: 1123140
acuguaggcaccauuuagc

SEQ ID NO: 1123142 - RNA, 19 nt, Artificial Sequence
  Description of Artificial Sequence: Synthetic oligonucleotide
  Sense strand starting at position 1183 of SEQ ID NO: 916007
gugccuacagucuggauua

SEQ ID NO: 1123143 - RNA, 19 nt, Artificial Sequence
  Description of Artificial Sequence: Synthetic oligonucleotide
  Antisense strand to SEQ ID NO: 1123142
uaauccagacuguaggcac

SEQ ID NO: 1123144 - RNA, 19 nt, Artificial Sequence
  Description of Artificial Sequence: Synthetic oligonucleotide
  Sense strand starting at position 1185 of SEQ ID NO: 916007
gccuacagucuggauuaca

SEQ ID NO: 1123145 - RNA, 19 nt, Artificial Sequence
  Description of Artificial Sequence: Synthetic oligonucleotide
  Antisense strand to SEQ ID NO: 1123144
uguaauccagacuguaggc

SEQ ID NO: 1123146 - RNA, 19 nt, Artificial Sequence
  Description of Artificial Sequence: Synthetic oligonucleotide
  Sense strand starting at position 1333 of SEQ ID NO: 916007
cuaaccucagaaugauguu

SEQ ID NO: 1123147 - RNA, 19 nt, Artificial Sequence
  Description of Artificial Sequence: Synthetic oligonucleotide
  Antisense strand to SEQ ID NO: 1123146
aacaucauucugagguuag

SEQ ID NO: 1123148 - RNA, 19 nt, Artificial Sequence
  Description of Artificial Sequence: Synthetic oligonucleotide
  Sense strand starting at position 1500 of SEQ ID NO: 916007
gcccuauaagacuaaguuu

SEQ ID NO: 1123149 - RNA, 19 nt, Artificial Sequence
  Description of Artificial Sequence: Synthetic oligonucleotide
  Antisense strand to SEQ ID NO: 1123148
aaacuuagucuuauagggc

SEQ ID NO: 1123150 - RNA, 19 nt, Artificial Sequence
  Description of Artificial Sequence: Synthetic oligonucleotide
  Sense strand starting at position 1682 of SEQ ID NO: 916007
ugucauauuccagggagag

SEQ ID NO: 1123151 - RNA, 19 nt, Artificial Sequence
  Description of Artificial Sequence: Synthetic oligonucleotide
  Antisense strand to SEQ ID NO: 1123150
cucucccuggaauaugaca

SEQ ID NO: 1123152 - RNA, 19 nt, Artificial Sequence
  Description of Artificial Sequence: Synthetic oligonucleotide
  Sense strand starting at position 1683 of SEQ ID NO: 916007
gucauauuccagggagagu

SEQ ID NO: 1123153 - RNA, 19 nt, Artificial Sequence
  Description of Artificial Sequence: Synthetic oligonucleotide
  Antisense strand to SEQ ID NO: 1123152
acucucccuggaauaugac

SEQ ID NO: 1123154 - RNA, 19 nt, Artificial Sequence
  Description of Artificial Sequence: Synthetic oligonucleotide
  Sense strand starting at position 1786 of SEQ ID NO: 916007
guuagaugcaugcaguuaa

SEQ ID NO: 1123155 - RNA, 19 nt, Artificial Sequence
  Description of Artificial Sequence: Synthetic oligonucleotide
  Antisense strand to SEQ ID NO: 1123154
uuaacugcaugcaucuaac

SEQ ID NO: 1123156 - RNA, 19 nt, Artificial Sequence
  Description of Artificial Sequence: Synthetic oligonucleotide
  Sense strand starting at position 2248 of SEQ ID NO: 916007
gggaauuacuucuuagguu

SEQ ID NO: 1123157 - RNA, 19 nt, Artificial Sequence
  Description of Artificial Sequence: Synthetic oligonucleotide
  Antisense strand to SEQ ID NO: 1123156
aaccuaagaaguaauuccc

SEQ ID NO: 1123158 - RNA, 19 nt, Artificial Sequence
  Description of Artificial Sequence: Synthetic oligonucleotide
  Sense strand starting at position 2272 of SEQ ID NO: 916007
uccaguauuuaugcuuauu

SEQ ID NO: 1123159 - RNA, 19 nt, Artificial Sequence
  Description of Artificial Sequence: Synthetic oligonucleotide
  Antisense strand to SEQ ID NO: 1123158
aauaagcauaaauacugga

SEQ ID NO: 1123160 - RNA, 19 nt, Artificial Sequence
  Description of Artificial Sequence: Synthetic oligonucleotide
  Sense strand starting at position 2292 of SEQ ID NO: 916007
cucuaacagcacugugaau

SEQ ID NO: 1123161 - RNA, 19 nt, Artificial Sequence
  Description of Artificial Sequence: Synthetic oligonucleotide
  Antisense strand to SEQ ID NO: 1123160
auucacagugcuguuagag

SEQ ID NO: 1123162 - RNA, 19 nt, Artificial Sequence
  Description of Artificial Sequence: Synthetic oligonucleotide
  Sense strand starting at position 2294 of SEQ ID NO: 916007
cuaacagcacugugaauua

SEQ ID NO: 1123163 - RNA, 19 nt, Artificial Sequence
  Description of Artificial Sequence: Synthetic oligonucleotide
  Antisense strand to SEQ ID NO: 1123162
uaauucacagugcuguuag

SEQ ID NO: 1123164 - RNA, 19 nt, Artificial Sequence
  Description of Artificial Sequence: Synthetic oligonucleotide
  Sense strand starting at position 2458 of SEQ ID NO: 916007
ccgucugucacagaacagu

SEQ ID NO: 1123165 - RNA, 19 nt, Artificial Sequence
  Description of Artificial Sequence: Synthetic oligonucleotide
  Antisense strand to SEQ ID NO: 1123164
acuguucugugacagacgg

SEQ ID NO: 1123166 - RNA, 19 nt, Artificial Sequence
  Description of Artificial Sequence: Synthetic oligonucleotide
  Sense strand starting at position 2731 of SEQ ID NO: 916007
aggucacgugcucaagacu

SEQ ID NO: 1123167 - RNA, 19 nt, Artificial Sequence
  Description of Artificial Sequence: Synthetic oligonucleotide
  Antisense strand to SEQ ID NO: 1123166
agucuugagcacgugaccu

SEQ ID NO: 1123168 - RNA, 19 nt, Artificial Sequence
  Description of Artificial Sequence: Synthetic oligonucleotide
  Sense strand starting at position 3014 of SEQ ID NO: 916007
gagagcaguucugccacaa

SEQ ID NO: 1123169 - RNA, 19 nt, Artificial Sequence
  Description of Artificial Sequence: Synthetic oligonucleotide
  Antisense strand to SEQ ID NO: 1123168
uuguggcagaacugcucuc

SEQ ID NO: 1123170 - RNA, 19 nt, Artificial Sequence
  Description of Artificial Sequence: Synthetic oligonucleotide
  Sense strand starting at position 3018 of SEQ ID NO: 916007
gcaguucugccacaaccua

SEQ ID NO: 1123171 - RNA, 19 nt, Artificial Sequence
  Description of Artificial Sequence: Synthetic oligonucleotide
  Antisense strand to SEQ ID NO: 1123170
uagguuguggcagaacugc

SEQ ID NO: 1123172 - RNA, 19 nt, Artificial Sequence
  Description of Artificial Sequence: Synthetic oligonucleotide
  Sense strand starting at position 3033 of SEQ ID NO: 916007
ccuaaugguugauaaauuu

SEQ ID NO: 1123173 - RNA, 19 nt, Artificial Sequence
  Description of Artificial Sequence: Synthetic oligonucleotide
  Antisense strand to SEQ ID NO: 1123172
aaauuuaucaaccauuagg

SEQ ID NO: 1123174 - RNA, 19 nt, Artificial Sequence
  Description of Artificial Sequence: Synthetic oligonucleotide
  Sense strand starting at position 3055 of SEQ ID NO: 916007
ccacuuauagguugcucua

SEQ ID NO: 1123175 - RNA, 19 nt, Artificial Sequence
  Description of Artificial Sequence: Synthetic oligonucleotide
  Antisense strand to SEQ ID NO: 1123174
uagagcaaccuauaagugg

SEQ ID NO: 1123176 - RNA, 19 nt, Artificial Sequence
  Description of Artificial Sequence: Synthetic oligonucleotide
  Sense strand starting at position 3057 of SEQ ID NO: 916007
acuuauagguugcucuaua

SEQ ID NO: 1123177 - RNA, 19 nt, Artificial Sequence
  Description of Artificial Sequence: Synthetic oligonucleotide
  Antisense strand to SEQ ID NO: 1123176
uauagagcaaccuauaagu

SEQ ID NO: 1123178 - RNA, 19 nt, Artificial Sequence
  Description of Artificial Sequence: Synthetic oligonucleotide
  Sense strand starting at position 3058 of SEQ ID NO: 916007
cuuauagguugcucuauaa

SEQ ID NO: 1123179 - RNA, 19 nt, Artificial Sequence
  Description of Artificial Sequence: Synthetic oligonucleotide
  Antisense strand to SEQ ID NO: 1123178
uuauagagcaaccuauaag

SEQ ID NO: 1123180 - RNA, 19 nt, Artificial Sequence
  Description of Artificial Sequence: Synthetic oligonucleotide
  Sense strand starting at position 3062 of SEQ ID NO: 916007
uagguugcucuauaauguu

SEQ ID NO: 1123181 - RNA, 19 nt, Artificial Sequence
  Description of Artificial Sequence: Synthetic oligonucleotide
  Antisense strand to SEQ ID NO: 1123180
aacauuauagagcaaccua

SEQ ID NO: 1123182 - RNA, 19 nt, Artificial Sequence
  Description of Artificial Sequence: Synthetic oligonucleotide
  Sense strand starting at position 3141 of SEQ ID NO: 916007
guaucaguaugucucaaua

SEQ ID NO: 1123183 - RNA, 19 nt, Artificial Sequence
  Description of Artificial Sequence: Synthetic oligonucleotide
  Antisense strand to SEQ ID NO: 1123182
uauugagacauacugauac

SEQ ID NO: 1123184 - RNA, 19 nt, Artificial Sequence
  Description of Artificial Sequence: Synthetic oligonucleotide
  Sense strand starting at position 3149 of SEQ ID NO: 916007
augucucaauacuugagaa

SEQ ID NO: 1123185 - RNA, 19 nt, Artificial Sequence
  Description of Artificial Sequence: Synthetic oligonucleotide
  Antisense strand to SEQ ID NO: 1123184
uucucaaguauugagacau

SEQ ID NO: 1123186 - RNA, 19 nt, Artificial Sequence
  Description of Artificial Sequence: Synthetic oligonucleotide
  Sense strand starting at position 3205 of SEQ ID NO: 916007
cuugaaauacuguaaguuu

SEQ ID NO: 1123187 - RNA, 19 nt, Artificial Sequence
  Description of Artificial Sequence: Synthetic oligonucleotide
  Antisense strand to SEQ ID NO: 1123186
aaacuuacaguauuucaag

SEQ ID NO: 1123188 - RNA, 19 nt, Artificial Sequence
  Description of Artificial Sequence: Synthetic oligonucleotide
  Sense strand starting at position 3228 of SEQ ID NO: 916007
uucuucuggcucuaaagaa

SEQ ID NO: 1123189 - RNA, 19 nt, Artificial Sequence
  Description of Artificial Sequence: Synthetic oligonucleotide
  Antisense strand to SEQ ID NO: 1123188
uucuuuagagccagaagaa

SEQ ID NO: 1123190 - RNA, 19 nt, Artificial Sequence
  Description of Artificial Sequence: Synthetic oligonucleotide
  Sense strand starting at position 3274 of SEQ ID NO: 916007
cugcuuuauagauguggga

SEQ ID NO: 1123191 - RNA, 19 nt, Artificial Sequence
  Description of Artificial Sequence: Synthetic oligonucleotide
  Antisense strand to SEQ ID NO: 1123190
ucccacaucuauaaagcag

SEQ ID NO: 1123192 - RNA, 19 nt, Artificial Sequence
  Description of Artificial Sequence: Synthetic oligonucleotide
  Sense strand starting at position 3276 of SEQ ID NO: 916007
gcuuuauagaugugggaac

SEQ ID NO: 1123193 - RNA, 19 nt, Artificial Sequence
  Description of Artificial Sequence: Synthetic oligonucleotide
  Antisense strand to SEQ ID NO: 1123192
guucccacaucuauaaagc

SEQ ID NO: 1123194 - RNA, 19 nt, Artificial Sequence
  Description of Artificial Sequence: Synthetic oligonucleotide
  Sense strand starting at position 3278 of SEQ ID NO: 916007
uuuauagaugugggaacuu

SEQ ID NO: 1123195 - RNA, 19 nt, Artificial Sequence
  Description of Artificial Sequence: Synthetic oligonucleotide
  Antisense strand to SEQ ID NO: 1123194
aaguucccacaucuauaaa

SEQ ID NO: 1123196 - RNA, 19 nt, Artificial Sequence
  Description of Artificial Sequence: Synthetic oligonucleotide
  Sense strand starting at position 3689 of SEQ ID NO: 916007
gacuauuacgacugucaaa

SEQ ID NO: 1123197 - RNA, 19 nt, Artificial Sequence
  Description of Artificial Sequence: Synthetic oligonucleotide
  Antisense strand to SEQ ID NO: 1123196
uuugacagucguaauaguc

SEQ ID NO: 1123198 - RNA, 19 nt, Artificial Sequence
  Description of Artificial Sequence: Synthetic oligonucleotide
  Sense strand starting at position 118 of SEQ ID NO: 916008
agugcuaaugcugagaaac

SEQ ID NO: 1123199 - RNA, 19 nt, Artificial Sequence
  Description of Artificial Sequence: Synthetic oligonucleotide
  Antisense strand to SEQ ID NO: 1123198
guuucucagcauuagcacu

SEQ ID NO: 1123200 - RNA, 19 nt, Artificial Sequence
  Description of Artificial Sequence: Synthetic oligonucleotide
  Sense strand starting at position 132 of SEQ ID NO: 916008
gaaaccuugcuguagguca

SEQ ID NO: 1123201 - RNA, 19 nt, Artificial Sequence
  Description of Artificial Sequence: Synthetic oligonucleotide
  Antisense strand to SEQ ID NO: 1123200
ugaccuacagcaagguuuc

SEQ ID NO: 1123202 - RNA, 19 nt, Artificial Sequence
  Description of Artificial Sequence: Synthetic oligonucleotide
  Sense strand starting at position 200 of SEQ ID NO: 916008
ccaguaucacuuuaguucu

SEQ ID NO: 1123203 - RNA, 19 nt, Artificial Sequence
  Description of Artificial Sequence: Synthetic oligonucleotide
  Antisense strand to SEQ ID NO: 1123202
agaacuaaagugauacugg

SEQ ID NO: 1123204 - RNA, 19 nt, Artificial Sequence
  Description of Artificial Sequence: Synthetic oligonucleotide
  Sense strand starting at position 206 of SEQ ID NO: 916008
ucacuuuaguucucagaag

SEQ ID NO: 1123205 - RNA, 19 nt, Artificial Sequence
  Description of Artificial Sequence: Synthetic oligonucleotide
  Antisense strand to SEQ ID NO: 1123204
cuucugagaacuaaaguga

SEQ ID NO: 1123206 - RNA, 19 nt, Artificial Sequence
  Description of Artificial Sequence: Synthetic oligonucleotide
  Sense strand starting at position 295 of SEQ ID NO: 916008
uugcuagugccagagaaca

SEQ ID NO: 1123207 - RNA, 19 nt, Artificial Sequence
  Description of Artificial Sequence: Synthetic oligonucleotide
  Antisense strand to SEQ ID NO: 1123206
uguucucuggcacuagcaa

SEQ ID NO: 1123208 - RNA, 19 nt, Artificial Sequence
  Description of Artificial Sequence: Synthetic oligonucleotide
  Sense strand starting at position 313 of SEQ ID NO: 916008
auggaaaucucuccucugu

SEQ ID NO: 1123209 - RNA, 19 nt, Artificial Sequence
  Description of Artificial Sequence: Synthetic oligonucleotide
  Antisense strand to SEQ ID NO: 1123208
acagaggagagauuuccau

SEQ ID NO: 1123210 - RNA, 19 nt, Artificial Sequence
  Description of Artificial Sequence: Synthetic oligonucleotide
  Sense strand starting at position 361 of SEQ ID NO: 916008
uugguauaaagucggaaag

SEQ ID NO: 1123211 - RNA, 19 nt, Artificial Sequence
  Description of Artificial Sequence: Synthetic oligonucleotide
  Antisense strand to SEQ ID NO: 1123210
cuuuccgacuuuauaccaa

SEQ ID NO: 1123212 - RNA, 19 nt, Artificial Sequence
  Description of Artificial Sequence: Synthetic oligonucleotide
  Sense strand starting at position 372 of SEQ ID NO: 916008
ucggaaaggucucuaauua

SEQ ID NO: 1123213 - RNA, 19 nt, Artificial Sequence
  Description of Artificial Sequence: Synthetic oligonucleotide
  Antisense strand to SEQ ID NO: 1123212
uaauuagagaccuuuccga

SEQ ID NO: 1123214 - RNA, 19 nt, Artificial Sequence
  Description of Artificial Sequence: Synthetic oligonucleotide
  Sense strand starting at position 373 of SEQ ID NO: 916008
cggaaaggucucuaauuau

SEQ ID NO: 1123215 - RNA, 19 nt, Artificial Sequence
  Description of Artificial Sequence: Synthetic oligonucleotide
  Antisense strand to SEQ ID NO: 1123214
auaauuagagaccuuuccg

SEQ ID NO: 1123216 - RNA, 19 nt, Artificial Sequence
  Description of Artificial Sequence: Synthetic oligonucleotide
  Sense strand starting at position 466 of SEQ ID NO: 916008
gcaguaagacucugauaca

SEQ ID NO: 1123217 - RNA, 19 nt, Artificial Sequence
  Description of Artificial Sequence: Synthetic oligonucleotide
  Antisense strand to SEQ ID NO: 1123216
uguaucagagucuuacugc

SEQ ID NO: 1123218 - RNA, 19 nt, Artificial Sequence
  Description of Artificial Sequence: Synthetic oligonucleotide
  Sense strand starting at position 615 of SEQ ID NO: 916008
ccaggugauggaugaaucu

SEQ ID NO: 1123219 - RNA, 19 nt, Artificial Sequence
  Description of Artificial Sequence: Synthetic oligonucleotide
  Antisense strand to SEQ ID NO: 1123218
agauucauccaucaccugg

SEQ ID NO: 1123220 - RNA, 19 nt, Artificial Sequence
  Description of Artificial Sequence: Synthetic oligonucleotide
  Sense strand starting at position 759 of SEQ ID NO: 916008
augaaaguucccgggagaa

SEQ ID NO: 1123221 - RNA, 19 nt, Artificial Sequence
  Description of Artificial Sequence: Synthetic oligonucleotide
  Antisense strand to SEQ ID NO: 1123220
uucucccgggaacuuucau

SEQ ID NO: 1123222 - RNA, 19 nt, Artificial Sequence
  Description of Artificial Sequence: Synthetic oligonucleotide
  Sense strand starting at position 833 of SEQ ID NO: 916008
guaaguaugugauuaugac

SEQ ID NO: 1123223 - RNA, 19 nt, Artificial Sequence
  Description of Artificial Sequence: Synthetic oligonucleotide
  Antisense strand to SEQ ID NO: 1123222
gucauaaucacauacuuac

SEQ ID NO: 1123224 - RNA, 19 nt, Artificial Sequence
  Description of Artificial Sequence: Synthetic oligonucleotide
  Sense strand starting at position 834 of SEQ ID NO: 916008
uaaguaugugauuaugacu

SEQ ID NO: 1123225 - RNA, 19 nt, Artificial Sequence
  Description of Artificial Sequence: Synthetic oligonucleotide
  Antisense strand to SEQ ID NO: 1123224
agucauaaucacauacuua

SEQ ID NO: 1123226 - RNA, 19 nt, Artificial Sequence
  Description of Artificial Sequence: Synthetic oligonucleotide
  Sense strand starting at position 1230 of SEQ ID NO: 916008
gcucaagucgaggaauaca

SEQ ID NO: 1123227 - RNA, 19 nt, Artificial Sequence
  Description of Artificial Sequence: Synthetic oligonucleotide
  Antisense strand to SEQ ID NO: 1123226
uguauuccucgacuugagc

SEQ ID NO: 1123228 - RNA, 19 nt, Artificial Sequence
  Description of Artificial Sequence: Synthetic oligonucleotide
  Sense strand starting at position 1304 of SEQ ID NO: 916008
uagagaagucaucguggau

SEQ ID NO: 1123229 - RNA, 19 nt, Artificial Sequence
  Description of Artificial Sequence: Synthetic oligonucleotide
  Antisense strand to SEQ ID NO: 1123228
auccacgaugacuucucua

SEQ ID NO: 1123230 - RNA, 19 nt, Artificial Sequence
  Description of Artificial Sequence: Synthetic oligonucleotide
  Sense strand starting at position 1307 of SEQ ID NO: 916008
agaagucaucguggauaaa

SEQ ID NO: 1123231 - RNA, 19 nt, Artificial Sequence
  Description of Artificial Sequence: Synthetic oligonucleotide
  Antisense strand to SEQ ID NO: 1123230
uuuauccacgaugacuucu

SEQ ID NO: 1123232 - RNA, 19 nt, Artificial Sequence
  Description of Artificial Sequence: Synthetic oligonucleotide
  Sense strand starting at position 1839 of SEQ ID NO: 916008
agaccuacuauggguagau

SEQ ID NO: 1123233 - RNA, 19 nt, Artificial Sequence
  Description of Artificial Sequence: Synthetic oligonucleotide
  Antisense strand to SEQ ID NO: 1123232
aucuacccauaguaggucu

SEQ ID NO: 1123234 - RNA, 19 nt, Artificial Sequence
  Description of Artificial Sequence: Synthetic oligonucleotide
  Sense strand starting at position 1840 of SEQ ID NO: 916008
gaccuacuauggguagaua

SEQ ID NO: 1123235 - RNA, 19 nt, Artificial Sequence
  Description of Artificial Sequence: Synthetic oligonucleotide
  Antisense strand to SEQ ID NO: 1123234
uaucuacccauaguagguc

SEQ ID NO: 1123236 - RNA, 19 nt, Artificial Sequence
  Description of Artificial Sequence: Synthetic oligonucleotide
  Sense strand starting at position 1878 of SEQ ID NO: 916008
cgggauugagagugaucac

SEQ ID NO: 1123237 - RNA, 19 nt, Artificial Sequence
  Description of Artificial Sequence: Synthetic oligonucleotide
  Antisense strand to SEQ ID NO: 1123236
gugaucacucucaaucccg

SEQ ID NO: 1123238 - RNA, 19 nt, Artificial Sequence
  Description of Artificial Sequence: Synthetic oligonucleotide
  Sense strand starting at position 1881 of SEQ ID NO: 916008
gauugagagugaucacuca

SEQ ID NO: 1123239 - RNA, 19 nt, Artificial Sequence
  Description of Artificial Sequence: Synthetic oligonucleotide
  Antisense strand to SEQ ID NO: 1123238
ugagugaucacucucaauc

SEQ ID NO: 1123240 - RNA, 19 nt, Artificial Sequence
  Description of Artificial Sequence: Synthetic oligonucleotide
  Sense strand starting at position 2280 of SEQ ID NO: 916008
gcgacuugacuguaauauu

SEQ ID NO: 1123241 - RNA, 19 nt, Artificial Sequence
  Description of Artificial Sequence: Synthetic oligonucleotide
  Antisense strand to SEQ ID NO: 1123240
aauauuacagucaagucgc

SEQ ID NO: 1123242 - RNA, 19 nt, Artificial Sequence
  Description of Artificial Sequence: Synthetic oligonucleotide
  Sense strand starting at position 2293 of SEQ ID NO: 916008
aauauuugcgcguggaaga

SEQ ID NO: 1123243 - RNA, 19 nt, Artificial Sequence
  Description of Artificial Sequence: Synthetic oligonucleotide
  Antisense strand to SEQ ID NO: 1123242
ucuuccacgcgcaaauauu

SEQ ID NO: 1123244 - RNA, 19 nt, Artificial Sequence
  Description of Artificial Sequence: Synthetic oligonucleotide
  Sense strand starting at position 2294 of SEQ ID NO: 916008
auauuugcgcguggaagau

SEQ ID NO: 1123245 - RNA, 19 nt, Artificial Sequence
  Description of Artificial Sequence: Synthetic oligonucleotide
  Antisense strand to SEQ ID NO: 1123244
aucuuccacgcgcaaauau

SEQ ID NO: 1123246 - RNA, 19 nt, Artificial Sequence
  Description of Artificial Sequence: Synthetic oligonucleotide
  Sense strand starting at position 2366 of SEQ ID NO: 916008
ggccaaucagacugguuaa

SEQ ID NO: 1123247 - RNA, 19 nt, Artificial Sequence
  Description of Artificial Sequence: Synthetic oligonucleotide
  Antisense strand to SEQ ID NO: 1123246
uuaaccagucugauuggcc

SEQ ID NO: 1123248 - RNA, 19 nt, Artificial Sequence
  Description of Artificial Sequence: Synthetic oligonucleotide
  Sense strand starting at position 2681 of SEQ ID NO: 916008
cuaagucagaggugaguua

SEQ ID NO: 1123249 - RNA, 19 nt, Artificial Sequence
  Description of Artificial Sequence: Synthetic oligonucleotide
  Antisense strand to SEQ ID NO: 1123248
uaacucaccucugacuuag

SEQ ID NO: 1123250 - RNA, 19 nt, Artificial Sequence
  Description of Artificial Sequence: Synthetic oligonucleotide
  Sense strand starting at position 2702 of SEQ ID NO: 916008
cgcgcuuucccacuugaau

SEQ ID NO: 1123251 - RNA, 19 nt, Artificial Sequence
  Description of Artificial Sequence: Synthetic oligonucleotide
  Antisense strand to SEQ ID NO: 1123250
auucaagugggaaagcgcg

SEQ ID NO: 1123252 - RNA, 19 nt, Artificial Sequence
  Description of Artificial Sequence: Synthetic oligonucleotide
  Sense strand starting at position 2733 of SEQ ID NO: 916008
cuuuccugaaucgguaaga

SEQ ID NO: 1123253 - RNA, 19 nt, Artificial Sequence
  Description of Artificial Sequence: Synthetic oligonucleotide
  Antisense strand to SEQ ID NO: 1123252
ucuuaccgauucaggaaag

SEQ ID NO: 1123254 - RNA, 19 nt, Artificial Sequence
  Description of Artificial Sequence: Synthetic oligonucleotide
  Sense strand starting at position 2734 of SEQ ID NO: 916008
uuuccugaaucgguaagau

SEQ ID NO: 1123255 - RNA, 19 nt, Artificial Sequence
  Description of Artificial Sequence: Synthetic oligonucleotide
  Antisense strand to SEQ ID NO: 1123254
aucuuaccgauucaggaaa

SEQ ID NO: 1123256 - RNA, 19 nt, Artificial Sequence
  Description of Artificial Sequence: Synthetic oligonucleotide
  Sense strand starting at position 2974 of SEQ ID NO: 916008
uuucuaaagagcgauuagu

SEQ ID NO: 1123257 - RNA, 19 nt, Artificial Sequence
  Description of Artificial Sequence: Synthetic oligonucleotide
  Antisense strand to SEQ ID NO: 1123256
acuaaucgcucuuuagaaa

SEQ ID NO: 1123258 - RNA, 19 nt, Artificial Sequence
  Description of Artificial Sequence: Synthetic oligonucleotide
  Sense strand starting at position 3212 of SEQ ID NO: 916008
cguguuguagcccauuuaa

SEQ ID NO: 1123259 - RNA, 19 nt, Artificial Sequence
  Description of Artificial Sequence: Synthetic oligonucleotide
  Antisense strand to SEQ ID NO: 1123258
uuaaaugggcuacaacacg

SEQ ID NO: 1123260 - RNA, 19 nt, Artificial Sequence
  Description of Artificial Sequence: Synthetic oligonucleotide
  Sense strand starting at position 3370 of SEQ ID NO: 916008
ugguaagauuuggaaggga

SEQ ID NO: 1123261 - RNA, 19 nt, Artificial Sequence
  Description of Artificial Sequence: Synthetic oligonucleotide
  Antisense strand to SEQ ID NO: 1123260
ucccuuccaaaucuuacca

SEQ ID NO: 1123262 - RNA, 19 nt, Artificial Sequence
  Description of Artificial Sequence: Synthetic oligonucleotide
  Sense strand starting at position 3403 of SEQ ID NO: 916008
agccgauuuccuuggcuua

SEQ ID NO: 1123263 - RNA, 19 nt, Artificial Sequence
  Description of Artificial Sequence: Synthetic oligonucleotide
  Antisense strand to SEQ ID NO: 1123262
uaagccaaggaaaucggcu

SEQ ID NO: 1123264 - RNA, 19 nt, Artificial Sequence
  Description of Artificial Sequence: Synthetic oligonucleotide
  Sense strand starting at position 3404 of SEQ ID NO: 916008
gccgauuuccuuggcuuau

SEQ ID NO: 1123265 - RNA, 19 nt, Artificial Sequence
  Description of Artificial Sequence: Synthetic oligonucleotide
  Antisense strand to SEQ ID NO: 1123264
auaagccaaggaaaucggc

SEQ ID NO: 1123266 - RNA, 19 nt, Artificial Sequence
  Description of Artificial Sequence: Synthetic oligonucleotide
  Sense strand starting at position 3523 of SEQ ID NO: 916008
cucuuaaaucuaggguagu

SEQ ID NO: 1123267 - RNA, 19 nt, Artificial Sequence
  Description of Artificial Sequence: Synthetic oligonucleotide
  Antisense strand to SEQ ID NO: 1123266
acuacccuagauuuaagag

SEQ ID NO: 1123268 - RNA, 19 nt, Artificial Sequence
  Description of Artificial Sequence: Synthetic oligonucleotide
  Sense strand starting at position 3622 of SEQ ID NO: 916008
ugcggucagacuuuguguu

SEQ ID NO: 1123269 - RNA, 19 nt, Artificial Sequence
  Description of Artificial Sequence: Synthetic oligonucleotide
  Antisense strand to SEQ ID NO: 1123268
aacacaaagucugaccgca

SEQ ID NO: 1123270 - RNA, 19 nt, Artificial Sequence
  Description of Artificial Sequence: Synthetic oligonucleotide
  Sense strand starting at position 3653 of SEQ ID NO: 916008
acuguucucagguaaugag

SEQ ID NO: 1123271 - RNA, 19 nt, Artificial Sequence
  Description of Artificial Sequence: Synthetic oligonucleotide
  Antisense strand to SEQ ID NO: 1123270
cucauuaccugagaacagu

SEQ ID NO: 1123272 - RNA, 19 nt, Artificial Sequence
  Description of Artificial Sequence: Synthetic oligonucleotide
  Sense strand starting at position 3796 of SEQ ID NO: 916008
gcugucuccagagaaguga

SEQ ID NO: 1123273 - RNA, 19 nt, Artificial Sequence
  Description of Artificial Sequence: Synthetic oligonucleotide
  Antisense strand to SEQ ID NO: 1123272
ucacuucucuggagacagc

SEQ ID NO: 1123274 - RNA, 19 nt, Artificial Sequence
  Description of Artificial Sequence: Synthetic oligonucleotide
  Sense strand starting at position 3804 of SEQ ID NO: 916008
cagagaagugaguggguuu

SEQ ID NO: 1123275 - RNA, 19 nt, Artificial Sequence
  Description of Artificial Sequence: Synthetic oligonucleotide
  Antisense strand to SEQ ID NO: 1123274
aaacccacucacuucucug

SEQ ID NO: 1123276 - RNA, 19 nt, Artificial Sequence
  Description of Artificial Sequence: Synthetic oligonucleotide
  Sense strand starting at position 3866 of SEQ ID NO: 916008
ggacuuaagauucgggagu

SEQ ID NO: 1123277 - RNA, 19 nt, Artificial Sequence
  Description of Artificial Sequence: Synthetic oligonucleotide
  Antisense strand to SEQ ID NO: 1123276
acucccgaaucuuaagucc

SEQ ID NO: 1123278 - RNA, 19 nt, Artificial Sequence
  Description of Artificial Sequence: Synthetic oligonucleotide
  Sense strand starting at position 1994 of SEQ ID NO: 916009
acguaaaugacgugugucu

SEQ ID NO: 1123279 - RNA, 19 nt, Artificial Sequence
  Description of Artificial Sequence: Synthetic oligonucleotide
  Antisense strand to SEQ ID NO: 1123278
agacacacgucauuuacgu

SEQ ID NO: 1123280 - RNA, 19 nt, Artificial Sequence
  Description of Artificial Sequence: Synthetic oligonucleotide
  Sense strand starting at position 2144 of SEQ ID NO: 916009
gcguguggucgcaauguuu

SEQ ID NO: 1123281 - RNA, 19 nt, Artificial Sequence
  Description of Artificial Sequence: Synthetic oligonucleotide
  Antisense strand to SEQ ID NO: 1123280
aaacauugcgaccacacgc

SEQ ID NO: 1123282 - RNA, 19 nt, Artificial Sequence
  Description of Artificial Sequence: Synthetic oligonucleotide
  Sense strand starting at position 2153 of SEQ ID NO: 916009
cgcaauguuuaauagggaa

SEQ ID NO: 1123283 - RNA, 19 nt, Artificial Sequence
  Description of Artificial Sequence: Synthetic oligonucleotide
  Antisense strand to SEQ ID NO: 1123282
uucccuauuaaacauugcg

SEQ ID NO: 1123284 - RNA, 19 nt, Artificial Sequence
  Description of Artificial Sequence: Synthetic oligonucleotide
  Sense strand starting at position 2156 of SEQ ID NO: 916009
aauguuuaauagggaagua

SEQ ID NO: 1123285 - RNA, 19 nt, Artificial Sequence
  Description of Artificial Sequence: Synthetic oligonucleotide
  Antisense strand to SEQ ID NO: 1123284
uacuucccuauuaaacauu

SEQ ID NO: 1123286 - RNA, 19 nt, Artificial Sequence
  Description of Artificial Sequence: Synthetic oligonucleotide
  Sense strand starting at position 2200 of SEQ ID NO: 916009
cuccaaguccgggagagau

SEQ ID NO: 1123287 - RNA, 19 nt, Artificial Sequence
  Description of Artificial Sequence: Synthetic oligonucleotide
  Antisense strand to SEQ ID NO: 1123286
aucucucccggacuuggag

SEQ ID NO: 1123288 - RNA, 19 nt, Artificial Sequence
  Description of Artificial Sequence: Synthetic oligonucleotide
  Sense strand starting at position 2250 of SEQ ID NO: 916009
gcgagacugcccuggaaag

SEQ ID NO: 1123289 - RNA, 19 nt, Artificial Sequence
  Description of Artificial Sequence: Synthetic oligonucleotide
  Antisense strand to SEQ ID NO: 1123288
cuuuccagggcagucucgc

SEQ ID NO: 1123290 - RNA, 19 nt, Artificial Sequence
  Description of Artificial Sequence: Synthetic oligonucleotide
  Sense strand starting at position 2251 of SEQ ID NO: 916009
cgagacugcccuggaaaga

SEQ ID NO: 1123291 - RNA, 19 nt, Artificial Sequence
  Description of Artificial Sequence: Synthetic oligonucleotide
  Antisense strand to SEQ ID NO: 1123290
ucuuuccagggcagucucg

SEQ ID NO: 1123292 - RNA, 19 nt, Artificial Sequence
  Description of Artificial Sequence: Synthetic oligonucleotide
  Sense strand starting at position 2282 of SEQ ID NO: 916009
gcauuccuuucucagagga

SEQ ID NO: 1123293 - RNA, 19 nt, Artificial Sequence
  Description of Artificial Sequence: Synthetic oligonucleotide
  Antisense strand to SEQ ID NO: 1123292
uccucugagaaaggaaugc

SEQ ID NO: 1123294 - RNA, 19 nt, Artificial Sequence
  Description of Artificial Sequence: Synthetic oligonucleotide
  Sense strand starting at position 2284 of SEQ ID NO: 916009
auuccuuucucagaggaug

SEQ ID NO: 1123295 - RNA, 19 nt, Artificial Sequence
  Description of Artificial Sequence: Synthetic oligonucleotide
  Antisense strand to SEQ ID NO: 1123294
cauccucugagaaaggaau

SEQ ID NO: 1123296 - RNA, 19 nt, Artificial Sequence
  Description of Artificial Sequence: Synthetic oligonucleotide
  Sense strand starting at position 2371 of SEQ ID NO: 916009
uguugcuaaugaucccaga

SEQ ID NO: 1123297 - RNA, 19 nt, Artificial Sequence
  Description of Artificial Sequence: Synthetic oligonucleotide
  Antisense strand to SEQ ID NO: 1123296
ucugggaucauuagcaaca

SEQ ID NO: 1123298 - RNA, 19 nt, Artificial Sequence
  Description of Artificial Sequence: Synthetic oligonucleotide
  Sense strand starting at position 2374 of SEQ ID NO: 916009
ugcuaaugaucccagaguu

SEQ ID NO: 1123299 - RNA, 19 nt, Artificial Sequence
  Description of Artificial Sequence: Synthetic oligonucleotide
  Antisense strand to SEQ ID NO: 1123298
aacucugggaucauuagca

SEQ ID NO: 1123300 - RNA, 19 nt, Artificial Sequence
  Description of Artificial Sequence: Synthetic oligonucleotide
  Sense strand starting at position 2469 of SEQ ID NO: 916009
agguuucugcaguaaauca

SEQ ID NO: 1123301 - RNA, 19 nt, Artificial Sequence
  Description of Artificial Sequence: Synthetic oligonucleotide
  Antisense strand to SEQ ID NO: 1123300
ugauuuacugcagaaaccu

SEQ ID NO: 1123302 - RNA, 19 nt, Artificial Sequence
  Description of Artificial Sequence: Synthetic oligonucleotide
  Sense strand starting at position 2488 of SEQ ID NO: 916009
gcccucuagcuauagaaau

SEQ ID NO: 1123303 - RNA, 19 nt, Artificial Sequence
  Description of Artificial Sequence: Synthetic oligonucleotide
  Antisense strand to SEQ ID NO: 1123302
auuucuauagcuagagggc

SEQ ID NO: 1123304 - RNA, 19 nt, Artificial Sequence
  Description of Artificial Sequence: Synthetic oligonucleotide
  Sense strand starting at position 2527 of SEQ ID NO: 916009
gggacucccuccuuuauga

SEQ ID NO: 1123305 - RNA, 19 nt, Artificial Sequence
  Description of Artificial Sequence: Synthetic oligonucleotide
  Antisense strand to SEQ ID NO: 1123304
ucauaaaggagggaguccc

SEQ ID NO: 1123306 - RNA, 19 nt, Artificial Sequence
  Description of Artificial Sequence: Synthetic oligonucleotide
  Sense strand starting at position 2571 of SEQ ID NO: 916009
cugggaguuugucccagau

SEQ ID NO: 1123307 - RNA, 19 nt, Artificial Sequence
  Description of Artificial Sequence: Synthetic oligonucleotide
  Antisense strand to SEQ ID NO: 1123306
aucugggacaaacucccag

SEQ ID NO: 1123308 - RNA, 19 nt, Artificial Sequence
  Description of Artificial Sequence: Synthetic oligonucleotide
  Sense strand starting at position 2593 of SEQ ID NO: 916009
gaggccaagugcuuaaguu

SEQ ID NO: 1123309 - RNA, 19 nt, Artificial Sequence
  Description of Artificial Sequence: Synthetic oligonucleotide
  Antisense strand to SEQ ID NO: 1123308
aacuuaagcacuuggccuc

SEQ ID NO: 1123310 - RNA, 19 nt, Artificial Sequence
  Description of Artificial Sequence: Synthetic oligonucleotide
  Sense strand starting at position 2706 of SEQ ID NO: 916009
guauguagaugcuuaauau

SEQ ID NO: 1123311 - RNA, 19 nt, Artificial Sequence
  Description of Artificial Sequence: Synthetic oligonucleotide
  Antisense strand to SEQ ID NO: 1123310
auauuaagcaucuacauac

SEQ ID NO: 1123312 - RNA, 19 nt, Artificial Sequence
  Description of Artificial Sequence: Synthetic oligonucleotide
  Sense strand starting at position 2710 of SEQ ID NO: 916009
guagaugcuuaauauaguu

SEQ ID NO: 1123313 - RNA, 19 nt, Artificial Sequence
  Description of Artificial Sequence: Synthetic oligonucleotide
  Antisense strand to SEQ ID NO: 1123312
aacuauauuaagcaucuac

SEQ ID NO: 1123314 - RNA, 19 nt, Artificial Sequence
  Description of Artificial Sequence: Synthetic oligonucleotide
  Sense strand starting at position 2847 of SEQ ID NO: 916009
cgaccuuggccacaucauu

SEQ ID NO: 1123315 - RNA, 19 nt, Artificial Sequence
  Description of Artificial Sequence: Synthetic oligonucleotide
  Antisense strand to SEQ ID NO: 1123314
aaugauguggccaaggucg

SEQ ID NO: 1123316 - RNA, 19 nt, Artificial Sequence
  Description of Artificial Sequence: Synthetic oligonucleotide
  Sense strand starting at position 2866 of SEQ ID NO: 916009
uuccucaucuguuagggaa

SEQ ID NO: 1123317 - RNA, 19 nt, Artificial Sequence
  Description of Artificial Sequence: Synthetic oligonucleotide
  Antisense strand to SEQ ID NO: 1123316
uucccuaacagaugaggaa

SEQ ID NO: 1123318 - RNA, 19 nt, Artificial Sequence
  Description of Artificial Sequence: Synthetic oligonucleotide
  Sense strand starting at position 2920 of SEQ ID NO: 916009
ugaauaacagucugcauca

SEQ ID NO: 1123319 - RNA, 19 nt, Artificial Sequence
  Description of Artificial Sequence: Synthetic oligonucleotide
  Antisense strand to SEQ ID NO: 1123318
ugaugcagacuguuauuca

SEQ ID NO: 1123320 - RNA, 19 nt, Artificial Sequence
  Description of Artificial Sequence: Synthetic oligonucleotide
  Sense strand starting at position 2932 of SEQ ID NO: 916009
ugcaucaucucacagguga

SEQ ID NO: 1123321 - RNA, 19 nt, Artificial Sequence
  Description of Artificial Sequence: Synthetic oligonucleotide
  Antisense strand to SEQ ID NO: 1123320
ucaccugugagaugaugca

SEQ ID NO: 1123322 - RNA, 19 nt, Artificial Sequence
  Description of Artificial Sequence: Synthetic oligonucleotide
  Sense strand starting at position 3040 of SEQ ID NO: 916009
ucagacauacacugaguau

SEQ ID NO: 1123323 - RNA, 19 nt, Artificial Sequence
  Description of Artificial Sequence: Synthetic oligonucleotide
  Antisense strand to SEQ ID NO: 1123322
auacucaguguaugucuga

SEQ ID NO: 1123324 - RNA, 19 nt, Artificial Sequence
  Description of Artificial Sequence: Synthetic oligonucleotide
  Sense strand starting at position 3132 of SEQ ID NO: 916009
ucuuuaauauacguagaug

SEQ ID NO: 1123325 - RNA, 19 nt, Artificial Sequence
  Description of Artificial Sequence: Synthetic oligonucleotide
  Antisense strand to SEQ ID NO: 1123324
caucuacguauauuaaaga

SEQ ID NO: 1123326 - RNA, 19 nt, Artificial Sequence
  Description of Artificial Sequence: Synthetic oligonucleotide
  Sense strand starting at position 3140 of SEQ ID NO: 916009
auacguagaugauugcaga

SEQ ID NO: 1123327 - RNA, 19 nt, Artificial Sequence
  Description of Artificial Sequence: Synthetic oligonucleotide
  Antisense strand to SEQ ID NO: 1123326
ucugcaaucaucuacguau

SEQ ID NO: 1123328 - RNA, 19 nt, Artificial Sequence
  Description of Artificial Sequence: Synthetic oligonucleotide
  Sense strand starting at position 3141 of SEQ ID NO: 916009
uacguagaugauugcagau

SEQ ID NO: 1123329 - RNA, 19 nt, Artificial Sequence
  Description of Artificial Sequence: Synthetic oligonucleotide
  Antisense strand to SEQ ID NO: 1123328
aucugcaaucaucuacgua

SEQ ID NO: 1123330 - RNA, 19 nt, Artificial Sequence
  Description of Artificial Sequence: Synthetic oligonucleotide
  Sense strand starting at position 3256 of SEQ ID NO: 916009
aagaauaaaucugggaaag

SEQ ID NO: 1123331 - RNA, 19 nt, Artificial Sequence
  Description of Artificial Sequence: Synthetic oligonucleotide
  Antisense strand to SEQ ID NO: 1123330
cuuucccagauuuauucuu

SEQ ID NO: 1123332 - RNA, 19 nt, Artificial Sequence
  Description of Artificial Sequence: Synthetic oligonucleotide
  Sense strand starting at position 3258 of SEQ ID NO: 916009
gaauaaaucugggaaagag

SEQ ID NO: 1123333 - RNA, 19 nt, Artificial Sequence
  Description of Artificial Sequence: Synthetic oligonucleotide
  Antisense strand to SEQ ID NO: 1123332
cucuuucccagauuuauuc

SEQ ID NO: 1123334 - RNA, 19 nt, Artificial Sequence
  Description of Artificial Sequence: Synthetic oligonucleotide
  Sense strand starting at position 3346 of SEQ ID NO: 916009
agugacagcaaauguguua

SEQ ID NO: 1123335 - RNA, 19 nt, Artificial Sequence
  Description of Artificial Sequence: Synthetic oligonucleotide
  Antisense strand to SEQ ID NO: 1123334
uaacacauuugcugucacu

SEQ ID NO: 1123336 - RNA, 19 nt, Artificial Sequence
  Description of Artificial Sequence: Synthetic oligonucleotide
  Sense strand starting at position 3357 of SEQ ID NO: 916009
auguguuaccuuuggguuu

SEQ ID NO: 1123337 - RNA, 19 nt, Artificial Sequence
  Description of Artificial Sequence: Synthetic oligonucleotide
  Antisense strand to SEQ ID NO: 1123336
aaacccaaagguaacacau

SEQ ID NO: 1123338 - RNA, 19 nt, Artificial Sequence
  Description of Artificial Sequence: Synthetic oligonucleotide
  Sense strand starting at position 3368 of SEQ ID NO: 916009
uuggguuucccugguuaug

SEQ ID NO: 1123339 - RNA, 19 nt, Artificial Sequence
  Description of Artificial Sequence: Synthetic oligonucleotide
  Antisense strand to SEQ ID NO: 1123338
cauaaccagggaaacccaa

SEQ ID NO: 1123340 - RNA, 19 nt, Artificial Sequence
  Description of Artificial Sequence: Synthetic oligonucleotide
  Sense strand starting at position 3378 of SEQ ID NO: 916009
cugguuaugugcuugguga

SEQ ID NO: 1123341 - RNA, 19 nt, Artificial Sequence
  Description of Artificial Sequence: Synthetic oligonucleotide
  Antisense strand to SEQ ID NO: 1123340
ucaccaagcacauaaccag

SEQ ID NO: 1123342 - RNA, 19 nt, Artificial Sequence
  Description of Artificial Sequence: Synthetic oligonucleotide
  Sense strand starting at position 3379 of SEQ ID NO: 916009
ugguuaugugcuuggugau

SEQ ID NO: 1123343 - RNA, 19 nt, Artificial Sequence
  Description of Artificial Sequence: Synthetic oligonucleotide
  Antisense strand to SEQ ID NO: 1123342
aucaccaagcacauaacca

SEQ ID NO: 1123344 - RNA, 19 nt, Artificial Sequence
  Description of Artificial Sequence: Synthetic oligonucleotide
  Sense strand starting at position 3380 of SEQ ID NO: 916009
gguuaugugcuuggugaug

SEQ ID NO: 1123345 - RNA, 19 nt, Artificial Sequence
  Description of Artificial Sequence: Synthetic oligonucleotide
  Antisense strand to SEQ ID NO: 1123344
caucaccaagcacauaacc

SEQ ID NO: 1123346 - RNA, 19 nt, Artificial Sequence
  Description of Artificial Sequence: Synthetic oligonucleotide
  Sense strand starting at position 3386 of SEQ ID NO: 916009
gugcuuggugaugaagagu

SEQ ID NO: 1123347 - RNA, 19 nt, Artificial Sequence
  Description of Artificial Sequence: Synthetic oligonucleotide
  Antisense strand to SEQ ID NO: 1123346
acucuucaucaccaagcac

SEQ ID NO: 1123348 - RNA, 19 nt, Artificial Sequence
  Description of Artificial Sequence: Synthetic oligonucleotide
  Sense strand starting at position 3509 of SEQ ID NO: 916009
gcagcagaauguuuaaaua

SEQ ID NO: 1123349 - RNA, 19 nt, Artificial Sequence
  Description of Artificial Sequence: Synthetic oligonucleotide
  Antisense strand to SEQ ID NO: 1123348
uauuuaaacauucugcugc

SEQ ID NO: 1123350 - RNA, 19 nt, Artificial Sequence
  Description of Artificial Sequence: Synthetic oligonucleotide
  Sense strand starting at position 3831 of SEQ ID NO: 916009
gugggcugguguuuacaaa

SEQ ID NO: 1123351 - RNA, 19 nt, Artificial Sequence
  Description of Artificial Sequence: Synthetic oligonucleotide
  Antisense strand to SEQ ID NO: 1123350
uuuguaaacaccagcccac

SEQ ID NO: 1123352 - RNA, 19 nt, Artificial Sequence
  Description of Artificial Sequence: Synthetic oligonucleotide
  Sense strand starting at position 3910 of SEQ ID NO: 916009
gagcuuacacagcauaagu

SEQ ID NO: 1123353 - RNA, 19 nt, Artificial Sequence
  Description of Artificial Sequence: Synthetic oligonucleotide
  Antisense strand to SEQ ID NO: 1123352
acuuaugcuguguaagcuc

SEQ ID NO: 1123354 - RNA, 19 nt, Artificial Sequence
  Description of Artificial Sequence: Synthetic oligonucleotide
  Sense strand starting at position 3921 of SEQ ID NO: 916009
gcauaaguuucugauuaua

SEQ ID NO: 1123355 - RNA, 19 nt, Artificial Sequence
  Description of Artificial Sequence: Synthetic oligonucleotide
  Antisense strand to SEQ ID NO: 1123354
uauaaucagaaacuuaugc

SEQ ID NO: 1123356 - RNA, 19 nt, Artificial Sequence
  Description of Artificial Sequence: Synthetic oligonucleotide
  Sense strand starting at position 3949 of SEQ ID NO: 916009
gcauguucucagggcuuau

SEQ ID NO: 1123357 - RNA, 19 nt, Artificial Sequence
  Description of Artificial Sequence: Synthetic oligonucleotide
  Antisense strand to SEQ ID NO: 1123356
auaagcccugagaacaugc

SEQ ID NO: 1123358 - RNA, 19 nt, Artificial Sequence
  Description of Artificial Sequence: Synthetic oligonucleotide
  Sense strand starting at position 278 of SEQ ID NO: 916010
ggguuaaggagucagcaua

SEQ ID NO: 1123359 - RNA, 19 nt, Artificial Sequence
  Description of Artificial Sequence: Synthetic oligonucleotide
  Antisense strand to SEQ ID NO: 1123358
uaugcugacuccuuaaccc

SEQ ID NO: 1123360 - RNA, 19 nt, Artificial Sequence
  Description of Artificial Sequence: Synthetic oligonucleotide
  Sense strand starting at position 285 of SEQ ID NO: 916010
ggagucagcauauacaagu

SEQ ID NO: 1123361 - RNA, 19 nt, Artificial Sequence
  Description of Artificial Sequence: Synthetic oligonucleotide
  Antisense strand to SEQ ID NO: 1123360
acuuguauaugcugacucc

SEQ ID NO: 1123362 - RNA, 19 nt, Artificial Sequence
  Description of Artificial Sequence: Synthetic oligonucleotide
  Sense strand starting at position 342 of SEQ ID NO: 916010
ggauguugguuauuaccaa

SEQ ID NO: 1123363 - RNA, 19 nt, Artificial Sequence
  Description of Artificial Sequence: Synthetic oligonucleotide
  Antisense strand to SEQ ID NO: 1123362
uugguaauaaccaacaucc

SEQ ID NO: 1123364 - RNA, 19 nt, Artificial Sequence
  Description of Artificial Sequence: Synthetic oligonucleotide
  Sense strand starting at position 367 of SEQ ID NO: 916010
augugucauccuuauccau

SEQ ID NO: 1123365 - RNA, 19 nt, Artificial Sequence
  Description of Artificial Sequence: Synthetic oligonucleotide
  Antisense strand to SEQ ID NO: 1123364
auggauaaggaugacacau

SEQ ID NO: 1123366 - RNA, 19 nt, Artificial Sequence
  Description of Artificial Sequence: Synthetic oligonucleotide
  Sense strand starting at position 481 of SEQ ID NO: 916010
cugucuggacugugaauca

SEQ ID NO: 1123367 - RNA, 19 nt, Artificial Sequence
  Description of Artificial Sequence: Synthetic oligonucleotide
  Antisense strand to SEQ ID NO: 1123366
ugauucacaguccagacag

SEQ ID NO: 1123368 - RNA, 19 nt, Artificial Sequence
  Description of Artificial Sequence: Synthetic oligonucleotide
  Sense strand starting at position 492 of SEQ ID NO: 916010
gugaaucagaugcacaguu

SEQ ID NO: 1123369 - RNA, 19 nt, Artificial Sequence
  Description of Artificial Sequence: Synthetic oligonucleotide
  Antisense strand to SEQ ID NO: 1123368
aacugugcaucugauucac

SEQ ID NO: 1123370 - RNA, 19 nt, Artificial Sequence
  Description of Artificial Sequence: Synthetic oligonucleotide
  Sense strand starting at position 613 of SEQ ID NO: 916010
acuauacuauuggcugaaa

SEQ ID NO: 1123371 - RNA, 19 nt, Artificial Sequence
  Description of Artificial Sequence: Synthetic oligonucleotide
  Antisense strand to SEQ ID NO: 1123370
uuucagccaauaguauagu

SEQ ID NO: 1123372 - RNA, 19 nt, Artificial Sequence
  Description of Artificial Sequence: Synthetic oligonucleotide
  Sense strand starting at position 614 of SEQ ID NO: 916010
cuauacuauuggcugaaau

SEQ ID NO: 1123373 - RNA, 19 nt, Artificial Sequence
  Description of Artificial Sequence: Synthetic oligonucleotide
  Antisense strand to SEQ ID NO: 1123372
auuucagccaauaguauag

SEQ ID NO: 1123374 - RNA, 19 nt, Artificial Sequence
  Description of Artificial Sequence: Synthetic oligonucleotide
  Sense strand starting at position 616 of SEQ ID NO: 916010
auacuauuggcugaaaucu

SEQ ID NO: 1123375 - RNA, 19 nt, Artificial Sequence
  Description of Artificial Sequence: Synthetic oligonucleotide
  Antisense strand to SEQ ID NO: 1123374
agauuucagccaauaguau

SEQ ID NO: 1123376 - RNA, 19 nt, Artificial Sequence
  Description of Artificial Sequence: Synthetic oligonucleotide
  Sense strand starting at position 701 of SEQ ID NO: 916010
accuauuacuuguuuagag

SEQ ID NO: 1123377 - RNA, 19 nt, Artificial Sequence
  Description of Artificial Sequence: Synthetic oligonucleotide
  Antisense strand to SEQ ID NO: 1123376
cucuaaacaaguaauaggu

SEQ ID NO: 1123378 - RNA, 19 nt, Artificial Sequence
  Description of Artificial Sequence: Synthetic oligonucleotide
  Sense strand starting at position 703 of SEQ ID NO: 916010
cuauuacuuguuuagagcu

SEQ ID NO: 1123379 - RNA, 19 nt, Artificial Sequence
  Description of Artificial Sequence: Synthetic oligonucleotide
  Antisense strand to SEQ ID NO: 1123378
agcucuaaacaaguaauag

SEQ ID NO: 1123380 - RNA, 19 nt, Artificial Sequence
  Description of Artificial Sequence: Synthetic oligonucleotide
  Sense strand starting at position 948 of SEQ ID NO: 916010
ugcauaguucugcaaauau

SEQ ID NO: 1123381 - RNA, 19 nt, Artificial Sequence
  Description of Artificial Sequence: Synthetic oligonucleotide
  Antisense strand to SEQ ID NO: 1123380
auauuugcagaacuaugca

SEQ ID NO: 1123382 - RNA, 19 nt, Artificial Sequence
  Description of Artificial Sequence: Synthetic oligonucleotide
  Sense strand starting at position 1031 of SEQ ID NO: 916010
auauuucucugugaauuag

SEQ ID NO: 1123383 - RNA, 19 nt, Artificial Sequence
  Description of Artificial Sequence: Synthetic oligonucleotide
  Antisense strand to SEQ ID NO: 1123382
cuaauucacagagaaauau

SEQ ID NO: 1123384 - RNA, 19 nt, Artificial Sequence
  Description of Artificial Sequence: Synthetic oligonucleotide
  Sense strand starting at position 1037 of SEQ ID NO: 916010
cucugugaauuagugacuu

SEQ ID NO: 1123385 - RNA, 19 nt, Artificial Sequence
  Description of Artificial Sequence: Synthetic oligonucleotide
  Antisense strand to SEQ ID NO: 1123384
aagucacuaauucacagag

SEQ ID NO: 1123386 - RNA, 19 nt, Artificial Sequence
  Description of Artificial Sequence: Synthetic oligonucleotide
  Sense strand starting at position 1041 of SEQ ID NO: 916010
gugaauuagugacuuuaug

SEQ ID NO: 1123387 - RNA, 19 nt, Artificial Sequence
  Description of Artificial Sequence: Synthetic oligonucleotide
  Antisense strand to SEQ ID NO: 1123386
cauaaagucacuaauucac

SEQ ID NO: 1123388 - RNA, 19 nt, Artificial Sequence
  Description of Artificial Sequence: Synthetic oligonucleotide
  Sense strand starting at position 1174 of SEQ ID NO: 916010
guauaugagcugugaauaa

SEQ ID NO: 1123389 - RNA, 19 nt, Artificial Sequence
  Description of Artificial Sequence: Synthetic oligonucleotide
  Antisense strand to SEQ ID NO: 1123388
uuauucacagcucauauac

SEQ ID NO: 1123390 - RNA, 19 nt, Artificial Sequence
  Description of Artificial Sequence: Synthetic oligonucleotide
  Sense strand starting at position 1178 of SEQ ID NO: 916010
augagcugugaauaaucuu

SEQ ID NO: 1123391 - RNA, 19 nt, Artificial Sequence
  Description of Artificial Sequence: Synthetic oligonucleotide
  Antisense strand to SEQ ID NO: 1123390
aagauuauucacagcucau

SEQ ID NO: 1123392 - RNA, 19 nt, Artificial Sequence
  Description of Artificial Sequence: Synthetic oligonucleotide
  Sense strand starting at position 1184 of SEQ ID NO: 916010
ugugaauaaucuucugaug

SEQ ID NO: 1123393 - RNA, 19 nt, Artificial Sequence
  Description of Artificial Sequence: Synthetic oligonucleotide
  Antisense strand to SEQ ID NO: 1123392
caucagaagauuauucaca

SEQ ID NO: 1123394 - RNA, 19 nt, Artificial Sequence
  Description of Artificial Sequence: Synthetic oligonucleotide
  Sense strand starting at position 1326 of SEQ ID NO: 916010
cuuauuuaucguggucauc

SEQ ID NO: 1123395 - RNA, 19 nt, Artificial Sequence
  Description of Artificial Sequence: Synthetic oligonucleotide
  Antisense strand to SEQ ID NO: 1123394
gaugaccacgauaaauaag

SEQ ID NO: 1123396 - RNA, 19 nt, Artificial Sequence
  Description of Artificial Sequence: Synthetic oligonucleotide
  Sense strand starting at position 1328 of SEQ ID NO: 916010
uauuuaucguggucaucua

SEQ ID NO: 1123397 - RNA, 19 nt, Artificial Sequence
  Description of Artificial Sequence: Synthetic oligonucleotide
  Antisense strand to SEQ ID NO: 1123396
uagaugaccacgauaaaua

SEQ ID NO: 1123398 - RNA, 19 nt, Artificial Sequence
  Description of Artificial Sequence: Synthetic oligonucleotide
  Sense strand starting at position 1337 of SEQ ID NO: 916010
uggucaucuaaaggagugu

SEQ ID NO: 1123399 - RNA, 19 nt, Artificial Sequence
  Description of Artificial Sequence: Synthetic oligonucleotide
  Antisense strand to SEQ ID NO: 1123398
acacuccuuuagaugacca

SEQ ID NO: 1123400 - RNA, 19 nt, Artificial Sequence
  Description of Artificial Sequence: Synthetic oligonucleotide
  Sense strand starting at position 1338 of SEQ ID NO: 916010
ggucaucuaaaggaguguu

SEQ ID NO: 1123401 - RNA, 19 nt, Artificial Sequence
  Description of Artificial Sequence: Synthetic oligonucleotide
  Antisense strand to SEQ ID NO: 1123400
aacacuccuuuagaugacc

SEQ ID NO: 1123402 - RNA, 19 nt, Artificial Sequence
  Description of Artificial Sequence: Synthetic oligonucleotide
  Sense strand starting at position 1350 of SEQ ID NO: 916010
gaguguuugcuuucuguuc

SEQ ID NO: 1123403 - RNA, 19 nt, Artificial Sequence
  Description of Artificial Sequence: Synthetic oligonucleotide
  Antisense strand to SEQ ID NO: 1123402
gaacagaaagcaaacacuc

SEQ ID NO: 1123404 - RNA, 19 nt, Artificial Sequence
  Description of Artificial Sequence: Synthetic oligonucleotide
  Sense strand starting at position 1478 of SEQ ID NO: 916010
gucuuuacugggcagggaa

SEQ ID NO: 1123405 - RNA, 19 nt, Artificial Sequence
  Description of Artificial Sequence: Synthetic oligonucleotide
  Antisense strand to SEQ ID NO: 1123404
uucccugcccaguaaagac

SEQ ID NO: 1123406 - RNA, 19 nt, Artificial Sequence
  Description of Artificial Sequence: Synthetic oligonucleotide
  Sense strand starting at position 1513 of SEQ ID NO: 916010
uuguauguuccacaagacu

SEQ ID NO: 1123407 - RNA, 19 nt, Artificial Sequence
  Description of Artificial Sequence: Synthetic oligonucleotide
  Antisense strand to SEQ ID NO: 1123406
agucuuguggaacauacaa

SEQ ID NO: 1123408 - RNA, 19 nt, Artificial Sequence
  Description of Artificial Sequence: Synthetic oligonucleotide
  Sense strand starting at position 1532 of SEQ ID NO: 916010
uaacacagagcuugugaua

SEQ ID NO: 1123409 - RNA, 19 nt, Artificial Sequence
  Description of Artificial Sequence: Synthetic oligonucleotide
  Antisense strand to SEQ ID NO: 1123408
uaucacaagcucuguguua

SEQ ID NO: 1123410 - RNA, 19 nt, Artificial Sequence
  Description of Artificial Sequence: Synthetic oligonucleotide
  Sense strand starting at position 2489 of SEQ ID NO: 916010
ucguuuacucgggauggga

SEQ ID NO: 1123411 - RNA, 19 nt, Artificial Sequence
  Description of Artificial Sequence: Synthetic oligonucleotide
  Antisense strand to SEQ ID NO: 1123410
ucccaucccgaguaaacga

SEQ ID NO: 1123412 - RNA, 19 nt, Artificial Sequence
  Description of Artificial Sequence: Synthetic oligonucleotide
  Sense strand starting at position 2526 of SEQ ID NO: 916010
gaggauuccucaucagguu

SEQ ID NO: 1123413 - RNA, 19 nt, Artificial Sequence
  Description of Artificial Sequence: Synthetic oligonucleotide
  Antisense strand to SEQ ID NO: 1123412
aaccugaugaggaauccuc

SEQ ID NO: 1123414 - RNA, 19 nt, Artificial Sequence
  Description of Artificial Sequence: Synthetic oligonucleotide
  Sense strand starting at position 2527 of SEQ ID NO: 916010
aggauuccucaucagguuu

SEQ ID NO: 1123415 - RNA, 19 nt, Artificial Sequence
  Description of Artificial Sequence: Synthetic oligonucleotide
  Antisense strand to SEQ ID NO: 1123414
aaaccugaugaggaauccu

SEQ ID NO: 1123416 - RNA, 19 nt, Artificial Sequence
  Description of Artificial Sequence: Synthetic oligonucleotide
  Sense strand starting at position 2962 of SEQ ID NO: 916010
gggaaacaacgccgugaaa

SEQ ID NO: 1123417 - RNA, 19 nt, Artificial Sequence
  Description of Artificial Sequence: Synthetic oligonucleotide
  Antisense strand to SEQ ID NO: 1123416
uuucacggcguuguuuccc

SEQ ID NO: 1123418 - RNA, 19 nt, Artificial Sequence
  Description of Artificial Sequence: Synthetic oligonucleotide
  Sense strand starting at position 3056 of SEQ ID NO: 916010
ugucauuccguccaaagag

SEQ ID NO: 1123419 - RNA, 19 nt, Artificial Sequence
  Description of Artificial Sequence: Synthetic oligonucleotide
  Antisense strand to SEQ ID NO: 1123418
cucuuuggacggaaugaca

SEQ ID NO: 1123420 - RNA, 19 nt, Artificial Sequence
  Description of Artificial Sequence: Synthetic oligonucleotide
  Sense strand starting at position 3353 of SEQ ID NO: 916010
cgugaucucguacacuaaa

SEQ ID NO: 1123421 - RNA, 19 nt, Artificial Sequence
  Description of Artificial Sequence: Synthetic oligonucleotide
  Antisense strand to SEQ ID NO: 1123420
uuuaguguacgagaucacg

SEQ ID NO: 1123422 - RNA, 19 nt, Artificial Sequence
  Description of Artificial Sequence: Synthetic oligonucleotide
  Sense strand starting at position 3372 of SEQ ID NO: 916010
gcuuuagaaccacggagaa

SEQ ID NO: 1123423 - RNA, 19 nt, Artificial Sequence
  Description of Artificial Sequence: Synthetic oligonucleotide
  Antisense strand to SEQ ID NO: 1123422
uucuccgugguucuaaagc

SEQ ID NO: 1123424 - RNA, 19 nt, Artificial Sequence
  Description of Artificial Sequence: Synthetic oligonucleotide
  Sense strand starting at position 3385 of SEQ ID NO: 916010
ggagaacauuuagacgaua

SEQ ID NO: 1123425 - RNA, 19 nt, Artificial Sequence
  Description of Artificial Sequence: Synthetic oligonucleotide
  Antisense strand to SEQ ID NO: 1123424
uaucgucuaaauguucucc

SEQ ID NO: 1123426 - RNA, 19 nt, Artificial Sequence
  Description of Artificial Sequence: Synthetic oligonucleotide
  Sense strand starting at position 3400 of SEQ ID NO: 916010
gauaauggcccugagugau

SEQ ID NO: 1123427 - RNA, 19 nt, Artificial Sequence
  Description of Artificial Sequence: Synthetic oligonucleotide
  Antisense strand to SEQ ID NO: 1123426
aucacucagggccauuauc

SEQ ID NO: 1123428 - RNA, 19 nt, Artificial Sequence
  Description of Artificial Sequence: Synthetic oligonucleotide
  Sense strand starting at position 3403 of SEQ ID NO: 916010
aauggcccugagugauaau

SEQ ID NO: 1123429 - RNA, 19 nt, Artificial Sequence
  Description of Artificial Sequence: Synthetic oligonucleotide
  Antisense strand to SEQ ID NO: 1123428
auuaucacucagggccauu

SEQ ID NO: 1123430 - RNA, 19 nt, Artificial Sequence
  Description of Artificial Sequence: Synthetic oligonucleotide
  Sense strand starting at position 3404 of SEQ ID NO: 916010
auggcccugagugauaaua

SEQ ID NO: 1123431 - RNA, 19 nt, Artificial Sequence
  Description of Artificial Sequence: Synthetic oligonucleotide
  Antisense strand to SEQ ID NO: 1123430
uauuaucacucagggccau

SEQ ID NO: 1123432 - RNA, 19 nt, Artificial Sequence
  Description of Artificial Sequence: Synthetic oligonucleotide
  Sense strand starting at position 3471 of SEQ ID NO: 916010
agcuuccugccagauauga

SEQ ID NO: 1123433 - RNA, 19 nt, Artificial Sequence
  Description of Artificial Sequence: Synthetic oligonucleotide
  Antisense strand to SEQ ID NO: 1123432
ucauaucuggcaggaagcu

SEQ ID NO: 1123434 - RNA, 19 nt, Artificial Sequence
  Description of Artificial Sequence: Synthetic oligonucleotide
  Sense strand starting at position 3559 of SEQ ID NO: 916010
gugccaugggaccacaauu

SEQ ID NO: 1123435 - RNA, 19 nt, Artificial Sequence
  Description of Artificial Sequence: Synthetic oligonucleotide
  Antisense strand to SEQ ID NO: 1123434
aauuguggucccauggcac

SEQ ID NO: 1123436 - RNA, 19 nt, Artificial Sequence
  Description of Artificial Sequence: Synthetic oligonucleotide
  Sense strand starting at position 3572 of SEQ ID NO: 916010
acaauugcacacgaucaau

SEQ ID NO: 1123437 - RNA, 19 nt, Artificial Sequence
  Description of Artificial Sequence: Synthetic oligonucleotide
  Antisense strand to SEQ ID NO: 1123436
auugaucgugugcaauugu

SEQ ID NO: 1123438 - RNA, 19 nt, Artificial Sequence
  Description of Artificial Sequence: Synthetic oligonucleotide
  Sense strand starting at position 32 of SEQ ID NO: 916011
ccugcuggcuguuuaauuu

SEQ ID NO: 1123439 - RNA, 19 nt, Artificial Sequence
  Description of Artificial Sequence: Synthetic oligonucleotide
  Antisense strand to SEQ ID NO: 1123438
aaauuaaacagccagcagg

SEQ ID NO: 1123440 - RNA, 19 nt, Artificial Sequence
  Description of Artificial Sequence: Synthetic oligonucleotide
  Sense strand starting at position 112 of SEQ ID NO: 916011
uggucuaaucaucauagcu

SEQ ID NO: 1123441 - RNA, 19 nt, Artificial Sequence
  Description of Artificial Sequence: Synthetic oligonucleotide
  Antisense strand to SEQ ID NO: 1123440
agcuaugaugauuagacca

SEQ ID NO: 1123442 - RNA, 19 nt, Artificial Sequence
  Description of Artificial Sequence: Synthetic oligonucleotide
  Sense strand starting at position 336 of SEQ ID NO: 916011
accacaucugguugaauua

SEQ ID NO: 1123443 - RNA, 19 nt, Artificial Sequence
  Description of Artificial Sequence: Synthetic oligonucleotide
  Antisense strand to SEQ ID NO: 1123442
uaauucaaccagauguggu

SEQ ID NO: 1123444 - RNA, 19 nt, Artificial Sequence
  Description of Artificial Sequence: Synthetic oligonucleotide
  Sense strand starting at position 337 of SEQ ID NO: 916011
ccacaucugguugaauuau

SEQ ID NO: 1123445 - RNA, 19 nt, Artificial Sequence
  Description of Artificial Sequence: Synthetic oligonucleotide
  Antisense strand to SEQ ID NO: 1123444
auaauucaaccagaugugg

SEQ ID NO: 1123446 - RNA, 19 nt, Artificial Sequence
  Description of Artificial Sequence: Synthetic oligonucleotide
  Sense strand starting at position 654 of SEQ ID NO: 916011
cugguugaauucuuuauuc

SEQ ID NO: 1123447 - RNA, 19 nt, Artificial Sequence
  Description of Artificial Sequence: Synthetic oligonucleotide
  Antisense strand to SEQ ID NO: 1123446
gaauaaagaauucaaccag

SEQ ID NO: 1123448 - RNA, 19 nt, Artificial Sequence
  Description of Artificial Sequence: Synthetic oligonucleotide
  Sense strand starting at position 779 of SEQ ID NO: 916011
ugcauuguucugggagcca

SEQ ID NO: 1123449 - RNA, 19 nt, Artificial Sequence
  Description of Artificial Sequence: Synthetic oligonucleotide
  Antisense strand to SEQ ID NO: 1123448
uggcucccagaacaaugca

SEQ ID NO: 1123450 - RNA, 19 nt, Artificial Sequence
  Description of Artificial Sequence: Synthetic oligonucleotide
  Sense strand starting at position 955 of SEQ ID NO: 916011
cguggacaucuccagggaa

SEQ ID NO: 1123451 - RNA, 19 nt, Artificial Sequence
  Description of Artificial Sequence: Synthetic oligonucleotide
  Antisense strand to SEQ ID NO: 1123450
uucccuggagauguccacg

SEQ ID NO: 1123452 - RNA, 19 nt, Artificial Sequence
  Description of Artificial Sequence: Synthetic oligonucleotide
  Sense strand starting at position 1100 of SEQ ID NO: 916011
uggccuugacucuaaguga

SEQ ID NO: 1123453 - RNA, 19 nt, Artificial Sequence
  Description of Artificial Sequence: Synthetic oligonucleotide
  Antisense strand to SEQ ID NO: 1123452
ucacuuagagucaaggcca

SEQ ID NO: 1123454 - RNA, 19 nt, Artificial Sequence
  Description of Artificial Sequence: Synthetic oligonucleotide
  Sense strand starting at position 1103 of SEQ ID NO: 916011
ccuugacucuaagugaagu

SEQ ID NO: 1123455 - RNA, 19 nt, Artificial Sequence
  Description of Artificial Sequence: Synthetic oligonucleotide
  Antisense strand to SEQ ID NO: 1123454
acuucacuuagagucaagg

SEQ ID NO: 1123456 - RNA, 19 nt, Artificial Sequence
  Description of Artificial Sequence: Synthetic oligonucleotide
  Sense strand starting at position 1231 of SEQ ID NO: 916011
gagauagugugguucugag

SEQ ID NO: 1123457 - RNA, 19 nt, Artificial Sequence
  Description of Artificial Sequence: Synthetic oligonucleotide
  Antisense strand to SEQ ID NO: 1123456
cucagaaccacacuaucuc

SEQ ID NO: 1123458 - RNA, 19 nt, Artificial Sequence
  Description of Artificial Sequence: Synthetic oligonucleotide
  Sense strand starting at position 1492 of SEQ ID NO: 916011
acuaauguguaaucagcaa

SEQ ID NO: 1123459 - RNA, 19 nt, Artificial Sequence
  Description of Artificial Sequence: Synthetic oligonucleotide
  Antisense strand to SEQ ID NO: 1123458
uugcugauuacacauuagu

SEQ ID NO: 1123460 - RNA, 19 nt, Artificial Sequence
  Description of Artificial Sequence: Synthetic oligonucleotide
  Sense strand starting at position 1496 of SEQ ID NO: 916011
auguguaaucagcaaggcu

SEQ ID NO: 1123461 - RNA, 19 nt, Artificial Sequence
  Description of Artificial Sequence: Synthetic oligonucleotide
  Antisense strand to SEQ ID NO: 1123460
agccuugcugauuacacau

SEQ ID NO: 1123462 - RNA, 19 nt, Artificial Sequence
  Description of Artificial Sequence: Synthetic oligonucleotide
  Sense strand starting at position 1520 of SEQ ID NO: 916011
agccgugguccagaagaaa

SEQ ID NO: 1123463 - RNA, 19 nt, Artificial Sequence
  Description of Artificial Sequence: Synthetic oligonucleotide
  Antisense strand to SEQ ID NO: 1123462
uuucuucuggaccacggcu

SEQ ID NO: 1123464 - RNA, 19 nt, Artificial Sequence
  Description of Artificial Sequence: Synthetic oligonucleotide
  Sense strand starting at position 1693 of SEQ ID NO: 916011
uucccagcuugguuugaau

SEQ ID NO: 1123465 - RNA, 19 nt, Artificial Sequence
  Description of Artificial Sequence: Synthetic oligonucleotide
  Antisense strand to SEQ ID NO: 1123464
auucaaaccaagcugggaa

SEQ ID NO: 1123466 - RNA, 19 nt, Artificial Sequence
  Description of Artificial Sequence: Synthetic oligonucleotide
  Sense strand starting at position 1695 of SEQ ID NO: 916011
cccagcuugguuugaauga

SEQ ID NO: 1123467 - RNA, 19 nt, Artificial Sequence
  Description of Artificial Sequence: Synthetic oligonucleotide
  Antisense strand to SEQ ID NO: 1123466
ucauucaaaccaagcuggg

SEQ ID NO: 1123468 - RNA, 19 nt, Artificial Sequence
  Description of Artificial Sequence: Synthetic oligonucleotide
  Sense strand starting at position 2231 of SEQ ID NO: 916011
ccuggagaggccuguaaca

SEQ ID NO: 1123469 - RNA, 19 nt, Artificial Sequence
  Description of Artificial Sequence: Synthetic oligonucleotide
  Antisense strand to SEQ ID NO: 1123468
uguuacaggccucuccagg

SEQ ID NO: 1123470 - RNA, 19 nt, Artificial Sequence
  Description of Artificial Sequence: Synthetic oligonucleotide
  Sense strand starting at position 2252 of SEQ ID NO: 916011
ccaucaaaucgguggugca

SEQ ID NO: 1123471 - RNA, 19 nt, Artificial Sequence
  Description of Artificial Sequence: Synthetic oligonucleotide
  Antisense strand to SEQ ID NO: 1123470
ugcaccaccgauuugaugg

SEQ ID NO: 1123472 - RNA, 19 nt, Artificial Sequence
  Description of Artificial Sequence: Synthetic oligonucleotide
  Sense strand starting at position 2253 of SEQ ID NO: 916011
caucaaaucgguggugcaa

SEQ ID NO: 1123473 - RNA, 19 nt, Artificial Sequence
  Description of Artificial Sequence: Synthetic oligonucleotide
  Antisense strand to SEQ ID NO: 1123472
uugcaccaccgauuugaug

SEQ ID NO: 1123474 - RNA, 19 nt, Artificial Sequence
  Description of Artificial Sequence: Synthetic oligonucleotide
  Sense strand starting at position 2299 of SEQ ID NO: 916011
gaaauugccucucuuagug

SEQ ID NO: 1123475 - RNA, 19 nt, Artificial Sequence
  Description of Artificial Sequence: Synthetic oligonucleotide
  Antisense strand to SEQ ID NO: 1123474
cacuaagagaggcaauuuc

SEQ ID NO: 1123476 - RNA, 19 nt, Artificial Sequence
  Description of Artificial Sequence: Synthetic oligonucleotide
  Sense strand starting at position 2350 of SEQ ID NO: 916011
gugggauagccucacuauc

SEQ ID NO: 1123477 - RNA, 19 nt, Artificial Sequence
  Description of Artificial Sequence: Synthetic oligonucleotide
  Antisense strand to SEQ ID NO: 1123476
gauagugaggcuaucccac

SEQ ID NO: 1123478 - RNA, 19 nt, Artificial Sequence
  Description of Artificial Sequence: Synthetic oligonucleotide
  Sense strand starting at position 2388 of SEQ ID NO: 916011
cucaguuaauggcucgaaa

SEQ ID NO: 1123479 - RNA, 19 nt, Artificial Sequence
  Description of Artificial Sequence: Synthetic oligonucleotide
  Antisense strand to SEQ ID NO: 1123478
uuucgagccauuaacugag

SEQ ID NO: 1123480 - RNA, 19 nt, Artificial Sequence
  Description of Artificial Sequence: Synthetic oligonucleotide
  Sense strand starting at position 2390 of SEQ ID NO: 916011
caguuaauggcucgaaaga

SEQ ID NO: 1123481 - RNA, 19 nt, Artificial Sequence
  Description of Artificial Sequence: Synthetic oligonucleotide
  Antisense strand to SEQ ID NO: 1123480
ucuuucgagccauuaacug

SEQ ID NO: 1123482 - RNA, 19 nt, Artificial Sequence
  Description of Artificial Sequence: Synthetic oligonucleotide
  Sense strand starting at position 2391 of SEQ ID NO: 916011
aguuaauggcucgaaagaa

SEQ ID NO: 1123483 - RNA, 19 nt, Artificial Sequence
  Description of Artificial Sequence: Synthetic oligonucleotide
  Antisense strand to SEQ ID NO: 1123482
uucuuucgagccauuaacu

SEQ ID NO: 1123484 - RNA, 19 nt, Artificial Sequence
  Description of Artificial Sequence: Synthetic oligonucleotide
  Sense strand starting at position 2437 of SEQ ID NO: 916011
ggcccuggguggagucauu

SEQ ID NO: 1123485 - RNA, 19 nt, Artificial Sequence
  Description of Artificial Sequence: Synthetic oligonucleotide
  Antisense strand to SEQ ID NO: 1123484
aaugacuccacccagggcc

SEQ ID NO: 1123486 - RNA, 19 nt, Artificial Sequence
  Description of Artificial Sequence: Synthetic oligonucleotide
  Sense strand starting at position 2940 of SEQ ID NO: 916011
ugggcuuuacuguggguua

SEQ ID NO: 1123487 - RNA, 19 nt, Artificial Sequence
  Description of Artificial Sequence: Synthetic oligonucleotide
  Antisense strand to SEQ ID NO: 1123486
uaacccacaguaaagccca

SEQ ID NO: 1123488 - RNA, 19 nt, Artificial Sequence
  Description of Artificial Sequence: Synthetic oligonucleotide
  Sense strand starting at position 2942 of SEQ ID NO: 916011
ggcuuuacuguggguuaga

SEQ ID NO: 1123489 - RNA, 19 nt, Artificial Sequence
  Description of Artificial Sequence: Synthetic oligonucleotide
  Antisense strand to SEQ ID NO: 1123488
ucuaacccacaguaaagcc

SEQ ID NO: 1123490 - RNA, 19 nt, Artificial Sequence
  Description of Artificial Sequence: Synthetic oligonucleotide
  Sense strand starting at position 2943 of SEQ ID NO: 916011
gcuuuacuguggguuagau

SEQ ID NO: 1123491 - RNA, 19 nt, Artificial Sequence
  Description of Artificial Sequence: Synthetic oligonucleotide
  Antisense strand to SEQ ID NO: 1123490
aucuaacccacaguaaagc

SEQ ID NO: 1123492 - RNA, 19 nt, Artificial Sequence
  Description of Artificial Sequence: Synthetic oligonucleotide
  Sense strand starting at position 2966 of SEQ ID NO: 916011
ugcucagcacucuauagua

SEQ ID NO: 1123493 - RNA, 19 nt, Artificial Sequence
  Description of Artificial Sequence: Synthetic oligonucleotide
  Antisense strand to SEQ ID NO: 1123492
uacuauagagugcugagca

SEQ ID NO: 1123494 - RNA, 19 nt, Artificial Sequence
  Description of Artificial Sequence: Synthetic oligonucleotide
  Sense strand starting at position 3203 of SEQ ID NO: 916011
accuauaguuccuuguaau

SEQ ID NO: 1123495 - RNA, 19 nt, Artificial Sequence
  Description of Artificial Sequence: Synthetic oligonucleotide
  Antisense strand to SEQ ID NO: 1123494
auuacaaggaacuauaggu

SEQ ID NO: 1123496 - RNA, 19 nt, Artificial Sequence
  Description of Artificial Sequence: Synthetic oligonucleotide
  Sense strand starting at position 3204 of SEQ ID NO: 916011
ccuauaguuccuuguaauc

SEQ ID NO: 1123497 - RNA, 19 nt, Artificial Sequence
  Description of Artificial Sequence: Synthetic oligonucleotide
  Antisense strand to SEQ ID NO: 1123496
gauuacaaggaacuauagg

SEQ ID NO: 1123498 - RNA, 19 nt, Artificial Sequence
  Description of Artificial Sequence: Synthetic oligonucleotide
  Sense strand starting at position 3209 of SEQ ID NO: 916011
aguuccuuguaauccuaca

SEQ ID NO: 1123499 - RNA, 19 nt, Artificial Sequence
  Description of Artificial Sequence: Synthetic oligonucleotide
  Antisense strand to SEQ ID NO: 1123498
uguaggauuacaaggaacu

SEQ ID NO: 1123500 - RNA, 19 nt, Artificial Sequence
  Description of Artificial Sequence: Synthetic oligonucleotide
  Sense strand starting at position 3241 of SEQ ID NO: 916011
uccuaaggauuucguuaga

SEQ ID NO: 1123501 - RNA, 19 nt, Artificial Sequence
  Description of Artificial Sequence: Synthetic oligonucleotide
  Antisense strand to SEQ ID NO: 1123500
ucuaacgaaauccuuagga

SEQ ID NO: 1123502 - RNA, 19 nt, Artificial Sequence
  Description of Artificial Sequence: Synthetic oligonucleotide
  Sense strand starting at position 3246 of SEQ ID NO: 916011
aggauuucguuagagcaug

SEQ ID NO: 1123503 - RNA, 19 nt, Artificial Sequence
  Description of Artificial Sequence: Synthetic oligonucleotide
  Antisense strand to SEQ ID NO: 1123502
caugcucuaacgaaauccu

SEQ ID NO: 1123504 - RNA, 19 nt, Artificial Sequence
  Description of Artificial Sequence: Synthetic oligonucleotide
  Sense strand starting at position 3424 of SEQ ID NO: 916011
gggauaguggcaugugucu

SEQ ID NO: 1123505 - RNA, 19 nt, Artificial Sequence
  Description of Artificial Sequence: Synthetic oligonucleotide
  Antisense strand to SEQ ID NO: 1123504
agacacaugccacuauccc

SEQ ID NO: 1123506 - RNA, 19 nt, Artificial Sequence
  Description of Artificial Sequence: Synthetic oligonucleotide
  Sense strand starting at position 3426 of SEQ ID NO: 916011
gauaguggcaugugucuau

SEQ ID NO: 1123507 - RNA, 19 nt, Artificial Sequence
  Description of Artificial Sequence: Synthetic oligonucleotide
  Antisense strand to SEQ ID NO: 1123506
auagacacaugccacuauc

SEQ ID NO: 1123508 - RNA, 19 nt, Artificial Sequence
  Description of Artificial Sequence: Synthetic oligonucleotide
  Sense strand starting at position 3657 of SEQ ID NO: 916011
ugcugucuuucugcacaaa

SEQ ID NO: 1123509 - RNA, 19 nt, Artificial Sequence
  Description of Artificial Sequence: Synthetic oligonucleotide
  Antisense strand to SEQ ID NO: 1123508
uuugugcagaaagacagca

SEQ ID NO: 1123510 - RNA, 19 nt, Artificial Sequence
  Description of Artificial Sequence: Synthetic oligonucleotide
  Sense strand starting at position 3658 of SEQ ID NO: 916011
gcugucuuucugcacaaau

SEQ ID NO: 1123511 - RNA, 19 nt, Artificial Sequence
  Description of Artificial Sequence: Synthetic oligonucleotide
  Antisense strand to SEQ ID NO: 1123510
auuugugcagaaagacagc

SEQ ID NO: 1123512 - RNA, 19 nt, Artificial Sequence
  Description of Artificial Sequence: Synthetic oligonucleotide
  Sense strand starting at position 3660 of SEQ ID NO: 916011
ugucuuucugcacaaauug

SEQ ID NO: 1123513 - RNA, 19 nt, Artificial Sequence
  Description of Artificial Sequence: Synthetic oligonucleotide
  Antisense strand to SEQ ID NO: 1123512
caauuugugcagaaagaca

SEQ ID NO: 1123514 - RNA, 19 nt, Artificial Sequence
  Description of Artificial Sequence: Synthetic oligonucleotide
  Sense strand starting at position 3671 of SEQ ID NO: 916011
acaaauugaugugaaguua

SEQ ID NO: 1123515 - RNA, 19 nt, Artificial Sequence
  Description of Artificial Sequence: Synthetic oligonucleotide
  Antisense strand to SEQ ID NO: 1123514
uaacuucacaucaauuugu

SEQ ID NO: 1123516 - RNA, 19 nt, Artificial Sequence
  Description of Artificial Sequence: Synthetic oligonucleotide
  Sense strand starting at position 3834 of SEQ ID NO: 916011
uggaguagcugagauugaa

SEQ ID NO: 1123517 - RNA, 19 nt, Artificial Sequence
  Description of Artificial Sequence: Synthetic oligonucleotide
  Antisense strand to SEQ ID NO: 1123516
uucaaucucagcuacucca

SEQ ID NO: 1123518 - RNA, 19 nt, Artificial Sequence
  Description of Artificial Sequence: Synthetic oligonucleotide
  Sense strand starting at position 41 of SEQ ID NO: 916012
gugaauaucuaagucccau

SEQ ID NO: 1123519 - RNA, 19 nt, Artificial Sequence
  Description of Artificial Sequence: Synthetic oligonucleotide
  Antisense strand to SEQ ID NO: 1123518
augggacuuagauauucac

SEQ ID NO: 1123520 - RNA, 19 nt, Artificial Sequence
  Description of Artificial Sequence: Synthetic oligonucleotide
  Sense strand starting at position 143 of SEQ ID NO: 916012
cagggauucccuggauccu

SEQ ID NO: 1123521 - RNA, 19 nt, Artificial Sequence
  Description of Artificial Sequence: Synthetic oligonucleotide
  Antisense strand to SEQ ID NO: 1123520
aggauccagggaaucccug

SEQ ID NO: 1123522 - RNA, 19 nt, Artificial Sequence
  Description of Artificial Sequence: Synthetic oligonucleotide
  Sense strand starting at position 307 of SEQ ID NO: 916012
ugcugugccaguucuggua

SEQ ID NO: 1123523 - RNA, 19 nt, Artificial Sequence
  Description of Artificial Sequence: Synthetic oligonucleotide
  Antisense strand to SEQ ID NO: 1123522
uaccagaacuggcacagca

SEQ ID NO: 1123524 - RNA, 19 nt, Artificial Sequence
  Description of Artificial Sequence: Synthetic oligonucleotide
  Sense strand starting at position 331 of SEQ ID NO: 916012
ucccuaguuggguacuuaa

SEQ ID NO: 1123525 - RNA, 19 nt, Artificial Sequence
  Description of Artificial Sequence: Synthetic oligonucleotide
  Antisense strand to SEQ ID NO: 1123524
uuaaguacccaacuaggga

SEQ ID NO: 1123526 - RNA, 19 nt, Artificial Sequence
  Description of Artificial Sequence: Synthetic oligonucleotide
  Sense strand starting at position 637 of SEQ ID NO: 916012
gcuugaucaacauguugga

SEQ ID NO: 1123527 - RNA, 19 nt, Artificial Sequence
  Description of Artificial Sequence: Synthetic oligonucleotide
  Antisense strand to SEQ ID NO: 1123526
uccaacauguugaucaagc

SEQ ID NO: 1123528 - RNA, 19 nt, Artificial Sequence
  Description of Artificial Sequence: Synthetic oligonucleotide
  Sense strand starting at position 1005 of SEQ ID NO: 916012
gugaugagaggucacggua

SEQ ID NO: 1123529 - RNA, 19 nt, Artificial Sequence
  Description of Artificial Sequence: Synthetic oligonucleotide
  Antisense strand to SEQ ID NO: 1123528
uaccgugaccucucaucac

SEQ ID NO: 1123530 - RNA, 19 nt, Artificial Sequence
  Description of Artificial Sequence: Synthetic oligonucleotide
  Sense strand starting at position 1008 of SEQ ID NO: 916012
augagaggucacgguacau

SEQ ID NO: 1123531 - RNA, 19 nt, Artificial Sequence
  Description of Artificial Sequence: Synthetic oligonucleotide
  Antisense strand to SEQ ID NO: 1123530
auguaccgugaccucucau

SEQ ID NO: 1123532 - RNA, 19 nt, Artificial Sequence
  Description of Artificial Sequence: Synthetic oligonucleotide
  Sense strand starting at position 1012 of SEQ ID NO: 916012
gaggucacgguacaugaau

SEQ ID NO: 1123533 - RNA, 19 nt, Artificial Sequence
  Description of Artificial Sequence: Synthetic oligonucleotide
  Antisense strand to SEQ ID NO: 1123532
auucauguaccgugaccuc

SEQ ID NO: 1123534 - RNA, 19 nt, Artificial Sequence
  Description of Artificial Sequence: Synthetic oligonucleotide
  Sense strand starting at position 1014 of SEQ ID NO: 916012
ggucacgguacaugaauaa

SEQ ID NO: 1123535 - RNA, 19 nt, Artificial Sequence
  Description of Artificial Sequence: Synthetic oligonucleotide
  Antisense strand to SEQ ID NO: 1123534
uuauucauguaccgugacc

SEQ ID NO: 1123536 - RNA, 19 nt, Artificial Sequence
  Description of Artificial Sequence: Synthetic oligonucleotide
  Sense strand starting at position 1068 of SEQ ID NO: 916012
ucagcagugaaaggugauu

SEQ ID NO: 1123537 - RNA, 19 nt, Artificial Sequence
  Description of Artificial Sequence: Synthetic oligonucleotide
  Antisense strand to SEQ ID NO: 1123536
aaucaccuuucacugcuga

SEQ ID NO: 1123538 - RNA, 19 nt, Artificial Sequence
  Description of Artificial Sequence: Synthetic oligonucleotide
  Sense strand starting at position 1079 of SEQ ID NO: 916012
aggugauuuccaggcgacu

SEQ ID NO: 1123539 - RNA, 19 nt, Artificial Sequence
  Description of Artificial Sequence: Synthetic oligonucleotide
  Antisense strand to SEQ ID NO: 1123538
agucgccuggaaaucaccu

SEQ ID NO: 1123540 - RNA, 19 nt, Artificial Sequence
  Description of Artificial Sequence: Synthetic oligonucleotide
  Sense strand starting at position 1081 of SEQ ID NO: 916012
gugauuuccaggcgacucu

SEQ ID NO: 1123541 - RNA, 19 nt, Artificial Sequence
  Description of Artificial Sequence: Synthetic oligonucleotide
  Antisense strand to SEQ ID NO: 1123540
agagucgccuggaaaucac

SEQ ID NO: 1123542 - RNA, 19 nt, Artificial Sequence
  Description of Artificial Sequence: Synthetic oligonucleotide
  Sense strand starting at position 1293 of SEQ ID NO: 916012
acauaaucacgaggcacuu

SEQ ID NO: 1123543 - RNA, 19 nt, Artificial Sequence
  Description of Artificial Sequence: Synthetic oligonucleotide
  Antisense strand to SEQ ID NO: 1123542
aagugccucgugauuaugu

SEQ ID NO: 1123544 - RNA, 19 nt, Artificial Sequence
  Description of Artificial Sequence: Synthetic oligonucleotide
  Sense strand starting at position 1312 of SEQ ID NO: 916012
ugcugugugauaugaauuu

SEQ ID NO: 1123545 - RNA, 19 nt, Artificial Sequence
  Description of Artificial Sequence: Synthetic oligonucleotide
  Antisense strand to SEQ ID NO: 1123544
aaauucauaucacacagca

SEQ ID NO: 1123546 - RNA, 19 nt, Artificial Sequence
  Description of Artificial Sequence: Synthetic oligonucleotide
  Sense strand starting at position 1321 of SEQ ID NO: 916012
auaugaauuucuugaagga

SEQ ID NO: 1123547 - RNA, 19 nt, Artificial Sequence
  Description of Artificial Sequence: Synthetic oligonucleotide
  Antisense strand to SEQ ID NO: 1123546
uccuucaagaaauucauau

SEQ ID NO: 1123548 - RNA, 19 nt, Artificial Sequence
  Description of Artificial Sequence: Synthetic oligonucleotide
  Sense strand starting at position 1341 of SEQ ID NO: 916012
ugggaauagucauuaacuu

SEQ ID NO: 1123549 - RNA, 19 nt, Artificial Sequence
  Description of Artificial Sequence: Synthetic oligonucleotide
  Antisense strand to SEQ ID NO: 1123548
aaguuaaugacuauuccca

SEQ ID NO: 1123550 - RNA, 19 nt, Artificial Sequence
  Description of Artificial Sequence: Synthetic oligonucleotide
  Sense strand starting at position 2096 of SEQ ID NO: 916012
caguuagagcacugaaauc

SEQ ID NO: 1123551 - RNA, 19 nt, Artificial Sequence
  Description of Artificial Sequence: Synthetic oligonucleotide
  Antisense strand to SEQ ID NO: 1123550
gauuucagugcucuaacug

SEQ ID NO: 1123552 - RNA, 19 nt, Artificial Sequence
  Description of Artificial Sequence: Synthetic oligonucleotide
  Sense strand starting at position 2106 of SEQ ID NO: 916012
acugaaaucuuagaaagga

SEQ ID NO: 1123553 - RNA, 19 nt, Artificial Sequence
  Description of Artificial Sequence: Synthetic oligonucleotide
  Antisense strand to SEQ ID NO: 1123552
uccuuucuaagauuucagu

SEQ ID NO: 1123554 - RNA, 19 nt, Artificial Sequence
  Description of Artificial Sequence: Synthetic oligonucleotide
  Sense strand starting at position 2171 of SEQ ID NO: 916012
ugagguuaucccuacuuag

SEQ ID NO: 1123555 - RNA, 19 nt, Artificial Sequence
  Description of Artificial Sequence: Synthetic oligonucleotide
  Antisense strand to SEQ ID NO: 1123554
cuaaguagggauaaccuca

SEQ ID NO: 1123556 - RNA, 19 nt, Artificial Sequence
  Description of Artificial Sequence: Synthetic oligonucleotide
  Sense strand starting at position 2214 of SEQ ID NO: 916012
gucauuccuugagcaacaa

SEQ ID NO: 1123557 - RNA, 19 nt, Artificial Sequence
  Description of Artificial Sequence: Synthetic oligonucleotide
  Antisense strand to SEQ ID NO: 1123556
uuguugcucaaggaaugac

SEQ ID NO: 1123558 - RNA, 19 nt, Artificial Sequence
  Description of Artificial Sequence: Synthetic oligonucleotide
  Sense strand starting at position 2323 of SEQ ID NO: 916012
agagguuuaugcccugaag

SEQ ID NO: 1123559 - RNA, 19 nt, Artificial Sequence
  Description of Artificial Sequence: Synthetic oligonucleotide
  Antisense strand to SEQ ID NO: 1123558
cuucagggcauaaaccucu

SEQ ID NO: 1123560 - RNA, 19 nt, Artificial Sequence
  Description of Artificial Sequence: Synthetic oligonucleotide
  Sense strand starting at position 2325 of SEQ ID NO: 916012
agguuuaugcccugaagaa

SEQ ID NO: 1123561 - RNA, 19 nt, Artificial Sequence
  Description of Artificial Sequence: Synthetic oligonucleotide
  Antisense strand to SEQ ID NO: 1123560
uucuucagggcauaaaccu

SEQ ID NO: 1123562 - RNA, 19 nt, Artificial Sequence
  Description of Artificial Sequence: Synthetic oligonucleotide
  Sense strand starting at position 2326 of SEQ ID NO: 916012
gguuuaugcccugaagaau

SEQ ID NO: 1123563 - RNA, 19 nt, Artificial Sequence
  Description of Artificial Sequence: Synthetic oligonucleotide
  Antisense strand to SEQ ID NO: 1123562
auucuucagggcauaaacc

SEQ ID NO: 1123564 - RNA, 19 nt, Artificial Sequence
  Description of Artificial Sequence: Synthetic oligonucleotide
  Sense strand starting at position 2335 of SEQ ID NO: 916012
ccugaagaaugagaaauaa

SEQ ID NO: 1123565 - RNA, 19 nt, Artificial Sequence
  Description of Artificial Sequence: Synthetic oligonucleotide
  Antisense strand to SEQ ID NO: 1123564
uuauuucucauucuucagg

SEQ ID NO: 1123566 - RNA, 19 nt, Artificial Sequence
  Description of Artificial Sequence: Synthetic oligonucleotide
  Sense strand starting at position 2554 of SEQ ID NO: 916012
ugucaacuacuagauguga

SEQ ID NO: 1123567 - RNA, 19 nt, Artificial Sequence
  Description of Artificial Sequence: Synthetic oligonucleotide
  Antisense strand to SEQ ID NO: 1123566
ucacaucuaguaguugaca

SEQ ID NO: 1123568 - RNA, 19 nt, Artificial Sequence
  Description of Artificial Sequence: Synthetic oligonucleotide
  Sense strand starting at position 2700 of SEQ ID NO: 916012
aggaucauagcucaccuua

SEQ ID NO: 1123569 - RNA, 19 nt, Artificial Sequence
  Description of Artificial Sequence: Synthetic oligonucleotide
  Antisense strand to SEQ ID NO: 1123568
uaaggugagcuaugauccu

SEQ ID NO: 1123570 - RNA, 19 nt, Artificial Sequence
  Description of Artificial Sequence: Synthetic oligonucleotide
  Sense strand starting at position 2836 of SEQ ID NO: 916012
aauggagaaugguaggaaa

SEQ ID NO: 1123571 - RNA, 19 nt, Artificial Sequence
  Description of Artificial Sequence: Synthetic oligonucleotide
  Antisense strand to SEQ ID NO: 1123570
uuuccuaccauucuccauu

SEQ ID NO: 1123572 - RNA, 19 nt, Artificial Sequence
  Description of Artificial Sequence: Synthetic oligonucleotide
  Sense strand starting at position 2917 of SEQ ID NO: 916012
cgcacaaaucaaggagaga

SEQ ID NO: 1123573 - RNA, 19 nt, Artificial Sequence
  Description of Artificial Sequence: Synthetic oligonucleotide
  Antisense strand to SEQ ID NO: 1123572
ucucuccuugauuugugcg

SEQ ID NO: 1123574 - RNA, 19 nt, Artificial Sequence
  Description of Artificial Sequence: Synthetic oligonucleotide
  Sense strand starting at position 3178 of SEQ ID NO: 916012
gcaaccaaucauuggcuaa

SEQ ID NO: 1123575 - RNA, 19 nt, Artificial Sequence
  Description of Artificial Sequence: Synthetic oligonucleotide
  Antisense strand to SEQ ID NO: 1123574
uuagccaaugauugguugc

SEQ ID NO: 1123576 - RNA, 19 nt, Artificial Sequence
  Description of Artificial Sequence: Synthetic oligonucleotide
  Sense strand starting at position 3181 of SEQ ID NO: 916012
accaaucauuggcuaaagu

SEQ ID NO: 1123577 - RNA, 19 nt, Artificial Sequence
  Description of Artificial Sequence: Synthetic oligonucleotide
  Antisense strand to SEQ ID NO: 1123576
acuuuagccaaugauuggu

SEQ ID NO: 1123578 - RNA, 19 nt, Artificial Sequence
  Description of Artificial Sequence: Synthetic oligonucleotide
  Sense strand starting at position 3188 of SEQ ID NO: 916012
auuggcuaaagugauguua

SEQ ID NO: 1123579 - RNA, 19 nt, Artificial Sequence
  Description of Artificial Sequence: Synthetic oligonucleotide
  Antisense strand to SEQ ID NO: 1123578
uaacaucacuuuagccaau

SEQ ID NO: 1123580 - RNA, 19 nt, Artificial Sequence
  Description of Artificial Sequence: Synthetic oligonucleotide
  Sense strand starting at position 3230 of SEQ ID NO: 916012
gaagauuuggcccgcaauc

SEQ ID NO: 1123581 - RNA, 19 nt, Artificial Sequence
  Description of Artificial Sequence: Synthetic oligonucleotide
  Antisense strand to SEQ ID NO: 1123580
gauugcgggccaaaucuuc

SEQ ID NO: 1123582 - RNA, 19 nt, Artificial Sequence
  Description of Artificial Sequence: Synthetic oligonucleotide
  Sense strand starting at position 3250 of SEQ ID NO: 916012
gucugauugguugagguac

SEQ ID NO: 1123583 - RNA, 19 nt, Artificial Sequence
  Description of Artificial Sequence: Synthetic oligonucleotide
  Antisense strand to SEQ ID NO: 1123582
guaccucaaccaaucagac

SEQ ID NO: 1123584 - RNA, 19 nt, Artificial Sequence
  Description of Artificial Sequence: Synthetic oligonucleotide
  Sense strand starting at position 3390 of SEQ ID NO: 916012
gcgugaaucggcguuaggu

SEQ ID NO: 1123585 - RNA, 19 nt, Artificial Sequence
  Description of Artificial Sequence: Synthetic oligonucleotide
  Antisense strand to SEQ ID NO: 1123584
accuaacgccgauucacgc

SEQ ID NO: 1123586 - RNA, 19 nt, Artificial Sequence
  Description of Artificial Sequence: Synthetic oligonucleotide
  Sense strand starting at position 3391 of SEQ ID NO: 916012
cgugaaucggcguuagguu

SEQ ID NO: 1123587 - RNA, 19 nt, Artificial Sequence
  Description of Artificial Sequence: Synthetic oligonucleotide
  Antisense strand to SEQ ID NO: 1123586
aaccuaacgccgauucacg

SEQ ID NO: 1123588 - RNA, 19 nt, Artificial Sequence
  Description of Artificial Sequence: Synthetic oligonucleotide
  Sense strand starting at position 3424 of SEQ ID NO: 916012
ccuauucugccucaggaga

SEQ ID NO: 1123589 - RNA, 19 nt, Artificial Sequence
  Description of Artificial Sequence: Synthetic oligonucleotide
  Antisense strand to SEQ ID NO: 1123588
ucuccugaggcagaauagg

SEQ ID NO: 1123590 - RNA, 19 nt, Artificial Sequence
  Description of Artificial Sequence: Synthetic oligonucleotide
  Sense strand starting at position 3493 of SEQ ID NO: 916012
auaguccauguuuaucuaa

SEQ ID NO: 1123591 - RNA, 19 nt, Artificial Sequence
  Description of Artificial Sequence: Synthetic oligonucleotide
  Antisense strand to SEQ ID NO: 1123590
uuagauaaacauggacuau

SEQ ID NO: 1123592 - RNA, 19 nt, Artificial Sequence
  Description of Artificial Sequence: Synthetic oligonucleotide
  Sense strand starting at position 3495 of SEQ ID NO: 916012
aguccauguuuaucuaaug

SEQ ID NO: 1123593 - RNA, 19 nt, Artificial Sequence
  Description of Artificial Sequence: Synthetic oligonucleotide
  Antisense strand to SEQ ID NO: 1123592
cauuagauaaacauggacu

SEQ ID NO: 1123594 - RNA, 19 nt, Artificial Sequence
  Description of Artificial Sequence: Synthetic oligonucleotide
  Sense strand starting at position 3595 of SEQ ID NO: 916012
gugaucaccuucuccugau

SEQ ID NO: 1123595 - RNA, 19 nt, Artificial Sequence
  Description of Artificial Sequence: Synthetic oligonucleotide
  Antisense strand to SEQ ID NO: 1123594
aucaggagaaggugaucac

SEQ ID NO: 1123596 - RNA, 19 nt, Artificial Sequence
  Description of Artificial Sequence: Synthetic oligonucleotide
  Sense strand starting at position 3724 of SEQ ID NO: 916012
ucucuagaguuucucacau

SEQ ID NO: 1123597 - RNA, 19 nt, Artificial Sequence
  Description of Artificial Sequence: Synthetic oligonucleotide
  Antisense strand to SEQ ID NO: 1123596
augugagaaacucuagaga

SEQ ID NO: 1123598 - RNA, 19 nt, Artificial Sequence
  Description of Artificial Sequence: Synthetic oligonucleotide
  Sense strand starting at position 33 of SEQ ID NO: 916013
aguuuaugugaguaaucca

SEQ ID NO: 1123599 - RNA, 19 nt, Artificial Sequence
  Description of Artificial Sequence: Synthetic oligonucleotide
  Antisense strand to SEQ ID NO: 1123598
uggauuacucacauaaacu

SEQ ID NO: 1123600 - RNA, 19 nt, Artificial Sequence
  Description of Artificial Sequence: Synthetic oligonucleotide
  Sense strand starting at position 36 of SEQ ID NO: 916013
uuaugugaguaauccauuc

SEQ ID NO: 1123601 - RNA, 19 nt, Artificial Sequence
  Description of Artificial Sequence: Synthetic oligonucleotide
  Antisense strand to SEQ ID NO: 1123600
gaauggauuacucacauaa

SEQ ID NO: 1123602 - RNA, 19 nt, Artificial Sequence
  Description of Artificial Sequence: Synthetic oligonucleotide
  Sense strand starting at position 344 of SEQ ID NO: 916013
ugucaauuaggcuaaacca

SEQ ID NO: 1123603 - RNA, 19 nt, Artificial Sequence
  Description of Artificial Sequence: Synthetic oligonucleotide
  Antisense strand to SEQ ID NO: 1123602
ugguuuagccuaauugaca

SEQ ID NO: 1123604 - RNA, 19 nt, Artificial Sequence
  Description of Artificial Sequence: Synthetic oligonucleotide
  Sense strand starting at position 414 of SEQ ID NO: 916013
cuaauuaaaccgugacuuc

SEQ ID NO: 1123605 - RNA, 19 nt, Artificial Sequence
  Description of Artificial Sequence: Synthetic oligonucleotide
  Antisense strand to SEQ ID NO: 1123604
gaagucacgguuuaauuag

SEQ ID NO: 1123606 - RNA, 19 nt, Artificial Sequence
  Description of Artificial Sequence: Synthetic oligonucleotide
  Sense strand starting at position 417 of SEQ ID NO: 916013
auuaaaccgugacuucuaa

SEQ ID NO: 1123607 - RNA, 19 nt, Artificial Sequence
  Description of Artificial Sequence: Synthetic oligonucleotide
  Antisense strand to SEQ ID NO: 1123606
uuagaagucacgguuuaau

SEQ ID NO: 1123608 - RNA, 19 nt, Artificial Sequence
  Description of Artificial Sequence: Synthetic oligonucleotide
  Sense strand starting at position 657 of SEQ ID NO: 916013
gacaaaggauggucgacuu

SEQ ID NO: 1123609 - RNA, 19 nt, Artificial Sequence
  Description of Artificial Sequence: Synthetic oligonucleotide
  Antisense strand to SEQ ID NO: 1123608
aagucgaccauccuuuguc

SEQ ID NO: 1123610 - RNA, 19 nt, Artificial Sequence
  Description of Artificial Sequence: Synthetic oligonucleotide
  Sense strand starting at position 844 of SEQ ID NO: 916013
cuuguccuacauugaggaa

SEQ ID NO: 1123611 - RNA, 19 nt, Artificial Sequence
  Description of Artificial Sequence: Synthetic oligonucleotide
  Antisense strand to SEQ ID NO: 1123610
uuccucaauguaggacaag

SEQ ID NO: 1123612 - RNA, 19 nt, Artificial Sequence
  Description of Artificial Sequence: Synthetic oligonucleotide
  Sense strand starting at position 907 of SEQ ID NO: 916013
uggagcuguuaauuacaaa

SEQ ID NO: 1123613 - RNA, 19 nt, Artificial Sequence
  Description of Artificial Sequence: Synthetic oligonucleotide
  Antisense strand to SEQ ID NO: 1123612
uuuguaauuaacagcucca

SEQ ID NO: 1123614 - RNA, 19 nt, Artificial Sequence
  Description of Artificial Sequence: Synthetic oligonucleotide
  Sense strand starting at position 1111 of SEQ ID NO: 916013
guugcacaacuugaguuua

SEQ ID NO: 1123615 - RNA, 19 nt, Artificial Sequence
  Description of Artificial Sequence: Synthetic oligonucleotide
  Antisense strand to SEQ ID NO: 1123614
uaaacucaaguugugcaac

SEQ ID NO: 1123616 - RNA, 19 nt, Artificial Sequence
  Description of Artificial Sequence: Synthetic oligonucleotide
  Sense strand starting at position 1113 of SEQ ID NO: 916013
ugcacaacuugaguuuaca

SEQ ID NO: 1123617 - RNA, 19 nt, Artificial Sequence
  Description of Artificial Sequence: Synthetic oligonucleotide
  Antisense strand to SEQ ID NO: 1123616
uguaaacucaaguugugca

SEQ ID NO: 1123618 - RNA, 19 nt, Artificial Sequence
  Description of Artificial Sequence: Synthetic oligonucleotide
  Sense strand starting at position 1421 of SEQ ID NO: 916013
ggccucggguauuuguaau

SEQ ID NO: 1123619 - RNA, 19 nt, Artificial Sequence
  Description of Artificial Sequence: Synthetic oligonucleotide
  Antisense strand to SEQ ID NO: 1123618
auuacaaauacccgaggcc

SEQ ID NO: 1123620 - RNA, 19 nt, Artificial Sequence
  Description of Artificial Sequence: Synthetic oligonucleotide
  Sense strand starting at position 1427 of SEQ ID NO: 916013
ggguauuuguaauaaggaa

SEQ ID NO: 1123621 - RNA, 19 nt, Artificial Sequence
  Description of Artificial Sequence: Synthetic oligonucleotide
  Antisense strand to SEQ ID NO: 1123620
uuccuuauuacaaauaccc

SEQ ID NO: 1123622 - RNA, 19 nt, Artificial Sequence
  Description of Artificial Sequence: Synthetic oligonucleotide
  Sense strand starting at position 1444 of SEQ ID NO: 916013
aagaauucggagcaguguu

SEQ ID NO: 1123623 - RNA, 19 nt, Artificial Sequence
  Description of Artificial Sequence: Synthetic oligonucleotide
  Antisense strand to SEQ ID NO: 1123622
aacacugcuccgaauucuu

SEQ ID NO: 1123624 - RNA, 19 nt, Artificial Sequence
  Description of Artificial Sequence: Synthetic oligonucleotide
  Sense strand starting at position 1759 of SEQ ID NO: 916013
cuuagcaagccugaggauu

SEQ ID NO: 1123625 - RNA, 19 nt, Artificial Sequence
  Description of Artificial Sequence: Synthetic oligonucleotide
  Antisense strand to SEQ ID NO: 1123624
aauccucaggcuugcuaag

SEQ ID NO: 1123626 - RNA, 19 nt, Artificial Sequence
  Description of Artificial Sequence: Synthetic oligonucleotide
  Sense strand starting at position 1964 of SEQ ID NO: 916013
gacuaacugcgucaucaga

SEQ ID NO: 1123627 - RNA, 19 nt, Artificial Sequence
  Description of Artificial Sequence: Synthetic oligonucleotide
  Antisense strand to SEQ ID NO: 1123626
ucugaugacgcaguuaguc

SEQ ID NO: 1123628 - RNA, 19 nt, Artificial Sequence
  Description of Artificial Sequence: Synthetic oligonucleotide
  Sense strand starting at position 2821 of SEQ ID NO: 916013
gguagggauuguguaagga

SEQ ID NO: 1123629 - RNA, 19 nt, Artificial Sequence
  Description of Artificial Sequence: Synthetic oligonucleotide
  Antisense strand to SEQ ID NO: 1123628
uccuuacacaaucccuacc

SEQ ID NO: 1123630 - RNA, 19 nt, Artificial Sequence
  Description of Artificial Sequence: Synthetic oligonucleotide
  Sense strand starting at position 2834 of SEQ ID NO: 916013
uaaggaggcugccucaauu

SEQ ID NO: 1123631 - RNA, 19 nt, Artificial Sequence
  Description of Artificial Sequence: Synthetic oligonucleotide
  Antisense strand to SEQ ID NO: 1123630
aauugaggcagccuccuua

SEQ ID NO: 1123632 - RNA, 19 nt, Artificial Sequence
  Description of Artificial Sequence: Synthetic oligonucleotide
  Sense strand starting at position 3038 of SEQ ID NO: 916013
gacggaaacccuugggauu

SEQ ID NO: 1123633 - RNA, 19 nt, Artificial Sequence
  Description of Artificial Sequence: Synthetic oligonucleotide
  Antisense strand to SEQ ID NO: 1123632
aaucccaaggguuuccguc

SEQ ID NO: 1123634 - RNA, 19 nt, Artificial Sequence
  Description of Artificial Sequence: Synthetic oligonucleotide
  Sense strand starting at position 3039 of SEQ ID NO: 916013
acggaaacccuugggauua

SEQ ID NO: 1123635 - RNA, 19 nt, Artificial Sequence
  Description of Artificial Sequence: Synthetic oligonucleotide
  Antisense strand to SEQ ID NO: 1123634
uaaucccaaggguuuccgu

SEQ ID NO: 1123636 - RNA, 19 nt, Artificial Sequence
  Description of Artificial Sequence: Synthetic oligonucleotide
  Sense strand starting at position 3063 of SEQ ID NO: 916013
gcaacauagugaccuaauu

SEQ ID NO: 1123637 - RNA, 19 nt, Artificial Sequence
  Description of Artificial Sequence: Synthetic oligonucleotide
  Antisense strand to SEQ ID NO: 1123636
aauuaggucacuauguugc

SEQ ID NO: 1123638 - RNA, 19 nt, Artificial Sequence
  Description of Artificial Sequence: Synthetic oligonucleotide
  Sense strand starting at position 3152 of SEQ ID NO: 916013
uuaggagacuaccucagua

SEQ ID NO: 1123639 - RNA, 19 nt, Artificial Sequence
  Description of Artificial Sequence: Synthetic oligonucleotide
  Antisense strand to SEQ ID NO: 1123638
uacugagguagucuccuaa

SEQ ID NO: 1123640 - RNA, 19 nt, Artificial Sequence
  Description of Artificial Sequence: Synthetic oligonucleotide
  Sense strand starting at position 3156 of SEQ ID NO: 916013
gagacuaccucaguaguac

SEQ ID NO: 1123641 - RNA, 19 nt, Artificial Sequence
  Description of Artificial Sequence: Synthetic oligonucleotide
  Antisense strand to SEQ ID NO: 1123640
guacuacugagguagucuc

SEQ ID NO: 1123642 - RNA, 19 nt, Artificial Sequence
  Description of Artificial Sequence: Synthetic oligonucleotide
  Sense strand starting at position 3157 of SEQ ID NO: 916013
agacuaccucaguaguaca

SEQ ID NO: 1123643 - RNA, 19 nt, Artificial Sequence
  Description of Artificial Sequence: Synthetic oligonucleotide
  Antisense strand to SEQ ID NO: 1123642
uguacuacugagguagucu

SEQ ID NO: 1123644 - RNA, 19 nt, Artificial Sequence
  Description of Artificial Sequence: Synthetic oligonucleotide
  Sense strand starting at position 3178 of SEQ ID NO: 916013
agaugauuguaucuuggac

SEQ ID NO: 1123645 - RNA, 19 nt, Artificial Sequence
  Description of Artificial Sequence: Synthetic oligonucleotide
  Antisense strand to SEQ ID NO: 1123644
guccaagauacaaucaucu

SEQ ID NO: 1123646 - RNA, 19 nt, Artificial Sequence
  Description of Artificial Sequence: Synthetic oligonucleotide
  Sense strand starting at position 3196 of SEQ ID NO: 916013
cuaggaugguauucggaua

SEQ ID NO: 1123647 - RNA, 19 nt, Artificial Sequence
  Description of Artificial Sequence: Synthetic oligonucleotide
  Antisense strand to SEQ ID NO: 1123646
uauccgaauaccauccuag

SEQ ID NO: 1123648 - RNA, 19 nt, Artificial Sequence
  Description of Artificial Sequence: Synthetic oligonucleotide
  Sense strand starting at position 3201 of SEQ ID NO: 916013
augguauucggauagucac

SEQ ID NO: 1123649 - RNA, 19 nt, Artificial Sequence
  Description of Artificial Sequence: Synthetic oligonucleotide
  Antisense strand to SEQ ID NO: 1123648
gugacuauccgaauaccau

SEQ ID NO: 1123650 - RNA, 19 nt, Artificial Sequence
  Description of Artificial Sequence: Synthetic oligonucleotide
  Sense strand starting at position 3248 of SEQ ID NO: 916013
ccuaauaugugucuugaau

SEQ ID NO: 1123651 - RNA, 19 nt, Artificial Sequence
  Description of Artificial Sequence: Synthetic oligonucleotide
  Antisense strand to SEQ ID NO: 1123650
auucaagacacauauuagg

SEQ ID NO: 1123652 - RNA, 19 nt, Artificial Sequence
  Description of Artificial Sequence: Synthetic oligonucleotide
  Sense strand starting at position 3426 of SEQ ID NO: 916013
gcauucucugaaugcaaag

SEQ ID NO: 1123653 - RNA, 19 nt, Artificial Sequence
  Description of Artificial Sequence: Synthetic oligonucleotide
  Antisense strand to SEQ ID NO: 1123652
cuuugcauucagagaaugc

SEQ ID NO: 1123654 - RNA, 19 nt, Artificial Sequence
  Description of Artificial Sequence: Synthetic oligonucleotide
  Sense strand starting at position 3465 of SEQ ID NO: 916013
auaauagcacuugguaaau

SEQ ID NO: 1123655 - RNA, 19 nt, Artificial Sequence
  Description of Artificial Sequence: Synthetic oligonucleotide
  Antisense strand to SEQ ID NO: 1123654
auuuaccaagugcuauuau

SEQ ID NO: 1123656 - RNA, 19 nt, Artificial Sequence
  Description of Artificial Sequence: Synthetic oligonucleotide
  Sense strand starting at position 3698 of SEQ ID NO: 916013
auuaaugaguuacucaugu

SEQ ID NO: 1123657 - RNA, 19 nt, Artificial Sequence
  Description of Artificial Sequence: Synthetic oligonucleotide
  Antisense strand to SEQ ID NO: 1123656
acaugaguaacucauuaau

SEQ ID NO: 1123658 - RNA, 19 nt, Artificial Sequence
  Description of Artificial Sequence: Synthetic oligonucleotide
  Sense strand starting at position 3747 of SEQ ID NO: 916013
ucaaguuuagaguguaaga

SEQ ID NO: 1123659 - RNA, 19 nt, Artificial Sequence
  Description of Artificial Sequence: Synthetic oligonucleotide
  Antisense strand to SEQ ID NO: 1123658
ucuuacacucuaaacuuga

SEQ ID NO: 1123660 - RNA, 19 nt, Artificial Sequence
  Description of Artificial Sequence: Synthetic oligonucleotide
  Sense strand starting at position 3749 of SEQ ID NO: 916013
aaguuuagaguguaagacu

SEQ ID NO: 1123661 - RNA, 19 nt, Artificial Sequence
  Description of Artificial Sequence: Synthetic oligonucleotide
  Antisense strand to SEQ ID NO: 1123660
agucuuacacucuaaacuu

SEQ ID NO: 1123662 - RNA, 19 nt, Artificial Sequence
  Description of Artificial Sequence: Synthetic oligonucleotide
  Sense strand starting at position 3780 of SEQ ID NO: 916013
uagccuggucuccagacaa

SEQ ID NO: 1123663 - RNA, 19 nt, Artificial Sequence
  Description of Artificial Sequence: Synthetic oligonucleotide
  Antisense strand to SEQ ID NO: 1123662
uugucuggagaccaggcua

SEQ ID NO: 1123664 - RNA, 19 nt, Artificial Sequence
  Description of Artificial Sequence: Synthetic oligonucleotide
  Sense strand starting at position 3803 of SEQ ID NO: 916013
agagucagauugucuuaca

SEQ ID NO: 1123665 - RNA, 19 nt, Artificial Sequence
  Description of Artificial Sequence: Synthetic oligonucleotide
  Antisense strand to SEQ ID NO: 1123664
uguaagacaaucugacucu

SEQ ID NO: 1123666 - RNA, 19 nt, Artificial Sequence
  Description of Artificial Sequence: Synthetic oligonucleotide
  Sense strand starting at position 3804 of SEQ ID NO: 916013
gagucagauugucuuacau

SEQ ID NO: 1123667 - RNA, 19 nt, Artificial Sequence
  Description of Artificial Sequence: Synthetic oligonucleotide
  Antisense strand to SEQ ID NO: 1123666
auguaagacaaucugacuc

SEQ ID NO: 1123668 - RNA, 19 nt, Artificial Sequence
  Description of Artificial Sequence: Synthetic oligonucleotide
  Sense strand starting at position 3869 of SEQ ID NO: 916013
gugugcuaagugucuucau

SEQ ID NO: 1123669 - RNA, 19 nt, Artificial Sequence
  Description of Artificial Sequence: Synthetic oligonucleotide
  Antisense strand to SEQ ID NO: 1123668
augaagacacuuagcacac

SEQ ID NO: 1123670 - RNA, 19 nt, Artificial Sequence
  Description of Artificial Sequence: Synthetic oligonucleotide
  Sense strand starting at position 3871 of SEQ ID NO: 916013
gugcuaagugucuucaugu

SEQ ID NO: 1123671 - RNA, 19 nt, Artificial Sequence
  Description of Artificial Sequence: Synthetic oligonucleotide
  Antisense strand to SEQ ID NO: 1123670
acaugaagacacuuagcac

SEQ ID NO: 1123672 - RNA, 19 nt, Artificial Sequence
  Description of Artificial Sequence: Synthetic oligonucleotide
  Sense strand starting at position 3924 of SEQ ID NO: 916013
aagauagguucuguuauug

SEQ ID NO: 1123673 - RNA, 19 nt, Artificial Sequence
  Description of Artificial Sequence: Synthetic oligonucleotide
  Antisense strand to SEQ ID NO: 1123672
caauaacagaaccuaucuu

SEQ ID NO: 1123674 - RNA, 19 nt, Artificial Sequence
  Description of Artificial Sequence: Synthetic oligonucleotide
  Sense strand starting at position 3933 of SEQ ID NO: 916013
ucuguuauugucgauuugu

SEQ ID NO: 1123675 - RNA, 19 nt, Artificial Sequence
  Description of Artificial Sequence: Synthetic oligonucleotide
  Antisense strand to SEQ ID NO: 1123674
acaaaucgacaauaacaga

SEQ ID NO: 1123676 - RNA, 19 nt, Artificial Sequence
  Description of Artificial Sequence: Synthetic oligonucleotide
  Sense strand starting at position 3967 of SEQ ID NO: 916013
ggaguuaauuugcaaggga

SEQ ID NO: 1123677 - RNA, 19 nt, Artificial Sequence
  Description of Artificial Sequence: Synthetic oligonucleotide
  Antisense strand to SEQ ID NO: 1123676
ucccuugcaaauuaacucc

SEQ ID NO: 1123678 - RNA, 19 nt, Artificial Sequence
  Description of Artificial Sequence: Synthetic oligonucleotide
  Sense strand starting at position 16 of SEQ ID NO: 916014
ugauguuccuguucuaaau

SEQ ID NO: 1123679 - RNA, 19 nt, Artificial Sequence
  Description of Artificial Sequence: Synthetic oligonucleotide
  Antisense strand to SEQ ID NO: 1123678
auuuagaacaggaacauca

SEQ ID NO: 1123680 - RNA, 19 nt, Artificial Sequence
  Description of Artificial Sequence: Synthetic oligonucleotide
  Sense strand starting at position 168 of SEQ ID NO: 916014
ggauaugccuguuucugga

SEQ ID NO: 1123681 - RNA, 19 nt, Artificial Sequence
  Description of Artificial Sequence: Synthetic oligonucleotide
  Antisense strand to SEQ ID NO: 1123680
uccagaaacaggcauaucc

SEQ ID NO: 1123682 - RNA, 19 nt, Artificial Sequence
  Description of Artificial Sequence: Synthetic oligonucleotide
  Sense strand starting at position 189 of SEQ ID NO: 916014
ccagcagaucucugagagu

SEQ ID NO: 1123683 - RNA, 19 nt, Artificial Sequence
  Description of Artificial Sequence: Synthetic oligonucleotide
  Antisense strand to SEQ ID NO: 1123682
acucucagagaucugcugg

SEQ ID NO: 1123684 - RNA, 19 nt, Artificial Sequence
  Description of Artificial Sequence: Synthetic oligonucleotide
  Sense strand starting at position 253 of SEQ ID NO: 916014
gauguucuacagugucauu

SEQ ID NO: 1123685 - RNA, 19 nt, Artificial Sequence
  Description of Artificial Sequence: Synthetic oligonucleotide
  Antisense strand to SEQ ID NO: 1123684
aaugacacuguagaacauc

SEQ ID NO: 1123686 - RNA, 19 nt, Artificial Sequence
  Description of Artificial Sequence: Synthetic oligonucleotide
  Sense strand starting at position 258 of SEQ ID NO: 916014
ucuacagugucauugcuga

SEQ ID NO: 1123687 - RNA, 19 nt, Artificial Sequence
  Description of Artificial Sequence: Synthetic oligonucleotide
  Antisense strand to SEQ ID NO: 1123686
ucagcaaugacacuguaga

SEQ ID NO: 1123688 - RNA, 19 nt, Artificial Sequence
  Description of Artificial Sequence: Synthetic oligonucleotide
  Sense strand starting at position 292 of SEQ ID NO: 916014
uggaauuacuggcuaauag

SEQ ID NO: 1123689 - RNA, 19 nt, Artificial Sequence
  Description of Artificial Sequence: Synthetic oligonucleotide
  Antisense strand to SEQ ID NO: 1123688
cuauuagccaguaauucca

SEQ ID NO: 1123690 - RNA, 19 nt, Artificial Sequence
  Description of Artificial Sequence: Synthetic oligonucleotide
  Sense strand starting at position 365 of SEQ ID NO: 916014
cauugauagcaacgggaau

SEQ ID NO: 1123691 - RNA, 19 nt, Artificial Sequence
  Description of Artificial Sequence: Synthetic oligonucleotide
  Antisense strand to SEQ ID NO: 1123690
auucccguugcuaucaaug

SEQ ID NO: 1123692 - RNA, 19 nt, Artificial Sequence
  Description of Artificial Sequence: Synthetic oligonucleotide
  Sense strand starting at position 376 of SEQ ID NO: 916014
acgggaaugugucucgaca

SEQ ID NO: 1123693 - RNA, 19 nt, Artificial Sequence
  Description of Artificial Sequence: Synthetic oligonucleotide
  Antisense strand to SEQ ID NO: 1123692
ugucgagacacauucccgu

SEQ ID NO: 1123694 - RNA, 19 nt, Artificial Sequence
  Description of Artificial Sequence: Synthetic oligonucleotide
  Sense strand starting at position 1436 of SEQ ID NO: 916014
gggagacuuaccugccuua

SEQ ID NO: 1123695 - RNA, 19 nt, Artificial Sequence
  Description of Artificial Sequence: Synthetic oligonucleotide
  Antisense strand to SEQ ID NO: 1123694
uaaggcagguaagucuccc

SEQ ID NO: 1123696 - RNA, 19 nt, Artificial Sequence
  Description of Artificial Sequence: Synthetic oligonucleotide
  Sense strand starting at position 2069 of SEQ ID NO: 916014
uuccucauuggcuggaauu

SEQ ID NO: 1123697 - RNA, 19 nt, Artificial Sequence
  Description of Artificial Sequence: Synthetic oligonucleotide
  Antisense strand to SEQ ID NO: 1123696
aauuccagccaaugaggaa

SEQ ID NO: 1123698 - RNA, 19 nt, Artificial Sequence
  Description of Artificial Sequence: Synthetic oligonucleotide
  Sense strand starting at position 2164 of SEQ ID NO: 916014
ggagcugcauucucuaaac

SEQ ID NO: 1123699 - RNA, 19 nt, Artificial Sequence
  Description of Artificial Sequence: Synthetic oligonucleotide
  Antisense strand to SEQ ID NO: 1123698
guuuagagaaugcagcucc

SEQ ID NO: 1123700 - RNA, 19 nt, Artificial Sequence
  Description of Artificial Sequence: Synthetic oligonucleotide
  Sense strand starting at position 2316 of SEQ ID NO: 916014
gccuguaguccugcaauuc

SEQ ID NO: 1123701 - RNA, 19 nt, Artificial Sequence
  Description of Artificial Sequence: Synthetic oligonucleotide
  Antisense strand to SEQ ID NO: 1123700
gaauugcaggacuacaggc

SEQ ID NO: 1123702 - RNA, 19 nt, Artificial Sequence
  Description of Artificial Sequence: Synthetic oligonucleotide
  Sense strand starting at position 2317 of SEQ ID NO: 916014
ccuguaguccugcaauucu

SEQ ID NO: 1123703 - RNA, 19 nt, Artificial Sequence
  Description of Artificial Sequence: Synthetic oligonucleotide
  Antisense strand to SEQ ID NO: 1123702
agaauugcaggacuacagg

SEQ ID NO: 1123704 - RNA, 19 nt, Artificial Sequence
  Description of Artificial Sequence: Synthetic oligonucleotide
  Sense strand starting at position 2327 of SEQ ID NO: 916014
ugcaauucuuaaccugaga

SEQ ID NO: 1123705 - RNA, 19 nt, Artificial Sequence
  Description of Artificial Sequence: Synthetic oligonucleotide
  Antisense strand to SEQ ID NO: 1123704
ucucagguuaagaauugca

SEQ ID NO: 1123706 - RNA, 19 nt, Artificial Sequence
  Description of Artificial Sequence: Synthetic oligonucleotide
  Sense strand starting at position 2523 of SEQ ID NO: 916014
gaucuauaguguguauguu

SEQ ID NO: 1123707 - RNA, 19 nt, Artificial Sequence
  Description of Artificial Sequence: Synthetic oligonucleotide
  Antisense strand to SEQ ID NO: 1123706
aacauacacacuauagauc

SEQ ID NO: 1123708 - RNA, 19 nt, Artificial Sequence
  Description of Artificial Sequence: Synthetic oligonucleotide
  Sense strand starting at position 2529 of SEQ ID NO: 916014
uaguguguauguuugggau

SEQ ID NO: 1123709 - RNA, 19 nt, Artificial Sequence
  Description of Artificial Sequence: Synthetic oligonucleotide
  Antisense strand to SEQ ID NO: 1123708
aucccaaacauacacacua

SEQ ID NO: 1123710 - RNA, 19 nt, Artificial Sequence
  Description of Artificial Sequence: Synthetic oligonucleotide
  Sense strand starting at position 2571 of SEQ ID NO: 916014
uguuauaaggcaggaugau

SEQ ID NO: 1123711 - RNA, 19 nt, Artificial Sequence
  Description of Artificial Sequence: Synthetic oligonucleotide
  Antisense strand to SEQ ID NO: 1123710
aucauccugccuuauaaca

SEQ ID NO: 1123712 - RNA, 19 nt, Artificial Sequence
  Description of Artificial Sequence: Synthetic oligonucleotide
  Sense strand starting at position 2590 of SEQ ID NO: 916014
uuaugaugugcugggaaag

SEQ ID NO: 1123713 - RNA, 19 nt, Artificial Sequence
  Description of Artificial Sequence: Synthetic oligonucleotide
  Antisense strand to SEQ ID NO: 1123712
cuuucccagcacaucauaa

SEQ ID NO: 1123714 - RNA, 19 nt, Artificial Sequence
  Description of Artificial Sequence: Synthetic oligonucleotide
  Sense strand starting at position 2591 of SEQ ID NO: 916014
uaugaugugcugggaaagu

SEQ ID NO: 1123715 - RNA, 19 nt, Artificial Sequence
  Description of Artificial Sequence: Synthetic oligonucleotide
  Antisense strand to SEQ ID NO: 1123714
acuuucccagcacaucaua

SEQ ID NO: 1123716 - RNA, 19 nt, Artificial Sequence
  Description of Artificial Sequence: Synthetic oligonucleotide
  Sense strand starting at position 2614 of SEQ ID NO: 916014
uaggguauugugggagcaa

SEQ ID NO: 1123717 - RNA, 19 nt, Artificial Sequence
  Description of Artificial Sequence: Synthetic oligonucleotide
  Antisense strand to SEQ ID NO: 1123716
uugcucccacaauacccua

SEQ ID NO: 1123718 - RNA, 19 nt, Artificial Sequence
  Description of Artificial Sequence: Synthetic oligonucleotide
  Sense strand starting at position 2723 of SEQ ID NO: 916014
uguguauauacguauuugu

SEQ ID NO: 1123719 - RNA, 19 nt, Artificial Sequence
  Description of Artificial Sequence: Synthetic oligonucleotide
  Antisense strand to SEQ ID NO: 1123718
acaaauacguauauacaca

SEQ ID NO: 1123720 - RNA, 19 nt, Artificial Sequence
  Description of Artificial Sequence: Synthetic oligonucleotide
  Sense strand starting at position 2747 of SEQ ID NO: 916014
ugggcauguaugcauauga

SEQ ID NO: 1123721 - RNA, 19 nt, Artificial Sequence
  Description of Artificial Sequence: Synthetic oligonucleotide
  Antisense strand to SEQ ID NO: 1123720
ucauaugcauacaugccca

SEQ ID NO: 1123722 - RNA, 19 nt, Artificial Sequence
  Description of Artificial Sequence: Synthetic oligonucleotide
  Sense strand starting at position 2754 of SEQ ID NO: 916014
guaugcauaugacauuuau

SEQ ID NO: 1123723 - RNA, 19 nt, Artificial Sequence
  Description of Artificial Sequence: Synthetic oligonucleotide
  Antisense strand to SEQ ID NO: 1123722
auaaaugucauaugcauac

SEQ ID NO: 1123724 - RNA, 19 nt, Artificial Sequence
  Description of Artificial Sequence: Synthetic oligonucleotide
  Sense strand starting at position 2768 of SEQ ID NO: 916014
uuuauugagugcuuaggau

SEQ ID NO: 1123725 - RNA, 19 nt, Artificial Sequence
  Description of Artificial Sequence: Synthetic oligonucleotide
  Antisense strand to SEQ ID NO: 1123724
auccuaagcacucaauaaa

SEQ ID NO: 1123726 - RNA, 19 nt, Artificial Sequence
  Description of Artificial Sequence: Synthetic oligonucleotide
  Sense strand starting at position 2922 of SEQ ID NO: 916014
gcaugugcugcagcugaaa

SEQ ID NO: 1123727 - RNA, 19 nt, Artificial Sequence
  Description of Artificial Sequence: Synthetic oligonucleotide
  Antisense strand to SEQ ID NO: 1123726
uuucagcugcagcacaugc

SEQ ID NO: 1123728 - RNA, 19 nt, Artificial Sequence
  Description of Artificial Sequence: Synthetic oligonucleotide
  Sense strand starting at position 2947 of SEQ ID NO: 916014
gccagaacuguuugagucu

SEQ ID NO: 1123729 - RNA, 19 nt, Artificial Sequence
  Description of Artificial Sequence: Synthetic oligonucleotide
  Antisense strand to SEQ ID NO: 1123728
agacucaaacaguucuggc

SEQ ID NO: 1123730 - RNA, 19 nt, Artificial Sequence
  Description of Artificial Sequence: Synthetic oligonucleotide
  Sense strand starting at position 3011 of SEQ ID NO: 916014
uggcuucuaugucuuuaaa

SEQ ID NO: 1123731 - RNA, 19 nt, Artificial Sequence
  Description of Artificial Sequence: Synthetic oligonucleotide
  Antisense strand to SEQ ID NO: 1123730
uuuaaagacauagaagcca

SEQ ID NO: 1123732 - RNA, 19 nt, Artificial Sequence
  Description of Artificial Sequence: Synthetic oligonucleotide
  Sense strand starting at position 3033 of SEQ ID NO: 916014
gggauacuaucuuugccac

SEQ ID NO: 1123733 - RNA, 19 nt, Artificial Sequence
  Description of Artificial Sequence: Synthetic oligonucleotide
  Antisense strand to SEQ ID NO: 1123732
guggcaaagauaguauccc

SEQ ID NO: 1123734 - RNA, 19 nt, Artificial Sequence
  Description of Artificial Sequence: Synthetic oligonucleotide
  Sense strand starting at position 3034 of SEQ ID NO: 916014
ggauacuaucuuugccaca

SEQ ID NO: 1123735 - RNA, 19 nt, Artificial Sequence
  Description of Artificial Sequence: Synthetic oligonucleotide
  Antisense strand to SEQ ID NO: 1123734
uguggcaaagauaguaucc

SEQ ID NO: 1123736 - RNA, 19 nt, Artificial Sequence
  Description of Artificial Sequence: Synthetic oligonucleotide
  Sense strand starting at position 3046 of SEQ ID NO: 916014
ugccacagguuguuaagaa

SEQ ID NO: 1123737 - RNA, 19 nt, Artificial Sequence
  Description of Artificial Sequence: Synthetic oligonucleotide
  Antisense strand to SEQ ID NO: 1123736
uucuuaacaaccuguggca

SEQ ID NO: 1123738 - RNA, 19 nt, Artificial Sequence
  Description of Artificial Sequence: Synthetic oligonucleotide
  Sense strand starting at position 3054 of SEQ ID NO: 916014
guuguuaagaauugaagug

SEQ ID NO: 1123739 - RNA, 19 nt, Artificial Sequence
  Description of Artificial Sequence: Synthetic oligonucleotide
  Antisense strand to SEQ ID NO: 1123738
cacuucaauucuuaacaac

SEQ ID NO: 1123740 - RNA, 19 nt, Artificial Sequence
  Description of Artificial Sequence: Synthetic oligonucleotide
  Sense strand starting at position 3140 of SEQ ID NO: 916014
aucacuucccgaggaagaa

SEQ ID NO: 1123741 - RNA, 19 nt, Artificial Sequence
  Description of Artificial Sequence: Synthetic oligonucleotide
  Antisense strand to SEQ ID NO: 1123740
uucuuccucgggaagugau

SEQ ID NO: 1123742 - RNA, 19 nt, Artificial Sequence
  Description of Artificial Sequence: Synthetic oligonucleotide
  Sense strand starting at position 3320 of SEQ ID NO: 916014
gcagauuuauuucguaugu

SEQ ID NO: 1123743 - RNA, 19 nt, Artificial Sequence
  Description of Artificial Sequence: Synthetic oligonucleotide
  Antisense strand to SEQ ID NO: 1123742
acauacgaaauaaaucugc

SEQ ID NO: 1123744 - RNA, 19 nt, Artificial Sequence
  Description of Artificial Sequence: Synthetic oligonucleotide
  Sense strand starting at position 3325 of SEQ ID NO: 916014
uuuauuucguauguuugga

SEQ ID NO: 1123745 - RNA, 19 nt, Artificial Sequence
  Description of Artificial Sequence: Synthetic oligonucleotide
  Antisense strand to SEQ ID NO: 1123744
uccaaacauacgaaauaaa

SEQ ID NO: 1123746 - RNA, 19 nt, Artificial Sequence
  Description of Artificial Sequence: Synthetic oligonucleotide
  Sense strand starting at position 3327 of SEQ ID NO: 916014
uauuucguauguuuggauu

SEQ ID NO: 1123747 - RNA, 19 nt, Artificial Sequence
  Description of Artificial Sequence: Synthetic oligonucleotide
  Antisense strand to SEQ ID NO: 1123746
aauccaaacauacgaaaua

SEQ ID NO: 1123748 - RNA, 19 nt, Artificial Sequence
  Description of Artificial Sequence: Synthetic oligonucleotide
  Sense strand starting at position 3423 of SEQ ID NO: 916014
ggauuaugauaucauuaug

SEQ ID NO: 1123749 - RNA, 19 nt, Artificial Sequence
  Description of Artificial Sequence: Synthetic oligonucleotide
  Antisense strand to SEQ ID NO: 1123748
cauaaugauaucauaaucc

SEQ ID NO: 1123750 - RNA, 19 nt, Artificial Sequence
  Description of Artificial Sequence: Synthetic oligonucleotide
  Sense strand starting at position 3426 of SEQ ID NO: 916014
uuaugauaucauuauggcu

SEQ ID NO: 1123751 - RNA, 19 nt, Artificial Sequence
  Description of Artificial Sequence: Synthetic oligonucleotide
  Antisense strand to SEQ ID NO: 1123750
agccauaaugauaucauaa

SEQ ID NO: 1123752 - RNA, 19 nt, Artificial Sequence
  Description of Artificial Sequence: Synthetic oligonucleotide
  Sense strand starting at position 3710 of SEQ ID NO: 916014
aaguuaucugcugggauua

SEQ ID NO: 1123753 - RNA, 19 nt, Artificial Sequence
  Description of Artificial Sequence: Synthetic oligonucleotide
  Antisense strand to SEQ ID NO: 1123752
uaaucccagcagauaacuu

SEQ ID NO: 1123754 - RNA, 19 nt, Artificial Sequence
  Description of Artificial Sequence: Synthetic oligonucleotide
  Sense strand starting at position 3711 of SEQ ID NO: 916014
aguuaucugcugggauuac

SEQ ID NO: 1123755 - RNA, 19 nt, Artificial Sequence
  Description of Artificial Sequence: Synthetic oligonucleotide
  Antisense strand to SEQ ID NO: 1123754
guaaucccagcagauaacu

SEQ ID NO: 1123756 - RNA, 19 nt, Artificial Sequence
  Description of Artificial Sequence: Synthetic oligonucleotide
  Sense strand starting at position 3932 of SEQ ID NO: 916014
gcauuaagcaaucggcaga

SEQ ID NO: 1123757 - RNA, 19 nt, Artificial Sequence
  Description of Artificial Sequence: Synthetic oligonucleotide
  Antisense strand to SEQ ID NO: 1123756
ucugccgauugcuuaaugc

SEQ ID NO: 1123758 - RNA, 19 nt, Artificial Sequence
  Description of Artificial Sequence: Synthetic oligonucleotide
  Sense strand starting at position 194 of SEQ ID NO: 916015
acaaguuggccugaccaaa

SEQ ID NO: 1123759 - RNA, 19 nt, Artificial Sequence
  Description of Artificial Sequence: Synthetic oligonucleotide
  Antisense strand to SEQ ID NO: 1123758
uuuggucaggccaacuugu

SEQ ID NO: 1123760 - RNA, 19 nt, Artificial Sequence
  Description of Artificial Sequence: Synthetic oligonucleotide
  Sense strand starting at position 207 of SEQ ID NO: 916015
accaaauugugaucccaga

SEQ ID NO: 1123761 - RNA, 19 nt, Artificial Sequence
  Description of Artificial Sequence: Synthetic oligonucleotide
  Antisense strand to SEQ ID NO: 1123760
ucugggaucacaauuuggu

SEQ ID NO: 1123762 - RNA, 19 nt, Artificial Sequence
  Description of Artificial Sequence: Synthetic oligonucleotide
  Sense strand starting at position 231 of SEQ ID NO: 916015
ccacuuaguggcuacauaa

SEQ ID NO: 1123763 - RNA, 19 nt, Artificial Sequence
  Description of Artificial Sequence: Synthetic oligonucleotide
  Antisense strand to SEQ ID NO: 1123762
uuauguagccacuaagugg

SEQ ID NO: 1123764 - RNA, 19 nt, Artificial Sequence
  Description of Artificial Sequence: Synthetic oligonucleotide
  Sense strand starting at position 241 of SEQ ID NO: 916015
gcuacauaaccuugggcaa

SEQ ID NO: 1123765 - RNA, 19 nt, Artificial Sequence
  Description of Artificial Sequence: Synthetic oligonucleotide
  Antisense strand to SEQ ID NO: 1123764
uugcccaagguuauguagc

SEQ ID NO: 1123766 - RNA, 19 nt, Artificial Sequence
  Description of Artificial Sequence: Synthetic oligonucleotide
  Sense strand starting at position 320 of SEQ ID NO: 916015
aacaucuuggaguggugaa

SEQ ID NO: 1123767 - RNA, 19 nt, Artificial Sequence
  Description of Artificial Sequence: Synthetic oligonucleotide
  Antisense strand to SEQ ID NO: 1123766
uucaccacuccaagauguu

SEQ ID NO: 1123768 - RNA, 19 nt, Artificial Sequence
  Description of Artificial Sequence: Synthetic oligonucleotide
  Sense strand starting at position 376 of SEQ ID NO: 916015
aagccuggcccguuguaau

SEQ ID NO: 1123769 - RNA, 19 nt, Artificial Sequence
  Description of Artificial Sequence: Synthetic oligonucleotide
  Antisense strand to SEQ ID NO: 1123768
auuacaacgggccaggcuu

SEQ ID NO: 1123770 - RNA, 19 nt, Artificial Sequence
  Description of Artificial Sequence: Synthetic oligonucleotide
  Sense strand starting at position 450 of SEQ ID NO: 916015
gcugucccugccuaugaaa

SEQ ID NO: 1123771 - RNA, 19 nt, Artificial Sequence
  Description of Artificial Sequence: Synthetic oligonucleotide
  Antisense strand to SEQ ID NO: 1123770
uuucauaggcagggacagc

SEQ ID NO: 1123772 - RNA, 19 nt, Artificial Sequence
  Description of Artificial Sequence: Synthetic oligonucleotide
  Sense strand starting at position 452 of SEQ ID NO: 916015
ugucccugccuaugaaaua

SEQ ID NO: 1123773 - RNA, 19 nt, Artificial Sequence
  Description of Artificial Sequence: Synthetic oligonucleotide
  Antisense strand to SEQ ID NO: 1123772
uauuucauaggcagggaca

SEQ ID NO: 1123774 - RNA, 19 nt, Artificial Sequence
  Description of Artificial Sequence: Synthetic oligonucleotide
  Sense strand starting at position 1020 of SEQ ID NO: 916015
uaauuuauugagcgccagu

SEQ ID NO: 1123775 - RNA, 19 nt, Artificial Sequence
  Description of Artificial Sequence: Synthetic oligonucleotide
  Antisense strand to SEQ ID NO: 1123774
acuggcgcucaauaaauua

SEQ ID NO: 1123776 - RNA, 19 nt, Artificial Sequence
  Description of Artificial Sequence: Synthetic oligonucleotide
  Sense strand starting at position 1119 of SEQ ID NO: 916015
gucgucuuacacugaugga

SEQ ID NO: 1123777 - RNA, 19 nt, Artificial Sequence
  Description of Artificial Sequence: Synthetic oligonucleotide
  Antisense strand to SEQ ID NO: 1123776
uccaucaguguaagacgac

SEQ ID NO: 1123778 - RNA, 19 nt, Artificial Sequence
  Description of Artificial Sequence: Synthetic oligonucleotide
  Sense strand starting at position 1323 of SEQ ID NO: 916015
gcugaauaacaagguguua

SEQ ID NO: 1123779 - RNA, 19 nt, Artificial Sequence
  Description of Artificial Sequence: Synthetic oligonucleotide
  Antisense strand to SEQ ID NO: 1123778
uaacaccuuguuauucagc

SEQ ID NO: 1123780 - RNA, 19 nt, Artificial Sequence
  Description of Artificial Sequence: Synthetic oligonucleotide
  Sense strand starting at position 1332 of SEQ ID NO: 916015
caagguguuauuggguuaa

SEQ ID NO: 1123781 - RNA, 19 nt, Artificial Sequence
  Description of Artificial Sequence: Synthetic oligonucleotide
  Antisense strand to SEQ ID NO: 1123780
uuaacccaauaacaccuug

SEQ ID NO: 1123782 - RNA, 19 nt, Artificial Sequence
  Description of Artificial Sequence: Synthetic oligonucleotide
  Sense strand starting at position 1336 of SEQ ID NO: 916015
guguuauuggguuaaggaa

SEQ ID NO: 1123783 - RNA, 19 nt, Artificial Sequence
  Description of Artificial Sequence: Synthetic oligonucleotide
  Antisense strand to SEQ ID NO: 1123782
uuccuuaacccaauaacac

SEQ ID NO: 1123784 - RNA, 19 nt, Artificial Sequence
  Description of Artificial Sequence: Synthetic oligonucleotide
  Sense strand starting at position 1719 of SEQ ID NO: 916015
uagacaccguucuugagaa

SEQ ID NO: 1123785 - RNA, 19 nt, Artificial Sequence
  Description of Artificial Sequence: Synthetic oligonucleotide
  Antisense strand to SEQ ID NO: 1123784
uucucaagaacggugucua

SEQ ID NO: 1123786 - RNA, 19 nt, Artificial Sequence
  Description of Artificial Sequence: Synthetic oligonucleotide
  Sense strand starting at position 1738 of SEQ ID NO: 916015
gcaauagauuucgaccaau

SEQ ID NO: 1123787 - RNA, 19 nt, Artificial Sequence
  Description of Artificial Sequence: Synthetic oligonucleotide
  Antisense strand to SEQ ID NO: 1123786
auuggucgaaaucuauugc

SEQ ID NO: 1123788 - RNA, 19 nt, Artificial Sequence
  Description of Artificial Sequence: Synthetic oligonucleotide
  Sense strand starting at position 2237 of SEQ ID NO: 916015
ccagcacucugguuuauga

SEQ ID NO: 1123789 - RNA, 19 nt, Artificial Sequence
  Description of Artificial Sequence: Synthetic oligonucleotide
  Antisense strand to SEQ ID NO: 1123788
ucauaaaccagagugcugg

SEQ ID NO: 1123790 - RNA, 19 nt, Artificial Sequence
  Description of Artificial Sequence: Synthetic oligonucleotide
  Sense strand starting at position 2239 of SEQ ID NO: 916015
agcacucugguuuaugaca

SEQ ID NO: 1123791 - RNA, 19 nt, Artificial Sequence
  Description of Artificial Sequence: Synthetic oligonucleotide
  Antisense strand to SEQ ID NO: 1123790
ugucauaaaccagagugcu

SEQ ID NO: 1123792 - RNA, 19 nt, Artificial Sequence
  Description of Artificial Sequence: Synthetic oligonucleotide
  Sense strand starting at position 2244 of SEQ ID NO: 916015
ucugguuuaugacauuuga

SEQ ID NO: 1123793 - RNA, 19 nt, Artificial Sequence
  Description of Artificial Sequence: Synthetic oligonucleotide
  Antisense strand to SEQ ID NO: 1123792
ucaaaugucauaaaccaga

SEQ ID NO: 1123794 - RNA, 19 nt, Artificial Sequence
  Description of Artificial Sequence: Synthetic oligonucleotide
  Sense strand starting at position 2255 of SEQ ID NO: 916015
acauuugaguugcucacuu

SEQ ID NO: 1123795 - RNA, 19 nt, Artificial Sequence
  Description of Artificial Sequence: Synthetic oligonucleotide
  Antisense strand to SEQ ID NO: 1123794
aagugagcaacucaaaugu

SEQ ID NO: 1123796 - RNA, 19 nt, Artificial Sequence
  Description of Artificial Sequence: Synthetic oligonucleotide
  Sense strand starting at position 2525 of SEQ ID NO: 916015
uacgauauucuggguugaa

SEQ ID NO: 1123797 - RNA, 19 nt, Artificial Sequence
  Description of Artificial Sequence: Synthetic oligonucleotide
  Antisense strand to SEQ ID NO: 1123796
uucaacccagaauaucgua

SEQ ID NO: 1123798 - RNA, 19 nt, Artificial Sequence
  Description of Artificial Sequence: Synthetic oligonucleotide
  Sense strand starting at position 2526 of SEQ ID NO: 916015
acgauauucuggguugaau

SEQ ID NO: 1123799 - RNA, 19 nt, Artificial Sequence
  Description of Artificial Sequence: Synthetic oligonucleotide
  Antisense strand to SEQ ID NO: 1123798
auucaacccagaauaucgu

SEQ ID NO: 1123800 - RNA, 19 nt, Artificial Sequence
  Description of Artificial Sequence: Synthetic oligonucleotide
  Sense strand starting at position 2528 of SEQ ID NO: 916015
gauauucuggguugaaucu

SEQ ID NO: 1123801 - RNA, 19 nt, Artificial Sequence
  Description of Artificial Sequence: Synthetic oligonucleotide
  Antisense strand to SEQ ID NO: 1123800
agauucaacccagaauauc

SEQ ID NO: 1123802 - RNA, 19 nt, Artificial Sequence
  Description of Artificial Sequence: Synthetic oligonucleotide
  Sense strand starting at position 2534 of SEQ ID NO: 916015
cuggguugaaucuaagcuu

SEQ ID NO: 1123803 - RNA, 19 nt, Artificial Sequence
  Description of Artificial Sequence: Synthetic oligonucleotide
  Antisense strand to SEQ ID NO: 1123802
aagcuuagauucaacccag

SEQ ID NO: 1123804 - RNA, 19 nt, Artificial Sequence
  Description of Artificial Sequence: Synthetic oligonucleotide
  Sense strand starting at position 2740 of SEQ ID NO: 916015
uuugguugaauaugaaaug

SEQ ID NO: 1123805 - RNA, 19 nt, Artificial Sequence
  Description of Artificial Sequence: Synthetic oligonucleotide
  Antisense strand to SEQ ID NO: 1123804
cauuucauauucaaccaaa

SEQ ID NO: 1123806 - RNA, 19 nt, Artificial Sequence
  Description of Artificial Sequence: Synthetic oligonucleotide
  Sense strand starting at position 2836 of SEQ ID NO: 916015
uacugauaggcucauguuu

SEQ ID NO: 1123807 - RNA, 19 nt, Artificial Sequence
  Description of Artificial Sequence: Synthetic oligonucleotide
  Antisense strand to SEQ ID NO: 1123806
aaacaugagccuaucagua

SEQ ID NO: 1123808 - RNA, 19 nt, Artificial Sequence
  Description of Artificial Sequence: Synthetic oligonucleotide
  Sense strand starting at position 2842 of SEQ ID NO: 916015
uaggcucauguuugggaga

SEQ ID NO: 1123809 - RNA, 19 nt, Artificial Sequence
  Description of Artificial Sequence: Synthetic oligonucleotide
  Antisense strand to SEQ ID NO: 1123808
ucucccaaacaugagccua

SEQ ID NO: 1123810 - RNA, 19 nt, Artificial Sequence
  Description of Artificial Sequence: Synthetic oligonucleotide
  Sense strand starting at position 2858 of SEQ ID NO: 916015
agaccaaagcaaugucuua

SEQ ID NO: 1123811 - RNA, 19 nt, Artificial Sequence
  Description of Artificial Sequence: Synthetic oligonucleotide
  Antisense strand to SEQ ID NO: 1123810
uaagacauugcuuuggucu

SEQ ID NO: 1123812 - RNA, 19 nt, Artificial Sequence
  Description of Artificial Sequence: Synthetic oligonucleotide
  Sense strand starting at position 2865 of SEQ ID NO: 916015
agcaaugucuuagaauuua

SEQ ID NO: 1123813 - RNA, 19 nt, Artificial Sequence
  Description of Artificial Sequence: Synthetic oligonucleotide
  Antisense strand to SEQ ID NO: 1123812
uaaauucuaagacauugcu

SEQ ID NO: 1123814 - RNA, 19 nt, Artificial Sequence
  Description of Artificial Sequence: Synthetic oligonucleotide
  Sense strand starting at position 3373 of SEQ ID NO: 916015
gcugacuugagcugggaga

SEQ ID NO: 1123815 - RNA, 19 nt, Artificial Sequence
  Description of Artificial Sequence: Synthetic oligonucleotide
  Antisense strand to SEQ ID NO: 1123814
ucucccagcucaagucagc

SEQ ID NO: 1123816 - RNA, 19 nt, Artificial Sequence
  Description of Artificial Sequence: Synthetic oligonucleotide
  Sense strand starting at position 3374 of SEQ ID NO: 916015
cugacuugagcugggagau

SEQ ID NO: 1123817 - RNA, 19 nt, Artificial Sequence
  Description of Artificial Sequence: Synthetic oligonucleotide
  Antisense strand to SEQ ID NO: 1123816
aucucccagcucaagucag

SEQ ID NO: 1123818 - RNA, 19 nt, Artificial Sequence
  Description of Artificial Sequence: Synthetic oligonucleotide
  Sense strand starting at position 3529 of SEQ ID NO: 916015
gauggaucaugagauuaga

SEQ ID NO: 1123819 - RNA, 19 nt, Artificial Sequence
  Description of Artificial Sequence: Synthetic oligonucleotide
  Antisense strand to SEQ ID NO: 1123818
ucuaaucucaugauccauc

SEQ ID NO: 1123820 - RNA, 19 nt, Artificial Sequence
  Description of Artificial Sequence: Synthetic oligonucleotide
  Sense strand starting at position 3757 of SEQ ID NO: 916015
gagggacacuccguaucaa

SEQ ID NO: 1123821 - RNA, 19 nt, Artificial Sequence
  Description of Artificial Sequence: Synthetic oligonucleotide
  Antisense strand to SEQ ID NO: 1123820
uugauacggagugucccuc

SEQ ID NO: 1123822 - RNA, 19 nt, Artificial Sequence
  Description of Artificial Sequence: Synthetic oligonucleotide
  Sense strand starting at position 3854 of SEQ ID NO: 916015
uggucuacuucccugauca

SEQ ID NO: 1123823 - RNA, 19 nt, Artificial Sequence
  Description of Artificial Sequence: Synthetic oligonucleotide
  Antisense strand to SEQ ID NO: 1123822
ugaucagggaaguagacca

SEQ ID NO: 1123824 - RNA, 19 nt, Artificial Sequence
  Description of Artificial Sequence: Synthetic oligonucleotide
  Sense strand starting at position 3855 of SEQ ID NO: 916015
ggucuacuucccugaucau

SEQ ID NO: 1123825 - RNA, 19 nt, Artificial Sequence
  Description of Artificial Sequence: Synthetic oligonucleotide
  Antisense strand to SEQ ID NO: 1123824
augaucagggaaguagacc

SEQ ID NO: 1123826 - RNA, 19 nt, Artificial Sequence
  Description of Artificial Sequence: Synthetic oligonucleotide
  Sense strand starting at position 3856 of SEQ ID NO: 916015
gucuacuucccugaucauu

SEQ ID NO: 1123827 - RNA, 19 nt, Artificial Sequence
  Description of Artificial Sequence: Synthetic oligonucleotide
  Antisense strand to SEQ ID NO: 1123826
aaugaucagggaaguagac

SEQ ID NO: 1123828 - RNA, 19 nt, Artificial Sequence
  Description of Artificial Sequence: Synthetic oligonucleotide
  Sense strand starting at position 3917 of SEQ ID NO: 916015
agcaaauucugggugggua

SEQ ID NO: 1123829 - RNA, 19 nt, Artificial Sequence
  Description of Artificial Sequence: Synthetic oligonucleotide
  Antisense strand to SEQ ID NO: 1123828
uacccacccagaauuugcu

SEQ ID NO: 1123830 - RNA, 19 nt, Artificial Sequence
  Description of Artificial Sequence: Synthetic oligonucleotide
  Sense strand starting at position 3918 of SEQ ID NO: 916015
gcaaauucuggguggguau

SEQ ID NO: 1123831 - RNA, 19 nt, Artificial Sequence
  Description of Artificial Sequence: Synthetic oligonucleotide
  Antisense strand to SEQ ID NO: 1123830
auacccacccagaauuugc

SEQ ID NO: 1123832 - RNA, 19 nt, Artificial Sequence
  Description of Artificial Sequence: Synthetic oligonucleotide
  Sense strand starting at position 3919 of SEQ ID NO: 916015
caaauucuggguggguauu

SEQ ID NO: 1123833 - RNA, 19 nt, Artificial Sequence
  Description of Artificial Sequence: Synthetic oligonucleotide
  Antisense strand to SEQ ID NO: 1123832
aauacccacccagaauuug

SEQ ID NO: 1123834 - RNA, 19 nt, Artificial Sequence
  Description of Artificial Sequence: Synthetic oligonucleotide
  Sense strand starting at position 3946 of SEQ ID NO: 916015
acagucuagcaguagauga

SEQ ID NO: 1123835 - RNA, 19 nt, Artificial Sequence
  Description of Artificial Sequence: Synthetic oligonucleotide
  Antisense strand to SEQ ID NO: 1123834
ucaucuacugcuagacugu

SEQ ID NO: 1123836 - RNA, 19 nt, Artificial Sequence
  Description of Artificial Sequence: Synthetic oligonucleotide
  Sense strand starting at position 3971 of SEQ ID NO: 916015
uaaguugguggugaugaga

SEQ ID NO: 1123837 - RNA, 19 nt, Artificial Sequence
  Description of Artificial Sequence: Synthetic oligonucleotide
  Antisense strand to SEQ ID NO: 1123836
ucucaucaccaccaacuua

SEQ ID NO: 1123838 - RNA, 19 nt, Artificial Sequence
  Description of Artificial Sequence: Synthetic oligonucleotide
  Sense strand starting at position 151 of SEQ ID NO: 916016
uaacaugaacuggguauau

SEQ ID NO: 1123839 - RNA, 19 nt, Artificial Sequence
  Description of Artificial Sequence: Synthetic oligonucleotide
  Antisense strand to SEQ ID NO: 1123838
auauacccaguucauguua

SEQ ID NO: 1123840 - RNA, 19 nt, Artificial Sequence
  Description of Artificial Sequence: Synthetic oligonucleotide
  Sense strand starting at position 269 of SEQ ID NO: 916016
cuguaaagugguuagcaua

SEQ ID NO: 1123841 - RNA, 19 nt, Artificial Sequence
  Description of Artificial Sequence: Synthetic oligonucleotide
  Antisense strand to SEQ ID NO: 1123840
uaugcuaaccacuuuacag

SEQ ID NO: 1123842 - RNA, 19 nt, Artificial Sequence
  Description of Artificial Sequence: Synthetic oligonucleotide
  Sense strand starting at position 369 of SEQ ID NO: 916016
gagaucauuggcuggguua

SEQ ID NO: 1123843 - RNA, 19 nt, Artificial Sequence
  Description of Artificial Sequence: Synthetic oligonucleotide
  Antisense strand to SEQ ID NO: 1123842
uaacccagccaaugaucuc

SEQ ID NO: 1123844 - RNA, 19 nt, Artificial Sequence
  Description of Artificial Sequence: Synthetic oligonucleotide
  Sense strand starting at position 370 of SEQ ID NO: 916016
agaucauuggcuggguuau

SEQ ID NO: 1123845 - RNA, 19 nt, Artificial Sequence
  Description of Artificial Sequence: Synthetic oligonucleotide
  Antisense strand to SEQ ID NO: 1123844
auaacccagccaaugaucu

SEQ ID NO: 1123846 - RNA, 19 nt, Artificial Sequence
  Description of Artificial Sequence: Synthetic oligonucleotide
  Sense strand starting at position 438 of SEQ ID NO: 916016
gauccauaugcgcauacau

SEQ ID NO: 1123847 - RNA, 19 nt, Artificial Sequence
  Description of Artificial Sequence: Synthetic oligonucleotide
  Antisense strand to SEQ ID NO: 1123846
auguaugcgcauauggauc

SEQ ID NO: 1123848 - RNA, 19 nt, Artificial Sequence
  Description of Artificial Sequence: Synthetic oligonucleotide
  Sense strand starting at position 1027 of SEQ ID NO: 916016
gcaaauacaguuugaauga

SEQ ID NO: 1123849 - RNA, 19 nt, Artificial Sequence
  Description of Artificial Sequence: Synthetic oligonucleotide
  Antisense strand to SEQ ID NO: 1123848
ucauucaaacuguauuugc

SEQ ID NO: 1123850 - RNA, 19 nt, Artificial Sequence
  Description of Artificial Sequence: Synthetic oligonucleotide
  Sense strand starting at position 1051 of SEQ ID NO: 916016
guuuccuccaggcagagau

SEQ ID NO: 1123851 - RNA, 19 nt, Artificial Sequence
  Description of Artificial Sequence: Synthetic oligonucleotide
  Antisense strand to SEQ ID NO: 1123850
aucucugccuggaggaaac

SEQ ID NO: 1123852 - RNA, 19 nt, Artificial Sequence
  Description of Artificial Sequence: Synthetic oligonucleotide
  Sense strand starting at position 1186 of SEQ ID NO: 916016
ggcagcuauguggaucaua

SEQ ID NO: 1123853 - RNA, 19 nt, Artificial Sequence
  Description of Artificial Sequence: Synthetic oligonucleotide
  Antisense strand to SEQ ID NO: 1123852
uaugauccacauagcugcc

SEQ ID NO: 1123854 - RNA, 19 nt, Artificial Sequence
  Description of Artificial Sequence: Synthetic oligonucleotide
  Sense strand starting at position 1436 of SEQ ID NO: 916016
uagcgugcagugguucaau

SEQ ID NO: 1123855 - RNA, 19 nt, Artificial Sequence
  Description of Artificial Sequence: Synthetic oligonucleotide
  Antisense strand to SEQ ID NO: 1123854
auugaaccacugcacgcua

SEQ ID NO: 1123856 - RNA, 19 nt, Artificial Sequence
  Description of Artificial Sequence: Synthetic oligonucleotide
  Sense strand starting at position 1438 of SEQ ID NO: 916016
gcgugcagugguucaaucu

SEQ ID NO: 1123857 - RNA, 19 nt, Artificial Sequence
  Description of Artificial Sequence: Synthetic oligonucleotide
  Antisense strand to SEQ ID NO: 1123856
agauugaaccacugcacgc

SEQ ID NO: 1123858 - RNA, 19 nt, Artificial Sequence
  Description of Artificial Sequence: Synthetic oligonucleotide
  Sense strand starting at position 1575 of SEQ ID NO: 916016
agacgaauuugcccgagcu

SEQ ID NO: 1123859 - RNA, 19 nt, Artificial Sequence
  Description of Artificial Sequence: Synthetic oligonucleotide
  Antisense strand to SEQ ID NO: 1123858
agcucgggcaaauucgucu

SEQ ID NO: 1123860 - RNA, 19 nt, Artificial Sequence
  Description of Artificial Sequence: Synthetic oligonucleotide
  Sense strand starting at position 1576 of SEQ ID NO: 916016
gacgaauuugcccgagcug

SEQ ID NO: 1123861 - RNA, 19 nt, Artificial Sequence
  Description of Artificial Sequence: Synthetic oligonucleotide
  Antisense strand to SEQ ID NO: 1123860
cagcucgggcaaauucguc

SEQ ID NO: 1123862 - RNA, 19 nt, Artificial Sequence
  Description of Artificial Sequence: Synthetic oligonucleotide
  Sense strand starting at position 1721 of SEQ ID NO: 916016
gcgggagacccugauacuu

SEQ ID NO: 1123863 - RNA, 19 nt, Artificial Sequence
  Description of Artificial Sequence: Synthetic oligonucleotide
  Antisense strand to SEQ ID NO: 1123862
aaguaucagggucucccgc

SEQ ID NO: 1123864 - RNA, 19 nt, Artificial Sequence
  Description of Artificial Sequence: Synthetic oligonucleotide
  Sense strand starting at position 1749 of SEQ ID NO: 916016
agggcagcgagauaugaau

SEQ ID NO: 1123865 - RNA, 19 nt, Artificial Sequence
  Description of Artificial Sequence: Synthetic oligonucleotide
  Antisense strand to SEQ ID NO: 1123864
auucauaucucgcugcccu

SEQ ID NO: 1123866 - RNA, 19 nt, Artificial Sequence
  Description of Artificial Sequence: Synthetic oligonucleotide
  Sense strand starting at position 1755 of SEQ ID NO: 916016
gcgagauaugaauggacug

SEQ ID NO: 1123867 - RNA, 19 nt, Artificial Sequence
  Description of Artificial Sequence: Synthetic oligonucleotide
  Antisense strand to SEQ ID NO: 1123866
caguccauucauaucucgc

SEQ ID NO: 1123868 - RNA, 19 nt, Artificial Sequence
  Description of Artificial Sequence: Synthetic oligonucleotide
  Sense strand starting at position 2019 of SEQ ID NO: 916016
cgccuuugugacucgcaca

SEQ ID NO: 1123869 - RNA, 19 nt, Artificial Sequence
  Description of Artificial Sequence: Synthetic oligonucleotide
  Antisense strand to SEQ ID NO: 1123868
ugugcgagucacaaaggcg

SEQ ID NO: 1123870 - RNA, 19 nt, Artificial Sequence
  Description of Artificial Sequence: Synthetic oligonucleotide
  Sense strand starting at position 2024 of SEQ ID NO: 916016
uugugacucgcacaaacau

SEQ ID NO: 1123871 - RNA, 19 nt, Artificial Sequence
  Description of Artificial Sequence: Synthetic oligonucleotide
  Antisense strand to SEQ ID NO: 1123870
auguuugugcgagucacaa

SEQ ID NO: 1123872 - RNA, 19 nt, Artificial Sequence
  Description of Artificial Sequence: Synthetic oligonucleotide
  Sense strand starting at position 2183 of SEQ ID NO: 916016
cccucaugacgcuaaguga

SEQ ID NO: 1123873 - RNA, 19 nt, Artificial Sequence
  Description of Artificial Sequence: Synthetic oligonucleotide
  Antisense strand to SEQ ID NO: 1123872
ucacuuagcgucaugaggg

SEQ ID NO: 1123874 - RNA, 19 nt, Artificial Sequence
  Description of Artificial Sequence: Synthetic oligonucleotide
  Sense strand starting at position 2196 of SEQ ID NO: 916016
aagugacuucuugagucaa

SEQ ID NO: 1123875 - RNA, 19 nt, Artificial Sequence
  Description of Artificial Sequence: Synthetic oligonucleotide
  Antisense strand to SEQ ID NO: 1123874
uugacucaagaagucacuu

SEQ ID NO: 1123876 - RNA, 19 nt, Artificial Sequence
  Description of Artificial Sequence: Synthetic oligonucleotide
  Sense strand starting at position 2472 of SEQ ID NO: 916016
ucaucagugcaggagaauu

SEQ ID NO: 1123877 - RNA, 19 nt, Artificial Sequence
  Description of Artificial Sequence: Synthetic oligonucleotide
  Antisense strand to SEQ ID NO: 1123876
aauucuccugcacugauga

SEQ ID NO: 1123878 - RNA, 19 nt, Artificial Sequence
  Description of Artificial Sequence: Synthetic oligonucleotide
  Sense strand starting at position 2536 of SEQ ID NO: 916016
cgggaacccaagugugauc

SEQ ID NO: 1123879 - RNA, 19 nt, Artificial Sequence
  Description of Artificial Sequence: Synthetic oligonucleotide
  Antisense strand to SEQ ID NO: 1123878
gaucacacuuggguucccg

SEQ ID NO: 1123880 - RNA, 19 nt, Artificial Sequence
  Description of Artificial Sequence: Synthetic oligonucleotide
  Sense strand starting at position 2543 of SEQ ID NO: 916016
ccaagugugauccaggcaa

SEQ ID NO: 1123881 - RNA, 19 nt, Artificial Sequence
  Description of Artificial Sequence: Synthetic oligonucleotide
  Antisense strand to SEQ ID NO: 1123880
uugccuggaucacacuugg

SEQ ID NO: 1123882 - RNA, 19 nt, Artificial Sequence
  Description of Artificial Sequence: Synthetic oligonucleotide
  Sense strand starting at position 2547 of SEQ ID NO: 916016
gugugauccaggcaaguga

SEQ ID NO: 1123883 - RNA, 19 nt, Artificial Sequence
  Description of Artificial Sequence: Synthetic oligonucleotide
  Antisense strand to SEQ ID NO: 1123882
ucacuugccuggaucacac

SEQ ID NO: 1123884 - RNA, 19 nt, Artificial Sequence
  Description of Artificial Sequence: Synthetic oligonucleotide
  Sense strand starting at position 2584 of SEQ ID NO: 916016
ggaguuuagugguuuaaag

SEQ ID NO: 1123885 - RNA, 19 nt, Artificial Sequence
  Description of Artificial Sequence: Synthetic oligonucleotide
  Antisense strand to SEQ ID NO: 1123884
cuuuaaaccacuaaacucc

SEQ ID NO: 1123886 - RNA, 19 nt, Artificial Sequence
  Description of Artificial Sequence: Synthetic oligonucleotide
  Sense strand starting at position 2657 of SEQ ID NO: 916016
ggcuaagcucuagaaacaa

SEQ ID NO: 1123887 - RNA, 19 nt, Artificial Sequence
  Description of Artificial Sequence: Synthetic oligonucleotide
  Antisense strand to SEQ ID NO: 1123886
uuguuucuagagcuuagcc

SEQ ID NO: 1123888 - RNA, 19 nt, Artificial Sequence
  Description of Artificial Sequence: Synthetic oligonucleotide
  Sense strand starting at position 2809 of SEQ ID NO: 916016
ccguaaauucuugggacag

SEQ ID NO: 1123889 - RNA, 19 nt, Artificial Sequence
  Description of Artificial Sequence: Synthetic oligonucleotide
  Antisense strand to SEQ ID NO: 1123888
cugucccaagaauuuacgg

SEQ ID NO: 1123890 - RNA, 19 nt, Artificial Sequence
  Description of Artificial Sequence: Synthetic oligonucleotide
  Sense strand starting at position 2960 of SEQ ID NO: 916016
ggugaaacccuguguauuu

SEQ ID NO: 1123891 - RNA, 19 nt, Artificial Sequence
  Description of Artificial Sequence: Synthetic oligonucleotide
  Antisense strand to SEQ ID NO: 1123890
aaauacacaggguuucacc

SEQ ID NO: 1123892 - RNA, 19 nt, Artificial Sequence
  Description of Artificial Sequence: Synthetic oligonucleotide
  Sense strand starting at position 2961 of SEQ ID NO: 916016
gugaaacccuguguauuuc

SEQ ID NO: 1123893 - RNA, 19 nt, Artificial Sequence
  Description of Artificial Sequence: Synthetic oligonucleotide
  Antisense strand to SEQ ID NO: 1123892
gaaauacacaggguuucac

SEQ ID NO: 1123894 - RNA, 19 nt, Artificial Sequence
  Description of Artificial Sequence: Synthetic oligonucleotide
  Sense strand starting at position 3277 of SEQ ID NO: 916016
cguuguaaccaugagggaa

SEQ ID NO: 1123895 - RNA, 19 nt, Artificial Sequence
  Description of Artificial Sequence: Synthetic oligonucleotide
  Antisense strand to SEQ ID NO: 1123894
uucccucaugguuacaacg

SEQ ID NO: 1123896 - RNA, 19 nt, Artificial Sequence
  Description of Artificial Sequence: Synthetic oligonucleotide
  Sense strand starting at position 3294 of SEQ ID NO: 916016
aagucagugggacaguaua

SEQ ID NO: 1123897 - RNA, 19 nt, Artificial Sequence
  Description of Artificial Sequence: Synthetic oligonucleotide
  Antisense strand to SEQ ID NO: 1123896
uauacugucccacugacuu

SEQ ID NO: 1123898 - RNA, 19 nt, Artificial Sequence
  Description of Artificial Sequence: Synthetic oligonucleotide
  Sense strand starting at position 3351 of SEQ ID NO: 916016
gaauuacuguuucugcaag

SEQ ID NO: 1123899 - RNA, 19 nt, Artificial Sequence
  Description of Artificial Sequence: Synthetic oligonucleotide
  Antisense strand to SEQ ID NO: 1123898
cuugcagaaacaguaauuc

SEQ ID NO: 1123900 - RNA, 19 nt, Artificial Sequence
  Description of Artificial Sequence: Synthetic oligonucleotide
  Sense strand starting at position 3353 of SEQ ID NO: 916016
auuacuguuucugcaagga

SEQ ID NO: 1123901 - RNA, 19 nt, Artificial Sequence
  Description of Artificial Sequence: Synthetic oligonucleotide
  Antisense strand to SEQ ID NO: 1123900
uccuugcagaaacaguaau

SEQ ID NO: 1123902 - RNA, 19 nt, Artificial Sequence
  Description of Artificial Sequence: Synthetic oligonucleotide
  Sense strand starting at position 3357 of SEQ ID NO: 916016
cuguuucugcaaggaaaca

SEQ ID NO: 1123903 - RNA, 19 nt, Artificial Sequence
  Description of Artificial Sequence: Synthetic oligonucleotide
  Antisense strand to SEQ ID NO: 1123902
uguuuccuugcagaaacag

SEQ ID NO: 1123904 - RNA, 19 nt, Artificial Sequence
  Description of Artificial Sequence: Synthetic oligonucleotide
  Sense strand starting at position 3427 of SEQ ID NO: 916016
aggccuugccuccaaauga

SEQ ID NO: 1123905 - RNA, 19 nt, Artificial Sequence
  Description of Artificial Sequence: Synthetic oligonucleotide
  Antisense strand to SEQ ID NO: 1123904
ucauuuggaggcaaggccu

SEQ ID NO: 1123906 - RNA, 19 nt, Artificial Sequence
  Description of Artificial Sequence: Synthetic oligonucleotide
  Sense strand starting at position 3712 of SEQ ID NO: 916016
ucaagugucaacgacugaa

SEQ ID NO: 1123907 - RNA, 19 nt, Artificial Sequence
  Description of Artificial Sequence: Synthetic oligonucleotide
  Antisense strand to SEQ ID NO: 1123906
uucagucguugacacuuga

SEQ ID NO: 1123908 - RNA, 19 nt, Artificial Sequence
  Description of Artificial Sequence: Synthetic oligonucleotide
  Sense strand starting at position 3773 of SEQ ID NO: 916016
accuuccuccgacgaauuu

SEQ ID NO: 1123909 - RNA, 19 nt, Artificial Sequence
  Description of Artificial Sequence: Synthetic oligonucleotide
  Antisense strand to SEQ ID NO: 1123908
aaauucgucggaggaaggu

SEQ ID NO: 1123910 - RNA, 19 nt, Artificial Sequence
  Description of Artificial Sequence: Synthetic oligonucleotide
  Sense strand starting at position 3871 of SEQ ID NO: 916016
agaaucgauucugcuaaag

SEQ ID NO: 1123911 - RNA, 19 nt, Artificial Sequence
  Description of Artificial Sequence: Synthetic oligonucleotide
  Antisense strand to SEQ ID NO: 1123910
cuuuagcagaaucgauucu

SEQ ID NO: 1123912 - RNA, 19 nt, Artificial Sequence
  Description of Artificial Sequence: Synthetic oligonucleotide
  Sense strand starting at position 3889 of SEQ ID NO: 916016
gggaccuucugcuuuauca

SEQ ID NO: 1123913 - RNA, 19 nt, Artificial Sequence
  Description of Artificial Sequence: Synthetic oligonucleotide
  Antisense strand to SEQ ID NO: 1123912
ugauaaagcagaagguccc

SEQ ID NO: 1123914 - RNA, 19 nt, Artificial Sequence
  Description of Artificial Sequence: Synthetic oligonucleotide
  Sense strand starting at position 3963 of SEQ ID NO: 916016
ggaaauguuggcgacagca

SEQ ID NO: 1123915 - RNA, 19 nt, Artificial Sequence
  Description of Artificial Sequence: Synthetic oligonucleotide
  Antisense strand to SEQ ID NO: 1123914
ugcugucgccaacauuucc

SEQ ID NO: 1123916 - RNA, 19 nt, Artificial Sequence
  Description of Artificial Sequence: Synthetic oligonucleotide
  Sense strand starting at position 3965 of SEQ ID NO: 916016
aaauguuggcgacagcaga

SEQ ID NO: 1123917 - RNA, 19 nt, Artificial Sequence
  Description of Artificial Sequence: Synthetic oligonucleotide
  Antisense strand to SEQ ID NO: 1123916
ucugcugucgccaacauuu

SEQ ID NO: 1123918 - RNA, 19 nt, Artificial Sequence
  Description of Artificial Sequence: Synthetic oligonucleotide
  Sense strand starting at position 35 of SEQ ID NO: 916017
cccagaauguauguaauug

SEQ ID NO: 1123919 - RNA, 19 nt, Artificial Sequence
  Description of Artificial Sequence: Synthetic oligonucleotide
  Antisense strand to SEQ ID NO: 1123918
caauuacauacauucuggg

SEQ ID NO: 1123920 - RNA, 19 nt, Artificial Sequence
  Description of Artificial Sequence: Synthetic oligonucleotide
  Sense strand starting at position 39 of SEQ ID NO: 916017
gaauguauguaauugcaca

SEQ ID NO: 1123921 - RNA, 19 nt, Artificial Sequence
  Description of Artificial Sequence: Synthetic oligonucleotide
  Antisense strand to SEQ ID NO: 1123920
ugugcaauuacauacauuc

SEQ ID NO: 1123922 - RNA, 19 nt, Artificial Sequence
  Description of Artificial Sequence: Synthetic oligonucleotide
  Sense strand starting at position 163 of SEQ ID NO: 916017
aguauaaaucucuguaguu

SEQ ID NO: 1123923 - RNA, 19 nt, Artificial Sequence
  Description of Artificial Sequence: Synthetic oligonucleotide
  Antisense strand to SEQ ID NO: 1123922
aacuacagagauuuauacu

SEQ ID NO: 1123924 - RNA, 19 nt, Artificial Sequence
  Description of Artificial Sequence: Synthetic oligonucleotide
  Sense strand starting at position 164 of SEQ ID NO: 916017
guauaaaucucuguaguug

SEQ ID NO: 1123925 - RNA, 19 nt, Artificial Sequence
  Description of Artificial Sequence: Synthetic oligonucleotide
  Antisense strand to SEQ ID NO: 1123924
caacuacagagauuuauac

SEQ ID NO: 1123926 - RNA, 19 nt, Artificial Sequence
  Description of Artificial Sequence: Synthetic oligonucleotide
  Sense strand starting at position 178 of SEQ ID NO: 916017
aguuguacuucuuuacaaa

SEQ ID NO: 1123927 - RNA, 19 nt, Artificial Sequence
  Description of Artificial Sequence: Synthetic oligonucleotide
  Antisense strand to SEQ ID NO: 1123926
uuuguaaagaaguacaacu

SEQ ID NO: 1123928 - RNA, 19 nt, Artificial Sequence
  Description of Artificial Sequence: Synthetic oligonucleotide
  Sense strand starting at position 179 of SEQ ID NO: 916017
guuguacuucuuuacaaag

SEQ ID NO: 1123929 - RNA, 19 nt, Artificial Sequence
  Description of Artificial Sequence: Synthetic oligonucleotide
  Antisense strand to SEQ ID NO: 1123928
cuuuguaaagaaguacaac

SEQ ID NO: 1123930 - RNA, 19 nt, Artificial Sequence
  Description of Artificial Sequence: Synthetic oligonucleotide
  Sense strand starting at position 302 of SEQ ID NO: 916017
gcagucuaccuauagguuu

SEQ ID NO: 1123931 - RNA, 19 nt, Artificial Sequence
  Description of Artificial Sequence: Synthetic oligonucleotide
  Antisense strand to SEQ ID NO: 1123930
aaaccuauagguagacugc

SEQ ID NO: 1123932 - RNA, 19 nt, Artificial Sequence
  Description of Artificial Sequence: Synthetic oligonucleotide
  Sense strand starting at position 571 of SEQ ID NO: 916017
auugucuugcuguaacuaa

SEQ ID NO: 1123933 - RNA, 19 nt, Artificial Sequence
  Description of Artificial Sequence: Synthetic oligonucleotide
  Antisense strand to SEQ ID NO: 1123932
uuaguuacagcaagacaau

SEQ ID NO: 1123934 - RNA, 19 nt, Artificial Sequence
  Description of Artificial Sequence: Synthetic oligonucleotide
  Sense strand starting at position 652 of SEQ ID NO: 916017
agguaagucacaggugacu

SEQ ID NO: 1123935 - RNA, 19 nt, Artificial Sequence
  Description of Artificial Sequence: Synthetic oligonucleotide
  Antisense strand to SEQ ID NO: 1123934
agucaccugugacuuaccu

SEQ ID NO: 1123936 - RNA, 19 nt, Artificial Sequence
  Description of Artificial Sequence: Synthetic oligonucleotide
  Sense strand starting at position 783 of SEQ ID NO: 916017
cugaaagacugccuagaga

SEQ ID NO: 1123937 - RNA, 19 nt, Artificial Sequence
  Description of Artificial Sequence: Synthetic oligonucleotide
  Antisense strand to SEQ ID NO: 1123936
ucucuaggcagucuuucag

SEQ ID NO: 1123938 - RNA, 19 nt, Artificial Sequence
  Description of Artificial Sequence: Synthetic oligonucleotide
  Sense strand starting at position 855 of SEQ ID NO: 916017
guaauaugguucucauagg

SEQ ID NO: 1123939 - RNA, 19 nt, Artificial Sequence
  Description of Artificial Sequence: Synthetic oligonucleotide
  Antisense strand to SEQ ID NO: 1123938
ccuaugagaaccauauuac

SEQ ID NO: 1123940 - RNA, 19 nt, Artificial Sequence
  Description of Artificial Sequence: Synthetic oligonucleotide
  Sense strand starting at position 995 of SEQ ID NO: 916017
cucgccugauuucugcaau

SEQ ID NO: 1123941 - RNA, 19 nt, Artificial Sequence
  Description of Artificial Sequence: Synthetic oligonucleotide
  Antisense strand to SEQ ID NO: 1123940
auugcagaaaucaggcgag

SEQ ID NO: 1123942 - RNA, 19 nt, Artificial Sequence
  Description of Artificial Sequence: Synthetic oligonucleotide
  Sense strand starting at position 1068 of SEQ ID NO: 916017
gggcacuuguuucccacaa

SEQ ID NO: 1123943 - RNA, 19 nt, Artificial Sequence
  Description of Artificial Sequence: Synthetic oligonucleotide
  Antisense strand to SEQ ID NO: 1123942
uugugggaaacaagugccc

SEQ ID NO: 1123944 - RNA, 19 nt, Artificial Sequence
  Description of Artificial Sequence: Synthetic oligonucleotide
  Sense strand starting at position 1089 of SEQ ID NO: 916017
cugagcugccaggaaguua

SEQ ID NO: 1123945 - RNA, 19 nt, Artificial Sequence
  Description of Artificial Sequence: Synthetic oligonucleotide
  Antisense strand to SEQ ID NO: 1123944
uaacuuccuggcagcucag

SEQ ID NO: 1123946 - RNA, 19 nt, Artificial Sequence
  Description of Artificial Sequence: Synthetic oligonucleotide
  Sense strand starting at position 1203 of SEQ ID NO: 916017
uuuaaaugcuucccgacuu

SEQ ID NO: 1123947 - RNA, 19 nt, Artificial Sequence
  Description of Artificial Sequence: Synthetic oligonucleotide
  Antisense strand to SEQ ID NO: 1123946
aagucgggaagcauuuaaa

SEQ ID NO: 1123948 - RNA, 19 nt, Artificial Sequence
  Description of Artificial Sequence: Synthetic oligonucleotide
  Sense strand starting at position 1222 of SEQ ID NO: 916017
ccucauuucucuguaugca

SEQ ID NO: 1123949 - RNA, 19 nt, Artificial Sequence
  Description of Artificial Sequence: Synthetic oligonucleotide
  Antisense strand to SEQ ID NO: 1123948
ugcauacagagaaaugagg

SEQ ID NO: 1123950 - RNA, 19 nt, Artificial Sequence
  Description of Artificial Sequence: Synthetic oligonucleotide
  Sense strand starting at position 1242 of SEQ ID NO: 916017
acaucaccucagugcuaua

SEQ ID NO: 1123951 - RNA, 19 nt, Artificial Sequence
  Description of Artificial Sequence: Synthetic oligonucleotide
  Antisense strand to SEQ ID NO: 1123950
uauagcacugaggugaugu

SEQ ID NO: 1123952 - RNA, 19 nt, Artificial Sequence
  Description of Artificial Sequence: Synthetic oligonucleotide
  Sense strand starting at position 1252 of SEQ ID NO: 916017
agugcuauauagucauacu

SEQ ID NO: 1123953 - RNA, 19 nt, Artificial Sequence
  Description of Artificial Sequence: Synthetic oligonucleotide
  Antisense strand to SEQ ID NO: 1123952
aguaugacuauauagcacu

SEQ ID NO: 1123954 - RNA, 19 nt, Artificial Sequence
  Description of Artificial Sequence: Synthetic oligonucleotide
  Sense strand starting at position 1291 of SEQ ID NO: 916017
uggguacaguacguauaua

SEQ ID NO: 1123955 - RNA, 19 nt, Artificial Sequence
  Description of Artificial Sequence: Synthetic oligonucleotide
  Antisense strand to SEQ ID NO: 1123954
uauauacguacuguaccca

SEQ ID NO: 1123956 - RNA, 19 nt, Artificial Sequence
  Description of Artificial Sequence: Synthetic oligonucleotide
  Sense strand starting at position 1366 of SEQ ID NO: 916017
ggaagucaaguggguucaa

SEQ ID NO: 1123957 - RNA, 19 nt, Artificial Sequence
  Description of Artificial Sequence: Synthetic oligonucleotide
  Antisense strand to SEQ ID NO: 1123956
uugaacccacuugacuucc

SEQ ID NO: 1123958 - RNA, 19 nt, Artificial Sequence
  Description of Artificial Sequence: Synthetic oligonucleotide
  Sense strand starting at position 1464 of SEQ ID NO: 916017
gugagugguucccuaacug

SEQ ID NO: 1123959 - RNA, 19 nt, Artificial Sequence
  Description of Artificial Sequence: Synthetic oligonucleotide
  Antisense strand to SEQ ID NO: 1123958
caguuagggaaccacucac

SEQ ID NO: 1123960 - RNA, 19 nt, Artificial Sequence
  Description of Artificial Sequence: Synthetic oligonucleotide
  Sense strand starting at position 3105 of SEQ ID NO: 916017
cagaguucuguugccgcau

SEQ ID NO: 1123961 - RNA, 19 nt, Artificial Sequence
  Description of Artificial Sequence: Synthetic oligonucleotide
  Antisense strand to SEQ ID NO: 1123960
augcggcaacagaacucug

SEQ ID NO: 1123962 - RNA, 19 nt, Artificial Sequence
  Description of Artificial Sequence: Synthetic oligonucleotide
  Sense strand starting at position 3365 of SEQ ID NO: 916017
aggguuucugcggagaaau

SEQ ID NO: 1123963 - RNA, 19 nt, Artificial Sequence
  Description of Artificial Sequence: Synthetic oligonucleotide
  Antisense strand to SEQ ID NO: 1123962
auuucuccgcagaaacccu

SEQ ID NO: 1123964 - RNA, 19 nt, Artificial Sequence
  Description of Artificial Sequence: Synthetic oligonucleotide
  Sense strand starting at position 3367 of SEQ ID NO: 916017
gguuucugcggagaaauaa

SEQ ID NO: 1123965 - RNA, 19 nt, Artificial Sequence
  Description of Artificial Sequence: Synthetic oligonucleotide
  Antisense strand to SEQ ID NO: 1123964
uuauuucuccgcagaaacc

SEQ ID NO: 1123966 - RNA, 19 nt, Artificial Sequence
  Description of Artificial Sequence: Synthetic oligonucleotide
  Sense strand starting at position 3462 of SEQ ID NO: 916017
gugugugccauguccugua

SEQ ID NO: 1123967 - RNA, 19 nt, Artificial Sequence
  Description of Artificial Sequence: Synthetic oligonucleotide
  Antisense strand to SEQ ID NO: 1123966
uacaggacauggcacacac

SEQ ID NO: 1123968 - RNA, 19 nt, Artificial Sequence
  Description of Artificial Sequence: Synthetic oligonucleotide
  Sense strand starting at position 3467 of SEQ ID NO: 916017
ugccauguccuguauuaag

SEQ ID NO: 1123969 - RNA, 19 nt, Artificial Sequence
  Description of Artificial Sequence: Synthetic oligonucleotide
  Antisense strand to SEQ ID NO: 1123968
cuuaauacaggacauggca

SEQ ID NO: 1123970 - RNA, 19 nt, Artificial Sequence
  Description of Artificial Sequence: Synthetic oligonucleotide
  Sense strand starting at position 3479 of SEQ ID NO: 916017
uauuaagugcuugauaguc

SEQ ID NO: 1123971 - RNA, 19 nt, Artificial Sequence
  Description of Artificial Sequence: Synthetic oligonucleotide
  Antisense strand to SEQ ID NO: 1123970
gacuaucaagcacuuaaua

SEQ ID NO: 1123972 - RNA, 19 nt, Artificial Sequence
  Description of Artificial Sequence: Synthetic oligonucleotide
  Sense strand starting at position 3484 of SEQ ID NO: 916017
agugcuugauagucauuau

SEQ ID NO: 1123973 - RNA, 19 nt, Artificial Sequence
  Description of Artificial Sequence: Synthetic oligonucleotide
  Antisense strand to SEQ ID NO: 1123972
auaaugacuaucaagcacu

SEQ ID NO: 1123974 - RNA, 19 nt, Artificial Sequence
  Description of Artificial Sequence: Synthetic oligonucleotide
  Sense strand starting at position 3602 of SEQ ID NO: 916017
ggucauuacaacugguaga

SEQ ID NO: 1123975 - RNA, 19 nt, Artificial Sequence
  Description of Artificial Sequence: Synthetic oligonucleotide
  Antisense strand to SEQ ID NO: 1123974
ucuaccaguuguaaugacc

SEQ ID NO: 1123976 - RNA, 19 nt, Artificial Sequence
  Description of Artificial Sequence: Synthetic oligonucleotide
  Sense strand starting at position 3657 of SEQ ID NO: 916017
ucacgugaaucauuauucu

SEQ ID NO: 1123977 - RNA, 19 nt, Artificial Sequence
  Description of Artificial Sequence: Synthetic oligonucleotide
  Antisense strand to SEQ ID NO: 1123976
agaauaaugauucacguga

SEQ ID NO: 1123978 - RNA, 19 nt, Artificial Sequence
  Description of Artificial Sequence: Synthetic oligonucleotide
  Sense strand starting at position 3660 of SEQ ID NO: 916017
cgugaaucauuauucuuua

SEQ ID NO: 1123979 - RNA, 19 nt, Artificial Sequence
  Description of Artificial Sequence: Synthetic oligonucleotide
  Antisense strand to SEQ ID NO: 1123978
uaaagaauaaugauucacg

SEQ ID NO: 1123980 - RNA, 19 nt, Artificial Sequence
  Description of Artificial Sequence: Synthetic oligonucleotide
  Sense strand starting at position 3709 of SEQ ID NO: 916017
gauaaaugguccuuuguga

SEQ ID NO: 1123981 - RNA, 19 nt, Artificial Sequence
  Description of Artificial Sequence: Synthetic oligonucleotide
  Antisense strand to SEQ ID NO: 1123980
ucacaaaggaccauuuauc

SEQ ID NO: 1123982 - RNA, 19 nt, Artificial Sequence
  Description of Artificial Sequence: Synthetic oligonucleotide
  Sense strand starting at position 3716 of SEQ ID NO: 916017
gguccuuugugaccaagau

SEQ ID NO: 1123983 - RNA, 19 nt, Artificial Sequence
  Description of Artificial Sequence: Synthetic oligonucleotide
  Antisense strand to SEQ ID NO: 1123982
aucuuggucacaaaggacc

SEQ ID NO: 1123984 - RNA, 19 nt, Artificial Sequence
  Description of Artificial Sequence: Synthetic oligonucleotide
  Sense strand starting at position 3717 of SEQ ID NO: 916017
guccuuugugaccaagaug

SEQ ID NO: 1123985 - RNA, 19 nt, Artificial Sequence
  Description of Artificial Sequence: Synthetic oligonucleotide
  Antisense strand to SEQ ID NO: 1123984
caucuuggucacaaaggac

SEQ ID NO: 1123986 - RNA, 19 nt, Artificial Sequence
  Description of Artificial Sequence: Synthetic oligonucleotide
  Sense strand starting at position 3809 of SEQ ID NO: 916017
agucauuccuugguguuga

SEQ ID NO: 1123987 - RNA, 19 nt, Artificial Sequence
  Description of Artificial Sequence: Synthetic oligonucleotide
  Antisense strand to SEQ ID NO: 1123986
ucaacaccaaggaaugacu

SEQ ID NO: 1123988 - RNA, 19 nt, Artificial Sequence
  Description of Artificial Sequence: Synthetic oligonucleotide
  Sense strand starting at position 3839 of SEQ ID NO: 916017
gugcuacgugucuccuauu

SEQ ID NO: 1123989 - RNA, 19 nt, Artificial Sequence
  Description of Artificial Sequence: Synthetic oligonucleotide
  Antisense strand to SEQ ID NO: 1123988
aauaggagacacguagcac

SEQ ID NO: 1123990 - RNA, 19 nt, Artificial Sequence
  Description of Artificial Sequence: Synthetic oligonucleotide
  Sense strand starting at position 3840 of SEQ ID NO: 916017
ugcuacgugucuccuauuu

SEQ ID NO: 1123991 - RNA, 19 nt, Artificial Sequence
  Description of Artificial Sequence: Synthetic oligonucleotide
  Antisense strand to SEQ ID NO: 1123990
aaauaggagacacguagca

SEQ ID NO: 1123992 - RNA, 19 nt, Artificial Sequence
  Description of Artificial Sequence: Synthetic oligonucleotide
  Sense strand starting at position 3845 of SEQ ID NO: 916017
cgugucuccuauuuccaga

SEQ ID NO: 1123993 - RNA, 19 nt, Artificial Sequence
  Description of Artificial Sequence: Synthetic oligonucleotide
  Antisense strand to SEQ ID NO: 1123992
ucuggaaauaggagacacg

SEQ ID NO: 1123994 - RNA, 19 nt, Artificial Sequence
  Description of Artificial Sequence: Synthetic oligonucleotide
  Sense strand starting at position 3878 of SEQ ID NO: 916017
aagcuagaauucgucccua

SEQ ID NO: 1123995 - RNA, 19 nt, Artificial Sequence
  Description of Artificial Sequence: Synthetic oligonucleotide
  Antisense strand to SEQ ID NO: 1123994
uagggacgaauucuagcuu

SEQ ID NO: 1123996 - RNA, 19 nt, Artificial Sequence
  Description of Artificial Sequence: Synthetic oligonucleotide
  Sense strand starting at position 3883 of SEQ ID NO: 916017
agaauucgucccuaugcuu

SEQ ID NO: 1123997 - RNA, 19 nt, Artificial Sequence
  Description of Artificial Sequence: Synthetic oligonucleotide
  Antisense strand to SEQ ID NO: 1123996
aagcauagggacgaauucu

SEQ ID NO: 1123998 - RNA, 19 nt, Artificial Sequence
  Description of Artificial Sequence: Synthetic oligonucleotide
  Sense strand starting at position 473 of SEQ ID NO: 916018
aaggauggcugauugaauu

SEQ ID NO: 1123999 - RNA, 19 nt, Artificial Sequence
  Description of Artificial Sequence: Synthetic oligonucleotide
  Antisense strand to SEQ ID NO: 1123998
aauucaaucagccauccuu

SEQ ID NO: 1124000 - RNA, 19 nt, Artificial Sequence
  Description of Artificial Sequence: Synthetic oligonucleotide
  Sense strand starting at position 479 of SEQ ID NO: 916018
ggcugauugaauugcuuag

SEQ ID NO: 1124001 - RNA, 19 nt, Artificial Sequence
  Description of Artificial Sequence: Synthetic oligonucleotide
  Antisense strand to SEQ ID NO: 1124000
cuaagcaauucaaucagcc

SEQ ID NO: 1124002 - RNA, 19 nt, Artificial Sequence
  Description of Artificial Sequence: Synthetic oligonucleotide
  Sense strand starting at position 481 of SEQ ID NO: 916018
cugauugaauugcuuagaa

SEQ ID NO: 1124003 - RNA, 19 nt, Artificial Sequence
  Description of Artificial Sequence: Synthetic oligonucleotide
  Antisense strand to SEQ ID NO: 1124002
uucuaagcaauucaaucag

SEQ ID NO: 1124004 - RNA, 19 nt, Artificial Sequence
  Description of Artificial Sequence: Synthetic oligonucleotide
  Sense strand starting at position 509 of SEQ ID NO: 916018
ugcucuuacccauggagau

SEQ ID NO: 1124005 - RNA, 19 nt, Artificial Sequence
  Description of Artificial Sequence: Synthetic oligonucleotide
  Antisense strand to SEQ ID NO: 1124004
aucuccauggguaagagca

SEQ ID NO: 1124006 - RNA, 19 nt, Artificial Sequence
  Description of Artificial Sequence: Synthetic oligonucleotide
  Sense strand starting at position 510 of SEQ ID NO: 916018
gcucuuacccauggagauc

SEQ ID NO: 1124007 - RNA, 19 nt, Artificial Sequence
  Description of Artificial Sequence: Synthetic oligonucleotide
  Antisense strand to SEQ ID NO: 1124006
gaucuccauggguaagagc

SEQ ID NO: 1124008 - RNA, 19 nt, Artificial Sequence
  Description of Artificial Sequence: Synthetic oligonucleotide
  Sense strand starting at position 556 of SEQ ID NO: 916018
guugaaucaagaggccaaa

SEQ ID NO: 1124009 - RNA, 19 nt, Artificial Sequence
  Description of Artificial Sequence: Synthetic oligonucleotide
  Antisense strand to SEQ ID NO: 1124008
uuuggccucuugauucaac

SEQ ID NO: 1124010 - RNA, 19 nt, Artificial Sequence
  Description of Artificial Sequence: Synthetic oligonucleotide
  Sense strand starting at position 624 of SEQ ID NO: 916018
gaguccugguucucucacu

SEQ ID NO: 1124011 - RNA, 19 nt, Artificial Sequence
  Description of Artificial Sequence: Synthetic oligonucleotide
  Antisense strand to SEQ ID NO: 1124010
agugagagaaccaggacuc

SEQ ID NO: 1124012 - RNA, 19 nt, Artificial Sequence
  Description of Artificial Sequence: Synthetic oligonucleotide
  Sense strand starting at position 629 of SEQ ID NO: 916018
cugguucucucacugacua

SEQ ID NO: 1124013 - RNA, 19 nt, Artificial Sequence
  Description of Artificial Sequence: Synthetic oligonucleotide
  Antisense strand to SEQ ID NO: 1124012
uagucagugagagaaccag

SEQ ID NO: 1124014 - RNA, 19 nt, Artificial Sequence
  Description of Artificial Sequence: Synthetic oligonucleotide
  Sense strand starting at position 689 of SEQ ID NO: 916018
gccuucugacauugaaaug

SEQ ID NO: 1124015 - RNA, 19 nt, Artificial Sequence
  Description of Artificial Sequence: Synthetic oligonucleotide
  Antisense strand to SEQ ID NO: 1124014
cauuucaaugucagaaggc

SEQ ID NO: 1124016 - RNA, 19 nt, Artificial Sequence
  Description of Artificial Sequence: Synthetic oligonucleotide
  Sense strand starting at position 741 of SEQ ID NO: 916018
ugucuacugugccuuauga

SEQ ID NO: 1124017 - RNA, 19 nt, Artificial Sequence
  Description of Artificial Sequence: Synthetic oligonucleotide
  Antisense strand to SEQ ID NO: 1124016
ucauaaggcacaguagaca

SEQ ID NO: 1124018 - RNA, 19 nt, Artificial Sequence
  Description of Artificial Sequence: Synthetic oligonucleotide
  Sense strand starting at position 743 of SEQ ID NO: 916018
ucuacugugccuuaugacu

SEQ ID NO: 1124019 - RNA, 19 nt, Artificial Sequence
  Description of Artificial Sequence: Synthetic oligonucleotide
  Antisense strand to SEQ ID NO: 1124018
agucauaaggcacaguaga

SEQ ID NO: 1124020 - RNA, 19 nt, Artificial Sequence
  Description of Artificial Sequence: Synthetic oligonucleotide
  Sense strand starting at position 909 of SEQ ID NO: 916018
uugugagggcuuuaagaug

SEQ ID NO: 1124021 - RNA, 19 nt, Artificial Sequence
  Description of Artificial Sequence: Synthetic oligonucleotide
  Antisense strand to SEQ ID NO: 1124020
caucuuaaagcccucacaa

SEQ ID NO: 1124022 - RNA, 19 nt, Artificial Sequence
  Description of Artificial Sequence: Synthetic oligonucleotide
  Sense strand starting at position 968 of SEQ ID NO: 916018
acucaagguuuccuuggaa

SEQ ID NO: 1124023 - RNA, 19 nt, Artificial Sequence
  Description of Artificial Sequence: Synthetic oligonucleotide
  Antisense strand to SEQ ID NO: 1124022
uuccaaggaaaccuugagu

SEQ ID NO: 1124024 - RNA, 19 nt, Artificial Sequence
  Description of Artificial Sequence: Synthetic oligonucleotide
  Sense strand starting at position 971 of SEQ ID NO: 916018
caagguuuccuuggaaaga

SEQ ID NO: 1124025 - RNA, 19 nt, Artificial Sequence
  Description of Artificial Sequence: Synthetic oligonucleotide
  Antisense strand to SEQ ID NO: 1124024
ucuuuccaaggaaaccuug

SEQ ID NO: 1124026 - RNA, 19 nt, Artificial Sequence
  Description of Artificial Sequence: Synthetic oligonucleotide
  Sense strand starting at position 972 of SEQ ID NO: 916018
aagguuuccuuggaaagag

SEQ ID NO: 1124027 - RNA, 19 nt, Artificial Sequence
  Description of Artificial Sequence: Synthetic oligonucleotide
  Antisense strand to SEQ ID NO: 1124026
cucuuuccaaggaaaccuu

SEQ ID NO: 1124028 - RNA, 19 nt, Artificial Sequence
  Description of Artificial Sequence: Synthetic oligonucleotide
  Sense strand starting at position 1159 of SEQ ID NO: 916018
gcuuguccugugugaagga

SEQ ID NO: 1124029 - RNA, 19 nt, Artificial Sequence
  Description of Artificial Sequence: Synthetic oligonucleotide
  Antisense strand to SEQ ID NO: 1124028
uccuucacacaggacaagc

SEQ ID NO: 1124030 - RNA, 19 nt, Artificial Sequence
  Description of Artificial Sequence: Synthetic oligonucleotide
  Sense strand starting at position 1331 of SEQ ID NO: 916018
guaggauguuguuuguaau

SEQ ID NO: 1124031 - RNA, 19 nt, Artificial Sequence
  Description of Artificial Sequence: Synthetic oligonucleotide
  Antisense strand to SEQ ID NO: 1124030
auuacaaacaacauccuac

SEQ ID NO: 1124032 - RNA, 19 nt, Artificial Sequence
  Description of Artificial Sequence: Synthetic oligonucleotide
  Sense strand starting at position 1332 of SEQ ID NO: 916018
uaggauguuguuuguaaug

SEQ ID NO: 1124033 - RNA, 19 nt, Artificial Sequence
  Description of Artificial Sequence: Synthetic oligonucleotide
  Antisense strand to SEQ ID NO: 1124032
cauuacaaacaacauccua

SEQ ID NO: 1124034 - RNA, 19 nt, Artificial Sequence
  Description of Artificial Sequence: Synthetic oligonucleotide
  Sense strand starting at position 1338 of SEQ ID NO: 916018
guuguuuguaaugaccuau

SEQ ID NO: 1124035 - RNA, 19 nt, Artificial Sequence
  Description of Artificial Sequence: Synthetic oligonucleotide
  Antisense strand to SEQ ID NO: 1124034
auaggucauuacaaacaac

SEQ ID NO: 1124036 - RNA, 19 nt, Artificial Sequence
  Description of Artificial Sequence: Synthetic oligonucleotide
  Sense strand starting at position 1465 of SEQ ID NO: 916018
ccgugcuucgcagagaaca

SEQ ID NO: 1124037 - RNA, 19 nt, Artificial Sequence
  Description of Artificial Sequence: Synthetic oligonucleotide
  Antisense strand to SEQ ID NO: 1124036
uguucucugcgaagcacgg

SEQ ID NO: 1124038 - RNA, 19 nt, Artificial Sequence
  Description of Artificial Sequence: Synthetic oligonucleotide
  Sense strand starting at position 1516 of SEQ ID NO: 916018
uaaguauaucugggucuca

SEQ ID NO: 1124039 - RNA, 19 nt, Artificial Sequence
  Description of Artificial Sequence: Synthetic oligonucleotide
  Antisense strand to SEQ ID NO: 1124038
ugagacccagauauacuua

SEQ ID NO: 1124040 - RNA, 19 nt, Artificial Sequence
  Description of Artificial Sequence: Synthetic oligonucleotide
  Sense strand starting at position 1569 of SEQ ID NO: 916018
gagguuuccucagugacag

SEQ ID NO: 1124041 - RNA, 19 nt, Artificial Sequence
  Description of Artificial Sequence: Synthetic oligonucleotide
  Antisense strand to SEQ ID NO: 1124040
cugucacugaggaaaccuc

SEQ ID NO: 1124042 - RNA, 19 nt, Artificial Sequence
  Description of Artificial Sequence: Synthetic oligonucleotide
  Sense strand starting at position 1992 of SEQ ID NO: 916018
cgaggauaucgcuaacaug

SEQ ID NO: 1124043 - RNA, 19 nt, Artificial Sequence
  Description of Artificial Sequence: Synthetic oligonucleotide
  Antisense strand to SEQ ID NO: 1124042
cauguuagcgauauccucg

SEQ ID NO: 1124044 - RNA, 19 nt, Artificial Sequence
  Description of Artificial Sequence: Synthetic oligonucleotide
  Sense strand starting at position 2024 of SEQ ID NO: 916018
cuagaagagucccugucuu

SEQ ID NO: 1124045 - RNA, 19 nt, Artificial Sequence
  Description of Artificial Sequence: Synthetic oligonucleotide
  Antisense strand to SEQ ID NO: 1124044
aagacagggacucuucuag

SEQ ID NO: 1124046 - RNA, 19 nt, Artificial Sequence
  Description of Artificial Sequence: Synthetic oligonucleotide
  Sense strand starting at position 2338 of SEQ ID NO: 916018
ccaagaaguuuauccggca

SEQ ID NO: 1124047 - RNA, 19 nt, Artificial Sequence
  Description of Artificial Sequence: Synthetic oligonucleotide
  Antisense strand to SEQ ID NO: 1124046
ugccggauaaacuucuugg

SEQ ID NO: 1124048 - RNA, 19 nt, Artificial Sequence
  Description of Artificial Sequence: Synthetic oligonucleotide
  Sense strand starting at position 2343 of SEQ ID NO: 916018
aaguuuauccggcaccagu

SEQ ID NO: 1124049 - RNA, 19 nt, Artificial Sequence
  Description of Artificial Sequence: Synthetic oligonucleotide
  Antisense strand to SEQ ID NO: 1124048
acuggugccggauaaacuu

SEQ ID NO: 1124050 - RNA, 19 nt, Artificial Sequence
  Description of Artificial Sequence: Synthetic oligonucleotide
  Sense strand starting at position 2392 of SEQ ID NO: 916018
ggcggaaacccagagguau

SEQ ID NO: 1124051 - RNA, 19 nt, Artificial Sequence
  Description of Artificial Sequence: Synthetic oligonucleotide
  Antisense strand to SEQ ID NO: 1124050
auaccucuggguuuccgcc

SEQ ID NO: 1124052 - RNA, 19 nt, Artificial Sequence
  Description of Artificial Sequence: Synthetic oligonucleotide
  Sense strand starting at position 2416 of SEQ ID NO: 916018
acaggguucguggaagguu

SEQ ID NO: 1124053 - RNA, 19 nt, Artificial Sequence
  Description of Artificial Sequence: Synthetic oligonucleotide
  Antisense strand to SEQ ID NO: 1124052
aaccuuccacgaacccugu

SEQ ID NO: 1124054 - RNA, 19 nt, Artificial Sequence
  Description of Artificial Sequence: Synthetic oligonucleotide
  Sense strand starting at position 2447 of SEQ ID NO: 916018
cuugaugcccaacauugau

SEQ ID NO: 1124055 - RNA, 19 nt, Artificial Sequence
  Description of Artificial Sequence: Synthetic oligonucleotide
  Antisense strand to SEQ ID NO: 1124054
aucaauguugggcaucaag

SEQ ID NO: 1124056 - RNA, 19 nt, Artificial Sequence
  Description of Artificial Sequence: Synthetic oligonucleotide
  Sense strand starting at position 2510 of SEQ ID NO: 916018
ccggaaauuccugguccac

SEQ ID NO: 1124057 - RNA, 19 nt, Artificial Sequence
  Description of Artificial Sequence: Synthetic oligonucleotide
  Antisense strand to SEQ ID NO: 1124056
guggaccaggaauuuccgg

SEQ ID NO: 1124058 - RNA, 19 nt, Artificial Sequence
  Description of Artificial Sequence: Synthetic oligonucleotide
  Sense strand starting at position 2512 of SEQ ID NO: 916018
ggaaauuccugguccacac

SEQ ID NO: 1124059 - RNA, 19 nt, Artificial Sequence
  Description of Artificial Sequence: Synthetic oligonucleotide
  Antisense strand to SEQ ID NO: 1124058
guguggaccaggaauuucc

SEQ ID NO: 1124060 - RNA, 19 nt, Artificial Sequence
  Description of Artificial Sequence: Synthetic oligonucleotide
  Sense strand starting at position 2551 of SEQ ID NO: 916018
gcuguugugcaacaaaucu

SEQ ID NO: 1124061 - RNA, 19 nt, Artificial Sequence
  Description of Artificial Sequence: Synthetic oligonucleotide
  Antisense strand to SEQ ID NO: 1124060
agauuuguugcacaacagc

SEQ ID NO: 1124062 - RNA, 19 nt, Artificial Sequence
  Description of Artificial Sequence: Synthetic oligonucleotide
  Sense strand starting at position 2777 of SEQ ID NO: 916018
agauaaguguuggagagaa

SEQ ID NO: 1124063 - RNA, 19 nt, Artificial Sequence
  Description of Artificial Sequence: Synthetic oligonucleotide
  Antisense strand to SEQ ID NO: 1124062
uucucuccaacacuuaucu

SEQ ID NO: 1124064 - RNA, 19 nt, Artificial Sequence
  Description of Artificial Sequence: Synthetic oligonucleotide
  Sense strand starting at position 2815 of SEQ ID NO: 916018
ucauauauuggugguagaa

SEQ ID NO: 1124065 - RNA, 19 nt, Artificial Sequence
  Description of Artificial Sequence: Synthetic oligonucleotide
  Antisense strand to SEQ ID NO: 1124064
uucuaccaccaauauauga

SEQ ID NO: 1124066 - RNA, 19 nt, Artificial Sequence
  Description of Artificial Sequence: Synthetic oligonucleotide
  Sense strand starting at position 3046 of SEQ ID NO: 916018
uuaacaugugaaugaguag

SEQ ID NO: 1124067 - RNA, 19 nt, Artificial Sequence
  Description of Artificial Sequence: Synthetic oligonucleotide
  Antisense strand to SEQ ID NO: 1124066
cuacucauucacauguuaa

SEQ ID NO: 1124068 - RNA, 19 nt, Artificial Sequence
  Description of Artificial Sequence: Synthetic oligonucleotide
  Sense strand starting at position 3049 of SEQ ID NO: 916018
acaugugaaugaguagaca

SEQ ID NO: 1124069 - RNA, 19 nt, Artificial Sequence
  Description of Artificial Sequence: Synthetic oligonucleotide
  Antisense strand to SEQ ID NO: 1124068
ugucuacucauucacaugu

SEQ ID NO: 1124070 - RNA, 19 nt, Artificial Sequence
  Description of Artificial Sequence: Synthetic oligonucleotide
  Sense strand starting at position 3236 of SEQ ID NO: 916018
cgagacuagcuugagcaau

SEQ ID NO: 1124071 - RNA, 19 nt, Artificial Sequence
  Description of Artificial Sequence: Synthetic oligonucleotide
  Antisense strand to SEQ ID NO: 1124070
auugcucaagcuagucucg

SEQ ID NO: 1124072 - RNA, 19 nt, Artificial Sequence
  Description of Artificial Sequence: Synthetic oligonucleotide
  Sense strand starting at position 3370 of SEQ ID NO: 916018
gaggucaagccauagucaa

SEQ ID NO: 1124073 - RNA, 19 nt, Artificial Sequence
  Description of Artificial Sequence: Synthetic oligonucleotide
  Antisense strand to SEQ ID NO: 1124072
uugacuauggcuugaccuc

SEQ ID NO: 1124074 - RNA, 19 nt, Artificial Sequence
  Description of Artificial Sequence: Synthetic oligonucleotide
  Sense strand starting at position 3413 of SEQ ID NO: 916018
agagcagcccuguaucaaa

SEQ ID NO: 1124075 - RNA, 19 nt, Artificial Sequence
  Description of Artificial Sequence: Synthetic oligonucleotide
  Antisense strand to SEQ ID NO: 1124074
uuugauacagggcugcucu

SEQ ID NO: 1124076 - RNA, 19 nt, Artificial Sequence
  Description of Artificial Sequence: Synthetic oligonucleotide
  Sense strand starting at position 3767 of SEQ ID NO: 916018
cccuaugcucagugaaaua

SEQ ID NO: 1124077 - RNA, 19 nt, Artificial Sequence
  Description of Artificial Sequence: Synthetic oligonucleotide
  Antisense strand to SEQ ID NO: 1124076
uauuucacugagcauaggg

SEQ ID NO: 1124078 - RNA, 19 nt, Artificial Sequence
  Description of Artificial Sequence: Synthetic oligonucleotide
  Sense strand starting at position 50 of SEQ ID NO: 916019
gugagaccuuaccuggaaa

SEQ ID NO: 1124079 - RNA, 19 nt, Artificial Sequence
  Description of Artificial Sequence: Synthetic oligonucleotide
  Antisense strand to SEQ ID NO: 1124078
uuuccagguaaggucucac

SEQ ID NO: 1124080 - RNA, 19 nt, Artificial Sequence
  Description of Artificial Sequence: Synthetic oligonucleotide
  Sense strand starting at position 91 of SEQ ID NO: 916019
ugcuuuguaguugagaaug

SEQ ID NO: 1124081 - RNA, 19 nt, Artificial Sequence
  Description of Artificial Sequence: Synthetic oligonucleotide
  Antisense strand to SEQ ID NO: 1124080
cauucucaacuacaaagca

SEQ ID NO: 1124082 - RNA, 19 nt, Artificial Sequence
  Description of Artificial Sequence: Synthetic oligonucleotide
  Sense strand starting at position 101 of SEQ ID NO: 916019
uugagaaugugggcucuga

SEQ ID NO: 1124083 - RNA, 19 nt, Artificial Sequence
  Description of Artificial Sequence: Synthetic oligonucleotide
  Antisense strand to SEQ ID NO: 1124082
ucagagcccacauucucaa

SEQ ID NO: 1124084 - RNA, 19 nt, Artificial Sequence
  Description of Artificial Sequence: Synthetic oligonucleotide
  Sense strand starting at position 105 of SEQ ID NO: 916019
gaaugugggcucugauauc

SEQ ID NO: 1124085 - RNA, 19 nt, Artificial Sequence
  Description of Artificial Sequence: Synthetic oligonucleotide
  Antisense strand to SEQ ID NO: 1124084
gauaucagagcccacauuc

SEQ ID NO: 1124086 - RNA, 19 nt, Artificial Sequence
  Description of Artificial Sequence: Synthetic oligonucleotide
  Sense strand starting at position 117 of SEQ ID NO: 916019
ugauaucagacuuggguuu

SEQ ID NO: 1124087 - RNA, 19 nt, Artificial Sequence
  Description of Artificial Sequence: Synthetic oligonucleotide
  Antisense strand to SEQ ID NO: 1124086
aaacccaagucugauauca

SEQ ID NO: 1124088 - RNA, 19 nt, Artificial Sequence
  Description of Artificial Sequence: Synthetic oligonucleotide
  Sense strand starting at position 123 of SEQ ID NO: 916019
cagacuuggguuugaguca

SEQ ID NO: 1124089 - RNA, 19 nt, Artificial Sequence
  Description of Artificial Sequence: Synthetic oligonucleotide
  Antisense strand to SEQ ID NO: 1124088
ugacucaaacccaagucug

SEQ ID NO: 1124090 - RNA, 19 nt, Artificial Sequence
  Description of Artificial Sequence: Synthetic oligonucleotide
  Sense strand starting at position 163 of SEQ ID NO: 916019
guguaccucaggcaaguua

SEQ ID NO: 1124091 - RNA, 19 nt, Artificial Sequence
  Description of Artificial Sequence: Synthetic oligonucleotide
  Antisense strand to SEQ ID NO: 1124090
uaacuugccugagguacac

SEQ ID NO: 1124092 - RNA, 19 nt, Artificial Sequence
  Description of Artificial Sequence: Synthetic oligonucleotide
  Sense strand starting at position 239 of SEQ ID NO: 916019
agggacaguguuugacaca

SEQ ID NO: 1124093 - RNA, 19 nt, Artificial Sequence
  Description of Artificial Sequence: Synthetic oligonucleotide
  Antisense strand to SEQ ID NO: 1124092
ugugucaaacacugucccu

SEQ ID NO: 1124094 - RNA, 19 nt, Artificial Sequence
  Description of Artificial Sequence: Synthetic oligonucleotide
  Sense strand starting at position 269 of SEQ ID NO: 916019
ucaguaaauguggacuauu

SEQ ID NO: 1124095 - RNA, 19 nt, Artificial Sequence
  Description of Artificial Sequence: Synthetic oligonucleotide
  Antisense strand to SEQ ID NO: 1124094
aauaguccacauuuacuga

SEQ ID NO: 1124096 - RNA, 19 nt, Artificial Sequence
  Description of Artificial Sequence: Synthetic oligonucleotide
  Sense strand starting at position 272 of SEQ ID NO: 916019
guaaauguggacuauuauu

SEQ ID NO: 1124097 - RNA, 19 nt, Artificial Sequence
  Description of Artificial Sequence: Synthetic oligonucleotide
  Antisense strand to SEQ ID NO: 1124096
aauaauaguccacauuuac

SEQ ID NO: 1124098 - RNA, 19 nt, Artificial Sequence
  Description of Artificial Sequence: Synthetic oligonucleotide
  Sense strand starting at position 358 of SEQ ID NO: 916019
ccauuucuuugggaacauc

SEQ ID NO: 1124099 - RNA, 19 nt, Artificial Sequence
  Description of Artificial Sequence: Synthetic oligonucleotide
  Antisense strand to SEQ ID NO: 1124098
gauguucccaaagaaaugg

SEQ ID NO: 1124100 - RNA, 19 nt, Artificial Sequence
  Description of Artificial Sequence: Synthetic oligonucleotide
  Sense strand starting at position 538 of SEQ ID NO: 916019
acuugaaacguuuaacuua

SEQ ID NO: 1124101 - RNA, 19 nt, Artificial Sequence
  Description of Artificial Sequence: Synthetic oligonucleotide
  Antisense strand to SEQ ID NO: 1124100
uaaguuaaacguuucaagu

SEQ ID NO: 1124102 - RNA, 19 nt, Artificial Sequence
  Description of Artificial Sequence: Synthetic oligonucleotide
  Sense strand starting at position 1013 of SEQ ID NO: 916019
aauguaccguuuccagaua

SEQ ID NO: 1124103 - RNA, 19 nt, Artificial Sequence
  Description of Artificial Sequence: Synthetic oligonucleotide
  Antisense strand to SEQ ID NO: 1124102
uaucuggaaacgguacauu

SEQ ID NO: 1124104 - RNA, 19 nt, Artificial Sequence
  Description of Artificial Sequence: Synthetic oligonucleotide
  Sense strand starting at position 1254 of SEQ ID NO: 916019
auauuagagugcuuuauug

SEQ ID NO: 1124105 - RNA, 19 nt, Artificial Sequence
  Description of Artificial Sequence: Synthetic oligonucleotide
  Antisense strand to SEQ ID NO: 1124104
caauaaagcacucuaauau

SEQ ID NO: 1124106 - RNA, 19 nt, Artificial Sequence
  Description of Artificial Sequence: Synthetic oligonucleotide
  Sense strand starting at position 1264 of SEQ ID NO: 916019
gcuuuauugcuaucguuuc

SEQ ID NO: 1124107 - RNA, 19 nt, Artificial Sequence
  Description of Artificial Sequence: Synthetic oligonucleotide
  Antisense strand to SEQ ID NO: 1124106
gaaacgauagcaauaaagc

SEQ ID NO: 1124108 - RNA, 19 nt, Artificial Sequence
  Description of Artificial Sequence: Synthetic oligonucleotide
  Sense strand starting at position 1464 of SEQ ID NO: 916019
uguguagcacuuugaauuu

SEQ ID NO: 1124109 - RNA, 19 nt, Artificial Sequence
  Description of Artificial Sequence: Synthetic oligonucleotide
  Antisense strand to SEQ ID NO: 1124108
aaauucaaagugcuacaca

SEQ ID NO: 1124110 - RNA, 19 nt, Artificial Sequence
  Description of Artificial Sequence: Synthetic oligonucleotide
  Sense strand starting at position 1497 of SEQ ID NO: 916019
cgugacaaaucuguacaau

SEQ ID NO: 1124111 - RNA, 19 nt, Artificial Sequence
  Description of Artificial Sequence: Synthetic oligonucleotide
  Antisense strand to SEQ ID NO: 1124110
auuguacagauuugucacg

SEQ ID NO: 1124112 - RNA, 19 nt, Artificial Sequence
  Description of Artificial Sequence: Synthetic oligonucleotide
  Sense strand starting at position 1498 of SEQ ID NO: 916019
gugacaaaucuguacaauu

SEQ ID NO: 1124113 - RNA, 19 nt, Artificial Sequence
  Description of Artificial Sequence: Synthetic oligonucleotide
  Antisense strand to SEQ ID NO: 1124112
aauuguacagauuugucac

SEQ ID NO: 1124114 - RNA, 19 nt, Artificial Sequence
  Description of Artificial Sequence: Synthetic oligonucleotide
  Sense strand starting at position 2091 of SEQ ID NO: 916019
cgcagaggucucugggaaa

SEQ ID NO: 1124115 - RNA, 19 nt, Artificial Sequence
  Description of Artificial Sequence: Synthetic oligonucleotide
  Antisense strand to SEQ ID NO: 1124114
uuucccagagaccucugcg

SEQ ID NO: 1124116 - RNA, 19 nt, Artificial Sequence
  Description of Artificial Sequence: Synthetic oligonucleotide
  Sense strand starting at position 2098 of SEQ ID NO: 916019
gucucugggaaauguaguu

SEQ ID NO: 1124117 - RNA, 19 nt, Artificial Sequence
  Description of Artificial Sequence: Synthetic oligonucleotide
  Antisense strand to SEQ ID NO: 1124116
aacuacauuucccagagac

SEQ ID NO: 1124118 - RNA, 19 nt, Artificial Sequence
  Description of Artificial Sequence: Synthetic oligonucleotide
  Sense strand starting at position 2228 of SEQ ID NO: 916019
acuuaagauugcucaacug

SEQ ID NO: 1124119 - RNA, 19 nt, Artificial Sequence
  Description of Artificial Sequence: Synthetic oligonucleotide
  Antisense strand to SEQ ID NO: 1124118
caguugagcaaucuuaagu

SEQ ID NO: 1124120 - RNA, 19 nt, Artificial Sequence
  Description of Artificial Sequence: Synthetic oligonucleotide
  Sense strand starting at position 2273 of SEQ ID NO: 916019
ugguacauauauguuguaa

SEQ ID NO: 1124121 - RNA, 19 nt, Artificial Sequence
  Description of Artificial Sequence: Synthetic oligonucleotide
  Antisense strand to SEQ ID NO: 1124120
uuacaacauauauguacca

SEQ ID NO: 1124122 - RNA, 19 nt, Artificial Sequence
  Description of Artificial Sequence: Synthetic oligonucleotide
  Sense strand starting at position 2293 of SEQ ID NO: 916019
uuccaagcuugucucaaga

SEQ ID NO: 1124123 - RNA, 19 nt, Artificial Sequence
  Description of Artificial Sequence: Synthetic oligonucleotide
  Antisense strand to SEQ ID NO: 1124122
ucuugagacaagcuuggaa

SEQ ID NO: 1124124 - RNA, 19 nt, Artificial Sequence
  Description of Artificial Sequence: Synthetic oligonucleotide
  Sense strand starting at position 2463 of SEQ ID NO: 916019
guaagacacugggcuuuaa

SEQ ID NO: 1124125 - RNA, 19 nt, Artificial Sequence
  Description of Artificial Sequence: Synthetic oligonucleotide
  Antisense strand to SEQ ID NO: 1124124
uuaaagcccagugucuuac

SEQ ID NO: 1124126 - RNA, 19 nt, Artificial Sequence
  Description of Artificial Sequence: Synthetic oligonucleotide
  Sense strand starting at position 2508 of SEQ ID NO: 916019
auggucuuaucuuuccaga

SEQ ID NO: 1124127 - RNA, 19 nt, Artificial Sequence
  Description of Artificial Sequence: Synthetic oligonucleotide
  Antisense strand to SEQ ID NO: 1124126
ucuggaaagauaagaccau

SEQ ID NO: 1124128 - RNA, 19 nt, Artificial Sequence
  Description of Artificial Sequence: Synthetic oligonucleotide
  Sense strand starting at position 2510 of SEQ ID NO: 916019
ggucuuaucuuuccagaaa

SEQ ID NO: 1124129 - RNA, 19 nt, Artificial Sequence
  Description of Artificial Sequence: Synthetic oligonucleotide
  Antisense strand to SEQ ID NO: 1124128
uuucuggaaagauaagacc

SEQ ID NO: 1124130 - RNA, 19 nt, Artificial Sequence
  Description of Artificial Sequence: Synthetic oligonucleotide
  Sense strand starting at position 2521 of SEQ ID NO: 916019
uccagaaagcaagguguaa

SEQ ID NO: 1124131 - RNA, 19 nt, Artificial Sequence
  Description of Artificial Sequence: Synthetic oligonucleotide
  Antisense strand to SEQ ID NO: 1124130
uuacaccuugcuuucugga

SEQ ID NO: 1124132 - RNA, 19 nt, Artificial Sequence
  Description of Artificial Sequence: Synthetic oligonucleotide
  Sense strand starting at position 2613 of SEQ ID NO: 916019
gaguccuaaggaugucuaa

SEQ ID NO: 1124133 - RNA, 19 nt, Artificial Sequence
  Description of Artificial Sequence: Synthetic oligonucleotide
  Antisense strand to SEQ ID NO: 1124132
uuagacauccuuaggacuc

SEQ ID NO: 1124134 - RNA, 19 nt, Artificial Sequence
  Description of Artificial Sequence: Synthetic oligonucleotide
  Sense strand starting at position 2616 of SEQ ID NO: 916019
uccuaaggaugucuaaaug

SEQ ID NO: 1124135 - RNA, 19 nt, Artificial Sequence
  Description of Artificial Sequence: Synthetic oligonucleotide
  Antisense strand to SEQ ID NO: 1124134
cauuuagacauccuuagga

SEQ ID NO: 1124136 - RNA, 19 nt, Artificial Sequence
  Description of Artificial Sequence: Synthetic oligonucleotide
  Sense strand starting at position 2844 of SEQ ID NO: 916019
cugaucuguuauccuuuau

SEQ ID NO: 1124137 - RNA, 19 nt, Artificial Sequence
  Description of Artificial Sequence: Synthetic oligonucleotide
  Antisense strand to SEQ ID NO: 1124136
auaaaggauaacagaucag

SEQ ID NO: 1124138 - RNA, 19 nt, Artificial Sequence
  Description of Artificial Sequence: Synthetic oligonucleotide
  Sense strand starting at position 2998 of SEQ ID NO: 916019
uccuuauuccugugauaca

SEQ ID NO: 1124139 - RNA, 19 nt, Artificial Sequence
  Description of Artificial Sequence: Synthetic oligonucleotide
  Antisense strand to SEQ ID NO: 1124138
uguaucacaggaauaagga

SEQ ID NO: 1124140 - RNA, 19 nt, Artificial Sequence
  Description of Artificial Sequence: Synthetic oligonucleotide
  Sense strand starting at position 3327 of SEQ ID NO: 916019
acagcauucccugaagcca

SEQ ID NO: 1124141 - RNA, 19 nt, Artificial Sequence
  Description of Artificial Sequence: Synthetic oligonucleotide
  Antisense strand to SEQ ID NO: 1124140
uggcuucagggaaugcugu

SEQ ID NO: 1124142 - RNA, 19 nt, Artificial Sequence
  Description of Artificial Sequence: Synthetic oligonucleotide
  Sense strand starting at position 3463 of SEQ ID NO: 916019
ggagcuauuuccguuacuu

SEQ ID NO: 1124143 - RNA, 19 nt, Artificial Sequence
  Description of Artificial Sequence: Synthetic oligonucleotide
  Antisense strand to SEQ ID NO: 1124142
aaguaacggaaauagcucc

SEQ ID NO: 1124144 - RNA, 19 nt, Artificial Sequence
  Description of Artificial Sequence: Synthetic oligonucleotide
  Sense strand starting at position 3549 of SEQ ID NO: 916019
uaagguaauugauuaaggu

SEQ ID NO: 1124145 - RNA, 19 nt, Artificial Sequence
  Description of Artificial Sequence: Synthetic oligonucleotide
  Antisense strand to SEQ ID NO: 1124144
accuuaaucaauuaccuua

SEQ ID NO: 1124146 - RNA, 19 nt, Artificial Sequence
  Description of Artificial Sequence: Synthetic oligonucleotide
  Sense strand starting at position 3556 of SEQ ID NO: 916019
auugauuaagguggcuaaa

SEQ ID NO: 1124147 - RNA, 19 nt, Artificial Sequence
  Description of Artificial Sequence: Synthetic oligonucleotide
  Antisense strand to SEQ ID NO: 1124146
uuuagccaccuuaaucaau

SEQ ID NO: 1124148 - RNA, 19 nt, Artificial Sequence
  Description of Artificial Sequence: Synthetic oligonucleotide
  Sense strand starting at position 3621 of SEQ ID NO: 916019
ggagaugccaaguaguacu

SEQ ID NO: 1124149 - RNA, 19 nt, Artificial Sequence
  Description of Artificial Sequence: Synthetic oligonucleotide
  Antisense strand to SEQ ID NO: 1124148
aguacuacuuggcaucucc

SEQ ID NO: 1124150 - RNA, 19 nt, Artificial Sequence
  Description of Artificial Sequence: Synthetic oligonucleotide
  Sense strand starting at position 3839 of SEQ ID NO: 916019
agcauauauguuuauagca

SEQ ID NO: 1124151 - RNA, 19 nt, Artificial Sequence
  Description of Artificial Sequence: Synthetic oligonucleotide
  Antisense strand to SEQ ID NO: 1124150
ugcuauaaacauauaugcu

SEQ ID NO: 1124152 - RNA, 19 nt, Artificial Sequence
  Description of Artificial Sequence: Synthetic oligonucleotide
  Sense strand starting at position 3853 of SEQ ID NO: 916019
uagcaugguuaacugagua

SEQ ID NO: 1124153 - RNA, 19 nt, Artificial Sequence
  Description of Artificial Sequence: Synthetic oligonucleotide
  Antisense strand to SEQ ID NO: 1124152
uacucaguuaaccaugcua

SEQ ID NO: 1124154 - RNA, 19 nt, Artificial Sequence
  Description of Artificial Sequence: Synthetic oligonucleotide
  Sense strand starting at position 3906 of SEQ ID NO: 916019
aaguccuacugcucaggaa

SEQ ID NO: 1124155 - RNA, 19 nt, Artificial Sequence
  Description of Artificial Sequence: Synthetic oligonucleotide
  Antisense strand to SEQ ID NO: 1124154
uuccugagcaguaggacuu

SEQ ID NO: 1124156 - RNA, 19 nt, Artificial Sequence
  Description of Artificial Sequence: Synthetic oligonucleotide
  Sense strand starting at position 3907 of SEQ ID NO: 916019
aguccuacugcucaggaaa

SEQ ID NO: 1124157 - RNA, 19 nt, Artificial Sequence
  Description of Artificial Sequence: Synthetic oligonucleotide
  Antisense strand to SEQ ID NO: 1124156
uuuccugagcaguaggacu

SEQ ID NO: 1124158 - RNA, 19 nt, Artificial Sequence
  Description of Artificial Sequence: Synthetic oligonucleotide
  Sense strand starting at position 299 of SEQ ID NO: 916020
ugaaucugggauggucuua

SEQ ID NO: 1124159 - RNA, 19 nt, Artificial Sequence
  Description of Artificial Sequence: Synthetic oligonucleotide
  Antisense strand to SEQ ID NO: 1124158
uaagaccaucccagauuca

SEQ ID NO: 1124160 - RNA, 19 nt, Artificial Sequence
  Description of Artificial Sequence: Synthetic oligonucleotide
  Sense strand starting at position 456 of SEQ ID NO: 916020
ugagaagccauguggagaa

SEQ ID NO: 1124161 - RNA, 19 nt, Artificial Sequence
  Description of Artificial Sequence: Synthetic oligonucleotide
  Antisense strand to SEQ ID NO: 1124160
uucuccacauggcuucuca

SEQ ID NO: 1124162 - RNA, 19 nt, Artificial Sequence
  Description of Artificial Sequence: Synthetic oligonucleotide
  Sense strand starting at position 636 of SEQ ID NO: 916020
ggacuugacucacuugauu

SEQ ID NO: 1124163 - RNA, 19 nt, Artificial Sequence
  Description of Artificial Sequence: Synthetic oligonucleotide
  Antisense strand to SEQ ID NO: 1124162
aaucaagugagucaagucc

SEQ ID NO: 1124164 - RNA, 19 nt, Artificial Sequence
  Description of Artificial Sequence: Synthetic oligonucleotide
  Sense strand starting at position 757 of SEQ ID NO: 916020
uuccuucuugcucauggaa

SEQ ID NO: 1124165 - RNA, 19 nt, Artificial Sequence
  Description of Artificial Sequence: Synthetic oligonucleotide
  Antisense strand to SEQ ID NO: 1124164
uuccaugagcaagaaggaa

SEQ ID NO: 1124166 - RNA, 19 nt, Artificial Sequence
  Description of Artificial Sequence: Synthetic oligonucleotide
  Sense strand starting at position 869 of SEQ ID NO: 916020
uuguuacucagaggugaga

SEQ ID NO: 1124167 - RNA, 19 nt, Artificial Sequence
  Description of Artificial Sequence: Synthetic oligonucleotide
  Antisense strand to SEQ ID NO: 1124166
ucucaccucugaguaacaa

SEQ ID NO: 1124168 - RNA, 19 nt, Artificial Sequence
  Description of Artificial Sequence: Synthetic oligonucleotide
  Sense strand starting at position 899 of SEQ ID NO: 916020
guacuaaagucaccacaaa

SEQ ID NO: 1124169 - RNA, 19 nt, Artificial Sequence
  Description of Artificial Sequence: Synthetic oligonucleotide
  Antisense strand to SEQ ID NO: 1124168
uuuguggugacuuuaguac

SEQ ID NO: 1124170 - RNA, 19 nt, Artificial Sequence
  Description of Artificial Sequence: Synthetic oligonucleotide
  Sense strand starting at position 969 of SEQ ID NO: 916020
gcagcaaaucagcaauuaa

SEQ ID NO: 1124171 - RNA, 19 nt, Artificial Sequence
  Description of Artificial Sequence: Synthetic oligonucleotide
  Antisense strand to SEQ ID NO: 1124170
uuaauugcugauuugcugc

SEQ ID NO: 1124172 - RNA, 19 nt, Artificial Sequence
  Description of Artificial Sequence: Synthetic oligonucleotide
  Sense strand starting at position 1157 of SEQ ID NO: 916020
acgauuauacaugggaagu

SEQ ID NO: 1124173 - RNA, 19 nt, Artificial Sequence
  Description of Artificial Sequence: Synthetic oligonucleotide
  Antisense strand to SEQ ID NO: 1124172
acuucccauguauaaucgu

SEQ ID NO: 1124174 - RNA, 19 nt, Artificial Sequence
  Description of Artificial Sequence: Synthetic oligonucleotide
  Sense strand starting at position 1158 of SEQ ID NO: 916020
cgauuauacaugggaagug

SEQ ID NO: 1124175 - RNA, 19 nt, Artificial Sequence
  Description of Artificial Sequence: Synthetic oligonucleotide
  Antisense strand to SEQ ID NO: 1124174
cacuucccauguauaaucg

SEQ ID NO: 1124176 - RNA, 19 nt, Artificial Sequence
  Description of Artificial Sequence: Synthetic oligonucleotide
  Sense strand starting at position 1308 of SEQ ID NO: 916020
gaguuaucaaagugagaug

SEQ ID NO: 1124177 - RNA, 19 nt, Artificial Sequence
  Description of Artificial Sequence: Synthetic oligonucleotide
  Antisense strand to SEQ ID NO: 1124176
caucucacuuugauaacuc

SEQ ID NO: 1124178 - RNA, 19 nt, Artificial Sequence
  Description of Artificial Sequence: Synthetic oligonucleotide
  Sense strand starting at position 1320 of SEQ ID NO: 916020
ugagauguccugcagguag

SEQ ID NO: 1124179 - RNA, 19 nt, Artificial Sequence
  Description of Artificial Sequence: Synthetic oligonucleotide
  Antisense strand to SEQ ID NO: 1124178
cuaccugcaggacaucuca

SEQ ID NO: 1124180 - RNA, 19 nt, Artificial Sequence
  Description of Artificial Sequence: Synthetic oligonucleotide
  Sense strand starting at position 1341 of SEQ ID NO: 916020
agacgauacuggcugguaa

SEQ ID NO: 1124181 - RNA, 19 nt, Artificial Sequence
  Description of Artificial Sequence: Synthetic oligonucleotide
  Antisense strand to SEQ ID NO: 1124180
uuaccagccaguaucgucu

SEQ ID NO: 1124182 - RNA, 19 nt, Artificial Sequence
  Description of Artificial Sequence: Synthetic oligonucleotide
  Sense strand starting at position 1353 of SEQ ID NO: 916020
cugguaauucaggagagcu

SEQ ID NO: 1124183 - RNA, 19 nt, Artificial Sequence
  Description of Artificial Sequence: Synthetic oligonucleotide
  Antisense strand to SEQ ID NO: 1124182
agcucuccugaauuaccag

SEQ ID NO: 1124184 - RNA, 19 nt, Artificial Sequence
  Description of Artificial Sequence: Synthetic oligonucleotide
  Sense strand starting at position 1627 of SEQ ID NO: 916020
agauuaagcccggcguguu

SEQ ID NO: 1124185 - RNA, 19 nt, Artificial Sequence
  Description of Artificial Sequence: Synthetic oligonucleotide
  Antisense strand to SEQ ID NO: 1124184
aacacgccgggcuuaaucu

SEQ ID NO: 1124186 - RNA, 19 nt, Artificial Sequence
  Description of Artificial Sequence: Synthetic oligonucleotide
  Sense strand starting at position 2056 of SEQ ID NO: 916020
uccugaaccucaguggaaa

SEQ ID NO: 1124187 - RNA, 19 nt, Artificial Sequence
  Description of Artificial Sequence: Synthetic oligonucleotide
  Antisense strand to SEQ ID NO: 1124186
uuuccacugagguucagga

SEQ ID NO: 1124188 - RNA, 19 nt, Artificial Sequence
  Description of Artificial Sequence: Synthetic oligonucleotide
  Sense strand starting at position 2699 of SEQ ID NO: 916020
cgauaugguguuuaaagua

SEQ ID NO: 1124189 - RNA, 19 nt, Artificial Sequence
  Description of Artificial Sequence: Synthetic oligonucleotide
  Antisense strand to SEQ ID NO: 1124188
uacuuuaaacaccauaucg

SEQ ID NO: 1124190 - RNA, 19 nt, Artificial Sequence
  Description of Artificial Sequence: Synthetic oligonucleotide
  Sense strand starting at position 2704 of SEQ ID NO: 916020
ugguguuuaaaguacagua

SEQ ID NO: 1124191 - RNA, 19 nt, Artificial Sequence
  Description of Artificial Sequence: Synthetic oligonucleotide
  Antisense strand to SEQ ID NO: 1124190
uacuguacuuuaaacacca

SEQ ID NO: 1124192 - RNA, 19 nt, Artificial Sequence
  Description of Artificial Sequence: Synthetic oligonucleotide
  Sense strand starting at position 2706 of SEQ ID NO: 916020
guguuuaaaguacaguauu

SEQ ID NO: 1124193 - RNA, 19 nt, Artificial Sequence
  Description of Artificial Sequence: Synthetic oligonucleotide
  Antisense strand to SEQ ID NO: 1124192
aauacuguacuuuaaacac

SEQ ID NO: 1124194 - RNA, 19 nt, Artificial Sequence
  Description of Artificial Sequence: Synthetic oligonucleotide
  Sense strand starting at position 2753 of SEQ ID NO: 916020
uccucauuaugguuugaua

SEQ ID NO: 1124195 - RNA, 19 nt, Artificial Sequence
  Description of Artificial Sequence: Synthetic oligonucleotide
  Antisense strand to SEQ ID NO: 1124194
uaucaaaccauaaugagga

SEQ ID NO: 1124196 - RNA, 19 nt, Artificial Sequence
  Description of Artificial Sequence: Synthetic oligonucleotide
  Sense strand starting at position 2988 of SEQ ID NO: 916020
guuuauaguggagguggaa

SEQ ID NO: 1124197 - RNA, 19 nt, Artificial Sequence
  Description of Artificial Sequence: Synthetic oligonucleotide
  Antisense strand to SEQ ID NO: 1124196
uuccaccuccacuauaaac

SEQ ID NO: 1124198 - RNA, 19 nt, Artificial Sequence
  Description of Artificial Sequence: Synthetic oligonucleotide
  Sense strand starting at position 3014 of SEQ ID NO: 916020
uugaaaucucuugacguag

SEQ ID NO: 1124199 - RNA, 19 nt, Artificial Sequence
  Description of Artificial Sequence: Synthetic oligonucleotide
  Antisense strand to SEQ ID NO: 1124198
cuacgucaagagauuucaa

SEQ ID NO: 1124200 - RNA, 19 nt, Artificial Sequence
  Description of Artificial Sequence: Synthetic oligonucleotide
  Sense strand starting at position 3056 of SEQ ID NO: 916020
gaaucacaguuauugcaga

SEQ ID NO: 1124201 - RNA, 19 nt, Artificial Sequence
  Description of Artificial Sequence: Synthetic oligonucleotide
  Antisense strand to SEQ ID NO: 1124200
ucugcaauaacugugauuc

SEQ ID NO: 1124202 - RNA, 19 nt, Artificial Sequence
  Description of Artificial Sequence: Synthetic oligonucleotide
  Sense strand starting at position 3061 of SEQ ID NO: 916020
acaguuauugcagauaacu

SEQ ID NO: 1124203 - RNA, 19 nt, Artificial Sequence
  Description of Artificial Sequence: Synthetic oligonucleotide
  Antisense strand to SEQ ID NO: 1124202
aguuaucugcaauaacugu

SEQ ID NO: 1124204 - RNA, 19 nt, Artificial Sequence
  Description of Artificial Sequence: Synthetic oligonucleotide
  Sense strand starting at position 3074 of SEQ ID NO: 916020
auaacuagguuugccuaua

SEQ ID NO: 1124205 - RNA, 19 nt, Artificial Sequence
  Description of Artificial Sequence: Synthetic oligonucleotide
  Antisense strand to SEQ ID NO: 1124204
uauaggcaaaccuaguuau

SEQ ID NO: 1124206 - RNA, 19 nt, Artificial Sequence
  Description of Artificial Sequence: Synthetic oligonucleotide
  Sense strand starting at position 3079 of SEQ ID NO: 916020
uagguuugccuauaagguu

SEQ ID NO: 1124207 - RNA, 19 nt, Artificial Sequence
  Description of Artificial Sequence: Synthetic oligonucleotide
  Antisense strand to SEQ ID NO: 1124206
aaccuuauaggcaaaccua

SEQ ID NO: 1124208 - RNA, 19 nt, Artificial Sequence
  Description of Artificial Sequence: Synthetic oligonucleotide
  Sense strand starting at position 3085 of SEQ ID NO: 916020
ugccuauaagguuaauuau

SEQ ID NO: 1124209 - RNA, 19 nt, Artificial Sequence
  Description of Artificial Sequence: Synthetic oligonucleotide
  Antisense strand to SEQ ID NO: 1124208
auaauuaaccuuauaggca

SEQ ID NO: 1124210 - RNA, 19 nt, Artificial Sequence
  Description of Artificial Sequence: Synthetic oligonucleotide
  Sense strand starting at position 3164 of SEQ ID NO: 916020
ccaagagguugagugauua

SEQ ID NO: 1124211 - RNA, 19 nt, Artificial Sequence
  Description of Artificial Sequence: Synthetic oligonucleotide
  Antisense strand to SEQ ID NO: 1124210
uaaucacucaaccucuugg

SEQ ID NO: 1124212 - RNA, 19 nt, Artificial Sequence
  Description of Artificial Sequence: Synthetic oligonucleotide
  Sense strand starting at position 3168 of SEQ ID NO: 916020
gagguugagugauuacuca

SEQ ID NO: 1124213 - RNA, 19 nt, Artificial Sequence
  Description of Artificial Sequence: Synthetic oligonucleotide
  Antisense strand to SEQ ID NO: 1124212
ugaguaaucacucaaccuc

SEQ ID NO: 1124214 - RNA, 19 nt, Artificial Sequence
  Description of Artificial Sequence: Synthetic oligonucleotide
  Sense strand starting at position 3176 of SEQ ID NO: 916020
gugauuacucaaggucaaa

SEQ ID NO: 1124215 - RNA, 19 nt, Artificial Sequence
  Description of Artificial Sequence: Synthetic oligonucleotide
  Antisense strand to SEQ ID NO: 1124214
uuugaccuugaguaaucac

SEQ ID NO: 1124216 - RNA, 19 nt, Artificial Sequence
  Description of Artificial Sequence: Synthetic oligonucleotide
  Sense strand starting at position 3302 of SEQ ID NO: 916020
guggaaguucuggaaucug

SEQ ID NO: 1124217 - RNA, 19 nt, Artificial Sequence
  Description of Artificial Sequence: Synthetic oligonucleotide
  Antisense strand to SEQ ID NO: 1124216
cagauuccagaacuuccac

SEQ ID NO: 1124218 - RNA, 19 nt, Artificial Sequence
  Description of Artificial Sequence: Synthetic oligonucleotide
  Sense strand starting at position 3325 of SEQ ID NO: 916020
ucuagcaacuagucucaga

SEQ ID NO: 1124219 - RNA, 19 nt, Artificial Sequence
  Description of Artificial Sequence: Synthetic oligonucleotide
  Antisense strand to SEQ ID NO: 1124218
ucugagacuaguugcuaga

SEQ ID NO: 1124220 - RNA, 19 nt, Artificial Sequence
  Description of Artificial Sequence: Synthetic oligonucleotide
  Sense strand starting at position 3335 of SEQ ID NO: 916020
agucucagaugauucucau

SEQ ID NO: 1124221 - RNA, 19 nt, Artificial Sequence
  Description of Artificial Sequence: Synthetic oligonucleotide
  Antisense strand to SEQ ID NO: 1124220
augagaaucaucugagacu

SEQ ID NO: 1124222 - RNA, 19 nt, Artificial Sequence
  Description of Artificial Sequence: Synthetic oligonucleotide
  Sense strand starting at position 3338 of SEQ ID NO: 916020
cucagaugauucucaugua

SEQ ID NO: 1124223 - RNA, 19 nt, Artificial Sequence
  Description of Artificial Sequence: Synthetic oligonucleotide
  Antisense strand to SEQ ID NO: 1124222
uacaugagaaucaucugag

SEQ ID NO: 1124224 - RNA, 19 nt, Artificial Sequence
  Description of Artificial Sequence: Synthetic oligonucleotide
  Sense strand starting at position 3628 of SEQ ID NO: 916020
agaugaggcuaaucuggau

SEQ ID NO: 1124225 - RNA, 19 nt, Artificial Sequence
  Description of Artificial Sequence: Synthetic oligonucleotide
  Antisense strand to SEQ ID NO: 1124224
auccagauuagccucaucu

SEQ ID NO: 1124226 - RNA, 19 nt, Artificial Sequence
  Description of Artificial Sequence: Synthetic oligonucleotide
  Sense strand starting at position 3634 of SEQ ID NO: 916020
ggcuaaucuggauaaguua

SEQ ID NO: 1124227 - RNA, 19 nt, Artificial Sequence
  Description of Artificial Sequence: Synthetic oligonucleotide
  Antisense strand to SEQ ID NO: 1124226
uaacuuauccagauuagcc

SEQ ID NO: 1124228 - RNA, 19 nt, Artificial Sequence
  Description of Artificial Sequence: Synthetic oligonucleotide
  Sense strand starting at position 3655 of SEQ ID NO: 916020
acaccaaaugugugaucuu

SEQ ID NO: 1124229 - RNA, 19 nt, Artificial Sequence
  Description of Artificial Sequence: Synthetic oligonucleotide
  Antisense strand to SEQ ID NO: 1124228
aagaucacacauuuggugu

SEQ ID NO: 1124230 - RNA, 19 nt, Artificial Sequence
  Description of Artificial Sequence: Synthetic oligonucleotide
  Sense strand starting at position 3719 of SEQ ID NO: 916020
uucugaaacagacguaaug

SEQ ID NO: 1124231 - RNA, 19 nt, Artificial Sequence
  Description of Artificial Sequence: Synthetic oligonucleotide
  Antisense strand to SEQ ID NO: 1124230
cauuacgucuguuucagaa

SEQ ID NO: 1124232 - RNA, 19 nt, Artificial Sequence
  Description of Artificial Sequence: Synthetic oligonucleotide
  Sense strand starting at position 3748 of SEQ ID NO: 916020
guugaaugacuuuguuuaa

SEQ ID NO: 1124233 - RNA, 19 nt, Artificial Sequence
  Description of Artificial Sequence: Synthetic oligonucleotide
  Antisense strand to SEQ ID NO: 1124232
uuaaacaaagucauucaac

SEQ ID NO: 1124234 - RNA, 19 nt, Artificial Sequence
  Description of Artificial Sequence: Synthetic oligonucleotide
  Sense strand starting at position 3752 of SEQ ID NO: 916020
aaugacuuuguuuaagguu

SEQ ID NO: 1124235 - RNA, 19 nt, Artificial Sequence
  Description of Artificial Sequence: Synthetic oligonucleotide
  Antisense strand to SEQ ID NO: 1124234
aaccuuaaacaaagucauu

SEQ ID NO: 1124236 - RNA, 19 nt, Artificial Sequence
  Description of Artificial Sequence: Synthetic oligonucleotide
  Sense strand starting at position 3758 of SEQ ID NO: 916020
uuuguuuaagguuauagac

SEQ ID NO: 1124237 - RNA, 19 nt, Artificial Sequence
  Description of Artificial Sequence: Synthetic oligonucleotide
  Antisense strand to SEQ ID NO: 1124236
gucuauaaccuuaaacaaa

SEQ ID NO: 1124238 - RNA, 19 nt, Artificial Sequence
  Description of Artificial Sequence: Synthetic oligonucleotide
  Sense strand starting at position 69 of SEQ ID NO: 916021
acucuacuguuagucaaua

SEQ ID NO: 1124239 - RNA, 19 nt, Artificial Sequence
  Description of Artificial Sequence: Synthetic oligonucleotide
  Antisense strand to SEQ ID NO: 1124238
uauugacuaacaguagagu

SEQ ID NO: 1124240 - RNA, 19 nt, Artificial Sequence
  Description of Artificial Sequence: Synthetic oligonucleotide
  Sense strand starting at position 380 of SEQ ID NO: 916021
acugaauacugaguuugua

SEQ ID NO: 1124241 - RNA, 19 nt, Artificial Sequence
  Description of Artificial Sequence: Synthetic oligonucleotide
  Antisense strand to SEQ ID NO: 1124240
uacaaacucaguauucagu

SEQ ID NO: 1124242 - RNA, 19 nt, Artificial Sequence
  Description of Artificial Sequence: Synthetic oligonucleotide
  Sense strand starting at position 383 of SEQ ID NO: 916021
gaauacugaguuuguaggu

SEQ ID NO: 1124243 - RNA, 19 nt, Artificial Sequence
  Description of Artificial Sequence: Synthetic oligonucleotide
  Antisense strand to SEQ ID NO: 1124242
accuacaaacucaguauuc

SEQ ID NO: 1124244 - RNA, 19 nt, Artificial Sequence
  Description of Artificial Sequence: Synthetic oligonucleotide
  Sense strand starting at position 384 of SEQ ID NO: 916021
aauacugaguuuguaggua

SEQ ID NO: 1124245 - RNA, 19 nt, Artificial Sequence
  Description of Artificial Sequence: Synthetic oligonucleotide
  Antisense strand to SEQ ID NO: 1124244
uaccuacaaacucaguauu

SEQ ID NO: 1124246 - RNA, 19 nt, Artificial Sequence
  Description of Artificial Sequence: Synthetic oligonucleotide
  Sense strand starting at position 388 of SEQ ID NO: 916021
cugaguuuguagguaagag

SEQ ID NO: 1124247 - RNA, 19 nt, Artificial Sequence
  Description of Artificial Sequence: Synthetic oligonucleotide
  Antisense strand to SEQ ID NO: 1124246
cucuuaccuacaaacucag

SEQ ID NO: 1124248 - RNA, 19 nt, Artificial Sequence
  Description of Artificial Sequence: Synthetic oligonucleotide
  Sense strand starting at position 691 of SEQ ID NO: 916021
cugguuaaccuguaccuau

SEQ ID NO: 1124249 - RNA, 19 nt, Artificial Sequence
  Description of Artificial Sequence: Synthetic oligonucleotide
  Antisense strand to SEQ ID NO: 1124248
auagguacagguuaaccag

SEQ ID NO: 1124250 - RNA, 19 nt, Artificial Sequence
  Description of Artificial Sequence: Synthetic oligonucleotide
  Sense strand starting at position 702 of SEQ ID NO: 916021
guaccuaugcaguacugaa

SEQ ID NO: 1124251 - RNA, 19 nt, Artificial Sequence
  Description of Artificial Sequence: Synthetic oligonucleotide
  Antisense strand to SEQ ID NO: 1124250
uucaguacugcauagguac

SEQ ID NO: 1124252 - RNA, 19 nt, Artificial Sequence
  Description of Artificial Sequence: Synthetic oligonucleotide
  Sense strand starting at position 750 of SEQ ID NO: 916021
guaauacuguuauucuaca

SEQ ID NO: 1124253 - RNA, 19 nt, Artificial Sequence
  Description of Artificial Sequence: Synthetic oligonucleotide
  Antisense strand to SEQ ID NO: 1124252
uguagaauaacaguauuac

SEQ ID NO: 1124254 - RNA, 19 nt, Artificial Sequence
  Description of Artificial Sequence: Synthetic oligonucleotide
  Sense strand starting at position 801 of SEQ ID NO: 916021
auacaugaagugugguuua

SEQ ID NO: 1124255 - RNA, 19 nt, Artificial Sequence
  Description of Artificial Sequence: Synthetic oligonucleotide
  Antisense strand to SEQ ID NO: 1124254
uaaaccacacuucauguau

SEQ ID NO: 1124256 - RNA, 19 nt, Artificial Sequence
  Description of Artificial Sequence: Synthetic oligonucleotide
  Sense strand starting at position 804 of SEQ ID NO: 916021
caugaagugugguuuaaau

SEQ ID NO: 1124257 - RNA, 19 nt, Artificial Sequence
  Description of Artificial Sequence: Synthetic oligonucleotide
  Antisense strand to SEQ ID NO: 1124256
auuuaaaccacacuucaug

SEQ ID NO: 1124258 - RNA, 19 nt, Artificial Sequence
  Description of Artificial Sequence: Synthetic oligonucleotide
  Sense strand starting at position 806 of SEQ ID NO: 916021
ugaagugugguuuaaauaa

SEQ ID NO: 1124259 - RNA, 19 nt, Artificial Sequence
  Description of Artificial Sequence: Synthetic oligonucleotide
  Antisense strand to SEQ ID NO: 1124258
uuauuuaaaccacacuuca

SEQ ID NO: 1124260 - RNA, 19 nt, Artificial Sequence
  Description of Artificial Sequence: Synthetic oligonucleotide
  Sense strand starting at position 827 of SEQ ID NO: 916021
aagacuaugccagacugua

SEQ ID NO: 1124261 - RNA, 19 nt, Artificial Sequence
  Description of Artificial Sequence: Synthetic oligonucleotide
  Antisense strand to SEQ ID NO: 1124260
uacagucuggcauagucuu

SEQ ID NO: 1124262 - RNA, 19 nt, Artificial Sequence
  Description of Artificial Sequence: Synthetic oligonucleotide
  Sense strand starting at position 880 of SEQ ID NO: 916021
gccagaugauaucugaaac

SEQ ID NO: 1124263 - RNA, 19 nt, Artificial Sequence
  Description of Artificial Sequence: Synthetic oligonucleotide
  Antisense strand to SEQ ID NO: 1124262
guuucagauaucaucuggc

SEQ ID NO: 1124264 - RNA, 19 nt, Artificial Sequence
  Description of Artificial Sequence: Synthetic oligonucleotide
  Sense strand starting at position 1055 of SEQ ID NO: 916021
gucuauacuccauauugac

SEQ ID NO: 1124265 - RNA, 19 nt, Artificial Sequence
  Description of Artificial Sequence: Synthetic oligonucleotide
  Antisense strand to SEQ ID NO: 1124264
gucaauauggaguauagac

SEQ ID NO: 1124266 - RNA, 19 nt, Artificial Sequence
  Description of Artificial Sequence: Synthetic oligonucleotide
  Sense strand starting at position 1096 of SEQ ID NO: 916021
agaagaagauccuaacaaa

SEQ ID NO: 1124267 - RNA, 19 nt, Artificial Sequence
  Description of Artificial Sequence: Synthetic oligonucleotide
  Antisense strand to SEQ ID NO: 1124266
uuuguuaggaucuucuucu

SEQ ID NO: 1124268 - RNA, 19 nt, Artificial Sequence
  Description of Artificial Sequence: Synthetic oligonucleotide
  Sense strand starting at position 1274 of SEQ ID NO: 916021
cagcauucccuugauggua

SEQ ID NO: 1124269 - RNA, 19 nt, Artificial Sequence
  Description of Artificial Sequence: Synthetic oligonucleotide
  Antisense strand to SEQ ID NO: 1124268
uaccaucaagggaaugcug

SEQ ID NO: 1124270 - RNA, 19 nt, Artificial Sequence
  Description of Artificial Sequence: Synthetic oligonucleotide
  Sense strand starting at position 1347 of SEQ ID NO: 916021
agacuauacuggcuccaua

SEQ ID NO: 1124271 - RNA, 19 nt, Artificial Sequence
  Description of Artificial Sequence: Synthetic oligonucleotide
  Antisense strand to SEQ ID NO: 1124270
uauggagccaguauagucu

SEQ ID NO: 1124272 - RNA, 19 nt, Artificial Sequence
  Description of Artificial Sequence: Synthetic oligonucleotide
  Sense strand starting at position 1591 of SEQ ID NO: 916021
gugacaggaucuuuaguac

SEQ ID NO: 1124273 - RNA, 19 nt, Artificial Sequence
  Description of Artificial Sequence: Synthetic oligonucleotide
  Antisense strand to SEQ ID NO: 1124272
guacuaaagauccugucac

SEQ ID NO: 1124274 - RNA, 19 nt, Artificial Sequence
  Description of Artificial Sequence: Synthetic oligonucleotide
  Sense strand starting at position 1594 of SEQ ID NO: 916021
acaggaucuuuaguacuca

SEQ ID NO: 1124275 - RNA, 19 nt, Artificial Sequence
  Description of Artificial Sequence: Synthetic oligonucleotide
  Antisense strand to SEQ ID NO: 1124274
ugaguacuaaagauccugu

SEQ ID NO: 1124276 - RNA, 19 nt, Artificial Sequence
  Description of Artificial Sequence: Synthetic oligonucleotide
  Sense strand starting at position 2553 of SEQ ID NO: 916021
aaguuacuaggcugaucaa

SEQ ID NO: 1124277 - RNA, 19 nt, Artificial Sequence
  Description of Artificial Sequence: Synthetic oligonucleotide
  Antisense strand to SEQ ID NO: 1124276
uugaucagccuaguaacuu

SEQ ID NO: 1124278 - RNA, 19 nt, Artificial Sequence
  Description of Artificial Sequence: Synthetic oligonucleotide
  Sense strand starting at position 2556 of SEQ ID NO: 916021
uuacuaggcugaucaagau

SEQ ID NO: 1124279 - RNA, 19 nt, Artificial Sequence
  Description of Artificial Sequence: Synthetic oligonucleotide
  Antisense strand to SEQ ID NO: 1124278
aucuugaucagccuaguaa

SEQ ID NO: 1124280 - RNA, 19 nt, Artificial Sequence
  Description of Artificial Sequence: Synthetic oligonucleotide
  Sense strand starting at position 2650 of SEQ ID NO: 916021
acucuuaaaguauguaaga

SEQ ID NO: 1124281 - RNA, 19 nt, Artificial Sequence
  Description of Artificial Sequence: Synthetic oligonucleotide
  Antisense strand to SEQ ID NO: 1124280
ucuuacauacuuuaagagu

SEQ ID NO: 1124282 - RNA, 19 nt, Artificial Sequence
  Description of Artificial Sequence: Synthetic oligonucleotide
  Sense strand starting at position 2702 of SEQ ID NO: 916021
guccuaaauguauaucaua

SEQ ID NO: 1124283 - RNA, 19 nt, Artificial Sequence
  Description of Artificial Sequence: Synthetic oligonucleotide
  Antisense strand to SEQ ID NO: 1124282
uaugauauacauuuaggac

SEQ ID NO: 1124284 - RNA, 19 nt, Artificial Sequence
  Description of Artificial Sequence: Synthetic oligonucleotide
  Sense strand starting at position 2898 of SEQ ID NO: 916021
ggaaccuguaauugugaau

SEQ ID NO: 1124285 - RNA, 19 nt, Artificial Sequence
  Description of Artificial Sequence: Synthetic oligonucleotide
  Antisense strand to SEQ ID NO: 1124284
auucacaauuacagguucc

SEQ ID NO: 1124286 - RNA, 19 nt, Artificial Sequence
  Description of Artificial Sequence: Synthetic oligonucleotide
  Sense strand starting at position 2929 of SEQ ID NO: 916021
guaauacucuagucaguaa

SEQ ID NO: 1124287 - RNA, 19 nt, Artificial Sequence
  Description of Artificial Sequence: Synthetic oligonucleotide
  Antisense strand to SEQ ID NO: 1124286
uuacugacuagaguauuac

SEQ ID NO: 1124288 - RNA, 19 nt, Artificial Sequence
  Description of Artificial Sequence: Synthetic oligonucleotide
  Sense strand starting at position 2932 of SEQ ID NO: 916021
auacucuagucaguaauaa

SEQ ID NO: 1124289 - RNA, 19 nt, Artificial Sequence
  Description of Artificial Sequence: Synthetic oligonucleotide
  Antisense strand to SEQ ID NO: 1124288
uuauuacugacuagaguau

SEQ ID NO: 1124290 - RNA, 19 nt, Artificial Sequence
  Description of Artificial Sequence: Synthetic oligonucleotide
  Sense strand starting at position 3122 of SEQ ID NO: 916021
cccaaauguugauuauagu

SEQ ID NO: 1124291 - RNA, 19 nt, Artificial Sequence
  Description of Artificial Sequence: Synthetic oligonucleotide
  Antisense strand to SEQ ID NO: 1124290
acuauaaucaacauuuggg

SEQ ID NO: 1124292 - RNA, 19 nt, Artificial Sequence
  Description of Artificial Sequence: Synthetic oligonucleotide
  Sense strand starting at position 3123 of SEQ ID NO: 916021
ccaaauguugauuauaguu

SEQ ID NO: 1124293 - RNA, 19 nt, Artificial Sequence
  Description of Artificial Sequence: Synthetic oligonucleotide
  Antisense strand to SEQ ID NO: 1124292
aacuauaaucaacauuugg

SEQ ID NO: 1124294 - RNA, 19 nt, Artificial Sequence
  Description of Artificial Sequence: Synthetic oligonucleotide
  Sense strand starting at position 3131 of SEQ ID NO: 916021
ugauuauaguuuccuugac

SEQ ID NO: 1124295 - RNA, 19 nt, Artificial Sequence
  Description of Artificial Sequence: Synthetic oligonucleotide
  Antisense strand to SEQ ID NO: 1124294
gucaaggaaacuauaauca

SEQ ID NO: 1124296 - RNA, 19 nt, Artificial Sequence
  Description of Artificial Sequence: Synthetic oligonucleotide
  Sense strand starting at position 3133 of SEQ ID NO: 916021
auuauaguuuccuugacuc

SEQ ID NO: 1124297 - RNA, 19 nt, Artificial Sequence
  Description of Artificial Sequence: Synthetic oligonucleotide
  Antisense strand to SEQ ID NO: 1124296
gagucaaggaaacuauaau

SEQ ID NO: 1124298 - RNA, 19 nt, Artificial Sequence
  Description of Artificial Sequence: Synthetic oligonucleotide
  Sense strand starting at position 3259 of SEQ ID NO: 916021
uuucuaaggucauuugcuu

SEQ ID NO: 1124299 - RNA, 19 nt, Artificial Sequence
  Description of Artificial Sequence: Synthetic oligonucleotide
  Antisense strand to SEQ ID NO: 1124298
aagcaaaugaccuuagaaa

SEQ ID NO: 1124300 - RNA, 19 nt, Artificial Sequence
  Description of Artificial Sequence: Synthetic oligonucleotide
  Sense strand starting at position 3264 of SEQ ID NO: 916021
aaggucauuugcuuuaagu

SEQ ID NO: 1124301 - RNA, 19 nt, Artificial Sequence
  Description of Artificial Sequence: Synthetic oligonucleotide
  Antisense strand to SEQ ID NO: 1124300
acuuaaagcaaaugaccuu

SEQ ID NO: 1124302 - RNA, 19 nt, Artificial Sequence
  Description of Artificial Sequence: Synthetic oligonucleotide
  Sense strand starting at position 3280 of SEQ ID NO: 916021
aguagucaucuauaucugu

SEQ ID NO: 1124303 - RNA, 19 nt, Artificial Sequence
  Description of Artificial Sequence: Synthetic oligonucleotide
  Antisense strand to SEQ ID NO: 1124302
acagauauagaugacuacu

SEQ ID NO: 1124304 - RNA, 19 nt, Artificial Sequence
  Description of Artificial Sequence: Synthetic oligonucleotide
  Sense strand starting at position 3421 of SEQ ID NO: 916021
cacagaaacucaguaggua

SEQ ID NO: 1124305 - RNA, 19 nt, Artificial Sequence
  Description of Artificial Sequence: Synthetic oligonucleotide
  Antisense strand to SEQ ID NO: 1124304
uaccuacugaguuucugug

SEQ ID NO: 1124306 - RNA, 19 nt, Artificial Sequence
  Description of Artificial Sequence: Synthetic oligonucleotide
  Sense strand starting at position 3425 of SEQ ID NO: 916021
gaaacucaguagguaauga

SEQ ID NO: 1124307 - RNA, 19 nt, Artificial Sequence
  Description of Artificial Sequence: Synthetic oligonucleotide
  Antisense strand to SEQ ID NO: 1124306
ucauuaccuacugaguuuc

SEQ ID NO: 1124308 - RNA, 19 nt, Artificial Sequence
  Description of Artificial Sequence: Synthetic oligonucleotide
  Sense strand starting at position 3654 of SEQ ID NO: 916021
ugaugauguuuaguuugaa

SEQ ID NO: 1124309 - RNA, 19 nt, Artificial Sequence
  Description of Artificial Sequence: Synthetic oligonucleotide
  Antisense strand to SEQ ID NO: 1124308
uucaaacuaaacaucauca

SEQ ID NO: 1124310 - RNA, 19 nt, Artificial Sequence
  Description of Artificial Sequence: Synthetic oligonucleotide
  Sense strand starting at position 3655 of SEQ ID NO: 916021
gaugauguuuaguuugaaa

SEQ ID NO: 1124311 - RNA, 19 nt, Artificial Sequence
  Description of Artificial Sequence: Synthetic oligonucleotide
  Antisense strand to SEQ ID NO: 1124310
uuucaaacuaaacaucauc

SEQ ID NO: 1124312 - RNA, 19 nt, Artificial Sequence
  Description of Artificial Sequence: Synthetic oligonucleotide
  Sense strand starting at position 3657 of SEQ ID NO: 916021
ugauguuuaguuugaaaug

SEQ ID NO: 1124313 - RNA, 19 nt, Artificial Sequence
  Description of Artificial Sequence: Synthetic oligonucleotide
  Antisense strand to SEQ ID NO: 1124312
cauuucaaacuaaacauca

SEQ ID NO: 1124314 - RNA, 19 nt, Artificial Sequence
  Description of Artificial Sequence: Synthetic oligonucleotide
  Sense strand starting at position 3694 of SEQ ID NO: 916021
guugcaagugaacagaaau

SEQ ID NO: 1124315 - RNA, 19 nt, Artificial Sequence
  Description of Artificial Sequence: Synthetic oligonucleotide
  Antisense strand to SEQ ID NO: 1124314
auuucuguucacuugcaac

SEQ ID NO: 1124316 - RNA, 19 nt, Artificial Sequence
  Description of Artificial Sequence: Synthetic oligonucleotide
  Sense strand starting at position 3707 of SEQ ID NO: 916021
agaaaucuguauguggcua

SEQ ID NO: 1124317 - RNA, 19 nt, Artificial Sequence
  Description of Artificial Sequence: Synthetic oligonucleotide
  Antisense strand to SEQ ID NO: 1124316
uagccacauacagauuucu

SEQ ID NO: 1124318 - RNA, 19 nt, Artificial Sequence
  Description of Artificial Sequence: Synthetic oligonucleotide
  Sense strand starting at position 2 of SEQ ID NO: 916022
gcaacauuggugugugaag
